United States Patent Application Publication US 2005/0228172 A9 - sequence listing, part 105

SEQ ID NO: 485250 - DNA, 586 bp, Homo sapiens
gaacccagctgcgctctctacagtatgggttacttttgtgtctggaaggtgtctgacatcctgagacctggacccatttcaaggagctttgggaagagcccagatcactgatggaattggacagtgcgtggaaatggttcagcaggacgagggtaagtgcaggatcacggccaggtcattctgagagacaatgagtggcactgatggggtcagacaaagattaaaaacaaaagtttgtgcttcgacttcagaaactcaataactaatttgctcttataagtaataagcatttttctatctacatgagaatttaatctcaaaacagaaatcagaaaaaatatcaagtccagggcataaaacctaaaccagtgcttagattattcattttaaatagagctaagagtaaaatcttctccataaaatacatattgtatctatacataaaatatatrttgtatctgagttcagggtgtgatgagtgtgaccatggactacccagcattcatgtggaagtgaaggaagaggactggatcaatcccagtggaaagcatgcctctcagcagcccacaccatcctccacctacac

SEQ ID NO: 485251 - DNA, 247 bp, Homo sapiens
actagtgaaaaagatgcaaaactcctgtataaaatattagcaaatcaaatctcataatacacgaaatggataagacattatakatatatatatatatatatatatatatatattcatgcactgtatacatttcagtcaatgatagaccatatatatgacagtgatttagtaaggttatagtactatattttcaccatggaatactacacagccataaagaagaataaaatcacgtcctctgcagcaa

SEQ ID NO: 485252 - DNA, 247 bp, Homo sapiens
actagtgaaaaagatgcaaaactcctgtataaaatattagcaaatcaaatctcataatacacgaaatggataagacattatatatakatatatatatatatatatatatatattcatgcactgtatacatttcagtcaatgatagaccatatatatgacagtgatttagtaaggttatagtactatattttcaccatggaatactacacagccataaagaagaataaaatcacgtcctctgcagcaa

SEQ ID NO: 485253 - DNA, 321 bp, Homo sapiens
agctactgcctactccctggccaaccagctgaagaaatacagtaagttctatagattcacaatgatgaacgtgatgaatgatcacctgtgttctgagaaactgaacrgtcttttcatcgaaattaatttcatccttcccatacttctaggaaaatagaagtggatgttttaacctcattttgttaaacatggaaaacagaggcacaaagtatttagcaacttttccacattggcagtctggtgtgaggtgggactagacttaaaatcctacttattgtcttctgacacaggcacagaaccacctgttttcctcagtaagag

SEQ ID NO: 485254 - DNA, 552 bp, Homo sapiens
tattcattcacactcctggctcaaatggtttctggtgcctagcattagatgtgacaataatgatagctagctagtcaaacctactgccttaaagatcaaccaatttgctccattctggttacttggcatggtaaatttatttaactaaaaagaataatggggtgaggtgatgtaaacctggctttcaataagatgcacaacaaattctaataaggccaaaactctgttgaggttaactggtgtcttgagtttactaaaataaaggcagtccataggaagcctcaaagagacattatcttaccacttggcaccacaaaaacaccaagctctcctctctgaaaatacaggccgggggtggtggctcacgcctgtaatcccagcactttgggaggccgaggygggcggatcacgtggtcaggagtgatccgtctctactaaaccccgtctctactaaaaatacaaaaaaattagccgggtgtggtggcacgcacctgtggtctcagctactcgggaggctgaggcagaatcccttgaacccgggaggtggaggtt

SEQ ID NO: 485255 - DNA, 594 bp, Homo sapiens
tgggaacaaaaggatggcagtttttgcatgactcaagttccaagcttaattttcctttgtcatagtgagtttggggtcctgagattttattttcctttcacactttctaccaatataaagcttcctcatagatgccttcttttttcaaacattaacaaccctcgtgggttttctctcattttaagtacagaaaacataatactgtacaataattttatctgtcttaaatacaagactgcttatgattcacttaaaataaaaaaaatggctccacatttctggcttttagttggattatgatttcaaccaaaaatcagagctttttaaccttgagtttgagtttcacacacccagtaaagtggaaatatagactttttcttaggacagtgttatgacactcaaaagaatcgtggccaaacttaattacctgttgcaaacatcattgcagttttttactgaactatcagagactttcttgtgcctatcacagtgtatatgctaaatacatattacagggccaggcacggtggcccatgcctataatcycaatgcttagacaggccaaagcaggagcattgcttgaggccaagattt

SEQ ID NO: 485256 - DNA, 529 bp, Homo sapiens
cccaggttacccgcccttcatgtacatggygatggtcacctggctcaccagcaaagtgaacaacaggtcggtggcaaccagccgcataactgtgtagaaggtggtctccttctgttccttgcgcgacttgcacagcaccacgatggccaccaggttgcccaccaccccgaaaatggacggtcccaggctgtccagcagattgggctccagaccaaggacacattggcctgggaaggggttaacatgacagtggctggtggtacgcagccctggagtgcgaagctgagtctggagatggcagaagagagacaaagccaccatgagtgaaatgaccacctgcagggcattagacccgcgcccaggaaacgggatgctaacatgacaagggaggaactcaatcccactctctggattgcaaccacttaccaacggcagccacccaaatctccaggctccctctgctcctgccagcagcacacccttgctgatcttaatatttataaactgagcctcccattcctcttcctcc

SEQ ID NO: 485257 - DNA, 529 bp, Homo sapiens
cccaggttacccgcccttcatgtacatggtgatggtcacctggctcaccagcaaagtgaacaacaggtcggtggcaaccagccgcataactgtgtagaaggtggtctccttctgytccttgcgcgacttgcacagcaccacgatggccaccaggttgcccaccaccccgaaaatggacggtcccaggctgtccagcagattgggctccagaccaaggacacattggcctgggaaggggttaacatgacagtggctggtggtacgcagccctggagtgcgaagctgagtctggagatggcagaagagagacaaagccaccatgagtgaaatgaccacctgcagggcattagacccgcgcccaggaaacgggatgctaacatgacaagggaggaactcaatcccactctctggattgcaaccacttaccaacggcagccacccaaatctccaggctccctctgctcctgccagcagcacacccttgctgatcttaatatttataaactgagcctcccattcctcttcctcc

SEQ ID NO: 485258 - DNA, 529 bp, Homo sapiens
cccaggttacccgcccttcatgtacatggtgatggtcacctggctcaccagcaaagtgaacaacaggtcggtggcaaccagccgcataactgtgtagaaggtggtctccttctgttccttgcgcgacttgcacagcaccacgatggccaccaggttgcccaccaccccgaaaatggacggtcccargctgtccagcagattgggctccagaccaaggacacattggcctgggaaggggttaacatgacagtggctggtggtacgcagccctggagtgcgaagctgagtctggagatggcagaagagagacaaagccaccatgagtgaaatgaccacctgcagggcattagacccgcgcccaggaaacgggatgctaacatgacaagggaggaactcaatcccactctctggattgcaaccacttaccaacggcagccacccaaatctccaggctccctctgctcctgccagcagcacacccttgctgatcttaatatttataaactgagcctcccattcctcttcctcc

SEQ ID NO: 485259 - DNA, 529 bp, Homo sapiens
cccaggttacccgcccttcatgtacatggtgatggtcacctggctcaccagcaaagtgaacaacaggtcggtggcaaccagccgcataactgtgtagaaggtggtctccttctgttccttgcgcgacttgcacagcaccacgatggccaccaggttgcccaccaccccgaaaatggacggtcccaggctgtccagcagattgggctccagaccaaggacacattggcctgggaaggggttaacatgacagtggctggtggtacgcagccctggagtgcgaagctgagtctggagatggcagaagagagacaaagccaccatgagtgaaatgaccacctgcagggcattagacccrcgcccaggaaacgggatgctaacatgacaagggaggaactcaatcccactctctggattgcaaccacttaccaacggcagccacccaaatctccaggctccctctgctcctgccagcagcacacccttgctgatcttaatatttataaactgagcctcccattcctcttcctcc

SEQ ID NO: 485260 - DNA, 480 bp, Homo sapiens
ctgatttggttctccgcttgactcttgttggtgtatgggaatgcgagtaatttttgtatgttctttttgtatcctgagactctgccaaaggtgtttttcatcttaaggagctttcgggccttaagcttttgggcctataaagttttctacatataggatcatgtaatctacagacagggatagtttgacgtcctttcttcctatttgggtaccctttatttctttctcttgcctaactgttttggcaaggacttccaatactatgttgaacaggagtggtgagagagggcatccttgtcttgtgyacaaaatacactaaaataaaattgcttaaaaccagtgataaagaaaaattctcaaagcagccaatgacaaaaacacggtttgcacagaggaacaaaaaatgccagcaaacattttattggaaacaaagaaaattagaagataatgaagcaacatctttaaagtactggaagataa

SEQ ID NO: 485261 - DNA, 480 bp, Homo sapiens
ctgatttggttctccgcttgactcttgttggtgtatgggaatgcgagtaatttttgtatgttctttttgtatcctgagactctgccaaaggtgtttttcatcttaaggagctttcgggccttaagcttttgggcctataaagttttctacatataggatcatgtaatctacagacagggatagtttgacgtcctttcttcctatttgggtaccctttatttctttctcttgcctaactgttttggcaaggacttccaatactatgttgaacaggagtggtgagagagggcatccttgtcttgtgtacaaaatacactaaaataaaattgcttaaaacyagtgataaagaaaaattctcaaagcagccaatgacaaaaacacggtttgcacagaggaacaaaaaatgccagcaaacattttattggaaacaaagaaaattagaagataatgaagcaacatctttaaagtactggaagataa

SEQ ID NO: 485262 - DNA, 612 bp, Homo sapiens
aatacatatatatgcacacataaccacattacatataaatggtctaaatataccaatttaaaagcagattggatsaataaaacaagatctaagttattactgtctagaagaaatttaagaatatcctaataaaacatatctatgtaaaaacaatagctggcatcatacttaatgaagaaaaatcagtttatttccccctatttcaggaacaagatgagtccattaactcttagcactttgttttaacattccactagacgttctaccaagtaaaatagacaaaaaacataaacaaaagaattacagacgggaaaggaaaatgtagattggttttatttatagacggcatgtctatgtagaaagtccactgaaatctacaaaaacactgctggctataataagtgagttagcaacataaaaaagaaaaaaagcaacatattaaactaatatttccatataccagcaatgaacaataaaaaattaaaataaaagtactattaataatatcatgaaaaatgtagaagaattaggaattaatctaccaaatgatgtgagagtctggtacactaaaactcaaaacactgcagaaagttaaagaagacttaaataaat

SEQ ID NO: 485263 - DNA, 612 bp, Homo sapiens
aatacatatatatgcacacataaccacattacatataaatggtctaaatataccaatttaaaagcagattggatcaataaaacaagatctaagttattactgtctagaagaaattyaagaatatcctaataaaacatatctatgtaaaaacaatagctggcatcatacttaatgaagaaaaatcagtttatttccccctatttcaggaacaagatgagtccattaactcttagcactttgttttaacattccactagacgttctaccaagtaaaatagacaaaaaacataaacaaaagaattacagacgggaaaggaaaatgtagattggttttatttatagacggcatgtctatgtagaaagtccactgaaatctacaaaaacactgctggctataataagtgagttagcaacataaaaaagaaaaaaagcaacatattaaactaatatttccatataccagcaatgaacaataaaaaattaaaataaaagtactattaataatatcatgaaaaatgtagaagaattaggaattaatctaccaaatgatgtgagagtctggtacactaaaactcaaaacactgcagaaagttaaagaagacttaaataaat

SEQ ID NO: 485264 - DNA, 612 bp, Homo sapiens
aatacatatatatgcacacataaccacattacatataaatggtctaaatataccaatttaaaagcagattggatcaataaaacaagatctaagttattactgtctagaagaaatttaagaatatcctaataaaasatatctatgtaaaaacaatagctggcatcatacttaatgaagaaaaatcagtttatttccccctatttcaggaacaagatgagtccattaactcttagcactttgttttaacattccactagacgttctaccaagtaaaatagacaaaaaacataaacaaaagaattacagacgggaaaggaaaatgtagattggttttatttatagacggcatgtctatgtagaaagtccactgaaatctacaaaaacactgctggctataataagtgagttagcaacataaaaaagaaaaaaagcaacatattaaactaatatttccatataccagcaatgaacaataaaaaattaaaataaaagtactattaataatatcatgaaaaatgtagaagaattaggaattaatctaccaaatgatgtgagagtctggtacactaaaactcaaaacactgcagaaagttaaagaagacttaaataaat

SEQ ID NO: 485265 - DNA, 612 bp, Homo sapiens
aatacatatatatgcacacataaccacattacatataaatggtctaaatataccaatttaaaagcagattggatcaataaaacaagatctaagttattactgtctagaagaaatttaagaatatcctaataaaacatatctatgtaaaaacaatagctggcatcatacttaatgaagaaaaatcagtttatttccccctatttcaggaacaagatgagtccattaactcttagcactttgttttaacattccactagacgttctaccaagtaaaatagacaaaaaacataaacaaaagaattacagaygggaaaggaaaatgtagattggttttatttatagacggcatgtctatgtagaaagtccactgaaatctacaaaaacactgctggctataataagtgagttagcaacataaaaaagaaaaaaagcaacatattaaactaatatttccatataccagcaatgaacaataaaaaattaaaataaaagtactattaataatatcatgaaaaatgtagaagaattaggaattaatctaccaaatgatgtgagagtctggtacactaaaactcaaaacactgcagaaagttaaagaagacttaaataaat

SEQ ID NO: 485266 - DNA, 399 bp, Homo sapiens
agacttctgctctacgctaagaactagctctggaaattaattcacagaaagaacatggttaggggccatcctgagggatttacctcactagggatatatatttacatttcaagagaagatgagacccagtagatgcatcccagaagttacaaagcyggagagtctagtgttatctttcccctagagagatttatttttatccaaatggttagagtaagaactcagatttttttccgttttgtgactatggagacacactcagaagggggtcagagcaactgggtcactcttccacaaaaatgctcaggttcttttttccagagttctttgcctacagcagatccccttacatgtaggacatctggttctcaccacatcaccaccacggtaagaattagt

SEQ ID NO: 485267 - DNA, 399 bp, Homo sapiens
agacttctgctctacgctaagaactagctctggaaattaattcacagaaagaacatggttaggggccatcctgagggatttacctcactagggatatatatttacatttcaagagaagatgagacccagtagatgcatcccagaagttacaaagccggagastctagtgttatctttcccctagagagatttatttttatccaaatggttagagtaagaactcagatttttttccgttttgtgactatggagacacactcagaagggggtcagagcaactgggtcactcttccacaaaaatgctcaggttcttttttccagagttctttgcctacagcagatccccttacatgtaggacatctggttctcaccacatcaccaccacggtaagaattagt

SEQ ID NO: 485268 - DNA, 399 bp, Homo sapiens
agacttctgctctacgctaagaactagctctggaaattaattcacagaaagaacatggttaggggccatcctgagggatttacctcactagggatatatatttacatttcaagagaagatgagacccagtagatgcatcccagaagttacaaagccggagagtctagtgttatctttcccctagagagatttatttttatccaartggttagagtaagaactcagatttttttccgttttgtgactatggagacacactcagaagggggtcagagcaactgggtcactcttccacaaaaatgctcaggttcttttttccagagttctttgcctacagcagatccccttacatgtaggacatctggttctcaccacatcaccaccacggtaagaattagt

SEQ ID NO: 485269 - DNA, 429 bp, Homo sapiens
aaggatgcttcagtatgtatttctagtttccctccaaattcttgggctgatccttctcatccttttttttttctttttttctttttttttttttttgagacagtctcgctctgtcacccagtctagagtgcagtgatgygatctctgctcactgcaacctccacctcccaggttcaagtgattctactgcctcaccctcccaagctcccaagtagctgggattataggtatgtgccaccatgcccagctaatttttgtatttttagtagagacagggtttcaccatgttggccaggctggtctcaaactcatgacctcaggtgatctgcctgcctcagcctcccaaagtgctgggattacaggcatgagccactgcacccctcctgatccttctcatcctcttttgaagattctttgtcctgtctttaa

SEQ ID NO: 485270 - DNA, 447 bp, Homo sapiens
ccagtatgattgtcactaagtgggaaggaagaaatttaacccctggtgggtccctgagaggagttcccaagccatttactttcccacctccactcacccacacacacatcaagccaagtcttttggaagcagtatgtttaagagaattctcattgcgacttgggaatacaagagtaaggaagatctatgctcaattcccaggctgggcgcagtatttggcaaaactcatagaatttccgtaagcccagcatcatgtaaaaaaagtagaaaatggccaagtggggktcccagcagataggtctgaaaccatctcctggagtcctgaagctttctagcacagtgcatggaaaaccaccaactgtctggggacaatcagaagagcagtgggagtagctaaggatgacccagacttgaagaagccttgtggttaggacaaaaaggcacagc

SEQ ID NO: 485271 - DNA, 517 bp, Homo sapiens
atagaacttttaaggaaataattaaagtggggccactagggtgggccctaatccaatatgactgatgcccttacaagaaagaggaaacctgtgaagacatggggacaagctggccatctacaaagcaagagaggggcatggaacagattattccattagggccttcagcaggaatcaaccctgatatcttaatctcagacttctcagaactgtgagagaattaatttttgttgtttaagccacaaaaattgttacagcagccctagcaaactaataaaccatataaacaattgataccactcccccaacctctggtagctaaaagccagaaatctaaaktcagtcctaagttaccttcttgcttcaaactacaaagtacatctcagtctgaccacttcctctccttccattgccactgcctggcccaagccaccatatgtatcaactggaaccctatcagccccatctaatagacaggcatggttcttattagtcccctccagcatatcaggtgttg

SEQ ID NO: 485272 - DNA, 622 bp, Homo sapiens
ctgtccaggttccctatcggattataaagcttaacatttttgtgaaggaagaagaaagccttccctctggagagcgataagaacattccatcctcctctggctccagggagcctgggaaacaatcaccaaagggagagagactccccagggacaggctcccgagggcacgggcagggctgccctctgctggccctcccacccgctcctgcccttcmctccacagaggcctggtctggtctgtggtcagccagtgagatcctggggcaggggcctggggaagggggcaggcctcaggctgcacagactaaggttccttggggtggagggcttctccgtagcctggctccatagctggggggcacaaggaaccttgggcaccagctctcttgaatgtgaattgtgcaatcttggcagtaagagcttcctccaaggagatcactcagaagacaggccatatgggagttaatttgcagtggggttgtgcatagttaagggaaaccaccaaggggtatgaagcatcccccgactagcaatgtgggcgagagtagttaccagaatgctgttggaaggagcagggccatggccaagttgaggcccctcaaggctggagtctctctctgc

SEQ ID NO: 485273 - DNA, 622 bp, Homo sapiens
ctgtccaggttccctatcggattataaagcttaacatttttgtgaaggaagaagaaagccttccctctggagagcgataagaacattccatcctcctctggctccagggagcctgggaaacaatcaccaaagggagagagactccccagggacaggctcccgagggcacgggcagggctgccctctgctggccctcccacccgctcctgcccttcactccacagaggcctggtctggtctgtggtcagccagtgagatcctggggcaggggcctggggaagggggcaggcctcaggctgcacagactaaggttccttggggtggagggcttctccgtagcctggctccrtagctggggggcacaaggaaccttgggcaccagctctcttgaatgtgaattgtgcaatcttggcagtaagagcttcctccaaggagatcactcagaagacaggccatatgggagttaatttgcagtggggttgtgcatagttaagggaaaccaccaaggggtatgaagcatcccccgactagcaatgtgggcgagagtagttaccagaatgctgttggaaggagcagggccatggccaagttgaggcccctcaaggctggagtctctctctgc

SEQ ID NO: 485274 - DNA, 622 bp, Homo sapiens
ctgtccaggttccctatcggattataaagcttaacatttttgtgaaggaagaagaaagccttccctctggagagcgataagaacattccatcctcctctggctccagggagcctgggaaacaatcaccaaagggagagagactccccagggacaggctcccgagggcacgggcagggctgccctctgctggccctcccacccgctcctgcccttcactccacagaggcctggtctggtctgtggtcagccagtgagatcctggggcaggggcctggggaagggggcaggcctcaggctgcacagactaaggttccttggggtggagggcttctccgtagcctggctccatagctggggggcacaaggaaccttgggcaccagctctcttgaatgtgaattgtgcartcttggcagtaagagcttcctccaaggagatcactcagaagacaggccatatgggagttaatttgcagtggggttgtgcatagttaagggaaaccaccaaggggtatgaagcatcccccgactagcaatgtgggcgagagtagttaccagaatgctgttggaaggagcagggccatggccaagttgaggcccctcaaggctggagtctctctctgc

SEQ ID NO: 485275 - DNA, 605 bp, Homo sapiens
tcacatttgaagtctcagttcaaatgtcaccccttttggagtttcctaaattatccttcttkttatatttggaacagataattcctccactaaaatataagcttcatgagggaggaactttgctgttctgattaatgttgtatcctcagtatctggaacagggtctggcacatagtatatgctaagtcaataattcttgaataaatgcttgctctgctattcattatccctgggccttctaccatcttcttcactcagctaactcctttaactcttgagttgggagctcaaagtccacttcttcagggaggcccctgctcatgccagcatacattctctacctccccaccttccatcccacattctaccctcccagagcctctgggcttctgttgttgcatctcactctcgcccttactgatttgatgtctgtctattagagaatcagctctatgcggaatgctcaggaactgtgctgttttgtttactgctgtctctcccatgcttagcacagtgcctggcacatagtagatgctccaagattatgtgttgaatcattggagggacaactgagggcttcaggtgaccatcagagtgaggacgca

SEQ ID NO: 485276 - DNA, 593 bp, Homo sapiens
ttacctctcagttgaaagccaaatgatcacaaatcaaattgagatccgggagtccattgaagcaaacagcaataactagaaaaagtcattcaggagaggtccagggtcagcacagccccatctgcaacacctatccctacaccaacattcagtcttggccttgacgctgtggccttggcaatgctaaatcaaggaagtggatggtcctatttcacagaggtttttagcaacaaaggtggaaatgtaaagggtgtaagcccccgattatctaaggatccaatgcacagcatcttgcacttctctgggcatgactgctggttggatggagctttgggtgtgtttggctgtatgccaccattcagggcacagtcatgagtgatgagtgtgacagagagacaggtgtagctgtgggggaggatgtcaggattgcccagacagccttatcagtcatgaatctagtttttggaccaccatccatatctcttacttgttgctataatagttctatacaccctgtaacttagtggtttaaaacaacaatcatttcytcttgttcatgtgtctatgggttatgtggcctttggctgatttag

SEQ ID NO: 485277 - DNA, 613 bp, Homo sapiens
gacttgttaccatgcatcctgtgttagggtcttctcatcctgctcttctgaccatgtcagtcattagagctctggcatcagtgactagggctagatccccaaatggctgtcaatctgccacccttcatgttcatgttcattggaacatgactgtgctccaggtagaaagatgtcttttcttccttcttccacccacctctgtattgcctgagtcacagactgtgctggttacagaccatgttctatcaaattcctctgaacattcccctgtcttctgcctgcaggtcctctctccatgcagcttagaccaaagttccattagctagactgggtgcccaagatccccaacaagtgtcatgctgtcatcctcttccatttgttttcctccctccctcctccttacattccccttctctccatgcatgtgttccctgccccaggccagtgggcatccaagatgtgtctgactctgtctcagtggtactcactgatgtaattcatctcagggtagattagagttacttctcaaaacaatcctgtgaagagattgamcatgtaatattatggttcaaattatggagtggagagagactgaggaaagatcactgaactg

SEQ ID NO: 485278 - DNA, 575 bp, Homo sapiens
ctgtatggaggagagtgaggtgagggtggctcagaggctgattcacgcgattgttacgggtgtgcattgtgcaactccagggcgcgccatgcatatcctgtctttgttgatttgtatatgtattgtacttttctggcagatggcaggtagtaaatcatcttgatgaaggggtgcctttttctaatctgtacaaactgtctcagggactggtggtgctgatcagatgttgagctccttcacccacccmccgctgtagaatccactccatactccagaacaaccatgcctgaggcatggttgttcttccccttaaggcaatgcctgacttttgaggtacgaggctgagtggcctaggcctagactctacttggccatacagccaacctctgcctgtggggagagtagactcagagtccatacagcctgagttaaattcccagctacaagatttttgaaaacccctttctcccaaaacagcctagggagtaaatgctagctgatagcagcagctcacctacgaacttccccaggaaaagggatatttcactctgggccttctagaaatgtggagtgaa

SEQ ID NO: 485279 - DNA, 502 bp, Homo sapiens
caaggggtaggcattgtttttctcagkttgctaacgaggaagcagaaactcacagttttcagaggctccttcaaggtcatctacatagtgagagcttcagagtttttgagatttttttcaacagagaactctgaccaaatttctcaccttccatggcttgtggtcactttcagacaaaagctcttcacagtctgttcaatgtatccgaccaaagcacgtgcctacctctacagcctgctcttcttctctgttcctcctctgccccctggctcttgagagtcctgccagccccatgccacctcctctgggaacttttccatgggttccttctctgagttctcttcatgtcactatctcagtgggccctgatctcaaaaatcctagaatctgattccagatctgatgaccccttgactaagcatccttgtccccattatctctgccacttagcctatggcctgactcagaaaaatctttgctgttgttgaatgggtatgtgagc

SEQ ID NO: 485280 - DNA, 514 bp, Homo sapiens
ctctgatgtgtttgggcaaatctagctgtgtatttggctcacctgcaggcctggtgttacacaaatgcagataatttttagtctccagtgttctttacctggttcctcccatcctgatgactggtaaaagtttttctgaatctcctcatttcacatattcctattttattcaaacagggaaattggtgagaagtgtaattctgctctacttttattttccaagccaatagattatcctttttaatcaatattagccccaagctccgaacaacaatatatctttcaaaatatattctcttttacagaggaaagcccacaatttaggaatgaaattgttttctggctcttatcttagggaagaggaagagaaaaaaggaactatctttgactttatccaataaggtaggtcatcacctagcaaggccctgagaaaatgaagcacratatagtctaggggaaaagatatgaaacagtgtcaggagaacgataagtttatggtggggcaaagagtgat

SEQ ID NO: 485281 - DNA, 427 bp, Homo sapiens
gaaaacccaaggaatcccaagtgaacaaacggaaatctcactaaaggcccatcatcatgggagtgagatgatcttataatcagctccacagtaaagacagattccttacaaaggaatgacaggcatagttgayttctcaatagcaagaatggaaaccaggagacagtggaataatatcttaaattattaaaagaaaacaatgtctagcttcaattttatattcaacaaatcagttttatttatttgtttttatttatttttagaatgagagcaaaatgaaagtattttcagacaaagagagagcttgccattgggtgatccttcattaaaggaaattataaataatgaattcagaagtgattccttaagtgagatctgaatgcaagagggaatggtgagcgaagaaaatcagaaacctgtggttaca

SEQ ID NO: 485282 - DNA, 628 bp, Homo sapiens
atatcaagaaccaagtagtcagactgacgtatgtatgtttgggcaaaggtggaatcacaagactggagggaaaaggaacaaaggagacagggactctcatgtattgtatgtctccatggactaggcttttggctagaatttttcataaacattacctttaaagcagtcttgaagtatagggctgaccaccgttttgtcaacaaaaagactaagattcaggaagggtaagaaatatgttcaaagttcaccaactgacagtttcccaaagtgacagaaccaggaatcaaaccccattaacttattgtgaggcctggaacctaccagaacccatgacgtggggaaaacccagcagcttgtcrttgcatgcaccaagttatattatgttgacaattatattatttcaaccacgttaagcaggcaaacttggctataaaatgggttcacaaattttacctgtaatgtaaccgaatgacataaggcatgcctaaacaaaaagatattcctgttgtaataaattttctttctgtcatggtggagggggaagactcatatcagttgcagatattgctcagaagtttcaattgtgttattttgaaaaactacatagcagaacacgcatgtcatatac

SEQ ID NO: 485283 - DNA, 581 bp, Homo sapiens
tgaaagtgcttcttaggatatgcatgaaaacaaacttctcatgcttccttgctgttcccgctttaccctccaaagcacttgcccgcacccctgaccgcccccgccccccccccgcacacacacactattgccccggaaagcaaacctacctggaatctcctattgtggagaggaaaaccaggattccggaagctttgccactgcccagctctatgacttgagccaggcattaacaacctcacaccacacatacacaggtacacacacatgcacactcatgggcaaaaatgcacgtgcacacatgtgcaagcacaggcacacacgcaggcatgcatgtatactcacacatgcatcggacacaccctcacacacatgtgcacacatacacaaagtttagtttcctcacctatcaaatcaggagaaaatgttctctctctgtctctcagactagttgtagggatcaaatgggataacagatgtgagagcgctttcaaagtcctaaaccccaggtctyctttgtcgccccagattaattcaatctctgggggtggacccttgaaagctccccagagagctccaca

SEQ ID NO: 485284 - DNA, 581 bp, Homo sapiens
tgaaagtgcttcttaggatatgcatgaaaacaaacttctcatgcttccttgctgttcccgctttaccctccaaagcacttgcccgcacccctgaccgcccccgccccccccccgcacacacacactattgccccggaaagcaaacctacctggaatctcctattgtggagaggaaaaccaggattccggaagctttgccactgcccagctctatgacttgagccaggcattaacaacctcacaccacacatacacaggtacacacacatgcacactcatgggcaaaaatgcacgtgcacacatgtgcaagcacaggcacacacgcaggcatgcatgtatactcacacatgcatcggacacaccctcacacacatgtgcacacatacacaaagtttagtttcctcacctatcaaatcaggagaaaatgttctctctctgtctctcagactagttgtagggatcaaatgggataacagatgtgagagcgctttcaaagtcctaaaccccaggtctcctttgtcgccccarattaattcaatctctgggggtggacccttgaaagctccccagagagctccaca

SEQ ID NO: 485285 - DNA, 542 bp, Homo sapiens
tcattgcaatcacccatggatgcatgagaccaacccttggaaattcctatttggcctggagtgtgatctgggcatcaggatttttaaacgtcctagtagtcagaatgtgtggctaaaggtgagttcaccttaggaattcgcagctgggccatcactgcattcccactgggtgttggccacctgtctgygtattcaggaccatctggttccctctttcctccatgccaacaattcaactggtggaccatgactatttgtttggtttccaggagaacttctggttccctgaaaagtttggggactggtaaccaacattctggtttgccagggactgaggggattcccagggtgtggggcttttcattttcttttttcttttttaaaatagagatgggatcttgctatgttgccttggctggcctcaaactcctgggctcaagtgatccccctgcctcagcctcctcaagtgctgggattacaggcatgagctactgtacccggcaggctttcagttttaaaacccagacaatcttagcaaacca

SEQ ID NO: 485286 - DNA, 542 bp, Homo sapiens
tcattgcaatcacccatggatgcatgagaccaacccttggaaattcctatttggcctggagtgtgatctgggcatcaggatttttaaacgtcctagtagtcagaatgtgtggctaaaggtgagttcaccttaggaattcgcagctgggccatcactgcattcccactgggtgttggccacctgtctgtgtattcaggaccatctggttccctctttcctccatgccaacaattcaactggtggaccatgactatttgtttggtttccaggagaacttctggttccctgaaaagtttggggactggtaaccaacattctggtttgccagggactgaggggattcccagggtgtggggcttttcattttcttttttcttttttaaaatagagatgggatcttgctatgttgccttggctggcctcaaactcctgggctcaagtgatccccctgcctcagcmtcctcaagtgctgggattacaggcatgagctactgtacccggcaggctttcagttttaaaacccagacaatcttagcaaacca

SEQ ID NO: 485287 - DNA, 542 bp, Homo sapiens
tcattgcaatcacccatggatgcatgagaccaacccttggaaattcctatttggcctggagtgtgatctgggcatcaggatttttaaacgtcctagtagtcagaatgtgtggctaaaggtgagttcaccttaggaattcgcagctgggccatcactgcattcccactgggtgttggccacctgtctgtgtattcaggaccatctggttccctctttcctccatgccaacaattcaactggtggaccatgactatttgtttggtttccaggagaacttctggttccctgaaaagtttggggactggtaaccaacattctggtttgccagggactgaggggattcccagggtgtggggcttttcattttcttttttcttttttaaaatagagatgggatcttgctatgttgccttggctggcctcaaactcctgggctcaagtgatccccctgcctcagcctcctcaagtgctggkattacaggcatgagctactgtacccggcaggctttcagttttaaaacccagacaatcttagcaaacca

SEQ ID NO: 485288 - DNA, 328 bp, Homo sapiens
gcgtgcttgacctgattaggctcagtgagcccgggggagggagggagtgaaggcaggcttgggaaagtgttttccatccccacccaacagactttgcttccttgtrtctctgccaagacctctttttggggaggaaaggccgaatcgcctcatttctacaggggcaccttggcctcgctcctctaaacctgggtaagctctttgacctgcctgtccccctccctcttgtctttccttcccaccaaccagctcccaaacagaaagtgtttttcacactcgcagctctccctcctcaggccctgccaggcccgaagctgggcccagaggc

SEQ ID NO: 485289 - DNA, 555 bp, Homo sapiens
acccctgaacgtcataggaatttaatgcccactgagctaggggagccaatgtcaacatctctgagccagaggccagggactagcaaagcaaatgcagctcaaaagatgaggtgccccatcacccgacaggggctccttggctgtgaagccagagggatcttagttcagattccggctgggtgaccttgagtaatttacttggcccttccaaacctcaccttttgcacctgacrtggggctccagtcatttcttcatgtattcatttgttcaataagtatttacttagtgtgtaccatgtgccacgcaccgtgcatacaacagcaatcaaactattgtccctattgtccctgctccaaaggaagttgtagcttagtgaggacaagcaaaaaggttcttctaaaacagaatgagaatttctaccctagcgatatacactgggaaggataggagtataaactagtcttgagaccaaaaaatctttctgtaagaaggaacatctaagttgagacttgcaagataagtaggagttcttgcaaaaagaaagaaaaagcaat

SEQ ID NO: 485290 - DNA, 607 bp, Homo sapiens
tgcttgcttcttgctctaaaattgctaatgcatgggctcatgctgctgtcaccttgctcactggaaggctggactgccttttttatgtctgtattctttgccctcctctcattctttggtacttcgtagatgcccaatttccgttcattgaataaatgaatccctcacttggctcaagttaaaatcaatcatcttacctggactgataaacatttcagctccctggagctcctcagtcataagtatattgaggtagcaggttacctagatgaagacttacaaagcaagaccaattatctcccactccttccctgctttccttccttttatcattcttctcgtagagagaagaggacctggaaaagactagcattttggagactgggaatggtgactgggaggccacaagagrgctgcctgaagaatgtgctggaatgagggaaagagattgtgtgagagggtttgggctaccccatcctccagggctcattcgaaagcactgttcagtcactagcgtttttctacttaatcaatggtgaatagctttccacaggatttcacttttgcaacatgattggtaatggctacatagtgttctttagatgac

SEQ ID NO: 485291 - DNA, 632 bp, Homo sapiens
taaaatttcaaacccaaactttgtacaacataacaagtatatgagctagtaaatatttattttgaaagttaccactttcaaatattcaggttaatggggtaaaagaagtgtttttgcctccakcacaaaccaatgtgcatgtgaataaacagtgtgctagtggagatgcaagttgttatcaatgtttcacttgttcgctagtcattcactcacttgttaatagttattgattcacccagtagatactgtcctaagctccatcattgtgactgagagaggaatatggaaatatagaggaagaatggatatatatatatatatatatatatatatatatatatatatatgtcaaaacacatctgccctatagacagttttagttcattaaaattctaatatttttcttggtaaaagaggatgtggaaaaaaatcatacattttataccttcacctggttagacatcatgtcaaaattttagacagtttaatatttatgtcttataataatctttataggtctaatgttattgattaatcaaaatataatttaagaacttaagctcaaagtgacagggccagaaagggtgtcatttgatcttagaggtaattcatcgcaaaatttgtgtttttta

SEQ ID NO: 485292 - DNA, 632 bp, Homo sapiens
taaaatttcaaacccaaactttgtacaacataacaagtatatgagctagtaaatatttattttgaaagttaccactttcaaatattcaggttaatggggtaaaagaagtgtttttgcctccagcacaaaccaatgtgcatgtgaataaacagtgtgctagtggagatgcaagttgttatcaatgtttcacttgttcgctagtcattcactcacttgttaatagttattgattcacccagtagatactgtcctaagctccatcattgtgactgagagaggaatatggaaatatagaggaagaatggatatatatatatatatatatatatatatatatatatatatatgtcaaaacacatctgccctatagacagttttagttcattaaaattctaatatttttcttggtaaaagagkatgtggaaaaaaatcatacattttataccttcacctggttagacatcatgtcaaaattttagacagtttaatatttatgtcttataataatctttataggtctaatgttattgattaatcaaaatataatttaagaacttaagctcaaagtgacagggccagaaagggtgtcatttgatcttagaggtaattcatcgcaaaatttgtgtttttta

SEQ ID NO: 485293 - DNA, 632 bp, Homo sapiens
tcttatattttctaacatccatgaaatcacggtaggcgaatatgtgagtttaaaactagggtagaatctcaaactcttcatagtttataaaatatctctgggtagcttccttctctccaatattatgccccaaaattctagctgcttcatgcaacctgaacactggttactatatgtttaccttgatgagcccaccattatcttcttggtttttccttttctgtattttggtccagaaaattcctgaatgttgaaagctggtgtgattataaagctggtctcctgtttgccatcactcaggctcagagccctgcattgccagttatctttggtctgaaaattattaagtcattatttcaatttattttctacagttttctactttttcaacatcagaaggrtagatgtaggacctgctgctttttgaccttaaaaaaaaagtattgacactaccattccatgatatgactagaacagtcaaactttacctccacttacccctcttgatttttattttattaagcatgtattttaaacatttgaagacattaaaattattgttttgtatagttagtatttattcacttatatttacctatctcctcacttttgttgaatttctattatgtttt

SEQ ID NO: 485294 - DNA, 539 bp, Homo sapiens
agagcagaaggggatgtggggggcccatgtgggtttctggagttctctgccttccatggtgggtgagctggagcatgccatatgacgggggcaggaggccagggagtgctgggcgggggcctgagggccaggggcatgtgccagttggtgtcacccagaggtggagggagggcttccatgttttgtcttgatgtggaatggtggacccagctaggacccagtcctgaatggggccagggcagccagtgggatgtgcaaggccatctgggcagagggtgctgggggtgtttctcyggtcgtgccagtgtctggcgagggttgtggtgccgctggaggtaggggtagggggagggccctcagggtggtctgttccttgggtgactgccagtgtgggggccgaggaggcttggggtggggcctgtccccatgaggatgggtggttggcagtgacagggagcctaggtccccacggcctgggctgaaggcctaagtggggcaggacctgctggtggcccaggtgcttaaggggccagcaggac

SEQ ID NO: 485295 - DNA, 539 bp, Homo sapiens
agagcagaaggggatgtggggggcccatgtgggtttctggagttctctgccttccatggtgggtgagctggagcatgccatatgacgggggcaggaggccagggagtgctgggcgggggcctgagggccaggggcatgtgccagttggtgtcacccagaggtggagggagggcttccatgttttgtcttgatgtggaatggtggacccagctaggacccagtcctgaatggggccagggcagccagtgggatgtgcaaggccatctgggcagagggtgctgggggtgtttctctggtcgtgccagtgtctggcgagggttgtggtgcygctggaggtaggggtagggggagggccctcagggtggtctgttccttgggtgactgccagtgtgggggccgaggaggcttggggtggggcctgtccccatgaggatgggtggttggcagtgacagggagcctaggtccccacggcctgggctgaaggcctaagtggggcaggacctgctggtggcccaggtgcttaaggggccagcaggac

SEQ ID NO: 485296 - DNA, 588 bp, Homo sapiens
tgtggaggtcggcagttgagaggtggagagacctgagcacacttgggccmgtcgtcccgtggcatttgggagcccaggaccgagccggggggcaagtgtgggcaatgcttggagccacagagtgggggtagggaattggaggggtagagaggacaactcaaaccaagccaggaacccacagaggagaccaggaaaggaaaaccaagaaggagtgagtccccaatgcccccaaattgatccatatattaaatgatccccagtaaaagtagctccatgatgattccaaagcccttaggaaactaaaggtgccaggagaatgaatagacacgtctccatagaagacacacactggtcaacaagtacatgggaaatgtccagcatcctccaggaaatgcaaagcaaaaccacagtgagatcccacctcccacccgctgggactgggcagatgcagtcctggcaaaccagtcttggtgaggagcgggggtatcagagccctgctgcactgagatacacacacacaaaatggaatagtattcagtcttaaaaaggaaagaaattccagtactggctgcaacttggatggaccct

SEQ ID NO: 485297 - DNA, 588 bp, Homo sapiens
tgtggaggtcggcagttgagaggtggagagacctgagcacacttgggcccgtcgtcccgtggcatttgggagcccaggaccgagccggggggcaagtgtgggcaatgcttggagccacagagtgggggtagggaattggaggggtagagaggacaactcaaaccaagccaggaacccacagaggagaccaggaaaggaaaaccaagaaggagtgagtccccaatgcccccaaattgatccatatattraatgatccccagtaaaagtagctccatgatgattccaaagcccttaggaaactaaaggtgccaggagaatgaatagacacgtctccatagaagacacacactggtcaacaagtacatgggaaatgtccagcatcctccaggaaatgcaaagcaaaaccacagtgagatcccacctcccacccgctgggactgggcagatgcagtcctggcaaaccagtcttggtgaggagcgggggtatcagagccctgctgcactgagatacacacacacaaaatggaatagtattcagtcttaaaaaggaaagaaattccagtactggctgcaacttggatggaccct

SEQ ID NO: 485298 - DNA, 594 bp, Homo sapiens
ctgctcaggagacatgcacgccggggtgctggccgcccaggactgcccaaccttcccctgccctggagagggccaggggacgctgcaggagtgccccgggctgcccagtggctgacggtggaaagtgcccacgtgctgctgtggaactgacacaaaccacaggaatggcccggtcgcccgggagtcctggcttcctcccacgcaggcgggcgcggagtccgacacagaggcgcgtaccagacccacggcaggtgtgagaggggcggcccaaggtggggctcctgctctggagagagccgcgagggggcctgggaggcccacgctggccagaggagcgagagccgggcgcccgcgggagtcccaagtgggaaggagtgggtgcggcgccccggggcctcccgagagtccctctcgcacgcggcccgcagagcagccctggarcgcctgggcctggacagggcccgaggtggccggctaagcgcctggcccacggctcccgagagtccccgcgtgtcctgggcccgggcccgggccccgcacccaccttggtcgccgcctcggcggggccgcgcgggaccagggcgagagaaacct

SEQ ID NO: 485299 - DNA, 588 bp, Homo sapiens
tggcacatggagagccctcaaaaaaatggtagctgacattaagctccctgtagccaatttcctgtcgtcaagaaaataatagcagtatgagacaccagtttgacttttttgttaaaaccagttgtggttataggtaaagaatatatcaaaccattggaggaattcaagccattcacaagccatcacccaaaatttcctacacataaaacaagttgctgagaggaaataaaactgccctctgaacacacgtatcgtgtatcactgttgcagtcccagagcctgcagaattgcctgtaacatactagatgtgcaataaatatgcgttaaatgaatgttctcttgatcacactacacgtaaaacatcaagaaytgttacaacaaaggattagcaagcctggtagcctgaaattggttctgccattgacaagactatagcatatggcaagctactctgcatagcttataaaaggtaacccttctccataggatgtaacaaaatgatatgaaacaggaactcacatttgtcttgtatactcacatcacaggattcagagatggaagatctgttttgctctgttatgtccatgt

SEQ ID NO: 485300 - DNA, 623 bp, Homo sapiens
cctgaaggggaggagagagtcctggatgaccttggtggggtcctcataagtagaagtggggagmagtgagagtgtgagccagcagagattgcaaggtgctactgctgctggctttggagacaggaagaagacacagccaaggaacgcaggagacctctaaaagctgacagagcaaaggaaatggactctgccctggagcctccagaaggaaccaagccctactgataccatgattttagcccacagaggctaaaagccccactggaggacttgtgacctgcaaaactgttaagaaatcaatgtgtgctgttttaagctactaagtttttagtaaccgtttgttgttgttgtttatttatttatttaattttttttgagatggtgtctcactctctcgcccaggctggagtgcaatggcgtgatctcggctcaccacaacttctgcctcccgtgttcaagcgattcttctgcctcagcctcccgagtagctgcgattataggcatgcgccgccacgcctggttaattttgtatttttagtagagacggggtttctccatgttggtcaggctggtctccaactcccgacctcaggtgatccgcccacctcggcctcccaaagagt

SEQ ID NO: 485301 - DNA, 595 bp, Homo sapiens
tcgtctgacaattttgaagaactcacatctaaaaccttgacacatacaaagcattaaaaaaaggaaagaaaactttccacaaactttgaagccacgtgacttcaactttagtccctgtagcaacttctccttttcccctgtttgttcatattcaaaactctcatgctaatgtatacagatwtacctattatatgaaagggatttgcattcagttctctgtgtaagactgaatcagaaattaagtaataactttttgtgaaaaattgaacttgtttctttatgactttcttaattactgtaaagactacagcctgtcatcttatcgagcaactgagattttttaattgctctttgacatctttgctatgtgtttcacctaattcatcagaaactgtcatgattcaatggtataaacaataaacaaaaatccaggaggggaaatgcaagagagaaaccctggcacgggcatggctgcagcctcagagtaggaccttctgcaggggctgccggagtccatcagagaaaacataccacgggggtcttgtacaaagcactatttggtgtggtgtttgacattttgcattacctttagtta

SEQ ID NO: 485302 - DNA, 426 bp, Homo sapiens
taaaaaaaatgcaggttcccaaacccctggggacgcagtcccccaggaggatcctgtaaatctgcgttttaagggactctgggtagttmtgaagcaagtggtcctttgaaacccacctttattcattcaacaaaaatgatgtgaacgcacactgtggaccaggcagtggaaacacagcggagccaccacagtgggtaaaataaacaaaatcctcatctttgtggagcatctaacttcagggatctagttcctcaacacagtgcttttatcataaataaacaggttacgtatagctaagtcactctttgcttttgttctttgttcattgcatatctttgactacttttctaactgccccaactaaatgctgcttgccctgcctcttgctaattagtttagaggcaacttgaagtgttcatgtgggca

SEQ ID NO: 485303 - DNA, 623 bp, Homo sapiens
ccccagccaacctgcttcttgggtaaaaattgtgaacttggcaaacctgtattttgtcaacaacggttcttcaatcccctcagcattattaccatctgaaagctaagaagctggaacagcttttcagggatgcaacaggctagaggcaactgatcatttcagatacccttcacctgtgggttaaggaggccggagccacatcccaaacatcctttgcaattgccataaagcataagtttaattaaaacattttgttacatgccgtctcaagcaccaaactctgcragagattctaagtatagagaggtgaagaagaagtggcctctggtgtcgcagcagccctggcatcccagcacatccacccacgaactcagttacaagcccacagaaggtttcccatcaccacgtttgtccctctggggataaactccctctagaacccactttctttgcctctctgaccttacttcaagccacttctgtagagttctagagcttttttttttttttaaagacagtggttctgtcacccaggctggagctcagtggtgtgatcttggctcattgcaacctttgcctcccaggctcaggtgatcctcctcccaccccagcctcctgagcag

SEQ ID NO: 485304 - DNA, 599 bp, Homo sapiens
attatcacaatacaacatatacatatatatatcccaagcccagccggagcccctagacctggccccggcagcagaagccatcacctgctgtgaaggaactcagactcaaataggagatacacaatttaacatccattaattgagggagaaattactgaccatctactacacgttaaacactgggaactgagaattcagggaagaccatgaaaaatatactactgtctttatgaagcttaatctagtctgggacatagtcatcaagcagacaggcacaaaattaagtaattcattaaaatactaataaatgcaatgaagggaagtacagggtcctatgaaagcacagagctggaggatggggcttcagaggagacttccctgagaaagtgaccttgacactaagaagtgaaggacaagccatcatttcccaggcaaaaggggtgtggtggggatggtragggtagggcattcaggcagggagaatggcatgtataaaataaaggacctgtcacaaaaggtaggaattaatgtggttcttttgagggactgctagaagccaacatagggcccaagcagagaggcacaagacatcaggccag

SEQ ID NO: 485305 - DNA, 500 bp, Homo sapiens
attgcacttgctcaggtgacacttacgacatttattgaatgctgcagactcttattcctaatacatcttaatatatctaatttcccaaacctgattgtcagtttcagaaccttgtctggatgcatagttctttcaacatttactagcacatatttagcaattgaccacaacgtgcaaaagttatgttagcattggagttgcagtggtgaagaacatakacatgaccacaactctcgcagatctgttatataaggtgaacatatgaattagggtcaaagaatgtgtgtaattttcagtatcacttacaatgctttgaccattgtgagggtacagaagatacttttgcggaaggatctaaaattccgtttttgttggtaagcaaacttacatctagtagtagaatgtcaactgttgttgtgtatgcttttgctacaagtaagatttctagtttctttaagtttacttaaaaaggatgtgtggtatatataaatttcaataat

SEQ ID NO: 485306 - DNA, 678 bp, Homo sapiens
tgactccaaggactgcacaattgataacaagaatcagttttggataatgttaagcatattactgttgttcagtccaggttggtactgtgcagaaactacgtgcttccagactctagaaaagctaatatgagcagaaaaaaggatggtttcctcccaagccaggtaaagattttaaaagatacacaagaaaaaaattatagatcatacaggcaacgacagagcattaacattccatttctaacaaagatgatcttagtattagtcagagttctccagagagacaagaccaataggagatagatggatggatagatggatggatggatagatgatagatagatagatagatagatagatagatagrtaggtagataaagagaggattattaggggaattggctcatatgattatggaggcagagaagtcccatgacaagccgcccacaaactgcatgcctgcagtatggctcagtccaaaagcctcagaaccagagaagccaatggtgcaactctgagtctgaggccaaaggcctgagaacccagggtgtcctggagtctaaaggctgaaaagcctggagttctgatatccaagggcaacagaaacagggtgtcccaggtccaggagaaagaaagaaagatttctcctttcctctgccttgttgttctatgtgggccccc

SEQ ID NO: 485307 - DNA, 678 bp, Homo sapiens
tgactccaaggactgcacaattgataacaagaatcagttttggataatgttaagcatattactgttgttcagtccaggttggtactgtgcagaaactacgtgcttccagactctagaaaagctaatatgagcagaaaaaaggatggtttcctcccaagccaggtaaagattttaaaagatacacaagaaaaaaattatagatcatacaggcaacgacagagcattaacattccatttctaacaaagatgatcttagtattagtcagagttctccagagagacaagaccaataggagatagatggatggatagatggatggatggatagatgatagatagatagatagatagatagatagataggtagrtagataaagagaggattattaggggaattggctcatatgattatggaggcagagaagtcccatgacaagccgcccacaaactgcatgcctgcagtatggctcagtccaaaagcctcagaaccagagaagccaatggtgcaactctgagtctgaggccaaaggcctgagaacccagggtgtcctggagtctaaaggctgaaaagcctggagttctgatatccaagggcaacagaaacagggtgtcccaggtccaggagaaagaaagaaagatttctcctttcctctgccttgttgttctatgtgggccccc

SEQ ID NO: 485308 - DNA, 410 bp, Homo sapiens
gtactacgttgcatttctcaatctgactttgtttagtttggggaaaacattttttcggtcctgaaaaaaaaaatcactgtggtttctctcctactcccgccctctgtaatcgccacttgcaagagtttcaccattttcccrgaaaaccaaaaaaatgaggatgctgggcagacattctttgtttcttttcttccatctccctctgccccaggccgtctcgtctgcccactctccctacacctccttccttcacgctgggctcgcctctttctccttaccagatttccttttcggaatccagctcaaccctcaccttggtaaataacgcctcagtagacttagaggtagcccgggtccttccgcccatacggtgccagcacacccttggccccatcacaggctcaggctca

SEQ ID NO: 485309 - DNA, 380 bp, Homo sapiens
ggggaggactgggatgactgaacctctcctgcttaggttcaggggccctcccttcaaggtgcggcctgtgtgagacacgcatccacagcccggtaaccaaaactggcacacccagcacagtcacctccacggcagcacatgacctacatcagccagtcagcagctcttactggggagctcctaggtccaagtgcatgtgcagcaggacagggaggggggcttacctacattgaattagcaaagtgagatatacacacatgagaagttccagaagtagcaaaggatcacggatggttgcagaagctgattggggtggaaggaaggacttcgagaggagatggcactggagctggkagttgagggagaactagagtgaaatt

SEQ ID NO: 485310 - DNA, 626 bp, Homo sapiens
ggagaaggagccaaggcctgcaaaggttttaagtggcccctgcaggttcactctgacccacctcagagacgcccccacaacacccagcgccctgcaggaggaatctagagacttagggtctaggctcaacattgccactcattagctctatggtcttggccatgtcaacctaagttgaatggcagccacagccctgtggccttccaggatgtcatgaggtatccacatggccttacacacatgggtggcagagctcttcctctctgtcttgcagtgggaggccttgttgcaatgggaaacaagctgtagagataaaaacaatgaacctgwtgactaatcctagaaacgtccagatggaatacattttttttttttttgagacagagtctcactctgtcgccaggacagtggcgcgatctcggctcaccgcaacctctgactccctggttcaagcgattatcctgcctcagcctcccgagtagctgggattacaggcacgcgccaccacgcccagctaatttttgtatttttagtagagacggggtttcaccgtgttggccaggctggtctcaatctcctgacctggtgatctgcccttctcggcctcccaaagtgctggtattaca

SEQ ID NO: 485311 - DNA, 606 bp, Homo sapiens
cccacttctgaccttttcctctccaagatctgagaatgctatgtccttgttcttcaaagtcaccaccttcttctttcttcttaagcctgccccttcctactttccagagaatttccccataaatcattctctctctgctatatcttctgctactccctcttccataactcttgaccccacctataaacattaggaaaaattttctcattctaaaaattaattatttcttctccttgcatctctttagatgtctccctatcttccctttacaaccaacctccggaaaatgttgtcaatatttattttctcttgctcaatgcccacttgttccttgttctaccaccaactggatattgctcaaatggtttcagctgttagagttaccaatgagcctctgcaattatttccatcctttgtaaataatactccctcatgttcatatygctctctcctaatttaactaatttccttccttctttccttccttccattcctttttctttctttctcttctctctctctttctctctctcaacaatgtacagggtataatttgtttcacaaaaagtaggtggagaccaacagtttcaggtttgctcaacaaaa

SEQ ID NO: 485312 - DNA, 641 bp, Homo sapiens
aatatctataagtctgtaaagaaataaattctttgtactgagttctgaatgtatttattgtaaacttaataactctataatttaatctctgcgagatcactttgttgaccctgcttggttttgatcagacatctgagagaaattccactgttagactctgatgtgatacaagaaatgagctctcttacttctaaagtactggccaaattctgactcacaattgataagaaattctgtactacttttcatatcacagaactgtcatccatacatagttagcaccttattttaagttasgactttgtcttcaaaatacaaactataactgcctttaatagtgccaatattcatgtagttctttataactatcctaatcctttgtcagtgaggaactactaggaaatgattcaatgaatatattttagtacaagcatgcaattcaggtatgttaatgtgagcatgtctttcctcactctcaatgacactttatgctgtttcattggatattgtcccagttttgtaccaatcctttgctgcaatatttaataataatatggtcattaattgcttaatgatgaggatatcttctgaaaaatgtgtcattaagtgatttcgtccttgtacaaacatcagagtgtact

SEQ ID NO: 485313 - DNA, 641 bp, Homo sapiens
aatatctataagtctgtaaagaaataaattctttgtactgagttctgaatgtatttattgtaaacttaataactctataatttaatctctgcgagatcactttgttgaccctgcttggttttgatcagacatctgagagaaattccactgttagactctgatgtgatacaagaaatgagctctcttacttctaaagtactggccaaattctgactcacaattgataagaaattctgtactacttttcatatcacagaactgtcatccatacatagttagcaccttattttaagttaggactttgtcttcaaaatacaaactataactgcctttaatagtgccaatattcatgtagttctttataactatcctaatcctttgtcagtgaggaactactaggaaatgattcaatgaatatattttagtacaagcatgcaattcagrtatgttaatgtgagcatgtctttcctcactctcaatgacactttatgctgtttcattggatattgtcccagttttgtaccaatcctttgctgcaatatttaataataatatggtcattaattgcttaatgatgaggatatcttctgaaaaatgtgtcattaagtgatttcgtccttgtacaaacatcagagtgtact

SEQ ID NO: 485314 - DNA, 658 bp, Homo sapiens
ctgtctccaaggattatttaaatttgaaagaaaattatttacaagttaatttctgcctccccatgcaatcattctccctagcaatcattaattgcccctcaatagaatgcctcttctcttccctcccataacctggattcaagcccccattctttctgtaaccccaagtaaagtttctgtaactcattgggaagttggatcttcattctgaaggctcccatttatgcgcactcaatacatttgtatacttttcctcctattaatcaacctgcttcatgcctgtgatttttaagcaaatctttagggggccaatagcaatggcccataaaccatttaaaagtgtacgaccttgggaaagtaatttatatcccytatatattcctcttttttcagctataattcagctgaataacaaccattttactaagtaattgaaagacaaaatatataagctttatcgttaataaaatattataaaagaatatcattactaagtagagctgatattatcaccactttacaaatgagaaaatattagtaagttggttcaatatcttacagtgtttaggtgtgaatgttcagagccaagttaggtcttctgtcttgatattcattttatattgacatgtaacttgatattcattttatatcaacaagc

SEQ ID NO: 485315 - DNA, 641 bp, Homo sapiens
ctttctaagagattattctccttccctgaaggtaggaagttgtaagctttaaaactgtatctgactctattcaaaataaaaattaaaacgtattttttttctcttgttctgaagacaaaattggaagcatgaaggtcacttgcaaaccaaatgtttgcaagaatgacccatctacccaatgaggattctgtcttgatataaatgagcaccttaaactataaattggtgcttttcagagaggtgctgaaaaataaactgtwataaaattgtcagcagctgccaaccagagaactgattctgtaatttagtgagaaactgaaaagatcaaaatcacatttctgccttttaatgggtctttggctgttgcacagaacctgctaatagcatcgcagaagggaggaaggaagtagaggtcataagcacactttacatggttgagaaaatggatgtgcctattcttaggcagctgtgggctctaaaaacaaaagacttaaaaatgtattggcctttctctgagagaattaatcatatgaattcaaacaaagcatcttgctatgcatagaacaattattataactgtgagtaattgcaatgtgttttgtttacctaactccttattcagaggcataaaacaatacata

SEQ ID NO: 485316 - DNA, 545 bp, Homo sapiens
cttattaatagacatggatacttttcagatagttaaagtaaaaataatgtcattatgactaacttttggcttgcattgttttgtacttgttaagatatatatatatatcttaatatatattatatataatatatcttaatatataatatacaatatatatctttatatattatatataatatatcttaatatattatatataatatatatctttatatattatatataatatatcttaatatataatatatatctttatatattatatataatatatcttaatatatatatctttatatattatatataatatatatatcttaatatrttatatatatctttatatatattatatatatctttatatatataatatatatatctgtttctagatgtggtaagtgcacgtgtaactttgtaatttactgataactttgtaatttactgacaaattaacttccacagtattatgtcatcttgaactttagccagcaatatatgagagtcagtttttaatatagtcatgccaacagtttatgtattga

SEQ ID NO: 485317 - DNA, 506 bp, Homo sapiens
ttattttgaaggcagtgattaaagcacaatttgacttctaaaaattattgagatcttattttaatgcttctttccccctatggagaatgatttcgtcttttgcttccctcatccccattccctctggctaaccttcactcattagcacccagaactcaaatactgatcatttaagagagaacttgccaactcagagccatgggctaactataaacaagactttaaacctttttgctaatgccatagttaatctcaagtaataacttctgaaaacctttgaaaaggtctgagaatggctttctgtcaggggcctaaggaaactgtacattttctcaccgtgaaaccttgatcatgccagatataatcagactgtttatctggcaatgttaattttctgagtttacagtrtaacaattcgccaagattattggaacagaatcagaagaagttatatttgttaatcggccaattttctttttttgcatttaaaaattcagtgcaaaatg

SEQ ID NO: 485318 - DNA, 411 bp, Homo sapiens
cttagttcactgcacagccaactcagaagcccttccggagcaaatctggcccagaaggctgcacatatttttgcctggatagacttcttcatgttcaacaggagcctctgcagcgatgatggggtcctccatattgctcacacaaagctacagtatgggacaggaaatctggctctttaaccctctggctgctgcacatgactatttggctagcaaagcagaaaaatgtcgacagcctaaggtttaaatgattagtaacaggtttttgagtgattttcccagaatgtgctagyataaatagaggactgtgaaactgtggtttgtggtattttttttcttccttttgatattgtggcttgtttgtttccatttcttttcatgacacattcctttttatgactgtacacccac

SEQ ID NO: 485319 - DNA, 551 bp, Homo sapiens
aggtttacctcctgcttctgtgcagattattttatcattagcaagccaaataagccattctcttttgttagataaaatgggattgataataataattaatgataaaaataataacaaaaacaactgctaccaaaacaatggtctgcctgccttaaaagcattagcttctcaaattctagagcataccacaggttgttctttttatggtacatgcttataaaacaatcatcttgattcttaaaaatgaaaccagtctcatccatatyattgtcactgatacaagtgcattttatttgcacttatgtagcatgaaatagtgcatgaaagccttttatggtgataaaataacttcttaactagggtgaaaaaggaaaactgttaacttgggttcacaggactaatgctcacatataattgtatctataaatgtcctagatgctatgatccctcccatatgtgtaatcctcctgttgatgtcaatccaaaatactatgctcatgttacggtatctcctctacatccttattgtaaattcacattctgagttagag

SEQ ID NO: 485320 - DNA, 479 bp, Homo sapiens
cctaatcacttcgtctccaacttcataatcacatgccacactatatccattagcctatgggccatgatttacaacatactgacatatatgcttccagaagttaaaattctataatatagagctgggcccagcagctcacacctataatcccagcactttgggaggccaaggtgggcggatcatgaggtcaagagatagaaaccatgctggccaacatggtgaaactccatctctactaaaaatacaaaaattagctgggcatggtggcacgcacctgtcgtcccagctactcaggaggctgaggcaggagaawcgcttgaacctgggaggcagaggttgcagtgagccaagatcatgccactgcaccccggcctggagacagagcgagactctgtcaaaaaaaaaaaaaaaaaaagctttaaaataagtaatataaagaaggtatcatataaaaaatgttaaaatattgagttagaagt

SEQ ID NO: 485321 - DNA, 575 bp, Homo sapiens
gataaggaaggcagggtagggacaataatttacccaaaaaagagagtgtagatttatagagtgatattttaatgcagggatttggggaaatgtagtattcttacaacaaaactagtgcagatatattacaaggtagaatgtaaatatgagatacaattttaatataaaacaggaaactttatggmaattttgggtttaccattatccttccatgttgtctcctgggaccacaaaagctggctacctccatcagtcattaggaatgcttcatggaaaaatttgaagaactactatcatacccatcaaatataaattcctgatttttcaggtcttccatttcttgtgacctccctcaccttaccagctctactattaattcctcacagatttgggaagcattaatgtttcattgtcctataaaagtatcatctcctttttacccactcgtattctcttttttttggtggggggaatgcttgctttcttcccagttctactccatttattgcccagtttgatacgcatgtcttccatgaacatttgtctatcaaattcattctttgattcagcaaaca

SEQ ID NO: 485322 - DNA, 656 bp, Homo sapiens
aagcaatccccattttacttaagctggaagtatggtggaaggtggtaaatgagcatatgcagatcaaagtgaagaccagcaatcgtgaaacaaacctatggcccagtcctcctctgtttcctgtactgcatgattttcttaaccctcatattggcaggttagtgccactagtccaarattgatttggaaaggattttggtagccctaataattgattatgcattctgcaaatatggatttttgtggttatattatttagaaaagatagaagcaaatagacactcaagcaaatagaaggtgtagaaattgttgcatccctgaaatgtcactttcacagaatgttcaattctcgcaggaaggcagggtcccttgtgtttgttttccccaggtgcctggtgatggtgtgaccaaggcttgcctcagtattgggaaaaggatacagtgagtatggctatttcgaggaattggttcctgctgcataagaaatgctaggaggaagtttacctgttacattttctcctttagtcacgctaagctctttcctggcactcaccagagcggctgtttatttatacctctgttctgtttgcatttggctttgcttcttatggcctttcttttaacaaacagacaaaaaaagagttgagcaactgctc

SEQ ID NO: 485323 - DNA, 656 bp, Homo sapiens
aagcaatccccattttacttaagctggaagtatggtggaaggtggtaaatgagcatatgcagatcaaagtgaagaccagcaatcgtgaaacaaacctatggcccagtcctcctctgtttcctgtactgcatgattttcttaaccctcatattggcaggttagtgccactagtccaaaattgatttggaaaggattttggtagccctaataattgattatgcattctgcaaatatggatttttgtggttatattatttagaaaagatagaagcaaatagacactcaagcaaatagaaggtgtagaaattgttgcatccctgaaatgtcactttcacagaatgttcaattctcgcaggaaggcagggtcccttgtgtttgttttccccaggtgcctggtgatggtgtgaccaaggcttgcctcagtattgggaaaaggatacagtgagyatggctatttcgaggaattggttcctgctgcataagaaatgctaggaggaagtttacctgttacattttctcctttagtcacgctaagctctttcctggcactcaccagagcggctgtttatttatacctctgttctgtttgcatttggctttgcttcttatggcctttcttttaacaaacagacaaaaaaagagttgagcaactgctc

SEQ ID NO: 485324 - DNA, 528 bp, Homo sapiens
caggctttagaaaataagggtatgttttagggagttcacttttatgtgtatttataggagatttttaaaggagtcaaaaaaccaagttctcatagtataaaatttcccacaccaggcatacatgcaacagcatattgttgactgagcattaactttataatatttcactttttaacatcttcttcttttttgctgtctgcatctgacttgaatgaaagttgagggcgctgtcacaaaagaattaacaggggccatttttttttttaccagaaatttgctcaaagtagayctattaatgatccaggaactgttgcataatggaattaatagttacaagccaagtcgtaaccgttgtgctacaattctagatgcttagatgtatttttttttttttttttttgagacggagtttcactcttgttgcccaggctggagtgcagtggcgtgatcttggctcactgcaacctctgcctcctgggttcaagtgattctcctgcctcagtctcccaagtagctgggattacaggt

SEQ ID NO: 485325 - DNA, 637 bp, Homo sapiens
agtctctccttctgtagtgtagactgtgctttgtttagcatattgtgcttgaagggagaaaagaattcaacatgcagtatctctggattaatctcattttattaacctctgaacataagrttttatagggcatgagattgaaatgctgtaaatcttgtaaccagaatctgaggatttcttcttaaaaagaaaaaagctagataaacctgtctgttgattgaggtacagtgttgttttcatggactgtagatccattactaatagtagaactttgccaatttgacatccctgcactacaaataaaattgcaacaacaattctctgtaaggaaaatatttgtgaaccttagctgagccatggtaagttgatgctcagtatactgaaattcacttttatgaataattcagttcatgaaatttcagtgtgcaattctatcccatttgataatcactcaataaaatgataataaaaaagagcacctgctatgcaggaaaaaatgtggcagttgaatcatgctgtaaacctcacacttcggtctctgctaatagaggaacgtagaagtgcaggataagcagtttctctcttctgtctaactaggggcacgcatgggcagagtgacactcaaaggaggggctgg

SEQ ID NO: 485326 - DNA, 623 bp, Homo sapiens
ctggctagaaacatcttcctttgatgtctccctgagcctatttttaagcttttcagagacagaactttctttgcagaaattgctgcgtgctttaaaaaaatggatttgctctctctgatcacattcttgtaatcaggagttttctgcctttcaaatcaatgcatctcattttagttccagactccttagtgtgggcgtgagtgctaaccatcagtgtttatggatatgtcttgcttattttcacggatttttatttgtgataaacgtcaagctatcccaagttgggagatccctctatgatggtagttaattaatgtgcttctgatggggtgatgttagaggccctgggctggggtgattcttcgttgcttttagaagatgtctcttgagtcaacaaacaattcctattatcaggattttattttacattaaatgacatttgattcacttttctcattaaatctttctataggaagacaacatgattttgaagttaccattttyatgatatcttagcacaagagaaaagcaaagaggacctaaatgcagggttaaaggagaatttttatgtttgctggtaaacctaactctactttttactttctctttttaatgaaaactaa

SEQ ID NO: 485327 - DNA, 517 bp, Homo sapiens
tttatatgtactaactcacccgcttcaatgactttatgaggtaagtattttatattcttctattttctgatgaagaaactgaggtaaagcgagtaaaagttgtgagtctaagctttcaacaactgttaaacagcagatcaagaagccaaacccagagagtcttatcagcagccgtgttctttactactacgcaagtgcagctcttctttctcacgctaaacatgaaaagtaaaaaatgagagatgataaatagtacagcttacaaagccactcatttgtagtgtgttagagaaaacacactgtaaaattgtaaaattaaaaaaaaattaagtaagttagtctaaacttaatgcatttttttcttagatatatgcactcaaaaagaacaaacaaggtagaaagagccttgtggattttgcagaaatckttgagaattctaggaagaagaactagcaaatgctggggccctgcaaagggaggagctcagtagtttgaaggagcagaaggaagtcagcac

SEQ ID NO: 485328 - DNA, 578 bp, Homo sapiens
aaatacattgtttaaataaaactggtgcatacagaaatatgaaaatcagcaccatataagaagaatccataatattcctaaaaatattatggacgtgtagttaaagtgactttacccaacaaaatgatctgtgtctggcaaaagatgttcactcaccattggtcataatttgcaacatttgtcttatatttgcaaatycccccttcatatatatatatacatacactatagtgaatggcagcattatatcacaatatcgagagagacagagagagaacatagtacatagtatattgtatacagatatagggtatgtacatagtgtattatatatactatgttatatttatataatatattggctggaaaattggaaggcaataacatatatcacaagtcactccaaaatacttataaatgtgtttttgaagaaaacaggaaaaatgtgtttcaaagaaaaaaggatcttattttaacttaatcacaaattactaaattcagaaaatttaaaactcataaatcattaacgtatgtcaatattcaaatatcaccaattgtctaataatgtccccttccaa

SEQ ID NO: 485329 - DNA, 446 bp, Homo sapiens
tttctgtcatcaggaattcttcctgtcctggaacactgggtctgagaatacagaagtagtagcaggaatggcccctgctaatctgagacctaaaggaatgaccaatcataagtgaacattaggcctaggtcaaaagcatgggcttctgttaccatgactgatatagctactgctgttgccagacgtccaacctaccaagaatagactacaaccaagattytgatatcccttgataacaccaacagctatttgatgacagattgactacattggatcccttattccctggaaatagttgcaaaatttttgacagaaatacacacatattctgagtatgtgtttgcctttttggtcacaaaaacacaaccgatactgttatgcaaggacttacattgttttgacccacttgcaaaggatcacacacaccgtcatgttaaatgcaggaa

SEQ ID NO: 485330 - DNA, 617 bp, Homo sapiens
cactccatctacttaaattcttaatggacttcattattttctacattcctatttgagtcacactttttcccttactataatttgtttttaactagtataaatcctggcctctatggtgtagatcaaattgaatgtctaacgtaaactttttctgacaatcacaggagaaatgatctttccttccttggactgcatacaaagaaggaaatattttgtaaataggaaggaagaaagtgtttttgcatccaagaaagaaagaaagtatttatagttgcaaaakgtattgcagtgttttttagttatttaattcgcttaaagggtaaattgtgttaggcatcatgctagtaatgcaggatttttcttggcccctttgtcagacttgcaacagaggtgccccatttacttggcctaccatactcaaccccttgctggagggagcatgtaagcaggcaagtgtgggacctggtcagccactctgggtgccaacataagagcaagcttcatgcagggtccatggcagtgcccagataaggtttcccaccacccagaagccccagagggggtgttacagtgctcctttagttatgccatccatggacagctttgtgttagcaact

SEQ ID NO: 485331 - DNA, 605 bp, Homo sapiens
ttaattccatgtgtcctcagggacagttcctttgattctggaatggcgccagcttttatgtttaatccgtaaaaaacaaggtgttaatctacataaaagtaagaccttgttcatatcacacattccaacaggcttcatttctgattcctgaatgtggattactattttaaaaaagcctaaaaattctggtcatggatattagacactgttattgtactttgtgaagaatttactccttcaggatcaattacacacgggctcatcagtacctttgtaaataaaggaacaagaaccatgtggcatctatggatgtggtgaggtgaagtatagggagaccacagcataacagctcttcccttgttttcagtagtctgtggggtcaagtacctgccttcctcccccatccctcactattttcattctactcctgactgttccctcttcaggtgggagtttctaaatacacttgtctgcaagtgttgstggggatgttgtaacgtgaggtcatccatcatccgtcaccttaaagatgaatgaagaggattttgtgatctgtgttcaagaggcactgctgttgggtgtgtggctgcaaaaacacgtgatct

SEQ ID NO: 485332 - DNA, 668 bp, Homo sapiens
tgctgctgacatcctttcagtcctgaatcaagtttgttcactagattcttaactacaagagacagagaggaaaacaaaacccctttgctcaggccagttggagtcagggttttctaacatttttgcaagcgaacaagtctcaagtgattcgccctactatttaaaaatgcatatgagaggctgggcgcggtggctcacgcctttaatcccagcactttgggaggccgaggagggcgaatcacgaggtcaggagatcaagaccatcctggctaacacggtgaaatcccgtctctactaaaaatayaaaaaaattagccgggcatggtggtgggcgcctgtagtcccagctactccagagggtgaggcaggagaatggtgtggacccaggaggcagagcttgcagtgagtgagccgagatctcgctactgcattccagcctgggtgacagaggagactccgtctcaaaaaaaaaaaaaaaaaaaatgcctatgaatgacggcatgtgtgtaccgagctggggcagaggttagagaaatttaaaaatgcatttgaataacagcatatctctacagagctggggcaaatgttagagaaagcaatctatgtaaaacagccaccaggcccgtacacagtaggtgctcagtaaaggctgtctccctgtcctgtcc

SEQ ID NO: 485333 - DNA, 536 bp, Homo sapiens
cattattcacaacggccaaaaggtacaaacgacccaagtgttcgttatgggtgaatagatttaagaaaaatacataagtggaatattattgagccttagaaaggaaggaaaatttgacacatgctaccacatggatgaaacttgaggatgttatgctgcacacttaaaatagttaatgttctgtatattttacaataattttaaaacagttccaaatcccctatctctaaaattgggtgaaaaagccttccctgcctctgagagtgatgagggttgaatttgtcacatgtctaacaccctcagaaaatgatccagcccaaagtcagtgataagtgacaccattgaagagtgtgatggtctttcctgtccttctgctggctcatgttcagggatggtcagcccttgggcacagtccttcacctytctgggcctcagtttccccacacagaacagatgtgttgggacaatgcccaaggcccctctccttccctgcagtggtgttccccactggttacatgctggcatcacccttccca

SEQ ID NO: 485334 - DNA, 208 bp, Homo sapiens
atagtattaagaggactggaataaaaatattttagacttttgtatgatgaaagtactttttctaatgcagaaaaacaagtgataacagactggtgataatataatgctactatgaaattatatagcytaatttttctatctcttcaaacattaactctgtggtccttacagtgtaccatgaaggctggtagaatttacccaccacaca

SEQ ID NO: 485335 - DNA, 586 bp, Homo sapiens
aagggtgagtgtccagccctctttgcctgggaaatccaacgccagctttgtgctgaagggctttgcacccaggacaagactcccagtgtaagtacccttccctccccacactggggctggaaaagaggctttctgggggagacaaagaacctttcttatttggcaatgtgggcatcccaagctggtgacagggctcctgggcaattctgacccataagtttttcttttgaaaagtggtggtaataagaggattgggaaggagaaagcatagagagagagagaggaggctgcccttgggaacaatgtgtaggtggagacagatgggaaaaaggatattaagggcaacatcctcagggtatagccctgagtctgagcaccatctctccactcaacaccctgacactcccaggtctcctccatcaaccgagtcctgcgggcattacaggaggaccagggactaccgtgcacacggctcaggtcaccaggtgggtcttggagttgtccccagggctaatcacagccaaatctctagcattttatagttctcaaagccctttctcrttctttcttggatcaccctcacaac

SEQ ID NO: 485336 - DNA, 592 bp, Homo sapiens
ctaaccccaaacagagctgtaacaccaaacagaggttgaaaaccattgcactaggtcattccacccgtaaaaataatayctccaatatatgcatatttatttataaattagatttatgtacaagtctactaatatattatgtgtcttaaaaaacatatactttaaaaaggatgagatgaaattagatattaatacaaatacaagattgaaattttcttcctgtactccaagggaacatcttgcaacctctaaggcatgtgcctcccaaccttgggggctattgctctacactgtgggggttaaacaggaaaaagaccatcacgatttccaaatctgagtctgggtcctgttccctgatgtatcttcttcacatcagccagctctatctatcacaacatacttttttgccttcctggcacttatcacaactggcagtcatcttgctcatctgtgtgttcatttgtccaacatctttctcccccaactagaatacagcttcctgagaggcaggatcttgactgacttgttcattcctaatttctcagcatctagaagaaggtatggcacatagtaggtgcttgttagatacttg

SEQ ID NO: 485337 - DNA, 649 bp, Homo sapiens
tgataataattacacactctaccttacatttcttttaaggctctcagcaggcggtctatgacagcttcccatgcaagttctaaggcaagataagagacaaagctgtggccaggtgccctgactacggaaagaaagagaaaaaaggcccagaaatcttccctggcctgttccagtccagaagaaaggagactgggcctgggcacacagacaaactgtctttagtttaaagaggagaacagactttatcagatttcagggttaatgtggtaaaacactaaacttgcctgtcttccgggaaaatgcacgtagaacaagaggtcactgagatgaggacccctgggaatcctacctcaagaccctctgtttccttcccatccccaaagacatctttctcttattgataaaaccagaaagataagaaggaagctacaacatcaatttgttctgcasattaaatgttacattaatgccaagttttctccttgagatttatcattttcctattaagttgtatcatttatcatgtcctaaaagcaatacaagtgtgtaagaaaatcaggaatggagcaaagaatgagacaaaggtttagtaagtggaggttgttattcattcttggggggatctttttggcctgtttctaccagtaat

SEQ ID NO: 485338 - DNA, 649 bp, Homo sapiens
tgataataattacacactctaccttacatttcttttaaggctctcagcaggcggtctatgacagcttcccatgcaagttctaaggcaagataagagacaaagctgtggccaggtgccctgactacggaaagaaagagaaaaaaggcccagaaatcttccctggcctgttccagtccagaagaaaggagactgggcctgggcacacagacaaactgtctttagtttaaagaggagaacagactttatcagatttcagggttaatgtggtaaaacactaaacttgcctgtcttccgggaaaatgcacgtagaacaagaggtcactgagatgaggacccctgggaatcctacctcaagaccctctgtttccttcccatccccaaagacatctttctcttattgataaaaccagaaagataagaaggaagctacaacatcaatttgttctgcagattaaaygttacattaatgccaagttttctccttgagatttatcattttcctattaagttgtatcatttatcatgtcctaaaagcaatacaagtgtgtaagaaaatcaggaatggagcaaagaatgagacaaaggtttagtaagtggaggttgttattcattcttggggggatctttttggcctgtttctaccagtaat

SEQ ID NO: 485339 - DNA, 511 bp, Homo sapiens
tgttggggtttcctgtgcttctggcagttccttaccacctctgggtctttgcttctctttgtgcctacagaagtgccccttgccctgccccgtctcttgcttattattcaaaattcagcttaggtatcacttcttccaggaggcctcccctgacctccgcaacccctaattgtactattaggaacccttcctctgtgctgccatggcataccaaggatacctctgtaataagcaagattgttcattcgttcacccattcactcattatagcaaggtgcagactctggggccaaacctcaggtttgaatcctggcttcaaagtgggcaagttcttaaccaccgccccccaccctgccttactatctgtaaaatgaggaaaacaatagtccctacctcaaacgttgttgtgaggattaaatgaattatctgtatagcacgtgtataacactgcctggaawgtagtaacacactaatagtttagtaagtatttgatgaatgttggctactactc

SEQ ID NO: 485340 - DNA, 380 bp, Homo sapiens
aaaagtaatcaaataaagattgtgcagggttcccaagagatctgaatggtctgtttcttcactggctgtacaacgctgaaaatggctgaacagttctgtaatacaytgcaatgtctgtgttgagtcctgtagccacaaggcaaatgcatcatcaataacaccatcagattggagaccttcctcctcatcttgatcataaaagtgacacagagctcggatcaataaatttgttgcttcatattccgacataaaaaaaagaagacccttctgtgactgtgcaagaaacttcaaaacatcttttgtggcttgcagcacaccagggtgagcacttgttactggaattgacagaagcaaggtaaccaactccaagaagtgatgac

SEQ ID NO: 485341 - DNA, 595 bp, Homo sapiens
taatttaagaatcaaagatattttccaaattagaaggttactatcatgtgtgaaagtatcatgtatataagaaacacatgcacgagtcacaagttaacaaacaatggctatttcacacatttaaatttttattttataaatttagcatctccttaggagtttgacatttctttaataccaccwtgacacaattaaaccctgtgttcttgggtctaccagcagatacatccttttcttctatctaaagaatcaatcaaaaggtgttgcttactaactcatgagtttctggtgaaattacctagcaggtacataccttcccaacctatcgaaaacaggggcacttggtttgcttacattgttgaagaataagtctaattgaaatgtatggggagatgtctctctgtaaatgaaacaaagttgaaacatcagcctttgtaacaaacacttcctaaattaaaacaaataacatagtaagtacaaagttaagagcaattctagaattagaatatgatgttcctaagatttaaataacaaaaatatagttaactatgatattgaatgtaattttattcacatccaatctcaagtagccaac

SEQ ID NO: 485342 - DNA, 595 bp, Homo sapiens
taatttaagaatcaaagatattttccaaattagaaggttactatcatgtgtgaaagtatcatgtatataagaaacacatgcacgagtcacaagttaacaaacaatggctatttcacacatttaaatttttattttataaatttagcatctccttaggagtttgacatttctttaataccaccatgacacaattaaaccctgtgttcttgggtctaccagcagatacatccttttcttctatctaaagaatcaatcaaaaggtgttgcttactaactcatgagtttctggtgaaattaccyagcaggtacataccttcccaacctatcgaaaacaggggcacttggtttgcttacattgttgaagaataagtctaattgaaatgtatggggagatgtctctctgtaaatgaaacaaagttgaaacatcagcctttgtaacaaacacttcctaaattaaaacaaataacatagtaagtacaaagttaagagcaattctagaattagaatatgatgttcctaagatttaaataacaaaaatatagttaactatgatattgaatgtaattttattcacatccaatctcaagtagccaac

SEQ ID NO: 485343 - DNA, 595 bp, Homo sapiens
taatttaagaatcaaagatattttccaaattagaaggttactatcatgtgtgaaagtatcatgtatataagaaacacatgcacgagtcacaagttaacaaacaatggctatttcacacatttaaatttttattttataaatttagcatctccttaggagtttgacatttctttaataccaccatgacacaattaaaccctgtgttcttgggtctaccagcagatacatccttttcttctatctaaagaatcaatcaaaaggtgttgcttactaactcatgagtttctggtgaaattacctagcaggtacataccttcccaacctatcgaaaacaggggcacttggtttgcttacattgttgaagaataagtctaattgaaatgtatggggagatgtctctctgtaaatgaaacaaagttgaaacatcagcctttgtaacaaacacttcctaaattaaaacaaataacatagtaagtacaaagttaagagcaattctagaattagaatatgatgttcctaagatttaaataacaaaaatatagttaactatgatattgwatgtaattttattcacatccaatctcaagtagccaac

SEQ ID NO: 485344 - DNA, 624 bp, Homo sapiens
catcatagctagagggcaaaatagcaaaacaggggaggaaagcagagaagagtagctaagaacaaccaacagaattacaaaaacaagattttcatccacagccagaggacaattcccaatctgtatctccatctaggacctctctcctgagccccaggctactatatccaactgcccactcagcctctccatttcaatgtcccttgtgcaccaaactcaacaaatccaaactgaattctcctacattagtgatggcatcaccatccacatattgcccaagacattattatcctggacttctcatcctctctcttctatatcatctatctattcaaacactaagtcctattgattaaagctctcctccattcyggctgtcactcctttagttccatatactacatcactccaatatgaattacagcaataggatcctaattgattttgtgcttcttttttaatttttgttttttaaatttttatttcaatagtttttgggatacaagtggttgtttacatggataagttctttaacggtgatttctgagattttagtgtacctgtctcccaagcagtgtgcactgtacccaatatgtagtcttttatccctcacccccgtcccaa

SEQ ID NO: 485345 - DNA, 538 bp, Homo sapiens
ggtgggcgcctgtaatcccagctactcgggaggctgaggcaggagaatcgtttgtacccaggaggtggaggttgcagtgagccaagatcacgccagtgcgctccaggctgggtgacagaacgagactctgtctcaacaaaaaaaaaaaaaaaagaaagaaatttaggataagaggagcgatttaaagttgcacagctaattagtagagcatagaactggttctcaaaaccagactttttggtcacaaagaacttctccacaacatcatgtcccatcacagatttacctggtacatttcaccttcccaaataaaaataactctttakagaaattccattgtgatttctaaaacagatgctatcatcaaattcttcaggttgaaactctctgggcacattttgtcctgcataattttttgttttgctcacaaaatgtttttaatttttaaattgaattaattgcatatttgaaaactgattacacaataatccagatttttggcttctccctaaaagtcagaagcacaaccattaaaagg

SEQ ID NO: 485346 - DNA, 401 bp, Homo sapiens
gttttctgagacttgttcaccatttcagaaaatcacatcagcgaaacaatgcccctcattataattgagtcaccaatataacataccagtgctatttggcacatatcgctgctgcatacagacagatagtaagggaaacctaagactcttatgacttagaaataatattattaaattattggaaatatacaagatgctgggatttaattgaattttattaataaagatttatttttatattttatattcttgccattacatgtattttaaagtttttaatgaataaygatgagaaatctagattatataagttatataaggaaattatttattttgagggttgccttttttcccagtgttgacacaggttctgtctccgtcacaatgttcctatggtttct

SEQ ID NO: 485347 - DNA, 634 bp, Homo sapiens
tgtattagttcccagtcatcctccctgtttcctgtttccctttttcaacttgtagccctttcatctgagtttgctctmtccttatgggatttctttcctgttttaatggggtcacatttatttttacatgctgttgggtatgcccattgtttttgtcttcattttttcctggtttctttcacattcacagggcagctcttccttcaatgcttcagattctttcccttcctcttactctgcagtacttttttcagagagctttccttttccccaggttaaagcacaaccaacccacgctcagtttctgccaagcagaggtacagatcacccttgctagtagaatcccttcccaaaatgatgtgcaagatctaagcaattcccggtccttatttagggtggttctactagaacaaagggggaacttcctgtattccaaatagttaagttccttaaaacattgaacaggtggaatttcaaaaattccaccttttggcctcatactacctacctacctaggctctacctacctgggccctacctacctatgtcctacctattgtcacggctcaggatatgctaccccaaactacggccacttggaggccactgtgacctccccccgcctttctgtggg

SEQ ID NO: 485348 - DNA, 634 bp, Homo sapiens
tgtattagttcccagtcatcctccctgtttcctgtttccctttttcaacttgtagccctttcatctgagtttgctctatccttatgggatttctttcctgttttaatggggtcacatttatttttacatgctgttgggtatgcccattgtttttgtcttcattttttcctggtttctttcacattcacagggcagctcttccttcaatgcttcagattctttcccttcctcttactctgcagtactttttkcagagagctttccttttccccaggttaaagcacaaccaacccacgctcagtttctgccaagcagaggtacagatcacccttgctagtagaatcccttcccaaaatgatgtgcaagatctaagcaattcccggtccttatttagggtggttctactagaacaaagggggaacttcctgtattccaaatagttaagttccttaaaacattgaacaggtggaatttcaaaaattccaccttttggcctcatactacctacctacctaggctctacctacctgggccctacctacctatgtcctacctattgtcacggctcaggatatgctaccccaaactacggccacttggaggccactgtgacctccccccgcctttctgtggg

SEQ ID NO: 485349 - DNA, 634 bp, Homo sapiens
tgtattagttcccagtcatcctccctgtttcctgtttccctttttcaacttgtagccctttcatctgagtttgctctatccttatgggatttctttcctgttttaatggggtcacatttatttttacatgctgttgggtatgcccattgtttttgtcttcattttttcctggtttctttcacattcacagggcagctcttccttcaatgcttcagattctttcccttcctcttactctgcagtacttttttcagagagctttccttttccccaggttaaagcacaaccaacccacgctcagtttctgccaagcagaggtacagatcacccttgctagtagaatcccttcccaaaatgatgtgcaagatctaagcaattcccggtccttatttagggtggttctactagaacaaagggggaacttcctgtattccaaatagttaagttccttaaaacaytgaacaggtggaatttcaaaaattccaccttttggcctcatactacctacctacctaggctctacctacctgggccctacctacctatgtcctacctattgtcacggctcaggatatgctaccccaaactacggccacttggaggccactgtgacctccccccgcctttctgtggg

SEQ ID NO: 485350 - DNA, 563 bp, Homo sapiens
gtctccatagtggcttccctgtttccagccttgcacctatctaatagtaagcaaggcacttcaaatgtatctcagttatgtggttttaaaaaaaacaaattatattttaatttttaaaattttttattagagtataacatacatacaaaaaagtacacagatcataagagtacaactgagttacaataaatataataaaaactgtgtaatcaccactaattgcaaaaaactgaacattactagcactccacaagatccccttgtgacctttacaaattactacctctttctttctccccaaaggtaaccaccattctgatttctaaccccacagggtagttttgcctgtttttgaactttatataagtggaatcaaagagtayaaaatcttttgtgtttgatttctttttttttttttttaattagagacagggtcttgctatgttgcccagactagtcttgaactcctgagctcaaatgattctcctgccttggccttccacagtactgggattacaggcgtgagctgccacacctggccttgtgtttgatttctggtatag

SEQ ID NO: 485351 - DNA, 553 bp, Homo sapiens
gctggaaggactgagcttttgctatagggagaaatagccagtttccttgtattctagttattgtaagctctcattctttctctgttccatgagagtggaagaaaagtgacttaaccattactttcccctcttacctctttatagggctgatagccaggacttgaatattagctttggtaatatgccaatgcttgttctgtcacaaaagtccatggcttactttcaacattaaagtggttgtttgacattgagaatttaactgaccaactgtaggactaattctcagcattatagcaaaggtttctgaagtgttttggaaataatgggtagaagtaaagatgtagttgatactgcatattacttcttgttcagcttctgagcctaattccttctgtccccacttatttaacactgacaatgtgcctaggcaatggagatacataatatatgaaaatccctgcctttttgaagccaacattctagagggagagactaacaagacaaattaacttctatraggaggccatgggtactatggagggcaaaacaggga

SEQ ID NO: 485352 - DNA, 511 bp, Homo sapiens
cttctgggtggtgcagatgtgagaggagccgatgggtcccatgatcmcatgcccaccacgacacctcctttaccaaaaagtgcgcttcttgatctgatgttatgttcaggattcaatatctggaccaaatactctataaactttcagatacttgagctaaccaaggcatatgcccaccagtgacaataggtgtgagctgaggaaggggccagtgcaacagtgatggatcacacgtggttctgggataaatattttcgtactctgaagttctctattttctgaaattctttttgttatttttccactgaaacttatattcctatgtcatattccatcagaatataggtctcagctagtggtcatgggaaaagccatctatcaaagtggtatgtactcacaaattaatagctctttctggaggctcctggaaatggtccccttaaatcaaggtgatccttatacattatatgtatcaaaacatcactatgtatcccataaatacatataatta

SEQ ID NO: 485353 - DNA, 584 bp, Homo sapiens
aattaggcagttccaaattgagatcgcattagatggttttatttgctagcactttcaattcttgcatttttagcataattataatacatctgcacggccttcagtagttattctcctcatttctcacctttgtatatattctgctactagtgctgaagaatatataaattatgctaggtatagagtttgaaaggcctaaattttaatcacagatctataatgtacttgctaagtaaccctgagcaagtccttcaaggtttcttggcctgtttcctcacctttaaattgcgacaatatctgtgcttcagaattcttgcaaatattagatattatacatgcaatactgctggcacgtaataggggtctgaaaacaatggaaactgattttcttctaaacccttagtctttccccttctccctgtcctttcacccagcatctcmccctagaaatgtttctgtttgtttatttagaacagtcagtaggcatcaatggcattttggggccatgacattggggactttctcattggttggcaagtccctgactttgtcctcattcctcttcttcaactcagtattctgtg

SEQ ID NO: 485354 - DNA, 284 bp, Homo sapiens
caaatatgtttcctgccccctctgagtttaattagaaactttaaaaagtaaacttctcaaacttgrcaggttccaacactgacttaaagctaattgcagagtcaagataggagaaaagcaatctttgttgatacgtttatgtgtgcatgcctacccatacatacatacaaaattaatacataatatataaacaaaagtttcttatgtcatacatttgtgtcacaagtttgaagcaacaacttctatgtttattaaaaccattttctagttctttcttagaaact

SEQ ID NO: 485355 - DNA, 605 bp, Homo sapiens
acctgattagaaaaaactgctccctgattgaagctgtttatcttggtggacaacagcagttccaaagagaatcagcttggtatagaatattatttcaagctctttcaagaataggttgtgttcacattctattccccctttccraaggcacaagtatgtctctaccacttctaatcaatggagatgctcttaatagccaacaaataactgtttgagaagaagagaagattcagaaatccagtgcaattttcctgatgctcacatttttgatgcatgagtgaaataccaaagaacaaggcaaggtgagattcttactcttcctggtatgctttcatttttccaggtacttctgaagccactgtactctggggtaagacttctgctaacagcagagaaacaaacagccttactacccattccagactttacctgaagctcccaagggaggacacctagcaccaactccacctgcaaaagggagaccaagtctcttctctcctacttcaagctgagccctacatttacacttcctcaactaagtaactcacataaggataacagaaaacaccaacctcctttgaaagggattgtggaaagaaatgaca

SEQ ID NO: 485356 - DNA, 465 bp, Homo sapiens
ggtcctaactgggaaggctgaatcctgctccacattgtctcctgtcctccagcagtctagcctggacctgcccccgtggtagtgagcatgttcacatgttgttcctttctctgctatcttaggtttatttagctctgctatcttaggtttatgaataaaattagatattatttatatatatacttacaaggwtataatgttcctcctgaagttatctaactaatgtgctgccccttaaactgagaggcagcttagtatcatgcttaagagcacaaagtccagagcacatttccctgaggttcatattctgtctccaccacttacaacctacatgatcttgagcaagctacttaacccctctatgcctgagttctgtccttgtctgtaatgagtaaaagagttaatatatgtaaaacatttggaagagtgctcagcacgtattaaatatcatgtaagtgttagcta

SEQ ID NO: 485357 - DNA, 669 bp, Homo sapiens
agaaacatttacatatgatccctctcataattacacattgcagtgctttggcgtaaatggaaaaaaaaaaaaagtaaaattactgagcacatagagctagtgcccttaatctagctgctactcccttccaatggttaccagttgatagtcctcgttagggaggcagatcatctcacaggagtcactttttgcatgagaaccagccagtggaagctcayacatttctcctcaggaggaaaactgaaggaaaaagaggacacaggtgtggtgacagaatgacacacgtcatgctagttgggaattttcttaccctgcctccacttccatcaccttttcctataaggtcttcagggatgttcttcagtgcctcacgctggattttgcagagtctcagaacatgaaggaggtttggaggcagctgctgctctgaaagacagagaaatcgggcatgcacaacctgggcttggtaatttaaaccaaactcaagcttttttgcagatccttaggtcgaatgctgcctctacttaaagtttgattttccatattattttatatgtgtatatgaaaagagaccaaccttattatattgactttcaatatcacctaaaagcctattgaactttaaaataccatataaacaagtaaccaagaacatatttataatgttgt

SEQ ID NO: 485358 - DNA, 663 bp, Homo sapiens
agggttgagtcaaatccacccattttccactaggtggcagaccttgttaaaaagttacggaaaaggaaagaaagacaaagaaaataatgagtcttctgaagctgaccaatagatgtctctttgcaaccacatatccctgagctgtcgcttaaaatacacacaaattcaacactccctagtctttctttttcattttacagataatatcatcaacactttccacaaggtacacacagaacactgaagagatgaatatctcttacttttcatgatgcacttaaccatattctatccacccaaagggaaatgagatcatacaaacataactaggaataagattctgaacacaagtgacttggcagaaagcagatttcattaaaatgctgttcccaagttaagggttttctgtttggagtgatcttaaatatttactgatcatatgtgatggtacttattgagctattggcattagcactaactccagacagacgcagatgcctagtggctattggcctgctgaacatgacactgggaacacgcaggaaatwatggaaactcctaaacagcagagggacatcctgacaccatttttggctattattttcccaacattcagacatgtgagtgctcacacaaaggtgtgttcatgctcatatttggccc

SEQ ID NO: 485359 - DNA, 562 bp, Homo sapiens
gggtctttggccataagaagtaaagatttgaagacagaaggaagaaactcaggagtaagcttctagcaccccttcagcttctacacccttctgccctctctccattgcctgcaccccaccccagccactcaactcctgcttgtttttcctttggccatrggaaggtttaccagtagaatccttgctaggttgatgtgggccatacattcctttaataaaccattgtgtacataagaggttgctgtgttccagttcagtaatggtgaatgtggaaaagtgaaataagaccaagaaatacacccaagtgcttcttcgtctccttcatctgagtctctgcctcctccaccccagcaacagcactggttcaaggagaggagagatgcaggtgacatgcctgccaacttctgagcaaggttgggcgagtgggtgctatttagttgtaagtgcttctcagcttatgagggggatgacagtcacagcaggtatggtggagctgacctggaccctggacactcttctcccccactgccactgacaacatgtgtggccttgtgtgactctc

SEQ ID NO: 485360 - DNA, 611 bp, Homo sapiens
aaactccaggtggtgggcagggctggcacaggtgtggacaatgtggatctggaggccgcaacaaggaagggcatcttggttatgaagtaagtcatggaggctgcgggcggtttgggggtaggggggtgagtgcggagactgaccacacctagggagaaaaaactcacttgagagaaagctgagtccattggaagggcttccaggaggatgcctggtctagggcctgcatggtcaacacacacagcatagtggtttcaaggtttttggaaggcagctatgctcaccactatatcaccaatgccatcagggtgttacacagtttttgaaattgagagtccctgcataatctcaaaatgtttcacgagcccaccccatgcgcagttgcttgcacctctgtgacctggttcaggaatcggaaggtcagtgagttcatctgcatttcstgctcccacccagccccctctgcctatattaatgctgtttgtggcaggtttttgtcagctctactttactgtgcttgtacagaggcacaacctttgctagcagactaatgactagaatccttgccctccccacttccctgccaccttgctggaactaagacactagtt

SEQ ID NO: 485361 - DNA, 611 bp, Homo sapiens
aaactccaggtggtgggcagggctggcacaggtgtggacaatgtggatctggaggccgcaacaaggaagggcatcttggttatgaagtaagtcatggaggctgcgggcggtttgggggtaggggggtgagtgcggagactgaccacacctagggagaaaaaactcacttgagagaaagctgagtccattggaagggcttccaggaggatgcctggtctagggcctgcatggtcaacacacacagcatagtggtttcaaggtttttggaaggcagctatgctcaccactatatcaccaatgccatcagggtgttacacagtttttgaaattgagagtccctgcataatctcaaaatgtttcacgagcccaccccatgcgcagttgcttgcacctctgtgacctggttcaggaatcggaaggtcagtgagttcatctgcatttcgtgctcccacccagccccctctgcctmtattaatgctgtttgtggcaggtttttgtcagctctactttactgtgcttgtacagaggcacaacctttgctagcagactaatgactagaatccttgccctccccacttccctgccaccttgctggaactaagacactagtt

SEQ ID NO: 485362 - DNA, 135 bp, Homo sapiens
tgtctgccttccccatcgcagccttgcaatttattgccattaccattaggtagcagtgacattccagagcttttcctgaaagggactcctkaatataagctctggcagagcgagggggtgggggagggaggggga

SEQ ID NO: 485363 - DNA, 640 bp, Homo sapiens
ttgccctctcccttctggtcctgaattactgagcacattatccaggctggagccctacatcctaccaatgggtgatttggccaagagaggagggtggacgtggtgcagccaggaggtgtaacagtcaccttgccttctccacacaggtcaccacctcccacagccctgctgcaccaggggagcaaggcttcggggaatgcctcctggccgtggccctggcaggcgccccttaccaggctgtgggcttggtccaaggcactacrcctgtactgcaggggctcaatggagctgtcttcaggccagaagtgcctctccgcagggacctgcccctgctcctattccggactcagacctctgaccctgcaatgctgcctaccatgattggtgaggagggccctgtagggctggctggtgtccttgaggctggggtggggtctgccctggaattgaactctacccaccttcctttagcccctcttcatgtcccagggtgtctctggatctgcaccatacagagggtctgatgccagttttcagaaccttcagggagtggatactcagttcaaagagggaaagtgccttatccagggtcacagagcagcatggcaggggtggggccatagcctctattcctgcccag

SEQ ID NO: 485364 - DNA, 538 bp, Homo sapiens
tggaaggacctgggattgttcctgttctgctggaggattgccatttgtcccccacaggggtgctggtggtctagacttaaggcatgaagaagcctccttcttgctcacacctcaccagcctctaggctccccaagaagagaactcacccgaaagcctccagccccttatataagctggtttgtgtgtcactgctggctgacaggaagtcattgaacatcaggcgagccagagacttctggaccatcttgcaaaagggtgtatgaaagatcatgtactgtaaatcgtcaagggtgaagggtcgatcrctgccagctggaagaggaagcgtgaaggcaaggatggggcatgaggggcgagccatttagatatcctccctgagatttaactgtgccgagtttctccaggcctcccagggaactacttcccacctcctgcaaacacatatgagctttatttattcattttacatgcacttactaagcaatctctacgaataaggaaagaagggaaagaaacaaagcctttgtatctactatt

SEQ ID NO: 485365 - DNA, 639 bp, Homo sapiens
gtgcaaacagaggtggcacagtgctgtttatgttcattgtggggaatgctaccagactgtcccactatgacaggacaactacttctctcccacccaaggaaaattgggactagcagtcacagaaattaaatgacgaatgaagaaagaccaacatttaatcttcaaagtaattatgagactaaagaagttgctgggtaaggcagggcagggagtgcattcaaataccggggagatttgcatttaacattaagagtggctattcagactaaagttttattctctggcagttttcaagagtttcatgttttgttttgtttttcttactacaacaagaaaggcatggatttcttgatttctcttctcacctacatagwatcatcagcctagaaaaccctttccctaaaggtccagaattaggctgggaaacaaatgaaggctcttaagaaagttagtaaagattacatgccatacaggaagtgttgaccaggaatacttaccacaccacctattcaatcaataaacacaagcacatattaggaagtagagaaacagaaacaaaagatgtcctgtggcaactgccccccagactagtgtaggctgtggctgcagtctggttaaattcaactgatgcttattgtt

SEQ ID NO: 485366 - DNA, 650 bp, Homo sapiens
atgctatccatgctatctagaatacataagggttttaatccaaacatctaattttacaaatgaagaaactgaagaggttaagtgatttacccaaattcacgcatttcagtttagtacggtgctggagacttgacctagtgtcacacactggcaagccattgctctctccaataacaccccaygccctcatatattatgaaccatggatttaagagagttgtttgacaagaagtcaaggagtcttgtaagacaggattctccttgcaatatttctttaataatctcatattctccttcactagtgaaataatagcctacagatgtccaacatcgtcctctttgcaaaaatgttttcacattcattatttcatttgagctttgagtggccctatgaagtagattctgtagatattaatatccacattttacagatgcgaaaaatgagtttagagagtttcagtgacatgagcatggttacaaagtgaggaccagactaagggcagactcagctgccccaggcctcaattcatggatgcactaaaatattactggaattaatcagagattcagtcctatttaactcaagtttttaccaacactacaacacaagtgatgaaatgtaaattagtttttactcccacttaagaagg

SEQ ID NO: 485367 - DNA, 642 bp, Homo sapiens
aacggagcccacctggcatctatcctgagtttaaaggaagccagcaccatagcagagtacataagtggctatcagagaagccagccgatatggattggcctgcacgacccacagaaggtaacctcagacttggccacaaaggccctcttgggaaagccaggctggcatcctctttttggggaatggcctcccggcctataacaaggacacagcgggtggatcttctccagatgtgcctccagctgacggrgaccaaagtctcaaggtcaggggcccagttctggccctcggtggagggtatgatttaaatgactccattgtatagacctttgtctaattaaggccctcctgaatggcagaacacaaaattaccagctttctagagccttaaaaagtgtgtgtgtgtgtgtgtgtgtgtgtgtgtacgcacacaggcctattatgagacagattaatcaaatctccattggatcttgagttaaagttgaaaactttcagctagcctttttttttagatgctgtaattttttttatgttatccttgatgtttttcactgtaacttcctgttcttttcatcaataccttcttgtaagaaatgacgtgagtggtttttgtaaggaacagctggttgatgaggtcta

SEQ ID NO: 485368 - DNA, 473 bp, Homo sapiens
ctgggctatggcaggtgaatctgctttgctggtgaacagtcttctcaggggctgccaatccaattacttctatgagtgctaaggtttcactagttacaaaaaactctaaagtaaattaaaaatttgtttaaattcataaaatatgacagctctaaagtattatcataattatcctctccaagtccatctctaagacaaaccttcctacttcctcaatgtgagatgaatacctgctgtcaaatacatgttttgtcccttctatagtctggctagatttctcawgaaaagagggaaagaaattgtatccttctcttgaccaagttcaccatatcctcaggatttctttgcagatgaactatttagttaatgcagtttctaaggcccagtgaatagtattgtgaaagagatttttcaaagaaagctgattggacatcttcaatatacaccaatactttccaaacgaacaaacaaaa

SEQ ID NO: 485369 - DNA, 638 bp, Homo sapiens
cttgtgttacacattgaaggtcaggaaaaatgtgtaagaaagaggggaagagcattcaaggtcgggggcgtggagtcctgaaaccctggtgcttagtgcacagtgaggccacctgtctggctggcataaaagggacagtatcaggcaaaaatttaggttgtggatgaagtaaggaagtcatcaaagagcttgggttctatccagaagatgataatttttcaaacaatatttctcagaattctatgagtctacagaggtgcctcaatattctcaaaggctgatattaagaataaataaatgtggtgactttgaccttaaaataaatgtatactagtaaactaacattgttttgattgttcttctatattatggttgtatatatgattttrctggaaaaaaataatgacactgataatgggaaaccatctttttagttatcacaggaaaaacagtatctgttattttatttataatacaattcgtttcaaaattaatttaagattcattgtattttttttcttcttaaggccaattcattgtattttaaaattaatacatgcttattttgacacctggagttcctcgtatctagaatggggaagtttttactaacatcattattaattgtatcaatctgg

SEQ ID NO: 485370 - DNA, 413 bp, Homo sapiens
ccagctggtggtgctggagaaatctggggcttataaagagagaactgggctagtgagatcaggcatcatyatgcctaatggtagtgaaaaccttaaccaagaaaaacacataggaaatagcagtggtccagagctatttccctaggaaatccaaaacctaagaggaaaaagtagaatagaacctctaaagagacatctaaagaatagttcaaaaggacacagtggctcacatctacaatctcagtgcttcgggaggccaaggtgggaggatcgcttaacccaggagttcaaggcagtatagcaagaccctatgtctacaaaacacagtgagactccgtctctacaaaaaataaaattagctgggcatggtggcacctacctgtagtcccagctactcgagaggctgaggtggg

SEQ ID NO: 485371 - DNA, 583 bp, Homo sapiens
tccctgagtcagtttcctacaaggtaaagtgaaaataatataataagtagccaccacaggagattcttgtgatgataaaatgaaacaatgcatagaaatcattggaaaagtgtaagtttggaaataatcgcagtaacacactgcwgttgaaagaacaagtcctggaggtaagctggttctaacctgggctccaccactccttggaatcataaactcagaaaatcacttcgcattttagactcctcatctgtaaaatagtttctgattcaatgtgtttctgagattaaacgagattaagtatttaagtgctattatggttcctgaaacaaaataaacacccaatatatgtcaactagtatttctgttgttatttggattaaagaaaataagtcagattctgtcccttgcagagcatctgaaacataatgtgaataataatgcacagaagaataatattgtggttgaaaatgacttgagctgttagttagagaagtgcttctttgccattttgaagtcatggctccagttgagaatatgatataaattatgggctcgtgcaccttaaagaaagcatacaaagtaa

SEQ ID NO: 485372 - DNA, 581 bp, Homo sapiens
cactgattaccagggctcctttgaatgctttcaaggactgagtaaagtttgtaagaggcatttctgcagtttattttctccaataggggctggtgatacacactggcagttccacccrtttcttttgccaccaatttctgtgaacagtgtcatggagttgctaaatggcctatgtgagaggagcttgtaatcaagaaccatccgtggttgacagatgtggctctgattcaatggagggttaggggaaattgtattaaataccaatgtcagtctgcacatgagttcaacaatgttcttcttttgggtttgagtagctgggagagtgcaaggcactcaatccttctccaacgcttcaggtcactagcctgggtcctgctgagagactctgaaaggcttgtcccagttgttcgtcgggcaggagggctgaaatgttgaatttctaaaattacttaattgattgattgatttgaagttttgtgaacaggaataagagctattatgtaatattttcttacctggcaataaattttggtcatgtaaactaggactgatgtaggggcattttgcacttcaatggaaaa

SEQ ID NO: 485373 - DNA, 581 bp, Homo sapiens
cactgattaccagggctcctttgaatgctttcaaggactgagtaaagtttgtaagaggcatttctgcagtttattttctccaataggggctggtgatacacactggcagttccacccatttcttttgccaccaatttctgtgaacagtgtcatggagttgctaaatggcctatgtgagaggagcttgtaatcaagaaccatccgtggktgacagatgtggctctgattcaatggagggttaggggaaattgtattaaataccaatgtcagtctgcacatgagttcaacaatgttcttcttttgggtttgagtagctgggagagtgcaaggcactcaatccttctccaacgcttcaggtcactagcctgggtcctgctgagagactctgaaaggcttgtcccagttgttcgtcgggcaggagggctgaaatgttgaatttctaaaattacttaattgattgattgatttgaagttttgtgaacaggaataagagctattatgtaatattttcttacctggcaataaattttggtcatgtaaactaggactgatgtaggggcattttgcacttcaatggaaaa

SEQ ID NO: 485374 - DNA, 388 bp, Homo sapiens
tgtggatttaggccagtgaaggaagccaaggggctattcaggaagagtacaattctgtgattatctgataagcaccacctgataaattgtaaggtaagagacataattgagttaytatttcagtttaagaaacagaaaaattaatttctttaattctcagtctatcattctagaacttttaggggtaaactctggaggccataaagacatgcatttgtgtataaaacatttttcctctgggtcagtcacaacacaaacagtggtagttctgtatttgactctttgtccagaaatacatggaatcatctggaagttccatggattatataaattgcatgtttataatagttaataataaagataagaacatatcttatttattgattgt

SEQ ID NO: 485375 - DNA, 618 bp, Homo sapiens
catttttgttgtggtgatattttttttttaaaagacattcccatttctgaagagttagagaaacagaaggtttctcttcaaatagatttatcacccactgtttctgcaaatatctgaggtaggcactccataatatacagagaagaggacagcgaagctaacaattatcaggcgtgtttcatgtgcaaacactgtgttgggctctgggaatgtatatcatttactttctcaacaactctgttagttgggcattattgttttcattttagatgagaaagctgcaacccagagaatcaattgcctctctcagcaagctaattatttaatagttggagaagttaagccaaattgatgcaaaatttaaaagaacaataaaatagayaagttatttacaattcataaaacacatctaaatgatgacttcaatctattttcgcagcagtatgaaatggatattgctattcccattgttacaggacccaacactcacccaaagttaacctttgggtcgggggtttctgtactatattcccttctgtggtcgccagagaaatgttacaggaaaggagtcccgatccagacccccggagagggttcttggatctgacgccagaaaaa

SEQ ID NO: 485376 - DNA, 558 bp, Homo sapiens
catattacatgactcaggccacatagccacatttctctcaaggctcagaataatttcaatttccagtaactttaagtttgaatttttttttttctttgagacagggtctcactgtctcgcccagaccggaatgcagtggccggatcttggctcactgcaacctctgcctcccgagttcaagtgattctcctgtctcagcctctcgagtarctgggattacaggcatgcaccaccatgcatggctaattttttcttttttgtatatttagtagagacagggtttcaccatgttggccagactggtctcaaactgatctcaggtgatccagccgcctcagcctcccaaagtgctggattacaggcatgagccaccacgcccagccagtttgaattaatttcacattagtatctcttcaatagtcttctcttagttttgtttttgttatttcttctagattaaagtcataattagacattatttaaaatgtcctaactataacaatatttatatcttttcaatatttgctctcctcatccatttacatctttccatttatt

SEQ ID NO: 485377 - DNA, 558 bp, Homo sapiens
catattacatgactcaggccacatagccacatttctctcaaggctcagaataatttcaatttccagtaactttaagtttgaatttttttttttctttgagacagggtctcactgtctcgcccagaccggaatgcagtggccggatcttggctcactgcaacctctgcctcccgagttcaagtgattctcctgtctcagcctctcgagtaactgggattacaggcatgcaccaccatgcatggctaattttttcttttttgtatatttagtagagacagggtttcaccatgttggccagactggtctcaaactgatctcaggtgatccagccrcctcagcctcccaaagtgctggattacaggcatgagccaccacgcccagccagtttgaattaatttcacattagtatctcttcaatagtcttctcttagttttgtttttgttatttcttctagattaaagtcataattagacattatttaaaatgtcctaactataacaatatttatatcttttcaatatttgctctcctcatccatttacatctttccatttatt

SEQ ID NO: 485378 - DNA, 606 bp, Homo sapiens
tcccaccaagcctcccagccaggttcctctgaccactctactttgctatgggaactcagaagtgtcccttcttttccaagagggtttactagatgccaggcactgttctcagcatgtaacccttctaaataagtaacttattcaacacacacgtaatggtgtgaggtaaggactrtgattaactttgtgattcaaaattcttaaattcatagatgaagaaactgaggcacaaaatagtggatgcaaatcacagtcagctctcctaaccccaacccagaggttgagttttgaccctcggcctggactgcaggaaaccttcaagcaagctctcaagtgggtgcagcaggaggaaggtcttatgatcttggggaaatttggtccagatacttccaggagcaagcatcctcccatatctgactaaagagcaatactgactcaggcaagaagaaagtgagtggtcagggtaaggaggaaagcgaggctgaggtcatggcagcacctgtgccctgacactgctggaaagacatgtcaccagaaggtacctacaggaagcaatgggatttcattcatgcaatctgatcttacgctctgatagtgtcatgtgga

SEQ ID NO: 485379 - DNA, 606 bp, Homo sapiens
tcccaccaagcctcccagccaggttcctctgaccactctactttgctatgggaactcagaagtgtcccttcttttccaagagggtttactagatgccaggcactgttctcagcatgtaacccttctaaataagtaacttattcaacacacacgtaatggtgtgaggtaaggactgtgattaactttgtgattcaaaattcttaaattcatagatgaagaaactgaggcacaaaatagtggatgcaaatcacagtcagctctcctaaccccaacccagaggttgagttttgaccctcggcctggactgcaggaaaccttcaagcaagctctcaagtgggtgcagcaggaggaaggtcttatgatcttggggaaatttggtccagatacttccrggagcaagcatcctcccatatctgactaaagagcaatactgactcaggcaagaagaaagtgagtggtcagggtaaggaggaaagcgaggctgaggtcatggcagcacctgtgccctgacactgctggaaagacatgtcaccagaaggtacctacaggaagcaatgggatttcattcatgcaatctgatcttacgctctgatagtgtcatgtgga

SEQ ID NO: 485380 - DNA, 504 bp, Homo sapiens
tttcacaatgccatgaaaacagcaagaattttggcaaaatatttacaatttcttcaataatattgcttgtggaatatgaggaatggacrgcaaccacttagtgactgcagagagacaagcaggaatgaggaaaaacaattacttactacgctatttgtgatgaaaaaatctgagtttagcttattataaaaagcctgttgggagccaagcatcgcacatgtcagaggaacatgctgcttcccttcaccatgtctgagatagggtacctacagttgggctgtttgttggatgaagaagtgcttctataacatcagcaggcgtgtgaccagtggcttgtgggagacaagcacttatgggaataaaagggaacctggcacaggccttgggcctctggcatcattagttacaggtctgccaagatgctttgggaaacattttaatttaaatgccaagtctatttcaacgaagctccctggtatgacctgttgggagtccagagtgaga

SEQ ID NO: 485381 - DNA, 504 bp, Homo sapiens
tttcacaatgccatgaaaacagcaagaattttggcaaaatatttacaatttcttcaataatattgcttgtggaatatgaggaatggacagcaaccacttagtgactgcagagagacaagcaggaatgaggaaaaacaattacttactacgctatttgtgatgaaaaaatctgagtttagcttattataaaaagcctgttgggagccaagcatcgcacatgtcagaggaacatgctgcttcccttcaccatgtctgagatakggtacctacagttgggctgtttgttggatgaagaagtgcttctataacatcagcaggcgtgtgaccagtggcttgtgggagacaagcacttatgggaataaaagggaacctggcacaggccttgggcctctggcatcattagttacaggtctgccaagatgctttgggaaacattttaatttaaatgccaagtctatttcaacgaagctccctggtatgacctgttgggagtccagagtgaga

SEQ ID NO: 485382 - DNA, 548 bp, Homo sapiens
ctcattcggctcgctcaagtttggagcaaatgaaaacattgctttctgaaaatcaaggagttatcaggacagggagcagcaaagcaaattgacaggctgcacccacccttcctgtggctgataactggtgggagggcagaacgtgccacagtaaagagagttggcagtggtggtatctgaaattttattggacctacagaaatcttccaagtactgtgaaaatgtctgatggtgttatcaacttatgcagtaatctagtgaaatataccatcttgctactctatgtaagaggcaattgtgaaacwgcatttccctttgtcatctgtttgcgcagtttatgtctgggcaaggacacaatttgaagggtttggagatgaagtgtattaactacctgcagcacacacgtagagataaactaaggaaagtaaagtgtctttttgctgcatacatagcttttagtgacttacgttttcttttactctgtagcttatgtttccatggaagttgctttcaactgtgcatgataatcaatcctattgacagagtta

SEQ ID NO: 485383 - DNA, 548 bp, Homo sapiens
ctcattcggctcgctcaagtttggagcaaatgaaaacattgctttctgaaaatcaaggagttatcaggacagggagcagcaaagcaaattgacaggctgcacccacccttcctgtggctgataactggtgggagggcagaacgtgccacagtaaagagagttggcagtggtggtatctgaaattttattggacctacagaaatcttccaagtactgtgaaaatgtctgatggtgttatcaacttatgcagtaatctagtgaaatataccatcttgctactctatgtaagaggcaattgtgaaactgcatttccctttgtcatctgtttgcrcagtttatgtctgggcaaggacacaatttgaagggtttggagatgaagtgtattaactacctgcagcacacacgtagagataaactaaggaaagtaaagtgtctttttgctgcatacatagcttttagtgacttacgttttcttttactctgtagcttatgtttccatggaagttgctttcaactgtgcatgataatcaatcctattgacagagtta

SEQ ID NO: 485384 - DNA, 548 bp, Homo sapiens
ctcattcggctcgctcaagtttggagcaaatgaaaacattgctttctgaaaatcaaggagttatcaggacagggagcagcaaagcaaattgacaggctgcacccacccttcctgtggctgataactggtgggagggcagaacgtgccacagtaaagagagttggcagtggtggtatctgaaattttattggacctacagaaatcttccaagtactgtgaaaatgtctgatggtgttatcaacttatgcagtaatctagtgaaatataccatcttgctactctatgtaagaggcaattgtgaaactgcatttccctttgtcatctgtttgcgcagtttatgtctgggcaaggacacaatttgaagggtttggagatsaagtgtattaactacctgcagcacacacgtagagataaactaaggaaagtaaagtgtctttttgctgcatacatagcttttagtgacttacgttttcttttactctgtagcttatgtttccatggaagttgctttcaactgtgcatgataatcaatcctattgacagagtta

SEQ ID NO: 485385 - DNA, 400 bp, Homo sapiens
tgactctaattgaaaggaagaggaatacactgttacacagaggatgtgtgtccttaacaaaatgggaccgtgtcctatgtacatccggatgtgaaggacagaaaggggctaagtaccaggaaaaggctgggccagggaaggaagagccttttatagcatagctatctcattctccagttactgccaggcaaccyactgaggaaactatgagtctcccaggggctcgtacgacaaagaacacaggcaaggggaggtggggagataaagaacacataagttgttcctccaccctttgaggtacaggatgacacatggataatgtacgatcacaaaagagagaaggaagccaaagatataagtaaccatacagccttgaataccaaagaggaaaaatcaagga

SEQ ID NO: 485386 - DNA, 481 bp, Homo sapiens
gctggtgcatgaagtgcagagtctgcaaaatatctcgggcactaatcttgacttttacaatagtgatggtattcccaggagcaatttggggaggttcagactcttgcagtcagaggttgcattgtccctaaaccataatttttaatcttgtagctaatctcttagtcctacaaaggcagactggttccagtcaaagggctattatttagtttgtttcagagttaaactataaacaactaaatttctttctaagcttagtttgccctgtgcccaggaatgaacaaggacagcttaaaggttagaagcaagatggagttggttaggtctgatgtctttcactgtcataatttcctcagttacaatttttgcaaaggcagtttcactttgtgctcagaggaccttctttcaaagtcaaaaatggttcttggtgtacaagtagttagactttcagtgacytgagtgatgaaaagactgaaagcta

SEQ ID NO: 485387 - DNA, 557 bp, Homo sapiens
gatgtatggaccaaatatgtttactataggatttttttttcttttcagtagcagccgagatctcaagatggtctaagtatccactaataaagtattggttaagtaaattatggcctatttataaaaatggagtattctgtagtcattgcaaagaasaagaaagattggtctatggtgatgtcaaagctttggaagatgtaaggaaatttatttgtatgaataataaaaatgtgcatataattttctgaaataatatagaaaaacataactggggttaatattggggttaagagagaaaacatgacaacgtgaatatacttaactctactgaatggtacacttaaaaatggtccagatggtaaattttatatgtattttaccacaataaataataaaagataaaggagaagagacatttactgctcatttctcacctttctactgtattttatttatgtatatattacttttgttttcacaaatattcaataaaaataaacaaaatgcataaaacaatgttgtgagtggtcaggctgcattacactaatttatttgca

SEQ ID NO: 485388 - DNA, 557 bp, Homo sapiens
gatgtatggaccaaatatgtttactataggatttttttttcttttcagtagcagccgagatctcaagatggtctaagtatccactaataaagtattggttaagtaaattatggcctatttataaaaatggagtattctgtagtcattgcaaagaagaagaaagattggtctatggtgatgtcaaagctttggaagatgtaaggaaatttatttgtatgaataataaaaatgtgcatataattttctgaaataatatagaaaaacataactggggttaatattggggttaagagagaaaacatgacaacgtgaatatacttaactctactgaatggtacacttaaaaatggtccagatggtaaattttatatgtattttaccacaataaataataaaagataaaggagaagagacatttactgctcatttctcacctttctactgtattttatwtatgtatatattacttttgttttcacaaatattcaataaaaataaacaaaatgcataaaacaatgttgtgagtggtcaggctgcattacactaatttatttgca

SEQ ID NO: 485389 - DNA, 514 bp, Homo sapiens
tattttctcctttttgttgggtgtttatctatgtgatgcgtaagttacgtgtgccacatttcgtttgaaagagatttatcacttgcaatgatctcagatttgtcattttatagggagtttttcaycccaaaccccactcatttagaaagaagaaaagtcagagcccataggtgtgtgctggcagcgtggatgtgggaggatgaagaagggcagatgtccagggtggaccctcatgcaccttcagagctggagggaggtctcagaatccagaaataaacttgggcccagtgtgggcaccgcactaccctagcttctgtgggaagggctggggaaggagatcttactgttaaatgcttattgtaccaaattatatcaaccttagtagatgtggactgtgagatgacttcttcacgatgatctgatggacttttaggttagcagatgaagtaatctgtgtaataggccaaaccctattctttttattcccatccatctgaatacacagctgattgca

SEQ ID NO: 485390 - DNA, 477 bp, Homo sapiens
gcctagagtggtaaagattggacaccataaccgtgtggtacacagcacagaccgtggcagagcaggtgctatcatcatagtccccaccaccactaacctcaggcccatagatttcagtttcccttctccaactcattcttctttgcagaatatarcatagtgattcaaaataagcaatgtgaaattaaatggccctgattcagtcccaaacccagacttattagctgtttgacctgagacaaatgccttcactgctttctttatgcctcggtttcccgatgtataaatatggcagtgaatatcaaatgagatgaagcacatataaggcattcgtatgatggctggactgtagagagggcaggagaaggttacctgaaaagttggagatggagtgtcctcaggtaggtatcctgatgggagggagtcctggagaaagagagggtgaggagtagagtttggtagcgagcctgacaggag

SEQ ID NO: 485391 - DNA, 477 bp, Homo sapiens
gcctagagtggtaaagattggacaccataaccgtgtggtacacagcacagaccgtggcagagcaggtgctatcatcatagtccccaccaccactaacctcaggcccatagatttcagtttcccttctccaactcattcttctttgcagaatataacatagtgattcaaaataagcaatgygaaattaaatggccctgattcagtcccaaacccagacttattagctgtttgacctgagacaaatgccttcactgctttctttatgcctcggtttcccgatgtataaatatggcagtgaatatcaaatgagatgaagcacatataaggcattcgtatgatggctggactgtagagagggcaggagaaggttacctgaaaagttggagatggagtgtcctcaggtaggtatcctgatgggagggagtcctggagaaagagagggtgaggagtagagtttggtagcgagcctgacaggag

SEQ ID NO: 485392 - DNA, 593 bp, Homo sapiens
gctttcaatataattcctgggcaggcactttgtgccccaactgctttctcttctccctcatctctggactctaatttagctgggtatgaagattactccaattcatacaatcaattttcaagrctgctgttcactgaatggtgacagcaatatgggtgccttcaactgccctccattctgttttttgatgagctgataacagaatatgtggaagcttccctaagagataacactctgagacttttgtcaactctgcagccagaatgaatctaaaaatatccctctgcaaaaaatccttcagtggctccccatttctctcaaaggaaaaactgaagtgctcacaacagcttacaacacttctcatggtctacctccttgtacctcagtctcagctactatgagtgactcccctgccttgggaccttctcatgttccctctgcctgaaacacattatcctctgctagccacatggcccactcacttacctcagtctcaatcaaatgtcccctccctgaggctactttccccaccctacctaaaattgcaacactttacctgaatcccaatcccctgtatgcagttctactttttc

SEQ ID NO: 485393 - DNA, 593 bp, Homo sapiens
gctttcaatataattcctgggcaggcactttgtgccccaactgctttctcttctccctcatctctggactctaatttagctgggtatgaagattactccaattcatacaatcaattttcaaggctgctgttcactgaatggtgacagcaatatgggtgccttcaactgccctccattctgttttttgatgagctgataacagaatatgtggaagcttccctaagagataacactytgagacttttgtcaactctgcagccagaatgaatctaaaaatatccctctgcaaaaaatccttcagtggctccccatttctctcaaaggaaaaactgaagtgctcacaacagcttacaacacttctcatggtctacctccttgtacctcagtctcagctactatgagtgactcccctgccttgggaccttctcatgttccctctgcctgaaacacattatcctctgctagccacatggcccactcacttacctcagtctcaatcaaatgtcccctccctgaggctactttccccaccctacctaaaattgcaacactttacctgaatcccaatcccctgtatgcagttctactttttc

SEQ ID NO: 485394 - DNA, 541 bp, Homo sapiens
acacactttgtcgcaagcattttagatacgggatactcaacctrtattgctaattccccccagatgaggttagattttgctggtcttgtggcagaaactcggcttggtgtaattctcaatggcagcagcagagggcagcagcagtagacggttgggatactcctcacaccgagttaagggaaacttcattcctttatgaggtttgggattctgcctccacccactgacggtagatgtttccagatgctggggaagagacgactggccctggcttgccaagtaaaccgcagtttcatctacaccttccagatggaaatactgagcaaagcaacagggatcgccttattccacgaagcaaaaagaataataataggcctagcacggtggctcacgcctgtaatcctagcactttgggaggccgaggcgggcggattgtctgaggtcaggagttcgagatcaacctgggcaacacggtgaaaccccgtctctactaaaaatgcaaaaaattcgccgggcatagcggcgtgtgcctgtagtccca

SEQ ID NO: 485395 - DNA, 642 bp, Homo sapiens
tatgactcatattttcaaagaactgcatttgttactatgttgaaaatagatgtcagggcacatgggaagaaacagagacagagaggtattcctgcaattcaagcaagggatcatgacgatgaccaggaccagggggacagcagtgggtggagtgacaagtagtgggattatagatatatgtttaaggtagagccaataggcgttccccacaatttacaggtggggtgtgagagaagatgggagtcaactgtgacctcttttatcgaayctaagtagccagaagaacggggaaaggtgtacatagagcaggcatggacttggtgcttctgagattataagacatccagtagaaatgtcaagtagatggctggtcccaactctggagtacaccagttatcaattaactgcctctcagctccagatccacctttcattatctggtctgtggaaatggagctgggccatgtaaatatcttgactttgccctctggaatgatgtgaaagtttctcagcagagtgcactggagggatgctgcaggaggaaaggcttctcttcccaatcctggtgaatgcttcgtggcaggcccctacagtgtgcatagtgtgtgcagcacccaagtcctacagtgagctgcagccact

SEQ ID NO: 485396 - DNA, 642 bp, Homo sapiens
tatgactcatattttcaaagaactgcatttgttactatgttgaaaatagatgtcagggcacatgggaagaaacagagacagagaggtattcctgcaattcaagcaagggatcatgacgatgaccaggaccagggggacagcagtgggtggagtgacaagtagtgggattatagatatatgtttaaggtagagccaataggcgttccccacaatttacaggtggggtgtgagagaagatgggagtcaactgtgacctcttttatcgaatctaagyagccagaagaacggggaaaggtgtacatagagcaggcatggacttggtgcttctgagattataagacatccagtagaaatgtcaagtagatggctggtcccaactctggagtacaccagttatcaattaactgcctctcagctccagatccacctttcattatctggtctgtggaaatggagctgggccatgtaaatatcttgactttgccctctggaatgatgtgaaagtttctcagcagagtgcactggagggatgctgcaggaggaaaggcttctcttcccaatcctggtgaatgcttcgtggcaggcccctacagtgtgcatagtgtgtgcagcacccaagtcctacagtgagctgcagccact

SEQ ID NO: 485397 - DNA, 642 bp, Homo sapiens
tatgactcatattttcaaagaactgcatttgttactatgttgaaaatagatgtcagggcacatgggaagaaacagagacagagaggtattcctgcaattcaagcaagggatcatgacgatgaccaggaccagggggacagcagtgggtggagtgacaagtagtgggattatagatatatgtttaaggtagagccaataggcgttccccacaatttacaggtggggtgtgagagaagatgggagtcaactgtgacctcttttatcgaatctaagtagccagaagaacggggaaaggtgtacatagagcaggcatggacttggtgcttctgagattataagacatccagtagaaatgtcaagtagatggctggtcccaactctggagtacaccagttatcaattaactgcctctcasctccagatccacctttcattatctggtctgtggaaatggagctgggccatgtaaatatcttgactttgccctctggaatgatgtgaaagtttctcagcagagtgcactggagggatgctgcaggaggaaaggcttctcttcccaatcctggtgaatgcttcgtggcaggcccctacagtgtgcatagtgtgtgcagcacccaagtcctacagtgagctgcagccact

SEQ ID NO: 485398 - DNA, 592 bp, Homo sapiens
tgtatgctgagtcctgctaccagatcacctcttaccaaacctgggggtgatcttggagaccccaaacacactcatggattttcaaagtgactaagcgcaagtgaagataagtccagtgtaattccctggtgttaattcatgctacagaggattgggcccctctgcctgtgctaaaaggagctttagcttagttaacatctgcaactgtggcgtcatgattacttacgtccccctcagccccacctagaatccaaatgttgtgctgtccattgagaggccagatcatttgtggtctaggrgtaaaaaatcacagaaatcttggcctggtttgacattctggaatatggaggaaattctcaggaacagaatttggctggtgtgccttctcacctgggcagctctggcagcgttcttcggaaagagcagcagcagcattccttaattgaatggtggtgacagttctccagaaccaagtcaggaaagccagttagtcttatagaagttgggaaaatttactgctggaggaaatattatttgagaggaagtacaaagtcttaaccttagtgtattagtatgttttcatgctgttgat

SEQ ID NO: 485399 - DNA, 492 bp, Homo sapiens
gctggagaactggctcaggccaggcctcgggtgtgccccaggtgttgctgcttctagtgccaaccatggtgctgggcactagacctttcagagctagtgcaaagctagatttgctcagcacacagtaggtccaaacacatggtcacttttaccttcgcatttcacacttgctcttgggaaatcgatgggagaagaaaaggagtttttccttctttttaataaaagaaaagggagcgtacacttcaggacacatttagcaggacaacagaatcttatacaaccacccaaggttaagtaaaatattttaagtaaactagtgttccacatcagaagtctctcagactattaaccccacagaagccccaccaaaattcaacacaattccacatcctacagcaccactaataattatccctagacccccataaatcggagaaggtttcamagaaaaacctacaaaccctatcaccaaaagaacacttaacaataaag

SEQ ID NO: 485400 - DNA, 582 bp, Homo sapiens
tgttctcttcctcctttttcctcctgagtacatagcacgcgaagactccctggggcctcccacctgagcaggacgtgtgctgctgccttgaagtgaaggcagccccgggctctggaggcyagcggcacagggcatgaatcctcaccccaccagcaggatcccagctctatggctctgggcttctgtccaccactgagagcctctaaacctccatctgccacctataaaactggaagagcgaaacctctatctcataggattgttctaaggattaaatgagacagaatacagaatatacttagtacagtgcccgaagcatactaagaaagtcagtaataaaactatcttcagagttaaacttttaggtcaaaaacctgtcagattagaaaaggaactatacaaaaaccccttgactcctgggtcacggttccctgacaggctgtaagagccatagctctaggtctagggcctacaggcacttagaaaatgtgcaattaaaaaagtaaagaaagcctcaattatcagcagatgatcacagtatcaacatagccaaagaaaagacttattaatcaggaagggggt

SEQ ID NO: 485401 - DNA, 247 bp, Homo sapiens
gatgttccacagttttcttgccagccatgaaagcctaaacaggagctttcagccttcgtgggtcttcattttcccagcctaatccaggactgggtcaagccaaatccaaggtgcagagagaaacattcccacttggcttcttctgatgtaaatgatgtgatctggtctagatttcccrgttgacttatcttttctgttcagtcacatgatttggtgtatgtggattttaaaatctctttattataaa

SEQ ID NO: 485402 - DNA, 534 bp, Homo sapiens
tctagcgattggggaaagctgctttgcctcactgatgacctttgctcccaaggataatggagtcaccttcctgactgctcagrgctatgggatgggcacatgcatgccagtaaaaggcagagctcactgggggcttagaagacactggggccagggggttggttagagccctgcattccacagccgaatccatcagttgaacccttgaggagctgcctggtgtcgggtctcacctgtggcctggtgaagcgtctgctgcttgagcactctgcggcggtctctgtgcatcaccccaggcaggcttctgctgctgcagccttagctgaatcctgctcacagacacacgctcatgtgtgcttctaccccgggagatggtggcctagagcctgagtccaggtgacccagggagcgagcaggagggtttttcatagctcctgacaattatattcctcgccatggggtctgagagtcgccgtagagatttctatgctctggttagcagtgtgccggcagatggtttaagtaaagccacag

SEQ ID NO: 485403 - DNA, 617 bp, Homo sapiens
tgtggaaacacacatccctggggccccaaatctgacccccacagataagggcgagcatcccttctgtacaaacgtgaggtggtcttaaaaccatacagcattagaaaggataaagggcttagggggcacctaattcatgccacaggtgataaaactgaggcatgttcaggcttgtaaaaatgaggtaactcccccagagacagcagagagacagtgacagagctgtgtcccaagctcagggctcccaaccatcctccagctctgattaggaggcctgatgctacccaccctgcygcttccacttctctcagccaggctggaatgtggcgaaagccacaggcctaattttaggattcaaaggcaattaggggagagctgacaaaatctgatctgggtgaggattctcgtgctgacctgtgatgtgggttatcatacactagctcaggagaccttggtcagccagaccaggtcagcttttctcctggaagacacacagcccctgcactgccccatacgcagtcttgcaaattggtagataagtgtgcccatgacctggtgtacattataagacacggtcttttccagctccttgcagaaaagccaaccccaaccaaacc

SEQ ID NO: 485404 - DNA, 591 bp, Homo sapiens
gtgtgtgatcttaccaaatcactttgcccattttttgttcccattttctttactgaactgtcagcatgttgatcttggacttctaacctccagaacagtgaaaaaataaatttctattgtttaagccatccagtcggtgtgtgtatgctgttatgcaagccctagcaaacaaatacactttccttccaactaacttagagatctcaatgttcttaccaatgattcggttctttctttatctcatcagtcacaaagaacgcctaacttcattacgagaaagtctttgggatctgccsgtctctattccccatgtggcttttcactttaaatgccagagcatagcttgtcccaatgacttcacacatgattttcattaaagaaatctcaattctaggacatcttttaaaacaccaccaactatcatctttttaaagaggaaatctcctcgatccttgccctcatttaaaaattattaatatacaatatcttatcttaataactctcctgtgcctattttcccattttccagggaaagaaaatattgaccccagtattctatgaagattcatccattgcccctttaaagttcct

SEQ ID NO: 485405 - DNA, 618 bp, Homo sapiens
actttagtacctgctacttttactaatcaattgtgaggagtcttttcaaaataacaagataatttgaaaatattatttctgtcctagaataacttattcttaatatgattttcttttatttttttcccttaggcaagtttttcaaataattgagacttttcacatgtgatctgtactgagatacatttaagtcaaagaaaatactatgcaagtaacctgtgactaggcattttatttagcaaaagtatcagttaaatgtatggtwataatagaatcactgagctaaggaaataatgtgtgttataaagagaagaaagttgcttgccgttttgtcattttatgaatgcatgttgtttgtgtttggtcctggaggtgggagtggtgatagttgggttcattttgcagtctataagggactatttggaaatttctctcttctgttttaaaaaattgtcagtagtagactgatctaatttttgcaaattagccactttgcactttttaaattttttagccagtttctggttttccagactattctcattctaaggactttaaaatgagaaaagaaatattttatatttagataggattctactttaatttcatgatttttaa

SEQ ID NO: 485406 - DNA, 505 bp, Homo sapiens
ttctttccaccttggagctaatattttaaaatgataacagttattaatacgtattaatagcaataygtatcttgttcttgtactttatatttacatgtatttagaaagggagaaatgaaaaggaaaatgttattacctttgcctcctttacagtgaatcgctacgatgttttcaagatcttgagccatccactcatttacttccttggtgaaaaccaccatctcactgatttcaagtttaagatttttagttaaaatatcttcaaaaaatcaagcccaatatatttagccctcttctgatagccagcttagcataaaacttactgtagagtggggacattatgatcatcaatcatgagtctaccaacgctattatggaagtgcttaggatcataagctctttcacctaaaataaataatatgtatgtcctatctctacagggaataacatgataaatgatgaagttacgaataagttaacatatcttattagaattcctcatcta

SEQ ID NO: 485407 - DNA, 505 bp, Homo sapiens
ttctttccaccttggagctaatattttaaaatgataacagttattaatacgtattaatagcaatacgtatcttgttcttktactttatatttacatgtatttagaaagggagaaatgaaaaggaaaatgttattacctttgcctcctttacagtgaatcgctacgatgttttcaagatcttgagccatccactcatttacttccttggtgaaaaccaccatctcactgatttcaagtttaagatttttagttaaaatatcttcaaaaaatcaagcccaatatatttagccctcttctgatagccagcttagcataaaacttactgtagagtggggacattatgatcatcaatcatgagtctaccaacgctattatggaagtgcttaggatcataagctctttcacctaaaataaataatatgtatgtcctatctctacagggaataacatgataaatgatgaagttacgaataagttaacatatcttattagaattcctcatcta

SEQ ID NO: 485408 - DNA, 505 bp, Homo sapiens
ttctttccaccttggagctaatattttaaaatgataacagttattaatacgtattaatagcaatacgtatcttgttcttgtactttatatttacatgtatttagaaagggagaaatgaaaaggaaaatgttattacctttgcctcctttacagtgaatcgctacgatgttttcaagatcttgagccatccactmatttacttccttggtgaaaaccaccatctcactgatttcaagtttaagatttttagttaaaatatcttcaaaaaatcaagcccaatatatttagccctcttctgatagccagcttagcataaaacttactgtagagtggggacattatgatcatcaatcatgagtctaccaacgctattatggaagtgcttaggatcataagctctttcacctaaaataaataatatgtatgtcctatctctacagggaataacatgataaatgatgaagttacgaataagttaacatatcttattagaattcctcatcta

SEQ ID NO: 485409 - DNA, 585 bp, Homo sapiens
ggcacttcacagtaaacagcattatatgtttgaaattaatttagtcatccacagagcctaaagccatatgccctgactataatttaggatctcaacctaagaatacacattttgggttatagcatccccatctttcytccctatggtagactatcaaaaaccgccacaattctttatagttccttccatcaagagttggagtttattttctactccttgaatccagactggtagtgtaatttgcattgtccaataaaatggggtagaagtaatatataattttgagcctgggccggaagaggatttgcattgttttgttgccgctcctgggactcttgcctctgccgtcacgtgaacaggcctgaagtagcctactggagaatgagagaccacatggggccattcagccaagtcaggtaattttctttcctttcatttaaaaaatcggtttccttcattctttaaaaatatttttaactgacacataatacttgttcatatttatgaggtacacagggatatctcaatacttgcatacaatgtgtaatgatcaaatcaggatagtcagcatatctgtcacctcaa

SEQ ID NO: 485410 - DNA, 585 bp, Homo sapiens
ggcacttcacagtaaacagcattatatgtttgaaattaatttagtcatccacagagcctaaagccatatgccctgactataatttaggatctcaacctaagaatacacattttgggttatagcatccccatctttcctccctatggtagactatcaaaaacygccacaattctttatagttccttccatcaagagttggagtttattttctactccttgaatccagactggtagtgtaatttgcattgtccaataaaatggggtagaagtaatatataattttgagcctgggccggaagaggatttgcattgttttgttgccgctcctgggactcttgcctctgccgtcacgtgaacaggcctgaagtagcctactggagaatgagagaccacatggggccattcagccaagtcaggtaattttctttcctttcatttaaaaaatcggtttccttcattctttaaaaatatttttaactgacacataatacttgttcatatttatgaggtacacagggatatctcaatacttgcatacaatgtgtaatgatcaaatcaggatagtcagcatatctgtcacctcaa

SEQ ID NO: 485411 - DNA, 585 bp, Homo sapiens
ggcacttcacagtaaacagcattatatgtttgaaattaatttagtcatccacagagcctaaagccatatgccctgactataatttaggatctcaacctaagaatacacattttgggttatagcatccccatctttcctccctatggtagactatcaaaaaccgccacaattctttatagttccttccatcaagagttggagtttattttctactccttgaatccagactggtagtgtaatttgcattgtccaataaaatggggtagaagtaatatataattttgagcctgggcckgaagaggatttgcattgttttgttgccgctcctgggactcttgcctctgccgtcacgtgaacaggcctgaagtagcctactggagaatgagagaccacatggggccattcagccaagtcaggtaattttctttcctttcatttaaaaaatcggtttccttcattctttaaaaatatttttaactgacacataatacttgttcatatttatgaggtacacagggatatctcaatacttgcatacaatgtgtaatgatcaaatcaggatagtcagcatatctgtcacctcaa

SEQ ID NO: 485412 - DNA, 425 bp, Homo sapiens
ccacactgccaatgagttggatgtggaggacgtatcgcaccttctggtggccaacaccctggtggccacctgkatgaggcccacaagtccctgctggtagccctctcctgaggactcagatggccccgtgctggccctgctggccttgctgcggctggggagaggctgcttctatgatgccaacccaggtgggctgcagagggcaggtagcagcgggactcttctctgaggagggcacaggccttccgtggcccttgctctccaccccacaacctgggctttggagcaagcaaaccttgttcagccctagttctgccacctgccacaggatctcacctctttgaccttcagtctcctcatctgtgtcctggtctttcgggttgtcatggaaattagctggagcaggtaccccagggcccagcagg

SEQ ID NO: 485413 - DNA, 425 bp, Homo sapiens
ccacactgccaatgagttggatgtggaggacgtatcgcaccttctggtggccaacaccctggtggccacctggatgaggcccacaagtccctgctggtagccctctcctgaggactcagatggccccgtgctggccctgctggccttgctgcggctggggagaggctgcttctaygatgccaacccaggtgggctgcagagggcaggtagcagcgggactcttctctgaggagggcacaggccttccgtggcccttgctctccaccccacaacctgggctttggagcaagcaaaccttgttcagccctagttctgccacctgccacaggatctcacctctttgaccttcagtctcctcatctgtgtcctggtctttcgggttgtcatggaaattagctggagcaggtaccccagggcccagcagg

SEQ ID NO: 485414 - DNA, 425 bp, Homo sapiens
ccacactgccaatgagttggatgtggaggacgtatcgcaccttctggtggccaacaccctggtggccacctggatgaggcccacaagtccctgctggtagccctctcctgaggactcagatggccccgtgctggccctgctggccttgctgcggctggggagaggctgcttctatgatgccaacccaggtgggctgcagagggcaggtagcagcgggactcttctctgaggagggcacaggccttccgtggcccttgctctccaccccacaacctgggctttggagcaagcaaaccttgttcagccctagttctgccacctgccacaggatctcacctctttgaccttcagtctcctcatctgtrtcctggtctttcgggttgtcatggaaattagctggagcaggtaccccagggcccagcagg

SEQ ID NO: 485415 - DNA, 616 bp, Homo sapiens
gctggttgagaagctgacagttaactttggatcagacaaacatttgctatcagagacacaatttttctctctctcgtccctttctctcaacagtgagagcttcttaatttcttcttgttattgactcattccctattactgcttgcttcaaatgcatcctcaggtagagtcctatcactcagaaatggtcacctcattgttttgtatcattttggagacagtcacactctatcgcccaggctgaagtgcaatggtgcgatctcggctcactgcaacctccgcatcccgggttcaagcaattctcctgcctcagcttcctgagtagctgggattacaggcgcccgccaccacgccaagctaatttttgtatttttagtagagatggggtttcatcatgttggccaggctagtctcaaactaccgacctcaggctatttgcccgccttggcctcccaaagtgctgggattacaggcatgagccaccgtgcccggcctacttcatagtttgatttctgtgcctccttcagtctctctgcatatgtaacatttccctctttactgtgtggyttcctttcttcctgctgcgggatgcctgcatctatgcccttttcagtgc

SEQ ID NO: 485416 - DNA, 477 bp, Homo sapiens
gccaatatagcccattaagtctcttttcaaagctgactagaaccaytaaaaattcctttgggagagaagtacccagttcagtgtttctgcacaaaatatttctccattcttttttttttccagtagagctcattcatgctacaagagtgtctcatttctgaaggtcttagctaacccatcatattacagtggcactttgtcaaattgcccatttgttcaattttgcaggatgagatcttttcacttagcaagtctaatttctcacttcttgaatctgggtaaaacttgaggataataagttgcttaagttcaatttcaccaccttaaatgctcatgaagaactactctgtcaactctaatttcttacttcttgattgtgggaggaaattgaaacaggttctcaaatcccttgattcctcttttataaagggcttcagtgtacttgctctaaaagcaattctgtgtgccatttacagc

SEQ ID NO: 485417 - DNA, 571 bp, Homo sapiens
tcacatcctgctttttccctactaattcaaggtctttgatctgatgagaatttggcatagcaggacttatttactcctgaagttctagctttctggaatttcataagcattgacaaactacttcatccacagcgagactgggttttgcaaatgtgtaaacctttggccgtgcttatgggactcattaggaatgtttttggctgcagctaacagcttatccaactaaaggtgtcttaagcaaataagaatttatttttgtacataacaaaaagtttaggattgtacagttctggcattttttggctccttagtggtgtcacaagaaacttaggtttttttttttycccttctttttccactctaacatgcttaatgtggtggctttacttcccatgctcattgcttcatgattgcaagatggctgtgacggcatcatatatggagatttcatttgatgcagaaagaagggaaagtgggaaaaatgagccaggccaggttttttatcaggaaaaaaaaaatttatcccacctcaccccaccccaaattgtccccgcccttgctctcagccact

SEQ ID NO: 485418 - DNA, 528 bp, Homo sapiens
tgtttaaattattggatcaagctaaatttaaaccaggttagacatttagttaatttatttttctctaaccagcaggtggaagttcagagaaagacaagattatagacaaaataaaggcactacattttctctggtaaaaatgtctcaacattttcatatcctgttggttttccaggaaacatagaaatacgctgtaagaaataatcycaaaattgacgtgatggattaaagatgaaaaaacatgccttggaatacctaatgggaacattagtctatctctacacccagatcaacatgactgaatatagctttcttaaaaaagcagttgaattcagcaaggcaattattctattgctcaataagacttaatatttggattgattgaatttcctttgctttttattttggagtctatgttcatagcctcaatataagagtgaaaattttcacacagaaacaatacataatccaataaagagccagatacaagacattcttttatttggaaatattcaagggagtgtttaa

SEQ ID NO: 485419 - DNA, 528 bp, Homo sapiens
tgtttaaattattggatcaagctaaatttaaaccaggttagacatttagttaatttatttttctctaaccagcaggtggaagttcagagaaagacaagattatagacaaaataaaggcactacattttctctggtaaaaatgtctcaacattttcatatcctgttggttttccaggaaacatagaaatacgctgtaagaaataatcccaaaattgacgtgatggattaaagatgaaaaaacatgycttggaatacctaatgggaacattagtctatctctacacccagatcaacatgactgaatatagctttcttaaaaaagcagttgaattcagcaaggcaattattctattgctcaataagacttaatatttggattgattgaatttcctttgctttttattttggagtctatgttcatagcctcaatataagagtgaaaattttcacacagaaacaatacataatccaataaagagccagatacaagacattcttttatttggaaatattcaagggagtgtttaa

SEQ ID NO: 485420 - DNA, 528 bp, Homo sapiens
tgtttaaattattggatcaagctaaatttaaaccaggttagacatttagttaatttatttttctctaaccagcaggtggaagttcagagaaagacaagattatagacaaaataaaggcactacattttctctggtaaaaatgtctcaacattttcatatcctgttggttttccaggaaacatagaaatacgctgtaagaaataatcccaaaattgacgtgatggattaaagatgaaaaaacatgccttggaatacctaatgggaacattagtctatstctacacccagatcaacatgactgaatatagctttcttaaaaaagcagttgaattcagcaaggcaattattctattgctcaataagacttaatatttggattgattgaatttcctttgctttttattttggagtctatgttcatagcctcaatataagagtgaaaattttcacacagaaacaatacataatccaataaagagccagatacaagacattcttttatttggaaatattcaagggagtgtttaa

SEQ ID NO: 485421 - DNA, 528 bp, Homo sapiens
tgtttaaattattggatcaagctaaatttaaaccaggttagacatttagttaatttatttttctctaaccagcaggtggaagttcagagaaagacaagattatagacaaaataaaggcactacattttctctggtaaaaatgtctcaacattttcatatcctgttggttttccaggaaacatagaaatacgctgtaagaaataatcccaaaattgacgtgatggattaaagatgaaaaaacatgccttggaatacctaatgggaacattagtctatctctacacccagatcaacatgactgaatatagctttcttaaaaaagcagttgaattcagcaaggcaattattctattgctcaataagactyaatatttggattgattgaatttcctttgctttttattttggagtctatgttcatagcctcaatataagagtgaaaattttcacacagaaacaatacataatccaataaagagccagatacaagacattcttttatttggaaatattcaagggagtgtttaa

SEQ ID NO: 485422 - DNA, 654 bp, Homo sapiens
tccatttctccatttttgctctcatactatttgtattattttgaaaattagtgaattacctgcaattgaaatcatatattttttctctcatttgaatatctccattcttttcattttgttcctcaattttcttaaaattttgtggatacgaattcagaatgtagacattctttcagttagattgaggttactyattataggcctcactcaatctgcaaagtaatgcagcacattagattaacaatcatgtactctctgctgtaggatggcatcccaccaatgtctgattataagtatcaagattagagccttcctctaacacagccattgggagttcagaatttgtctgtctagaaatatgctgccatcagtatgtggataattaatataatgggaagtaatgaaatgggggtaaaggtaccagggcctcatggtaggagaaatttatgacagggtgaactttataataagaacaaagtatacgttagtacatttatcaaagggtgggaattcaaaatgtattgaatatggtgtgtgctcattgacctcatgacttcaaaccaaatcaggactgagaggcttattgtggcctcatttagtttattagctgagggcttattcttcttgattttgcacttgtcttgggtgtgttca

SEQ ID NO: 485423 - DNA, 654 bp, Homo sapiens
tccatttctccatttttgctctcatactatttgtattattttgaaaattagtgaattacctgcaattgaaatcatatattttttctctcatttgaatatctccattcttttcattttgttcctcaattttcttaaaattttgtggatacgaattcagaatgtagacattctttcagttagattgaggttactcattataggcctcactcaatctgcaaagtaatgcagcacattagattaacaatcatgtactctctgctgtaggatggcatcccaccaatgtctgattataagtatcaagattagagccttcctctaacacagccattgggagttcagaatttgtctgtctagaaatatgctgccatcagtatgtggataattaatataatgggaagtaatgaaatgggggtaaakgtaccagggcctcatggtaggagaaatttatgacagggtgaactttataataagaacaaagtatacgttagtacatttatcaaagggtgggaattcaaaatgtattgaatatggtgtgtgctcattgacctcatgacttcaaaccaaatcaggactgagaggcttattgtggcctcatttagtttattagctgagggcttattcttcttgattttgcacttgtcttgggtgtgttca

SEQ ID NO: 485424 - DNA, 656 bp, Homo sapiens
ctatgagacctctgcattgagtttgcaacctattttaagcatggagatcttagtaaaggatttgtcatctccaaattcccatgtaccccagttgagcaaataatttgcattctgcatggcttgcaytctttactccacatttgaaggcactatcaaggacttaaccattatttatgggagaatagaaaataagagggtggcctataaagacatgtggtataaactgagggcatgcatagcttaggaagaaaaaattgtttcttactttattctccaactgagagctggtctacctatgctatgttctcaaaaaaatttaaaaggtaggggaagaagaagaaagaaaaacatgcttactacagccagtgctgctattacactgaatgcatgagttcattctggggctcaaatattttgtagaatttgctggggtttctcgtgggaggaaaacaaagtacattaacttagccttttgttattagcaaaaagggtatgaataaatcagactcatccttgaatcctcaaagaataatgtcacccattagactacattaacaggaagatttttctctaataaagtcatggaaatctaattcatcatcatcaaccacaaaaataatcatcttgctggatacctgaacagataacaaattggc

SEQ ID NO: 485425 - DNA, 656 bp, Homo sapiens
ctatgagacctctgcattgagtttgcaacctattttaagcatggagatcttagtaaaggatttgtcatctccaaattcccatgtaccccagttgagcaaataatttgcattctgcatggcttgcattctttactccacatttgaaggcactatcaaggacttaaccattatttatgggagaatagaaaataagagggtggcctataaagacatgtggtataaactgagggcatgcatagcttaggaagaaaaaattgtttcttactttattctccaactgagagctggtctacctatgctatgttctcaaaaaaatttaaaaggtaggggaagaagaagaaagaaaaacatgcttactacagccagtgctgctattacactgaatgyatgagttcattctggggctcaaatattttgtagaatttgctggggtttctcgtgggaggaaaacaaagtacattaacttagccttttgttattagcaaaaagggtatgaataaatcagactcatccttgaatcctcaaagaataatgtcacccattagactacattaacaggaagatttttctctaataaagtcatggaaatctaattcatcatcatcaaccacaaaaataatcatcttgctggatacctgaacagataacaaattggc

SEQ ID NO: 485426 - DNA, 564 bp, Homo sapiens
ttagttttacaaaatgagggctcaactgctaaaaatggattgctccttaagtgtacaaagtaacacaaaataatcactccgtaacataacatttgccggaaaaaaatgtgtgaaaactactagaaaaataatagttaggtcctgagcagtatattaaagatcttgattttgagactcaaattatatcttttcattctacatgagttcttactttctttggacaaaaaatttaaggtcctgtatctgaattcagctcagtgtgaaagctttaaatgtaaaactagtatatgcaatttaaatcccctttaacagtttttcagacaattaattaggtaaagcatttgaaacaccatacatacaaaaaattttcattcatattgcaatgaatttcactcaaaatcacatatcgaaytgtaataaatttacaataaaaatgtaacactaactgccccccacaaatacatatacacttttaagagatacacagtcatgtacctaagaaaggaaagtaaaacttgacaatgttcaagaaatctttcgaaagctctacagcattagtcagca

SEQ ID NO: 485427 - DNA, 588 bp, Homo sapiens
cgcagcattctcgctcctttgcggccacctcttctgccctgcttttccaccttgtcccttcttctgtcaagtggcttttggcttggtcaccactttgctggtgtttctctccagaagtgagtcccagacttcaggtgtggtctgactcacgtcctatcggrtctctccctctgaaaaccgtgcttgtattaaagcagcttgggagctcattaatgttcttggcagccaggtcctacccctgacagtgcaggagctgcctgtccacttaggggacccctgtctttttcacacgtgagtctgttaagcctcacctccctcatcgcctccatgtgtgcggcagttttcaacaaatgttcagagtacaacacctgcccttgttaaacgtaatcttgttacactagtccccttgttttaacttctcaaacattttgagtcttgctcctgttaaccaagaagacctagaaagctccacatctcctcttaaaatgtgtgtgtgtgtgtgtgtgcgtgtattcgtacgcacacccctgggtacagctctgaggaggccacctataggtttctgaacaatcttccatgaatacagct

SEQ ID NO: 485428 - DNA, 500 bp, Homo sapiens
tttctccctctgctacaattttcacatttagcttttaaaagatatytaatatattgtgcacctcttatactaggctgtgaactccaactccctgagacaagttgttcattcattcgtcaaatatttattgagctcctaccattgtaaaaggctctgtgctaagtactaaggatgaaaatggagaacaagatgcagcactttccctcaaagagcttgcagtctagtggggagtttcattaggtaaccaagccatcctaatccatattgctggcttagagtctgacacatggaagatggtgaatgaatgcttattggaatttctaagactggtggcaagagcatggaacacagtactcattccctgctaaagactgttctcgctgtctctgtcctcaaggagctggttgtttactgggagagacagacaccaactgtatataaaaagagcactagagtgttttccaggccatgatgtggcacactcactgtgagctgctgca

SEQ ID NO: 485429 - DNA, 567 bp, Homo sapiens
tttaggaataattaatttagcattttaatgatgttgacacggtgctaccttctgtagacatttaattagacatttattagttttgactttgtagtttgctttcctcctggtggagccaaaaattacttttccaggtctccagcatttttgttggaaatcccttccagcagcatgggggtcccaggcaactttcttagggtacccaacccctaggatggtcctgcccacttcagtcccccacctcctccccatgctaggggtggggcacctcccatctttctagtgtcctggctttcatgtgagcaggaccttctcaggtcaggccctgctaagctgtagattccctggagtccagtgtgattgtaaccatgtctcaatcaccagcctaactctaatagaaggagggtacttgtcagtgctgaattgaattgtgagtttctcatgagaggttggggtagaagracatgagatattaagtgtaccagaaaaaggatgggtagttctggtgtgtttcagtcagctctggctgctataacaaaataccatagccatagggtggctcagata

SEQ ID NO: 485430 - DNA, 636 bp, Homo sapiens
aaaaggtggaaaggcttgatataagtaaaacaatggaatgcttagctgcaggcctagaaaggaccctttaattgccaggctctgtcaccatatcaagcgtggtagggttcggggctgaagcatacttacgaagacacacaaggcagtagctggtaccctcacttytttaccagaaccaggatgagtatccacattgtcctgggggactgggaaggaagagacagagcgtctcctaagaaataacataaagacaaatattagacaggattgcagaggtttactgctcatcaaattgttagaaaggactccaagacgaccttgcttaagcagactgcctctgttgatagcctgtccttctagattcttcaaactacagaacaattcacaaaaaaatcaaaagcaccctcactcaaatgagaaagagagccagcacatgccttactctcctgcacactaacctgtggactccaaaacccaacaatgaaaagcaatcctgaacaactgcttacccagtcaataagctgctgggaaactttctcaacttaatgtaacagctagctcagaggtagctctttggtcttttttgcaaaactattttatttctatgcctagttagaatcaacctcatcacttgtg

SEQ ID NO: 485431 - DNA, 647 bp, Homo sapiens
gtctggtaccatcttagcactgtttccttgcagtcactgagtgccatcctgagacactgtatttcatagatttcatgtttttcaggctcactctttccttgtttctacttgtgaaattattattcatcctgcagcatatggacaacaggttttttacccattctctcttgccgttggcaggataccattcaacaatatggtgttaacaaaaaatattaaaactagctgtcttaaatttttggttctggttcataatgttgcataatgaaaaggaaaatctttcccacagtcccagtggtgcggaaacacttagaaatgactgtaaatatagactctcaaatgacaagaggttgttttatgtcattctgcgatttctttttcacagcatgttctatgtgctggaataaaaatttttaatgaagtcagaatgctaaatttaatggaacctttgctctttgttcattgcaaaatacatcatgttkccattgaatttgctgtgcatcttggcatcaggtcccacacagcaaaacaaaactcagacctcataattcaatagttttgattatgcccagattctaaagaccactgcatgtctttcctaatttgttactcacttgattttcagtgaataaatgtaaaaagagtct

SEQ ID NO: 485432 - DNA, 581 bp, Homo sapiens
atctccctcaaagagctttcctggaaccactctccccggtgatgtcagctccttcacctccattgctgtctctagctgcaggggtggttggagacccagtattttagctaggccctgccagaggccattgggatagcaggtcaatggatgaaggaggttgtataggcaaatgggagtaattatctctgatcttgatttttgtaggaaataggcrtagattaaggcatagataaatttgaaaaggcatagatacattaattaattaattagagatgaggtttcactctgtcgccctgtctgaagtgcaatggcgtgatcaaggttcattgcagctttgacctcctgggctcaagtgattcccgcaccttagcctactgagtagctgggaccacaggcaggcaccaccattcccagctaatttataaattttttttgtagaaacagggtctcactgtgttgcccaggctggtcttgaacacctgggctcaagggatcctcctgctttggcctcccaaagcactgattggcaggcatgagctgctgcgcccaaccaggcatagataaatttaaagacacctttt

SEQ ID NO: 485433 - DNA, 650 bp, Homo sapiens
gatgtttcaagcaacacaggtaaatgcagaaaatagctccttgcaaatacactcagaacaactctcaggcattttgtcttgatgccccatcacaggcatttctccaaaacacatccgcttggtactatgaactgctttcagtctagcctaytaacttattctccattagagttagcagtgatctctttcaaactcttatctaatcaggtccctcctttcctgattaaaatgttctgatggcttcccatttctgtcattataaaatgtaaactccaagaagtagcttatcactaggtccctgcctacttccattaactcatttcttgttttttgtttgtttgtttgttttaccttattctccttcaccccaagtaatatttgcaggggcccagctataaatgtgctgtgcgaagtttacttactcacctttctttaatatttccatggttttgcatgtactaaatactttaacaaatcagctattttcaatcctggctgcagaatagaataacaatagcagcaaaatcaggcaaccacaccagaattcattagtctatttattcaggagtgaggcagcatgggcactggtttttaaaacgctggatccttgtgtatgtcaacagcagagattccctgctgtaaatatttat

SEQ ID NO: 485434 - DNA, 675 bp, Homo sapiens
gttcatgcttcttttttcttcagagtttgtgcaatcaactctctatgttcatttttcccacttctgtgccatgctaccatsctgccaggatactatgatcactttttctcattcaattttaaaacaaattcctttttctgagacagcattaggtttcctcattacttcttgtgcctcccttgggaaggaagtgaagacataataagaaactgccagatacattggttttaccgtagtatgttgcattggagatccccattgctgctggatctttcccccatgccaatgttaggatctacatcttgcatagtatagcaagtatagcatcagtttcctttatgtggtcatatagtatgtaacaattgttctttttattcagtggcttcttgtatgcttcaatttacctgatcatgaatttctatatagtatgtattaattgttttagagatctgagaaaccagagaagttttctgaggacatgctgttacactcattgtgatgatggtagtgttggtagtggctcaactgtcctgacgtttagcagtacaatcacaggaattaagaatacccttagatgttctgcaatgttctctttcttttcctacagagcaatgaagtaatgagagatacagtggttgggatgtgagattttatgctcaactataaaggtgagga

SEQ ID NO: 485435 - DNA, 549 bp, Homo sapiens
aacataggaacagaaaaccaaataccacacattctcacttacaagtggaaactaaacgttgggtactcatggacataaagatggcaacaatagacactggagaccaccagagggaggaggaggaaagggaaaagaggggcaggggttgaaaaactaactgctgggtactatgcacactcctgagtgatgggatcacttgcacccatacctcagcatcatgcaatatacccatgtaacaaacctgcacatgtacccctgaatttaaaaataaaagttaaaatttttaaaaaaagaaaactaaaatgagcaataggccaaagagaggactgcatgattccagtagtttttgtcacggagctttaaggcaactaaagctgtgagttaggtagagcaattgaacatctttagtgggcaaattagaaaggaaaaawggtagaggaaagaagatggccatttttttttttaatccaaacatattttccatccttacagaggtaatccatgggcaaaggaagaattatccccttctaaaaccctcaaatgctggct

SEQ ID NO: 485436 - DNA, 456 bp, Homo sapiens
gccctggaagggtcactgcaggagaaacagtcttcaaactgaacctcctaagcctggtcctgtgcacataagtgtyccataaatattattatccaaaacatgctcctcaacatacattaagatgtatatgatagatgctaacaatgttcttaacttaaaaatattgggagctcagtataagccagccaccacactgatcctgtacatacatttctctaatatctgacccctgatcctgaaatatatgtacccgatcctgtacatacatttctctaatacctgacccctcttcttaccctggctccgagctccgtgagggcagggaccatccctgtacccatttgctgttgtcctctggttcctccctctcttattctatgaggagttatcagaaagcagaacaagtgaggagagacacggaagcattaggtatcactaggcccacgttcatgaatg

SEQ ID NO: 485437 - DNA, 547 bp, Homo sapiens
gttccgaccccagggcaggccctctgattgtggggtctaggatggtgggagcatgcagaggcaccttccaggctgtggggtcaaggaggctggcagagcctaaggcagtttaggagactctgagagagcagcctggccaatttatagagtgaggcaggcttgcaagtgtagacaggagagtggagaggactttgtaggtgtctggctgcccaaggaagcctatagttttcttttgaagtctggttttggtatcagagtaatactggcctcataagatgacttgggaagcattgtcttccatttttttctgaaaagtttatgcaaaattgrccttcattcttctttaaatgtttggtagaattcaccaataaagccatctgggcctaggcttttctttgtgaaaacttttaaaattattgattggatctctgcttgtcataggtctttttagattttctgtttcttcttgagtcaagtttgttagtttgtgtcccaccagaaatgtgtccacttcatgtgagtttctctaatgtggttgctatgtagt

SEQ ID NO: 485438 - DNA, 549 bp, Homo sapiens
agcttgtcacggcttgtcactcagagagacccgagtgtgggcaggaccccagagctcattgagaattaatcagggttctgcactgctggctctggaaagtccaggtccaaacctcttggagaacaatggacctcgggagaagatacaccgtgtctgggtcccgcagcgggttttcagcaggttttatgctggatccgagaatccctatcctgacaagcctccaagtaccccgtggcaggctctttgtagaccaagcctggttaaatagcttctggagttcattctcccgaagaacgaggttcttaccagaagcagtctagaattagtatcatattactattgaacattcatggagacccttggatattcagacggctttctggccactgcctggtgtttgcccagctcccggggatgtgtggttgcctgagacacctggcagacgccctgcgagacrtagcctgtgcctggtgggcttagtggcctggggtgggttgggtgattttctgaacgaaaggaaatgcctctgaggtcacagaccatccagcc

SEQ ID NO: 485439 - DNA, 653 bp, Homo sapiens
acaggcatgcaccaccatgcccgggtgatttttgtatttttagtacagacggcatttcactgtgttggccaggctggtctgtaactcctgacctcaagtgatccacccgccttggcctcccaaagtgctgggattacaggcatgagccaccgtgcctgggcaatatgtttcatttcccaataatagcatcaagttgctgatattgatttggatgagctgaaccctctcccgccttgaggttccttcacaggagcctcaactcacatggtctgctggtgacttcaggcgtcctgacccatgacacaagacaggtttttttcctgtttgttttgttttgttttgttttgtttatctgtttgttttgagacagagtcttcctgtgtcactcaggctggagtgcagtgacgcgatctcagctcactgcaacctctgccccccaggttcaagggattctcgtgcctcagcctccagagtagctgggattacaggcacccgccaccatgcctggctaattttttgtatttttagtagagatggggttttgccatgttggccaggctggtctcaaactcctgaccacaggtgatccgctcgcctcggcctcccaaagtgctaggattayaggcatgagccaccgtgcctggcccacaaga

SEQ ID NO: 485440 - DNA, 514 bp, Homo sapiens
  misc_feature (1)...(514): n = A,T,C or G
gcattttgggggcatctcgattccgggagcaccaactaccgggtaagcgcagtcctggacccagagaggctggagaggtgggcgctggggggagtgagccgcgtgtccaggtgggggtcgattttccgtagagagcccttccccctgcatgcctttcttcccgggcagggccggtgtcgaaagctttggaagcggcgtgggggcagagccaggaaggagccccgctttatctcctgcgcgcatggaccacgtwgtctctggcgcgtcctgccccttcctctggaacagcgcgtgtcacaancctcccccgctctcccggggtctccttgccccgggtcacgcccgccagcactaggacccgagccagcgagcccagcgaaggagcccgcgcggggccgcaggtggcgcgcgggggcgaagaccgaaccggtggccgcagtccccccgagaacccgctgcggtcaccctgggccttgacgcagagctccaatcaagggtccgtgggtcagagcag

SEQ ID NO: 485441 - DNA, 616 bp, Homo sapiens
tgccatcatgagccctcttccaccatcatttcatgtcccctttgacctcagttgggtggggtgtcttacctgggtgggggaaccagacactcattyctgaagggtctgaatcctcaatggtctgtctttttgggggatagttcaccactcacttgtactattaattatgcaagaaccaacaggcaccccagagaatcctttgggtctagaactagtctccttcctccccaccatcccacatcatgtagcagcaactaaatttccccttggcaattgggatccatcactctggccggtatagtgaccttcctcttttcctgcaggttcagtggtgtatggagcccaaaatggccatgtaatcatctcgttttccacttcactggaaccaatgttgtgtctccaggtggaaacatcctgtgcaaaccagcaacactcaaaattgcaaaagtgggaagcaaacactctgcaagtgggttacgggatggcatagcagaccaaccataggcatttacctccttagagtttcagaagacagtgtggcctcagaagatctgcaaggatttgaggactgggcacttgtctgagtcctttctgaatccctaaggtcttgtccagg

SEQ ID NO: 485442 - DNA, 573 bp, Homo sapiens
gccatcatgagccctcttccaccatcatttcatgtcccctttgacctcagttgggtggggtgtcttacctgggtgggggaaccagacactcattcctgaagggtctgaatcctcaatggtctgtctttttgggggatagttcaccactcacttgtactattaattatgcaagaaccaacaggcaccccagagaatcctttgggtctagaastagtctccttcctccccaccatcccacatcatgtagcagcaactaaatttccccttggcaattgggatccatcactctggccggtatagtgaccttcctcttttcctgcaggttcagtggtgtatggagcccaaaatggccatgtaatcatctcgttttccacttcactggaaccaatgttgtgtctccaggtggaaacatcctgtgcaaaccagcaacactcaaaattgcaaaagtgggaagcaaacactctgcaagtgggttacgggatggcatagcagaccaaccataggcatttacctccttagagtttcagaagacagtgtggcctcagaagatctgcaaggatttgaggactgggc

SEQ ID NO: 485443 - DNA, 656 bp, Homo sapiens
gttgcgtgctctggtaacgagccagcccagaacccaagcagctcgtagcagctttaaagcaatgacatcgtttatgtttctctttcacaccacatgggtgtgggggggtaggagggacctgggcatatctgcggggggctagtgtgtttgcgctgctcagatggtggctgctctggggtcatttgaaggcttcctccctcgtctgatggtggcactgtctgctgactgggaccttagctgggctgttggccagagctctgttaacttaaaaatcacacaatctgtaaatttagcaaaggagacccttccatgtcttgtaaaggactgcagcctgcagggtgctcctttggagaggctgggaagcttggcctctggtagagactggaaactggcacttcagaggaggaggagttggatgagaatttaagctgaatgggttggcccggtatacatatttaacaggttacaaggggagccataatatgtttataatttggtctcttattaccacaaagagtctgttccatcagtctcatgatctctattttaacattaatgctggtcactcatgtctaaactgcgtaaaggaaygggtataacgggctgtgtctgacttgccatctccccatggtcatctctgactctgtggctggcag

SEQ ID NO: 485444 - DNA, 556 bp, Homo sapiens
tgaaggttatatgaacaccacagggggagaagctcattttcagaagtctgtggacagatgatagccagtctttgtcctaatatgatctaaaagggtgcacagcttatataaatgaatcgctatgttgagaggcaattattatttgttggttggttaggtgacaaggtgacagaatgtggacctcatggttgatggtgatgcttagcttgactttctgttgatagaggtgtttggaatggtcattccctcaatgaaggtgaaactcatacggtaattcctctttttttttttttyccccttcctttctctcctttgcagatgagaagcccaaggtcaaccccaaactctacatgtgtgtgtgtgaaggtctctcctgcggtaatgaggaccactgtgaaggccagcagtgcttttcctcactgagcatcaacgatggcttccacgtctaccagaaaggctgcttccaggtttatgagcagggaaagatgacctgtaagaccccgccgtcccctggccaagccgtggagtgctgccaaggggactggtgtaacaggaa

SEQ ID NO: 485445 - DNA, 624 bp, Homo sapiens
caaaatcacgggcaatgcatcatacttaagagagcatttgaaaatgtgtcaataattataattacacacttgtagcagatctaatatactttcaccaccctttaacttcaactgatgtgaaattaaagcyagttacttaaaaatgcaactcttagatcataatttaatcctaaagtagatataaaacctgtcacactagagaggtacagtacattttactcaagaggataaaaggccacggcattataatacatcattttaggtaaggtgaccacctttaatgtggaaagggtaaaatacattatctagctgacataattttgaatatttactttatccatttgtatttaaagattgtctcttcaaaattatgcatgacccacagcacagagataactgctaaactttaggattatttcctaccaatcttttttttctctacatccatatatatacgttaactacaaatatgaaagtgtactatgtttcatgtttatgtttatggaactgtactacagaactgtacataatttatatgaaaggaattatactatgttttgagtgtcctgcttttttcatgtaatattttgtgtactctctatagtcattcattcattgcaacaa

SEQ ID NO: 485446 - DNA, 580 bp, Homo sapiens
tggcttttccccagagcctgacccattgaagttactctttcaatgctactttctgaaaatataccaaaattgatagaaaaacttaagttttccaagaacccaaataaaaaatctcagagtaaatcaataaaaagtattagtgctgtcactcagattttgtagcaagactaattaaagagtatgcacatacccatgcaccaaaaattaagattaagcattatcaacttagaaaaattcaaaaacaaatgggagttttcattgacttactgtattctatcttagttaagcagggcacatagttttctgttggtgatacaatcagtacatgaaataaagtatggtgtgtgaaataaagcctttccgtgtgcccaggaagcacaaaagtggaaaggacacagaggcattgaggagagacagcaaatccttcctcatccatttcttaaagtctccagagaagacagggagaagcacaaacttaaattcatttaaatggttctagctttgcccttttggactttaagaaaatcaacyaacaaattattttttaaaaaaacagttttaactaacaacttttatttgc

SEQ ID NO: 485447 - DNA, 97 bp, Homo sapiens
gctgcacacaatgaatctaaagccactttcaaacaccggcccttcaacttcaacaacagcagcagggargcaatcagagttcgtactttaacatggg

SEQ ID NO: 485448 - DNA, 617 bp, Homo sapiens
tctgttataaaatatttttattcaattttatttagtcataaagtttacaaactttcttgacagtgagcttatattggatatggatctgattcctcttccagttgctcatttatggttgagtgcagttacccctatcccaattaattttactrttaacttattatgtaaatcattccaagtgtcacattatctgcactttattcactgattttctgcagctctctgagtattctttctaacatccttattctgtatttctattttgaggttcaagaaaggctttgatactgagtaccatgaagtgttagaatacaagaaagtttcacattggttattaatctccagttttgcagatgagaaactcaagaatcagaaaaatgatgagattgtcccacactctttgctagtaagtgttatattgaaacaattgagatttttcactcccagcccatccagttgcctctgaactatctccttagcaatatatacctatctctcataatcagacaatcccctaatgactaaatcaaaggagtcctttgtaacttcaccctttcctagttgctttgttctcagttgatgcaaatataagcaactccttgaatagcatgtgctct

SEQ ID NO: 485449 - DNA, 611 bp, Homo sapiens
acagtcacactagaagtaaggctgagctgcccatctcaattattccaacattaattaggaaggaaacagaacaccagcaggaatttgcctaaagcaattgattaattgtctcaagatttccaaggccrttacaaaaagtggaaaatcccaggttttgaaacgagacagacttgaattattaataatagctcttcccttcactggttgagttcccaccagaagccagtttctttatttttaaatagaggggaacagtctgtaccttccagtttgttcgaggattaaatgggagcgtctatttaaagccactgcacagtgactgccactcagaaagggcttggcgacctgaggccgtcagcactgcctgtgtctttccttggcccctgcagccttgcggtcctggccatcactctctgtggagtgggacagggcatccagcctcactttgctgatgccctcggctgccgtctctgcaggcacacgtctgtgccacagaaactggcacactgcgggtcagcctcgagtgcatgagggtgttttacttcctaattagcaaaggcatagctcttgttaaaatactggcagatcgaatgtctcattaccttttattc

SEQ ID NO: 485450 - DNA, 611 bp, Homo sapiens
acagtcacactagaagtaaggctgagctgcccatctcaattattccaacattaattaggaaggaaacagaacaccagcaggaatttgcctaaagcaattgattaattgtctcaagatttccaaggccgttacaaaaagtggaaaatcccaggttttgaaacgagacagacttgaattattaataatagctcttcccttcactggttgagttcccaccagaagccagtttctttatttttaaatagaggggaacagtctgtaccttccagtttgttcgaggattaaatgggagcrtctatttaaagccactgcacagtgactgccactcagaaagggcttggcgacctgaggccgtcagcactgcctgtgtctttccttggcccctgcagccttgcggtcctggccatcactctctgtggagtgggacagggcatccagcctcactttgctgatgccctcggctgccgtctctgcaggcacacgtctgtgccacagaaactggcacactgcgggtcagcctcgagtgcatgagggtgttttacttcctaattagcaaaggcatagctcttgttaaaatactggcagatcgaatgtctcattaccttttattc

SEQ ID NO: 485451 - DNA, 553 bp, Homo sapiens
tatccagggtctcgtcaatgtttggtacatagtgagtggccttttttgtttgtttgtttggttgtttttgagacagagtttcactctgtcacccaggctggaatgcagtggcacaatctctgctcactgcaacctccacctccygggttcaagcgattcttgtgcctcagactctggactgaagtagctgggattacaggcacccaccaccatacccggctaattttgtatttttagtagagatggggtttcaccatgttggccaggctggtctcgaactgctgtcctcaagtgatctgcccacctcggcctcccaaagtgctaagattacagcatgagccatggtgcccagccatgagtggcttttaatttaatgttatgaagcataaacaaccaaatcaagagaaaaatccaacaatggaaatatagcaatgaaaaatatactagtaaatatttattattaatatggtcaagaaaataaatggcatgatggagaaatccaccagaggactggaatgtattaatatcgaaaagaatcaaattgaatttttaa

SEQ ID NO: 485452 - DNA, 614 bp, Homo sapiens
agtttttcaggaaatcacatgttagggctctggcttgagtcaagaccatctgcagtattgacagaagagtgaaataatggaccttaatattgaaaatacttgaatttctctcccaaaatttattactcttctctgttttctgtttgagaaaataaaagtatggctatccattttctaaagagtacattcatggcacacatagaatcatttttcataaaggattaagagaaataataacacatacccagaaaatcggattgcttgagatgcgtatgtgattttcaacgtgaataatgcacagttacattctgaagagggattgtggaggccccttagataagccagtcagtaggagatgcaacctcaggtccccatcccgcgtgagacaaaggggctatttagaagcartctggtacaatgttggctgttagcaggttctttcttgaggggtgctatgcagcccaggtgcctctgattgaggatgagcctgtgactgccctgactggtaagtccaggttcagttgtcatgatgttggaggaccctctgtccctcagagccaaaatcacccgctcctgggtcctagttaagacccctgatgctagtgcctctttgt

SEQ ID NO: 485453 - DNA, 571 bp, Homo sapiens
cctgttccacaccctgaggactgtggtagctgctgactctgagccacaacctagcactgctgtagcagttgctgtgtgctcatgttatgaaatgcaggctcttatgcatgcttcactccatgtaggatctggtttgtttcmacttttagtaattctcactcacctgtggtatgcttttcgttctccaaagctatctgattcgatgatttcatgtgctggggaaggtggagggcaagattcctgaaggctggctgagtgcattctagggcatcaggacaggactgggtctttggacaatttcacatttcaatttttctatctctggtgatagtagtggttattaaagtttctggtccaggaacccttaggggttccaaaaatcctttgaataactccatgagttcaaaatcattttcatagcaatgccaaagtattgtgtcttttttaatgttaccatagctgtagagcagggttttccagagattacgaaacatgtgctatcacaatggagtgcacacaggcaaaccaggtagagttgatttgtcttccattaagccggacgttaaggaga

SEQ ID NO: 485454 - DNA, 571 bp, Homo sapiens
cctgttccacaccctgaggactgtggtagctgctgactctgagccacaacctagcactgctgtagcagttgctgtgtgctcatgttatgaaatgcaggctcttatgcatgcttcactccatgtaggatctggtttgtttcaacttttagtaattctcactcacctgtggtatgcttttcgttctccaaagctatctgattcgatgatttcatgtgctggggaaggtggagggcaagattcctgaaggctggctgagtgcattctagggcatcaggacaggactgggtctttggacaatttcacatttcaatttttctatctctggtgatagtagtggttattaaagtttctggtccaggaacccttaggggttccmaaaatcctttgaataactccatgagttcaaaatcattttcatagcaatgccaaagtattgtgtcttttttaatgttaccatagctgtagagcagggttttccagagattacgaaacatgtgctatcacaatggagtgcacacaggcaaaccaggtagagttgatttgtcttccattaagccggacgttaaggaga

SEQ ID NO: 485455 - DNA, 603 bp, Homo sapiens
acagtttctctggaaagaaaatgattggaaggagttatttaacaaattccacaggtgataagcctaagatgtcctcagggtctctgttctgttgtgagtgttctagctgctttttctcccacggaaatttaatagattgtggtttttctactttcaattaatcaaaattttttagactcattgtgtgcagaagagcatagttctagctgttaagaaccaattgcaacctcaagaagatccagatgttcccttcaggggtttagttggatgrcagtgccagatgttcctacaaagaatggcatgtggtggattaaaggatggccataaattatttgctgcttcttccactgagcagtgaaatctctttccccactcttttaatctgagctaggctcatgactcctttgaccaatagaatgcggcagaagtgatgctgagccagttctgggcctcgccctaaagaggactgggagcctctattttcttgctattggaagacagcctctatgctgtaaggaattccagactattctataaaaatagtggagaggttctggaagagaaaaagctatgaggagagactccacatgaaggagaatttag

SEQ ID NO: 485456 - DNA, 603 bp, Homo sapiens
acagtttctctggaaagaaaatgattggaaggagttatttaacaaattccacaggtgataagcctaagatgtcctcagggtctctgttctgttgtgagtgttctagctgctttttctcccacggaaatttaatagattgtggtttttctactttcaattaatcaaaattttttagactcattgtgtgcagaagagcatagttctagctgttaagaaccaattgcaacctcaagaagatccagatgttcccttcaggggtttagttggatggcagtgccagatgttcctacaaagaatggcatgtggtggattaaaggatggccataaattatttgctgcttcttccactgagcagtgaaatctctttccccactcttttaatctgagctaggctcatgactcctttgaccaatagaatgcggcagaagtgatgctgagccagttctgggcctckccctaaagaggactgggagcctctattttcttgctattggaagacagcctctatgctgtaaggaattccagactattctataaaaatagtggagaggttctggaagagaaaaagctatgaggagagactccacatgaaggagaatttag

SEQ ID NO: 485457 - DNA, 542 bp, Homo sapiens
tttagttcttatttgaaattagtaatttgtgaattcttttacaaatgtataacaatagacaaatgttcttcagcactccatttttcacaacagtgaaacactgtaaatctctcaggtgtcaatatctcacatagaaaatctgatctattactcattttggcaatattaaccatttatgctacatgaataaatgtgaccagttctaatcacaagagtcacttgattttgcatataactagttcctaacatatatgaacatgtatataatattagttttaaggaaaattgttttctcacyctgaatatagtctttgggaataaaacttgttagtattctataaacaagcttaaaatgtttttatttaaagtcttgagccatctaaatattgtttaatgagttatcagattagatggtgctttgctatgtctttgtattgttaccgaagttcttatatgaggagtggaccagctggctctgtggggtcgcaggccactggcttcctagacttgagagagagctaaagcagaaggcttctgaggtt

SEQ ID NO: 485458 - DNA, 608 bp, Homo sapiens
aataatattttcttaattgcactttacaccatgtaaaagtatgtagttgatttataatgtttacttatttctgtctcctctcttatatcagattagtacctcagttgagaatagtgatttaatctgcttatttatggctctatctcttgtgcctgaaacagtgcatttatataacagatgctcaataaatgtgtyaaatgcatgataagtaaactttttaaatttaattcctttattaatttcagatatttaacatgtctcaatggtgagaagaaaggttaataacagcaaattgtatttactttctccgtgtcaatatatattttgagtgaggtgagttttagttgtgtccacctctcaaacacttgtaatgctaagtgggcacatcatcagtgtatcaaggggactgcttccctctcatgctgagtgggaattttgtcagaatgttcctgctattctggctcctgctgcccaaaaggtacagggccatatgtccctacaacaattacagaaaaaaatagaacaaatcctagaatcccgccaagtcagaatatcaagttttctgcacataccagttttttgtactcagatggaaactgttaaaagtg

SEQ ID NO: 485459 - DNA, 330 bp, Homo sapiens
ttcataaccccactggcagagacagtttggctctcaratggtgagaactatatctgattatgtactcagtggtcaggcaggctctggacacagatctgtaccctttcaagagagacagccgagagagcagaagtaaagaattttccatgaagtgtcatactgattaagattttgttctcggtaaactggcatattacctcaagactgcaaatgtttacaggttgggaccagagaacatctcccttcaattaagagcaagtatcatattgcctaagggttaacagtacttaaatttcgaaaatgtgttcaatttggattctaataagccct

SEQ ID NO: 485460 - DNA, 419 bp, Homo sapiens
tagtgctattttccatcttcatctaaaatagatattaagaactcttaaactgctgaccacatcagctgtcgagatttctgtgaatggaagttcgaatttatggcaatagtagttgaaggaagtatcctttatgggcactataagattgtcttcataaagttaggctataaaatcaacattttacaaattaaagcagaaatataaatcacactaaagaaaatgaatggatckcaggccagaaagaactcgtcgtaacctgattgtatgtattaatataggttacagactgaatctgggggatttagcctaggaagccaaggggaaaaaaaaatgaatctcagaagtattttggttgaactagggaatctaaatccatgtccattaaaaggagagggaactggacaaaggacttcaaccat

SEQ ID NO: 485461 - DNA, 392 bp, Homo sapiens
acatttaatccaattataaagtgttgcaaaaaaaaaaagagaaaagtaatctatgctgttagaatcctatagtggaagtttgtggttgtgtcaggtggaggtaaggtgattagtgactaggaggaggtgtaggaggcgtatgggatgtttgtagcatctttttttaacaaaaatctggttgttagttacatgattaacttcactctgtgaaaattcatcaagatatacactttcctgtatgtcagcagcatgtcagcatttcaataaaaatgttactaaaaaaataagctatgaayttgctccccaaaaaagtgtacatagactatcccttcctctcctatcacagtaaactaggatacgggcgctcaagtccaagtggtaatttaatagca

SEQ ID NO: 485462 - DNA, 392 bp, Homo sapiens
acatttaatccaattataaagtgttgcaaaaaaaaaaagagaaaagtaatctatgctgttagaatcctatagtggaagtttgtggttgtgtcaggtggaggtaaggtgattagtgactaggaggaggtgtaggaggcgtatgggatgtttgtagcatctttttttaacaaaaatctggttgttagttacatgattaacttcactctgtgaaaattcatcaagatatacactttcctgtatgtcagcagcatgtcagcatttcaataaaaatgttactaaaaaaataagctatgaacttgctccccaaaaaagtgtacatagactatccctycctctcctatcacagtaaactaggatacgggcgctcaagtccaagtggtaatttaatagca

SEQ ID NO: 485463 - DNA, 392 bp, Homo sapiens
acatttaatccaattataaagtgttgcaaaaaaaaaaagagaaaagtaatctatgctgttagaatcctatagtggaagtttgtggttgtgtcaggtggaggtaaggtgattagtgactaggaggaggtgtaggaggcgtatgggatgtttgtagcatctttttttaacaaaaatctggttgttagttacatgattaacttcactctgtgaaaattcatcaagatatacactttcctgtatgtcagcagcatgtcagcatttcaataaaaatgttactaaaaaaataagctatgaacttgctccccaaaaaagtgtacatagactatcccttcctctcctatcacagtaaactaggatacgggcrctcaagtccaagtggtaatttaatagca

SEQ ID NO: 485464 - DNA, 580 bp, Homo sapiens
atccaggtgctcaaatggtgttgtcagtactctggctatcttgtcatctggggattcttccttcctctgtataattgcatcattctcagagaagctctttccagggcatgggaaacatggctactagcatccccaggccttcctcttagtggytcatgatctaaaagggagagaaacattcctcctttcagtgcccatgtgtagaatctcaaggcaggtttctaaatggcccacttgggtcacacccctccacccctgaatcatcattagacctctttacaccttgggtctaccataaagacttgagccagcttaaagtcaggtgattaaatgggcatccatgaataaaagccccatcagaactacagggaatggtatgggtgttgtggaggtgtggtgggaaaagaagtgcccatagaaaaggggactagaagtagaaaccacttctccaccttacctatccaggtgccataatgcagataatcatctgtccctattttatcacacttggggtcctccagtcctttactgggccactcaaatctcaacttttttttttctaagcatcctctaaattaca

SEQ ID NO: 485465 - DNA, 638 bp, Homo sapiens
gatagggcaaatatagctggaggattgccacagcatcttttccaagaaagctggtcttgggggagtgtgggaccctgagaagaatttgcgcagggctaactaaggcaacacagccaagggagaaatgtagtctaagaggatagccaagaatatcaccatggaaacagtctccaagagccaagcatagaagatgatccaaaggtaaaagggaggtcccaggtcactgaggtgagacactcaggagatttggtggaggtaagaatgcactgctggctggggcaaattattcaggactgagatgagcaggagatgatccctcactccgaagtggtgctaggatggaaagatctgatgatatatgtgctcatataaactcagatacaagcagtagcactaggaattatttcaggattctacctgagcaattcaaagcagggtgattttaacagaagtagctgagacagaagatgatgtaggcagagcaataatgagttaatttttgggcrtgatgaatgagaaacacctacatgctaaggggacttgttgcatgtaaaactgtagagcttaaatttggaaataaaatgttgagactagacagtatgtagctttagttaaagccacaatactggatgagaata

SEQ ID NO: 485466 - DNA, 630 bp, Homo sapiens
ttccctctttgggttttaggctttattgctgtcattttaatgacagatattaaacacagagaattctcatctgtatttcctccaacaggctgagctatctgctgcatttgaacatgaaatgatcccaggaactggtatttccaaagtctccttcccctatatcatccatgcaaccatgctaggaatttatgacaattctgaagaagaacacatgtatcttcagactaatttcattatcatactaccaaaaatatagtaaatatctaatacatatttgaatgaattaatgaatgaagacttcattaacactttggcaggtggaccttttcatgaatctgccattaatcttcatttctaaatgctaagtgagcacctaccgtgtataaggaaattgtgctargtgttaagaaattcaaagatgcatattatcatacattccactaacttgctatttgttgataaaaaccacacgtgtacattaaaaaatcaatatcataaagtatgaaatgagttattctaaataataagtaagattgcaagttttctaaggatagaaaagaatgagatattctcttgagttggtcaagataagagaaaagaagtaggaaggctaagtagcttatggaataa

SEQ ID NO: 485467 - DNA, 630 bp, Homo sapiens
ttccctctttgggttttaggctttattgctgtcattttaatgacagatattaaacacagagaattctcatctgtatttcctccaacaggctgagctatctgctgcatttgaacatgaaatgatcccaggaactggtatttccaaagtctccttcccctatatcatccatgcaaccatgctaggaatttatgacaattctgaagaagaacacatgtatcttcagactaatttcattatcatactaccaaaaatatagtaaatatctaatacatatttgaatgaattaatgaatgaagacttcattaacactttggcaggtggaccttttcatgaatctgccattaatcttcatttctaaatgctaagtgagcacctaccgtgtataaggaaattgtgctaggtgttaagaaattcaaagatgcatattatcatacattccactaacttgctatttgttgataaaaaccacacgtgtacattaaaaaatcaatatcataaagtatgaaatgagttattctaaataataagtaakattgcaagttttctaaggatagaaaagaatgagatattctcttgagttggtcaagataagagaaaagaagtaggaaggctaagtagcttatggaataa

SEQ ID NO: 485468 - DNA, 578 bp, Homo sapiens
ggaaactatggtttgatgtcagagagaagtggcttgaattcagagggacagcttgatggcataacttctgagaggagtctggccaggaatggccaaactccaggggaagattaccttcccgctctgccctcttttcatttccccttcycaccaagagccgctttcatcagttataaaatcaccttcattcaccaccttcaatttgttcatgttacttcattcctcttggagactggccaagaacttggatgccatgagtgtcagagcaaaaagctgtcacactgaccctccactgagctgttaacacttaagccatctgcagacagcaaagctaaaagggcactgtaacacttcctctgggcttcgggtgttgcgagcaccctcccctagatgctgctgaggggctggtacagagtatgcccttgccagtgcccaaaagcactcacaccagctcctgcacttgcttatctgtgctccacctcccacaaggggtggagcagtgagtaagtgaagcttgcccctgccagcacccatgaactccagttcctgcccttgaagggtcaggaaaatatgctgct

SEQ ID NO: 485469 - DNA, 578 bp, Homo sapiens
ggaaactatggtttgatgtcagagagaagtggcttgaattcagagggacagcttgatggcataacttctgagaggagtctggccaggaatggccaaactccaggggaagattaccttcccgctctgccctcttttcatttccccttcccaccaagagccgctttcatcagttataaaatcaccttcattcaccaccttcaatttgttcatgttacttcattcctcttggagactggccaagaacttggatgccatgagtgtcagagcaaaaagctgtcacactgaccctccactgagctgttaacacttaagccatctgcagacagcaaagctaaaagggcactgtaacacttcctctgggcttcgggtgttgcgrgcaccctcccctagatgctgctgaggggctggtacagagtatgcccttgccagtgcccaaaagcactcacaccagctcctgcacttgcttatctgtgctccacctcccacaaggggtggagcagtgagtaagtgaagcttgcccctgccagcacccatgaactccagttcctgcccttgaagggtcaggaaaatatgctgct

SEQ ID NO: 485470 - DNA, 526 bp, Homo sapiens
tgttccactctgattcctcacatcctggcctgagtaataattttagaaatagatatgcgacttaagcttgtccaatcagaatgaatttcaaaatttgctctaaggatggtgggacaaaggtctcttctctcttctaaggcaggtctgaacgaggaagcatctagctgttggaactgtagcagctctcttggagccatgaagtcaggcttagaatgcagcccacagcaggtgaagtagagcaaagaaatgggaagtaaatgggccttaggacaacactaggactccatatcaagctctctggtagctagccctatttccagaaatttcatttatatgaggcattttattaagtctgagtcaggatttctgttactcataatcaaatgtgttgttaagtaatttgcttgtgaaggktatccctggcttcaatatgggttttggtcaagatcctttataaacctgatgtataatttgtcaatagtaaatgcatttccaatgtgttttaccttcaagcaaaaaggaactg

SEQ ID NO: 485471 - DNA, 427 bp, Homo sapiens
ttttagcatcattgtggaaggagacaaattcagcagtggtcaagcacttaaccaaataaagcaagaaytgagggtgtgaggaacaggaagacacaagctctactgtgggattttctgaggtcaaatgatgtgtaactccaggtttttcaaacattagcaatggaatcagtaaaagtattgtagccatggagagatcaagcatctcaaacagcactgattctaatacagtgtgaatgggctaattgcaacaactagggtgaggtgtgtgggtgaagggggagctgtgtgagtgaatgggtggtctcaaagactgctttggactccagtatgaggttggcaaagcaggaaaagggcccgcagggcagtacagaattggccaagtctgatggttcctgcaagggtctcccagtttggacaaagaaactcg

SEQ ID NO: 485472 - DNA, 427 bp, Homo sapiens
ttttagcatcattgtggaaggagacaaattcagcagtggtcaagcacttaaccaaataaagcaagaattgagggygtgaggaacaggaagacacaagctctactgtgggattttctgaggtcaaatgatgtgtaactccaggtttttcaaacattagcaatggaatcagtaaaagtattgtagccatggagagatcaagcatctcaaacagcactgattctaatacagtgtgaatgggctaattgcaacaactagggtgaggtgtgtgggtgaagggggagctgtgtgagtgaatgggtggtctcaaagactgctttggactccagtatgaggttggcaaagcaggaaaagggcccgcagggcagtacagaattggccaagtctgatggttcctgcaagggtctcccagtttggacaaagaaactcg

SEQ ID NO: 485473 - DNA, 427 bp, Homo sapiens
ttttagcatcattgtggaaggagacaaattcagcagtggtcaagcacttaaccaaataaagcaagaattgagggtgtgaggaacaggaagacacaagctctactgtgggattttctgaggtcaaatgatgtgtaactccaggtttttcaaacattagcaatggaatcagtaaaagtattgtagccatggagagatcaagcmtctcaaacagcactgattctaatacagtgtgaatgggctaattgcaacaactagggtgaggtgtgtgggtgaagggggagctgtgtgagtgaatgggtggtctcaaagactgctttggactccagtatgaggttggcaaagcaggaaaagggcccgcagggcagtacagaattggccaagtctgatggttcctgcaagggtctcccagtttggacaaagaaactcg

SEQ ID NO: 485474 - DNA, 427 bp, Homo sapiens
ttttagcatcattgtggaaggagacaaattcagcagtggtcaagcacttaaccaaataaagcaagaattgagggtgtgaggaacaggaagacacaagctctactgtgggattttctgaggtcaaatgatgtgtaactccaggtttttcaaacattagcaatggaatcagtaaaagtattgtagccatggagagatcaagcatctcaaacagcactgattctaatacagtgtgaatgggctaattgcaacaactagggkgaggtgtgtgggtgaagggggagctgtgtgagtgaatgggtggtctcaaagactgctttggactccagtatgaggttggcaaagcaggaaaagggcccgcagggcagtacagaattggccaagtctgatggttcctgcaagggtctcccagtttggacaaagaaactcg

SEQ ID NO: 485475 - DNA, 597 bp, Homo sapiens
tgagtagtcaagatttcagcctaaactatagcatgaccaagaaactcgtaagtggttccatgattgtgtctgatggatttttgtgtcaacattagccacttttgacttttctgctcgaagaaataaaagatctcttaatcggtttgcttagatgaaacaaagggaatttctgtgaacctagtggatagagaatttcctgccttttcataaagcagacaggtatttcaaaccattgacaaggagtgagaagtaatttgtgcctcctggctgacagcccatttttccaacagccytcagccaaagggcagtcggcaaaggagccagttgaataggattggctatgcctgtgagaagtgatcatctggtgagcaaaaaaaaaaaaaagtattcaaattggcacccgttgaaatggggcccagcaaacagagtcaatttattatggtcctgataatgcccctgcactcagcccatttaaatggtttgtttctcttatatctgatattgcatagagaggctacaatgggcaaaatgaggccacaagcaacaaatggtttcacggtaatgatctaatttcctgttaatctactgcttattaag

SEQ ID NO: 485476 - DNA, 597 bp, Homo sapiens
tgagtagtcaagatttcagcctaaactatagcatgaccaagaaactcgtaagtggttccatgattgtgtctgatggatttttgtgtcaacattagccacttttgacttttctgctcgaagaaataaaagatctcttaatcggtttgcttagatgaaacaaagggaatttctgtgaacctagtggatagagaatttcctgccttttcataaagcagacaggtatttcaaaccattgacaaggagtgagaagtaatttgtgcctcctggctgacagcccatttttccaacagccctcagccaaagggcagtcggcaaaggagccagttgaataggattggctatgcctgtgagaagtgatcatctggtgagcaaaaaaaaaaaaaagtattcaaattggcacccgttgaaatggggcccagcaaacagagtcaatttattatggtcctgayaatgcccctgcactcagcccatttaaatggtttgtttctcttatatctgatattgcatagagaggctacaatgggcaaaatgaggccacaagcaacaaatggtttcacggtaatgatctaatttcctgttaatctactgcttattaag

SEQ ID NO: 485477 - DNA, 572 bp, Homo sapiens
acattacatttaccattcctactttgctccttttcctgccccctagttagccattccttccccttcatttatgtagggggacttttctggctgcaagcactcttccccgatgagtacaataatcaaaatttataatcttaatttaataatcttaatttattgaggccttagtatggcccacaaattattctaaatgatttacatacaccaagccatttaacctcacaaaaccctgtgagttgcatatattatcacctgcaatgtacagaaaaagaaactgcacaaaatcatactaattctaaaaagccaggatgggatgtaatccyaggcagtctgactccacattttacctttaatgttacacacaagttgatttcttccaaagtgtacttctatgatagtattcagaatcattcattgcacttgtgttcattttagtgtttccatattacgttttaaacccccttagggaaaggaatatattttacttacctgtttactcaggacttagcagtgtctgatacataaaaggccttaggatggctaaatgagtgtacaacaatgttccctaa

SEQ ID NO: 485478 - DNA, 474 bp, Homo sapiens
ttggttgtataaggaatggcctagaaccctgtggatgtgggttgtcttcctcaaaacagacaactttatgagtcactcaaaaattaggtcaaagcaacatttgcagtcatggcatgtgtgacctccaaaatccaaagaagcctaaactacaaagtacatataagggatattcactcacattccgatctattgaatccctaaacacttaactaaagtgtcaagtccttgaaatgttgaaactgccttaaatttatcattcacccttctggcatgtatgcgtcttattaggatatccagagtatttgctattctctgtccactaggtccaattagaattatcattagacattgatatagtggactaacatgatgtttctgaggaatgtcaagatgattaaggtcactgcagattacagtgtggmagagagcaaaagagttaacctagtgcttggacaagacaatagatatgttcag

SEQ ID NO: 485479 - DNA, 593 bp, Homo sapiens
cctcttgaatgtattttcgttttttatgttcattaaatttgatctggccagttgtgctggctcatgcccataatcccagcactttgggaggctaaggtgggtggattgcttgagctcaggagttcaagaccagcctgggcaacataagagaccctgtctctacagaaaaatacaaaaattagctgggcatggtggtgcatacctatagtaccagctatttgggaggctaaggtgggaggatctcttgagcccaggaggttggtcaaggctgcagtaagctgtgatcacaccactgcactccagcatgggtgacagagtgagaccctgtctcaaaaacaaaacaaaacaaaacaaaaaacacaggttttttaatcttaaaaatcagcctagttgctgaatggagagtggcctgggggaagagggagctagaagtccgcaggaggctgctgaagaggcagaagtgagagtgagtgctggcccaggtcaggcagcagagggagaggaggagctcttgcaggagaagtggcygggacttggtagtggctactgtggaacaggaggaaggagagcgaggggtccagggcagctccctg

SEQ ID NO: 485480 - DNA, 540 bp, Homo sapiens
tccctagaaaaaacacatgaggcatggatcaacattctgtgctttacttgggaaacccaacacagtgagagtgaggaaaaagggaaatgcagaaaggtcggagacacaatgcattcagcaccaaacwtcctaatgagctataaagacatacagcaggtcatatgggcagctgcatccaatgggcacatggtacttctccagagacattgtaccaggctactactccttgaagaagtccataggaagaaggaagaagggggaattcacctacccagtaatttcctttgtttcccattgctgaaatttggcccatgggttaacttttccatttttctgggaggtatatggggtctcattggcagtcatttgtgatggtatattcctccacaggagatgtcctatctcattcaaacccaaaagtagctataacagccagaaattttaggcatatgcttgcttggcctaacctgcatgaaacagctaaagggcattcacttcccttggcttaggtagcaagtaggcagaaaaaaatataaggcg

SEQ ID NO: 485481 - DNA, 628 bp, Homo sapiens
tgcaatgatatgcttcatggccatgtaaaagtgtctttgctgaggttattaggtcacgtaagctattaaagagtttcacttttttttttaaatgggaggtatcttgagatgaaatcaaaaaatcttgttatctttttctaatgttgaagatgcttggttacaaagtatagttatgtcaaaatattaatcattttttaacatttcaattggtttgattttatttttgtttttgcatttgattgttaaagtttttgttttcaatctatgtgcttactggaaagatcctcttaatgctcattagggaaaaggtttaaaagcaaagctgtgatttaaaagaagtgtcaatcataggttgaaaatataatgtgtgcaactctatatatcatcacattactcttacatgattgacttgctattatttaataagctcttctttttattgacttttaggttatatgaattattaaagaagactggttataacctcaaaattsattcttcttaggggtgaaagtgtgtcatattaaagagcaggaacctaaaaaacgtcaaaatctgtaagcatttaatatcagtatacatctgggcccattcttgggacagcttttcattgtttcagtctctatct

SEQ ID NO: 485482 - DNA, 628 bp, Homo sapiens
tgcaatgatatgcttcatggccatgtaaaagtgtctttgctgaggttattaggtcacgtaagctattaaagagtttcacttttttttttaaatgggaggtatcttgagatgaaatcaaaaaatcttgttatctttttctaatgttgaagatgcttggttacaaagtatagttatgtcaaaatattaatcattttttaacatttcaattggtttgattttatttttgtttttgcatttgattgttaaagtttttgttttcaatctatgtgcttactggaaagatcctcttaatgctcattagggaaaaggtttaaaagcaaagctgtgatttaaaagaagtgtcaatcataggttgaaaatataatgtgtgcaactctatatatcatcacattactcttacatgattgacttgctattatttaataagctcttctttttattgacttttaggttatatgaattattaaagaagactggttataacctcaaaattcattcttcttaggggtgaaagtgtgtcatattaaagagcaggaacctaaaaaacgtcaaaatctgtaagcatttaatatcartatacatctgggcccattcttgggacagcttttcattgtttcagtctctatct

SEQ ID NO: 485483 - DNA, 526 bp, Homo sapiens
tgctattattattattattacatacatacacccacacatggtttattacttaaakaatgtgatctaatgtgtatttgataagaggtagccatttttaatggagatgagtattgggttgggattcaaagaccttaattttattatttttttttttttgctgctaactctatggctttgagcaaattgcagaatctctttgttcttctggattccacatccgataaaataatacttgctcctcctggcttcatggatagtcatgagaatagattgtttgagtgttttgaagttctaaggaaaagatgtactatatgaacctagagcagtactataattggcctttaaaaagtttatccaatcctgggcaagctaatgttttctggtggtaaactgtacaaaataattattatttagtgagagagacagaagctttgagtcacccagatcttggtttgaactcaggtttgtcattcttctagctgtgtgactttggtcaagttattttcccatctgagtttcagtctct

SEQ ID NO: 485484 - DNA, 526 bp, Homo sapiens
tgctattattattattattacatacatacacccacacatggtttattacttaaagaatgtgatctaatgtgtatttgataagaggtagccatttttaatggagatgagtattgggttgggattcaaagaccttaattttattattwttttttttttgctgctaactctatggctttgagcaaattgcagaatctctttgttcttctggattccacatccgataaaataatacttgctcctcctggcttcatggatagtcatgagaatagattgtttgagtgttttgaagttctaaggaaaagatgtactatatgaacctagagcagtactataattggcctttaaaaagtttatccaatcctgggcaagctaatgttttctggtggtaaactgtacaaaataattattatttagtgagagagacagaagctttgagtcacccagatcttggtttgaactcaggtttgtcattcttctagctgtgtgactttggtcaagttattttcccatctgagtttcagtctct

SEQ ID NO: 485485 - DNA, 586 bp, Homo sapiens
cttggcctcacttccagacatttttaacctggttggtctggggggtgcatcagcatttttcaagtgccacccaggtgagtttattttttattttctgttattttagttttgtttttctgagacagggtctcactcagtcrcccaggctggggtgcagtggcacgatcacggctcactgcagcctcgacttcctaggctcaagcgattccctcacctcagcctcctgagtagctggtactgcaggcacacaccaccacgcctggctattttgtttgtgcgtggagacggcgtctccctaggttgcctagactggtctagaactcctgggcttaggggatttagaactcctgcctcagcctcccaaagtgctgggattatgggagtaagccataagctgccgtgctcggccccaggtgagtttaatgtgccgccagcattgagcatcactgctctttgttctctgtggaacaaacatgctttaagaaagaggtcgagatttgcccctcagtatgcacatgtgcatgtgtgtgatggtgtagggggatggggagtgtctgtacataaacgtgtccgggggtgtaacgcc

SEQ ID NO: 485486 - DNA, 641 bp, Homo sapiens
aaaagagtaacaagatcaccaatttgcatgagatatatttaacactgaacatttgcaactcctgaataaaagtaaattagtctattgaggctagctcataaaaatcatcttagagctacaaaacaattctgaggttttattcataataatatttggagstttcataagaaagatttgaagacttcaaattaaaatataatgaataggtctcagcttttctccactaaacacttgaaaattaagatgtactagaatgtagtgaaggcttagttttagcccttccttcaacagctctccctccctatcctcttctatttcaaagggatcctgtgtacaagaaagcatgaggaaatgcagggtataaggatcaagttgtttattaggaatgtctattcaacaagctagataccatataataagcgtataatgagtgaggccattttaataataactttgttacctactcattccatgagcctgacatcttgaactggtgttggtgaattgtgtggatatctagaggtcagttaagttaaaaaagactcacagatttgaacttctcttcacctggttattgtaacttaccttggaaggcagcaagtggcctgagttattgaatcagacaactcctgtttgaatcc

SEQ ID NO: 485487 - DNA, 581 bp, Homo sapiens
gttgaaaacacaaaggcttggatttgacatgcgtctggccctccatatcaagatctcttgcatacagcatatccttgaagtacacacgaaaggawaaatgtaaatgatcataaactgtttttgtgaaatcatcaaaaatgatgctctggcatgcaggccatctgctttctgctttttctccttggaatatggcttcagggaagagatcatatatgagaaaggaggttagcaagcctgactttggagagctaatgtgaaggaggtgttctggaaaacaccttgtggaatctctgagtctgaaagggatcttaaaagttcacctccatcaacctttaatgaataaaacctctcactcatcagtgaatagtgtccctgtgtaggtaacaagggactcactaggccacctgtttagtttagggtgagatttaagattaggaaattctcccttttattgaacaaaaatctgccttcccctctcttctagatgcttagtcatgctgtattcttctgagccacacaaaataattctacatttttttacataacaaacgatttaaataattcaagattgtttctatcta

SEQ ID NO: 485488 - DNA, 587 bp, Homo sapiens
gtgcaattttaactgaggctattcacagtaatacctcaattatctatcacagtaggggaaaagagggtctctagatacatgaatttccatgctgccttacttgaactatttaaaagttccaacttaaaacaagcaaataaaaataaaatattttaaagcacacggaatttgcacaaggaaatctttaaagctcacaacaaaaaaaagggttatctcctgctgtttcatggagggggcagtggctccatgctgctccaagctgtggctcttctcactccaggacttgggctgaggcatggcattgccatggcaggagcaggattgctgatggaaactgcgagtgctgttcaaaacatctgcttacacagggcatctggcacatctgctgacctgccattggctaaagcaagccatagggtcgagcccagggtggggtgggtataagttccgctctcctgggagccctgggtggggatgttggttcccttcacttctctggtttgtgtgtgtgtatgtgtgtggggaggtggtgacaatcattggggattgtgrcaaaatctaacatatgcactttcaaacattaatta

SEQ ID NO: 485489 - DNA, 415 bp, Homo sapiens
cactgaattaatatttaatgattttgagttactggagtttcaaactttactggacctaaaacacacagagtaaacagaattgctgctaattacaagtcataaattagcactttgaaagtctgttttcttattttaaaacacgttttgatccttctttccaagtgactgactcatatgtgttcaatgaaagaggacctgaaattagtacagatccccttgaaaccaaatcagtaggatatatttatcacacatttcagttttattcacatgcatagcccactcacttggttwgcatgaaactttaatgggatcttaaagtaattatagcacaaaatcaagtcttagataatgaacaaggtgtcaagtttactctagggcaatgactatttcatttcccaattaaaacgtctgcaac

SEQ ID NO: 485490 - DNA, 610 bp, Homo sapiens
ctggctgcttatgggatctcattgtggcatattgtgaaaaaaatagcaaaaatattgcttttggaatatagttacaaagctgttatcaatgagtgttaatatgataagtggcatggcagcttcttttgcaatacatttttgtcagagtagattatttctcctcgaagcccaaagtcattggaagtaaatcccattataacacagggtttgttttccccctggtacatatcggccaaggacattttctggtcaagaattcatgcagtagctttgctatatccacacaggaaatggctgtgacctttctggcccataaggttatacattttgacaggcggcacagagccaatccctccaaccacacagcacagacgacygcacactgttctcctgaggcatgctgttagtcatgttgtctaatcacattcagcaggtctggagcggaacattgttcagaatatcagaaaggcagaaatgctatgttgctgattcaatggaaattgccagcaagaagcaatgttcatagctgcctggttatttaatgtatctgaaatcacttctagaaatgtcatccctttctgtctctgtcaccttccaccacatccaactc

SEQ ID NO: 485491 - DNA, 532 bp, Homo sapiens
acattttttcatagtcagacattttttttgggaaggaatcagtgtgttgattgacattctggtaccagcccctcatctcattgtyatggactgggaggcgtgtttgaggacaagcactgatcctggttcgcactttgagtgacactgaatctggggccctatcccaggcttactgaaccagaatctgaggttgatccatatgtgtatgacgttttaaaactggtatagaagacattttaaaaagtactggccatggagaatattttaaagtccactttaaaatatgctatgttttacatgatcattaagcaaaagctgccaaaaagaagatttttggatttgctttgtttggcatctcacatttggatagtctttgaagatattcaataagtactcacacatgaatgatactttaacatttcaaagatcttcatagtcctggattctcttggttctcgaaatgaccctgtgttatttctgttatacatatgaggtaattcaggcttagtgagattagccctaaaccacagct

SEQ ID NO: 485492 - DNA, 532 bp, Homo sapiens
acattttttcatagtcagacattttttttgggaaggaatcagtgtgttgattgacattctggtaccagcccctcatctcattgttatggactgggaggcgtgtttgaggacaagcactgatcctggttcgcactttgagtgacactgaatctggggccstatcccaggcttactgaaccagaatctgaggttgatccatatgtgtatgacgttttaaaactggtatagaagacattttaaaaagtactggccatggagaatattttaaagtccactttaaaatatgctatgttttacatgatcattaagcaaaagctgccaaaaagaagatttttggatttgctttgtttggcatctcacatttggatagtctttgaagatattcaataagtactcacacatgaatgatactttaacatttcaaagatcttcatagtcctggattctcttggttctcgaaatgaccctgtgttatttctgttatacatatgaggtaattcaggcttagtgagattagccctaaaccacagct

SEQ ID NO: 485493 - DNA, 617 bp, Homo sapiens
caaatcattgatattctattaactctcaatttcttcatttgtaaaagaagtatagtagtattaatgtcacagtacaggaaaaaatgaaaaagttttatatttaataaccttttaaaatttagaattgatttagatttacagaaaacttaggaagacaatacagaaaattcccatatatcctacacccagtttcccctgttattaatgtcttacaataatatatttgccacaattagccgacctatattgattcattaatgttaaccaaagtcaagattttattcaaatatccttagttcttacctaatcttcrgtacaggttattccatccaggatactatattacatttagttcatgtcctctgggactcctcttggctgtgaaaatttttcagacattccatgtttttcttgaccttgacagttttgaggagtaatgatcaggtattttgtaaaacatccctccactgggaatcatttgatctttttctcatgatccaaccaaacttacaggttttggggaagaaggttactgaggtaaagtgccaggctcatcatattgtatccagggcacacactgtcaatgtgacttataagctgttgatgttaatcttgat

SEQ ID NO: 485494 - DNA, 617 bp, Homo sapiens
caaatcattgatattctattaactctcaatttcttcatttgtaaaagaagtatagtagtattaatgtcacagtacaggaaaaaatgaaaaagttttatatttaataaccttttaaaatttagaattgatttagatttacagaaaacttaggaagacaatacagaaaattcccatatatcctacacccagtttcccctgttattaatgtcttacaataatatatttgccacaattagccgacctatattgattcattaatgttaaccaaagtcaagattttattcaaatatccttagttcttacctaatcttcagtacaggttattccatccaggatactatattacatttagttcatgtcctctgggactcctcttggctgtgaaaatttttcagacattccatgtttttcttgaccttgacagttttgaggagtaatgatcaggtattttgtaaaacatccctccactgggaatcatttgatctttttctcatgatccaaccaaacttacaggttttggggaagaaggttactgaggtaaagtgccaggctcatcatattgtatccagggcacacactgtcaaygtgacttataagctgttgatgttaatcttgat

SEQ ID NO: 485495 - DNA, 450 bp, Homo sapiens
ccatagtcctgggtaatgtcaacatctttgtatatgatccacttgttatcctggcttctccaattattttgttatctgcttttcttccattgcctattttttggccctagatgagattattttcctgaatttccatatstttgaaattgtaagctggaaaatgaataacttattgtatggcatcaaaacatttaatgatgtaatgtttggcatatttaatgtgtatatagagattttggcttttggggtgaatggtgggaaaaaaccaaaatgtgataaaattctggttatttcttgatataatgagcaaagttctggaagaaagggataaagtcagaatagaactattggattgtcaagcagacatagaaagaacttctgcattgtggaaggagatgctttcatgtttcacctgacatttaaattgatcaaaagttacatgatttggat

SEQ ID NO: 485496 - DNA, 450 bp, Homo sapiens
ccatagtcctgggtaatgtcaacatctttgtatatgatccacttgttatcctggcttctccaattattttgttatctgcttttcttccattgcctattttttggccctagatgagattattttcctgaatttccatatgtttgaaattgtaagctggaaaatgaataacttattgtatggcatcaaaacatttaatgatgtaatgtttggcatatttaatgtgtatatagagattttggcttttggggtgaatggtgggaaaaaaccaaaatgtgataaaattctggttatttcttgatataatgagcaaagttctggaagaaagggataaagtcagaatagaactattggattgtcaagcagacatagaaagaacttctgcrttgtggaaggagatgctttcatgtttcacctgacatttaaattgatcaaaagttacatgatttggat

SEQ ID NO: 485497 - DNA, 508 bp, Homo sapiens
cctgctggggaatctctgccaagacacactgagcaagtgcttcttttggagccttgtgaaaaacaaaataaaagtgactttattagcaactgaattttcctggctttttcataaaagactagggatacttcagcagccactaaaatgaagcaattctaattcataggcctgtaccttttcttaggaaccgcccatgaaatatggaatgagttaactagccaatgttacttatgattgctattactatccctgctaacatttgtcaagtcctttttcggtgccagcattctaacatttgatgattttgttgttgttgttttataacttttaaatgtggttctttcacttacttggtattaatttktttttacttttttttacaacatttatagattcataggaagttgcaaaaacagtaaagaaaggtaccgtgcacccttcacccagattcctccaaaggtaacatcttgcataactatagtacagtatcaaaaccaaaaccaggcag

SEQ ID NO: 485498 - DNA, 498 bp, Homo sapiens
tcacctcaattttttaaatttggaaaatttaaaagaagttttcttattgtaagtgcaattactttatcttctcacgtaagccttkagctgaatagggattattatgtctggactgatcaataggtactggggagaatgcatagtgtggattttgctgtctgtgtgtaagaagtacagtttgatattattgattacacccttagtttctgctctgtttggaagatgggcagaagtgaacaccaagaggaatagagacatagagattaccatctgtatcagttagggttctccacagaaatagaaccaacaggatatatgcatatatagggaaataaatttattataaggaattgactcatgcgattatggaggctgagagtcccaagatctgcagtcagtaagctagagacccgggaaagccaatgatatagttccagtacacgtctgaaagcctgagaaccagaagagccaatgttataagttccagtccaaaaagcc

SEQ ID NO: 485499 - DNA, 475 bp, Homo sapiens
tctgtaacctgcaacattccttttgccatgtaatgtaacatattcacaggttctaggaatrggagcatggacatttgcgggtgggttgggggcagcgggggcaggtcgtctgccagcactttttttttactcacacctgaagtttatttgctctggagaatttaaatagtttactggtgcatagtacaatttggactggtgaacacagtaaaggaccaaacaaaacttaaacgatgaaaatgaaaacttccaagaccttaggtttaattggtgaaagaagaaagctgcctgttcactaacagaaatacatatgagaattcaacttaaagtgaaatattggcaaaggacttcagcagttaattagaattcctaggcaatttgcttctcccaagatgtattttgggaggtgtggggaggagtttattgactgtcagctttaaatgcttagacatgctaatttacattaattctaaag

SEQ ID NO: 485500 - DNA, 405 bp, Homo sapiens
ggagggatagttactatgtgcataaattttaattgaaagaattatgagctcatagctgttaaaatagaaaataacaggttcatttgcataccttcccaaagtataaaaaattaaagcatttgttctaggctgcggaggcagggattttagtggagctaggattcaatatttgcaatattgtttatattttaaactatatggaccrtgataattatccagaaactattaagattgggaatgattcaaaaacattccttcccagccgggcacagtggctcacgcctgtaatcccagcactttgggaggctgaggctggcagatcatttgaggccaggagctcaagaccagcctggccaacatggcaaaactctgtctctaaatacaaaaatacaaaaattagccagc

SEQ ID NO: 485501 - DNA, 581 bp, Homo sapiens
tataattttttcaatgtatactaacatttctgcagtaaaatacaagtttccaaagaagactatgtgtagtcctatgcattacatggctgaattctcacttggtttgtcctacaggtcttattgttgtccttattggatcagagagagaatataatttgcccaatattttatggaagtgggtgatattaggacccaatatcagtatgtttaaaatcaatccactgctgaaaagttgtctgggcaagaataaataaaataaaaatgaatgaatgaataaaatcaagtaatcagggmattagaaggaagtatatcatgtggaaaacatgtaatttgacttttattaactcatttcctctgctgggcgtggagtgaccatatttgtggttttagatgagagatgtgattggagcagctacagccaatcagaactacttccgcgcctgcatggatgacaccattgcctacatgaacaattactccattcctaaacttgtgcaaaagcgagttcggacttggtatgaatatacatgggactctcaaagaatgctaggtaagcatggcagattaccgattaaattcct

SEQ ID NO: 485502 - DNA, 678 bp, Homo sapiens
cgaccgtaaaagacagccgcccccaaggtggccattttaaaggcctaccctcagggacacattctctttctcagggatgttccttgctgagaaaaagaactcatcaatatttctcccatttgcttttgaaagaagagaaatatggctctgttccacccggcccactggcagtcagagtttaaggttatctctcttgttccctgaacattgctgttatcctgttcttttttcaaggtgtccagatttcatattgttcaaacacacawgctctacaacaatttgtgcagttaacgcaatcatcccagggtcctgaggcaacatacatcctcctcagtttacgaagatgatgagattaagagattaaagtaaagacaagcataggaaatcacaagggtattgattggggaagtgataagtgtccatgaaatcttcacaatttattttcagagactgcagtagagacaggcataagaaattataaaagtattaatttggggaactaataaatgtccatgaaatcttcacaatccacgttcttctgccatggcttcagccggtccctccgtttggcgtccctgacttcctgcaacaaaccttcactggtcctcaaatgatgtgtgcacacaggtcagtcctataaacccctactgaggggtatgtaaaggataattgacgtga

SEQ ID NO: 485503 - DNA, 678 bp, Homo sapiens
cgaccgtaaaagacagccgcccccaaggtggccattttaaaggcctaccctcagggacacattctctttctcagggatgttccttgctgagaaaaagaactcatcaatatttctcccatttgcttttgaaagaagagaaatatggctctgttccacccggcccactggcagtcagagtttaaggttatctctcttgttccctgaacattgctgttatcctgttcttttttcaaggtgtccagatttcatattgttcaaacacacaagctctacaacaatttgtgcagttaacgcaatcatcccagggtccygaggcaacatacatcctcctcagtttacgaagatgatgagattaagagattaaagtaaagacaagcataggaaatcacaagggtattgattggggaagtgataagtgtccatgaaatcttcacaatttattttcagagactgcagtagagacaggcataagaaattataaaagtattaatttggggaactaataaatgtccatgaaatcttcacaatccacgttcttctgccatggcttcagccggtccctccgtttggcgtccctgacttcctgcaacaaaccttcactggtcctcaaatgatgtgtgcacacaggtcagtcctataaacccctactgaggggtatgtaaaggataattgacgtga

SEQ ID NO: 485504 - DNA, 663 bp, Homo sapiens
gtattcttctgggaaactcgaaggaagataaataaacagagcatggaataaagagtccacattatcctttttctcctctttccttccttagaagttatacccagattcttcatcgctcatccacttctctaaggccaattcagttctgaaatcaagacctgctaaggggaaaagggactaagcattttatatctgtaatatctaaactctctaattttgttaaaaatctgtatgtgcagacattcctcaaaatgttttacagaaaaaaaatctaggctaacatgtgtttgccattcagtacttttatgaatatcaaagtatctgcaaagatcaaaaatcccaggcagaggtggccttagaacatcctctgatatttgcctagccataaaagttttgctagaatttatttttagtcaagttttaaagttgcaaggaatraagtgtttcctaataatgttgacaaagatgaaaggatatctcagaaaaagtctacacaggttatctaacctcatgtttccgaaataaaacccagttagaaatttccttaatgagaacaaatatttggagttttaatcccttactcagcattgaatatgatgttctttccattgatagcatgtagagttatatatatatatggaaataattctacatgagaaaatg

SEQ ID NO: 485505 - DNA, 521 bp, Homo sapiens
ataccgctttagctgcgctgaggatcaggaagttccctactctgctccccagaatctggctccagaaccatgttaccctactataatttacactaacaaagtgagtcttttgcatgctactcctacttccccacttagcccagttctgaattcaaatcttacccaagtgtatcggattgatggaatataaatcccatctaaaacccacaaaaccattctgaaaaaaaaggaggcattgaattcaagaaacaatgatgtagaaagaaatcggtaaaaattatagttgtctgaataagtattaatgtataatgttaaaaagattaaataacctacaaggaaaaatccaagaaaatcctaagagaatgtaagttaaagtttactttctttccctgtttaggtgagataataggtactaattaacaataaaaattgatggaaaaatacacgtttgtgtgtattaaaatrttaagggttttcatagaaaaagattagatggataatttctaaactactaaaaggaa

SEQ ID NO: 485506 - DNA, 617 bp, Homo sapiens
aatgcagactcacagattcctgtggtaaatgtatcaggatacagatagtgacaatttcaattggtatgatattagttaatatctatgtaatactttaagtatgtatactctgaatttaccctctattatgggaaagcataaaatggtacactacactgacttacgcagccttgaccatttggagaaagttggggggaagtgtacaattaggaagagtaaacatatagaaacctgggacccaggacgttgccttctaaagaaacaggtctcccactcaacttctgggtctggcagtgtgaaaatgaaaaacctggtcctaaacacaacagaggaattttggagctgaggatatttgaatattgtgcccyaatttcatcacagagactaaaacaaagtgattttgtttaatcaagaatttaacatttattttggctattgatacttctgaatagtatcaaggcataatcatggaatgtataatatacatggaagaatcaatgtaacacatcagataatcagaattacaagggaagtaatgcacatcaatgaagaaggaaagtaataaatgtcaatgagacaatacatttaactactagaaaaaggatccatttaaatct

SEQ ID NO: 485507 - DNA, 630 bp, Homo sapiens
atggactcccctcatgcagctttttcctgctstctctgtccagaaatgattaattaactttgcattcatttaacattgacataatgtctaccatgtgaatgataccactttcggtgccaagtgaagatgaaaaggaaagagttggaaaagcctcttaacattacagaagtagagaagtttggttctcaaatatctttctggtattaggtaggaagtgagaagcaccataaggaaagagctgctgaaagccacggaggcttaagggaggcagaaagctctaaagccactaaagtggaggtgacatttgcatttgaaaatgagggataggcaaggagctttttgctggaaagcctgtgctgcagcattccctagcctgggttctgctgctgagcctcatcatctgtgtgagcacacagtttaattacctaaatagggccctggatatattcaacactttcatcatgactccaatgtattatgcaatctttacaacatcagttttaacttgtacagctatcctttttaaggagtggcaagttatgcctgttgatgacatcattggtactttgagtggcttctttacaataattgtggggatattcttgttgcatgcctttaaagatgtcggct

SEQ ID NO: 485508 - DNA, 505 bp, Homo sapiens
ctagcacacggaatttttcatatatttcaaatgaatgtttctttaatctcaaaaagtacaagtaaaatggctcctgacatatagatagatgatagttggatataggtatatacacatacatacacacacacagttgaccagttataataatgacatcttayaattgccaacctaatacctctcaaaattagaagtccatatttttttaaggtctgtgggttaccatccttcgtgatataaggaacaccctttgttctgacttctcaaggttaaacaccaaagagctcagtcctaaaacttcctcactgcaaagcaaaaataaactttggattaaaccagtgttttaattgtttgggtccatgctattacctttttttaagaacatttgggacagatatttactcataaaatctacgatctcatctctactgaataatttggctggagaggaattggtttaaggccaatttagaaaaacgaaaaagcaaaaagaaaagaaagaaaa

SEQ ID NO: 485509 - DNA, 505 bp, Homo sapiens
ctagcacacggaatttttcatatatttcaaatgaatgtttctttaatctcaaaaagtacaagtaaaatggctcctgacatatagatagatgatagttggatataggtatatacacatacatacacacacacagttgaccagttataataatgacatcttacaattgccaacctaatacctctcaaaattagaagtccatatttttttaakgtctgtgggttaccatccttcgtgatataaggaacaccctttgttctgacttctcaaggttaaacaccaaagagctcagtcctaaaacttcctcactgcaaagcaaaaataaactttggattaaaccagtgttttaattgtttgggtccatgctattacctttttttaagaacatttgggacagatatttactcataaaatctacgatctcatctctactgaataatttggctggagaggaattggtttaaggccaatttagaaaaacgaaaaagcaaaaagaaaagaaagaaaa

SEQ ID NO: 485510 - DNA, 517 bp, Homo sapiens
cctggtaattattccagagcactaggcttacattaaaaaataaaaaaaaaaaacttagcccagagtgttgtgaaaaagaccaatggagattatcatttagctacctaagaagagtgtaaagaaaacaaattattatcctaaaatactagtgatgatttacctaattaatctttgacagcttgaaatgtgtcctcagcaaacggtaatgtggtagtgtgtgctcaaggaacactagattaatgaagcacagatataaaaattgcatctgttagattatgtaattctctctgagtaattttaattactgggtatttcaggaccttccaaatcttcttagaacaaaaatgtcttattttatttttaagaaaacttactttgagttttccatcacgctaaatattttactcatcgagaccttttttaaattataagactttttttttctttctttgattttggcagcatgggagaaggaaggtaartgaacatagagaagttatctaacaatttgttttca

SEQ ID NO: 485511 - DNA, 536 bp, Homo sapiens
ccacaacaccatagaatgaatattggttttttaagttttgttttgttttgtttgtttttgaggcagtcttgctctgtcacccaggctggagtgcagtggtgcgatctcagatcactgcaacctccacctcccaggttcaggcaattcttgtgcctcagcctcccaagttgctggaattacaggtgtgcaccactatgcctggctaatttttatatttaggagagaaggggtttcaccatttttcccaggctggtctcaaactcctgacttcaggtgatccrcctgcctcagcttcccaaagtgctgggattacaggcatgagccaccatgcctggccagctttttaggtttaaaagtattgcccaacactcagagaatgtcaattcaagcagtgcctcaactgtgcattcaagaggcaacagttactacagcttgcttcactaatcctggtgtattaggtcttttgaagaaattaatggtttgtcacaacctaagagttgatttgggtgctgttaaaggcattcagttttcaaagg

SEQ ID NO: 485512 - DNA, 536 bp, Homo sapiens
ccacaacaccatagaatgaatattggttttttaagttttgttttgttttgtttgtttttgaggcagtcttgctctgtcacccaggctggagtgcagtggtgcgatctcagatcactgcaacctccacctcccaggttcaggcaattcttgtgcctcagcctcccaagttgctggaattacaggtgtgcaccactatgcctggctaatttttatatttaggagagaaggggtttcaccatttttcccaggctggtctcaaactcctgacttcaggtgatccgcctgcctcagcttcccaaagtgctgggattacaggcatgagccaccatgcctggccagctttttaggtttaaaagtattgcccaacactcagagaatgtcaattcaagcagtgcctcaactgtgcattcaagagrcaacagttactacagcttgcttcactaatcctggtgtattaggtcttttgaagaaattaatggtttgtcacaacctaagagttgatttgggtgctgttaaaggcattcagttttcaaagg

SEQ ID NO: 485513 - DNA, 462 bp, Homo sapiens
tgatttgagtggtgatggggctttaaagttaaccactgagctataggagcttggtgaaaacctttatgatagaggttctcatccatatccaccatgctgctcattggtggccatacggagccattataaacaacagcactggagatgcctgccccttgtggcattaaaacagctaccccaaacccattgcactcttstgtaaaaccccattaatatgaatccaagtttccataaaaattagcagagatatcctattgagaacaaggaacttgaactgatttcatagccttcaaaaccaagcacaaggtttgagaaaaatgaactttttaaatttgtgtgtcatctctcccctctcttccctgcaccatgtccctgttctttctaatttactctcctgtaacccttcccgatttcatgtctccagaaccatcttttgcctcatctctgctgtgaaacatatac

SEQ ID NO: 485514 - DNA, 398 bp, Homo sapiens
agagagatcacaatcttcttatgcaaacattttaaatcagagagtatctcttctttatgaggaaactctatcaacttgtgctagttctacttctttacacaacaaaataacaacaacaacagcagcaagattggtctcattctttccctgaagggcagctttttcaggtattaaaacccagtcttcatgttccaccaaagcttcatctccaggtaaggcagccttcacgccctgcagtgtccctcctctgggtggagtggagacatgccagtctctctactctaagtctactactgtatatctcagtctactaaatkgttgcctctaaagttcgaactttagctgtaatatgaatagcaacaagaaagaggacagaaaatgctataactatttggtaa

SEQ ID NO: 485515 - DNA, 591 bp, Homo sapiens
tgcccctagctttggatctattttcatttattgtgctgagctaatagcaaactatttcagtctgaaaattagtgtcatttagttttcagaaattgcaaggtatggtaaaggcacttattctcattaagttcattggaaaaaaaatatctatttattcacagtaattctagattctttgaggcttcagagatgctgttttgtgtagtcacaatggattctttccttttttttttctttttcaacgtttattttagattcagagggtacatgtgcaggtttgttacctgattatattgcataatgctgaggcttaaggtagaaatgatcctgtcattcaggtactgagcatagtatctaacagtttttcaatccttacctactccttccctcctccctstagtagtttccagtgtctattgtggccaggtcatgatggtttctaaactcatacctcacccccttccaccacataccatgctcagttcaagctttatatattttttcaagcccccttcccttttcccttatgcccattcaaatccatagtcaccagagttggactcaagagctataggctctaggaagaactct

SEQ ID NO: 485516 - DNA, 591 bp, Homo sapiens
tgcccctagctttggatctattttcatttattgtgctgagctaatagcaaactatttcagtctgaaaattagtgtcatttagttttcagaaattgcaaggtatggtaaaggcacttattctcattaagttcattggaaaaaaaatatctatttattcacagtaattctagattctttgaggcttcagagatgctgttttgtgtagtcacaatggattctttccttttttttttctttttcaacgtttattttagattcagagggtacatgtgcaggtttgttacctgattatattgcataatgctgaggcttaaggtagaaatgatcctgtcattcaggtactgagcatagtatctaacagtttttcaatccttacctactccttccctcctccctctagtagtttccagtgyctattgtggccaggtcatgatggtttctaaactcatacctcacccccttccaccacataccatgctcagttcaagctttatatattttttcaagcccccttcccttttcccttatgcccattcaaatccatagtcaccagagttggactcaagagctataggctctaggaagaactct

SEQ ID NO: 485517 - DNA, 613 bp, Homo sapiens
aaggtactgttttagatgacatatagatggatagataattagaaggtggatagatagatagatccttatttagttttacaatacaacactcttgagagaagacaggtaatcttattaagatcctcctgcagatccccatggggacctgcatctgcaaatctttgttaactaaatgactgcatcagtaagcacgcaatcagagaagcagaaccaataagaaatatatatgtgtgtgtgtgtgtgtgtgtgtgtgtgtataaagttgcctttaatagacattggaccacactcaattgtggaaactggtaaagcaatttctataagaatatggcctttgcattgtgatgctagaatttgaagtccatgagtcaggaagttgagaagagattatacatgtcgagggggtgggggagaataagaataaattggaacccacaggcacaatttggagccccaggagaataaagtaaaaaaacatgtgtcagttcttgttgcttctgatcttaggggtgtaggtatcctgcagaagctgggcccctttgctgyggagcaaaacatgcacatctggcccagaggtcagaaaagttacaagaggatccagaaaaggtggagc

SEQ ID NO: 485518 - DNA, 470 bp, Homo sapiens
agaagccacctccgctgtatttgaagtttcactttttaaaaaaaaaatgtttcccacctttttatccttcacccactgtccttccacctgctcactcactcactctctcacccatcctgctccacacttctttggtagtaaatgacaccatcaccagcagtttacacccgcagttaacaggcatcgaactgaaagaatcagtgatgacgtttttgtgcatcttcgctgagtgggtaagtggcaaygctttgccaaatattaacgaagccaatcaaagagcagcgcagccacagtatcactgcacatatatatatagatatataaatataatataaatatttattttttgtagccaggtccttggtgcagtatttatactccacaatccaccttttaaaaaaaggacaaaaagcaaaaagatgtgtgatgctgttaataatttaaaatgcagagccaaagccactgagcag

SEQ ID NO: 485519 - DNA, 389 bp, Homo sapiens
cctcctcctcctctgattgtcctcaaggcccacaagacagtggggactatggggactactgtagtcacaaggttcctcaggtgctccagatggcttcgggagcacccagtggctccagcttctgactcccggctgggcggcagcctccagctggcctgcgtggtgggtttctcagcctcgtgstccaggttgtgtcaaggtccccaaggcccgtgacgccctccctgccttccgtgaggacaccgcatggccacttgggggcgctccttgtctcgcctgccctcgggcatgggcctgagaggcccagctctaccacctgccgccctagacgtgaaggcggagggtcgagtttttccgcagtgagatcgccttggtggtgggctcctcct

SEQ ID NO: 485520 - DNA, 549 bp, Homo sapiens
aggtgcctaaaaatcaagggccacttccctaccttgccagacagaaccatcaatccctgttggacgcctttagttacctaaaacacataaaaggattggaaatgaggcctttcgttggtaatgaaattctagcttttaggtaaagacagtttattgggcaggktatcctcccatacccaagacagtcatttcaaatcctcctagacacaaaaaggagaagggacaaattcttgctcttacacactggatgtttcatttgtttattcaacaaagtaggtgttgagggctttttctgtggaagtcactgcatgtgtttttgtctgagatgagcttggaagacagatgttgccaaggacagggtaatagtaagaatacatgtacacagtgctctcataattaaaatgaaaaatgaaatctgtgaagagagaaaatcaagactcctttgattttcacctgacatttaacatttttcagttagccatggaaaaggaattactaaccttcccctaaggaagcagcagagcagaaatggccatggatcctattgct

SEQ ID NO: 485521 - DNA, 617 bp, Homo sapiens
aagttgaagatacaagtagaaaattttgtttagcttaatatraattcagatgattagatgtaaaaatatttatagctatgtgtacatgcctggtaaataaaacacatgtgttattttatgagccaaattcctggaagcaacaatcctcagaaacaacaaatacacctggagacctgagattggattctaatagtactttacaataaaaggaactctttggagaaatggctaattctacggtaagagcaggaaatatacaaaatgagcctggagtatcttaatgccataaaggaaaatagtattctaaaaacaaaaacaaaatctctgtttgtaagggtatgtggaagggacacagaagccaactgaaagagcttccaatgtccaaatctggaataatttaagaaaaaataaataaattaggactggcttataacttgaagtagaaaataaatatccgtgaatttataatgatataagtgattgaataattaaataactgaatgctatgaaagaaacaaatctcgtgcagaagaattttaagtaatttatgtagatcctttatgttggataatatttaatgaggtcactatcaagttttactattgatgaccagagaa

SEQ ID NO: 485522 - DNA, 617 bp, Homo sapiens
aagttgaagatacaagtagaaaattttgtttagcttaatatgaattcagatgattagatgtaaaaatatttatagctatgtgtacatgcctggtaaataaaacacatgtgttattttatgagccaaattcctggaagcaacaatcctcagaaacaacaaatacacctggagmcctgagattggattctaatagtactttacaataaaaggaactctttggagaaatggctaattctacggtaagagcaggaaatatacaaaatgagcctggagtatcttaatgccataaaggaaaatagtattctaaaaacaaaaacaaaatctctgtttgtaagggtatgtggaagggacacagaagccaactgaaagagcttccaatgtccaaatctggaataatttaagaaaaaataaataaattaggactggcttataacttgaagtagaaaataaatatccgtgaatttataatgatataagtgattgaataattaaataactgaatgctatgaaagaaacaaatctcgtgcagaagaattttaagtaatttatgtagatcctttatgttggataatatttaatgaggtcactatcaagttttactattgatgaccagagaa

SEQ ID NO: 485523 - DNA, 617 bp, Homo sapiens
aagttgaagatacaagtagaaaattttgtttagcttaatatgaattcagatgattagatgtaaaaatatttatagctatgtgtacatgcctggtaaataaaacacatgtgttattttatgagccaaattcctggaagcaacaatcctcagaaacaacaaatacacctggagacctgagattggattctaatagtactttacaataaaaggaactctttggagaaatggctaattctacggtaagagcaggaaatatacaaaatgagcctggagtatcttaatgccataaaggaaaatagtattctaaaaacaaaaacaaaatctctgtttgtaagggtatgtggaagggacacagaagccaactgaaagagcttccaatgtccaaatctggaataatttaagaaaaaataaataaattaggactggcttataacttgaagtagaaaataaatatccgtgaatttataatgatataagtgattgaataattaaataactgaatgctatgaaagaaacaaatctcgtgcagaagaattktaagtaatttatgtagatcctttatgttggataatatttaatgaggtcactatcaagttttactattgatgaccagagaa

SEQ ID NO: 485524 - DNA, 620 bp, Homo sapiens
taatacatgactgtcttgaggaggactttttaaagttagaatgtcttacattagagactgtgtggcttggaaagaaacaaaatctttcacaaaatataatttaaaagatttctatttatattaaatttacaacatcacagaggcaagttgcactgttcctcccaccttccacaattttatttcaatgtaaattatttttcagtataatgtattatattcctgatctgttccatcagctcctgtgagttgtgatgctttataagtttcctctagtgtatggaagaacttaagcagaaatgaagcatcagaagcaggctggaccccacattaacacaatcatcacttttcttcatgtaacaacgtattatcactcttcgcttcaaagtacaggagtctcccttatccaggcatgactttgctttctamagcttcagccaccggtggcgaactgtgatctgaaaataatgaatggaaaattccagaagtaaccaattcataagttttaaatttctattctgagaggcgtgatgaaatcttgcactgtcctctttgtaccaccctggatgtgaatcatccatttgtccaacggatccacgctgtctgtgttagttacttagcag

SEQ ID NO: 485525 - DNA, 629 bp, Homo sapiens
aataagatagctttgaaagattttttaaagtagcagttttatagccaacagtttttattataatctaataacattaaaaataaattacttaaaggtgaggagaaaactatttcagaaatatgcactagataatctttggctcaaggaagaaatcaaaagggtggtgtttatttgttaacaggcaataaaaaggagaaacataaaagtgaaatctaatgacccaacattggctggactcaaaggaaaattcatgacctatagtgcccttgctataggagacgatgattaaaagtcacagaactaagtacttgtcttaaggaattagtgaaataacattaaaataagccaagtgaagctaggaaaaggaaatctaaaaataaaagctagaattaattaaatgagttaactataatttaatgtatttattaaaattgcattaaatatatgtaacatttatttaaaaactggttccttgaaatagctaactccttcaaaaatctgaatatgttaaagaaagwgagaaaacaaaaaaggagacccaatactgtggcaacaaattcaagaatttagaggaaaaagatgacagcttggtacagtatgtattattaattactgacccaagaggaata

SEQ ID NO: 485526 - DNA, 503 bp, Homo sapiens
ccacccagctttctccagccagsttgtccagctacctggaaagcccctccctccacccactccttcagtgccactcccctctgcctttttcattccacccaattttcaaatctttcaccaaatgctttatcttccttgaagccttgcctgaaccaccattcagaggtggttcaactcctttgaactctcccagcccatgtttgtctcttcctcacagccttgaacatattaattcaacaaagacctactgtgttctatggaccaagctctatgctaggctctggagatgcaatggtaaacaacagagttgggtgtgtatgtgtgtgcacatgttggggtaagaatgagggcagagatgctaaacaaaatagttgcacaaaaacatatacatatacaaattataagtacgataaaggaacaagggataaaaaaattcgaatgtgtactttaaagaaggatctagtttagaaagggagaccaggaaaggccttccagaggaatga

SEQ ID NO: 485527 - DNA, 610 bp, Homo sapiens
tattgcccttacaccaaataagtaacacaatgggaactataataatctagaattaatagctcatacaaatacatggcatgtcttctgtaagtcttccaactgtcattaaacatcagctaatatccatacattgctataaggcaaatgggtagaaatatttaaggtttccgtttgagagaatagagaagtaacatgtgtggtagggcattaaaatgtctcaaagacagtattgagactgaagttaaaagccccttttgttcatgattatttttaaggaaatttaaacacaaagcccattttaaaccatctcatattggccacaaagagaagctggggtgtccattcctcgtttgtaccttgtaattctgtaccttgtaattctttaactggtgaccatatgtcaggatgtgcatgtgttttatgcagccagatgggtgagacataaagaccgtaatcagttccstcccataacaataccctatttttttttaccgtccaacaatcatggattaattatgagcctcgtctccccaacaggtggtgcctgtgatcccatgaccatatcagatccatcttcgaaatcaagcaggtaaatggtctatccagaatt

SEQ ID NO: 485528 - DNA, 518 bp, Homo sapiens
ctgggtgaaaactggggcagaggcagaagcygcaaggcaggttaggaggctatggtgacaatctaggcaagaggagaaggtggccgggagtaacagtaggtttggagggaagtatttgggatcaggatgtgttttgaaggtaaagtgaacagaatttgctggtggattggctctggggggtgaaagctaggaaagactcaacaatgactcccaagttttcagcctgtacagcttttgaggttgggaatcatgtgagagaagcaggattgcaattaatgaatattagaagactaaattaaacttgaagctcttgatgcaagagtggtttatgcccccatctgtcctctcgtccactgcagtgcacacccaaccaactcccaatgccagaacttcacatccttgctggaggactcttttgccaatggagtctactttaccaccaacatccctggaagtgctggggaattaatgccttccaggagcagccatcagccagtaactggcaggatttggtgtat

SEQ ID NO: 485529 - DNA, 634 bp, Homo sapiens
gctgctgggtgaaaactggggcagaggcagaagccgcaaggcaggttaggaggctatggtgacaatctaggcaagaggagaaggtggccgggagtaacagtaggtttggagggaagtatttgggatcaggatgtgttttgaaggtaaagtgaacagaatttgctggtggattggctctggggggtgaaagctaggaaagactcaacaatgactcccaagttttcagcctgtacagcttttgaggttgggaatcatgtgagagaagcaggattgcaattaatgaatattagaagactaaattaaacttgaagctcttgatgcaagagtggtttatgcccccatctgtcctctcgtccactgcartgcacacccaaccaactcccaatgccagaacttcacatccttgctggaggactcttttgccaatggagtctactttaccaccaacatccctggaagtgctggggaattaatgccttccaggagcagccatcagccagtaactggcaggatttggtgtataaataccccaagttccctcaccttttggctaggagaactaagaggttgtgttttatactagtcctcagaattctggaaagtaagaatatactcaagttcccacagtggtagc

SEQ ID NO: 485530 - DNA, 536 bp, Homo sapiens
gggacttgcagcatcaaggtcatctgtaaaggagctggccatgacccgccactgcccaccaaggtctggagcagacgttattctcaagaacacttcaaagggaactagttcaaagggaactaggtagtatcgtatgtttttgttttgttttgtaagaaaaaaaatgttagatatcctgaggttgttatcttgctattcacaaatggaaaagcagccgcccraggtgggggtggagtccatttgaacgagggaccactgtgctctgctgagcaggcatttgctcctgagctgcccttcctcttctaccgtcttcccaacccatcccttcagtcctctcaacctatcctgggtaactcccgcccggctccagggcgcggtgtgaccgccttaggaagtctatcttcaccaggaagcttgcattggctgctgctgtcaggaatttggacgctccatccaaatcccctcacatccctttactgttagtctctatgcctctttggcttcccggcttccttccatttcccccgccctgtggg

SEQ ID NO: 485531 - DNA, 536 bp, Homo sapiens
gggacttgcagcatcaaggtcatctgtaaaggagctggccatgacccgccactgcccaccaaggtctggagcagacgttattctcaagaacacttcaaagggaactagttcaaagggaactaggtagtatcgtatgtttttgttttgttttgtaagaaaaaaaatgttagatatcctgaggttgttatcttgctattcacaaatggaaaagcagccgcccgaggtgggggtggagtccatttgaacgagggaccacwgtgctctgctgagcaggcatttgctcctgagctgcccttcctcttctaccgtcttcccaacccatcccttcagtcctctcaacctatcctgggtaactcccgcccggctccagggcgcggtgtgaccgccttaggaagtctatcttcaccaggaagcttgcattggctgctgctgtcaggaatttggacgctccatccaaatcccctcacatccctttactgttagtctctatgcctctttggcttcccggcttccttccatttcccccgccctgtggg

SEQ ID NO: 485532 - DNA, 536 bp, Homo sapiens
gggacttgcagcatcaaggtcatctgtaaaggagctggccatgacccgccactgcccaccaaggtctggagcagacgttattctcaagaacacttcaaagggaactagttcaaagggaactaggtagtatcgtatgtttttgttttgttttgtaagaaaaaaaatgttagatatcctgaggttgttatcttgctattcacaaatggaaaagcagccgcccgaggtgggggtggagtccatttgaacgagggaccactgtgctctgctgagcaggcatttgctcctgagctgcccttcctcttctaccgtcttcccaacccawcccttcagtcctctcaacctatcctgggtaactcccgcccggctccagggcgcggtgtgaccgccttaggaagtctatcttcaccaggaagcttgcattggctgctgctgtcaggaatttggacgctccatccaaatcccctcacatccctttactgttagtctctatgcctctttggcttcccggcttccttccatttcccccgccctgtggg

SEQ ID NO: 485533 - DNA, 562 bp, Homo sapiens
tcctagtgtatcgtgtgaggtatgggttcaattttactttttttcagatggctacccaattatggataattacccaattacctaaaccataattgaatagtccaccttgcccccactattttgaggctccctctttattacttgtgtatatttttggctttgtatgaatctctgtcttttcatatacaaatattagaacatacatttcgaaaaagaagcagaacacacaggtgtttgaagtgatgaaaggtaagtttgctttgctcggggctaatgcattyatggacttcaaatggaaacctttctttgttcatcacttggaaaagccacctgtatttaggtaccttaacaagacttcctgtttacaatatatttttacttgattgaaaaatgaatattctatgactttttggagcagaatggcaggagttacaatcatgaaaagcattccaaatgacaggaccacggtaggccagatcaagatctcatggacagttgagggaaagtattaaaaaatagagaactggaaaatttattgaaaaatgcagaatatgcttttggc

SEQ ID NO: 485534 - DNA, 642 bp, Homo sapiens
gtaaaaaagaatgagttcatgtcctttgcagggacatggacgaagctggaaaccatcattctcagcaaactaacacaggaacagaaaaccagacaccacatgttctcactcataagtgggagttgaacaatgagaacacatggacacaggaaggggaacatcacayactggggcctgttggtgggtgtggggggctaggagagggatagcattaggagaaacacctaatgtaggtgacgggttgatgggtgcagcaaaccaccatggcatgtgtatacctatgtaacaaaactgcatgttctgcacatgtaacccagaacttaaagtataataataataaaaaaagaatattctgaacctagtttcctaaccaaatcttgagtgctgccagccaaaaagattttttttttccatcccacctccacattcacccaaatggactaaggaagggagatcagtgacagccatgattgtcatttaaatggactgaatatgatcatgcatgaacaaagattttggattccaacatttgctttccaaatactaatctcatttcctcaaaactgcttaacaaaacctcaatataagctttgtctcccttgtgagagctatgatgaacttcttgtggatgaaggatttttg

SEQ ID NO: 485535 - DNA, 566 bp, Homo sapiens
acttgctcaagggcacatagctaatgtctagctaaagtaccccagataaggtgggaaattaatctgtattagaaacagctatcaccaggcaaagtgctargtaatgaaatatgtgccttctcatttgatacaatggcctctgaggcagttcatcttaccgcccaactgcagatgagcaaacttgtccagacttgcccagtgttgcaagaacgatgggtagcaggctggggctcccagggttgctgactcccatcccatgtgattccacgccatcatgctgccttttctgtaacagcctctgaaattgtccaccccaccccacttccactggccaaacctcagccctcaactaggttacttctggtgaaggcgtctcttttcaccttgtattcccacaggctctatcagaaaacctcctgtctagagttcaaccatcttctatcgccttgagtaacacaactttaatgaatactatttctatcagataaaattaggagcaacttggaaaagagtaaagaaaagatttctgaatatcttttgtggggaataatgaggcattgttcaag

SEQ ID NO: 485536 - DNA, 566 bp, Homo sapiens
acttgctcaagggcacatagctaatgtctagctaaagtaccccagataaggtgggaaattaatctgtattagaaacagctatcaccaggcaaagtgctaagtaatgaaatatgtgccttctcatttgatacaatggcctctgaggcagttcatcttaccgcccaactgcagatgagcaaayttgtccagacttgcccagtgttgcaagaacgatgggtagcaggctggggctcccagggttgctgactcccatcccatgtgattccacgccatcatgctgccttttctgtaacagcctctgaaattgtccaccccaccccacttccactggccaaacctcagccctcaactaggttacttctggtgaaggcgtctcttttcaccttgtattcccacaggctctatcagaaaacctcctgtctagagttcaaccatcttctatcgccttgagtaacacaactttaatgaatactatttctatcagataaaattaggagcaacttggaaaagagtaaagaaaagatttctgaatatcttttgtggggaataatgaggcattgttcaag

SEQ ID NO: 485537 - DNA, 566 bp, Homo sapiens
acttgctcaagggcacatagctaatgtctagctaaagtaccccagataaggtgggaaattaatctgtattagaaacagctatcaccaggcaaagtgctaagtaatgaaatatgtgccttctcatttgatacaatggcctctgaggcagttcatcttaccgcccaactgcagatgagcaaacttgtccagacttgcccagtgttgcaagaacgatgggtagcaggctggggctcccagggttgctgactcccatcccatgtgattccacgccatcatgctgccttttctgtaacagcctctgaaattgtccaccccaccccacttccactggccaaacctcagccctcawctaggttacttctggtgaaggcgtctcttttcaccttgtattcccacaggctctatcagaaaacctcctgtctagagttcaaccatcttctatcgccttgagtaacacaactttaatgaatactatttctatcagataaaattaggagcaacttggaaaagagtaaagaaaagatttctgaatatcttttgtggggaataatgaggcattgttcaag

SEQ ID NO: 485538 - DNA, 626 bp, Homo sapiens
agtgcagtcaacctccagaaccacgaaagataataaactgttctttaagctactcaattttggggtggtctgttatacagcaatagacagctaaaacacagaggaagcagcagacacaagataacaaggtgggaaggacagaagatgaatcctcacatctttctctttttctttctctgttttttttgtttgcttgtttttgagacagggtcttgctctgtcacccaggcttgagtgaaccggcatgatctcaggctggagtgcagtggcaagatcttggctcactgcaacctctccctcccaggcccaagcgatcctttcacctcagccttctgagtagctgagactacaggtgcacaccatcacacctggctaatttttcatatttttggtagagattggggttttctcatgttgcccaggctgttctcaaactcttgaactcaagcaatctacccacctcgccctcccaaagtgctgggattaygggcgtgagccaccacacccagccacatacccagatttcaatcccagcttggcttattactgagtgacctttgggaaggctcttaacttcactaagcctcagtttgctcatctgtaaaatggtacgaatacagcttcta

SEQ ID NO: 485539 - DNA, 494 bp, Homo sapiens
cgccttttctgttttggaatcaaaggcgattaagtatcaaacttgaaatctagaggaaaggcaattttaaaagttaatacaacctttcagtcttttgcaaatggttttcctttccctaccattctcaggaaaaaaaagaaaagaaaaaagaaagaaagaaaaactcaaaagaagcctatctcttttagaaactctagaagctgttgaaaagtggatcatattttggagaactggattctaatcacctctacgtatatttgggagaagacagtgcctatgttggaaatattcataaaaactttcaaggtgatacaagatctggataagaagctttcactattctcttctcaatggatttagagcaaaaatataagttaaaagagtaggcaaatttatccaagcaaatatcacaggggtattaagaaagaaggtcatccaattaactaattacttcttacatatcctggcrtactaatcaaaatcagttgctatca

SEQ ID NO: 485540 - DNA, 509 bp, Homo sapiens
atttatgttaaattttttattaaaaaaattagacacaggctgggcgtggtggctcatgcctgtaatcctaagcattttgggaggccgaggtgggygattgcctgagctcaggagcttgagaccagcctgggcaacacggtgaaaccccgtctctactaaaatacaaaaaattagctaggcgtggcagtgtgtgcctgtagttccagctactcaggagactgaggcaggagaatcgcttgaacccaggaggcgggggttgcagtgagccaagatcactccactgcactccagcctgggcaacagagggagactctgcttcaaaaacaaacaaactaaaaacatagatgaatcaaaggactttttctgtgttatttacagctatgtccccagtgcaggggacagagcctgattctttgtagagaataaacattaatgaatgaatctcatttccccaggccagtagggcttaagccttagtatatataagtattatcaggagaacttgttaa

SEQ ID NO: 485541 - DNA, 645 bp, Homo sapiens
agtcatcagatgctgatgaaaatgacagaatttgaagctccaaagtaatctataatctcaatcaagaaaatactaaattttgccaggaataatgccaaaatttagattttttgctgttattaagaaaaagagtagtattttaaaataaaagacttgattgcacctagatctttgctttctgtgtaagattgcactaaaacctatctgctgtctgtatttgaagtagttacaacctttccgcagcctcgctgtaggagatagatacccctagatgaacttggaaagcctagagcagggggaacatttgactctcttctctggaaccctgggaggaaatcacccgacagygtgctccttgccaaactgagtagaaatggaaggttaagtagagagaaggctggacacagtgcccacagcctgaacatggcggaagcacactgagctttccaataggtccagcaataggcatgacaggggccatctcaccttggagcatggtgacctatagcccaggctctagggtgggaagccgaaaagatcaatgtgaggttgagtctccaagcttcatttgagccagaaggggctgaatgggggtggccatagtgggcctttatcacatttagacaacaggctacaagttaccag

SEQ ID NO: 485542 - DNA, 496 bp, Homo sapiens
cacaggctcactgtgatgctcaagtcacaaggcacaatcttaaaagggagagaggaataggtgcataataggattactgttcaagctaactcatgttggagcatctagtaagaagcagctgataccaagaaaaagtgcttggcagtagaggtgaaatttgaatcgagctttggcgatttctcacaaatgggaatatggatattggaaatatgtttatggtttttattttgctacccagcacgtgaaaaagttgcctaggaatccctgcaaggtgagttagttattgaagtccscgagtgatttttttctatggcaatttttcttcaaaagcagacctacagctttgaccctaggaattacaggttactgaggcacatgcaggagtaaatgggaaactgtgcaactaacagcaatttcttcaaagaaaagatatcaaaagaaaatttcccaatgacatttttagctaagttaggtgagttttcatttaacagattaa

SEQ ID NO: 485543 - DNA, 457 bp, Homo sapiens
tcctttttgagagcaaaattaccatttgtttaaagctttctcttcaattatagcaatttccacatgttttaaaactattctcagcaaaagaaaaatcaacaytatgtgcttttgaaacataggctaatctggtagacatcagtttgaaagagtcatggctgaaacaagtgacttggaagattttcattgtatgctcttagcccatgttgtctgtgaactcagaagcaggacaaattgaacttttttttttttttgtgaagataaattgatgcacaaggggaatcttgaaatgcactattaaaaagctcaactacttaaggataagacaacatgtagctgaactttttcatatatatatatgtatatatatatacacacacatatatgttttttatgtttcataggcttcagttaggaggacagtacagagcctccactgcaatcaaccagctgtggc

SEQ ID NO: 485544 - DNA, 591 bp, Homo sapiens
tgggcccagaagaaagggtattctaaccaaagggagcagcttggctgtgtaaatttacaaactgagtaaagttacacagcttggcatatatgttgaatatttgggaactggcaggatatttgtctgcttgtgaattcagtggaagaaaattaccaaagcaaactaccaaacacattaaacaatctctccggaccaagctctgtggtgcttcttacgcatcatccaatttaatcccccgaaaactctatgaggtaaggattagctccatttcatcagtaagatagctaaaatttatagaggttaaacaatgtttcctggtcacatagatcacatttaggagataagaataaaatctacgtctatttaaattcaaatttcatgatcttagcatctgtaatattgtgaagccaaggaaagaaaggctgggcatgaagaggcttagggacctgtccccgggtttgttcagttgctctggaggaagaagaaagtaaaatgaggttgctattaagctggttttgcgtgtggtaaagtatttgctcacatgctgaacaacattttttaaaaaaacaktttttagttttttgagacaga

SEQ ID NO: 485545 - DNA, 545 bp, Homo sapiens
tattgtttctcgctagccagagtttgaaatacaaaggaggcataatgagagctcccacatcccagatgctgatacttgcccaagtggaaccctgaacttattcaaactgcaccctctacagcactctcctgaaaaggaaggaaaggttacatgtgacaaaccttgacagtggagtagtcatgcagattaacaaaaagttgggggaaaaaaaacaacagggtaggmattaagaaatgatcacaaccaccaatgtacctgttactagggctgaagacttgctgtgtgaactcagctttctataatgtgagaggtgttgggacttacatgttaaccttctgatcataccaatggaaaagagaaggaaagtctattatattggcacaaggctgtggtcgcaatttggagaattagacccagttatagcaaattgctgcaggagcaatattgggaaccattactggggaaacacagactgctgaattcaagaggccactgaattctcacttattgggaagctaatttggaaggaggaagagcagccaggt

SEQ ID NO: 485546 - DNA, 595 bp, Homo sapiens
gctgtaacaaatcttagactttatacagttggagacctccaattctctcccctcccttaacagagggaaattttcctttagtgtgagtctttcaattctatgtcatttaaaatgttactacattttaaaatcaataaacaacataatgaataacaatgtgtttacttcgactttatgtaaagtgatgtcacatcatatcataacatagcttgctttgtcccccgacccaaaattttccctccataaaagcagcttctttttccctccaaattgtattctttagatttacctatgtcaataatacaaactcaatttattcattttgactgctttctcatatttgtgtgtgaatatggctttttctgatttggttttttttttttttttttttgagatgggagtctcgctctgttgcggctggactgcagtggcacgatttctgctcactgcaagctccgcctcccaggttcacgccattctcctgcctcagcctcccgagtagctgggactacaggggcccgccaccaygcccggctaatttttgttttagtagagatggggtttcaccgtgttagccaggatggtctcgatcttc

SEQ ID NO: 485547 - DNA, 565 bp, Homo sapiens
ttaactcgacttcctctcttcctaccacccatgcaaaaggcaaattttcagaaaccctatttaaagctctccaagcactttcagtatatttygtagagtgtttggcagtatataatattattccttttgcatgtagtattttatttattcttatatgaagtctgagagcatgaggccagatctctatgaggaagatagagtggaaaagccaccagcacacagcaaggaagatggcagaaaaaaaaatcctaacccagatctgactgagtgagaaggcctggctcttcccactacaccaagccaactccccgctgtgctaatacctcacaggtggttcattcatcccgtagaagttcctgggtgtaccaagaagcagacgcagaattagacatagatctctgggatcccctcaccctcccctaattggctgcctggccctttgcctccctcttcccttcctccatcccctcccttcctggtaattaccactggagcaaataagttaggccattagacactcaccaacatttggtcagcttgcatctagcactggcaaggcagggag

SEQ ID NO: 485548 - DNA, 565 bp, Homo sapiens
ttaactcgacttcctctcttcctaccacccatgcaaaaggcaaattttcagaaaccctatttaaagctctccaagcactttcagtatatttcgtagagtgtttggcagtatataatattattccttttgcatgtagtattttatttattcttatatgaagtctgagagcatgaggccagatctctatgaggaagatagagtggaaaagccaccagcacacagcaaggaagatggcagaaaaaaaaatcctaacccagatctgactgagtgagaaggcctggctcttcccactacaccaagccaactccccgctgtgctaatacctcacaggtggttcattcatcccgtagaagttcctgggtgtaccaagaagcagacgcagaattagacatagatctctgggatcccctcaccctcccctaattggctgcctggccctttgcctccctcttccctycctccatcccctcccttcctggtaattaccactggagcaaataagttaggccattagacactcaccaacatttggtcagcttgcatctagcactggcaaggcagggag

SEQ ID NO: 485549 - DNA, 282 bp, Homo sapiens
gtgatgagctggtatttcgtactaagtgaaagagaaacgctcttattctatgtggcatgtctgggcaaattagatttccatcttgttggaaaattgttgtaagataattttgttagaatgagtcatttcactaaaatctgccagaaaatattcawaataaatattaaatttccagtgcctccaatgtgaatgcactctcccatagggttgttctaccacaactgtacaattctatatggcagcctctgtggggagccatggaaatgtttcttcagggagtga

SEQ ID NO: 485550 - DNA, 425 bp, Homo sapiens
ctgcggtatattagaggccacacattacatttgtaaacaattgcaaatccattctggggacagtgctgagtgacctggttttaggtgctgtaagggacagcattggaaacatgtatttaaggatrcactgctaactccttagctacaagaagaaaagccatatgtcaattggccagccatacacatcccacgttttatagaaattctaaaaaggaggcacatttgtaatttatattttaatgttgattaatcacagatatgttaaatttttacccattttgttttaataaatacaaatgcatataataacatatttgagagcttttataaatcggttgttcccccacattgattacatgaccagttggcttttcatgccttataaaatcactactcattctctctcattttataatatgcattat

SEQ ID NO: 485551 - DNA, 659 bp, Homo sapiens
atgtgcaatgcatggaaactctatttccttaatgtttttgtaaatcccatactgttctaggataatgtttactttaactaaagttatactaatataactctattgtgccactcagaggtttccgtctaaaaaaacaattaccttcatgctattcattcttttaaacgtaagctgtgatgaaaaaatcaaatctgacacctgaaactatgtctttctgcagggatctagttgtcattagatttttamtcttatgaagacaaattatataagtaaagcttaacaaaacattagcttaattccatatatatttttataagtatttgcctcattctctgtttatttttctttatcccaaatcaggtgattggaagaaaacacatttcaaaaattaaggtgccctgctttaaagggtaggtgagaaacctactccagaaaacctcatttttcttccataggtagttattaattttattttcacttttgtaaattgctcactttgtactcaaacaagatgctttttttcctttcactgtaggccttgtccacttactgtgtaaagaagcaaaagaaaaataaaggtctgttttctattgtgaagtcgtaatgcaaaatgtgtgtccccaccagtgtttctgtggcaacagactgatgtcagagaa

SEQ ID NO: 485552 - DNA, 659 bp, Homo sapiens
atgtgcaatgcatggaaactctatttccttaatgtttttgtaaatcccatactgttctaggataatgtttactttaactaaagttatactaatataactctattgtgccactcagaggtttccgtctaaaaaaacaattaccttcatgctattcattcttttaaacgtaagctgtgatgaaaaaatcaaatctgacacctgaaactatgtctttctgcagggatctagttgtcattagatttttactcttatgaagacaaattatataagtaaagcttaacaaaacattagcttaattccatatatatttttataagtatttgcctcattctctgtttatttttctttatcccaaatcaggtgattggaagaaaacacatttcaaaaattaaggtgccctgctttaaagggtaggtgagaaacctactccagaaaacctcatttttcttccataggtagttattaattttattttcacttttgtaaattgctcactttgtactcaaacaagatgctttttttcctttcactgtaggccttgtccacttactgtgtaaagaagcaaaagaaaaataaaggtctgttttctattgtgaagtcrtaatgcaaaatgtgtgtccccaccagtgtttctgtggcaacagactgatgtcagagaa

SEQ ID NO: 485553 - DNA, 596 bp, Homo sapiens
taacatttaacaattgctgctgattgttttcagtaaatgctgtcagggaaaaagrtggtttacactgtatgagttctgagtcaggtcaaagcaagacaagccttgatttgagtaggattctccagggaactgccagacaggttaatggatgacagttatctgagaatggagttttggaggagctccaaccccattctgccctgtccagaggctgctgggctgttggttttcactgtgattgtgggaaattgatttttaaagctaccgtagggctagggggaaggggcagggactaaggcaagttaaagcttcctgagattcaaccatttttcttgaacaaatactccctagattgttgcaaacctttaattaatgttcagagttctggaaaagatttttgaccatttttcccagtgatctctgttcctttatggaggagagtgttcagaggtccttacctcaccattcttactggcatcactcctctttactaatcattttaagctcactttaaatcagtcctctcataagtagcttggctgcctactctactaagaaattttatgccacctacgtttatcttaataattaacatt

SEQ ID NO: 485554 - DNA, 509 bp, Homo sapiens
cctgggagcctgtcactgcttgagwcagagggcaaggaccacggccttgaactcagcatccacaggacgcccatcttggaggattttgagctcgagggagtgtgccagctcccagaccagtcgcctcccaggaacagcatgcctaaggccgaggaagcctcttcctggggacagtttgggttgagttccaggaagagagtcctgttggccaaggaagaagctgaccgtggagccaaaaggatctgtgacctgagagaagattcagaagttagtaagagtaaagaggggtctccaagttggagtgcatggcagctaccctccacgggagacgaagaggtgtttgtttccggtgagttcgtttttgaaacccagtttcctcatggtttcttttggtcagagtgcttgacaaggaggcacttgggagttgcttcttgggaggcctgggcttcccggttgggggtctggggacgctgctcttactatgtgggatctctttaggctccacccca

SEQ ID NO: 485555 - DNA, 579 bp, Homo sapiens
gggagccctgcccgtggtcttagccacgcggacttacatttgggaatgctacaaccttcactcctatggtctgcgtgaacaaaaaccacttatcccccttccctttgacactgtcatctgcctgtggctaccttcggcatgatccaatcctttgggggtgcccctggccaaccattgggtggtactggggtctgtgggcaggggttcaagtyagagggtggttgcctggtggcccacatgcaggaaacacacagggagtttgcatgggcccagctcatccttaggcgactggagcccagcttggagcaggtggggtgttggtttagggtctgcactggtgttgtctttctgattgtctccaatttgggacttcctccgtcttgctggggtctgacttcccctcactggtccctctaaggagtggggcctgtctagggtgcagaagcctccctgggcctcaattttccctcactgaaaggagaacataggatcagagtctctgagggcccatctagctcgaatgttccttgagtgcttgagcgaagcttgcccatggtttgagatttgtcccagaacccc

SEQ ID NO: 485556 - DNA, 608 bp, Homo sapiens
tgagtttcttgactcccaatctcrttatctttccattttgccaacttaagagttaaataataacgactctcctgttgctaaaatgttacacataatccctctccattactgcaatattttaactagaatctaccccttcatggattttcttgctaagtaatgcttgaagagaaatgttcaaagtcagtactccaacactaaggaatcaagacagaaaagcaatggtacagttcagaaagatcaaagtttggggaggtcattatgggaatttatttcattttgaaagaatacaggcaaatgcttgtatttagggtgtgaactaattggcgatatgcatatagtggcataatttaacatctctttctattcagtcagtgattcttagcctgttttggatcacagacacctttgaggagttatagaaagccatagaccctttcctccccacttcacccctgacccaaatcacataggcactaaaggttgtattcagttccaggggattcactgacctagttttagaatccttattctagatacatggctcccgactgtacaatgtttcccttgggggacatttagaatgtctgaaatatttttggtcttca

SEQ ID NO: 485557 - DNA, 623 bp, Homo sapiens
attttaggtgtctcttacatgcatctgtatatctctctgtagcatcatcttttaaaaataactcataaacaaatagttataaaaaaaagaaaggagacaaggcctggtggctcacgcctgtaatcccaacattttgggaggccaaggagggcagatggcttgagctcaaaagtttgagaccagcctgggcaacatggcaaaaccccatctctagaaaaaatacataaattagctgagagtgatggtgcatgccagtagttccagctacttgggaggcagaagtgggaggatcaactaagccctggaggtcaaggctgaagtaagccttgaccacaccattgtactccagcctgggtgacagaacaagactgttgaaaytgcctttgcaaaattatgactgagacagtgaaagagatctaactgactccaccttgcttctaacctccaagctgtctattcactcctgggcacaggctgagctaactttgggagaaacttagtttgtagtttatagtttaaacaaggacggtaacagccctttcccaaagcatatctccttcttgcctggggactagactaacattatccacaggattagaaattatggtttaggagtgacgcag

SEQ ID NO: 485558 - DNA, 384 bp, Homo sapiens
cagtagccactttgggttagagttgtatgtattcaaagtacacatgtgcatggggatgaaagtagagctgtggttatggggcagggagcctggccctggagatgacagaatggagcagtaaccatcaaattaccgcctccttgcttggactaaacttaccattataccttggaatacaaattccaattcaatcaataactgacatctaagttgacaaacagtagccaatctgactactatttacctttatgttaattatcatagacatttcttaggtaaacagttatgtggtgacttccttcagtgtgttgatcatttacagatgtatccacccattcgcccatccatcmccatgttcaacagtcacttactgagcattcataa

SEQ ID NO: 485559 - DNA, 375 bp, Homo sapiens
gtgatttgctgcatttcttattggcttgtgtaaatataccagtgggcaccagaggagtcattattgtcaatcacatcagggatccaagcatggaggagtctgagaatgcaattatgtagcaaataattccatccagtggagagggctaatgatacaagaacagaactgcagacagggatctgtgtttttgtaaatgaataaataatattatgtttccaaaaatgaycggtcaaatttagctccgtggagaaactgatcacggtaatgtacagacatgtcaagacatctcttcttctttcctcaatatctttaggaatgagaaattaggaaagaggttggtcattcaaactagctttttcttctctagccaattag

SEQ ID NO: 485560 - DNA, 528 bp, Homo sapiens
tggcatcaccactgattatgatgacatttgtgctgctgctctttttgctctcagaacttgattgtgaaacaacaaccaaaccatgcatggtagcttctgattgtttgaggctatgtcacatgccaggcccctatgagtgctcagcatttgtggtgtaattttatatctgctttacccccagtaaactcagaaagggttaactggccaaaaaaaaaaagataattatttattacactcaaacatacctcttgttattttcatgctccaatccagtccgaaaaaagctgacctaagactcaagaaaagttccaaggtcctatttcactttgtcttactttctcagctctacatgcatgaatatttctgaaagatttcttaatttattcaytatggtaccaagccatacttcaactctctctggacatagagaagaattgcacaaagatttatcaaaatccactactttacaaagacaagtgcttatccatatgcacaaaattaaggaggaggcaaagtcttggcatggtg

SEQ ID NO: 485561 - DNA, 618 bp, Homo sapiens
ggcactcagtaaatgaatggtgaatgaataaacagatgggtatctgttacaggagyggagtggttagcacacaggtgaacattctgaccggatttgtttcttcttcacaaagagttggtctttacacgttatctttccattaagtcagataggggattatgggaacccatgaagaacttaagtcctgtgctctctacctctgacatagtacctaaaccccaaagtctgcagttctgaaatttccttctctgcataaaggccacctactcccacttttctctcccaacctccaaccctcctttggctctctaaggcctctaggtttttactattcatcatcacccttgtcccttcttgactgccctggcagcactctacactcatcatgtcaaaggtgctcttaccagcagcactaggttgagtagtgatctcaaaacctcatgttaacccagaacctcagaatgtgaccttattttcaaatagagctttgcagttacgatcgagttaaaatgaggttatattggattagggtgggccctaaatccaatgacccacgttcttataaggaaaaagagagatccagagccacaaactgacatacagggaagaacaccatgt

SEQ ID NO: 485562 - DNA, 618 bp, Homo sapiens
ggcactcagtaaatgaatggtgaatgaataaacagatgggtatctgttacaggagtggagtggttagcacacaggtgaacattctgaccggatttgtttcttcttcacaaagagttggtctttacacgttatctttccattaagtcagataggggattatgggaacccatgaagaacttaagtcctgtgctctctacctctgacatagtacctaaaccccaaagtctgcagttctgaaatttccttctctgcataaaggccacctactcccacttttctctcccaacctccaaccctcctttggctctctaaggcctctaggtttttactattcatcatcacccttgtcccttcttgactgccctggcagcactctacactcatcatgtcaaaggtgctcttaccagcagcactaggttgagtagtgatctcaaaacctcatgttaacccagaacctcagaatgtgaccttattttcaaatagagctttgcagttacgatcgagttaaaatgaggttatattggattagggtgggccctaaatccaatgacccacgttcttataaggaaaaagagagatccagagccacaaactgacakacagggaagaacaccatgt

SEQ ID NO: 485563 - DNA, 567 bp, Homo sapiens
gttgaatcaatgcttcccatattttttaaaactttattcactgctgatgtctgatagttggataaaaacttcagtagatgtaacttcaaattaagaattaagaaggaattatatttatctaaaagcatggatttctgtatagtcctatgaatatcgaattttttgaatgaatgagtgaaatacatggattatgtacattctgtttttctacattttattttatgacatgttgttttattttggcatactatatgtgttctttctgcatgayattttctttcacatagtcccccattacattttgttttataagattactaaaataagaatttctgcttttgcataaaaccgtattttaagatgacttcacaagataacataaaattcaaactagattagttacatttagcagtctaagtagaaaaaatagaaagttatgatgcattcatgtctatattcataaattaaatatgtatttaccacaaaatttctaattacctggtgctaaaggagtaatagtgaatgaaaatagaggagtgatcactgtccttgttgagcttacagtct

SEQ ID NO: 485564 - DNA, 480 bp, Homo sapiens
acatcacaactctgatcttagcttctgtatgttgtttgaggccaagggaaggctgaggagagagggtccaggactggtttggagttcacttggtaaactggagaaggcatgaccctggcaattttttaaaaatatatagggagtcctaccaacaattatacagacccaagttgtcttccagacacatcacctactcttccctatgtgtacctcgtgtacctacactcttgctgatggcttttgctttgtcactaccaaatctttaattattctatttcttcttcatataatatatacctaccccatctcagaaacctcctttcccttgcagcctcctccacaaagcttctactaatcactattattgctgctaccaccctcatttttactacctgctctaattayatggtatgatttttgcattaaacccaagataattttatagtgatcttatgaaacttactacttcaacatgacatt

SEQ ID NO: 485565 - DNA, 595 bp, Homo sapiens
atagtttggatgcttgcctgtagtatcagaatcacattggttcctcctcaccagatcccgtgaatctaccaaactataagaattaggactcaccaataaagacaatagcaaaagctatatgtatttatctctcaaccagttttacattttttgactccttaagaagacagtataatacacctggatggttatagtttggcaataaatattaggtatatttgtgctaatgtatccatactatatttttgtggtaaaaatataaatccttgaaacatgtcattcaatttactctatcaactttaatgaagctaatataactgaagcacttgtaaacaaagtttaaattttctctattttgagaaatatttacttttatattcaacttctgatcataaagaaatatatattctaaaagtaagctacacsaaagagacaatttttcttagtgcaaatataaagttttcccaaaataatgtattggcaaacaaaggttttttaaaaaaatttaatttctagatacttatttgaatgttttactttttctaatataaaaaaaaggcagaggttaatcagaaaatttaaaagagaggaaggc

SEQ ID NO: 485566 - DNA, 641 bp, Homo sapiens
aaaagaacaaaaaagaatactgccatcactacaaaccacaggctctctcagttcttgctacctcaccacccagtaaagctggcccaacttcagcactttgcttgccttctgcagcctggcttcactccacgggcaatgaaaaccaaagcccaaatgcctttcttccatttctcattcattcagttcttaagtaaccaggaaagagtatcatattaggaatcagaagaagtggcattatctaatgttaagtgtgtctgctattatctaatctcattagagaggccaatgtaatatttgtaatatattgctggactcgcataagaaaggaacttgatataggaacccacaggggttactgctacgaactctatggagtccaccctcacccaccaaaccccagtttctagaaagttcaatcgtgaagtgtaatcccaccatttggaagaaacacaagatctcctcccacgccattcggcaaacaccagggaagcatcctgcccttttctggggcttccatctttgacaaagtttccraaaagtctccagaccatctgataggcatcccatgcacatcttatcaaaagcataaagctgccttatttcctttggcagaggtgcttgtgacgtaactccagaaccag

SEQ ID NO: 485567 - DNA, 609 bp, Homo sapiens
ctgggagttgctttctgagctcaggcctggagcatctcaatgggcaacatgtcccacggggctgggtgggtggcagacagtgtgtgacgcagggcctgccagagcccaggacttacctttaggaggtggtgtgaacaactgcaccccccacccactctctgagcctccaattctaaattcagtcttggagtccctgaccagaaagcaggaactcctggttgagtcacaggggtatatcacagatggttttctttttctttcttttttgagtcaggatctcgccctgtcaggctggagtgcaatgacacaatccggctcactgctgcctcaaagtcctggcctcaagcaaccttcccacctcagcctcccgagtagctgagaccataagcgctcatttcttattttgtttttggtagagacgggatctcactatgttgcccaggctggtctggaactcctgacctcaaacgattcacccgtcttggcctcccaaagtcctgggatgacaggtgtgaaccactgcacccagccacagatgttttmtcgcagcacactttgtcacggctgaggaagagtgttcgcatgttaggcttgccaaagctaagaata

SEQ ID NO: 485568 - DNA, 586 bp, Homo sapiens
tcatattgctactctactgatccttaagctaaataagtggttattgtttaaagctactgacttatggggtagtttgttgtgcagaaaaagctaactgttacatgatactaaacataatggaatgtttggtgaattggcattttgtatcctcagggttatagagtggacatcaattctttccrtatagaactacaaatttaaaagacagaggctggatttataccaagtccaggatatacctaaattcttcttttaaaaagttagccaatatactgttgtgttaaaatgcaaatgcctgaataatatgctaagtataatgccattagattaactaaatttatgctgtgtatatatacttgtatatacatggaaaattctagaggaacactgaagaagctgttaatagaggatacctctgggcctgggactagaggtgggataggggtaggaggaactttttttgttgtttatatcaagtttgaaattttcaccatgattacatgttaattttataactaaaaaaatactaacatttaaaaaaatgaagtctatcaccaaatggtctaagagtaccagcttggttcaa

SEQ ID NO: 485569 - DNA, 619 bp, Homo sapiens
cttctcagagtaagaaaggaccatagggtaatgtcaaagctagtgtgctaataggaaaatgtggactggagttgaagataatgctaagggtrtgacttaaaaaccctttaataagacctcagaaagagataagttggtgcctcatagacccatgcagacagacaaaagcccttctaagggtcttagggtcttgtttagcaagtcctctctattaaacaatagggcttctaaaactctcaaaacagactcatagggggcccagtacagacaagggtttatctcaaaaagatgtgagtatgtattagtccgttttcgtgctgctgataaagacatgccttagactgggcaatttacaacagaaagaggtttaattggacttacagttccatgtggctgggaaagcctcacattaatggcgaaaggcaaaaaagagcaactcacgtcttacctggatggcagcaggcaaacagagagagcttgtgaaggggaactcctctttttaaaaaccatcagatctcgtgagacttattcactctcacaagaacagcacgggaaagacttgaccccatgattcaattacctcccactgggtacctcccacaacacatgggaattcaag

SEQ ID NO: 485570 - DNA, 619 bp, Homo sapiens
cttctcagagtaagaaaggaccatagggtaatgtcaaagctagtgtgctaataggaaaatgtggactggagttgaagataatgctaagggtatgacttaaaaaccctttaataagacctcagaaagagataagttggtgcctcatagacccatgcagacagacaaaagcccttctaagggtcttagggtcttgtttagcaagtcctctctattaaacaatagggcttctaaaactctcaaaacagactcatagggggcccagtacagacaagggtttatctcaaaaagatgtgagtatgtattagtccgttttcgtgctgctgataaagacatgccttagactgggcaatttacaacagaaagaggtttaattggacttacagttccatgtggctgggaaagcctcacattaatggcgaaaggcaaaaaagagcaactcacgtcttacctggatggcagcaggcaaacagagagagcttgtgaaggggaactcctctttttaaaaaccatcagatctcgtgagacttattcactctcacaagaacagcaygggaaagacttgaccccatgattcaattacctcccactgggtacctcccacaacacatgggaattcaag

SEQ ID NO: 485571 - DNA, 611 bp, Homo sapiens
gggaaatatcttataaagatcattttctgtggaagctggggaagaaactgaactcaagagaatgttttagaaatacaaataaaccaacaattgatgctgttatttcctctagtctttgcatttcttaaaaaatcagtcctttatttctctttatcagttgcaaattggatagattctctttggctctctggaagaagggaaaaaccatggcacctcacagaccctgttttaacagatcacagtaatagtagctttacatagttctaagtgatattcgtcctgattttagtcgtcattccaatattttagatgggggaatatgactggcccatttttggtcaagacatatacctgatccaactaactctgaccagaacaatttcatgaaggaaaaatataactgcagaagaagatacttaatggattaggaattgagaatatattttgcagagacatggttattattgggtcaggagtcacattaccaggtgtccttccagaatgcaaggaatattaaaygtcaaggaagatgggactgagccaaatcttgtgcttgaaagcaaatatcaataatattaaataataaatatagttcaatgttttaacaattt

SEQ ID NO: 485572 - DNA, 638 bp, Homo sapiens
caaagtaagcctggttcttaagacacattcagtctcatccctgtaatccatgtatattttaagtatagaaagaattcgagccaaggggagagaaggacatgaaaaggcttttaggtaatgtaatatatagttaatggcaattattattatatattattgagggtttaactaagagtagacaccattctaagcacttccatcacttgctcaatttaactgtcactataatgctacgaggtaggtattgttattaaccccatttaaagatgaagacactgaggcacacagaggttaagtaatgcagggccagtaaatggtagcgccaaagccaaatcartgcagcctaattctagagaccaagctcttactaaccccccaccatgtctctcagtatgagaataacacttccccctgggcctatgtgaccgtggagtcttagaaggcgttcctcaaatctgctgaagattcatctgtcgacttgaaatattacattagcactgaattgggagtctctaggctggacatggatgcccccacacagccatcttgtctccagctttgtgggagttcagttgggaacataatgcaaataatgaggaatcaaaacccaaaggcaaagaccttgaaggcagaggggg

SEQ ID NO: 485573 - DNA, 638 bp, Homo sapiens
caaagtaagcctggttcttaagacacattcagtctcatccctgtaatccatgtatattttaagtatagaaagaattcgagccaaggggagagaaggacatgaaaaggcttttaggtaatgtaatatatagttaatggcaattattattatatattattgagggtttaactaagagtagacaccattctaagcacttccatcacttgctcaatttaactgtcactataatgctacgaggtaggtattgttattaaccccatttaaagatgaagacactgaggcacacagaggttaagtaatgcagggccagtaaatggtagcgccaaagccaaatcagtgcagcctrattctagagaccaagctcttactaaccccccaccatgtctctcagtatgagaataacacttccccctgggcctatgtgaccgtggagtcttagaaggcgttcctcaaatctgctgaagattcatctgtcgacttgaaatattacattagcactgaattgggagtctctaggctggacatggatgcccccacacagccatcttgtctccagctttgtgggagttcagttgggaacataatgcaaataatgaggaatcaaaacccaaaggcaaagaccttgaaggcagaggggg

SEQ ID NO: 485574 - DNA, 638 bp, Homo sapiens
tttttttctggaacttaaaaccattgcaagatccatctgttggtaaacaggtgaaaacagccgagctctccttgagacagataaggaataatagcatataaggtgctagttggcattctgagagcttcctgtatctcaactcattaactctcacagcaaccctctgagataggtactattattaacctactttacagagacagacgctgagtccaaatgttaaattaatctgcccatggtcatacagtcactgtagatgatagagctgggaagatgaaccagtcaggccagtaccagagctcaagctcttgaccacgacacctacttcctcccagaggaggaagggcttgacaacccagatattaaatactaaaacatattataaagctgtaataatataatttatactatattgacttcaaaagagagatcaacagagctggaaaagaaagtccagaaaaggaaccaaaaatatatgataaagggggcttttsaaattagcagagagagggttgattgatcaatacctgatgctagaacaaatggctagccagttaatgacaaaattaggtccacacttcattccatgtaccagagaagtcctagaagaaaatataaggaatatttgtataatgttg

SEQ ID NO: 485575 - DNA, 564 bp, Homo sapiens
tgtgtggccaagtgtaactggttggctttgtggaagattgtctctcctgrcagggctggtgtgaggctgtgctcagttgctcgccgggcaaagcctatctcaaaggtctccctcagtgtcacagagttcagataagttgtcatccatcaagcctggtgaagcaaaggatacaggaaatgctgaggccgatgcggctccccggagacagtggtccttgggcagggtgcatttatgggaaagtgcccagtcctgtgctggctgggaagaggcctgggaaacttctctggaaacctcttgaaagttttatctggtcagggtccggaactggtaggtatggacaaagtgaattaacatctcaaatgtcttaaatgtcttctccaaagtgggaacctacctcatgaaacagatcatcatgcagacacctcccatgggaatgaggccagtagactgaggaatgtccaattccagaagcaaaacgagccattttaccaacaagacaagagagttatggtctcagaggaggcaatttcgagaaaaaaaacctggccctcccctcccctgccc

SEQ ID NO: 485576 - DNA, 589 bp, Homo sapiens
catccaccatggcagtggggcatttgagcccgacaccccatctctattagtttcttgtacggctataacaaggtgccacaaaccaggcagcttaaacaacaggaatttattctcacagtcctggagggctggagtctgaaatccaggtgtcacagggccacgctccctccaaggcctccaggggaggagccctcctgactctctggcttctggcagtggccagtgaccccggcgctctgggacgtgcaggttcatccctcccctctccgcctggcatctcagcctgtgcccaaatctccctcttcttacaaggataccattcattggttcagggcccaccctactccgggatgatctcatctaagtgtagctagttgtatctgcaaaggtcttctttccatttgtacattttttaacttttattatttttaactggcacatagtaattgtacacatttatgcgatgcattgtgacattgctctacatgtatacaacaygtaatgatcaaccagggtaattaacatagccattacctcaaacgggacatttctttgtattgggaacattcccatttcaattcaatctctt

SEQ ID NO: 485577 - DNA, 470 bp, Homo sapiens
atggcttcctctctggagaagactggctccagacctcccagtgactggctttggtgacctcagccatccactggtgcggtcctactgggtatcctgctgagaactcagaggttggcagacttttcatatctcctcgccagctcttggggacagcacccactgaggcactggccaggccaagaacacaccacggtgtgtgcctaggagcaaggccctcttttcctagccttctgagaagtcttcttccccaaccctcagctatgcrccaaggcaggtaacagctttttccctacttgcagggaatttggcggagatagagatgccatctctccgacacccctaacaagctgccatatgtgtcaccatcattggcacccatggccttaacttttacaaatttcctctcctggtgccacgggccctccaagccccctcttcctttttctttctgcaacttgaacaccacttat

SEQ ID NO: 485578 - DNA, 505 bp, Homo sapiens
ctgggagggcctgggtctggacaggggccattagaccagttcagtgctctgtgggctgtggccagaggcaccttgactggggctgctgtccccatcctcatcctcctccacttgctaggcccacttcgtgaggtgccgaaggtgaaacagccagagaacttcacttgcccgcaacaaccttagagtcagatgcaggtgggggaaaagccatatatcatcaggtaacttcatagagttataaacttaagaaatgcttggggccaaagagagagatcayctttcattcattcaactaatatgtactccatgagatctgagccggaagcggaattccttggacagtttttgctattctccatgccagtgttccctctgggcctagaggtttctttttagtctgccctcatcccccgtttctgtcttctctctcttcatgcaaatatttcttggaaatttcaacaagggttacatgccttctagcatctgcctagacactcccaaaata

SEQ ID NO: 485579 - DNA, 505 bp, Homo sapiens
ctgggagggcctgggtctggacaggggccattagaccagttcagtgctctgtgggctgtggccagaggcaccttgactggggctgctgtccccatcctcatcctcctccacttgctaggcccacttcgtgaggtgccgaaggtgaaacagccagagaacttcacttgcccgcaacaaccttagagtcagatgcaggtgggggaaaagccatatatcatcaggtaacttcatagagttataaacttaagaaatgcttggggccaaagagagagatcacctttcattcattcaactaatatgtactccatgagatctgagccggaagcggaattccttggacagtttttgctattctccatgccmgtgttccctctgggcctagaggtttctttttagtctgccctcatcccccgtttctgtcttctctctcttcatgcaaatatttcttggaaatttcaacaagggttacatgccttctagcatctgcctagacactcccaaaata

SEQ ID NO: 485580 - DNA, 621 bp, Homo sapiens
ttaactccagaggtcacgggaagccatgaggggttgcggacccgccctcaaggagtccatggtgctgagtgcatctctccaaatgtccatccctgccctgcctcaccctatgtggctaccatgcagcggtctccccaccagacagtgcccctgttgagagtgaagactgtgtccccccagctctccttccctggcctactgggaggtagcagcacctgagaaacactggcagaattcacgagttagcaaagccygatggcagaattcacgagttagttagcaaagcccgaatctgcagctccacagtgtgcagaaatgaggtccttccctgggttgtttctaatgctccatgccatatgtgctttaaaaaaaatcatgcccaccaatatgagaagaatctcttcccttttttatcacctaatagcatggtcccactgtcacctctacctttacaggccacattctttcacacctatcatttgacatcagtgcccctttacccacctccctagatctctttccatgttctcaagttatttttcaaacctctcaaccttcttttgtgcagagataagccttcccttgctgtacactgactcctcccaaaaagatgaagggtgg

SEQ ID NO: 485581 - DNA, 564 bp, Homo sapiens
acaattgtgaatttttcaatggttgctttaaagaacagtgttcaaaattttgtacttatttgtgcaaatcaactttcaacttaataacggtccacaatccaaaaaaaaaaaaatcaccagggcataaaaataagttgtgcatagtcatttcatgcaagatatttgatggttaaaaatayactaataacaaattgttattaccaataatagaaaatactttcattggaagttatacacaaacccaaaatgcaatatactatctaataagtttattttttattttatacaatttttaaacggtataaatttttaaacggttcactaaactctacacacattcttctaaagcctccttaatttactctgtacagtttaacatttctacctgtgatatgtcatttacaggtttgagaagtgctgctcggtggcccacaaaggcaaaacatggcggcttcactcaagtcattcagaatgtcattgcagagggagctgcatgcccagagaggcaaagtgggaggcatcaagctgccaagtgccacacagatgttccagtgacacacagaa

SEQ ID NO: 485582 - DNA, 600 bp, Homo sapiens
tgctaatttgcttaggttattggctccagctgcacccatgctgtggcaaagaatgtgattccactcttctttttttatagctgcatagtgttccatggrgtatatgtaccacaatttctttattcaattcactgttgataggcatgggtacctgggttgattctgtgtctttgctaccccaaacttcagcatcacgtaatatgcccaggtaacaaacctgcacatgtacctgtatttaaataaaaattgaaattatttttaaaaaatagtttaactggctataaaatgttctggggaattgttttctctcagtaagttgtatgcatttttctactgtttttgacttcagctgaaatatgaaaattatgaaaaaaatttggagtgtgtcttagttctacatccccctttggaaaagcctaattttgatccctttccccagcctggaccttaaatcccaagtctatatccacctagagcaactacctactatggttcctttgtgtgtgtgtgtgtgtgtgtgtgtgtgtgtgtgtgtgtgtgtgtgtgtgtgacaggtccaaggaggaagggctcctggttaaactctagagtgactatatt

SEQ ID NO: 485583 - DNA, 535 bp, Homo sapiens
ttaattttgtatcaggcttgatagaggcctcatactctcatttgattctctcaaaatgaaaagttaacataaaagcttttgcccttccatcagtaaactcaggcacatgtgctcctgctgctagattaccaaaactacctcagtctcctttccctaattttctaaatctttcatctgttttagagggacatggttgttttatccatgtctttccaaactttcataaaaagwtccattggtaaacaaagtactcttttaaaaaaattatcttatttagtttgtttcactatcaaatactagatcttattcatgttttttctatttattttttgtacccattaaccatccttacttccctcccaatccctcactactccttcccaggctctggaaaccattgttctactctctatcctcatgttttcaattgtttttatttttagctcccacaaacaattgggaacatatgaagtttgtttttctgtgcctgtcctatttcacttaatatcatgatctccagttccatccatgttgt

SEQ ID NO: 485584 - DNA, 535 bp, Homo sapiens
ttaattttgtatcaggcttgatagaggcctcatactctcatttgattctctcaaaatgaaaagttaacataaaagcttttgcccttccatcagtaaactcaggcacatgtgctcctgctgctagattaccaaaactacctcagtctcctttccctaattttctaaatctttcatctgttttagagggacatggttgttttatccatgtctttccaaactttcataaaaagatccattggtaaacaaagtactcttttaaaaaaattatcttatttagtttgtttcactatcaaatactagatcttattcatgttttttctatttattttttgtacccattaaccatccttacttccctcccaatccctcactactccttcccaggctctggaaaccattgttctactctctatcctcatgttttcaattgtttttatttttagctcccacaaacaattgrgaacatatgaagtttgtttttctgtgcctgtcctatttcacttaatatcatgatctccagttccatccatgttgt

SEQ ID NO: 485585 - DNA, 589 bp, Homo sapiens
tacaggtcttccctgaacttcctatcatgtatatcatacacacattcatgggtgcatgcacacatacttccactcacttcctctaccgggctcccagctacggcctctatggtgttccctgtggtacttgggcatgtctgagcaagtctgaagcctggtagcaagtgacatcagggtcttcattcatgacatttcaaggaattttttagagggcaatttaatgtaaatcaaagctgaaattttaaataccctttgacccaacaatttcatgggcagaacttttattctagatgtgccacaaagtatacatatgaaaggtattctactaaaacaaatgaattgccataaggttaagtaaatcatagcacagccattttataaaacagcatatgtgctgatatggaatgatttccaagacgttattgttaaatgaaaacatcaagttgcagaacaggatgaataatgcgcgaccattctagcaggttaaataaggaactggtaatatcactgccttttaagaactaggggaccygactgttctcttttgtaccttttgagctttgtacatcacatatgcattatttaattt

SEQ ID NO: 485586 - DNA, 652 bp, Homo sapiens
aatttctacttttaggtatctccacaaaataagtccttggcatttatacataagaaggtgtacaaaacaatattcactggggcactgtttgttactgcaaaacactaggagagaagggagagaattatgacataccagatggaaatgagatgaaactcctgtcagcttaaataactgggaggaaaaaaaaatattcattaatagaagaagagttaagtaaatgacagagcaccaatactagggaatactctgtggcaattatactctacagaaatgggtctatatgcatgcacttacaaggcaatatttccaagatgtgttagtgaaaaaacagcctggaataatagtctaattagcaaacagtgtaggattaggaaaactagatcaagaatgctttttggtttatctgtattactttaattttctacaacaatactatatgcatgtgttctctgcttattaaaatcaatttaaaggtatgaaaaatgtaaatgattaatatggacacttgcggaattctgtctaaataaggaggacccatgaaagaagatgtctwttctgagggctgtcctgccttcaagatgggagaggggaaaggaggaagaggcatggtcaagaaacacttcaaagtagccacatttgagtgaagtct

SEQ ID NO: 485587 - DNA, 543 bp, Homo sapiens
gagaagaaacctggttttcttggaatggtcctactaagcttgaaagtggtgctgcatttagggcagggcacacccagccataggcaacccctttgagcgatgggagaagtagcataagaaggatgccaagaagaacaataggttcttcaactcagtgtgggctctgggaaaccatcagcagtgggtacggaacacttctctgggctctgccctggggtcactgagagcaaatgggagtcaagtcctcaaaataagaaacttatcacttactaaatagctgkgcattcccttcagcttaggagcaaaatgtttactctcagaagctttcttttatttttaaactctccttaatggagggaataaaatccagaatagaagtgaagggcctggagagccgcattcgcagcagaaatgccctgaagacccagcacagctgtcccatcctccagcagctagactcctgatacctccatccccaccccagccaatccagtaatcagaatggctgctgtcaaaaaactaaattcatttgcataatagaga

SEQ ID NO: 485588 - DNA, 640 bp, Homo sapiens
gggatctgcaactgcagagaaaatctacattaatgcagccaggttttatttgaggccagcccttgtgcaaatccagaaaagattaactgatagataggctgayatctttaaaggtctgaaaaaaagatttactacctgttttctctgagggctactacctgtgaagtttcatctacataacaagaccaactttgctagtcaggcctcctctttttcctcttttctcccataacctgtgttaccaccataacctgctttgtcatgtatgtatactgggcagtgacattttgaaaattatctgggcagtgaacttaattcaaattaattgggacaacaatttagatttcaagaaaaattaagttggaaattataggagatcggtcagggtggcgggaaaaattatagaaagaagcaaatcttcttggaaggccaggaggttttgcaaaagcttggggaaaggatatagctgaaggcagctgaattctctcggagtagataacaaggaagcacaatggaattgatatagataagttagtttacttaggccttggaacctggcctttaattatctgcgtgcaggactgctctccccaggggtggggaggggggcccaaccgtgttaattactcaaggcctttgt

SEQ ID NO: 485589 - DNA, 666 bp, Homo sapiens
gttaatgttgtcttaaaatccttatttattcaatatttttataatgttctagtgtgatgtacccacaactacctttccttgtctcaaaatattttctatttgtctgtctgtttaaactatcagttttacatatgctatcataaaatacttgactcttgttttctctcttttctttcttaattccatcaactcacagcaatctaccttctttgattaggaaaatctaccaattaactctactctatgatcagtattttctgtcctgctcttrtttgtgttctctgatgtttgtaactatatattttaactcatttgattttgaaattttattttgacttacaagttactgtcttagccttcatcaattaagaatgataatgtcaactacagaaaaataacgaacatgcctatgaattcattataatgccattataactgtaaatatttaagtacagtaactctcatagaaaccccgatgtctctttcatgagattatatcatctttgatgcaggtgcatcttatatctattccgcatacttagaggtaaatctttaatgaccccattgatattgattaagggatgaagtaggaatgtcttgatacaattaatattaaccaagaaaatggctgttattgttagtgagcatatccaagaccttttaaaa

SEQ ID NO: 485590 - DNA, 644 bp, Homo sapiens
ctgcgttcgttttcctccttatttgggtrgttcacagggtgctcttatcacagtgtcagctacctaaaggctgagactctcttgattatccaaacactgaagctcaaagagacatatcaagaaaaaagtgttatttgataacagtctttacaagtcctgttacaaacatcaggaggatggcatggcacacaatgcttccagtaaatactaaattacaggaaactgttcttactagctaacgttcaggtgttttaagtttccatctaatatgagaacagcctagatctttcatacttgaaatcaaaagactattatttcttcatttctatgggtttggctggaagaagcaaagcagacatgataaactgacttgaccaggaacataaatctctaggaggggacaggcacccaaaggaaagtcaagtctattggtattaggaaagttgacaattccatctctgttgattctttctaaattaaggtgttggtaactttagtcatttcaaacctgagacaagagaatattttatatgcatatatatacacataactgtatatgtataataatttatatttatgattttttcaatactgaagtagaataaaagttccagccaaagatttttattgtatttttttaaaat

SEQ ID NO: 485591 - DNA, 644 bp, Homo sapiens
ctgcgttcgttttcctccttatttgggtggttcacaggrtgctcttatcacagtgtcagctacctaaaggctgagactctcttgattatccaaacactgaagctcaaagagacatatcaagaaaaaagtgttatttgataacagtctttacaagtcctgttacaaacatcaggaggatggcatggcacacaatgcttccagtaaatactaaattacaggaaactgttcttactagctaacgttcaggtgttttaagtttccatctaatatgagaacagcctagatctttcatacttgaaatcaaaagactattatttcttcatttctatgggtttggctggaagaagcaaagcagacatgataaactgacttgaccaggaacataaatctctaggaggggacaggcacccaaaggaaagtcaagtctattggtattaggaaagttgacaattccatctctgttgattctttctaaattaaggtgttggtaactttagtcatttcaaacctgagacaagagaatattttatatgcatatatatacacataactgtatatgtataataatttatatttatgattttttcaatactgaagtagaataaaagttccagccaaagatttttattgtatttttttaaaat

SEQ ID NO: 485592 - DNA, 644 bp, Homo sapiens
ctgcgttcgttttcctccttatttgggtggttcacagggtgctcttatcacagtgtcagctacctaaaggctgagactctcttgattatccaaacactgaagctcaaagagacatatcaagaaaaaagtgttatttgataacagtctttacaagtcctgttacaaacatcaggaggatggcatggcacacaatgcttccagtaaatactaaattacaggaaactgttcttactagctaacgttcaggtgttttaagtttccatctaatatgagaacagcctagatctttcatacttgaaatcaaaagactattatttcttcatttctatgggtttggctggaagaagcaaagcagacatgataaactgacttgaccaggaacataaatctctaggaggggacaggcacccaaaggaaagtcaagtctattggtattaggaaagttgacaattccmtctctgttgattctttctaaattaaggtgttggtaactttagtcatttcaaacctgagacaagagaatattttatatgcatatatatacacataactgtatatgtataataatttatatttatgattttttcaatactgaagtagaataaaagttccagccaaagatttttattgtatttttttaaaat

SEQ ID NO: 485593 - DNA, 509 bp, Homo sapiens
cctaccttcagaaggcttctcttctattaagtgatgaaaagacacaaaataattattctgtgaatggtaastactgcaatggacatgaggagatgttactttgggagcacattgggaaggacgtaatcatagctaccttcacctgagcgagcactcattaggtgaaggggtttacatagattatctcatttcatcctctcaatagcccagtgatgcaggcactgttatcctcctcttcattttacaggggaggccactgggacacagagggttggaatatcttacccaagatctgacagctaggaagtgcaggagcctcctctcgggtcctacattccatctgaggactggatcctgctggaagaaggaaggaggtttatccagggagggtgtgcaggtaggaggctgtcgtgattcatcacgggaagtcaataaagggtgaataagggcagtgggaggggccaaggacagcagtggggatggtcagaggggccagcacatcacatgag

SEQ ID NO: 485594 - DNA, 509 bp, Homo sapiens
cctaccttcagaaggcttctcttctattaagtgatgaaaagacacaaaataattattctgtgaatggtaactactgcaatggacatgaggagatkttactttgggagcacattgggaaggacgtaatcatagctaccttcacctgagcgagcactcattaggtgaaggggtttacatagattatctcatttcatcctctcaatagcccagtgatgcaggcactgttatcctcctcttcattttacaggggaggccactgggacacagagggttggaatatcttacccaagatctgacagctaggaagtgcaggagcctcctctcgggtcctacattccatctgaggactggatcctgctggaagaaggaaggaggtttatccagggagggtgtgcaggtaggaggctgtcgtgattcatcacgggaagtcaataaagggtgaataagggcagtgggaggggccaaggacagcagtggggatggtcagaggggccagcacatcacatgag

SEQ ID NO: 485595 - DNA, 509 bp, Homo sapiens
cctaccttcagaaggcttctcttctattaagtgatgaaaagacacaaaataattattctgtgaatggtaactactgcaatggacatgaggagatgttactttgggagcacattgggaaggacgtaatcatagctaccttcacctgagcgagcactcattaggtgaaggggtttacatagattatctcatttcatcctctcaatagcccagtgatgcaggcactgttatcctcctcttcattttacaggggaggccactgggacacagagggttggaatatcttacccaagatctgayagctaggaagtgcaggagcctcctctcgggtcctacattccatctgaggactggatcctgctggaagaaggaaggaggtttatccagggagggtgtgcaggtaggaggctgtcgtgattcatcacgggaagtcaataaagggtgaataagggcagtgggaggggccaaggacagcagtggggatggtcagaggggccagcacatcacatgag

SEQ ID NO: 485596 - DNA, 654 bp, Homo sapiens
attagcataaatcagcatgatttgggggaaacaaatcgyatttccatgtttacatggtcactgctttctgagcaaaaggtgctggcaacctgggttaaaggacgtttgagtggcaacaaaccttggaggttaaagtagtaacttctggagagattggcagcagcatctcccctagcgatgggtatttatattccaatggttgatggacctagagaccttctcgttctctccccagagagcctttgtttacatttcagagcaaaagctctttctctttctctacctggggtgagaagaggaggagcagctatgtcagcagcttttatggaagctccagaatttatactcctctccggtggcccaaattcctacatctggatctcggtttgtcactctgagggggatggatgcatggggactggtgcaatgatggctatgtgagcaattaaaaatctatctctgatctagaaacctggcatttcccaacagaacaaacaagcaaataagtaaagttatacaagtaaaagttataaaatggatttctcaacatgaactttgttatttcttcgataaatagattggaacgaagtagaggactgtgtaaagaaaaaagcagggaagaaattattaacatctctgtgaatatatttcatg

SEQ ID NO: 485597 - DNA, 654 bp, Homo sapiens
attagcataaatcagcatgatttgggggaaacaaatcgcatttccatgtttacatggtcactgctttctgagcaaaaggtgctggcaacctgggttaaaggacgtttgagtggcaacaaaccttggargttaaagtagtaacttctggagagattggcagcagcatctcccctagcgatgggtatttatattccaatggttgatggacctagagaccttctcgttctctccccagagagcctttgtttacatttcagagcaaaagctctttctctttctctacctggggtgagaagaggaggagcagctatgtcagcagcttttatggaagctccagaatttatactcctctccggtggcccaaattcctacatctggatctcggtttgtcactctgagggggatggatgcatggggactggtgcaatgatggctatgtgagcaattaaaaatctatctctgatctagaaacctggcatttcccaacagaacaaacaagcaaataagtaaagttatacaagtaaaagttataaaatggatttctcaacatgaactttgttatttcttcgataaatagattggaacgaagtagaggactgtgtaaagaaaaaagcagggaagaaattattaacatctctgtgaatatatttcatg

SEQ ID NO: 485598 - DNA, 654 bp, Homo sapiens
attagcataaatcagcatgatttgggggaaacaaatcgcatttccatgtttacatggtcactgctttctgagcaaaaggtgctggcaacctgggttaaaggacgtttgagtggcaacaaaccttggaggttaaagtagtaacttctggagagattggcagcagcatctcccctagcgatgggtatttatattccaatggttgatggacctagagaccttctcgttctctccccagagagcctttgtttacatttcagagcaaaagctctttctctttctctacctggggtgagaagaggaggagcagctatgtcagcagcttttatgkaagctccagaatttatactcctctccggtggcccaaattcctacatctggatctcggtttgtcactctgagggggatggatgcatggggactggtgcaatgatggctatgtgagcaattaaaaatctatctctgatctagaaacctggcatttcccaacagaacaaacaagcaaataagtaaagttatacaagtaaaagttataaaatggatttctcaacatgaactttgttatttcttcgataaatagattggaacgaagtagaggactgtgtaaagaaaaaagcagggaagaaattattaacatctctgtgaatatatttcatg

SEQ ID NO: 485599 - DNA, 654 bp, Homo sapiens
attagcataaatcagcatgatttgggggaaacaaatcgcatttccatgtttacatggtcactgctttctgagcaaaaggtgctggcaacctgggttaaaggacgtttgagtggcaacaaaccttggaggttaaagtagtaacttctggagagattggcagcagcatctcccctagcgatgggtatttatattccaatggttgatggacctagagaccttctcgttctctccccagagagcctttgtttacatttcagagcaaaagctctttctctttctctacctggggtgagaagaggaggagcagctatgtcagcagcttttatggaagctccagaatttatactcctctccggtggcccaaattcctacatctggatctcggtttgtcactctgagggggatggatgcatggggactggtgcaatgatggctatgtgagcaattaaaaatctatctctgatctagaaacctggcatttcccaacagaacaaacaagcaaataagtaaagttatacaagtaaaagttataaaatggatytctcaacatgaactttgttatttcttcgataaatagattggaacgaagtagaggactgtgtaaagaaaaaagcagggaagaaattattaacatctctgtgaatatatttcatg

SEQ ID NO: 485600 - DNA, 602 bp, Homo sapiens
gactgaagcttcataaaagcccttgagtcagaaccacccagttaagcctgtcccatattctgggtcacagaaactgagataatagatgtttgttgtttaaagttactaagtttgggattatttgttacactgcaatagataactgacaygcccctcagcattctctagcatagtgcccattctctgttcttattccactttatcataagctgaacactttattttttcattttttatttgttgtttatcttctcctcctcctatgggggaagggggagtcggtgaactcagtgttgtattcacaccacttaacacaaggcctggatcaaggacaatgaacagagggggtgggaggaaggcaaattattctggggcagtgagggttttggtgcagtgttaacaaataacataataatttgaaaagtccaaagcccaaatgtcagctcctctctccccttctcccatcatttggtccaagtggtcagcaggaccccttgctctcacacagacgcatcttctcccctccatcctcactgcccccactccctcccagcctccattctccctcaccagtgtcctcattggtctcactgttttctcct

SEQ ID NO: 485601 - DNA, 469 bp, Homo sapiens
aagctggttaccatgggcaactggagcacagtcccattggggaactcaggccctggtgtggaatgactctgcagagttatcccacatagcagagagggagctggggaatttatataccaacgtgtcctggcattgtggagggctgctccctgatgtgctcattccccagcacttccagcctgctgcctccatgggcagagtaggctttggccaccagtgaaagtcctcaggcaacgggatgcaggtgctggccgttggaagtgggaagggcaaggggttggactgggggcactgggcacagaccaggctcttcaaacacattcatgggtgaattaatgaatgaaygaacacatgaaagaatggatgtctctatggtgggcagaagaaatgcccagcttttctgagtggactccactcttgtggccttgttccctgtttgcacagacagcctccaactaatgccactgaa

SEQ ID NO: 485602 - DNA, 454 bp, Homo sapiens
aagaccttgtctcaaaacaaaacaaaacaaaaaaacaaaaaccccaaacaggctggtatatagatctattcagttacagtgaccttctattacggctgttattattttatgattgttattatttatatgtattattactaagttgcggattgcaggggtgagacagggcattctggtggaagggggctgggctgggktcccaaattctgatcctgccccttgccagccctgtgatcttgggtaggtgacctgttctcctctttgcgcctcacttcccttcttcctaaaagaagccaatagggtcatctcttgtggcggagtggccttcaagagttctcatgagttgggtgcctgagctgcatgggcctcaaactgacagggtcaaagctctgagtgggggtgacttggactcgtaaggagacactctcctccttgtccctggcccgtggtgaag

SEQ ID NO: 485603 - DNA, 483 bp, Homo sapiens
ctggtgtcagaagtgctgtgttcagtggttatgtgagagtagaaaaagtgctgttttgtttttcaattttctattaatttacaattttgctargacggtagatctcacgttatatagtttttaccataataataaaaaaagaataaaaggattaaaaattgtgataagaattaatgggataaatataggtttactgctaaaattttgaaactcaataaagagaagacatccctaaaatatggaaacaataaaattaaaacaaagaaaacagcaacctatataaatgattgaattaccttcaggaagtggttattggaaaatgtaactcaggtgaaaaatatacataagtccaagaagcatttcaataaattatcagataataacctcagatgaaattaataaaaatcacatttttaaaaattatttgaagttaacattatagtggataatgtgctctcttaaaaataaaaatgctttctgatg

SEQ ID NO: 485604 - DNA, 571 bp, Homo sapiens
aaacaaaaggtgaaatgtaagctctctggttctttcactctytcattttgctaatagactacccctcccatgccactctccaacataacctcttgtttggttactttgtactgccacataaggagaaattgcaagcgctaaacctaaagactgattatcctctgggcacaaaagatgattgtggtggatctgaaatgacagctcttgtctcttctactgtgtggactttgctttctgtacacaataaaaagaggcactattcatacctgtatcttggtaagtaaaaacctatgcaaatccagcctctaaatgggcaatcaacatctgactgaaaatgagacagctcccagtgtcctttttggattttgtctgtaacttcatcacttcctaaactatacatgacaggaggcatcagagtcacagtatttctgattttttttttaaatttttaatctggtgaaacagttaaagaactgtttctatgtaaacatttctttgtaatgaagactgatatccctgggatgtgggggaggtattctaaatgcaactacaggtgaaagaaaagtagcag

SEQ ID NO: 485605 - DNA, 629 bp, Homo sapiens
tacatgtactttcactagactggcactgtagccataaactgcctaaagcaattttaactgaattcctttttcaaagtttaaatatatctatagtgctagatacttaaaccagtaaatatctgttgcagtttcagttatgcagggaacaataagattggagaatgaaaagggaaataattgctttctaattttctgacttaaaaattaaaacaatagaaacagaacaaagtaagaaagtgcaattaaatgcttagcttttttggagggaagatcctttacscttcataatcattgtcaaaaaacttcacatgcacatgtgcgcatgcacacacgcacataatttaactgcagagagaacgccagatttggattctaaatctgaaactaccttgctgtgtgaccttcagcagggcctaaataaaacaccttgcatctcagctttctcagctatcaagaagggataataatatctgtcttgccaggttgctttgaagcttagaaataatctacatcaatcaagtacctggaatatagaaggtgatcaataaaagttagacattatgtttgctggtattcagattttcatacagtataagaaaagtcagagtaggaaaagtctgaacaaacat

SEQ ID NO: 485606 - DNA, 569 bp, Homo sapiens
ttccaaatatgatatcacttcaacaggataacaaaatgaaaatataataattcatatgattttagtttgaaatgtgtgaacatgtctacagaaaaatataattatttaataatctatatggccagttactcaagtaaatgaaatcattcatttaattctttgagtatataggtaccatttattaataggaamctacttttggtctgatgaaatttaacctgctttgcctggtagtaaaggttccacaaaattgcaaacaatcattattttaagtaagagaaggcacaggatgtcataaaaggacaaaatgtaataacacgttgtatttggggggtgggggagggaagtgacattcagagggatggctcatgcatataccaaatgtttaaaacatttttccataaatgtgttaagctgacattaagttgggaaaatgcctcgtaagggaaatctcagcttgaatcaaaaataatatttaaaaaaatccattgctaagagaaagtagtagtttatgctaatctactctttctgcaaagtgatgtctttgaattaatgattctaacccatca

SEQ ID NO: 485607 - DNA, 544 bp, Homo sapiens
acatgcatattaaaatcaaaccccttttgtaagtcaagtgtcttcatactttggggaggggaggggaggggtcacagtagaagcaacttagtgaaaaagtaagagcaaagatgatgaatctagacaacttgggtagaagtatagctcagacacttgtgaatgaatataagcaagttacatgccttctctgagcctctgtttccacattttagagcagcatccagtcctcctcacagaatgattatgagaawcatattacacgtaaatgtaaaaatacttcataaatattgatgcagacatgaggcaggaaaatactaggtagaagagggaggttcccaacaggggccacaccctcaagcctgggactgcggcccaaagtgagaacatgcattcttgttttcccacttgaatgttgctttttggcctgccccacaccccatcctgtacccataaaaaccccaggctccaccactggcagaggggcagcagagcaggagagcaactgagcagcagagcagagcagcagaggagagaagagaaaaag

SEQ ID NO: 485608 - DNA, 635 bp, Homo sapiens
gtgaagggttgaggcaagcaggggtgtgatggaactagctcttatcagcttgggagagccggcagggcacatctcttcccaactctacattcatcaacatcacactgataacttaaaattggccatggtgggaatatttaaaccatggtaatggcctaacttcagaacacattaatttgcagtgttgtcaatctataaaggagcttcactacatgggagtagcaaaatagatagtagaaagatcattaaagaagtcttcacttaaactggggtgaaatatgcatcctgaaacctctattccttagggccatgccaagcaagtctaagacctctgattaccctttagatgaagccatctgcccactgcaccatcaatgtattgacaaatacatgtattaaagggcagacatagccattgcttgggtgagtcacagagtgtacttctctaaaggataccaaagggaaaaatatagttgggggcacataccagagagaataccaacatttcttmttattatttttttagagacagggtctccctttgtcacctaggctggagtgcagcggagcgatcatggctcattgcagtctcgacctcctaggttcaaacgattctcccaccgcagcctcccaag

SEQ ID NO: 485609 - DNA, 544 bp, Homo sapiens
gtctgcagcaggggctggagctagtacccacctgcatcacagtggatgacactgtcacgcttatggtcccactgacagtgagtcacccggggatcactgtatcctcagggcttagcactgcccagccctgctttggctgaaagaggctaggctatgtggagaagatgcatttaattccacatctccatgtttttctagtaaaacatgctacaaaatcatgggatggtcaacatgcctctggtgtatacagaaaaagtgctctgaagataaagcatggactaagttaggcagcacccccgccccttcccctgcccaccaatcactgtacttactctaatggcagtgagtttaaaaaaaaaaggaaataaaaggctacttttgtgtggayatagatatccaaactggctctttgcaaattaatggtctgtcaccgggaaacagcactttctgttggtgggatgcccacaggacaggcagagaggaggcgtggagggtcccgaagtgcaggaggggtcaaggtaaaaatagcccacaccatcaacag

SEQ ID NO: 485610 - DNA, 565 bp, Homo sapiens
atgaggcaacccattccacctttgaatakttgccatctttgacattcaatgtagcacaaggttaatgtcttcctcattctgaatgcctcattcctgtaaatgctacccaagatcctgtagctattccagttccctcatcatatttctgacttgtgttttctattaagccaagtcccagacccttgctgtcagccaatcatccaagcctgtgcaaattcctggccctttgaaccccagggcagaacctgacattgatccctattgtgttttctctggcattttggattctatcacccaaaatatttgctgctctccctctttgtttcaagtcaaccacatattccacaggtacatccttacatttttgttttcatccaagtcattgatttaaataccagccagcacagggctgaagacagagcccagggacttgacccaaaaatcatactccaatttgtcttcgagttcattaaggaggctccttgtgattataattattcaaactcttccaaatgtcttagcatccagcctgtatttccttgtcttgaccaaaaggatatcagga

SEQ ID NO: 485611 - DNA, 524 bp, Homo sapiens
caccgcaggggctactgctctatgctacatcctgggcttcctaaagtccaggcagttttcagcctctggctggccagctcaacacactgctgtgtccccatccactaggaggtgtattgctactaatttgttaacaatcataaagtacttgagggcgtgaaagtttagtgcttatttctaataagcagattcaaggttatcctcatagtaacagcttccttactcttgccttcccttaaactttcctagtgagcgaggagtagaattacactagcatacttagaactgygcaggatatgcagcccatcataactaggccacagagggtgcaccctccctgagaaggtcatttgtcataagtgccccagcagaatagagcacatggggcccacatggaactccggccacttagtgaactctctaaacccctggagatagagagctatgaatttcttacatctgcctcaagtcaggattgcattttctggcaggaatttgcagtccattagcaggaactggactcc

SEQ ID NO: 485612 - DNA, 629 bp, Homo sapiens
ttaggaacgaggaaggaagagcagatgtccacctctggggcatcagggctcagaccaggaatacaaacccaaggcaggagagaaagggaggagagccaggaggtggtctggagagggaacagttagacgcaagcacaatcatgctgtctgtcccttgtaacytgccacttgtaactccatgcctgtctgttccaaggtcgcccatcagagagcaaccccacaccagaactgctctcatattttacacccaaattgacattttagaatagcctagtacaatatcctccatctttttattcatatacatatattcacacattcatatttcatgtatacactaatatgtgtgcctaccaaacaaaaacattacacttcacaattctctgttttattgttttaaatttcaaacacaaatgaaaattccaggtgatcacctaggtaatcacctaggtgaacacttagaacaacaaattttgagtcttcatctttataatcactgcttatttctaatctacttaaaaatgtgggaatatgtggtatcacaaggattggagacatagactgtggccaacacaacctggaacaactctgaagcttaagaatttaccctcacaatgaacacatgtagt

SEQ ID NO: 485613 - DNA, 524 bp, Homo sapiens
ggtgtgtagcaggctataaaatctagacttgcgtaagtgcactctaagatgttcgcacaacaacaaaattgcctgatgacatatttctcagaacatatcctgttgttaagttgtgtgtgcctataattcaataagatcaaatgacgtatctagctgcaacatattatgtagtctttatattactggagaggaactgtgaggttcaatgtactgtagaatcaacaagtaaacaaaattaaatgagcaccactgtcatgttgtgtcatggacacaaaaccataccaaatgtttatataataaaatttctatctgtgaagtctaaggcaaacccagttgaggcaaagttctaaagcaagaagaggtaaattttgctatgttgtttctaarggtacttcactgaggacaaatttgaatgataattgacaaattgaggcagaagaaagtcaatattagtacccaaagagctagaaccatgcgttagagccaagaggcctgtattttgatgcagcatgagttgaatgaac

SEQ ID NO: 485614 - DNA, 547 bp, Homo sapiens
tatcctattcatgaaagatctatcctcatgacttaatcatctcccaaaaagcctcatctcttaaactatcatattggggattatgtttcaacaaatgaattttgaggagaacagacacattcagcccataggaggtaggtatacatttttaatatgatctttgtccaaaacatgttatcagaagatccttttggcaataaagtattcaattatgattctttttaattttagttaatagagtcagtgtggtcctttttytctttctttttcatcacaatcttttaatttaaatttccaaactcaaagtcttgcaaggacatcatggaaaaactttccaggttgggtgtatctttctatcaaactggccttgaggtatggtgaggggaagattaatgggaacacaggtgagtctctaattaagacaaagccacagtctttaaaacatatattcacacccatgaaataaaggcataatttgaaaattatttttattcagaaataataaaaaaacttaggacactgtactttaatattctcaaaaaagatg

SEQ ID NO: 485615 - DNA, 507 bp, Homo sapiens
aagggagctttcaaatgggagatggggaaggcacgagcagacaggatcagtcaaggaactatgtgacaaaaagaagaatagcaaatgagaccagggtaggcaaacaagtatargtggttttcaaagagatgaagctaggtttatacaatatactcaggctttgtaaaaaagcctgtgaactggagttttagaatgcctaaaagtcaacattttccccttgcatttttctccactaagtgaaaaaaagatttcctttctgctctaacgggctcttccattttcctcctacaggatggtttttgtgtgtttttgatactactgtctacctagtgccaaggaggatttctgagtagtcgaggacccaagtactgacatttacttaagaactatccatttactctgtgataacccagaatctagtggtctagtaaaactaacagagtatggatatatacaatgtacttgcaggtgaagtatatctgacaattcatgagaggcagaagggtg

SEQ ID NO: 485616 - DNA, 460 bp, Homo sapiens
ccttcaggtccttactgaaacattattttctccgtgaggacttccttgatcattctatttaaaactgttctcccaacactgcctactcttattttcctctatttcttgtcatcaaaagtactatatatcactagggtctatgtaggtgttcaataaaaattggttgattgaatgaatgtccaaaagtcagaggcttttgctcttgtttttgtttttgatttaaatacaacttaagtcagaatccttctgaaatatcattgttcattccagggaaaygtgttttgtcaagtattagctcattcattttctcaaccaacaaatcaacaagctttggagtttactgcatgcctaacactctactcagtaggtatacattggtgaaggaaagaaacagggtcccaactctcctgaaactcaaggtttctaaaaagagacaaaggctatgaaggcaagttgattg

SEQ ID NO: 485617 - DNA, 500 bp, Homo sapiens
ctcagtcctgcaactgcaaggaactaaactctgccaacaaccagaatgagcaaaggtattaatccttcctgaatgtctccagaaaggaaccgcagacatgagtttaaggcagtgaggcccacgtcaagacttctgagctacagaactggaagataataaattcatgtcgcttaaacccctaaatttgggtaatttcttacggcagcaatagaaaactaatatactaagcctcacacctccacatccgcaaagtgtagscagtaaacaaatgagtaatggaaaatggcacaaggaggccattaagagtcagaaacatttcagagagctggccagtcgccatgaaacagactgttgaggtgggtggaggcaggttggagaaattgagattaataagagcaatcagtccctgctgcctttcttctgatttcatctcttttattattctttttttatcattattttttcagtcttcatttatttccatatggccttcatttttc

SEQ ID NO: 485618 - DNA, 539 bp, Homo sapiens
caatgaccaaaattatcaaattatacacttcaaattggtagactttattgtatgtaaacaatagaaacaaacaatcacacctgtaatcccagcactttgggaggctgaggcgggcggatcacgaagtcaggagatcgagaccatcctggctaacacgatgaaaccccgtctctactaaaaatacaaaaaattagcctggcgtggtggcaggcacctgtagtcccagcgacttgggaggctgaggcagaagaatagcgtgaacccgggaggcggagcttgcagtgagcagagatcgcgccactgcactccagcctgggcaacagagcaagactctgtctcaaaaaaaaaaaaaaaawagaaacgaacaaaagagaggaaaactttccccattaaaatagcaatagcaaaaaaaaaaaaaaaaaaaaaaaaaaagccaaaaatcggaatagagggctatttccttagcatgggataagtaagtaatattgtacgtgcctatgtgaggcacacagaatagtgagaatcaaaggcagagagtg

SEQ ID NO: 485619 - DNA, 640 bp, Homo sapiens
ggtagggttcactgggacctgctcctgtctgcctagaatttctstacatctgtctttagtaggatataactggaaattctaagaatctcctttttgcctcttgagctaaatagatgggaggtttttagtctggagtggtctagagccatattcccaattctggagaaatttatctggaacaggaaaatctgatatgcagaaaaaaatcagagataagaatcagtgaaaggaaataactgggtgaagtttataaattctgtcatctctgagtccaattctacacttggatttgttgtagatgtttatattagacaataaatttctcatattggcctaagttagttgagttgaggttttgtcacttgcaactataagaaatttaaatatactggaatacctggaagtcttaatggtatttttcaggaagtctagcagcttctgataagccttaaaagtgtttaaaagaaaagcaaagttgcacctaaacagatatgatatgcaatacacacaagatacatagtgttatagaaacataataactgcttttaatgatctgtctcaaggaggaagcacatttataaagattttcagatcatgaggtcttcttagataatctgaatcctggttatgctacatccca

SEQ ID NO: 485620 - DNA, 594 bp, Homo sapiens
ctgctgcttcagtagcatacaactgttaaatyattacaactacttctattccttccattttcttccttcattattagtaataaaatgaaggtatttcttatagtcagtcatctaaagtccttgccatatgaattgtagaaaaacagaaaccaaacgaggcaagtctaaataccttgaactttgctagcaatattaagttaaaatgtctgttgcaaagccaattaaagttggtcccaaagactcacattttccagtctgctggcatggttgatgcttgttggcaaagatgccgaatagagtcttcttactaaataggacaaatgatgacaatggtagacactgcaagctaaccattatggaagaatttcaccactttaaagggtctgcaggccacgaagaaatgatacagcagaaaaagaccaccagaaaatgctgacatctctgagccctgctttttgactctgcatcccacacctcctggacaaagtgggagacttaggcttgaatcctaaatactctatgcccacatgtaagccattatggataactgtgcttgaaacttaattccacatctgctcttctgcagcctttgga

SEQ ID NO: 485621 - DNA, 594 bp, Homo sapiens
ctgctgcttcagtagcatacaactgttaaattattacaactacttctattccttccattttyttccttcattattagtaataaaatgaaggtatttcttatagtcagtcatctaaagtccttgccatatgaattgtagaaaaacagaaaccaaacgaggcaagtctaaataccttgaactttgctagcaatattaagttaaaatgtctgttgcaaagccaattaaagttggtcccaaagactcacattttccagtctgctggcatggttgatgcttgttggcaaagatgccgaatagagtcttcttactaaataggacaaatgatgacaatggtagacactgcaagctaaccattatggaagaatttcaccactttaaagggtctgcaggccacgaagaaatgatacagcagaaaaagaccaccagaaaatgctgacatctctgagccctgctttttgactctgcatcccacacctcctggacaaagtgggagacttaggcttgaatcctaaatactctatgcccacatgtaagccattatggataactgtgcttgaaacttaattccacatctgctcttctgcagcctttgga

SEQ ID NO: 485622 - DNA, 594 bp, Homo sapiens
ctgctgcttcagtagcatacaactgttaaattattacaactacttctattccttccattttcttccttcattattagtaataaaatgaaggtatttcttatagtcagtcatctaaagtccttgccatatgaattgtagaaaaacagaaaccaaacgaggcaagtctaaataccttgaactttgctagcaatattaagttaaaatgtctgttgcaaagccaattaaagttggtcccaaagactcacattttccagtctgctggcatggttgatgcttgttggcaaagatgccraatagagtcttcttactaaataggacaaatgatgacaatggtagacactgcaagctaaccattatggaagaatttcaccactttaaagggtctgcaggccacgaagaaatgatacagcagaaaaagaccaccagaaaatgctgacatctctgagccctgctttttgactctgcatcccacacctcctggacaaagtgggagacttaggcttgaatcctaaatactctatgcccacatgtaagccattatggataactgtgcttgaaacttaattccacatctgctcttctgcagcctttgga

SEQ ID NO: 485623 - DNA, 582 bp, Homo sapiens
aagatcacccgacgtcaggagttcgagaccagcctggccaacatggtgaaaccccatctctactaaaaatacaaaaattggccgggcatggtggtacgcgcctgtaatcccagcgactcaggtggccgaggcaggagaactgcttgaacccgggaggcagaggttgcagtgagccgagatcgcaccactgcactccagcctgggcaacgagagcgaaactccatttcaaaaaaacaacaacaacaaaaaacaaatatagtaagcagaaatgtatgcagtagagagggagaagctgaggacaagaaagccatcagacatgagacagtaagggtgtgaatgaagacggacatgggaaaggctgagccccagcaagactcctgacgaggcagtggatgccttgtcctttcagatgatatgcacaggccctcgaagttaaccagcawctgcctagggctgtgtcagacactctaaaagccctttctatcctcccctctccagcctccctcactttccctgtctcccctggtcactttgcttccctccccacagaaagaaaccaagctgcttttggggaatggtgcc

SEQ ID NO: 485624 - DNA, 638 bp, Homo sapiens
cataccattcactaaaaacacaataccaacagtgtggtaaaggggttaaaatcaggaaaacatttgctttttaaaaatgaacatgaaaacctaggaaaattattcctggtatgaagcacgtttttgaagtacagatttttgtcccatgaaaagctgattcatttccattaccatgatgagctaaggggaacatgaaattgccatgggttgatggtttcatttaggggtcaattttcaaactaatagacataatgttcctttgcccttactctggttaacrtttaccaatgaacttacatcaagttttgggatatattgtctcattttttatcaggaaatgacatgttcatgaaactgaaacagaacaaattgtatgcctttgacatatctcccaaaagtaactagtgaatacagagaccatttcagctaaacatgcttgccttcctattgaaaaatgtgacagaggctgctggaggtttattaaaatccattgtcttctttcttggcaccaaacaagattatttcactccactcagatttggctgtgtgagttgggttctacccaatgcaatgtgatcagaggttaatcagtcacatccattgaaggctcataaattctcctacataatgtccctgca

SEQ ID NO: 485625 - DNA, 575 bp, Homo sapiens
gaatggataagcaaggtgcatatccagtgaatggatataaataaattgcctgaggatggaataatactcccaataaaaggaaagaacaactaatacataaaatgacatggataagtctctcaaacattatgctacgtgaaagacgctggcacaaaaaaccacatacagcatgatcccatttatattaaacattagaaagataaatctcacctatcaaaataaagagcaaattagtggctgcccgaggctaggggtagagggtgaggactgactgggaagatacacaagggaattttctaggaagatgaaattgtatactacatactgatcagggtggctacaccaatgtatacaattgtcaaaacccaaaaactacacttaaaatgtgttcgctttattatatattaattataccccaaagttgatyttaaaaaacaaagaacacttcataaaaagttggagaatggctctgaggggaatttcttccttttaaataaggctggagggaagaatctagttagaagtcaagttgcaataattctgaatggactcagtgggaacctgaacttacagtg

SEQ ID NO: 485626 - DNA, 433 bp, Homo sapiens
ttatcctaaaatgaaaatgtttctggagagtattggaatacatgatacagtaccactattaccactagataacaacagtgctattatcgaacacgtgttcgttgcaaatgcatttgtataaataaatcaaatccaagtagcatacttytatttttaaaattcctatccttaagatcaaagaagtctataggagaaagggaccatggaaacatttgtatacgactaacagacactgattaatgataaatgcctggtatagtccattttcgtactctaaagtttctaaaatcaaaggtctgttttcttgacgatttgttttctaacatcttttagcatcttctcttaagtaaatatattgataattgaatctgttccttcaaagagtttaactccatgatacactaattaatttttttaaatagcgacttgggta

SEQ ID NO: 485627 - DNA, 618 bp, Homo sapiens
tgtgattacattgatttctgaaacttgaaccaactttgcatacctagaataaatctctattggctgtagtgtgtaactgtttttatacattgttgaattcaatttgctaatattttgttgagaatttttgtatctgytcatgagagatactggcctataacttttcttcatagtaattgtctttgccgaatttagtattgggtaatgctagtctcacccgattagttaggaagtattatctcttctattttctggaaaagactgtagaacattgatgtcatttcttctttaaatgtttggtagaatccactagtaaaactatttgagcttggtgctttctgctctgaaaggttatggttgatttaatttctttaatagatctagggatatttaattatctgcctattaattacacctgccactgtaatgatctcttatttctcctgtgtgagctttggccaatgatattttgaagtattatttccattaggattaagtaaatattcaagatgatgactactatgaattattcaagtcataaagaagtccttgcgtattaggagttagttagaaaaaatttacctttgctaccggtaaaggttctaataaatttgattg

SEQ ID NO: 485628 - DNA, 618 bp, Homo sapiens
tgtgattacattgatttctgaaacttgaaccaactttgcatacctagaataaatctctattggctgtagtgtgtaactgtttttatacattgttgaattcaatttgctaatattttgttgagaatttttgtatctgctcatgagagatactggcctataacttttcttcatagtaattgtctttgccgaatttagtattgggtaatgctagtctcacccgattagttaggaagtattatctcttctattttctggaaaagactgtagaacattgatgkcatttcttctttaaatgtttggtagaatccactagtaaaactatttgagcttggtgctttctgctctgaaaggttatggttgatttaatttctttaatagatctagggatatttaattatctgcctattaattacacctgccactgtaatgatctcttatttctcctgtgtgagctttggccaatgatattttgaagtattatttccattaggattaagtaaatattcaagatgatgactactatgaattattcaagtcataaagaagtccttgcgtattaggagttagttagaaaaaatttacctttgctaccggtaaaggttctaataaatttgattg

SEQ ID NO: 485629 - DNA, 618 bp, Homo sapiens
tgtgattacattgatttctgaaacttgaaccaactttgcatacctagaataaatctctattggctgtagtgtgtaactgtttttatacattgttgaattcaatttgctaatattttgttgagaatttttgtatctgctcatgagagatactggcctataacttttcttcatagtaattgtctttgccgaatttagtattgggtaatgctagtctcacccgattagttaggaagtattatctcttctattttctggaaaagactgtagaacattgatgtcatttcttctttaaatgtttggtagaatccactagtaaaactatttgagcttggtgctttctgctctgaaaggttatggttgatttaatttctttaatagatctagggatatttaattatctgcctattaattacacctgccactgtaatgatctcttatttctcctgtgtgagctttggccaatgatattttgaagtattatttccattaggattaagtaaatattcaagatgatgactactatgaattattcaagtcataaagaagtccttgcrtattaggagttagttagaaaaaatttacctttgctaccggtaaaggttctaataaatttgattg

SEQ ID NO: 485630 - DNA, 572 bp, Homo sapiens
attatagcttgtccctaaaataatgtctttggcttcaggtgcaaagccacaaaggaaaatactatgaattttaagaaatgaatgaaataattttgtgaacagaatgaaaacaatattttaacaattaaatagtatttacatttctgtacacacttaaaacttgtttatgatttttttggagtgagtgctttatattattcatatatttatgtatgaatatatatatttatattatattatatatttatatatgaatatrtatagtatatttatattatattattcagtagaatagatttaccatgaatctaaatatgttttaggtgctttaactagaccagtaagagatcggatgaaatcaatgcaaaaaatattattgtgatgaaagtttctctttgtatgttatttatatttttctctatcaaatagttattttttctctgactgttattgtaggttcaagggatgcatgtgcagatttgttacaagggtaaattgcatgttgcagcagtttggtgtacagatttttttgtcacccaggtagtaagcataatatcagaaaggtagttttt

SEQ ID NO: 485631 - DNA, 579 bp, Homo sapiens
tgtcggtataaggctgactaaaagttggtgtagtacctggtttcatgaagtttacctgctaatgtataggaaaatattttgacttaatataagaaargatgttctctcggtgagggaaaccaaatgcttaggtgtcactgagcaagccatttgaaaactgggaatgttcagacacagtctccacaactttttgcaaggtgcaaaagaaaggaattgagaaatagactagggttgggttggatgcttctataatcccttccatttctgagtttatctgctgtttcttcctcataaactctgttatgaccataaaataaaataataaaatttggaagaggaggagacacaggcatcaatcagtttcaaaaaataaaagtataattagaaagtgtgataactgttatggaagaaagacaaagagacccaagaaagtaagtgaaaaaataaacaaggaggatcttatcaaatctggaaaccttggcaatctgataaatcagtaacagttcactcagtggaaagaaggggaaaaatacattccaactacagggaatagcctgtgcaaagtctctttggcaggac

SEQ ID NO: 485632 - DNA, 600 bp, Homo sapiens
tataaggctgactaaaagttggtgtagtacctggtttcatgaagtttacctgctaatgtataggaaaatattttgacttaatataagaaaggatgttctctcggtgagggaaaccaaatgcttaggtgtcactgagcaagccatttgaaaactgggaatgttcagacacagtctccacaactttttgcaaggtgcaaaagaaaggaattgagaaatagactagggttgggttggatgcttctataatcccttccatttctgagtttatctgctgtttcttcctcataaastctgttatgaccataaaataaaataataaaatttggaagaggaggagacacaggcatcaatcagtttcaaaaaataaaagtataattagaaagtgtgataactgttatggaagaaagacaaagagacccaagaaagtaagtgaaaaaataaacaaggaggatcttatcaaatctggaaaccttggcaatctgataaatcagtaacagttcactcagtggaaagaaggggaaaaatacattccaactacagggaatagcctgtgcaaagtctctttggcaggacagagcacagtgtttccaaaaactagaa

SEQ ID NO: 485633 - DNA, 532 bp, Homo sapiens
taagtaattatagtagcatatgtgtccttgttactagactgtgtgctccttgaaggcacagtctgtgtcttgttcctctctatagcacattttctaacacagtatctggcacacagtaggcaaccaatgcaagataatcacagtgatggggctatagcgagggtgatgctggtagtgatagtagtggtgtagcatagtggtggcggtagtggtcatggttgtagtgatggtaggtactggtaataactgggggagggggtgagacttggctgttaatttctcttcaaagagtagttatttggaattctcttctcagttggagccaaaaagtggaaatgaaacaaacaagcttttctggcagagagaaagaatctgctggaaggtcagacaaccacaagactagaattacacatgactcttcctagagcagcatgaacagaaaatgctcacaggattggaagtctgaaaacccgagggctggaaagraccattcagatctacagagtattttacagccttcaaaacactgaaa

SEQ ID NO: 485634 - DNA, 572 bp, Homo sapiens
tggcgacgtgccactttgcgctaggggagtacagagtgagtactgcacacatacatgcctgccgcaggtgcacggggccacctggcctttctcctttccctagcgtggcttttcattcagtgcacgtttatttcaatttgatctttctgcctagatttattacttaatctgctagtgaacatcacaatgattttgttttacgtaattttctctttactacagcttccctgaaataaggcatcagtactttttacatttcttgttcattgttccatttgttggaggatttttctttttattattatttttctttttattattattacactcttgtctcttctgytgtacttggaaacacaaggccattattaagtgggaaatggagatttatatttagcttactcaaacttcagattctctctttaaatggtaataacacgcccgggtgtggtggctcacacctataatcccaggactttgggaggctgaggccagcacatcacctgaggtcaggagtttaagaccatcctggccaacatggtgaaaccccatctctattaaaatacaaaaat

SEQ ID NO: 485635 - DNA, 630 bp, Homo sapiens
ctgggagttaaaaaaaattctgccgtagcctaccgcctcatgactttgagtctgtctgtattacaccaagacaacatagaagttatgaggtaagttacctatatgacatcaagtacctgaatatttgtaaaccttttgatagctttgcatatttttccagttttcagtctatacatgtagtacagtgactgaacccaatgtgtgaattctgcttcatgacggtgattcattgcatagtacagacaggtcatcagacatctaatttcacgccactgcaatcctagaccccgtattttccttacaccttaccaataattatgtcatcattacataatggccacagggttgtaaatatatacgtggagaaagtttcaaaatgaccagaaggcagttaagtaaattaatcaattacaaccgaattgtaggtgcattttgccatgaagttccctttataccataccaggtgcctatttttctgcctaagatgactaacraaacgtcaggggagacagccaccattttctgaaggctccaaaggcctttggaccatctgtctacatctccactgcctaatgaaggtttcccttctttggggcacctaaaggaaatttaaaattcaagctaataata

SEQ ID NO: 485636 - DNA, 586 bp, Homo sapiens
tgaaaaaactgaattattcaggataatggtgagcctccaatatgttttcccaatgttgtttcatttttgaactatcttactagattacctaatcataaagcaaatttaaaaatgtaamataaaaataaacacaaatatccagtcatatttttattgtcccactatgcttctatcaaaacacaacattctgcctaaaacaatttatcatcctttataacagaaggttaaacaggatcctaattaatgaatgtatcaattgtttttctctgtcaagcacaagatattgtcttccataatggcatacactcaagcaataaataataaatataattatcatcatcactaccgtcatacaaattatttgttcgggcaataaaaacccattcctttaagatgattgtaaaaaatgaaatagtatatggatggctcacttaagatagttcaatactgtgtctcacacagatagtgtttgaaaggggcttggcatcttgcagagcatcctcaatgcatacctactccaaagagatcaggaaagagccaaaagtgcatgctcctcatgagaaaggtggatcctgcacagataatt

SEQ ID NO: 485637 - DNA, 586 bp, Homo sapiens
tgaaaaaactgaattattcaggataatggtgagcctccaatatgttttcccaatgttgtttcatttttgaactatcttactagattacctaatcataaagcaaatttaaaaatgtaacataaaaataaacacaaatatccagtcatatttttattgtcccactatgcttctatcaaaacacaacattctgcctaaaacaatttatcatcctttataacagaaggttaaacaggatcctaattaatgaatgtatcaattgtttttctctgtcaagcacaagatattgtcttccataatggcatacactcaagcaatraataataaatataattatcatcatcactaccgtcatacaaattatttgttcgggcaataaaaacccattcctttaagatgattgtaaaaaatgaaatagtatatggatggctcacttaagatagttcaatactgtgtctcacacagatagtgtttgaaaggggcttggcatcttgcagagcatcctcaatgcatacctactccaaagagatcaggaaagagccaaaagtgcatgctcctcatgagaaaggtggatcctgcacagataatt

SEQ ID NO: 485638 - DNA, 482 bp, Homo sapiens
ccaatcctttctctactagattttatggtatatgtatgtcttatttatacacagaaacatgccttcttttgtccttgcctaacctggaatatcacttgaagaaggccttaaaatgttattaaaaattaatttccaactatgactttcaacacttctaaattccacacagcaacttagagtcagttttcataaatgttaaattagaatttcaacacataatttaaaaggaactgtacaagaatgtaagtttaaataagcttggaatgtcaggggaggtggcagagcaggaagcaccagggatctgtctcttgagagagacagygattgtactggcagaatctgtctgataaaactatttgggaattctatactccactcaaaggcttgcagtttccaggggaaggtgtggttaattttgatcaatttcagcctagtgcagcagcaactatgcatcgtcccacccccagctctgtggcaggcag

SEQ ID NO: 485639 - DNA, 573 bp, Homo sapiens
tgagaccctgtctcaaaataaacaarcaaacaaacataacttaaaaaaaatagctgatactgagtaacttggtattggttaatggcagaggtatttttgcctctgttttaaaaatgagatgtgtaaatgacgagatctgggctaaatatggaccagctgggattagaattagaacgaacagggaagtatgagacaggtgacctcgctgccagctctactcctcacagatgggtgaccccaaggctcttttaacctcggcttctcaggactcaaaagagacatggtaatatacatttctgaagccacattccttggaccaggggaaatattgatttcctgtctgtttttaagatttgtaattttaacatgtggcttttacaattcccttaaattggcacacaataaagagcttctggaaaaaaagggaacttatttactcagtgattaaaggatcattatatataaatataaggatatcctttgtcccagtagaggaaattgggggaatttggctccatgatatggtgataagaaatagaactttgtgctttctgagacaatgacccaggcatt

SEQ ID NO: 485640 - DNA, 564 bp, Homo sapiens
gacttcctcaagtggtgaatctcacctgagtttccttgccagtggaaactctgtcatctgtaatgaagtatctcrggtctgtagctaggagaaggaggggcatcctcttcaggggacacgttcctatgaatactcacactggctccatcctccagcctgcaaagcctggctgcctgatgccgtgagccaacacaccacagcataaatgcaacaggaagaaacaatcaaagtgtactgtgagtcttctcagcccccagcaacctaagataagtatcacaaacaagaacacgaggtcatttgagaggattctgctaatcaagaccgaattagatactcaggtatacataatgcggaaatcaggaatactcactttccataaataagaacctgtcaccacttggccctgattagcagttattgtaaccctcaaaattcatctttcccaagtgatttttctatgctgctctctcttaccatgtgaaggctggttttcataaaattgccacctgatgtatttctccaaaagctaaattcctcttctctttcctcacatggccagtgatt

SEQ ID NO: 485641 - DNA, 503 bp, Homo sapiens
caccagccactgaaatattattagctctttcatccgtatccactgatcttcaatgaaatagtaacagtgaggaggtgccacatggtgacggagcagcaatatcttcaatctacagcatcatagtcagaacaatcccatcactggatagttccagtgaaacccacatctccctccactccagtcaacctacacctttccaataaaactcaggaccaagtttatcaatacctaattctgcctcatgcaattacctcacctcctacctaaaatcttaaataagcagccccaaaaaaactttctgctctcaaaatgatacgaggcaaagctactaagaatgactgcacaggcaaatgagtcgtggtatgattgatcacctgcccccyagagcttctgtccaattaagctgggtgggcagagactgatggtaccaaaggcagaaggacaccaccaggccttcagccatgggaagaaaagagacaagaggcggatcaaggctgcaacag

SEQ ID NO: 485642 - DNA, 551 bp, Homo sapiens
cttgtcccttcagggtaagggtggctaggcatttctagcctgctggtactaaactataacttcttaccactttgcctaacccccctctttgcctggtaagtagtacaaataaataataaacttctcctcaaagtctttagtttaggtgtcctctttgtctcttgccaggacttgactggtgcagtattggtggctgctgggtcagatgagctccctgctattccaagaaacaatacatgtttgcagccactaagatttgaggacttttgttattactgcctatcctgacagactcaggtgctacaactatttaagggcrtaagtataataaattaatatctagttttatgttttcagatgtcttaaaactatttaaggggatccacgcaaaatgttgttcccttaaaagagggcacatctctctcacgtggagaaatactggtaagaggaaaagactttcaagtcaaccaacttgatgtggtgtgcaggtgctgcaatttacttcagacattgcatctataaaagaaagataaggtctcggctggcaagat

SEQ ID NO: 485643 - DNA, 536 bp, Homo sapiens
tgctgcggcgaggaggtgggtaatctacaaatgattgcaagccagtgaataagcacacattgattatgctcatttcactaccagtggaactgcctatggggaggatgggctaggggaaaaattgatgagctggttaatgtggcttattggcgagacagttttaacaccatgtggctttaagagtcctgtttaaaaaaaattaatgtggagattgcattctaatkggtctgagttcatacgcagcgagttgcaaatacgtgtctctaggggcagttcttacattaggctctttgttccgaaatcctttggggtggaagagggtaacgtatcatattgaacatttgttaagtgccactggtgttgtgcacacactgtgtagaggatgcagccaggtgggatgtgtggatcctgagtgctgaacaggtaacagtaacgagatgtcctaacttggaagctgagatgtggggaagacaagggttgatgaatgagatggatgctaaatagaactctgaaggggaaatcaaaccctattagag

SEQ ID NO: 485644 - DNA, 551 bp, Homo sapiens
ctgcctcggtcggtagacaagtaatgaatgaccgaaaaaaaaatcacattagaagttatcaccagcacgggtgcgaaggcagtgcattaaatcaacactcattttagagcgccccagacagcccagccggaagggaggagatcagagctgtcaaagcacagcagagccccaaaccacaaaggcttaatgaaattcaacttcctgagccaggaagtgtcacggtctcgcccgcactcgccctaagctcgtcctttccttttgaggaggcacaggcagagctgaaacatcttaagtaaagtttccaacacctacaaccactgggattccgtgagactggagasaagagtcccgcgcccgccctcgctcgcgcttccaattctgtcgctcccgagtgtggggagctggcggggccgccgagcacctcctctacccagggggccaggtccctgggcccggggcaccgcagacccagagccgggctcacaccggggggcccgcgagccccacccacctcggcacctccggccgccgcgcgccgcgcgacccgcgca

SEQ ID NO: 485645 - DNA, 551 bp, Homo sapiens
ctgcctcggtcggtagacaagtaatgaatgaccgaaaaaaaaatcacattagaagttatcaccagcacgggtgcgaaggcagtgcattaaatcaacactcattttagagcgccccagacagcccagccggaagggaggagatcagagctgtcaaagcacagcagagccccaaaccacaaaggcttaatgaaattcaacttcctgagccaggaagtgtcacggtctcgcccgcactcgccctaagctcgtcctttccttttgaggaggcacaggcagagctgaaacatcttaagtaaagtttccaacacctacaaccactgggattccgtgagactggagagaagagtcccgcgcccgccctcgctcgcgcttccaattctgtcgctcccgagtgtggggagctggcggggccgccgagcacctcctctacccagggggccrggtccctgggcccggggcaccgcagacccagagccgggctcacaccggggggcccgcgagccccacccacctcggcacctccggccgccgcgcgccgcgcgacccgcgca

SEQ ID NO: 485646 - DNA, 517 bp, Homo sapiens
atccttgatttgagttatagaaggataaatcagttagcattttagtcatgaggacagctaattctggaaattgtctgtgagaaacttcacccctcttttcttctacgagtagccacttagtttatgcctttaaagcaaaacatatgccttaaaggtcagagagataagtaatactcttcaagtaccaaagttaatcagaacaattcagtattcaaatgctcgtatttacttacattttcaaatagatgttattattctcagtttataggtgagggcactgaagctcagaaaactattttgcttgagatctcaaacctattaagtgtgaatactaaaataaagccctaggatttttattctaagttagtggtcttcccacccgtccagagctacttctttaagacaataatacagggcatgctgatctcagtggaggccagtcttatgaataccgacagctaaagaatgtgccsaggggtttaaggcaacattccctacaccaaaacatgcctctcac

SEQ ID NO: 485647 - DNA, 590 bp, Homo sapiens
taattgaagagctcaatagcatttggatcattttatgacctgaagtagattgaatatgcataagaagctgactttggatttctcagtgtatgttaatccattattaaccttccatgacatttcttggtaggagtgcatcaggtggtcacactctgttcaatactcagatgtattttcatatgtttcttttccttttcttcctgttatttgcaggtacagctatactgcttttaatatgttttatttgagagtaagaaatggcttatagttaacatattttgataaatgtaaataaatatttcaaatttgatcatagctcacttagctttgcaagatgagaacctcttatttttacttaaatgcttatgtactttacccatgatttagttcagtattttctagcaacaattggatgactgatacctttaagaacttttttccatccataagcttattcccatttgtatgacctttgcttgtagttcatatagktttaaaaaactttggtcttctgtttgtagagtgtgaggcatctattattaatgaaatattggtggaattttttttcaaattgtcttgagagaataatg

SEQ ID NO: 485648 - DNA, 549 bp, Homo sapiens
tattactatttagagctaaagaaagaaaaacaagttggagatataaatgctaaaacatacagatattgagaactatgaaatggaatgaaatcccagagactgtggctacacaagagaggaattccagaaattgagctttaaaacacccaatatttggatgtcagggagatgagaaggtactgactcagagactgaagcagaatggccaggagatgagggaatgtagtgcactggcagccagtgaagagagttttacagtgagataggagtgatcaacttgttagctaatgactcaccaaggaagrtaagaactgagaattccccattggctctatcaacatggagaccactgattattttgataatacaattttaatggagtggtagtgtgaatgcttgattggagggaattcaagagagacgggaggagggaaactggagatagaaagtatactcatgttgtttgagaaacatgaggaattggctgtaaagggaaagagagaagtagccagagagggaaacgatgtcaggagaaatgccgatttgcca

SEQ ID NO: 485649 - DNA, 549 bp, Homo sapiens
tattactatttagagctaaagaaagaaaaacaagttggagatataaatgctaaaacatacagatattgagaactatgaaatggaatgaaatcccagagactgtggctacacaagagaggaattccagaaattgagctttaaaacacccaatatttggatgtcagggagatgagaaggtactgactcagagactgaagcagaatggccaggagatgagggaatgtagtgcactggcagccagtgaagagagttttacagtgagataggagtgatcaacttgttagctaatgactcaccaaggaagataagaactgagaattccccattggctctatcaacatggagaccactgattattttgataatacaattttaatggagtggtrgtgtgaatgcttgattggagggaattcaagagagacgggaggagggaaactggagatagaaagtatactcatgttgtttgagaaacatgaggaattggctgtaaagggaaagagagaagtagccagagagggaaacgatgtcaggagaaatgccgatttgcca

SEQ ID NO: 485650 - DNA, 549 bp, Homo sapiens
tattactatttagagctaaagaaagaaaaacaagttggagatataaatgctaaaacatacagatattgagaactatgaaatggaatgaaatcccagagactgtggctacacaagagaggaattccagaaattgagctttaaaacacccaatatttggatgtcagggagatgagaaggtactgactcagagactgaagcagaatggccaggagatgagggaatgtagtgcactggcagccagtgaagagagttttacagtgagataggagtgatcaacttgttagctaatgactcaccaaggaagataagaactgagaattccccattggctctatcaacatggagaccactgattattttgataatacaattttaatggagtggtagtgtgaatgcttgattggagggaattcaagagagacgggaggagggaaactggagatagaaagtatactcatgttgtttgagaaacatgaggaattggctgtaaagggaaagagagaagtagccagagagggaaacgrtgtcaggagaaatgccgatttgcca

SEQ ID NO: 485651 - DNA, 655 bp, Homo sapiens
gacttcaaaacagaaataacagaagccaacagacaattgattgacatttttacagggctaaaagaaagtaaccatcaacttagaattgtacacatagggggaaaaaatttccaaaatgtgactaagattaaaaacacttttgattaacaaaacatgtcaagtatttaawgccaaaagattttcactgaaataaatgtaaaagagtttatcagatgaaaggaaaattacacttcatagaaacaaagaagttcagaaaggaaggaagagcaatggaaaaggtgaatatgtatgcaaatataaacagatattgaccttataaagtgatattttgaatacctcactgaatttaaaatatatgtaaaaatgaaatgcatgataaaacattgtaaatggcaagaaggaattcagagtttaaaaggtctaaggttttagcaatattgagaaaatagtaaaactaacattttgtactagattataataagttaagaattcatgttataatcactagctaatctctaaaaataataaaattattttatgaaaaacaggtatatattataggtagaacaatttgagcaaaaaagaaaggaattgagtaatatggtaatataaccccaaatataaaaatcaatatccatgagtccatactaatata

SEQ ID NO: 485652 - DNA, 665 bp, Homo sapiens
cttcaactccgacatttttgcattatcagttgagtgtggaggagagaaagcagactgaactccttcagattctgcttggtagatgtggagtcaggctggaatgtagatttctgaggatccctaaaacgtgttcttaagtgcttttcaacaaacgagcttcttggagctttttcttatctcttgggaataagagataattttttctattatatttccggttttcaaatgtgatgatttgtgaggaagctacaaagccacaaagtccaacttactgtttaggacagtggaactatcaaacaggacaaactgataagctcacaaagtcaggtaacctaaagataactaggagttgctcattcatctcttcagcatgagaaacactttaagcacaacatcttgagggaggaaagagacaagctgcccttaagaacagaagatgctcttttcttttggtaggtctccaaaaatcaccagcccagaacctaaaatccataacacctaggctattgaggtgtttagtcytgtaggaaacagaagatagaagctaagagtcaaaccatcacagagctgtgatggattttagatttctaatccaacatccttgtgttacagatgattaaatcaaaacacagagaaatgtttaaaatctagtcccaatacaaatc

SEQ ID NO: 485653 - DNA, 665 bp, Homo sapiens
atggagtactgattcacaagcaccaaattaagagacattaagatccagtttcacaaataagctatggcaacaaccaattgaataacattagataattcacccttagctttctatcttacaggagctgtttggatcagaagatgacatcctttcacccatccctttcaggttttgacatcctaaaatgtaccttatggaacccawacctgttatgttttcacctgtacaaggcaacagagaaaacatggtagtttttacttgagtagatgtgacttagcaatatgttgttgctgacctccatcccacagcacaaaacatatgtttatatgtctgacagacaaagtatccagaacaaggatttagtaccttcataatcctctgtatatgtggttctagaacttttggtaaagaaactctttatactcttattaattattgagaacctcaaaaaaagtttatatgttatatgtatcaatatttaccacattagacattaaagctgacttaaaaagttaaaatacttaagtcatttgaagtaataataaatgcagttacataccaacttaataacattttgcgaaaatagctatttttcaaaacctaaagtgagaaaagtggcagttttccatttttgcaaatctctttgctgtctagctgatagaaga

SEQ ID NO: 485654 - DNA, 527 bp, Homo sapiens
ctctggcggagaggcaaggctgtgggctcacacgggggttgagggcccccgtgatcaccctcagccagtgacagcacactgcaagtggacacccaggagcagcctcagccaccaggccctaggaggagggtgacacctttcaaggaatcatgactctttagtggccactgccttcccattcacccacccctccttcttagcacagattacagcctccaccttgatgacygtgatctgatgaggctcttcctctctccccaaaatgttggaaaggatgatgatctgtgggtcagagtccttggttctactgtttacaggctatgagaccccaggcaatcaagtcccctctccaagcctcggtttcctcatctgtaaaatggtgacacaagtaatgaatcctagtgtgtataacattggaatagaattatcaagcaaagtcccagactcttagaaagggctcaataagtgttcacaataaaggtttcttctctccttctttcatttcagtgaactaggaagagcgtaag

SEQ ID NO: 485655 - DNA, 415 bp, Homo sapiens
aatctcccccatgcaagtaaacatgttggcagtgccaactcactgccagagaccaggaccccctaacagggagcttgcccacaactgggaatgtctttaacacctattgacagctcttcccccatcgctctgtgccaaagttgaaacagtaaaaggcatcgatttcccagractgaactggggggccaaggtcaaggcaaggaagatgtgggttgcagggcaccatgcaagatgggttttacatgaaattatggttctggctctcccagtggcatctcttctgtgccaccacgacagacagctctctgagaaatggcagatttgtatttcattaggacactttagtcaaaagatcaatgatgcttctcagaacctctctgcccatccactggggcgggtgagcctggtgagaagc

SEQ ID NO: 485656 - DNA, 415 bp, Homo sapiens
aatctcccccatgcaagtaaacatgttggcagtgccaactcactgccagagaccaggaccccctaacagggagcttgcccacaactgggaatgtctttaacacctattgacagctcttcccccatcgctctgtgccaaagttgaaacagtaaaaggcatcgatttcccaggactgaactggggggccaaggtcaaggcaaggaagakgtgggttgcagggcaccatgcaagatgggttttacatgaaattatggttctggctctcccagtggcatctcttctgtgccaccacgacagacagctctctgagaaatggcagatttgtatttcattaggacactttagtcaaaagatcaatgatgcttctcagaacctctctgcccatccactggggcgggtgagcctggtgagaagc

SEQ ID NO: 485657 - DNA, 612 bp, Homo sapiens
ctgcggaggcagattctgcttgtgtaggccaggktgttctggttgcaagtgacagaaaccttaactcatcctcactaaacttaaaaggaaatgcattgactcatctaagtgggaagtccaaggggagaaggggctgctctcagagggaaaatgtcctcctcagtcaagaagaaggaagagaagaagggggtggggggtaggaggaggaggaggaggcagaggaggaggaagagaagaaggaggaggaggaggagaaataactaacagatcccatgaataagcacataccaagagttttctttgttgcaggcattactctaagcattttatatacataactcatttattcccataattctatgaagtccatgttactgtctccagtctatagatgaggaaactgaggctcagagaggctaagtaactccttcagagccacagccaagccaaggttttgaccaaggtaacctggcttcacagtctgagccttcaccactgcactgcacagccccaaagcaggactgtcagtgagcctcatcaaggtccacctcaaccacgaagctgagtggcttccttcagtaggagaagagccctcaaatgttcctaagcagg

SEQ ID NO: 485658 - DNA, 654 bp, Homo sapiens
ctgcggaggcagattctgcttgtgtaggccagggtgttctggttgcaagtgacagaaaccttaactcatcctcactaaacttaaaaggaaatgcattractcatctaagtgggaagtccaaggggagaaggggctgctctcagagggaaaatgtcctcctcagtcaagaagaaggaagagaagaagggggtggggggtaggaggaggaggaggaggcagaggaggaggaagagaagaaggaggaggaggaggagaaataactaacagatcccatgaataagcacataccaagagttttctttgttgcaggcattactctaagcattttatatacataactcatttattcccataattctatgaagtccatgttactgtctccagtctatagatgaggaaactgaggctcagagaggctaagtaactccttcagagccacagccaagccaaggttttgaccaaggtaacctggcttcacagtctgagccttcaccactgcactgcacagccccaaagcaggactgtcagtgagcctcatcaaggtccacctcaaccacgaagctgagtggcttccttcagtaggagaagagccctcaaatgttcctaagcagggggctcacatgatcaggtctgtgtctgagaaagagcacatgg

SEQ ID NO: 485659 - DNA, 149 bp, Homo sapiens
atcactggggcttcccacatrcaggcatgctggattgagtttcccacgtgttggctgagctttgtaaaacatttgatttctcatctacgtgcacggcagctctgctgtctctccccaggatccatgtcactccccagctctgtcaccaa

SEQ ID NO: 485660 - DNA, 655 bp, Homo sapiens
caccatcactggccttggattccaatattataactatttggattcagtcacaaaagccattttgctgaagcacaagccttgcttgcatagagtatatccctatgtcacccataagagaacaataccatttcctttgacctgtagttttagagcaggaaagagcctattcaatcatgctgtgcctttctacttttattgacatttcatttcttaggtcacattgctttgacctgatcccagggcctcactcagggctacgtcagtccaactatcttaggagaaaagagttgggtcttgatcctatctctctgaaaaagttccagggcaccttatgtaaatgagctcattaatttcaagacaaacttccagttgcaaaaatcattgctgtccttaaggagatacaattttgcctcaccaaatctagttactataaagacaaggcaacatcatttggcaattacgagcatgggttctgaagcctcaatgtcttggttgaaatatcacycttgtcatttattttctttatgacctttgtcaaaatactacaaacgttcttttcctagacttccttatgtgcataacaggaatgatatcactacttcctttacagagttgttacgagaattcaatgaggttaaaaatgtaatgcacttag

SEQ ID NO: 485661 - DNA, 651 bp, Homo sapiens
agaaaaattatagatgtattatttcattcattcaaccaatatgccctgaatgcctactactacatatggagtactcttgcaggtgtttggggacaaaggcctcagttctcacgaagtttacattccgatgaggggagacagataataaataacaaatgtgaaaaagaagtaaattgtataacatgttggaaggcaataaaagtcatgaaagtaaaaaggaaaaagtcaaacagagaataggggttaagaatgcataagggcagggcaggttgcaacttgtggtggttaggatgatccttgagaagatgacatgaataaagtcataaagagagtgggggattagctttgtgaagataattctggcagaagaagttgctgatatgaagattttcaggtgggagtgtgcctggtacattcatatagcagggagaccctgtatctgatggggattgagggaggaggagaggtaaggagtggggcragagggaagtggggttgctgtagctgcggagaggctacaggggcacagatcacaggaggggcagagatcacaggaggggcacagatcacaggaggggcacagatcacaggaggggcacagatcacatgaggccttgaagttccctttgaggagtttggctttgactctgt

SEQ ID NO: 485662 - DNA, 508 bp, Homo sapiens
aaaattaggttctgcagaacggggaaagcatggaaccaagaaacccaagatactctgttgatttcttttcttattttctctccatttctccctcctctttaatttcagtcccaaaattctataattctaaacaatcagaatccactctctatctggggtctaaatttatgttccttactgaaatgttcccatcggcactcatctaattctggattgagtattggcttgtctaagaaagaagtctaatatttcccaaatcgcctttcagagagggccgctgtagcttttacatagatttgcattatccaatccctttatatgctaatgttgcattgttggcaatcagggctttcttttatatacagtcttgcatcatttaacaatatattccgagaaatgataaattaacctttgctwactctaactatttttactttataaacttttatttttttccaactttttgactcttgtcataacatttagcttaaaacacaaacacattgta

SEQ ID NO: 485663 - DNA, 620 bp, Homo sapiens
tcagagggccggttaggattaagaccacaagctgccaacaggaacaagatatattattttgttttaagccatgaaagtttaacagggcagtttgtaatgaagaaacaaataataacaaacgatctatcaagctagagaaagaccccatgctcatttcattttgtcttacttcactagtattgcaaagggaaagtgagaaagaaaaagacagagaaggagagaaagagaaaatygagagaaaaagagagactctccaaacaaaatgattatgtctcaaaagaaaataaaatttttcatctatttgtctaacacacacacacacacacagagagagacacacacaactctactgcttggtatcccaccctattttgtatccctgaggatttatttgagtccttgagaaagccccttatgaacattagagctcctcttagggttagtggggaacgggtataactgagctttccctacagactagagtaaatgtgctaagccagaatgtcttcttcctcctcctcctcttcgtctttctcctctcctcctcttctaaatttaaatagtctatatatgatttttattacttatgtaattgagttcctaaatgtgtcccaggctta

SEQ ID NO: 485664 - DNA, 558 bp, Homo sapiens
caggaataaaaaagggccttaagaagagggaggcaggtggcacagtaatcacatcatgaacacagatgyggtggcccctgagaaagagtcatgatgacagctgcattctttgtttctatcgcctatgtaatctaatttcaaggaagtatcaaagtgtcggggtggagagaggataagaatcactagcatgaaatctaaagtgcagtcatccggttgcctgatgtcttctgaggtggttcacccagattcacaatacagataattaaattcagagctgcagagatagggaaaataagatgtggaaatagacttcttctgaagtattattcaggtctcctccttttcttccaaatgccatcccccccatcagtatactcaaggcatctgatggcattgatgagcaactgaaaaatcatttaattaatcatcaggttctttatccttagttaaaaatgtagaggcacaaaagtcatgtgtcaaaatatgctcttttttaatagagtatggtccactacccactgtgtgtcctcttaacctttccagagtaggtgtccttac

SEQ ID NO: 485665 - DNA, 558 bp, Homo sapiens
caggaataaaaaagggccttaagaagagggaggcaggtggcacagtaatcacatcatgaacacagatgcggtggcccctgagaaagagtcatgatgacagctgcattctttgtttctatckcctatgtaatctaatttcaaggaagtatcaaagtgtcggggtggagagaggataagaatcactagcatgaaatctaaagtgcagtcatccggttgcctgatgtcttctgaggtggttcacccagattcacaatacagataattaaattcagagctgcagagatagggaaaataagatgtggaaatagacttcttctgaagtattattcaggtctcctccttttcttccaaatgccatcccccccatcagtatactcaaggcatctgatggcattgatgagcaactgaaaaatcatttaattaatcatcaggttctttatccttagttaaaaatgtagaggcacaaaagtcatgtgtcaaaatatgctcttttttaatagagtatggtccactacccactgtgtgtcctcttaacctttccagagtaggtgtccttac

SEQ ID NO: 485666 - DNA, 558 bp, Homo sapiens
caggaataaaaaagggccttaagaagagggaggcaggtggcacagtaatcacatcatgaacacagatgcggtggcccctgagaaagagtcatgatgacagctgcattctttgtttctatcgcmtatgtaatctaatttcaaggaagtatcaaagtgtcggggtggagagaggataagaatcactagcatgaaatctaaagtgcagtcatccggttgcctgatgtcttctgaggtggttcacccagattcacaatacagataattaaattcagagctgcagagatagggaaaataagatgtggaaatagacttcttctgaagtattattcaggtctcctccttttcttccaaatgccatcccccccatcagtatactcaaggcatctgatggcattgatgagcaactgaaaaatcatttaattaatcatcaggttctttatccttagttaaaaatgtagaggcacaaaagtcatgtgtcaaaatatgctcttttttaatagagtatggtccactacccactgtgtgtcctcttaacctttccagagtaggtgtccttac

SEQ ID NO: 485667 - DNA, 348 bp, Homo sapiens
attttaaatattagtctaaaacatgaggtctaattgtgcagatttctttactctcttaggtgttatgcctcaaacataactcccatattgggcgtggcaatccagttaatctggtgtcagtagtgttaaagaacatatgtaatggyaggagattcttttcttgcagtgtaacaagttagatactttgaagcattctttaaagattttctttaataacttgaaggcactgttacacctttcctgtatcagatttttttttttggaattgaaatccatgagatttataactgtcatgcaaagtaattccatttctcctaaaatttaaggcttgctaaggtaaacagtttc

SEQ ID NO: 485668 - DNA, 348 bp, Homo sapiens
attttaaatattagtctaaaacatgaggtctaattgtgcagatttctttactctcttaggtgttatgcctcaaacataactcccatattgggcgtggcaatccagttaatctggtgtcagtagtgttaaagaacatatgtaatggtaggagattsttttcttgcagtgtaacaagttagatactttgaagcattctttaaagattttctttaataacttgaaggcactgttacacctttcctgtatcagatttttttttttggaattgaaatccatgagatttataactgtcatgcaaagtaattccatttctcctaaaatttaaggcttgctaaggtaaacagtttc

SEQ ID NO: 485669 - DNA, 348 bp, Homo sapiens
attttaaatattagtctaaaacatgaggtctaattgtgcagatttctttactctcttaggtgttatgcctcaaacataactcccatattgggcgtggcaatccagttaatctggtgtcagtagtgttaaagaacatatgtaatggtaggagattcttttcttgcagtgtaacaagttagatactttgaagcaytctttaaagattttctttaataacttgaaggcactgttacacctttcctgtatcagatttttttttttggaattgaaatccatgagatttataactgtcatgcaaagtaattccatttctcctaaaatttaaggcttgctaaggtaaacagtttc

SEQ ID NO: 485670 - DNA, 348 bp, Homo sapiens
attttaaatattagtctaaaacatgaggtctaattgtgcagatttctttactctcttaggtgttatgcctcaaacataactcccatattgggcgtggcaatccagttaatctggtgtcagtagtgttaaagaacatatgtaatggtaggagattcttttcttgcagtgtaacaagttagatactttgaagcattctttaaagattttctttaataacttgaaggcactgttacacctttcctgtatcagatttttttttttggaattgaaatccatgagatttataaytgtcatgcaaagtaattccatttctcctaaaatttaaggcttgctaaggtaaacagtttc

SEQ ID NO: 485671 - DNA, 624 bp, Homo sapiens
gatttttcctcctcagcagaaatgaatgacagcttgttatccaataracagtctgagcaggctggtagtgtgggagacaaaaggactaaatgacaaggtagcagtctgcgcacacactgagaacagggctttgctttgggttcctttggccagacagcacacattggagaggccaggaggtagatgtaaatgtaaggagtaatttcttgcactttgtaaaacatattgttctgtgtactagtctgctattcacactcttttctgtttatgatctggggtatgcacacttctgtactactcagctatgtgctggcagcaaagggttgccaaacatgaaactacacgggaaatctgacttattatgaaagtcaaaattttatttagtggcaagtattttaaataattactactatgagaaacatggactatgggaaaacactattatattcaactcaaattttaaggtgaaaaatgagatttcaaaataatttcttattttaaaaaaaagtctttttgagttactccctttatactcccaaagggtatgaattcttttcgcctcaagaattcctaagggtttgaaggcagaagaatattcaggagaattttaaattaaaaatttaa

SEQ ID NO: 485672 - DNA, 627 bp, Homo sapiens
cagctggcttcacctctcaatagcctgcccatcagctgttctgttgccctgtagcctgctccagattatcagtgaaatcaccgcagccagagaccctgtgagttcccacatatttgatacatttattacaagattttctctcttagaacttgacattttgcagtgggtgttttgcatggttctgaatcaactcctttatcctctaaggtytagaggtggactgagcttagagcttatagagtttccatcaaggatcagagagatttaaacttagggctcagtgctcacaggaacccagccatgagctaacatcaatgttgtttcatcttataatatctattctgagatttgggatgccagtttgggtaccctaaccatcatcatagtaatatgttcacagattaaaaaaacacaaattccttgtttaaaacaaattacatatatatgtcatttttggattacctttagctagatataaagttggctgttgcacattccaaaaatttatagagtgaaaaatttaacctggaacagttagggaataaataaggaaaaacatttaggtgtactgaatctgtttcattttacaaattccacttttataaacacactgaaagtgagctcaga

SEQ ID NO: 485673 - DNA, 628 bp, Homo sapiens
tattagtgagcaaattgccaagtcttctgcacggtggtggctggctatctgcagccctgtcaggtaacaagaaagaggtgcaaagaggccagccccaccaaggggcccctagtgttcctgggccctgtaggactgaccacaggacaaactgtcaagagacgaaagattacacagccatcacagaaatgtatcagccttcacatggaacacaggaggatacgtaccgtgcaaagaaggacgcctcttctggaatgtgaaaattcctgaaacactgctgttctttcctacaaaaacaaggaaaaatagagccttacaactcagagacaaactccagcaaggtaggcttacatctccctagctctctccatctcctactgctagagctattttcaggcacagagaggtttgccaggaaagaggaagaagcggattctttacatcttctaagatgaccctgtacttacaggaccggacttgaggctacagccaagtagcaggygctttgagggtgcatttttgtgagacactaccagggcaggcacactctccaggaatggccaaaaacaagaacaggaaggcacaagttactgcatgcagggcttcaagcctgcgtgcaatttattctaaa

SEQ ID NO: 485674 - DNA, 482 bp, Homo sapiens
agtgagcaggcaaacatagatgctttggggttcagggaaactaacctcgaaagggtgggagctttcttcaggcaaaggtgttgctagcagaggagaggagctttggggactgaggtatgcstgccttaaactaccatgcattcattgcttaggaaagcggtttccttggagagatcgtggtcagccttccctgaaacaacataacaacatagaggttttattcgcaaggctaaaggcacttggctgccaaagcccccttgaaatttctggtatccttgaatattttcagctttatgtgaaagctgcctttcctcagagtctcagtccgtctctctctctttctctctctctctttttctgtgtctctctctctcgctgtctccctgtctctctctctctgtctcgtttgcgttcatgccctctagtgttaaagaaacctgctggttcgagaatattgaaaagtaaggtcaacctattggtta

SEQ ID NO: 485675 - DNA, 591 bp, Homo sapiens
caggatttccatccagatctggccaatacccagagtgttttctttttaccttcaccaggttgccctaatctttctgttcccaaaagatctgccaggtttgcttacagtgcagtaattcacggatcaaggaatgaaacattccccaagaaaattagaaggtcacagccaatagtgactatggaagaaatatggctgcaaactgcagtgcaatcctgtgcttttggtaattctctcaagagaagatgcattatgttagtttatcattttaaataaattcycaacaagctgtttacctgtcagtctgtatctgtggggactatttgtgtaacatcagataaatgagcaattagagagtttaaagggctcttaaatgtggtggagcttgtaaacctgaactcccagggatggtaaatgtcacatcaaatgtcttcagtacatactccgtgtctaccttttgtttcaaaagctggatcatgacactccctatcctaatctaaggacacctgcctcccagcagcatataatgggaaaactggtgacctgagacacaagtcacttggattctcgattcagctattcttgggtaacttt

SEQ ID NO: 485676 - DNA, 638 bp, Homo sapiens
gcagggactggaaaagtcaaggaaagagactttcccctagagtctctgaagggagtacagccctgctaacaccttggttttgactgtttaccattttggacttctgacttttaggactgtaagagaatacatgtgcattgttgtaagccatcacatttgtagcaatttgttacagcagccataggaagctaatacatgggtggtttggcttgaatatttgtgagtgtgatccattttttgtcctgttcatttcttctgccatgtgaagatatagcagttttcctctccagaatatgcagcaacaaggtgccatcttgtagcasacggaacaagccatcactagcccctgaatctgcaggcaccttgatcttggaattcccagcctccagaattgtgagaaatttatattgtttataaattacctggtctccggtattttgttgtagcaaccagaacagactaagactaagacaatgggctaagatgaaaatttttatccatgggatcctacctttaaggagctttcaatttctgacaattgtgggtcaatttctgagataagaccaacaggaatctttgagtgctaactgtgcacaatattatttcctttcacctttagttagcagtggtgtgaagca

SEQ ID NO: 485677 - DNA, 653 bp, Homo sapiens
tgtttcctgaggatctatttgctactggtttatattggatgcaattaagttgccttttaaaaattatggtttctgaccttatacccaatttctaactcatccaaaatgtctgttttatgttacattttaatcctcaattctcagtactggccgttcataccttgttcaagtacgacttgagacttcattcgacttcacacagccctgtgagcacttgagtggtaacaaggggtttctgccattcatcctagttgaatcacagctaagtcacaaagccatttggactcattgcaaaacttttttctctaacactgagtggcactgaactgattatgagcatgtactcaccctgaccacatcattacatgattgcaacatcctgaacaaactcattctgcagcaccattgccacgtccacagaagcaagcattgcagccctgkgtgtagaccatactgcactgtgatgtcctgagcccgcactcaagaacctcttctgattcaaacctggaaacacgctgcttccctacctgactgcccgtcactgattttcttgtgtaagtagctttcaactgcacttgtgagatagaaagaaactagagatgatttctcctctgaagacggaaccctcaggattgctgacacgtcattcttac

SEQ ID NO: 485678 - DNA, 541 bp, Homo sapiens
ctggccaggctctgcgctcgctgtgtgaccccgggcgcgcccgagtccctctctgctcccaggccctggggtgccagggagggcggcgcccgggctcagacaaaccccgatgtcatctctctgggcggggaggagccgcggcggcccccagctccccgagggttcccctgtcgggcatctgcggcagggctggaagcggcgaggcgcacaagggcggcctccatgtcttacaaggttcccctctaagctacctgggaaaatacccggcgagcgggccggctgaaaggkgggggttaaacggtgtccattgcggcgcggcgggcaatttgtcacgctgttaaagtgatcgcattcattcggctccattcgaaagaaattgctaattctaaattcattagccctggaagaatgctgtagcagtaaattgtagctcaatgcggaggggacttgtttaaaaggggccgaggaattccccttacaaaaaagggggattagatggttgacatagcgtgaatggaagtggaattagtcttcacggtaa

SEQ ID NO: 485679 - DNA, 155 bp, Homo sapiens
ccccggccagagcccgcgtcctcttccctctccggccctgcactccccgggccgcyacagtcgccccgagctcgcgcgcagccctagttgccacgcggatcccctgctcagactgcgctgctgaagccggcgcttcgcttcatacgggccgcgcc

SEQ ID NO: 485680 - DNA, 572 bp, Homo sapiens
gcctggctgtctttctgttcagttccatcttctctacccacagctatgttcagaagcttttgacacaaagccccaaaatccagatttaagtttctcaatgccctttgggacttcctcctcatttctgatctataggacatgtctgcaccgctaattggcattgttagtttattgccacaggatcatctcaccctatgagagactttgccctctcatccagggagtagcccctgcttgccagccactaataaccctgaacacactctggaggggcagacagcttgggaaggggttactgctcccagagtttagatgaggaggctgatgccagggcagggagacaatcaggactcttcctggtgacttctctgctatggtttggatttgtgttccctccaaatctcatgttgaaatttgatccccagtgttggaggtggggcctaatgggaggtgtttgggtcctgaggagagattgttcatgaatagattaatgcctccctcaggcatgagtgagttgtcagagagcgggttgttgaaaagagctggcayctcctccttctctctctagcttc

SEQ ID NO: 485681 - DNA, 553 bp, Homo sapiens
aagttcacgctgaaggaccgatctgggttggagtgtctgctatgtcattacctttcaaattaatgtgaacagattatttcgatttttctgggctggatatttcttatytgatgatgatgatcatagcaagcaagcccttatattgttctgcctgtgattcgggcattttttttatttccttgtgataaacatttgattcgggcaatattttaagagactttcctgtatttattcacttaatcctcacatcaactgtaagaggtaggtactatcagtttactgatgagaaaacatatcaagagagcagcaagcaagaaatttgaaaccaaggagtctgacatcagagtccatgctcctgactaccacattatgcctgctttggggcagttatgagatataataaaataattttaataacaaaataatgtgagaaagtgcctgtcttcctacctatcacatagaagatttttaggcactgtttattgtcttctttttcgaagaaggacataaagatcatgttctaggccctcaataatatttatttgctttaaac

SEQ ID NO: 485682 - DNA, 598 bp, Homo sapiens
aggtgggactgaaggcaagtcccaagtagctgggactataggtgtgcaccaccacacccagcttattattttttctttctatttatttgtagagacggcgtttcaccattttgcccagaatggtctcaattcctgagctcaagcgatcctcccaccttggcctcccaaagttctaggattacaggcatcagacactgcacctggcctggatttctcaacatagttttaatggtagtttttaggtttcaatgtcttattcatgttgtttattcacaatacatttatgaatatatattttttctgwaatttttttaccttgtctcacttgttttaagtcttgaccactttaaaaaaatctttctttggatggattcagtataatagaattcaaattcttgtttgatttttttaaaaaaaaacagcatttgtttgctgtttgtttgcggctgtagttttgttgatctctactgagtattgattttcacattaaaatgcactttctatttgttgttattgaacacattagcaaacaaactgacttagaggaacataaatccaaatgaacaattaaggagctctactaatgggcttttttaag

SEQ ID NO: 485683 - DNA, 424 bp, Homo sapiens
gcccagcccagactaatacayttttcaaagaaaagatcaaaaagtagaaatggttaaactcttcattgtgttaaaatactgaaataaattaaataccaggttatagactgaccacagaaatgttagaacaatcccttgatgtataccatggtaaaagacaatggaataaaatacaatttccactttgttgaatggcacccgaatgttcagacagcatcagaaagccagatgtagtccagcatgtattctatctgtgaggaggaatgtatgaatcccaagtgtggtgactctctgcagtgaatacagactgttatcagattatgtcactctggcttaaatttagtaaatgctcaagatgtggcatttgaaacatggacgtttatctaaagttaatccaccctaagagaatctagggcatttcact

SEQ ID NO: 485684 - DNA, 639 bp, Homo sapiens
agaaaattccacttaacttgtggggtgtgttcataatgattatttcagaattcatgcatatgcatcttttaacatgcaaatattttaaaccttagtggactagtccagatctggctcatttctgttgtggttgttgttttagttaaatgttgaaaattgtaaataaggcatcatgaatacacatactaacatgtggagtcctctttacttctctttgatatagtctttttaattattaaagacacaatattaaatactttctatttattattacttcactgtggataaaaataacattaagaaaaaaaaatcttggtatctgacttttcctaccaaagtgtataatgtgtactagaatgctatagtcaggacttcatttacctttatgttcaattgtgctrttagaaattagagtttgatgtctcacatacacacacagacattacattattcataaaaagtggcaagaataccttgtgattacttttaaacctctcttatataatatattggcttcattgtaaagtatattttcttaacaattttttaggtaggtcataaccctcctctgtttaaaaaactctaccagttcttgattaattatcagatatgatctcagacctttagttcagcattgag

SEQ ID NO: 485685 - DNA, 619 bp, Homo sapiens
gctccccaaaatagtcgtgattctttttccagtttacaggctgagtctttagtaagaggatgctctttctggtccaaatttaatagatttggtctgtgagttgctgcagaaaaaaagaaacatcttctgtgagcatgtacacctcaaactcacatacacattacaaatcatgatccaaaagtggtttgcaacataagactgccttgaaatagaaaaatgaagcataataaaaggaagatattaattttagagtggaataaattatatgtggtttttaaaaaaaattatagattggacttgagatttccaaaactggtcttgccaagaaaaccagaagtttggttggccaaagggtcagtgggggcagtaagtcttgggctgggatagaggaacaagaagggaagataaagaaacacagaactccttcaacagaggcctytgggatgcctgaaaacaaagtttatgtatgggccgaaccaccaattagttcattcaacattcaagtacacagttggccaggcaccatctgcattctgaggacttaaaatggaatagaacatagactatgctctcctgtaatgtctgtcaagcaaatgaggccagtaaaccaaatatttta

SEQ ID NO: 485686 - DNA, 636 bp, Homo sapiens
tgaggccacataaaaaaaaaaatcctgtgtcactatgaaatggaaaaaatgagctgagataaaaagtgatagaggagcctattgggtggtcaatgatagcatctccaagatgacatttaagttgaatttaaaggactaagaggctgttgccatgtacagagaatgaagaaagcccattccagaaaaaggcaagggcatatacaaaggccctgctttgggacagagtcatccgcagaaaccaactgctgcctttgwctgcgtatgtgggaaaatggatagagaaaggggctggctggctgcacatggtgccccaggaggcaagctatagttccatggtttgtattcagtgtgttatgtctcatttgattcttcttcaagtgattggagtattaaaacataaacttgccatttgagccatagctactaccttatcacctggagacttttattatcttgataagatcactcaggcatgacatgtgaacaaggtacagcttggcctgcactcaaaaggaaaatctgatgcaatctgcacgttaaaatagaattgagcaatcaattattaatacgacaatgcagacatgaaaatctcgttatgtaaaaaagtagaaatatttatttctaagataactttaa

SEQ ID NO: 485687 - DNA, 636 bp, Homo sapiens
tgaggccacataaaaaaaaaaatcctgtgtcactatgaaatggaaaaaatgagctgagataaaaagtgatagaggagcctattgggtggtcaatgatagcatctccaagatgacatttaagttgaatttaaaggactaagaggctgttgccatgtacagagaatgaagaaagcccattccagaaaaaggcaagggcatatacaaaggccctgctttgggacagagtcatccgcagaaaccaactgctgcctttgactgcgtatgtgggaaaatggatagagaaaggggctggctggctgcacatggtgccccaggaggcaagctatagttccatggtttgtattcagtgtgttatgtctcatttgattcttcttcaagtgattggagtattaaaacataaacttgccatttgagccatagctactaccttatcacctggagacttttattatcttgataagatcactcaggcatgacatgtgaacaaggtacagcttggcctgcactcaaaaggaaaatctgatgcaatctgcacgttaaratagaattgagcaatcaattattaatacgacaatgcagacatgaaaatctcgttatgtaaaaaagtagaaatatttatttctaagataactttaa

SEQ ID NO: 485688 - DNA, 623 bp, Homo sapiens
gttgcagagaaaagggaatacttatacactgttggtgggagtgtaaattagttcaaacatcatggaagacagtttagtgattcctcaaagacctaaaaatagaactaccattcgacgacccagtaatcccattactaggtatataccctaaggaatataagtcagtttatcataaagacacatgcacttgtrtgttcattgcagctctcttcacaatagcaaagatgtggaatcaacaaaaatggccatcaataatagattggataaagaaaatgtggtacatataccccacggaatactatgcatccatttttaatagatgaataactttagtcctagaaagatttagtaacatgtgcaaggtcacaaaagtgatgagtttatattaaaatccaagttagacttcagtgctaggattattaagcactatgactgtgtcctactccattttaattgtgaaagagagaaaagtggaggtagtctcccaaaaactgagtacaatgggaaaatatgtggccagccaagctgagtgcatcattttcatcaaggaagatacaggcaggggacagtagtaatagaggagatgtttccaataatgcattaacaccccagaaagagagtca

SEQ ID NO: 485689 - DNA, 421 bp, Homo sapiens
gtagcttagtcaggtctaaatgatggttatccttctccatgtctctaattaagccctcctcacctgtactccactgggctagtccatatattcttttccttctcagtccctttgaaggsacatctgtttcttctttttccctttccagagacagacgtaccatgacactatagagttaaatttccagagcctgttacacatgcaagccatttcctctgccctataatcaatatcatatttgtagttttatattcattttcttaatgatgctctccctaaattgtttaagttttatatctcacagattcaagatctcctcacagtagctacacctcaattttctcttggggagatacagcaccccattcttattccatgtggcttggggattgaccaatcccaattccagtggtagaaacac

SEQ ID NO: 485690 - DNA, 421 bp, Homo sapiens
gtagcttagtcaggtctaaatgatggttatccttctccatgtctctaattaagccctcctcacctgtactccactgggctagtccatatattcttttccttctcagtccctttgaaggcacatctgtttcttctttttccctttccagagacagacgtaccatgacactatagagttaaatttccagagcctgttacacatgcaagccatttcctctgccctataatcaatatcatatttgtagttttatattcattttcttaatgatgctctccctaaattgtttaagttttatatctcacagattcaagatctcctcacrgtagctacacctcaattttctcttggggagatacagcaccccattcttattccatgtggcttggggattgaccaatcccaattccagtggtagaaacac

SEQ ID NO: 485691 - DNA, 509 bp, Homo sapiens
ctttcaatataactattagttaaatacagcttgctcttgtttgaatgttgcgytgtcaaagttgtacgtttattttccactttgatatgtatttatcatggctttcttcactcaggtatatagattatatataaaatatatgtcattttataaaattcatatatatatttgtaaatacctacacaaatatatacacaaaaaatttaagtagtcttagctgggaacccatagttccagctacttggaaggctgaagctggagaattgcttgaaacaaggagttcagggttgcagtgcactattgttgaaccttccaatagctattgcattccagcctaggcaacataagacctcatctcaaaaaaaaatagtcttattattttgaaaaatgatttaccatacgcttgctttgaatctttctgaatttaaatatgaactgattcattgtgtatataaattaaattttttttctctgagacttgtatcttaatgaatttggatattcacata

SEQ ID NO: 485692 - DNA, 603 bp, Homo sapiens
tcatattacagacctaagtatagaaatctgatgtcctgaatgccaacctggacctcacactctaaagaacttaattttgtggtgtgactcagaaagtatagaaaaagagtccacttatttttacttccaatatgttatgagagaagtcaaaggtggggcctttactttttttttttttttttttgagacagggtctcactctgtcgctcaggctgaagtgcagtggcatatgactcacttctcacttgacctcccaggctaaagtgattttcccacctcagcctcccgagtagctgggactacaggtgtgcaccaccatacctgcctaagttttaaaattttttgtagagtcagggtcttactatatcggacaggctggtcttgaactcttggcctcaagcgatcctcctgccttggtctcccaaagtgctgggattacagtcatgtaccaccgtgcccagtctcctttttatttcttagcagagagtgagcgttaggaaataaaggtttcacaggtcccacactgactttaaagactctattaacatattttrtatcaaaaataccttctgtccctgagaagtattcatcagttcattgtta

SEQ ID NO: 485693 - DNA, 518 bp, Homo sapiens
tgtttggcacttaaaagaacatgtcatgtcctctwtgagtgatcacttaaagaggacagggattataagtatttactttaggatttctaaaatagggctgactggttctaggcagaaagaaaatgatttcttaggaatcttctgctacaatagattatagagatatatgggaaccgtgatgaatgaaagagcagttacttgggattaaatggcatttgtcaccaatttaaatgggactgagcaattgtatagctggtgtttgagtttgaattgtgctatttacttggtcacaatccttcctgttgggtgtgtaatagtgtttatgcaagtccatggggtcacttcttgatttgctaactagtttgcctcttagcagctcaagggaactctcttcaaaattgattgtttattccaaagggggaaaaaaagctcttttatttttgccattaattcaaattataaaaacataaaaaataaaatgtctaaagttgttttaaatggctaatttccattatata

SEQ ID NO: 485694 - DNA, 590 bp, Homo sapiens
ttttgaagtcatttcactttgattaataaaatgtgatgggctaatattgtatccttttmatatcttactctgtgttgggcactttatcaggaactaaaatttcaaagacaaataaaacatgtttccacaccagaggtcctaatagcagtggttctccaccctgtctgtacattagaatcagccggggagcttggaaactactttgagctctaccacagaagatagtgactagcttaattttaaaacttctccaattaattttgaagtgcattcattaagactcatgatcttatagcacataagaggaggctaaactacacatgggcagacatttaacttatttggtaggaaccttagatagaattacacagggattgcagagatggtggagggtcagtgaaagccacaggagtttttttttgtgagattggggtgggacaagtggtaacatgattcttgagttttgaaagaaaagattttcaagtagtggagaaaaagtggatagaaatgtggagcacagaggaataaaattcagatagaggaaactacaaacaaaaggagtcatatagcaacctgctgtgaaaaaacta

SEQ ID NO: 485695 - DNA, 515 bp, Homo sapiens
aaatctggcatgcctttgaactttttcatgtttttaaacaattaaaaacctacaaacacacagaaaacaaaacaaatgtagcactcccaaactaatttctgaaaaaggacaccagagatgtgtcttttagaatcttatatcacaacagattgtaccacaaacaacctgtgcctggtccaaatggcacagaagcccaaacagcagaaacagaggaatcctggtgtgcacactagtttgacttacccagtcttggaggccgtcagctcctcagatgctgctttcccttgcaccarctgagcactacaagcagcagaggccatgcagagaagcaaaatactcaagaaaagttttgttagttgctaaggtgttcctaaaatcccagctagggggttagctagccatgagcaattggtactcatgagtagttgtcatcctgtctggtagtgtgaacagataagttctggcacacttccatggcctattgctccatccattggaaaccaggcagacaggac

SEQ ID NO: 485696 - DNA, 517 bp, Homo sapiens
taaacataaattcaaactttgcctccttacttatcttgatttccagtaaaamtaatatcaacatggaaatcattcattttgatcatcatgaagaccatatcctttctctccataaaatgtatatttttttaattgagcaccatcttccctaatagacttacaatgtgagtaaatgcatgtgtttgtatgtgcctgtgttacttgtgtctataagttattcaactttaatttttcctagctgcatctttcttctctagatttggacaaatatcaacagtacctgttgagtgatcaaactatctcctggtcctcagtttacatcttccctgtattacacactattagtatttcagctatctgtgtactgcctctcaactccaaatccacccttctttcatttcctttgtgatacctgatggatcctataaatactgctcctctgccagctaatacaatgtcaggttttgtcaatagagggtgctggagggacactccaatgtagtcacaagagaaggga

SEQ ID NO: 485697 - DNA, 517 bp, Homo sapiens
taaacataaattcaaactttgcctccttacttatcttgatttccagtaaaaataatatcaacatggaaatcattcattttgatcatcatgaagaccatatcctttctctccataaaatgtatatttttttaattgagcaccatcttccctaatagacttacaatgtgagtaaatgcatgtgtttgtatgtgyctgtgttacttgtgtctataagttattcaactttaatttttcctagctgcatctttcttctctagatttggacaaatatcaacagtacctgttgagtgatcaaactatctcctggtcctcagtttacatcttccctgtattacacactattagtatttcagctatctgtgtactgcctctcaactccaaatccacccttctttcatttcctttgtgatacctgatggatcctataaatactgctcctctgccagctaatacaatgtcaggttttgtcaatagagggtgctggagggacactccaatgtagtcacaagagaaggga

SEQ ID NO: 485698 - DNA, 558 bp, Homo sapiens
ttgtacttataatctgtctttttctcaaatttattttagatctatctatcctcctcagagaattcaggttcttaagggtagaaaatgtgtcatatttttaggtgtttatttttgtttctcaaactacctacctttcttttgttatgtaataggcatataatatttattaaagagaatttatatctaagggaaatgccagcatttttagtacataggagacatataggtttctaattctaatctgawtggaaatgcctggctcacaaaattgtttctgctttagtctttgctgaaaaccaaattaaaaaacaattttgtgagctttggcttaaactctttaataatcgtcttttaatatttgtgatgtatttgttggacactgggaacataccaaaatagtttttcaagttgcacgaatatgttaagagttttagttttaattaatagaatttattttataaaattataatataaaacattatatttagtttagaagaagttaactttataacatctattctcttttttttgaagtgatccttatttccatggatttag

SEQ ID NO: 485699 - DNA, 635 bp, Homo sapiens
ggctttcttgtttggtgatggggctcagaactgccatcttggcaaagtcatctcaagtactgtatcctttatgccagtcctctccatgaccctcatcctctggagcgtgcagagctgcagatggtgcccagtaacagtaaatgtaacagaaaagagtaattcttctcctacccagaccctgtgtattatagactatcataaagctgccagtagatttcagaggcagcattttgcttctgtatccttctctccctgctctcagaaaagggcagctttccctgcagacctcagactaataaatatttctttgcctttttggtaatcctagattaatcaagagataaaagtcagagctgagttttsactgatcaccaaaataacacagaaaataagaaaccaacttcccttgtgtttatattctcacttcacagatctaatctattcctcatgaaagaatgcttacagatgtaccctattttacgagtaagtgcattcctttaagagtatttttttaaatatacctaaggaatatgctactcttacaagcaccttagtaattttgttaaaataactaatctcaatttaatatttatatttactatagaggaagaagtattagatatagttcataggtc

SEQ ID NO: 485700 - DNA, 635 bp, Homo sapiens
ggctttcttgtttggtgatggggctcagaactgccatcttggcaaagtcatctcaagtactgtatcctttatgccagtcctctccatgaccctcatcctctggagcgtgcagagctgcagatggtgcccagtaacagtaaatgtaacagaaaagagtaattcttctcctacccagaccctgtgtattatagactatcataaagctgccagtagatttcagaggcagcattttgcttctgtatccttctctccctgctctcagaaaagggcagctttccctgcagacctcagactaataaatatttctttgcctttttggtaatcctagattaatcaagagataaaagtcagagctgagttttcactgatcaccaaaataacacagaaaataagaaaccaacttcccttgtgtttatattctcacttcacagatctaatctattcctcatgaaagaatgcttacagatgtaccctattttaygagtaagtgcattcctttaagagtatttttttaaatatacctaaggaatatgctactcttacaagcaccttagtaattttgttaaaataactaatctcaatttaatatttatatttactatagaggaagaagtattagatatagttcataggtc

SEQ ID NO: 485701 - DNA, 635 bp, Homo sapiens
ggctttcttgtttggtgatggggctcagaactgccatcttggcaaagtcatctcaagtactgtatcctttatgccagtcctctccatgaccctcatcctctggagcgtgcagagctgcagatggtgcccagtaacagtaaatgtaacagaaaagagtaattcttctcctacccagaccctgtgtattatagactatcataaagctgccagtagatttcagaggcagcattttgcttctgtatccttctctccctgctctcagaaaagggcagctttccctgcagacctcagactaataaatatttctttgcctttttggtaatcctagattaatcaagagataaaagtcagagctgagttttcactgatcaccaaaataacacagaaaataagaaaccaacttcccttgtgtttatattctcacttcacagatctaatctattcctcatgaaagaatgcttacagatgtaccctattttacgagtaagtgcattcctttaagagtatttttttaaatatacctaaggaatatgctactcttacaagcmccttagtaattttgttaaaataactaatctcaatttaatatttatatttactatagaggaagaagtattagatatagttcataggtc

SEQ ID NO: 485702 - DNA, 622 bp, Homo sapiens
gtatcccacacagtttttgccaggatcaaagatgtgataatggattccccctaagatattataaaccatgaaaacactatgcaaatatatatatgtgtgtrtgtatatacaataaatatatagtttttttaaatttttattattttttgagacagggttgtgctctgtggtccaggctggagtgcagtggtgtgatcatggcttactgtaggcttgaccttctgggcttaagtgattctcccacctcagcctcctgagtagcttgaactataggctcatactaccatgcctggctaatttttaaattttttgtagagatgggttttcactatattgcccaggctacaaatatattttgaaaagagattaatcctttgcttatctaacccaaaatgtgatgataaataataaaaataatgtttaaaaataggagttatactgaaataaatcattttatcaatttctttcttcattcaatttggggaactaactacacactcctcttaaagtgattggtagccaagaaatcattttgaaaacagagattactagaaatagccctgcttctcttacatagccagtgtttatttttcctatggccattgtgaaccttgtaattgtt

SEQ ID NO: 485703 - DNA, 622 bp, Homo sapiens
gtatcccacacagtttttgccaggatcaaagatgtgataatggattccccctaagatattataaaccatgaaaacactatgcaaatatatatatgtgtgtgtgtatatacaataaatatatagtttttttaaatttttattattttttgagacagggttgtgctctgtggtccaggctggagtgcagtggtgtgatcatggcttactgtaggcttgaccttctgggcttaagtgattctcccacctcagcctccygagtagcttgaactataggctcatactaccatgcctggctaatttttaaattttttgtagagatgggttttcactatattgcccaggctacaaatatattttgaaaagagattaatcctttgcttatctaacccaaaatgtgatgataaataataaaaataatgtttaaaaataggagttatactgaaataaatcattttatcaatttctttcttcattcaatttggggaactaactacacactcctcttaaagtgattggtagccaagaaatcattttgaaaacagagattactagaaatagccctgcttctcttacatagccagtgtttatttttcctatggccattgtgaaccttgtaattgtt

SEQ ID NO: 485704 - DNA, 622 bp, Homo sapiens
gtatcccacacagtttttgccaggatcaaagatgtgataatggattccccctaagatattataaaccatgaaaacactatgcaaatatatatatgtgtgtgtgtatatacaataaatatatagtttttttaaatttttattattttttgagacagggttgtgctctgtggtccaggctggagtgcagtggtgtgatcatggcttactgtaggcttgaccttctgggcttaagtgattctcccacctcagcctcctgagtagcttraactataggctcatactaccatgcctggctaatttttaaattttttgtagagatgggttttcactatattgcccaggctacaaatatattttgaaaagagattaatcctttgcttatctaacccaaaatgtgatgataaataataaaaataatgtttaaaaataggagttatactgaaataaatcattttatcaatttctttcttcattcaatttggggaactaactacacactcctcttaaagtgattggtagccaagaaatcattttgaaaacagagattactagaaatagccctgcttctcttacatagccagtgtttatttttcctatggccattgtgaaccttgtaattgtt

SEQ ID NO: 485705 - DNA, 622 bp, Homo sapiens
gtatcccacacagtttttgccaggatcaaagatgtgataatggattccccctaagatattataaaccatgaaaacactatgcaaatatatatatgtgtgtgtgtatatacaataaatatatagtttttttaaatttttattattttttgagacagggttgtgctctgtggtccaggctggagtgcagtggtgtgatcatggcttactgtaggcttgaccttctgggcttaagtgattctcccacctcagcctcctgagtagcttgaactataggctcatactaccatgcctggctaatttttaaattttttgtagagatgggttttcactatattgcccaggctacaaatatattttgaaaagagattaatcctttgcttatctaacccaaaatgtgatgataaataataaaaataatgtttaaaaataggagttatactgaaataaatcattttatcaatttctttcttcattcaatttggggaactaactrcacactcctcttaaagtgattggtagccaagaaatcattttgaaaacagagattactagaaatagccctgcttctcttacatagccagtgtttatttttcctatggccattgtgaaccttgtaattgtt

SEQ ID NO: 485706 - DNA, 610 bp, Homo sapiens
ttacaagctgtataatcttagggaagtatatagagctttttgtgtctccagttacttaacctataaaataagacttaaagtaatgcctcctactgtgataaattaaagattcatattgtgaactataaagcaaccacttaaaaagttaattgaagatgagtggttagtaatccaatagtggacataaaatataacgctaaaagtttaatttaactaaattaaagcagraaaaggagaaaaataaacaaaaaaagagaataaatagaaaacaattagcactaagacaaatttacaactaagaaagtcattaattatattaaatataaactatatatgaatattccagtgaaaaggcagagggtgtctgaataatgcccataagaaatccattttggatataaagatgttaaaatagaataatctaaaaagatgtaatcttcaaacacaaataataagaaagttgaggtagttatatcttggactaaattaaaataaacatcctacaaatcaaaattatggaaagtcattaaagtagtgaagaaagaacgttaaggctttaactgcttgtactaaaaaagaaaaaaagttctcatcaactatctgcgagtcc

SEQ ID NO: 485707 - DNA, 613 bp, Homo sapiens
agatctgacaacagcatagaggtgtgtaaagagtaaaaattgatattcactatgactcaggctagtataaattgcctaaggttaaatgattgtctgagaatctgaagtgttggtggggaagatgatacactgtgatattgtaccatattgtgatgcccagtattgtgatgtcaatccagagttttgctaatgagccatgtttttattccataataacctcgagtagatatcacctagtggctgttcgtatattttcattgaaagaaaattcaacactttaggaacactttagaagatcttattccattattgaaaagatgttattcttagacagctcttaactaaaggcaaaaaatctgatttccaatgattttcccttcattagcgcaagttgttctgacttctagggtaatacaaagtatacagtactcccctccacgtttggcaatataggtagcawgattgtgaagatacatccatggtaaggaatctctttcttgggtttgaaaattctatcaaagaacaaacaaagcaagcatttacataagttacagagcagtgcttctcaaataacaagggcatacatacccacatcaagacggcaaagagtcac

SEQ ID NO: 485708 - DNA, 613 bp, Homo sapiens
agatctgacaacagcatagaggtgtgtaaagagtaaaaattgatattcactatgactcaggctagtataaattgcctaaggttaaatgattgtctgagaatctgaagtgttggtggggaagatgatacactgtgatattgtaccatattgtgatgcccagtattgtgatgtcaatccagagttttgctaatgagccatgtttttattccataataacctcgagtagatatcacctagtggctgttcgtatattttcattgaaagaaaattcaacactttaggaacactttagaagatcttattccattattgaaaagatgttattcttagacagctcttaactaaaggcaaaaaatctgatttccaatgattttcccttcattagcgcaagttgttctgacttctagggtaatacaaagtatacagtactcccctccacgtttggcaatataggtagcaagattgtgaagatacatccatggtaaggaatctctttcttgggtttgaaaattctatcaaagaacaaacaaagcaagcatttacataagttacagagcagtgcttctcaaataacaagrgcatacatacccacatcaagacggcaaagagtcac

SEQ ID NO: 485709 - DNA, 599 bp, Homo sapiens
ttgttctatcttgtatcctttgtattcaatcagtggaatactcaatatttcggcctttaaaatgctccccacttatacccttccttatttctcctaccacaactttatctagatcatatccagctttttccataacatactaaccagtcctttgtttctggttcatttccatctcatccacccttcagagtcattaatcttcataaggaagaaatttagcagttaaaatttccatgtgcaaaaccctccattgtgccttagtgactataaaaatctaggttcccaggcgcggtggatcacgcctataatcccagcactttgggagactaaggcgggcagatcacgaggtcagaagttgaagaccatccgggctaacacggtgaaacccrtctctactaaaaatacaaaaattagctgggcgtggtggcacatgcctgtaattccagctactcaggagggtgaggcagaagaatcgcttgaaccagggagtcagacgttgcagtgagccgagatcctgccattgcactccagcctggtgacagagtgagactgcatctaaaaaaaaaaccaaaaaaaaaaaactaggttcatagcatttt

SEQ ID NO: 485710 - DNA, 649 bp, Homo sapiens
aaattagcaaaagaggttaagaactagtaatgaactagacttattttgccaattagaattactgcagtgttgacaggccctccctggaaacagattccatcagaacccgtgttttgcagcaccacactttccatcctcagtcacagctcattggatatgcattgtgccccttacccaaggtcagcaaatccataggcccataagtcaaatgcagcctgctcttgtttgaaaaggtagacatgccagtcatattctccctcatttgggartttagtaggagaacaagtcagccagtcatattctccctcatttgggaatttagtaggagaacaagtcaggatgagaattaggcaaaattatggtttagagagaagttataaagtaaaaaattgtattcaaagaactggagaatggaagagacttatagtcaaattataatgggcagagcattagggggctggtctaaaaattcttactgttaaagtttctggaactataataaatcctttcagttttaaaagacaaatcatttgtttatgagatctagcgtgtttttttcctcatagttttgcatcaaattctcactttcctcattcctacatatagacatcatatgaacatattacaaattttgttaatgtttaaattt

SEQ ID NO: 485711 - DNA, 608 bp, Homo sapiens
cagggatagggtggaagtacttttccataagacatgcccactagtgtgccatgacagtttaccatttccatggcaacactcatgagttaccacacctttccataacaacaaccttaccaccatctttctaaaaatttctgcataatctgcctcttaatttgcatataattaaaagtgggtataaatataaccacagaactgcctctgagctcctactctgggcacactgcccattgggtagccctgctgtgcaaggagcaatacctgtggctgcacactgccacctcaataaaaattgctgtctaacataccagctcacccttgaattctttcctaggtgaatctaaaaacccttccaggctaagcccctgtttgggggctcacttgcccagcatcaaaaccatcaggtggatgatatataccttttatgtgttttagcaattccttactactttctagcgctacaagaagctccaacaccaccttgtgtacttttttcctgaatactaaaattagtaattaatattttcaggtctctaaagcataaattgactaaccaaaaaaaaaaaaaaaaaaaaaaraaattatcaagccaaagtcagttgaag

SEQ ID NO: 485712 - DNA, 608 bp, Homo sapiens
cagggatagggtggaagtacttttccataagacatgcccactagtgtgccatgacagtttaccatttccatggcaacactcatgagttaccacacctttccataacaacaaccttaccaccatctttctaaaaatttctgcataatctgcctcttaatttgcatataattaaaagtgggtataaatataaccacagaactgcctctgagctcctactctgggcacactgcccattgggtagccctgctgtgcaaggagcaatacctgtggctgcacactgccacctcaataaaaattgctgtctaacataccagctcacccttgaattctttcctaggtgaatctaaaaacccttccaggctaagcccctgtttgggggctcacttgcccagcatcaaaaccatcaggtggatgatatataccttttatgtgttttagcaattccttactactttctagcgctacaagaagctccaacaccaccttgtgtacttttttcctgaatactaaaattagtaattaatattttcaggtctctaaagcataaattgactaaccaaaaaaaaaaaaaaaaaaaaaagraattatcaagccaaagtcagttgaag

SEQ ID NO: 485713 - DNA, 637 bp, Homo sapiens
gaaagttgttgggcatgtggctagaggctatcatattgaacagtgatacgctttcaatgtgctcagaaaattgctcagctaagtataagtgggtggtwtgatatggattttgaacatgccagaaactcccttctcaagtaagagggaggaaatttaaagcctaaaaagatagagaaaatatacaatctattgtagagacagaatgtgaatttgggaataacatttttatattttctcagccacactttaattaaagtgtaagcacctttagtaaaaataagaaaatagtaagatcaggttcaactttggagctaaaaggaaagctgtgtaagatggagagcacagaggttgaggtctcaaatctgccatccttgctgtttccttttaaagtggaaatagcactgatctcacatgagcattgaggttaacttagatttcatgaaaggtaataacatttgtctattataaattttatataatattatatatatataaaccgtagctgtgtgttagtcttcagggcaaaaagcttccctttcgatttttggaggtccactttcctgtgttctctctcactgtctgtctctctctcctgcatgcatttgcctccccagtcctgccccacccataaaaggat

SEQ ID NO: 485714 - DNA, 637 bp, Homo sapiens
gaaagttgttgggcatgtggctagaggctatcatattgaacagtgatacgctttcaatgtgctcagaaaattgctcagctaagtataagtgggtggtttgatatggattttgaacatgccagaaactcccttctcaagtaagagggaggaaatttaaagcctaaaaagatagagaaaatatacaatctattgtagagacagaatgtgaatttgggaataacatttttatattttctcagccacactttaattaaagtgtaagcacctttagtaaaaataagaaaatagtaagatcaggttcaactttggagctaaaaggaaagctgtgtaagatggagagcacagaggttgaggtctcaaatctgccatccttgctgtttccttttaaagtggaaatagcactratctcacatgagcattgaggttaacttagatttcatgaaaggtaataacatttgtctattataaattttatataatattatatatatataaaccgtagctgtgtgttagtcttcagggcaaaaagcttccctttcgatttttggaggtccactttcctgtgttctctctcactgtctgtctctctctcctgcatgcatttgcctccccagtcctgccccacccataaaaggat

SEQ ID NO: 485715 - DNA, 637 bp, Homo sapiens
gaaagttgttgggcatgtggctagaggctatcatattgaacagtgatacgctttcaatgtgctcagaaaattgctcagctaagtataagtgggtggtttgatatggattttgaacatgccagaaactcccttctcaagtaagagggaggaaatttaaagcctaaaaagatagagaaaatatacaatctattgtagagacagaatgtgaatttgggaataacatttttatattttctcagccacactttaattaaagtgtaagcacctttagtaaaaataagaaaatagtaagatcaggttcaactttggagctaaaaggaaagctgtgtaagatggagagcacagaggttgaggtctcaaatctgccatccttgctgtttccttttaaagtggaaatagcactgatctcacatgagcattgaggttaacttagatttcatgaaaggtaataacatttgtctattataaattttatataatattatatatatataaaccgtagctgtgtgttagtcttcagggcaaaaagcttccctttcgatttttggaggtmcactttcctgtgttctctctcactgtctgtctctctctcctgcatgcatttgcctccccagtcctgccccacccataaaaggat

SEQ ID NO: 485716 - DNA, 571 bp, Homo sapiens
agtgttagggatggaagcatgtgatgccagcccaggactgtggccacagcaggtggcaggaggggacacggacctccccctggtgatggggcccagccaccctcatggtaattgggggttgcatatggaacttacaagaatgacgagaatggggctggtgccaggccatctcctagcatctaggggaccatctccaacacagagcagaaaaccagtttgagaaaaccggggaggtgcacaaattggggcyagcacacccaagctccgtctgctggtgttggacttggactgtgatatccctggaataagagccctcccacacaatgcctcccctaattcctggccctgacccctaggaatggaacctgtgcatccaccccattcaccaccagaacatcaaggcactgcattgcacaaccatctaaatctcctggtgttctgattggtgggatttcaggcaggatgagggaagcagtcatagtgactagtgttcctgactcagtcagtcacctttcctatctcaagagcttctctttgatccaggaaagtgaaaaaaaaaggtaggccttta

SEQ ID NO: 485717 - DNA, 571 bp, Homo sapiens
agtgttagggatggaagcatgtgatgccagcccaggactgtggccacagcaggtggcaggaggggacacggacctccccctggtgatggggcccagccaccctcatggtaattgggggttgcatatggaacttacaagaatgacgagaatggggctggtgccaggccatctcctagcatctaggggaccatctccaacacagagcagaaaaccagtttgagaaaaccggggaggtgcacaaattggggccrgcacacccaagctccgtctgctggtgttggacttggactgtgatatccctggaataagagccctcccacacaatgcctcccctaattcctggccctgacccctaggaatggaacctgtgcatccaccccattcaccaccagaacatcaaggcactgcattgcacaaccatctaaatctcctggtgttctgattggtgggatttcaggcaggatgagggaagcagtcatagtgactagtgttcctgactcagtcagtcacctttcctatctcaagagcttctctttgatccaggaaagtgaaaaaaaaaggtaggccttta

SEQ ID NO: 485718 - DNA, 571 bp, Homo sapiens
agtgttagggatggaagcatgtgatgccagcccaggactgtggccacagcaggtggcaggaggggacacggacctccccctggtgatggggcccagccaccctcatggtaattgggggttgcatatggaacttacaagaatgacgagaatggggctggtgccaggccatctcctagcatctaggggaccatctccaacacagagcagaaaaccagtttgagaaaaccggggaggtgcacaaattggggccagcacacccaagctccgtctgctggtgttggacttggactgtgatatccctggaataagagccctcccacacaatgcctcccctaattcctggccctgacccctaggaatggaacctgtgcatccaccccattcaccaccagaacatcaaggcactgcattgcacaaccatctaaatctcctggtgttctgattggtgggatttcaggcaggatgagggaagcagtcatrgtgactagtgttcctgactcagtcagtcacctttcctatctcaagagcttctctttgatccaggaaagtgaaaaaaaaaggtaggccttta

SEQ ID NO: 485719 - DNA, 498 bp, Homo sapiens
tgtgtgcagatgacacaggcatgcagaacccagtccagatgccaggatccatctggacacttctctcttcttcacctctgacctccagttactcacatctctcaygctttatgtctctgttctccctcttctgtaccctcttccccatttcccctgcccctgcttggctcaggccatcaacacttctggactgatttctgcaatcacttctgaactgggcttcctgtcaaaaatgcccttttattctccctttcatcaaactaatatctgctagtaagtgtgccatttgaggctgttagctctgtgaagacagggtttgtccctgccctgactttagagctccagcttggataagtgtctgtgacaaggtaggcagttcagtgttcagggtaagactgtggctccagagtcagcgtctgggcacaatgaaaagttcctagctatgtgactatggacaaaccactcgacatgcttgtgcctttatttccacacatgtca

SEQ ID NO: 485720 - DNA, 639 bp, Homo sapiens
aaaaggagtatactaggaggtatttcacatgcttgttttgatatatgtaaagggcttagattagggcctggcatactgttggcactaagtaagtgctagtgtttatacaaggcatgaaatatttatttgtatgaatgaatgcataagtcctaatttagctttcgcttatcttgcattgtttcctattgttytgggtcaggtagtacctgataaattctaagtacctggaatcaagagaccatggactttttattcttcacagtacctagaaaactgttgcgcacatagcagacattcaggaaatacttactgattggtttaatgttctagagaagtaagtactccttctaataaaaccctatggtgtgctgagagacccctctccatgtgtcccttgccctgcacacatcttgcaagcagaggccttgaacagccatggaaaatagagattagtaccttcctctgaagcagagggcagccttgtttactgtccagtgtaataaagataaagtctccctctggggcaaaaactgggtcagcttgcttgcaatctgttataaaagattgaacggatgttttaagcctgaggtttctcagctgtaatgcaaaaccactgcaatcttaccatccacatacact

SEQ ID NO: 485721 - DNA, 346 bp, Homo sapiens
cctattcactatgtcattccttctaaagtattactgtcaggtaaccatctggcttctcctggaacgcttttaatgaaaaggggttcacaatatttccaggtcattgcaatgttaaagttcattgttggatgtaacctactttatttggaacaaaaacttatctttatataacttcttcccaatgatcttaactctaccatgtctagaaacacaatttctctccctactgacagctatgatgtctgcctttaatmtttttttagtggaaagcctaaatccctcaatcattaacagtgagatggtttagagactccttaccgcattgatcatcctctgcattagtggt

SEQ ID NO: 485722 - DNA, 545 bp, Homo sapiens
atcgaaaagttggcatactgtggataaagtacattaaaatgagaaaggcaaagttttaaggatatatgaaaatgaaaggatggcaactagtatggtcgaaattcatgtgataaatcgtaataaccaacgtgatagtattaagtggtggggccttgcagaggtaataaagtcacgggggcagagccctgacaagtggaattggtaacattatgaaaggccttgagggagtgagttggccctttctatctctctaccatgtgagaacacagcatttggccctctggaggatacagtgacaagacaccatcttgggagtagagaaccggccctcgccagatactgaacctgragacaaatgccttgatcttggagttcccagcctccagagctatgagaaataaatttctgttgtttgtaaattacccagtctcatgtattttgttataacagcacaaacagattaagacaacagctttctcagagcccaaaacatttataatagtaagaatttgcaaaatcaaacaatgagtaaggcctcaaatgat

SEQ ID NO: 485723 - DNA, 490 bp, Homo sapiens
ggccccctaatatgagtgactaaaagccttctctaggaagacctattttcaacctaggttgcacaggagtcctataggtaatgtgccacccaacatgaactcacaattttaaattacaaaatacaggaaaggcagggcatgctggcatatgcctgtaatcccagcactttaggaggcccaggcaggaggatcacttgagcccaggagtttgagacctgcctgggcaacatactgaaacatgtagagacagcaacatgctgtctccmcaaaaaatacaaaaattagccaggtatggtggcatgcacctgtagtcccagctacttgggaggctgaagtgagagaatcacctaagcctgggaggtagatgctatggtaagccatgatcatgccactgtactccagcctgggtgacagagtgagaccctgtctcaaaaaaaaaaaaaaaaaaaaaaaaagagagagagagaggagagaaaatacagggaaaaac

SEQ ID NO: 485724 - DNA, 561 bp, Homo sapiens
tcatccctttcctcctggaggatctttagcactcggtaagtttgttttgccatgtcagggggatactgaaaagaacatccattgtaaggccacaaaatgttctttttccagtgacatgtatatccactcacctaatattggcatacttaagagtatgcagggaggctggatgcagtggctcacacctgtaatcccagaactttgggaggccgaggcggacggatcacttgaggtcaggagtttaagaccagcctgggcaacatggtgaaaccctgtctctactaaaaatacaaaaattagctgggtgcagtggtgtgtgactgtaatcgcaggtacttrggaggctgaggcaggagaatcacttgagcctgggaggcagaggttgcagtgagctgagattgcgctattgcactccagcatgggcaacagagcgagactctgtctcaaaaaaaaaaaaaaaaaagtatgcagggaactaccaacgcagatccagggaattcatatcttagtctatcttgctgcttctccagcttcaaatgggacatgagtcacaacctggaa

SEQ ID NO: 485725 - DNA, 561 bp, Homo sapiens
tcatccctttcctcctggaggatctttagcactcggtaagtttgttttgccatgtcagggggatactgaaaagaacatccattgtaaggccacaaaatgttctttttccagtgacatgtatatccactcacctaatattggcatacttaagagtatgcagggaggctggatgcagtggctcacacctgtaatcccagaactttgggaggccgaggcggacggatcacttgaggtcaggagtttaagaccagcctgggcaacatggtgaaaccctgtctctactaaaaatacaaaaattagctgggtgcagtggtgtgtgactgtaatcgcaggtacttaggaggctgaggcaggagaatcacttgagcctggraggcagaggttgcagtgagctgagattgcgctattgcactccagcatgggcaacagagcgagactctgtctcaaaaaaaaaaaaaaaaaagtatgcagggaactaccaacgcagatccagggaattcatatcttagtctatcttgctgcttctccagcttcaaatgggacatgagtcacaacctggaa

SEQ ID NO: 485726 - DNA, 561 bp, Homo sapiens
tcatccctttcctcctggaggatctttagcactcggtaagtttgttttgccatgtcagggggatactgaaaagaacatccattgtaaggccacaaaatgttctttttccagtgacatgtatatccactcacctaatattggcatacttaagagtatgcagggaggctggatgcagtggctcacacctgtaatcccagaactttgggaggccgaggcggacggatcacttgaggtcaggagtttaagaccagcctgggcaacatggtgaaaccctgtctctactaaaaatacaaaaattagctgggtgcagtggtgtgtgactgtaatcgcaggtacttaggaggctgaggcaggagaatcacttgagcctgggaggcagaggttgcagtgagctgagattgcgctattgcactccagcatgggcaacagagcgagactctgtctcaaaaaaaaaaaaaaaaaagtatgcagggaactaccaacgcagatccagggaattcatatcttagtctatcttgctgcttctccagcttcaaatgkgacatgagtcacaacctggaa

SEQ ID NO: 485727 - DNA, 536 bp, Homo sapiens
gaaagatcaatgactgtttttcagagttttattgaaagtgcattatggattgtcttgcttttaacattattacttcattgaataacgatatatgagtagactaaggggaaaaattagaatctagctatgyaaggctatctgtgtgataggatgggaattacatagtaaaatggcctccagagaaaacttcaatctcacccattccctctacacagtgcaaatagattggaagttgggaaaacaaaatgaatgaagtttgtctttgtgccccacttatctcctttttgttgcacccctgtctaccttctgatgtcccttcatagttacccactggacccctgtgctgctgtcctgctacccaaagtccactcccactcacaactgctgcatgtcactgagatgcataattcacataaattttcccaagtgccataaagatctctcctgcaatcacaatcccctttcacacatcccatttcttcagtattttgatctcagtcaagccttagaaagaaagcaacctaatttaaccaatt

SEQ ID NO: 485728 - DNA, 617 bp, Homo sapiens
ctggaaaataagaactactaatcatatgccatcacatagaatcaatggaaaaactcattctgaaccacagtattaacagctatccctattttaaggtgaaggaaccaacattaaaccgcaatttttcctaaggtcagttttggatgctgtggaatggcatgttttttcaaggatttctaggctatttcaggtaaccatgtggctaaaataatctggttttatcattagaattaaaattaatatatcgactagccatgccacagattatcaaatagagcctaattatgacatggcatcaaagatctctttccttcttatatgtttcctagttactgaaatgcactcctaccaaaaagctctcagtcccaccacaaaaagagcagagcctgaacattttcatggacatccgttattttcatagtagtatagtcctgatgattcaacaattccccagttagttgacctatacaggtatgggaacactggctttagcaagttctatttctgaaaacaccataggctaattaatttgccttatatgtactaaccctgattttcatsctgccccaatcaaaaaaatatctattaattgcatagagcagtttagagagtgcact

SEQ ID NO: 485729 - DNA, 562 bp, Homo sapiens
ttttccataaggcaaaccaaagcatattttataaagcaagaattgtctctgctgaatactcaacaaggcccctaatgggcccaattcttcrccaatataactctcacagacgggatttgctctttctgcaacacattcactggcactaatatttcattaggctattcccgatcaatattcctgccatgactgtctaaaggcaccactgagaaggaagtatctggaagacttttcagcagttggatccttctaaggacaaagtgaggtgttatattgccacttaagaattcaaaggtaaataaaggaagatacctttctacttctagttactctctttgagacaaaccagaggagcttgtcattatagacaaaattcttacccacaaatctctgaggggttttcataatgttatattctaaccctttcaagctagagttgcttctaaaggtcagaataattacatccagtccccagcccaagtatcagtggttatagttgctagaccaccctgagccaacaggaatacagtgggaggcatggcaaataggtaaggaacagctt

SEQ ID NO: 485730 - DNA, 562 bp, Homo sapiens
ttttccataaggcaaaccaaagcatattttataaagcaagaattgtctctgctgaatactcaacaaggcccctaatgggcccaattcttcaccaatataactctcacagacgggatttgctctttctgcaacacattcactggcactaatatttcattaggctattcccgatcaatattcctgccatgactgtctaaaggcaccactgagaaggaagtatctggaagacttttcagcagttggatccttctaaggacaaagtgaggtgttatattgccacttaagaattcaaaggtaaataaaggaagatacctttctacttctagttactctctttgagacaaaccagaggagcttgtcattatagacaaaattcttacccacaaatctctgaggggttttcataatgttatattctaaccctttcaarctagagttgcttctaaaggtcagaataattacatccagtccccagcccaagtatcagtggttatagttgctagaccaccctgagccaacaggaatacagtgggaggcatggcaaataggtaaggaacagctt

SEQ ID NO: 485731 - DNA, 619 bp, Homo sapiens
gattattcagatgttttatctgaagaactattgaaattcctgggagggggcttcatccttactctagaagtgcaggggttaaccaagagcctcctggacccagagacgcctgcgacgcccctcccagagtgagtggtctgggcacamggactgctctggagcctggctggacacctctggaagaagagctgtgttgtgtcggctttgcagaaaccactcccgttcctcctccagggccctgtcaatgtcagtggtgcctcttggagttgtgccacatggtggccctgtcccccttcccagggatcctcctgagctgacagggcagctcccttctctgggaggcttcctgctcccctcctgtttgccgggcatccattcctgcgccgttgctccccaggcctctaatggcctccatggagcatctttattgtgcagccgtgatttatgggggccggccagatgcagccaggcccagagtgcctctgcaggggctttcccaccccggtgtgctcaagaggaggagttaaggaagagtgttttcacacagggagcagaagagcttgttacaaaaggctccaagcgtttcgattctcatcagtgaatccatattcagaggccc

SEQ ID NO: 485732 - DNA, 456 bp, Homo sapiens
ttttgtgaagaatattctatgaaatttgtcagagaggcagaagggagatgaagagttcaggaaattaagtgaagaaagaaaagttcatgaaaggcagaagagkcagtgtcaaagttcaaacagaataaggacttcaaagtgtcctttggatttagcaaataggaattcataataattcaaaattgcattgaatacaagagaatatgcagagataatgaggtagagcagaatctgaggattcaggaaagaagaaaataagtgttgtagtgaagtttctaattgaaacaaatggaatgtgaaccggaacaactggagaacttagcttgagcgaggggagaaatatttctgctatggagacaaaaagtaagaaaataaatagaagtgctgaattgcaagtatatttctggggaagagtagaaagaaaatcaagagaatttttacatgatggctcctttt

SEQ ID NO: 485733 - DNA, 488 bp, Homo sapiens
ggtgttgtcacctctacgggcttatccggtttttgcacgtaactctgtgatgggctcagcctggctgrggatccttaatccatcgagttaactgttaactaccccggccccagtgacacagcagcttgcatgattaactacagcccgggagggatgatcatttgtgcaccttccgtctccaaacctggctccctccccagacttgatagctacaagctctgggctcaacagtttgtgggtttgtgttgcaaggaggctaataaaaacatatttctcaaataccatatggtgagggcaactgcaacacatcctcctcgaagagcaataaaatatatatatttttaaagtcctgaattccaggggaaaaacgaggcttgaagacttcagagggtttacaggactatccccttcagtgtcagagccatcttgatcaaaagtctaaaacccaggaataggaaattggtagaaactttgagagagcctctgac

SEQ ID NO: 485734 - DNA, 488 bp, Homo sapiens
ggtgttgtcacctctacgggcttatccggtttttgcacgtaactctgtgatgggctcagcctggctgaggatccttaatccatcgagttaactgttaactaccccggccccagtgacacagcagcttgcatgattaactacagcccgggagggatgatcatttgtgcaccttccgtctccaaacstggctccctccccagacttgatagctacaagctctgggctcaacagtttgtgggtttgtgttgcaaggaggctaataaaaacatatttctcaaataccatatggtgagggcaactgcaacacatcctcctcgaagagcaataaaatatatatatttttaaagtcctgaattccaggggaaaaacgaggcttgaagacttcagagggtttacaggactatccccttcagtgtcagagccatcttgatcaaaagtctaaaacccaggaataggaaattggtagaaactttgagagagcctctgac

SEQ ID NO: 485735 - DNA, 600 bp, Homo sapiens
tgtctggatttttcccgtgggctaccatttactaatccctgaacctccagaggaagactgaccaatcctctgcctggcagttcccaagaggcatctcacactcggaagtcactaaagaaagtyaggaagagcacagacctcttgctagaccagaaggaagagaaagaaataaggaatatctggacctgttgaggattcagtgggataaaatgaattgatgcctcactttacaaaaatttccaggtcttctctgtcatttttctctgcacttttagtaaaattttggagactgtggaaaacctgaggttctctctgaagacatctcctcttagaaacaaattcctagccagcgtggtggctcacgcctgtaatcccagcactttgggaggctgaggcgggcggatcacttgacgtctggagctcaagaccagcctggccaacatgtagaaaccccgtctctactaaaaatacaaaaaattagctgggcgtgggggtgggcacctgtagtcccagctactcaggaggctgagacaggagaattgcttgaacccatgaggcggaggttgcagtgagctgagatcgcgccactgcactccagct

SEQ ID NO: 485736 - DNA, 630 bp, Homo sapiens
agaaagaaagccggaagttctcttcaagacaagcgtgatcctatcacctgacaacgtgtcacccrtttctggaaaatccacgggctgtggtactgtctccttgttcccataagcggagggttcaatgtgaagcctgctctgatggcagccaggtaggagaagtctgggagtcacgatctaccctcagatgttatcaccattgcaggagccggggcaggaagaaaagatgctgggagacctggggacaccacccctgggagtccattatgccagactgggaagtaacctgtatttggcttccaggcatttcagggctttaggtgatgatgtgatggatgacagggtttcataataagggagcaaaccctccatgagagtgcctagcaagcactgtatgtcattatttgtggattcccataaattgaatcctctagggtctggacaatgaaatctagaatttctggagtgctgtgattcccagtgagcttatcctaaggcaggactgaattttcttacaacatccaaaaggagaaagacaagagtcaacacttttgcaaagaagggatttagtatccagggagatccaaactcctcaactgcagagacaatggtgtctccctttcctgcagc

SEQ ID NO: 485737 - DNA, 649 bp, Homo sapiens
tgccactgacacgaacccaagcccaagtgcacagggtggggtgagagaggcctggctggctggctgggcggcgagtccagtgacgctgacacrctgtttccagccaccgggaagccagtgccaaatccctcttcactcctccctgctccgatattcttgactctgccgtggtgccagctaacttcagggggcattctgggaatcgtatttggcaggcagcacaggctgtatcctcacccatggttaagggcttgtcagagcccaggtgacattttaaccaatgctcgtggcctcccaggttaggccacaaggaaagctgctgctcagcactaccaatgttgaaatatcaatattctaggaacatacctaggcactcccttcctgccagcatcctcactggaattcagaataaaagcccaaacccatcatcgtgcatctgcacgaagcagaaggtgtccacggcactttatcaacagccaggagctgcctgcttcatgcacagaggaggtgcacaggcgggcagaaaggtcagaccagggttaagtgcacgccctgttggactcgcccttcctctctcctgcacctaagtgctgtctggcagggactccaacttctgagttccttaaagtgagacgccccatgatggctg

SEQ ID NO: 485738 - DNA, 596 bp, Homo sapiens
ttgatttattcatttgggttgatttatctgtctccttactgaggcacaattacttgttttgtacttattaataaaagtagagagcaatgagcaatcaattatgagttcccttgtatatatgcamgaattcctccaggtaagatatgtacaagtgtacttgctcagtccaaatgctcgtgcatctgcaaagttaacatattaggttggtgcaaaagtaattttgccatttctttaatgcaatgtaaaaacaacaattacttttgcaccaaactaatatattgctaaattcttgtctgaagtagttgtgccaatttattgtttggtagttttatatattctttccccagatcttcattagcaattgttaccagtgtttttcaatttgtaaaaatctgggtggtatgaaatagtgcttaattcttattttaatttccatttccctgaataggtaaggtggaatattttttcatatattttttgaccagtactgtttctctttgatgaattagacacttagctcattaacttgcaggttatcttctttcctacgtaatctatttaaagctatatattttaagtgtaaaaatttttaaatt

SEQ ID NO: 485739 - DNA, 517 bp, Homo sapiens
gctgtgggggactgatgcatactgttgaggctgatcttactctgtctcctctctatgtaagtaaagctttgttccatccagtgtttgcattgtgtttccctggctactctaataccagatgcaatggtcagaagtgtttagagttctgccctgggtttggtaaccagtgcagggtgttctgcttagcagatttcatgaacacagcccacagtcagccacggaaaactcatcctgagctcgccataaactaaaactcttagttctttttcacatatttctcttgacacacaaataactgctctttggatacaatgtggcataaaagttatacttgttatagtattaatgcttattaaaaaaataaaacaactacttgcttaaatttctaactttcaactatgtattttatcaayaaccaataactatctgatctgatcccagaagctacttatactgggtattattgaaacacaaatatttggattaaagtccctacactgaatacctgtctttcttt

SEQ ID NO: 485740 - DNA, 577 bp, Homo sapiens
tttgagtgttgaggatgcagaaggagaagcctgaaatccaacttaaaataattatataaaattaagtagacaaggtcccactaataattatcaaagcttctattgggtttatgtaatttttttctaagaaatgaacatacattttatatatcatatatattaattttttatgttctttcattgtattacatagaaaattctatgtaatttcttcctcrgtgccatggctccctgacatacatgaccataatgacacttatttgtttacttagctttctaacagggagctattaaggtcaagaaaaattgtttagatagcatattaagcacttgtttaacgttgcttatgaaaatatatgagacctgaaaattagatcaactccacctctaaccatattaattggagatcattttctttttatgtcttgcaaaccaagaatatataagagtgaaagatgctttctttgggaggtttgttttgttttttatccattattgtttaccttaactggaacataaacatttcaaaggaaatcaactgaatagggggataagtctagacatcgagtgaggagtt

SEQ ID NO: 485741 - DNA, 581 bp, Homo sapiens
ctgaagatttcagctattataattatcagacataggatggaaaataaacattgttaatttgcatataacaatacaggaggggaatgaaaatataactaaagagcaacagagcacaacataaatttgaaagagagccaaagagaatgcttaaaagtgaacataacaattaaaatttaaaacagtgggtagattttaaaatagattagacaaagctgaagaaagaattaatgaaatgaatcaaagataygagaaagttacctatactgtagttcagagagaaaacacatggaaaatatgaaatatattgatgtgttcatatatgtgtgttctagaataccagaagatgacagagtggggaatggagaaggggcaagaggcaatattagagagttaatagctgagaatttccaggattgtagaaagacactagttggaaagtacagaaatgccaatcaatcttgagcaagagaaacaaaaagaagtatatctacaccttgatcattattgtgaaacaactgaaccccaaaggcaaaaaagcagtcatagcaaacagactcatagagaaataaaaatcagactga

SEQ ID NO: 485742 - DNA, 581 bp, Homo sapiens
ctgaagatttcagctattataattatcagacataggatggaaaataaacattgttaatttgcatataacaatacaggaggggaatgaaaatataactaaagagcaacagagcacaacataaatttgaaagagagccaaagagaatgcttaaaagtgaacataacaattaaaatttaaaacagtgggtagattttaaaatagattagacaaagctgaagaaagaattaatgaaatgaatcaaagatatgagaaagttacctatactgtagttcagagagaaaacacatggaaaatatgaaatatattgatgtgttcatatatgtgtgttctagaataccagaagatgacagagtggggaatggagaaggggcaagaggcaatattagagagttaatagctgagaatttccaggattgtagaaagacactagttggaaagtacagaaatgccaatcaatcttgagcaagagaaacaaaaagaartatatctacaccttgatcattattgtgaaacaactgaaccccaaaggcaaaaaagcagtcatagcaaacagactcatagagaaataaaaatcagactga

SEQ ID NO: 485743 - DNA, 726 bp, Homo sapiens
atttaatattttcagagatgattatgatgagttcctgaatttgaaccagcctccagtgaatgcatcctggaataccttttgctttcttttagcctagagtttatctgttttcacatgacatgaaaatagcatgacctgggtaattcatttgacaagtatttacctaggactcgtaagtgctttttattgttacaagtagaagaagaccatgccattaygcttgtaggtctttaaaggacctacaacctagttggaaataattatagaatgggattagatagtatatatcatgatatcaacttactcatattaaagaccctactttgtctctttttctattttttaataatgccttagataaaaagatgtaagggatccttgttaaatacctgggagacacaacgctgggagtgagaaatggaagactaatatattgacgatagatagtgatccagtaaacaagagcattgtgctgaaactaacaagttgaaattaacaagaataaatagaaagccttgcatttagtttcaaaaatccagtagcataattacaggatgggagaaagctataatgtccacattcaaaaaaagtcttgttgactttttatttaatctacaccgtcagttagtatcttaaaatactaccgagaaccaggcaccatgtaggcactgggggacctcaccacctgatgcacctgcaaacacagatctattggtctctaacgtg

SEQ ID NO: 485744 - DNA, 726 bp, Homo sapiens
atttaatattttcagagatgattatgatgagttcctgaatttgaaccagcctccagtgaatgcatcctggaataccttttgctttcttttagcctagagtttatctgttttcacatgacatgaaaatagcatgacctgggtaattcatttgacaagtatttacctaggactcgtaagtgctttttattgttacaagtagaagaagaccatgccattatgcttgtaggtctttaaaggacctacaacctagttggaaataattatagaatgggattagatagtatatatcatgatatcaacttactcatattaaagaccctactttgtctctttttctattttttaataatgccttagataaaaagatgtaagggatccttgttaaatacctgggagacacaacgctgggagtgagaaatggaagactaatatattgacgatagatagtgatccagtaaacaagagcattgtgctgaaactaacaagttgaaattaacaagaataaatagaaagccttgcatttagtttcaaaaatccagtagcataattacaggatgggagaaagctataatgtccacattcaaaaaaagtcttgttgactttttatttaatctacaccgtcagttagtatcttaaaatactaccgagmaccaggcaccatgtaggcactgggggacctcaccacctgatgcacctgcaaacacagatctattggtctctaacgtg

SEQ ID NO: 485745 - DNA, 643 bp, Homo sapiens
agtttaaaagcatgctttgtaattttagaccaaaagaagtaaaatcactggtgccagatgccgatactataacccaaatcttttataagtcagaggcagagaaagtagaagtcctctgcasacctccttgtctaactgtgaccccaaacctcttgtcctgaggcagaggcagagaaggcagttctctgcagagatctttacctgaatctcctgtccaaagactgagactgaagccctcactcctaagggaaagaaatggtttgaaaaccaacctaaataaaatctagacctcaactaaatataaaaggaaggtctggatctaggagcactcacctttttgcatccagtcaaacctctggagttagaggaacatgttaggttcatgctgatactgagtgctgagcctgagagggaacaccaggtggtaaggaggaggtcactgtgagtcctgtccattttctccagataatgttgacagaaaggaaaatgctgaggcaaaattaatgtaagttgagagtctctttgagccaacttcaagaactgtaacccaggaagatagattcaagctgcccttaatatatgctctgattttacagcagttacaagtgggtttttgaaggaaaaaaagaagaggcagtttcta

SEQ ID NO: 485746 - DNA, 563 bp, Homo sapiens
gtgtggtatatcctgcctctaatcccagcactttggaggccaaagtggaaggatcacttgaggccaggagttcaagaccaagctgggcaactattagggagaccttatctctacaagtctttttttttaattagctgggagtagttacacatgcctgtggtcccagctactcaggaggctgaggtgagaggactgcttgaacctgggaggtcgaggctgcagtgagctatgcttgtgccactgcactccagcctgggcaacagagcaagaccctgtgaaggacggaaagagggagggaggaaggaaggagagagaaagaaagaaggaaggaaagaagaaasgagaagatctatatgtagcaatatagataaatctgaaaacataatattgagtaggaaagttgacaaaaagatacctaaagcacatatgttaccatttcagtagatttttcaaacataaatgtttatagatttacctgtatgtaggaaaagtattaaaaacatgcgtggaaatgatacacagtaagtgcagagcagtacttatccctggtagagtggaggagg

SEQ ID NO: 485747 - DNA, 472 bp, Homo sapiens
atcctgacctctctgtgccaatatcccaatatccaaaatgggaatggtcatcatgcctacctagtagggttattaaaagaattaagcaamataatgctcatgaagcgcttagcatagtgcctgacatacagcaaggacctaataaatgctgggggagatgtagtatttagatactagtgaatcagtatcagattatatagacaagattttccagttacatagcagaccttgaaaaaatattctcatgatctccacttgattttttacaaacaaacaaaaacaaacaaacaaacaaacaaaacaattgaaattgtctagagctaaagaggacagtttttccaatggaacataggcagagggcaaactttggtctttatttagctgaagttgtcaaatatccaaagattaggtgttggaggtgccctgaattcacttcatgagggcaatcccaagagtcactcgatgtcacaga

SEQ ID NO: 485748 - DNA, 472 bp, Homo sapiens
atcctgacctctctgtgccaatatcccaatatccaaaatgggaatggtcatcatgcctacctagtagggttattaaaagaattaagcaaaataatgctcatgaagcrcttagcatagtgcctgacatacagcaaggacctaataaatgctgggggagatgtagtatttagatactagtgaatcagtatcagattatatagacaagattttccagttacatagcagaccttgaaaaaatattctcatgatctccacttgattttttacaaacaaacaaaaacaaacaaacaaacaaacaaaacaattgaaattgtctagagctaaagaggacagtttttccaatggaacataggcagagggcaaactttggtctttatttagctgaagttgtcaaatatccaaagattaggtgttggaggtgccctgaattcacttcatgagggcaatcccaagagtcactcgatgtcacaga

SEQ ID NO: 485749 - DNA, 571 bp, Homo sapiens
taatttctaaaaagtttcattcagccttttctttagggaatatggtgggagtcatggcctttcatacagggctgaacattttttgtttaagttattttctatgtaaaccgctcttcatttattcaaatacaataaataaggagagcaatggtgtactctgatacttgaaaagaggagatctattctgatggaaacctttgcttgcttccatcctaagggtttaggtaaaagaattcttatgtatttccttctggattcaaattacatgaactttaygagtccatacacctgtttcagacaggctttgttctcgcaggtatagcgagagaaatgcaataaatgaagaaaggtctaaatatactttgtgatgtactctggttgttgtttcattgaacacttgcaggctagtcactgtgttaagtgcagtacctaccaggatgaataaaacataaccttggacttcaagagtttgagtcacctctgagaacactctgatgagtgactggaagaatgaaacagtgtggcttagagcaaagccatggctacctctgtctttgcagttaccaggccc

SEQ ID NO: 485750 - DNA, 503 bp, Homo sapiens
agttaagtttaatatcatcctcttctagcattgagactagagaggttgagaatcctgggcacttagcatggactaaacacagccatgaactttgagtcatcttaagcaggtaggttatgggggtttgcagggatgtgcaaagtctaacaaatagcaattggtttatgggtcagaaagtggctaatggctgaagagctcaaagakttgatgagttaaagccaagcccagctttccagcagcccaagaatatacccagaatagggcaggagccctatcaaccaggtgtgggaatctctgtgggactcaagggagcatgttcccagaagcaggggtttccccaaagagcatgtaagttgtccttgctcatgactgttatccacttggtgcttgcttttgtatggatacatgttagggaaatagtgtgttgcaaagagggctggatgccaattgacgttctctagctacctttgataggagccctggagtgagccaacaattgagga

SEQ ID NO: 485751 - DNA, 503 bp, Homo sapiens
agttaagtttaatatcatcctcttctagcattgagactagagaggttgagaatcctgggcacttagcatggactaaacacagccatgaactttgagtcatcttaagcaggtaggttatgggggtttgcagggatgtgcaaagtctaacaaatagcaattggtttatgggtcagaaagtggctaatggctgaagagctcaaagagttgatgagttaaagccaagcccagctttccagcagcccaagaatatacccagaatagggcaggagccctatcaaccaggtgtgggaatctctgtgggactcaagggagcaygttcccagaagcaggggtttccccaaagagcatgtaagttgtccttgctcatgactgttatccacttggtgcttgcttttgtatggatacatgttagggaaatagtgtgttgcaaagagggctggatgccaattgacgttctctagctacctttgataggagccctggagtgagccaacaattgagga

SEQ ID NO: 485752 - DNA, 546 bp, Homo sapiens
ctgacatgcagaaaaagaattagcccaatactgtgtggctccatggggattaggcagaagttatagggatgcagattttggttacagcatctgttcacaagtgaagagcatggccttgggttagaaagtgccttgtcatattccagcrcaggcagatgtgcatctgtcagggcacatgacataatgcagaaaacacttagcacagtacctgggcacgtcacaagtgctcagccaatggaacaaaatagttggacaggggattcttctgtctttggggaatatgtgatagatcattctagaattctaaagaacaggaactcttgcccatatttttatccctcctctccatcactgagcttggcatatggttggtggtctttaaatgtctaataaatgaatgagaggtttgtatcatctccaaagtgtacattaataattatgatactaaaagaatcataagccttcactgtccagaaaagaggaaagatggcagaaaaacagaaaaactactcaaaaggtacacaaaaacaaaggcttttgtgtcac

SEQ ID NO: 485753 - DNA, 538 bp, Homo sapiens
tgtggctactgggccagctccttcagcagtgttgtgggtgcgtggataagaataagaaaccaggtctcctaggctttcattttaaagaggagagaattgaacacctgtgaggtgaagtgatttgtccatgattatacagccagttactgatttacagacagcaatgaaacccagggctccttattcctctatagtccamaccattttgccttaaaaaaaaaatcaccaaaggtttattatatctgtcccacttttctagcacttctccttaattaaagggaagaaggacacccttaggttgggaaaccgaagcaaaggctgacttgcacatcacagaaatgcatctaagttttctacgttactattcagtaattcagtaggttgtcagtttgacttcttttctactgttttattgagatataatttacataccatacaattcatatttttttttttttgagatggagactcgctctgtcacccaggctggagtacagtggcacaatctcggttcattgcaacctccacctcctgagtt

SEQ ID NO: 485754 - DNA, 597 bp, Homo sapiens
ctgacttggaaactcagagaacgatcttgcatcaagttctccacctacatctagwccaaccattgagaacctgaagatgaagctggttaaactcagtgctaaaggcatcagggcctggatctcagcaccaagtggatcactcaacgttaccacccaaatcaccaggcacatcagtcttgatggaaaaataacaggacttagagtctaggactcaccttagccatgtctctaactgatgtgtgactgggcccaagttatttaccctctctgaacctcagcagctccatctataaagcagtgataataattcctacctcccagggggctatgtggagatacaacaaaacagtatataaaaaattatccataaagtattagttaatatagaaaggcatccacatgtatattcttcagccacaggctgcaccctcagccctacaggtaagctcaaaggagaccaggtcagagatggtgaacctgcctgtacaagccactgccaccattggccagtctccacagagcttgtgctgtggacagttggtgcatcagataacatggaagggacaccttaagcagtagaaatgctctgttgttatg

SEQ ID NO: 485755 - DNA, 597 bp, Homo sapiens
ctgacttggaaactcagagaacgatcttgcatcaagttctccacctacatctagaccaaccattgagaacctgaagatgaagctggttaaactcagtgctaaaggcatcagggcctggatctcagcaccaagtggatcactcaacgttaccacccaaatcaccaggcacatcagtcttgatggaaaaataacaggacttagagtctaggactcaccttagccatgtctctaactgatgtgtgactgggcccaagttatttaccctctctgaacctcagcagctccatctataaagcagtgataataattcctacctcccagggggctatgtggagatacaacaaaacagtatataaaaaattatccataaartattagttaatatagaaaggcatccacatgtatattcttcagccacaggctgcaccctcagccctacaggtaagctcaaaggagaccaggtcagagatggtgaacctgcctgtacaagccactgccaccattggccagtctccacagagcttgtgctgtggacagttggtgcatcagataacatggaagggacaccttaagcagtagaaatgctctgttgttatg

SEQ ID NO: 485756 - DNA, 518 bp, Homo sapiens
acctgtgtggctgacaaaaccttggccacctgatgtttaatagcatattgtacatcctcccacaacgacaarcagggtgaagtcttacctctggcaccacaccaacggtaagttagaatactttaaaaaatatttggcccctttaaaacaaaattcacacatattttacttcctttctctaacatcccagtgggatcaggagaaaagctattaaattagcatctcaactttggcaaagacaagatttgttcaaagtcataaagctgcttatgagacataagaaccagtactcacttggttagaagtcagacaagaggatacagcaggaaaaaaaaaaaagtgacctgaattgaatatttcctgctgatattcctgaaaaccacaactagccttgagcaatcaagggatgaccataataacactttaagatgcttggttgaaagtcaaattatagaaatacagtctcattttcattaattcattcatccaatggatatctactgaacacgttctacctg

SEQ ID NO: 485757 - DNA, 518 bp, Homo sapiens
acctgtgtggctgacaaaaccttggccacctgatgtttaatagcatattgtacatcctcccacaacgacaagcagggtgaagtcttacctctggcaccacaccaayggtaagttagaatactttaaaaaatatttggcccctttaaaacaaaattcacacatattttacttcctttctctaacatcccagtgggatcaggagaaaagctattaaattagcatctcaactttggcaaagacaagatttgttcaaagtcataaagctgcttatgagacataagaaccagtactcacttggttagaagtcagacaagaggatacagcaggaaaaaaaaaaaagtgacctgaattgaatatttcctgctgatattcctgaaaaccacaactagccttgagcaatcaagggatgaccataataacactttaagatgcttggttgaaagtcaaattatagaaatacagtctcattttcattaattcattcatccaatggatatctactgaacacgttctacctg

SEQ ID NO: 485758 - DNA, 448 bp, Homo sapiens
agcagggtgaagtcttacctctggcaccacaccaacggtaagttagaatactttaaaaaatatttggcccctttaaaacaaaattcacacatattttacttcctttctctaacatcccagtgggatcaggagaaaagctattaaattagcatctcaactttggcaaagacaagatttgttcaaagtcayaaagctgcttatgagacataagaaccagtactcacttggttagaagtcagacaagaggatacagcaggaaaaaaaaaaaagtgacctgaattgaatatttcctgctgatattcctgaaaaccacaactagccttgagcaatcaagggatgaccataataacactttaagatgcttggttgaaagtcaaattatagaaatacagtctcattttcattaattcattcatccaatggatatctactgaacacgttctacctg

SEQ ID NO: 485759 - DNA, 585 bp, Homo sapiens
agaataacaacctggagaaagccagtcattgctactccactgtccttatggttctctgatggtctgatgagttcatgtagattccacatgtgtcckggaaactctcaggatatggttgaagtcctacctaactctcactcctgatcctggaaaccacagagaatgaaaagaaccttgagtagtcatgtggcttctcagtcttacttctcataggaaaccttacactcattatcccagagaaaccagaaataagaccttgagggaaggttctctccaaaactcgttctgatgtgcaagtcttactaaacaaacaagaaacaaacataaacttgtatgaaatctgtctcccctgctctatatgtgtgatgtgtgtgcatgtaagtgtgcatatctgtatacactggtcattattctctgatacgaaagttaaaacgctcctatcaaagaaaaaacaaaaatcaacgaaaacagaaaatgataccactataacatctattctaggcagtccattcttcccacatgttctgggttgtcccattttctatctcgttttctaactctagctgcactctcctatgaaccttt

SEQ ID NO: 485760 - DNA, 518 bp, Homo sapiens
gctagaataacaacctggagaaagccagtcattgctactccactgtccttatggttctctgatggtctgatgagttcatgtagattccacatgtgtccgggaaactctcaggatatggttgaagtcctacctaactctcactcctgatcctggaaaccacagagaatgaaaagaaccttgagtagtcatgtggcttctcagtcttacttctcataggaaaccttacactcattatcccagagaaaccagaaataagaccttgagggaaggttctctccaaaactcgttctgaygtgcaagtcttactaaacaaacaagaaacaaacataaacttgtatgaaatctgtctcccctgctctatatgtgtgatgtgtgtgcatgtaagtgtgcatatctgtatacactggtcattattctctgatacgaaagttaaaacgctcctatcaaagaaaaaacaaaaatcaacgaaaacagaaaatgataccactataacatctattctaggcagtccattcttc

SEQ ID NO: 485761 - DNA, 591 bp, Homo sapiens
actctagctgcactctcctatgaacctttcttcccagattgtcacaagtctttttttaagtggctaaggtcagcttaagataagccattaggtagggggcgtggttaatccttaggtataggggaaacccagcttaagtttctctgcatgatactttttaaccgatgcatcgtaggtccttgctttcttcggtaacccaagagctagcatgctgagtcaccgtcagcttgttacctrttaggactccacggtctaggaagctgctaccatctgagtggaagacactaggtctgagagagacaggagtctcaggtcttatcccacctccagtctccccctagatgggtgaccctagacaaattcaacttgtgctgggaagaggagcctcacaagacctctccttttacagataaacttcatcgagtgacttgtccacagtcacagtgaacctctccatgactcttgtccctcagttactggggaaaaggagaaagaacaatcacatttggtttctcaggatgttataggtcaaatgagataaatatttaaggatttggcaaagtttaaagctctaaaatatgaggcagtgac

SEQ ID NO: 485762 - DNA, 458 bp, Homo sapiens
tagattgaggctcctatataaggaggaaactgttctggttttctcttccttggccaatttggaaatctaggagggcagtggaaacttttaggcagatagaaaaagyggggctaggagggagagtgacttatgatggctttgggggcactctggcttcccctccgaccactgaggggacccagctcctctgctggctctgctacttcagggctggccctctcagaaggtaacacctacccctaatcacatcctcattggcttgcagtatgcaggcctaccctgcatcaactcactggaatccatttataacttctgtgacaagccatgggtggaaagtgaggcccccttcccccaggtaaaaggctaggatccagaccctgcatcttccaggcccctaggagggacttctggaccccaagatgcagtaagcccttcttgttttgtaaaaatgaaatttc

SEQ ID NO: 485763 - DNA, 564 bp, Homo sapiens
aaaaccagaagacagcaccctcaggacagagcctatttctgcaggccctgccatcttcttctcacatgtgtcaatcctgagggtcaagttctttccttcctctcctcctccacatgaaaatctgttttcaatctctgtctatattggagctaatggacctgaaagagcctagagtataaatcctcccaagatgactggaatttgcataaggatcaaatctcaggctagaagatgacagcactgaagatggattcacatactccasaaggcatttagggaggaaaagacttcccagagctctgtaaacagtccagcacctagtaaatatctagcactggtctagacatttacctttaacaaggtgctagtttctagctcttactgactctgactcaggccttgttctttcaaccaaacatctgaaggcttcaagaagttagaaaataaactagaaatagtaggagattcctatttccccacctacactgttagggtaaaaatcatgccttcctgtcctggtgcaagtttgtgagcgccggccgccacccactggcaagatgagta

SEQ ID NO: 485764 - DNA, 291 bp, Homo sapiens
aaagaaaagaaggcttcaaaggagagaaaatccatactgcttgctaaaggggcacaggaggaaggaggagtggggtgacttgcaaattcttggtggatcttgggggagaagttgatctgaggtaatgaagacaggaaatatctccctccgcatgctttgttggctgtttcttgggaatatgcaagtggagacatccagttaacagctccatttacagatcttggcctcataagacagatctgggcctgagacagagacrgaagccatcagcatacatgtgaaacctgaagc

SEQ ID NO: 485765 - DNA, 582 bp, Homo sapiens
tatggagaaatattttcagctccatggctaacagagaatctcaggtcgattgttgaataaatttcccatgtagctgattggttggacttaattcatataattatrccttttctagtaaaggtgtgagtctttctttgaagttataaaagtgtaaaattggctcacacttgaatctgatgagacaaaaatcaatcaagcagaagtcttatttagtggcatcttagcctactgtctagcagagtctgagatgaaatcttgagcacaagtgctttaatggtgactgggagccaagaagcatgaatgggggccaagtgaagggaagcaaagaaggaagtggagccaacgtgatgacagggaatggagcaggcccctgttatgatgactatctgctggattctgtggaaagcctgagaagctacgtgaagtgtagtatagaacctcctgtccagggtaagaaaatgggaagcatttatccattagctcccagccaccatgcatcaaagtttctctccacagattgttaactccatgcattgactaccaagtggtttcttggggtgcctgcctttgtgtccgcggaga

SEQ ID NO: 485766 - DNA, 563 bp, Homo sapiens
ccaatcatgtgtcacatgtgtagaaaatggcaaataagctcctccctgggtgggtttttagtatggtaatgaggggagtttgccaaagttcatctccagctcaggcatctctggatccaaccagtttttgtttttctgggcctgagcttcttcctggtagtttttgagacaagcactcaaggtacaacaattgcaaatgggtactttctcatcgtgtacctgaaaacccagggacaatgggttttgctttttgggtgkgggggaggagagaatttgaaagaacttgagataccagtatctagagacagtgcaggtgcaggtgggagcaactggaatctgacagatcctgcacagacaatccttagtaaataaattccaaaagtatcttgatgaaaattttatcccagataagaagaaatctactctttgtgtaagatgggggttaagttcttgtaccctgacttaagttcagcttggggcttgttatggttacaaatgtccctatttaaccttgcagttaataccggagagtagacgctaggatgagatgtgagggttattca

SEQ ID NO: 485767 - DNA, 635 bp, Homo sapiens
cctcgacatgtagggattacaattctagatgagatttgggtggggacgaggagccaaaccatattacctagaaagcaactgaaagccagagaagctaatcacatacactaagtcacacaactagccagttagcaaaaccaaaactagtgagttcaagttatttatactgcataaatatcactgatacatgcagaggagtgagaagtctccaaacaggaataagaaaaccagctttccttgtcaatccaaaagaacagtgctgactttgaagaaacagctactagggaagtccactggtacttttgtcagctttccaaatgatgctataygctttatatatttttcaattttcacaattatgatccctttgggcataaattgctttaataagaaatttggcatctctcaaaatcacaaggctctcatctttcagataatacctactagaaactgccaaagagtaaaaccactcctttaggtttatcacttctcagtggatactattgacaggccatgggcaaatcccatgttgaagaaccactctggatgtgatgggcgtctcaggaggacctcctggacaggatgcagactccttatgtgacgggcataactggcgtgcatgtgagagttcccac

SEQ ID NO: 485768 - DNA, 688 bp, Homo sapiens
catctcatatcattctcacctttcttcactcctcttgttccagcccaattggccttattggtgttccaaaaaaaaagaaagaaacaaaggaaaaacttccaagctcattcccatctcaggccctttgcacttgctattccctctctctgaaaatattcagatctcttcatggcttgctccttcttatcatctggatctccgctcagatcacatctctttggaaaagtattccccaatcagctaaaataaaaattgtgtgcacatttttacacacacagagtcaatcactatcctggcatcttcattttaactttcttcacagcacttttcactacctgaaattattctgttcatttatttctttatgtgtccactgcttgtcctcacaactagaatttaatctccataaaagcagagatttttgcctattctgctccctgcttattcccaggggctagaaggatgcctgacacttaggagttactctaataaacatctgaaagatgaatggataaatacacaaatgaatctaaaaaggcaagtagagagactcaaaccaatagaggtgcctcctagatcyaggagttgcagggaggcttttgcagaagggctgcaaaggcatggtgagttcggtgataacctctcatctctgagagctgagtcctggcttagctctgttcaggagtgt

SEQ ID NO: 485769 - DNA, 582 bp, Homo sapiens
gtgtgtgtgtgtgtgcacgtgcatgcatacatgtgtgtgtttaagaagaggtcacatggaattatttatacctcactttcagccgaggtcctaaaggacattaagcaaaacaagggttaccagtttcttccatatttcccaatgacatgctccccaaccaaagtgcgccttgcaaggtggtctgcccaacctgttcttgaggcccttagctgatcatcagcttgagtatacaaaagcattgagcagtgacatcgagagaagttatcttttagggaaagttgtttgagtgatttgagtgcaggggagtcatttgctttttaccctaagtttgctaaggtcctgatatttctcacctaagcaatgcttaacaggaagagaaatagagaaaggttgkaactgtcgctacctcagatggcaaagcagggagagggaacatttgtggaagtagctgcatgtctaccacttggtgaaatgagagtgcatgcattctcatgggaccaggagctgccacgtgcacagtgcaggcaggagcaccttgtctggactggactgtgtttagggcatcccacatggattaggcat

SEQ ID NO: 485770 - DNA, 582 bp, Homo sapiens
gtgtgtgtgtgtgtgcacgtgcatgcatacatgtgtgtgtttaagaagaggtcacatggaattatttatacctcactttcagccgaggtcctaaaggacattaagcaaaacaagggttaccagtttcttccatatttcccaatgacatgctccccaaccaaagtgcgccttgcaaggtggtctgcccaacctgttcttgaggcccttagctgatcatcagcttgagtatacaaaagcattgagcagtgacatcgagagaagttatcttttagggaaagttgtttgagtgatttgagtgcaggggagtcatttgctttttaccctaagtttgctaaggtcctgatatttctcacctaagcaatgcttaacaggaagagaaatagagaaaggttgtaactgtcgctacctcagatggcaaagcagggagagggaacatttgtggaagtagctgcatgtctaccacttggtgaaatkagagtgcatgcattctcatgggaccaggagctgccacgtgcacagtgcaggcaggagcaccttgtctggactggactgtgtttagggcatcccacatggattaggcat

SEQ ID NO: 485771 - DNA, 563 bp, Homo sapiens
ctgctgtgattggctgagactcagctacttgttataagaatatactcttacattaggtagaacgttgtttacatattaaagatgcagtttactatgtatgatggtagctttaggccaaatttaatttaaagtaacaagttcaagtctaagaaaaagagtactattaacatttttatattttttgaaaggtaattctatgacattagaacatgaattaatttaattaatgaaacattttttaatgcaatatattcccgagatttccccaaactgtcaaaattgatttcttagtcctcacagcattccacgtgagctacatattctgaatttaaatgtatcccagttaactgcwatgctatgatttatctaagaaaaagagtaatcacggaaaagtagtaataatacaaactagcgtagaaaagtagcaaatgcctcctgatcctacatcttgtggttgaatgtcattctatagaatgattctcttttcttcttaaaaagagaagcactccactgataatcacatatatcccttatgattttaaaatctaaattaccaagtgcta

SEQ ID NO: 485772 - DNA, 545 bp, Homo sapiens
tatgataatatcttactgctaagtgagtagatatcaaaatgaaaaaaaatcattaaaatctgacagttaaaaaagattgagtattcatcacgaccaaaaccttcattttatctatgagaaatctgaggcacagagcactgtatgattaggtctacaagaacctgatagtcagtcatgattagagcacaatacacacttagttgtttttctctaactaatatctayggtttctgtataagctagacatatttaatcaatgaggaagacattatatttaatttaaaagaaagagctagaaagaaagagagtgggacaaagtgagaaagccaaacagttacttgttgaaggatggttttttggttttatattactggcagtagaacgcagaagagaaactcaggaaagaaaggcatgtatatcagatttcatttgaaaaatcagccatatcatgaaaatagaaaaggttaaacagttattgagcattggatgaatgctgggtcatgtatatgttagtgttcatttcagtttcattaacatattgttac

SEQ ID NO: 485773 - DNA, 545 bp, Homo sapiens
tatgataatatcttactgctaagtgagtagatatcaaaatgaaaaaaaatcattaaaatctgacagttaaaaaagattgagtattcatcacgaccaaaaccttcattttatctatgagaaatctgaggcacagagcactgtatgattaggtctacaagaacctgatagtcagtcatgattagagcacaatacacacttagttgtttttctctaactaatatctatgstttctgtataagctagacatatttaatcaatgaggaagacattatatttaatttaaaagaaagagctagaaagaaagagagtgggacaaagtgagaaagccaaacagttacttgttgaaggatggttttttggttttatattactggcagtagaacgcagaagagaaactcaggaaagaaaggcatgtatatcagatttcatttgaaaaatcagccatatcatgaaaatagaaaaggttaaacagttattgagcattggatgaatgctgggtcatgtatatgttagtgttcatttcagtttcattaacatattgttac

SEQ ID NO: 485774 - DNA, 545 bp, Homo sapiens
tatgataatatcttactgctaagtgagtagatatcaaaatgaaaaaaaatcattaaaatctgacagttaaaaaagattgagtattcatcacgaccaaaaccttcattttatctatgagaaatctgaggcacagagcactgtatgattaggtctacaagaacctgatagtcagtcatgattagagcacaatacacacttagttgtttttctctaactaatatctatggtttctgtataagctagacatatttaatcaatgaggaagacattatatttaayttaaaagaaagagctagaaagaaagagagtgggacaaagtgagaaagccaaacagttacttgttgaaggatggttttttggttttatattactggcagtagaacgcagaagagaaactcaggaaagaaaggcatgtatatcagatttcatttgaaaaatcagccatatcatgaaaatagaaaaggttaaacagttattgagcattggatgaatgctgggtcatgtatatgttagtgttcatttcagtttcattaacatattgttac

SEQ ID NO: 485775 - DNA, 583 bp, Homo sapiens
tctagggtatgtgtgtggggtgctttattgggtcatcgaggcaaccggtgcttcagccctgggcttagggaagcattgactatttctgagagtgaatggctagctagaaggagctgatccccatggcactggtctaaggccaccaggccatcatatccacacaagccatccacaactgattgctgtctattcacttgatcactcggcaaatggtgattaagcacaagctataagcacagccctgtaccagaaactagaaacragatcagaggtggggtctaggtctcatggggagacagacacagacaccagtgtgggttgttcataggttaattatttcccaatcacttctttgtgttttctgtctctcccactggaatgttgtgtttgcagttgcatacccagggccttaaagcagggcctggcacatagtaggtactcggcatgttcgtctaatgaaatgagtaaacagcatttgagtgtgagggctgtgagccccagcccaagccatggctgctgggatggaagtgtgaacaaagcctgctgaaaaccaaggctggagatggagaagagacagagaaag

SEQ ID NO: 485776 - DNA, 622 bp, Homo sapiens
ctggtaccccatttttcaagcacagcaggcttgggccttacctgatttctcatcctcagcatcataaacagtccatgagttcctagctttccagagctcactcaatcccttaaactaatttttgcctgaagaagggatataagaatatgccctcaggtgttcttggctgtatttggccaagtgtgaaaggcaaattggaaaatttagctaacagtgagtagggagagggagaaggagaatctccagggctgaaaattagggagaggctccagggctaaaaatttagrctccggggagaggctccagggctgaaaatttagctaacagtgagtacagagagggagaggtgcctggtcccagaaatattcttccttagatgcacttacttgggcttggccccaaatctcaggccctgtagaaaggacagatgcaggcagggaaactgtgtagtcaggagaatgcagaggtcactaccagaaaaatttcctgaacaggttcatgttggggtgattagtaatgcaacgatagatatttaaataaaagaagaaagggagggagggaggaaaggagaaagagggatggaattaggaggctacaataagagcctaggtaagagacaatg

SEQ ID NO: 485777 - DNA, 520 bp, Homo sapiens
ctggtgcgtctcattccatgatggggaagagtgggtggtggtgggaaggacacagagggcactgccttttccattccttttctgagacaagagaatgagcttggcagaaaagttagttaccgtctcacatttgatgaaatacaaaacaatctccaaacagtgcgaactcccatacaacttcctttttctctatttggactgaaaagcaaaaccatttctccataatgtacatacatagcaaggtctacacagcagacagcctaacagggcatcccccagcagtgstttgcatacgttcatgcgggtgcccagtcctccacagaccctccccctactctacttttcttgaaaacatgtgtgcaccttccatgcctgctgtgtattttttaaattgtctgtctcctccactagaatggaagcatcacaagcacagggattttgtctgtcttgctcaccactgaatcccaacagtgcccgaaagacagttggtgtctttgatagggttatactaaaattagac

SEQ ID NO: 485778 - DNA, 563 bp, Homo sapiens
attctctgtagcctaatcaatatattttaatggaaaaaattttataagaattacaagttaaaaaatcaatagatctggtaaaaagatgactccatcctgctacctccttagggttgtctaataaaaatctaaggatagatttattcttggaattcactggaagactctctgatgtgagtaccctgtaccttccctkacatcactctaacttaactgtcatatggcagcatggtatcttccattttcttttccccacagctttactgaatcctaatttagagaagacaattaaatgtgccaagaccattgtaaaaggaaaagaagggatgggagcatggtaagtcttacatttttatgtagcctgtattaacgactttcactcatgatctctaatctgaatcttggctaaatcttggctgttgcgcacgtgcagtgccaaaactaaaaggctctgactcaccaaggtaagtagcagaaaaccacaacctcaaggccacagagggaaggaaataattatcagagaaattgccttgaattgtactttttttcccccaaatcttgtt

SEQ ID NO: 485779 - DNA, 325 bp, Homo sapiens
caatcagagattgtttttcctgcttctatatctccagcctctagctctgcacctggcacataatggaaaccccctatgtgctcgttgaaaaactgaggctgcatttggggccactaacctgaagtcattcataacatttttacttttaaatttaccatttattatctttaaaaatgaaaaataaaccmtttccctcttatcagcagcctcctcaagggcaccagtgttaatattcttagaaatcagagaaaaatgtacccacagatattttaaaacacacatggaatcccagtgtccacactgagctgcaccttgctttttttca

SEQ ID NO: 485780 - DNA, 519 bp, Homo sapiens
gacatattaatatgacatatactctggaatagattggaatcctggtaaataaagatttgtcaaagactgtctcttccctggagcaaagactatctgtcaagactacacgcacacacacacagaaacacaatttctatattgtctgctatggcctaatttagcacattctatgattaaggaatatctttctaaaactttgttgagcaagggagagaaatgggtcaaccactggaacattgcacagcccaatccaccaaagcaggctgcaaatatcagttgtagttattagtgaaagactttgtatatacaacactgagcaccgtttctggcaaacagtaggtgatcygtatgtgtcctatgacattggatctgtgttcttacttcttctcctctctagaattggcctgctctgttttgccatggtggatgctttaaaagttttaaagtgcttgttggaatacagtgtgatccctaggatgtttttccccctcacagaaagctacagtttttagctcatgt

SEQ ID NO: 485781 - DNA, 547 bp, Homo sapiens
gagggttattccaattacctagcctgcgctattactagaaataaaaatcctggtacaaaatttaacagctacaaaaggtatacagtgaaaggtttccctgttattcctgcctttctgttcaccatatgatcatctcagtaggtgctaaaaccacatttgataaaattgaaaactcattcacacattcaccacacacacrcatacacacacatgcgcacacactctctctctctctctgtcttagaaaattaggaataggaatagaaaaggaaactttaaaaaaccaataatggtttaatgtcatactttggtgttgaaaatgtggggatattcttgctttttacttagtccaatttctttatttttcgacattggacgaaatcccagaaaggtaaattgacatacctaaagaccggtggtctacccagaaaagcacaagttattttatttattttttaaggtattttgtaaatgctatttttaaaactaatttcaacttttatttcagattcgggggtagatgtgtaggtttgttacatggatatgt

SEQ ID NO: 485782 - DNA, 468 bp, Homo sapiens
taatcggttgtgttatctatagattacagacattgtatagaaaagcactgtgaaaatccctgtcctgttctgttctgttctgttctaattaccggtgcttgcagcccccagtcacataccccctgcttgctcaatcaatcacgaccctctcatgcagacccccttagagttgtgagtccttaaaagggacaggaattgcttacttgggaagctcggtttttgagacatgagtcttgcygatgctcctggccgaataaagcccttccttctttaactcggtgtctgaggggttttgtctgaggctcgtcctgctacactaagattataatagaagtgacttgccaaatcaattttctacctctgtttcaccactgtatggaaaagcaggtgacaagactgtggcacagaggaaacaggaatgctgttttctcactgaggctgttcagagcttcagttgtctgatttcct

SEQ ID NO: 485783 - DNA, 468 bp, Homo sapiens
taatcggttgtgttatctatagattacagacattgtatagaaaagcactgtgaaaatccctgtcctgttctgttctgttctgttctaattaccggtgcttgcagcccccagtcacataccccctgcttgctcaatcaatcacgaccctctcatgcagacccccttagagttgtgagtccttaaaagggacaggaattgcttacttgggaagctcggtttttgagacatgagtcttgctgatgctcctggccraataaagcccttccttctttaactcggtgtctgaggggttttgtctgaggctcgtcctgctacactaagattataatagaagtgacttgccaaatcaattttctacctctgtttcaccactgtatggaaaagcaggtgacaagactgtggcacagaggaaacaggaatgctgttttctcactgaggctgttcagagcttcagttgtctgatttcct

SEQ ID NO: 485784 - DNA, 468 bp, Homo sapiens
taatcggttgtgttatctatagattacagacattgtatagaaaagcactgtgaaaatccctgtcctgttctgttctgttctgttctaattaccggtgcttgcagcccccagtcacataccccctgcttgctcaatcaatcacgaccctctcatgcagacccccttagagttgtgagtccttaaaagggacaggaattgcttacttgggaagctcggtttttgagacatgagtcttgctgatgctcctggccgaataaagcccttccttctttaactcrgtgtctgaggggttttgtctgaggctcgtcctgctacactaagattataatagaagtgacttgccaaatcaattttctacctctgtttcaccactgtatggaaaagcaggtgacaagactgtggcacagaggaaacaggaatgctgttttctcactgaggctgttcagagcttcagttgtctgatttcct

SEQ ID NO: 485785 - DNA, 678 bp, Homo sapiens
ctgttttccagaaacatagtgtccctgctcctcccaaatcacaaagagccccagactccagggctgtgaggcatgttcctgcctggggacagagcaaagtgccagcagaggccacatgctgactccctgagcagcatgcataygccagcggagagggggaggaggggttgcaaagacagaggacaagcccagggcactaggggaagcagagaccaagacacgctcccagctgagtgccctgaattccctcttgacagcgctggcaaccgaccaaagcccattaaaacacaccacaaatatgatttccaaagaagaactgttccctggacgtctcacccgggcatcctaggaaatgccaaagccctgagagggagccaaagggacaacagtgctcacagcagacagaagccctgtggggcggcaggcctggcatggctggaagccaggctgctaggagcaaggctgagaaacgtgcccccaggatcccccaatactcacccacgagttcctgggggtctcgcttttctgcttctgtattatcctgcaaaagacaaacaaatacgaggaggtaagactggggctcctgaaccagctactctctactgagaccactcaggatttttaaggaaggagaaaaagtaaaagcactgccaggaacactaagggtaagctgatgct

SEQ ID NO: 485786 - DNA, 663 bp, Homo sapiens
ccttgccccagggccctcaagtagcctcacaaatcctgcctgggtttaacagtctaataatcaagaaactcctgaccgggtgaggtggctcacacctgtaatcccaccactttgggaggccaaggccggccgatcacttgaggccaggcgttcaagaccagcctgggcaacatggtgaaaccccatctctactaaacatacaaaactagtagggcatggtggtgcacgcctgtaatcccagctacaggctgaggtgggaggatcccttgaatccagaaggcagaggttgcagtgagccgagatcgcgccactgcactccagcctgggcaacagagcgagactccgtctcaaaaaagaaacagaccttctcacacccaataaatagagagatggggaaggatgagaagagagtggtctcagaaaaggaagtaaagtggctctaagagcaggagagctgcttattttcacagataaatgaacttaaagaggcaccgagtttttttttttattttatttaaaaaaawtttttttgatacatattagatgtacttattttgggggtacatgtgataatttgatataatcaaatcagggtaattggggtatctgtcaccttttctttttctaatactaggaacatttgaatcattctctgttgtggta

SEQ ID NO: 485787 - DNA, 602 bp, Homo sapiens
gctgtcacttcctcatttacagagaagcaagctgaggccctgaaaggctaagtgatgggtctgaggccatgcttctaaagggtgctacggcctggatataaagccaagggaagctgactcagaggctgaggcaggggaggggagtaagcaggcaggggctgcagtctgcccctgctcacaaggggaaacctcttagctcctaccagccaggcaggcagcagcccccggcatgcccccaggtcagggggtgtctgctgcccactaccccctgmcccccaaccccaggctggccactcactgtccttcaggtaggtgtcagcaaagtacagggtccggacgaagcctgtgaaggagtcctctgccgagcgagcctcgatcttgcgctgcacaggcgccagctccatgttctggaggcctggccgctcagccttggcactcccctcctgtgcctgcaaggggtgggccagcctaagggtcagctctggactcccctccccaggaacagtgcttcgctcagtgctgatccttgcatcggaaggcaggccacagccatgccagccacctgccaggcctgcgtctagagggacccttgtccaagaggg

SEQ ID NO: 485788 - DNA, 614 bp, Homo sapiens
gggtcacaacccggcacagcagaaccattacgtgagagcttcagggtgcccacatatcatctgagggaagcaccgctcatcaggcacccacctcctggcctgcgggactgcggggagttggggacacagagggacaattgcaggaaggtggcctgtcctagaaagccccagcagtctcgaatttgtagctcagcaagtttcttccctcccttcctgacctttccgctgggaatcaggtaactcagttagcccggggagtgtggccaccatagcccaagaggcccccgctctgtgccaacatggcccaaatgttgtggaaagagcagagctgggccctgctctcagcatccagggtgtgaggagggaggagaggctgagaaagaaagaaaagcaggtttggggttcccctgaacagggtagatagaggccgtgagtacacagaccaggtgtcctgaacagccccgccccctcacctttcggcctcaggccctttcaggccagcrtcattaggagagggccctccctcctggagagctcctgcagggctcctctccaggtttcaacatcagccctttctggtcttgcctgtcacacaatttacgaggctgactcag

SEQ ID NO: 485789 - DNA, 598 bp, Homo sapiens
ccctaccctggcaactgtcaggctgccaccctgatcctgagctgcaaragacatgttggctgtcgcttggtagcacctgtgaaaaaacacacggcaccccagggggcctatcaccaacagccttggcccattagtcttggcaccagggattggtaactagagtctggctgtggcctggcaatgattaaccagccgagggaaggctgagcccgcagcaaggccctggccccctgtgtacaccagcccagcctggaactcgagtgctccatacccctcccccacaccgggcagaggggaagagggaggtcaggctccgctggaggtggcagccaagctattggaggtggtccctcatctctcaactcccttgggccctgccctgaggggagcacagatcagactggcggggtgcccaacctgatccggtttttcatctctgaaaacactgggagcccccagtcggccagaaccagtgctctggataaaagatgacccaactggacaacatccagcctcaggccggggaaggactgtccctgccaggcagagccctctccactctctgccgcctgtgggagtgggggtggaatttggaaga

SEQ ID NO: 485790 - DNA, 534 bp, Homo sapiens
aacatacaactccacagccctgagaactacaatttcaccttcttatgcccacgcttcaccctcttttttgggacagagacatttttgggggagattagaaactccgtttgattaagaagacctaggtggggcctgttccaagactgtaacatagcacagaatcatagaggctgaggggtgggagaccaacttctggtcttttctcctccagaaagtattaatgattaaagttaaatgtatttttatgttgctagatttaattactaaaaagtataactgcttaaawttgaacactgacaagtgtttgttggtgtacctgcatgtgtagacacatatactcattaatttgtttaattccctttaacagactctgtctgtatagtttaaaataaaaataaattctcctgtgatttaacctcatatcttctggatactaggtcagtgctttcccccacaataacacaactgacacaaaggaggggattaaacctaggtctccaaacttccccaattcagtactcttgcctcataagc

SEQ ID NO: 485791 - DNA, 560 bp, Homo sapiens
gcattaagcacacacagccaagggtggcagattaagaggacaaaatgtcactcaagattttgcaacacctggatgcctgaatttctgacttgtcatacggggattataatcttcaggaaaacactaaccattattatggatgcctgaaaacgtgcatggaaacattctgtatttgaaccttgaacctctaggaagcaaaaacatgttacctatctttagatcactgggctttccacattttaactttattcattcttttctaataatcaatgaaataggtctttgctatacgtaacagrggcaggaacatacttttgacaggcagaggttggggaaaatttgttctcagtggatagaactatgtcttgcacttaatagtcacttaaacattgatgagataaatgaatcaagaatgactaggcaaactcataggcctggacattatgctctgggcatgaaaatgtgccagaggacagtaagctctgtatggagggaaaaaataagcctctggaggaagagctgagctccaggctgatgtgcatctcaattcatcctgcaac

SEQ ID NO: 485792 - DNA, 640 bp, Homo sapiens
taactctcatttactaaggtctcattgtgaatgtgctgtccacatttaaattctaacaaaggctggtagtatcattaccataaacagaacaatagcgaatggacttgtttctctgctggggtgatgcatgcatgctaagctagccagagctcatcatgtaacatgttgggtccaagggcacacacatccataagaactagccaatattcagagtcctcagagaccagtaactttccaytttgcaaagctaattgacttgtgtgtggctactgagtgcactgaaaagctcagtgtagcaatagagcttgcactgcagtcagatagacccaagttcaaactctgactatctgtgtcacctcagatcaaatcccttgaacttctgagtgtcttatagaattgctataactattaaatgcaatatctcacttcaaacccctagcacgtaggaatcacccaatctttatcatctgtgattattggctcaagatagttgagcttgaattatcctgacacatcagatgtcattttatttggaaacaaggcaaactagagaaatgtgttctcatgttaaagtaaaaatcgaaagaaggaaaataactgtatatttgccacaaatagcttttgcatgccagaaacagaa

SEQ ID NO: 485793 - DNA, 527 bp, Homo sapiens
actactgcaactggaggatcgttaaaattgctgccattcagaaaagggaaattcaggaaatgggcttgttagggggtgaattgcgttcctacctaaaactcatacgttgaagccctaacccccagtatttcagaatgtggtcttatttggagataaggtcttgaggtccttacggtgatccctaatccgatatgactggtgtccttataaaaaggggcaatttgcatacggtcacccatagaaggatgagtatgtgaagagactcagggagagagaagacagatgtctacaagccaaggagggaggcctggaacagatccttctcttacatcctaagaaggaaccaactccttgttattggacttctaacatctggaagttaggaagacaggacattcctgttgctttaagccttccaacttgtggtactctgttatagcagcyccaggaaactaatacagggctttgccccagttcctaccttcccagctctccaaaatgggtgggctgaggcaatgtatttacag

SEQ ID NO: 485794 - DNA, 627 bp, Homo sapiens
tgttagaacacaaaggccagtcctggccgatgactccccctgcaccctgacatgcaaactggcctgcaggtctcttcttgtctcctgagtctccagggagcatagagggttattcatagtgttggctctggccatgatgcctgcggacatagagatatttttagaatctgttccctagggtctggctgaaaaggtcatgcctatctttttatgcctaatgtcaacttctgaataagtaggaggaggaactcatttctgttaataggacacaagtaatgtcagggttgggtcctattaacagcatgcgccccccaccccaccccgaaacccaaagctgtttaaaggagttattataaaggagaggagaatgagggactgggtcaaaggctgccttggagaaggttggttagatgagttcaggtagcatcacgggggctggacaaggaccaatggatggttttggatttcatgttttctactcatcagagctgggaaaaatggaatgttatattaccaaacaatgagcacctcacctttgaatgtattcaagtgaagactggaaggcctcttccgggatgttggtgcytgggcgtcctgtgggtgcagaagactgaatgagatgggctc

SEQ ID NO: 485795 - DNA, 635 bp, Homo sapiens
aaaatgttttcaatactatggatcttaatatccactgagatgacaaatgtaggaaaggaagattcattctgttaaatgttttttctcttttgcaatgtccaagctctacttatttattaatagcctccctctgtacccataacatcatttatttggtgaattcactgttattaatactagtattttatcacagtaaagaaaaggtttctgaaaacccacaacctcactatcctaaagcaactactgtgtttctattttggtatatcatcttccaggcttcctccacatgcaaatgcagcatacatattataatagtgtgtttttcttttctctttgaattatattccatgcatgtttccatgtttctatgtagtatttctaattatcaatgaacgattgtgtaatatgccattttagtgatgttccataatttatcatgccattccttattgctggcaagatactaagttttatggatgattttgtatgtttttttcctattgctggttacactgctatattatttgttatatgccaatagagaggaactttactattgaacaggtatctccttgtggatgagagagaggaggcagaawtgtgtaaatgaatggaactctccatattgttgtgtg

SEQ ID NO: 485796 - DNA, 592 bp, Homo sapiens
gcagggaagctgagctggcagttaaaggtgcgcctttggagacagacagccctggccacgtgtggccatcagcagccgtgtgaccctgggctcctggcttcactgggggaagctccatttcccacccacttttttgggatgacatatctggtgtgtgtagagctatgtgctcagggcctgggacccaggagatgctcggccactgctggtttcattttcccacctgggaggcaggtgagtcagaggaatagacccttggtatcctgaccaaggcaccaggcgagtgggtgcttgggccaaagacacggaaagactcaaggatagctgacaggaaggagaatcccaagcactggcctgcaggagaaatagtatggtggctgccctggagaggatcacccaagccagccgggttaataaccttctcagaaacttgaccccaaccctgccaaacaaggtccattaaactcacagtcttggggggttttgggatgatgctgcctgtcccaacagcgagtctggtgttagaactcygctagagggaggttgctggccctgtgcaggccgcgtggcagagcccttgggtccctcgcag

SEQ ID NO: 485797 - DNA, 634 bp, Homo sapiens
gtcttcctgtctttcatagataggacaccggaaaatgccaacctgccaccaggtgccgccttaatttggatgtggagtccctgaggccttgtttaggggagtcagagagctgcggaagccagtcaggaagcttgggactgccactcattacagacagggcggttgtcgccccagggagggtgaggagagtcatcccagcgggggtaggggcacaggaagaaagggctggggctggagagcagctcagagctgcgggtgaaccagctcgtacaataggactgtggatgacaatgcttacaaacacacagcacttgaggcctacacagattagcggggctggaggaggaccgggaaccccaagaatagcccttctgctgarccatgggtgcccctcagtggacaggcagacagaggagctggggaccacatagacacttcctccacaggagcaagctctctgcaccatggagtactgcggcacttcgggcacccaggcccccggggacccacgcgatatccccaagaaagcactaagtgctgggtacctgctttaccatctcttgtctattcagggtggaagtggggctactccccagcaaacctcccttaggctgtgtcctctcaaacttatgag

SEQ ID NO: 485798 - DNA, 572 bp, Homo sapiens
caagtccactgtcaaagcaaaaccaagagcaagcccacttatccaggcttaagagagaagaaccctgtccaggaaggggaggcctatagattaatccctcaagccacgaggggcaagctatggcagtgcrcgagggggctgcctcactaagggggaggccagggccggcaggacaccactgactgtagaggtggagaaaaatgtctccaggccatcccagcctgcggtcctgagccagctcgcagtccggtgtagtggaccagaggtgcacatctggaaagcctgagaagtcaacagtggtcaggccgccctgtggtgtgttagagctgacccctttccagggctcatcctctcacagccttggaggctggaagtcctcactggaagtgccctcagggccgtgctccccctgaacgtgctaggggaggacctcccctgtctctgccagccgctggtgctccaggtgttccttgactcgtggctgcctccctttgatctctcctctgtctgcgcatgggcctctcccctgtgtatctgtgactctgtgtccaaattcccatcttcttatccag

SEQ ID NO: 485799 - DNA, 572 bp, Homo sapiens
caagtccactgtcaaagcaaaaccaagagcaagcccacttatccaggcttaagagagaagaaccctgtccaggaaggggaggcctatagattaatccctcaagccacgaggggcaagctatggcagtgcacgagggggctgcctcactaagggggaggccagggccggcaggacaccactgactgtagaggtggagaaaaatgtctccaggccatcccagcctgcggtcctgagccagctcgcagtccggtgtagtggaccagaggtgcacatctggaaagcctgagaagtcaacagtggtcaggccgccctgtggtgtgttagagctgacccctttccagggctcatcctctcacagccytggaggctggaagtcctcactggaagtgccctcagggccgtgctccccctgaacgtgctaggggaggacctcccctgtctctgccagccgctggtgctccaggtgttccttgactcgtggctgcctccctttgatctctcctctgtctgcgcatgggcctctcccctgtgtatctgtgactctgtgtccaaattcccatcttcttatccag

SEQ ID NO: 485800 - DNA, 572 bp, Homo sapiens
caagtccactgtcaaagcaaaaccaagagcaagcccacttatccaggcttaagagagaagaaccctgtccaggaaggggaggcctatagattaatccctcaagccacgaggggcaagctatggcagtgcacgagggggctgcctcactaagggggaggccagggccggcaggacaccactgactgtagaggtggagaaaaatgtctccaggccatcccagcctgcggtcctgagccagctcgcagtccggtgtagtggaccagaggtgcacatctggaaagcctgagaagtcaacagtggtcaggccgccctgtggtgtgttagagctgacccctttccagggctcatcctctcacagcctyggaggctggaagtcctcactggaagtgccctcagggccgtgctccccctgaacgtgctaggggaggacctcccctgtctctgccagccgctggtgctccaggtgttccttgactcgtggctgcctccctttgatctctcctctgtctgcgcatgggcctctcccctgtgtatctgtgactctgtgtccaaattcccatcttcttatccag

SEQ ID NO: 485801 - DNA, 587 bp, Homo sapiens
ctgcagctcctatgaacccctgtgtgcactcggaaagatggtgtgaagctgtcctgcatggggatggggggccagcacaagcgagcaccaacaagctggctctgatcccgaggagctcagccaaagggcccaagaggtggcaccctcccactcactgtctgccaccacgggcagaaaccatgagagctagtggcctcaaggccagagatggagtcctggtgttgtcaaggcttcccaagacccaaccctccccatgcacgtgcccccagtcaagaccctggagagctccccagagcacaccaaccagcaccccaaacagcgctcctctatctcttctctcctggtcctccccctttccccatgtggccatctctcccccacctccttccctctctcctctgtctccctctctctcctctctgtctctcctcctctctctttttctctccaccttctctctcttgcccttcacctttcctttgccagcatcctctgagaagtaggaacctcacctttccatctctaaacattcggccctggcccagtgtagatactcaagtgtygctgaatggatggatgaatggatg

SEQ ID NO: 485802 - DNA, 453 bp, Homo sapiens
tcattcctggggttcctgcagatttctaagtataagacgaagggtgggcatccttatagaggagaattgttagtgtgcrggggatcgaggtgtgagggtggagagaggatcctttctgccagctcaccaccgcagatgggctgtcctggaaggacttggtctcagaccctgagttaaaacggccttcattatcatgatgtcattcattcattcatctagcacatttttatcaaggactactgtgtgtcccctgctgttctaggtatggataatgcagcttcaacaaaccactgagcttgtccaggcctaaaacacagaacttgccacggtctctcatcctccctcactctgcgttcctcacagcctccacatctgcgaagtgcagcttctatttccctgctcttcctccatctcctgctcaccctctcctctgcacactcttttctcctcgca

SEQ ID NO: 485803 - DNA, 453 bp, Homo sapiens
tcattcctggggttcctgcagatttctaagtataagacgaagggtgggcatccttatagaggagaattgttagtgtgcaggggatcgaggtgtgagggtrgagagaggatcctttctgccagctcaccaccgcagatgggctgtcctggaaggacttggtctcagaccctgagttaaaacggccttcattatcatgatgtcattcattcattcatctagcacatttttatcaaggactactgtgtgtcccctgctgttctaggtatggataatgcagcttcaacaaaccactgagcttgtccaggcctaaaacacagaacttgccacggtctctcatcctccctcactctgcgttcctcacagcctccacatctgcgaagtgcagcttctatttccctgctcttcctccatctcctgctcaccctctcctctgcacactcttttctcctcgca

SEQ ID NO: 485804 - DNA, 453 bp, Homo sapiens
tcattcctggggttcctgcagatttctaagtataagacgaagggtgggcatccttatagaggagaattgttagtgtgcaggggatcgaggtgtgagggtggagagaggatcctttctgccagctcaccaccgcagatgggctgtcctggaaggacttggtctcagaccctgagttaaaacggccttcattatcatgatgtcattcattcattcatctagcacatttttatcaaggactactgtgtgtcccctgctgttctaggtatggataatgcagcttcaacaaaccactgagcttgtccaggcctaaaacacasaacttgccacggtctctcatcctccctcactctgcgttcctcacagcctccacatctgcgaagtgcagcttctatttccctgctcttcctccatctcctgctcaccctctcctctgcacactcttttctcctcgca

SEQ ID NO: 485805 - DNA, 558 bp, Homo sapiens
gaacccaccccttgagtaaaacaaggctttcttttcccttcgccctcttttccattttctcccccaatcattgcctccctgccccttcctcctggggtctcctgctgcttctcgtctcctctgcttgcccctggttcccttcccttctgttccctttccctgcagaggctccaataatccctatccagtgcaggcagggacctcatggatggcagagccggtgaggcttggcgggagggcccagtggccatcgacctaaccaggacagccgctgyggccctcaagtcaactgcctgccctcctggctccctgcgctcctccaggtccctgcctggctggtccaggtaacagagatggcttgagaagcaattataggagacggggtcggtcagcttgctgggggtgggaacagcaggagctgtcaccatgtgtgcaggttgatggcccaggtgggtcaccgtggggaggtttttaaaaatctctcagattctcaggctttctgtttgtaaaatatgagtaatgattacttccctagcagggttctggcgagaattaaaa

SEQ ID NO: 485806 - DNA, 558 bp, Homo sapiens
gaacccaccccttgagtaaaacaaggctttcttttcccttcgccctcttttccattttctcccccaatcattgcctccctgccccttcctcctggggtctcctgctgcttctcgtctcctctgcttgcccctggttcccttcccttctgttccctttccctgcagaggctccaataatccctatccagtgcaggcagggacctcatggatggcagagccggtgaggcttggcgggagggcccagtggccatcgacctaaccaggacagccgctgcggccctcaagtcaactgcctgccctcctggctccctgcgctcctccaggtccctgcctggctggtccaggtaacagagatggcttgagaagcaattataggagayggggtcggtcagcttgctgggggtgggaacagcaggagctgtcaccatgtgtgcaggttgatggcccaggtgggtcaccgtggggaggtttttaaaaatctctcagattctcaggctttctgtttgtaaaatatgagtaatgattacttccctagcagggttctggcgagaattaaaa

SEQ ID NO: 485807 - DNA, 558 bp, Homo sapiens
gaacccaccccttgagtaaaacaaggctttcttttcccttcgccctcttttccattttctcccccaatcattgcctccctgccccttcctcctggggtctcctgctgcttctcgtctcctctgcttgcccctggttcccttcccttctgttccctttccctgcagaggctccaataatccctatccagtgcaggcagggacctcatggatggcagagccggtgaggcttggcgggagggcccagtggccatcgacctaaccaggacagccgctgcggccctcaagtcaactgcctgccctcctggctccctgcgctcctccaggtccctgcctggctggtccaggtaacagagatggcttgagaagcaattataggagacggggtcggtcagctygctgggggtgggaacagcaggagctgtcaccatgtgtgcaggttgatggcccaggtgggtcaccgtggggaggtttttaaaaatctctcagattctcaggctttctgtttgtaaaatatgagtaatgattacttccctagcagggttctggcgagaattaaaa

SEQ ID NO: 485808 - DNA, 641 bp, Homo sapiens
catcagggcccagccatttgtttgtcccagtttgtcatggccacagagctcacaaagggcttgctcagatggtcacgtcttcaaggtagtcagggcaggtggccactacttggaggtagtcagataggatttctggctctggatggggaaactgaggctcagggggtggggtggcttgcccacagtcacctggctggcaggctggctggcgtgaagcagggatgaggacccctgggtcccagcgccaagagcagcaccgtggcctctgttctgcaccatgcctctcttacagcaggtgctgccacaccacctttaatcstgcgtcccccagaactccctgacaccgccacagaatgccccctgggcaacctaacaactcccagtcttggcagacagacaaaccaaaatgcagcaaaggtcagaaaaaactttctgctcccctgtctctctcttctcacaagctcagcctccttccctgacaccctctttttcaccgtccctaaatgttgggaaatgacattgaggtcataaagggaagtcacctgccacgtgacttcacccactgagatctgtggctcatgcaggcattctgtgccagaccgcccagagatcaaatgtccactcctcaggagctgggtgac

SEQ ID NO: 485809 - DNA, 461 bp, Homo sapiens
gtcacccaggctggagtgcagtggtgtgatctcggctcactgcaacctccgcatcccagctccgcctcccaggttcaagcaattttccctgcctcagcctcccaagtagctgggattacaggcacccaccaccatgcccatctaatttttgtatttttagtaaaaacagggttttgccatgttggccaggctggtctcaaactcctgacctcaggtgatccacctgccttggcctcccagagtgttgggattacaggtgtgagccwccgcgccgggcctccagcctcatttcttactccctttccctttgcacccaaagttttaggcacactgaagggcttctagccaagccctccctcacctctggcccttgttctcctgctgctctccctgctcctttgctaacctagtctggcccatctttctgtccaggccaggcctcacctctttgggacgggctc

SEQ ID NO: 485810 - DNA, 599 bp, Homo sapiens
ctgcagagccaggctatccagccccaggccatgctcatcttccctgctcccaagggcctttcagggatgctactccccacccccaccaggatggttttcttggtaagctgctccctgcgtactgaccagatggctaggaggaaacttgagcaggaggtttttctttgcaggttggggcccagctctgtggcaactttggggcagtgataccgagtcacagatagcccgcctccaattctccttccctctgcccygcccccacccaggtagatccgattgctccccaggacacagctcctgcattcccacattgaggccgagtgggcagcccaccctattcagtcaccttgctttttataggtaagagcttagcacttcaacttcccttgtgccctaattaggctgtgctctttaatcagcgggacagtagtccttgtccccttggtacacagagaggcccacccagccagcactccaaggtatttgcctacttgttattttattgtttattttctcaaccttttaaaaactttgtgtaacctattttaattacttactacacatatacataatgattgtagaaaaattagaaaatgaag

SEQ ID NO: 485811 - DNA, 453 bp, Homo sapiens
tcttgtccaaatgccaattcaggctcagtacatgtggagtagagtcaggattctgcttttcgagcaagytcccaggtgagactgatgctgctgatcctcagaccatatatatctgaatgtttcgtttcatgagttccttatccataatatgtaaagtgcattcagcattaagaaggcatttggggcacaactccccattgcagtgggacttcgtcagtagccccttgccaggcctgggatgtgtggcttgaaggtggagtcagagtgctatatggcatccacttggggcctgcactctggttgtgacctcagtcctgagagacaatgggccccaggctcagccctggaccagcaccccgtctggcccagcaaggggctcaagagcaagctcagagggttgctggagcaggtgagacactcatgggtaggacccaagtggtctgtctctgagcc

SEQ ID NO: 485812 - DNA, 478 bp, Homo sapiens
gcaagagtttccttttccaaggaagctccacagaagattaatgattatttgatggtaagtcctgttacacttgtggggaaaaaaaawaagtgtgcagctgttctgccgtcacaccaaatcagctcacggaggccaggcctctggggtgacatcggtggtctctcatgccaatcaccagagcccctgccccactcttactttcagcctgtccagttccagctggtccctggcaacaggcacaaccgaaggggagctgggcgccacggtgggaggaggcccgttgccctcgccctcgctgagcttgatgatgacctcgtccttggcttggatggtctccatgagcattcccagctgctcgttgagctcgcccactttgctcttcagcgtccttacttcctgctgaagactctccttctccaagctgaacctctccagctggctggtaaggcccagaatctgatcatccttttggtgcaga

SEQ ID NO: 485813 - DNA, 514 bp, Homo sapiens
aatgatctactaatagccaactccagagtattaccttttaaggacaattagcaaaagatggataaatctattattaataagaatattacactgtgtggtgccatacatattcaaagcattttttcatggtagtttaaatgaagttctgccaagggcctggaggtgaccagattatgtcatgaggttttcttttttttttcctgcctcataattctataataaaaacatgttccatctatgtccctctagcattttaccaacaagagatttctttccatcccatctttgacagaaaagcagcatctatagctgaaaatgaaacacaccaaagaatgcttggataatggccttggtttatctcatagcattttgtttctgcccctcaggcaagcaattcctcatcacaatctcaccagtgaatcacaggactcacacattgctacaaaccctgcctttcagcrtgcccagattgaaccattatatttcaacccactatgaaataatccctgtgaaa

SEQ ID NO: 485814 - DNA, 611 bp, Homo sapiens
catttgaagtcacaatctctgagaacataaactgggacatgttttggcttgccctaactttaaaaccatttttatatatgaacataaaaatagacatttttggagtctccttcagataattacttggtaacctccacttttggattctggcggatctattataatgctgctatgaactttatttcataccacaccagggagggggagagagatactgagaagtcggagtactcagatattacatggaataacagggtcataaaaatcaatgtaaaatttaatgcaaaagggctgtgggcacccaaccattcaagttaggagataaggcagatagaaagtagggttgagcttccagaaagtagtatagtatattttccctaactctattgaaaagtatacaataatacttccgtttgccaatccaactgtgagttaaacatgttttcagccatgttttggaacctatttcctatttggagaaaataaccatcatcataataaagcaaaaatagcacttattgaacttgttctatgtggtaggcattgtgccaggcagttatattatcagtaaattctcataacaatcctsaatattttcactgttccgtttg

SEQ ID NO: 485815 - DNA, 535 bp, Homo sapiens
agataaatcagtttgaatttatctccaccactggcaaaaagagtctgaagccaagtcatagaaaagatcaaagattcctagttcatagaygcgggcttttgctctgacttctcataatgaaaactgatggttctgaaacctctctctcttgcagcactagacacagaacatggttctttgctttactgttagggaggacaagctgagtgaagcaaggagaaaaggatggagagaaaagggaaagaagaatctgagtgaggacatcttcacttgaaaatcaaagttattttttcctggggttagcaaactcatttagaaacaacatgaaaagcaggactttaagatactcctgaaaatactgaatgttgtcaggataagagtatagcccatgaaaaagacaaacttgaaatcatttttttgcaaaaatgctgaagggtttgctcaaaagaactgtaatcatcataaatcttcccaatttctagtcaatgtcttcagtcatcccatgtgcctgatgaaagaaaagaaagaagttaaa

SEQ ID NO: 485816 - DNA, 564 bp, Homo sapiens
agacatctcaaaaggccaatcttagatttatgcgtacacatcagcagaactcaggctcctttcatcgtcctaacttggtagactttcattagccttatgatgacagtttagttttggagaagggctattatcatttaaaccacaaactaaatgtctcccaaagtgaacttggcacaagcccagtttggaggttaaagacaagatgaggcgtttcgctggagcccatgaggttgaggctgcagtgagctatgattgcaccacttcactccagcctgggctactcagtgagaccctatctcttaaaaaaattaaaacaamaacaaaaacaaacaaacaaaacaaccaaactgcacactttggattccatgtgggattaacaatggaagctactccattttggagtctggtatttaaaattctcactgcggcttgggtttgcctcctgatcagggaatcagtccctactggcttccatttattgatccttatcccttccatgaacagcttttgatttcctgccttctgtctttgggacacagggcttttggacccttatgtgcaggt

SEQ ID NO: 485817 - DNA, 346 bp, Homo sapiens
ggaagatcctgagcgagaaactgtgcctcctccaagggtttaagaagtgcctggcaggtatgctgttgcctgggaatccctctacccyttccaccttccctccctccctcctccccttcctccctccttcctccccttcctccctcctccttccctcccccaccacgcacattcccacactcacctgctgtgtccagatagttcaggatggaggtgcagggcacagagcggggtgtgcagggtcaggtttgtaaagtggacatcctaagaagagcttctcccagtgctggcagggttcacggggacaggggtgtttaccatgggactcccccagacccccacacag

SEQ ID NO: 485818 - DNA, 379 bp, Homo sapiens
agtggcagcttcaaacctccaagtcttttttattttattttaattatttatttattttttgagatggagtctcactctgttgcccaggctggagtgcagyggcacaatcttggctcactgcaacctctgcctgccgggctcaagcgattctcctgtctcagcctcctgagtagctgggattacaggcgcacaccaccacgcccggctaatttttgtatttttattagggacggggtttccccatgttggtcaggctggtctcgaactcctgacctcaggttatccacctgccccagcctcccaaagtgctgggattacaggtgtgagccactgcgcccagcctccaagtcttttgtcaagatgacttccgtcccttcag

SEQ ID NO: 485819 - DNA, 506 bp, Homo sapiens
gtagagccaagctttctgtctcagttacatagagatactgagacaaattactcatgaacattccagaaaagatgagtatctacaaattattgagacagtttcaatatgtaaatagtattgttgaatacgatttctcacagttatccaagttagattggatacggtaagtgggtaattccaagctagttatcccctttacacatggcatagtgccccatcgttgggtcttcccagcctgccatgtccacgtggccgggatgctcccaggagctgctggggaaaggagggcgggctgcaggctgtgtcttgaaggctgagaatttaacgccgctgccctcgatgtgccatagcttgttggtagagcagtgtccatttgaagggaggtagctcctgaatttactttatttttgcaataccyttctgaggagctaattggccctaataaaccttgcagaacataagccctgcccaaatggggagaaccacctgctgtcaagagtcagcca

SEQ ID NO: 485820 - DNA, 639 bp, Homo sapiens
ataattccttatggaagccttctgtaaccacctcaaccaagttaattagccctgtacttcctaacatgtattctatcaagtcacacatcacactttttaaaaagagtaagacatagatgttgatataattgttagagttgaaaaggaactgagacttcagtacctttttattgcaaatgctaaaatatttcattatctttcacagacatattatgttttgcagacatattattacaatacactccagttaaaaggacttcatcagttataataaatgctaaattcacataagcatttctgctgatacacagacaaaccaaatgctattcagatttttttygttgatggaaataactgggttattataacttggttattaagatgctcatagaaaaactttttttggcaaacaatcacactctgtcattattttatgtataaacaagttgaaaactgttgaatcagggacatgattaagttggtggtgttcatgttggatggtgatgcagtggcaacagcagtggtgatgatgatgatgatggtgattgtgataaacatattctgcatggcattttttaaaaaagtgattagatggaaactgctttggtttcatttttatatttcagcagttcaagactg

SEQ ID NO: 485821 - DNA, 650 bp, Homo sapiens
atcccagctacccccatcagggctaactattggttggattgtgtgtgagctgataacattccacatgcgaacattcaaattcattattaataaacagcccaagtctctatcagaaaagtctggatcctttagcaagtgagggatgttgcttctcattaggagaagacatcaaatcttccagaatttagcaatttcatttttggaaccaatttctaacagtgtattaatggtgcattgaaaatctgaacaaagccttcatactttttattcattttgtaaattacagtaatctagggaggtctgactaagctactggagcaatgggcggtaaagacattggactgaagcattgcagttctaatgattcctttatgattaaacgtttatggagaaaaaattcatcctaggagagggaaattaactttcagcttgcacgttcattatctttgataccaaaatggaatgcagcttcttgttgttaaagtttcartcttttatttttaattcatacatattaaaggcagccttataaaacaaagcagaatataaaataaagatgtaagcatatagaatttatacacaaattctttagcaaatacttcaaatttttatacccatgttaagtccgctgttcatactaatgattggaa

SEQ ID NO: 485822 - DNA, 490 bp, Homo sapiens
ctgcaagcgaaattttgacagctcgcctttggggtgtatgtcacctcttggctggtcatttaaaatcrtgttggtcagggagccagacagtcagatggctacctcagtgccccaccgcaagtttccgcaaagcactcagggcacaaaccccagaatgctgatgagacttcatgcacaggccttttcctgttgaaatcccataaaaacagcttttctgtttgactaaacccaaggtaggatacctgagccccatggcctccaacacattaattcaggttttccagaaagctctgagtgcttttatattcacgggacaaaactttctgagcttatgcttcagtagaaatccgggcctgatgacaatgactctgtttactttcccgaaagaggcatcatgagcttcttaaaaaagaaaggaaattatcttaataggagacattttcttacaaggaaaaaaaaaaaaagtactgtggaaagaatacaagccacg

SEQ ID NO: 485823 - DNA, 427 bp, Homo sapiens
gtacagcgcagtagtaaaatacagaaaataagccgtctcattctttccccctttcagacactatgccaaccatccccacactacgtgggggcagcagtgctgtggccggccttctgtacagaggctgattcccacaaatgcgctgccttcttgcaaatgcgtgtctgggtggcccaaggccaccgattccatcgtcatccacaatatctcctagaaaacaactcaaagctcattctgagtaggttacattattttaggtgaatgctttcttatttctaaaaggcaattccttcaaggtgccaggagaagacagaaaggcrgcaaccatttgatgtgtagcctaaggacagaggccccaggagcactccaaagaaccagggccaggagtcgctgggtccgtctggaagtcatcatctctgggacaaga

SEQ ID NO: 485824 - DNA, 523 bp, Homo sapiens
ctgcattcaaaatgcatgaggtgcctcatggggcgtcctctagaggaagcactggaagctgcacttcatcaattagttacagtggacaccctagtaataccagagacccagccccagttcagaatgcatcaagagagtttatcaagcaccaaaacatctggatgtgatagtgtctggggcaaaatgcatccccacaccccacaaagctgccttacataccccggcagaaatcactcccagccttggaggggaggtgcatgatgtgaccaaggattctggggcggatggaaactgacgtaatctgtgtatgtgcctagtttatttcaaccacatcaaagtaagtccagctcttgcacgggggctgggggacatgtgcctgcccaccccgccttggcgtgcacatggctttaaatagatactaacaaggccgcagcagtggagcagaggaggaaactggagctcctgccttgccckgctgtaattaggttaatgccagaacatggtgcaagtggcccacttggca

SEQ ID NO: 485825 - DNA, 599 bp, Homo sapiens
actatccagccattctttatctccaagtgcctctgctctcatgaacttcttcatgtggacaaaagcaggaagcctttagggccacgcatctcttgttttcctgtgacttacacagccctcacctttgtgcttagatggactgtggccagcgggacctccaggcctggctgggtcaggagagttttgcttaaccagatctgtttgatccttgaaccaaaagcggggagccagagagatcctttgagaactgatgactgctgctgggtcctgcccagccatttgcattttataaaggtctttggcagcggccaaggccttctcattatgtggtgtttttccacttcgggatgaaccggagtggtttgtgcagccacctgatagctctttgcaccagcttctgcatgggagactttgagcaggccaggagccaaggggaccctcctaggccttccgagcacctagcactggcccttttcttcctyggggcttccttctggaggaggtttccctgggtttggagtcctccctcctgctgggggtgggggcgtggttgctggtggcctggagtgagctgcctgctgtggcctccagcactcccc

SEQ ID NO: 485826 - DNA, 626 bp, Homo sapiens
ttaaatcagggaatgacataagattgatggatatgctatctcctttaatcctcataacaaatgtatgtgctaggtaatatccccgttttaaagcagcacagaaattagggcagtggagattaaggagtttaccccaggacaccatgcaggtgaatgatggagccaggaaaccaactcrggtcagcttgcatccaaagtcctcagtcttccagatcagcgtacctccatagtaatataacaatgactgcagttttaaaacactttgaactcttaagatgaaagatttcccttaaattacaaagtggtattatgctgcagaaatgtgagcggtaatgagagagcaggtaatgcccgggaacttttgaaaggcccggtccgtgtggctctgctccagcaccttcaagttccctgccgtctggcggggggcgtctcataagctgctttcaacacaaagaagggtttggctgctccccggccatttgacactgccattgtccataaggactcgttgtccgtgaaatgcacccaaagcttgagctttcaggggttttgggaaatcagatctgggcagtgcatgtgtggtttcgctggagacatcatccaatgccaagtttctgctttctgct

SEQ ID NO: 485827 - DNA, 617 bp, Homo sapiens
tgacacatactggaaattgcaaaggctggcttccagcagcaccctctctgtgacgctcattttgctattaagagaagccacttaacaaaccaattgtcaacagggggagatgaaaacacaatagttaatcaggctttacaaggtcacacatctaattcaaattgtaaaaggaccccattagtgtcttctttcccttgttctagaatgtagcctttcttcaaattgagggcttatcactttggatccccctacaagatagcagtccgttaataaaggcttgaagtactattttcctaacygagggccccctttggagcctattaacacccttttttatggcgagcagagcaagtagccacctcctgacatgtgctggcacttcctaaaaggtcattaatgctccatatttcagagtataacaaacccaggaaggcttacaaggagcccagcaggggtaaataaaaacagtgagtaatttgcagaacttcttgtttcacctaggtggtgcatggtaaatgagagagaattaggccgtttccctcttttgactttcgcaaggatttgcagggtcctagaaatttccaggtaaaatctagaaagcaagcttttggagaaag

SEQ ID NO: 485828 - DNA, 615 bp, Homo sapiens
  misc_feature (1)...(615): n = A,T,C or G
nnnnnnnnnnnnnnngattttctttagcttttgaaattaaattcataatattacaattctgaattcctatgtatgtatatgttaagaatcctttaatgggactgactttcatatgtgtgtggctgcattctgaaatagttgtctagktgatacataaagcagtgagtgctatttgtaagatatatttatatttaaagtcttcatacagttattaactagctccaatattactgaaatgatttctccaaatatcctatatttaattatcatgctggcaaatttattataactttggtttgaaaaaatatattatgatacatatccactgactaatgccacctatctgctttcctgaattcaaagtttatgattatttccataaatgtatttatcagtataatcaaaaataaaaataacataaataaaatttctgtgagctttacacatctaatgtgcaatgattataaatctggtcttatacacatggtaaaaaacatttaagtcacaaaagtatacttcaggtttaagtataaatctgaaattaaattctcagatttaagtataatttttaaaagctttggtaattgtgtccctactgttaaatttattgtatag

SEQ ID NO: 485829 - DNA, 615 bp, Homo sapiens
  misc_feature (1)...(615): n = A,T,C or G
nnnnnnnnnnnnnnngattttctttagcttttgaaattaaattcataatattacaattctgaattcctatgtatgtatatgttaagaatcctttaatgggactgactttcatatgtgtgtggctgcattctgaaatagttgtctagttgatacataaagcagtgagtgctatttgtaagatatatttatatttaaagtcttcatacagttattaactagctccaatattactgaaatgatttctccaaatatcctatatttaattatcatgctggcaaatttattataactttggkttgaaaaaatatattatgatacatatccactgactaatgccacctatctgctttcctgaattcaaagtttatgattatttccataaatgtatttatcagtataatcaaaaataaaaataacataaataaaatttctgtgagctttacacatctaatgtgcaatgattataaatctggtcttatacacatggtaaaaaacatttaagtcacaaaagtatacttcaggtttaagtataaatctgaaattaaattctcagatttaagtataatttttaaaagctttggtaattgtgtccctactgttaaatttattgtatag

SEQ ID NO: 485830 - DNA, 615 bp, Homo sapiens
  misc_feature (1)...(615): n = A,T,C or G
nnnnnnnnnnnnnnngattttctttagcttttgaaattaaattcataatattacaattctgaattcctatgtatgtatatgttaagaatcctttaatgggactgactttcatatgtgtgtggctgcattctgaaatagttgtctagttgatacataaagcagtgagtgctatttgtaagatatatttatatttaaagtcttcatacagttattaactagctccaatattactgaaatgatttctccaaatatcctatatttaattatcatgctggcaaatttattataactttggtttgaaaaaatatattatgatacatatccactgaytaatgccacctatctgctttcctgaattcaaagtttatgattatttccataaatgtatttatcagtataatcaaaaataaaaataacataaataaaatttctgtgagctttacacatctaatgtgcaatgattataaatctggtcttatacacatggtaaaaaacatttaagtcacaaaagtatacttcaggtttaagtataaatctgaaattaaattctcagatttaagtataatttttaaaagctttggtaattgtgtccctactgttaaatttattgtatag

SEQ ID NO: 485831 - DNA, 615 bp, Homo sapiens
  misc_feature (1)...(615): n = A,T,C or G
nnnnnnnnnnnnnnngattttctttagcttttgaaattaaattcataatattacaattctgaattcctatgtatgtatatgttaagaatcctttaatgggactgactttcatatgtgtgtggctgcattctgaaatagttgtctagttgatacataaagcagtgagtgctatttgtaagatatatttatatttaaagtcttcatacagttattaactagctccaatattactgaaatgatttctccaaatatcctatatttaattatcatgctggcaaatttattataactttggtttgaaaaaatatattatgatacatatccactgactaatgccacctatctgctttcctgaattcaaagtttatgattatttccataaatgtatttatcagtataatcaaaaataaaaataacataaataaaatttctgtgagctttacacatctaatgtgcaatgattataaatctggtcttatacacatggtaaaaaacatttaagtcacaaaagtatacttcaggtttaagtataaatctgaaattaaattctcagatttaagtataatttttaaaarctttggtaattgtgtccctactgttaaatttattgtatag

SEQ ID NO: 485832 - DNA, 577 bp, Homo sapiens
acacacctaaagttccttctttaaagagaagcagtagattgcaagctccttgacagcaggccctgtagtaggtgcttattaagctgaactgatagacttgtagagtaaggcagcctctgctgcaatcttttccaacctctgtcaagtgtgagaagacactcacccacctcccttttaagtagacatccagcctttgcttgcatatctcttttggcagggggctcacagtttcctaaggtagttccatctgtcagtaacccttgtatattgttctcaaatcggcctttttgggacttgtactcattggtccattgttacttaaacagttaatttattgaggacctagtaggtggcagattctgggttaggagctggrgacgtaaaggaaaccttgtacagaactggctcttgacagagccatgttagacaagagcgctcagatctttagactaatgccttttactcaaagggagaaatgtttagcctttctcagactcctcttttggttcctcttagtctctgcttctccacgcttccctcttgtggcccagatgggtctcctgtagcattttctccc

SEQ ID NO: 485833 - DNA, 322 bp, Homo sapiens
gtctaggggaacatggagatttctgggtttcccatcagacattttgattctggcaccctaggagtgggccaggatgatgaatatttttaacaagcacacaagttgatcaaatgcaagtagttctgtaccatgttgkcaaacttagagtagatgacctctcagtccctttctatttagttttacaaatgtggacatctgtgattcaaagaaataaacaaacttgtttatgtagaagtgtgttttcactttttagaaacaaattgtttattttagaaaaatcaaaaaatatagaaacataaaaaagcatccattagaagtttaa

SEQ ID NO: 485834 - DNA, 322 bp, Homo sapiens
gtctaggggaacatggagatttctgggtttcccatcagacattttgattctggcaccctaggagtgggccaggatgatgaatatttttaacaagcacacaagttgatcaaatgcaagtagttctgtaccatgttgtcaaacttagagtagatgacctctcagtccctttctatttagttttacaaatgtggacatctgtgattcaaagaaataaacaaacttgtttatstagaagtgtgttttcactttttagaaacaaattgtttattttagaaaaatcaaaaaatatagaaacataaaaaagcatccattagaagtttaa

SEQ ID NO: 485835 - DNA, 653 bp, Homo sapiens
tctctaggcctctttttagtttgaacttctgcttctgtcttctctctaggtgattctgataaaattccaagagagataatgtgatttttccagctcatctgttcacactggcaatgtcacggcttgttgattatcctgtgttttacctgctctgaatcagtccttttcctgccccagtttgcagatagagggagtgagtggctttggttatctggcctgattctgataatccactaagcagaagctgcagacaagctgttttcacaaggactcaactaaaggcattgcagatacctaaacaaatccaaaaatagatcaatgttttaaagttttgagatttagttcaatgaggttcagttacctgaaaaatatgctttaggtagaaatacattccattaccattctacaaataaaaccctactctctctatatttcatatcaattcagggttctaataaaatattactaactttattatgcattatgtgtctttttccccraaattattccgaaagaacttctgtgttcttcctatcctatgttactcacccataagcacatttccattatcgtccttgatattcgagggttggatgtaattgatccatggcctctaccatttcctcctcttctccttattccctactcagact

SEQ ID NO: 485836 - DNA, 493 bp, Homo sapiens
aatagatgccagggaacaggggagaaagtgaagaaggggttattagctaatttcaattttattcatagtaggatgagaaaagtaaaaatgggactaaaggtattatttacagatattaataaaattatagataatatgaagatgttaataaaaagggctcagaacaaaatagcacaaacatttctaaatacaaaaagaggctgggtgcagtggttcacacctgtaatcccagccctgtgggaggccgaggtgggaggactgcttgagctcaggagttcaagaccagcctgggcaacaaagtgagaaccctattccctacaaaaacatttttaaattagccaggcgcagtggcatgtgcctgtagtctcagctgtttaggaggctgaggcaggacaatcccttgagtccagaagtttgaggttgcaasgagctatgatggcgccactgcactttagcctagatgacagagcgagaccctgtctcagaaagaaaa

SEQ ID NO: 485837 - DNA, 439 bp, Homo sapiens
  misc_feature (1)...(439): n = A,T,C or G
nnnnnnnnnnnnnnnnnnnnnnnnnnnnnnngtaccaaaggaattcggtaaggatgtccttgtatttttaattcattgtcatatttcctttcagtgttaatttttctgtcatttgataaacaagtatgctagagcttagtgaaatatttcatataaaagcaaatgagttgcatttaagtagcaggccttccaaacatatccygcacaatgtccattacagtccttttaccaatgtgatattaatgctcacagtcccctctagggttatgatccgaaataatcagagagaattaatttggctttcttcttaggtttcccaaacatagttctttcagttggttgtttttatgagcaacggaggatttctcataaagtagtgggtgggtcagaactctgtgtatatgtctgtgcatgaatggcacatacattcagtgaactc

SEQ ID NO: 485838 - DNA, 439 bp, Homo sapiens
  misc_feature (1)...(439): n = A,T,C or G
nnnnnnnnnnnnnnnnnnnnnnnnnnnnnnngtaccaaaggaattcggtaaggatgtccttgtatttttaattcattgtcatatttcctttcagtgttaatttttctgtcatttgataaacaagtatgctagagcttagtgaaatatttcatataaaagcaaatgagttgcatttaagtagcaggccttccaaacatatcctgcacaatgtccattacagtccttttaccaatgtgatattaatgctcacagtcccctctagggttatgatccgaaataatcagagagaattaatttggctttcttcttaggtttcccaaacatagttctttcagttggttgtttttatgagcaacggaggatttctcataaagtagygggtgggtcagaactctgtgtatatgtctgtgcatgaatggcacatacattcagtgaactc

SEQ ID NO: 485839 - DNA, 613 bp, Homo sapiens
catttttgtaatatttaaggagctgaaggtgttcatatgtttataataaaattatttaataaaaatattacaattttttgacagttgaaactcatatttctactacaaaaacacaataatatctaatttatcaggcactagaagggaataaatattgatcatattacctttctgtagctcttcacatctcgtaagatgacttcaaatacagtattttatctaattacgtattttgaaatagttkagatcttagtaacaatataggaaatatgtttaaaatgcattatacaatttcacattttattataaaaactaagcttaaatggaaatttaacaaaacaaaacaaaaaacaaaatatcacgcatgcatctcttatcctaactaaatacctattttattttgtttgtgttttattaactttgggtacttttacacctttatacttatcttttaatttaaaccttttaaaaaatatttgagattgctcaaagattctgcaaagtaaagaattttctcctaatttgtttcacttttgttttgcattgaaaaaatgaccacataaactgttcatacactttcagaagcttggattaagtctttgcgtggagcttg

SEQ ID NO: 485840 - DNA, 575 bp, Homo sapiens
gccaaaaaaaaagagtacagtgtttttcatatctgctttcttcttgcagaagccatatgctagtaatacatatatgctgtctggtattcaatatatactccagctttgtatatagttagcctagagcattacacaccacctgcataatttcaaaacactgaacactagatgtcacaaaacaaaaaccctgtgctgtgctctcaagcacaaatgcatttacagttggttaatgagatatacagaaagctgctgcaaagccaaagaagttagtttcattatacaagtttaggaaataatggtgaacttttgaggacaratattccgcagccataattagctttaagagaaatccatttggtatgcatttggtttttcattaggacatgcattttcactcccatgtgcaatgtttgaaaggtttacattacataaaattagggctgtataaactgtgtgcttcatctctttctctaaggtgattgcgccttcccttgaacacagtagcctgactgatagtccccattgtatgcaatgcacgtcaataaataccgaacatgaatgtgaatcaatattgt

SEQ ID NO: 485841 - DNA, 623 bp, Homo sapiens
tgccctggctcatgccactgagggttggctctctggcctgggtagaaacaccctgggccttattttgatgtggattatttcaaacagttcaactgtgaattgctgttctagcaaaagaaatatccagggcaaaatcttcacaaagaaaatacaatgcaaatataatgtgaatactgtcagataaagggcttttaatttgaacttttatccgtcctttaatgtttccttgccccttaaacttgtgaatccatccttcaagattggagaaaatctcatctctctaccctcagcacagttttcsctctgtctcatctccttgactatatgactgccaaactgaattcaataggccttcaaaatcatcttgctttttcttttcctgtcccattcagccacagacccaaatgtaagggcaattttattttataatatgtatttttgtttctttctttcttttgctatttcatttctcctgagggtagtccattccatgggccttttaagaaaattaaatataaaatttggatcagcatttaaagtcgtattggacaaacagacatattcactcttgtgatcatctaaaccttgatctggtcttttgaggactttaggactagaaagaa

SEQ ID NO: 485842 - DNA, 644 bp, Homo sapiens
tctatgcctattagaagtcactcattacccacttcccaccattataggcaatctcttatctactttctgtatctatacatttgtttattctggacattccatataaatggaatcagataatgtatggtcttcagtgacctgagttttcactcagcataatgttttcaaggatcatgctgtagcttgtatcggcactttattcctttttaatgcctaataatattcatcgtgtggtatactacattttgtttatctcttcatgagttgatggagatttggattgtttccattcttttggctatgatgaataatgctgttgtgaagagcttctgtacacatttttgtgtaaatatatgttttcatttttcttgaatatagaccagaaagtggaattgttaggtcatatggttatcctatatttaacattttgaggaactgcccaactgtgtttcaatgtgactgtgctggaaaacaaaacaaaaaaaaagcccggcacttctgatagtctaaaaataattctgcagtctacaagataagtcagcagagtttaytggaaattaaatagggaaagggaagaatctggatctagtcccagctctgccactaattagttgtttgaccttaagcaactcatttacattctc

SEQ ID NO: 485843 - DNA, 564 bp, Homo sapiens
ccatttctttgcctagtttcttcctcagttcaatcctattacctgctcctgtactggattcagttgagagcaatcactccataaatcacttgctcaagaatccttgtctcaggctcttcttttagcgaaactgacttmcggaagaagggcttaatgctctcaaagaagataagtaataatatagtgaaacaagggagaagttcagtgacttgccaagtcatgctgttgttggatccagcccatgttctcactaggattgaagttgctatttccccagtcataaaatgtaaacaaacatttccatgttcaagggccagagttcctctccatgaatgtgatatctgacaggccctactaaattcctctatgatctttctgaaccttgttgcataatgagaaaccacacaccttatcttgttcctggttcttggattttcctctaatacatactgacccagaaaatctgatgaaaatcatatcttgtgtttctttgggcaacagaaaataacccctatagttactaaggaaaggataaaaaattgaaagaaagtaactgtgtgactt

SEQ ID NO: 485844 - DNA, 648 bp, Homo sapiens
cttgacaaaacatagactctgttatcattgttacagggtaamtgggtataaactgttgcctgaagaaaggatgcagagatacagcaaggaaggcaaatacatagcaagcataatgccactgcttcttccacacccacagcagtcatcactaattgattgcagcactcttctcactacggtcaggcaattcttattaacacagcgtttccagcagccattaacaatcagagtggcatgtgagatttagccatttaacagacatttattgagtgctggctatatgcctggtactggggatttacaacgaataaaacaggcaaaaatgtctatcctcctagaacttgtattactatagggggcagggtcagtaattaagagaaataagttaaatatttagtagtatattagatggtaacaagtacagtggaagaaagtaaatcaggaaagggggatagagattgttgggaagagagaggttatactgttaaataagtagctaagtgtattatctttttctgagtaatgaatcatcccagagtttagtggtttaaaacaacactgtgatttcacaatttctgtggatcatgaattaaggagcagcttagatggatggtcctgggttgagtccttcctgtggctgcagtcaag

SEQ ID NO: 485845 - DNA, 638 bp, Homo sapiens
cccaaaaggcatcttggtgccccagggcatgctggctggcttttcatccacttctttaatgtaagcagaaaacactctgcatttgaagtcacatgatcctgctgccagcaaaacattgttgggatgccaatccaagctgaggactgtggagcgaatyggctttttaatatgcttgcttacccaccagtcattttcagactcaaagtaacaaacaaatgagtcatgctccacttcccacagcaaatttgttctctagcggggaccacttcacaaaagtagctgcacgattaattctaaggatcaccagggttggcttccagacaccatctttctgactccagatgtaggcattgcagtctaccccgcaagtgacgatgcggtcgctcttgggagcccagtgaatgcctgtgatatgtccattgtgctcactgagttcacgagctttcactcgctggctcccatgcttcttatagatgtgcgcttcctgattatcaggactgagggcaatctgggtacgatccctgttccaggcacgacaggtgattggctctagtaaaaactgatgcactgatgtcattcttagtgttttcaaaggagagaaagctgggatcggggaagtccagacgggctcagagcag

SEQ ID NO: 485846 - DNA, 638 bp, Homo sapiens
cccaaaaggcatcttggtgccccagggcatgctggctggcttttcatccacttctttaatgtaagcagaaaacactctgcatttgaagtcacatgatcctgctgccagcaaaacattgttgggatgccaatccaagctgaggactgtggagcgaattggctttttaatatgcttgcttacccaccagtcattttcagactcaaagtaacaaacaaatgagtcatgctccacttcccacagcaaatttgttctctagcggggaccacttcacaaaagtagctgcacgattaattctaaggatcaccagggttggcttccagacaccatctttctgactccagaygtaggcattgcagtctaccccgcaagtgacgatgcggtcgctcttgggagcccagtgaatgcctgtgatatgtccattgtgctcactgagttcacgagctttcactcgctggctcccatgcttcttatagatgtgcgcttcctgattatcaggactgagggcaatctgggtacgatccctgttccaggcacgacaggtgattggctctagtaaaaactgatgcactgatgtcattcttagtgttttcaaaggagagaaagctgggatcggggaagtccagacgggctcagagcag

SEQ ID NO: 485847 - DNA, 638 bp, Homo sapiens
cccaaaaggcatcttggtgccccagggcatgctggctggcttttcatccacttctttaatgtaagcagaaaacactctgcatttgaagtcacatgatcctgctgccagcaaaacattgttgggatgccaatccaagctgaggactgtggagcgaattggctttttaatatgcttgcttacccaccagtcattttcagactcaaagtaacaaacaaatgagtcatgctccacttcccacagcaaatttgttctctagcggggaccacttcacaaaagtagctgcacgattaattctaaggatcaccagggttggcttccagacaccatctttctgactccagatrtaggcattgcagtctaccccgcaagtgacgatgcggtcgctcttgggagcccagtgaatgcctgtgatatgtccattgtgctcactgagttcacgagctttcactcgctggctcccatgcttcttatagatgtgcgcttcctgattatcaggactgagggcaatctgggtacgatccctgttccaggcacgacaggtgattggctctagtaaaaactgatgcactgatgtcattcttagtgttttcaaaggagagaaagctgggatcggggaagtccagacgggctcagagcag

SEQ ID NO: 485848 - DNA, 471 bp, Homo sapiens
cagtggctcatgcctgtaatcccagtactttgagaggctgaagcaggtagatcatctgaggtcaggagttcaagaccagcctgaccaatgtggagaaaccttgtctactaaaaatacaaaattagctgggcatgctggtacatgcctgtaatcccagctactcgggaggcttaggcaggtgaatcacttgaacctgggaggcggaggttgcggtgagccgagatcccgccattgcactccagcctgggcgacaagagcaaaattccatctcaaaaaaaaaaaaaaaaaaaaaaaaatacaagccattcaggagtttggacaaaaggtactgcctgctcttgaccctttcaggaatcaacacccattataccaaccagggtcaaaaaacctggagagatgggtcatctgggtctcaactcccttatggaaagacccctttackgtcttactttccaccccaacagctatcaa

SEQ ID NO: 485849 - DNA, 600 bp, Homo sapiens
cacactgcacatgtccacccaggttttccacactgcctgtgggtggacatgtgcttaaaaacacgtctgatggcccggcgtggttgctcacgcctgtaatccgagtacttttggaggctgaggtgggcggatcacttgaggtcaggagttcgaaaccagcctggccaacatggttaaaccccttctctactaaaaatacaaaaaaagtagccgggcatggtggcagstgcctgtaatctcagctactcaggaggctgagccaagagaattgcttgaacctgggaggcggaggttgcagtgagccgagatcacaccactgcaccccagcctgggcaaaagagcgagactgtgtctccaaaaataaaaataaaaaaaagtctgagcctgctggcccaggatttagtcttgtttttctctcttattttctgtgaaaatttaggttagatacatgaataccatgggcctaatgtgtttatttgaaaaataataacaatttacttgaaagtttttaaaacaaggtggtggtgtgtgattacttggaatattgcatgtcttacagtaaagtcccaaagtttgtttaataagattgatcagccttct

SEQ ID NO: 485850 - DNA, 594 bp, Homo sapiens
gccttgtgactctgtgactctgttatcttggaataaacagggagaggccactggcctggctgcaagaatgtggcagctttatcttcccaaggacagtcccagtggaarcctctgggccgcaggtcagtgtgctgtgtttcactctgattcttggagaaatctttcccttactctgggaccctgataatcactccctcttgagttgcacccacagacgcccccacaacaaaccctccctaatgaaagccatctgcgcctgattcttaggatccccgttgcccttctggacccagacacgcttacaaactcccacactccccatatacttcataaagatcccacaatccccagatacttcataaagatccagaagccctgttatgaaatctcacaagccccagtaactcatggaataatatacacaaacaccccaggaactcactgacccagggcaacgtatttccactcatagtgactccaccccacaggggaataccactgaaacctaccaataaaacagagatgtctctaatgatgcaattagaccccaacatcaggaaaggaaacactccaaatgatcatttcatcttccaa

SEQ ID NO: 485851 - DNA, 594 bp, Homo sapiens
gccttgtgactctgtgactctgttatcttggaataaacagggagaggccactggcctggctgcaagaatgtggcagctttatcttcccaaggacagtcccagtggaaacctctgggccgcaggtcagtgtgctgtgtttcactctgattcttggagaaatctttcccttactctgggaccctgataatcactccctcttgagttgcacccacagaygcccccacaacaaaccctccctaatgaaagccatctgcgcctgattcttaggatccccgttgcccttctggacccagacacgcttacaaactcccacactccccatatacttcataaagatcccacaatccccagatacttcataaagatccagaagccctgttatgaaatctcacaagccccagtaactcatggaataatatacacaaacaccccaggaactcactgacccagggcaacgtatttccactcatagtgactccaccccacaggggaataccactgaaacctaccaataaaacagagatgtctctaatgatgcaattagaccccaacatcaggaaaggaaacactccaaatgatcatttcatcttccaa

SEQ ID NO: 485852 - DNA, 594 bp, Homo sapiens
gccttgtgactctgtgactctgttatcttggaataaacagggagaggccactggcctggctgcaagaatgtggcagctttatcttcccaaggacagtcccagtggaaacctctgggccgcaggtcagtgtgctgtgtttcactctgattcttggagaaatctttcccttactctgggaccctgataatcactccctcttgagttgcacccacagacgcccccacaacaaaccctccctaatgaaagccatctgcgcctgattcttaggrtccccgttgcccttctggacccagacacgcttacaaactcccacactccccatatacttcataaagatcccacaatccccagatacttcataaagatccagaagccctgttatgaaatctcacaagccccagtaactcatggaataatatacacaaacaccccaggaactcactgacccagggcaacgtatttccactcatagtgactccaccccacaggggaataccactgaaacctaccaataaaacagagatgtctctaatgatgcaattagaccccaacatcaggaaaggaaacactccaaatgatcatttcatcttccaa

SEQ ID NO: 485853 - DNA, 594 bp, Homo sapiens
gccttgtgactctgtgactctgttatcttggaataaacagggagaggccactggcctggctgcaagaatgtggcagctttatcttcccaaggacagtcccagtggaaacctctgggccgcaggtcagtgtgctgtgtttcactctgattcttggagaaatctttcccttactctgggaccctgataatcactccctcttgagttgcacccacagacgcccccacaacaaaccctccctaatgaaagccatctgcgcctgattcttaggayccccgttgcccttctggacccagacacgcttacaaactcccacactccccatatacttcataaagatcccacaatccccagatacttcataaagatccagaagccctgttatgaaatctcacaagccccagtaactcatggaataatatacacaaacaccccaggaactcactgacccagggcaacgtatttccactcatagtgactccaccccacaggggaataccactgaaacctaccaataaaacagagatgtctctaatgatgcaattagaccccaacatcaggaaaggaaacactccaaatgatcatttcatcttccaa

SEQ ID NO: 485854 - DNA, 604 bp, Homo sapiens
cctgtatattacaggtgggctcagtgaggttcacagcgggggccgtttcaccaagttatcctgagaagctctgagttttstaagaaggaagagtcgctgattttcatgtgatggccaggaagggtcaacaggctgcgttggtcatcttcctctataaaattccaggactggccacatgtggtggctcactcctgtaattccagcactttggaaggctgaagcaagtgggtcagttgagcccaggagtttgagacaaacctggcaacatggtgaaactccatctctaacgaaagtacagaaaattagccagacatggtggtgtgcatctgtggtcccagctatttggcaggctgactgggggggatcacttgggcctcagaggcagaggttgctgtgagccaagatcgtgccactgtacttaagcatgggtgacagagtaacactccatttcaaaaaaaggaaaaatattccaggaccatcttttatatccccaagcaaaagaaatgtctctttcaatgtccaaaattctgatggcacgaatcctaaacatgtaaatattttcccagaaaaatgacagtaatacattcaaaataaaaacaattgt

SEQ ID NO: 485855 - DNA, 604 bp, Homo sapiens
cctgtatattacaggtgggctcagtgaggttcacagcgggggccgtttcaccaagttatcctgagaagctctgagttttgtaagaaggaagagtcgctgattttcatgtgatggccaggaagggtcaacaggctgcgttggtcatcttcctctataaaattccaggactggccacatgtggtggctcactcctgtaattccagcactttggaaggctgaagcaagtgggtcagttgagcccaggagtttgagacaaacctggcaacatggtgaaactccatctctaacraaagtacagaaaattagccagacatggtggtgtgcatctgtggtcccagctatttggcaggctgactgggggggatcacttgggcctcagaggcagaggttgctgtgagccaagatcgtgccactgtacttaagcatgggtgacagagtaacactccatttcaaaaaaaggaaaaatattccaggaccatcttttatatccccaagcaaaagaaatgtctctttcaatgtccaaaattctgatggcacgaatcctaaacatgtaaatattttcccagaaaaatgacagtaatacattcaaaataaaaacaattgt

SEQ ID NO: 485856 - DNA, 604 bp, Homo sapiens
cctgtatattacaggtgggctcagtgaggttcacagcgggggccgtttcaccaagttatcctgagaagctctgagttttgtaagaaggaagagtcgctgattttcatgtgatggccaggaagggtcaacaggctgcgttggtcatcttcctctataaaattccaggactggccacatgtggtggctcactcctgtaattccagcactttggaaggctgaagcaagtgggtcagttgagcccaggagtttgagacaaacctggcaacatggtgaaactccatctctaacgaaagtacagaaaattagccagacatggtggtgtgcatctgtggtcccagctatttggcaggctgactgggggggatcacttgggcctcagaggcagaggttgctrtgagccaagatcgtgccactgtacttaagcatgggtgacagagtaacactccatttcaaaaaaaggaaaaatattccaggaccatcttttatatccccaagcaaaagaaatgtctctttcaatgtccaaaattctgatggcacgaatcctaaacatgtaaatattttcccagaaaaatgacagtaatacattcaaaataaaaacaattgt

SEQ ID NO: 485857 - DNA, 601 bp, Homo sapiens
tcaaaaaaaatcagagcagatcaagaccttagacactgggatttgtgggaggagtgtaatgggttattagtgactgattacatggtggaaataattcaggggaaaacggtggccaccttctgcatggaatggccatcgctgttatatagccaagattgaaaccacaatagaaaccacaacctcagagatgaaccacaatagcatgttattgattaggattcacatttactgctggtattacattttgctactgttttattcagaatgtatcatagatctcgtgctaattaatctgatttttgcataactatgaatgcatcatgttctctctgccaacatagttttatcccacctcagtaggttactttgtaacagacaataacaacacaccattagactcttaaggctgaaagatagaaccatttttttttttcttggaattaaatagagtgttgggaacatacacttacagagtgcacttgagttgttctccccscccataccctgcctcaggatacttatgtgaatataatgaaaatcccaagaaagttattttacaccatgaaagctgtatcactcttttttttaatttttatttttc

SEQ ID NO: 485858 - DNA, 621 bp, Homo sapiens
attctgtgtatgcagtctcaggccaaaggacaatactgaggacagactctgtgacctttgtcatgcacagggcacgtgaccacacttacagtgccttgttcagaggcaggcaagagccattttaaatttttgttgtaacttgagtaaatgtaaaaaattattgttatcattattattttgctgtgctaagagaattgggtagtccttcttggaactgaagtgaccgaccacatatttggaaatgtgtgactatttgcttcatctttcattcctaggctaaaatagactgtcttcccttccctacctaattagagaagtcattccctagtcactgaatccttgactttaaaggcagcagagcatttttagatgatcaagtacatcttcmccaattttataattgagatcaaaaccctggttggagaaatgacttactcaacatctcctgagattcagttcagatttggagatacttaaagacacaagttaacatttcttgaacctttcctttcaattccatcaaataagacctgccctatatagactttcagtagtttatctctagtggtttttttttttttgtacccctttcctccctggacagctcactgagtatactct

SEQ ID NO: 485859 - DNA, 562 bp, Homo sapiens
cttttctctccacctgaccccggaaggagactaaagcaaacaaaatgcctagctcaatcgcaggaggcacgtagtatgagtcagaaataaacctttgttgtctgaggacactgagtttttgagttgtcatcaccatgtaatccagcctaccagattaatatatgagataaataagattatgggtagggcacagaagcaacctgtttctaaagtggagttgttgcaaaggatgtttctcctcagccaacaacagtcaggtgtccattgctgagaaaatgccaattcagccagtattgttgagaatattgggaaggtgtatcttcctggagatggtaatcaagtgcaaagacagaagtccaaaataaactctattttaatgggatgaatcctagtctactcatacaaacaaaatactatagcagctcagaatagacctcaataattcatattagaaaatacaagggccasgtgcggtggctcatgcctgtaatcccactactttgggaggccgaggagggtggattacttgaggtcagacgttcaagaaaattaaaggaaggca

SEQ ID NO: 485860 - DNA, 551 bp, Homo sapiens
cagacgaataaggtcacatgagttttctagacagcagtatagaaaagttcacaactaggatttcaacctctgtcttttgactcaaaggccaccacatcatactagtctgtaaaatattaatatccttttccatgtgtctagaaattwgaaatctccctaaaagtcctgagttgtaacaaaattatacttgtgtcccataaatttatacacataaaataaataagtagctttaaaaacaaaaacaaaacaaaagaaattggcaatttaaaatctctacatcttttattcacaaatgctctgtgaagcaggcagggagaacgcatattatatgttactctatctaagaacgatgtctggtgaaaatacccattacttccccgtacatggccattaactctaaatgagcttaagtggacacctcaggttgcaattgcaccaatattaggataaccatatcatttgtcactaaacaggatgcttgatagaaaaaggagcactactaataattacgctaggacaacaggcataaactagggctgttccaggaaaat

SEQ ID NO: 485861 - DNA, 569 bp, Homo sapiens
gttgatgtgagctttctgggcgcaatattaacacactttccaacccagcaatctggttctaggaatttatcctacaaaaatcataacacaagtctacaaatatgtatacatattgacacacacacacacacatttaggaatagttattaaagcagtatttacaacagtgaaaaattgataaaaacctaagttttcatcaagtgtaccctggttgstacaaaaaacagaatactttatgtcactgacaaatgatgccacagagccacacggaaagatggttttggtgagggtcttgaacatgcagggagaaagactctgtactctgctgtgatggggagacactaaggcactctgttttagagcagcagtccccaacttttttggcaccagggactggtttcatggaagataatttttccacagatggcggggtggggtggtttggggatgaaactgttccacctcagatctcaagcattagattctcaataaggagcacgcaacgtagatccctggcatgtgcagtttacaatagggctcatgttcctatgagaagcgagtgtcgcagc

SEQ ID NO: 485862 - DNA, 569 bp, Homo sapiens
gttgatgtgagctttctgggcgcaatattaacacactttccaacccagcaatctggttctaggaatttatcctacaaaaatcataacacaagtctacaaatatgtatacatattgacacacacacacacacatttaggaatagttattaaagcagtatttacaacagtgaaaaattgataaaaacctaagttttcatcaagtgtaccctggttggtacaaaaaacagaatactttatgtcactgacaaatgatgccacagagccacacggaaagatggttttggtgagggtcttgaacatgcrgggagaaagactctgtactctgctgtgatggggagacactaaggcactctgttttagagcagcagtccccaacttttttggcaccagggactggtttcatggaagataatttttccacagatggcggggtggggtggtttggggatgaaactgttccacctcagatctcaagcattagattctcaataaggagcacgcaacgtagatccctggcatgtgcagtttacaatagggctcatgttcctatgagaagcgagtgtcgcagc

SEQ ID NO: 485863 - DNA, 496 bp, Homo sapiens
aatgggtacagagctatttttggagtaatgaaaatgttctggaattaggtagttgtagaagttgtacaatcttgtaaacacactaacaccattgaattttgtattttaaaattcttaaaatggctaattttatctcatatgaattttatctaaaaataacaggtaaaaaatagtgaactggaaaatggatcagaagtaaatacgcagaatgcagcacaagataaaagcaaagaaaacataaaagttagggtaaaggtatagagaaggactagcaaatatttaagtcacagaaagataatgaagcagaggcaataccaaaaggcagaacagtttatattcttctaaaatttataaaaatcataaayctataggtttaagaagaccaactaacatcgatgtaaaaatgtacttaatcctacctggatgcatcacagtaaaactttagaaaaccaaaaacaaagagactagggaattaaagcacttaaagtcagattga

SEQ ID NO: 485864 - DNA, 506 bp, Homo sapiens
ctctctgtcatttatcaacagccaccgtgagcgaggtgcggggccaggcagacaagataatggccaggacatacaccttcttggggaacatttccaaatgcagttccccacgactgtgttcaacagcaccactctttgctgtgtttgcartaagaaagaagatcctcagaagggcggcactgttttctcctcccgcaaacacatttagcttgtcgacactggtcgttctggatgcttatctgcctcatcccttgtggtgctgtcagtctgatgcctcaaagcatatctaagctataacccaacccctgtgacctcgtgtatcactgcattgcctgcgaggctcaataaatcatgtctcccagcagcagcaaatcaatctagttctcagaaacaagacacaagtcacaaccagaagcaccttcctgcactctcaaaaggattttgcgtgtatgaaacattcaaagtcctcctgataccatcccagagagacccttcctaaagtacca

SEQ ID NO: 485865 - DNA, 488 bp, Homo sapiens
gtttttttcattaatgtctggagtggccatcaatcccctaaaatgcaagctagcaccaagtcaccctgagaagtgtgtagctgggctgggggagggcgggatcccaagttcttgagaactttgaattcagacttaattcagttacttctgagacttagaaagcaatttcatctaatcagagcccgtaaaggatgaagtgatagcttcttcagtcttacctctcttttatttctgggggaaaaagacaaccagaacagatgcttctgagaaatatttcccaccatgtacagtggagaggtctgtggcctgtgacacttctcacaacccctaattggcaggggtttctggagtcagacctcaatctagctctactgtctaacagctttgcaactttgagaatgtttgctccttttattgcaaggactggagctaatgtaaacagagcagtctrcatggagatgttcatcaaattattatcattgacagtt

SEQ ID NO: 485866 - DNA, 521 bp, Homo sapiens
caagtaagtacatatatatacacgtatatatgtatatatacgtatatatacgtatgtatatgtatatatatacgtatatatacgcatgtataygtatatatatacgtgtatatatgtgtgtgtgtgtatatatatatatatatatttttttttttttttttttttttgagacgcagtctcgctcttgttgcccaggctagagtgcaacggtgcaatcttggctcaccgcaaagtctgcctcccaggttcaagcaattctcctccctcagcctctcgagtagctgggattacaggcatgtgccacaagcccagctaattttgtatttttagtagagatggggtttctccatgttggtcaggctggtctcgaactcctgacctcaggtgatccacccaccttggcctcccaaagtgctgggattacaggcgtgagccactgcacccagccagtatatatattattgttaatataaggctctaaaattctatttaccctaaagtgattcatttctgtaaaagtt

SEQ ID NO: 485867 - DNA, 521 bp, Homo sapiens
caagtaagtacatatatatacacgtatatatgtatatatacgtatatatacgtatgtatatgtatatatatacgtatatatacgcatgtatacgtatatatatacgtgtatatatgtgtgtgtgtgtatatatatatatatatatwtttttttttttttttttttttgagacgcagtctcgctcttgttgcccaggctagagtgcaacggtgcaatcttggctcaccgcaaagtctgcctcccaggttcaagcaattctcctccctcagcctctcgagtagctgggattacaggcatgtgccacaagcccagctaattttgtatttttagtagagatggggtttctccatgttggtcaggctggtctcgaactcctgacctcaggtgatccacccaccttggcctcccaaagtgctgggattacaggcgtgagccactgcacccagccagtatatatattattgttaatataaggctctaaaattctatttaccctaaagtgattcatttctgtaaaagtt

SEQ ID NO: 485868 - DNA, 521 bp, Homo sapiens
caagtaagtacatatatatacacgtatatatgtatatatacgtatatatacgtatgtatatgtatatatatacgtatatatacgcatgtatacgtatatatatacgtgtatatatgtgtgtgtgtgtatatatatatatatatatttttttttttttttttttttttgagacgcagtytcgctcttgttgcccaggctagagtgcaacggtgcaatcttggctcaccgcaaagtctgcctcccaggttcaagcaattctcctccctcagcctctcgagtagctgggattacaggcatgtgccacaagcccagctaattttgtatttttagtagagatggggtttctccatgttggtcaggctggtctcgaactcctgacctcaggtgatccacccaccttggcctcccaaagtgctgggattacaggcgtgagccactgcacccagccagtatatatattattgttaatataaggctctaaaattctatttaccctaaagtgattcatttctgtaaaagtt

SEQ ID NO: 485869 - DNA, 573 bp, Homo sapiens
taattatctatacttatcaygcatttaattaggtaattacaaataatccaatattaccagcaactcactagagacgtttaaagttgagtattctaaatttttaagctaataaatgtgaagaaagtataaatcaggtaggagatttgaacccaaaacttttcagctcccagacatcatttatgaaagatagaggtgcaaaaaagaacatcagtattccacacaaatcatgtttcttttcttcttaccatcgcttattggaacacactatatacataagaattaattaatttagtaatgagggataggtgttaataaatgtttaacaactggctgtcttgggagaaaagcctgatttgcagtatttgtggtttctgtggtacaaatatcaccaaaatgggcagtttcaaaacacaaactcaacatcacagaatgtggaagctggaaagagacgcaggaaaagggctctctggagtgagtcttagcacactactgggtgaaagggctgcaagaatattttcagttttagggacactattctattccacaagttattttgaaaattttatttacttt

SEQ ID NO: 485870 - DNA, 573 bp, Homo sapiens
taattatctatacttatcatgcatttaattaggtaattacaaataatccaatattaccagcaactcactagagacgtttaaagttgagtattctaaatttttaagctaataaatgtgaagaaagtataaatcaggtaggagatttgawcccaaaacttttcagctcccagacatcatttatgaaagatagaggtgcaaaaaagaacatcagtattccacacaaatcatgtttcttttcttcttaccatcgcttattggaacacactatatacataagaattaattaatttagtaatgagggataggtgttaataaatgtttaacaactggctgtcttgggagaaaagcctgatttgcagtatttgtggtttctgtggtacaaatatcaccaaaatgggcagtttcaaaacacaaactcaacatcacagaatgtggaagctggaaagagacgcaggaaaagggctctctggagtgagtcttagcacactactgggtgaaagggctgcaagaatattttcagttttagggacactattctattccacaagttattttgaaaattttatttacttt

SEQ ID NO: 485871 - DNA, 578 bp, Homo sapiens
acatcacagttctaatttgtgattgattacaagcaagcatctcttctctgccttgtcccaaactgtatctagttcttccttcctcaatagcttcttagaaagaagttctggcaaggggtggggaactggggtgctagcctggggttcactccctggtactggccaatttaactctctatagctacataatatagacattcttctctaggtcagcaaatccacagcaccactaaactagatctcaatggccaaaactcacacraggtatagaggatggatacacgagcacgtcttgcattaataagtaatcagaagtcaaggactgaatacattttacttcatacactttaatgtgagcaaacgactgaaaaaaacatattgtcatctaaaaacaaatgctatgtaaggctatctggatactagtcattcaattaattctgacttgaacatcacttgctgcttcagcatttgaatgttttggatctacttagtgacagagttccactatgaatcccaccccattggacctcatcagttagatctaactcttacttgaatttaatataactttcatcttt

SEQ ID NO: 485872 - DNA, 606 bp, Homo sapiens
acatcacagttctaatttgtgattgattacaagcaagcatctcttctctgccttgtcccaaactgtatctagttcttccttcctcaatagcttcttagaaagaagttctggcaaggggtggggaactggggtgctagcctggggttcactccctggtactggccaatttaactctctatagctacataatatagacattcttctctaggtcagcaaatccacagcaccactaaactagatctcaatggccaaaactcacacgaggtatagaggatggatacacgagcacgtcttgcattaataagtaatcagaagtcaaggactgaatacattttacttcatacactttaatgtgagcaaacgactgaaaaaaacatattgycatctaaaaacaaatgctatgtaaggctatctggatactagtcattcaattaattctgacttgaacatcacttgctgcttcagcatttgaatgttttggatctacttagtgacagagttccactatgaatcccaccccattggacctcatcagttagatctaactcttacttgaatttaatataactttcatctttctccatttttaccagcaataatactttt

SEQ ID NO: 485873 - DNA, 606 bp, Homo sapiens
acatcacagttctaatttgtgattgattacaagcaagcatctcttctctgccttgtcccaaactgtatctagttcttccttcctcaatagcttcttagaaagaagttctggcaaggggtggggaactggggtgctagcctggggttcactccctggtactggccaatttaactctctatagctacataatatagacattcttctctaggtcagcaaatccacagcaccactaaactagatctcaatggccaaaactcacacgaggtatagaggatggatacacgagcacgtcttgcattaataagtaatcagaagtcaaggactgaatacattttacttcatacactttaatgtgagcaaacgactgaaaaaaacatattgtyatctaaaaacaaatgctatgtaaggctatctggatactagtcattcaattaattctgacttgaacatcacttgctgcttcagcatttgaatgttttggatctacttagtgacagagttccactatgaatcccaccccattggacctcatcagttagatctaactcttacttgaatttaatataactttcatctttctccatttttaccagcaataatactttt

SEQ ID NO: 485874 - DNA, 634 bp, Homo sapiens
ctggctggagtaggtgttactggcccccgttcacacacatggaaattcaggctccaggcactttggtaatatgcccaagctcacgtgattagaacatagtggaaacaggattccagcacagcagatatgaatccaaaaatccaagcacagaaaatttcaactaatataacttgcaaatacttgattaaattgagtcaaattatcttacttttttttcaactttgaccccttcccatctttccctcaccccgtacattactcacggtattttaagaagggaagaaaaattatatcccaagaaaaatgttgccctctgccttcttctctctggctctgaaatagtaaccgtggtgcccaccaaggtttctcaaagcaggctattgaccttgcccgagctgacaaattgttcacctgtactccatctcccaacaatgccagatgacrgctcactctatgatattattattatagttggcactaaaccaaatagataattgattcattctctgttcaccaaaagctgaaatcctaccccagcaacaatctgacaagaatattggcatcacagatgagttgagacgttattttctagatcagggcttctcagactttaatgcacacaagaaacacctga

SEQ ID NO: 485875 - DNA, 667 bp, Homo sapiens
tgtaatgagcattcaataagaacacttctcttagggccaggcacagtggctcacgcctgtattcccaaagtatgctcactttggaaagcataggtgggaggatcacttcagggcaggagtttgagaccagcctcgggaagagagcgagacctctgtctctacaaaaaaactttaaaaaattagctgggcatggtggtgcatgcctgtagtcccagctactctttgggaggctgaggtgagaggattgcttgaggcctggagtttgaggctgcagtgagccgtgatcgcaccactgcactccagcctgctccacagagtgagaccccgtctctcttttttttwaaaaaaaaaagaaagaaaggaaagaaatacaaaaaattagcccggcgtggtagtggtggtgggtgcctgtaattccagctacttgggaggctgaggcaggagaattgcttgaacccaggaggtggaggttgcagtgagccaagatcccaccattgcacttcagcctgggcgacacagcgagactctgtctcaaaaaacaaaacaaaacaaaaaaacaaaaaaacaaaaaacaaacaaaaaacagcgagagagagaacagctctcaatgagattgttagtattgattcctcacaaaactcctgtgaggtgtcagtcatattctttt

SEQ ID NO: 485876 - DNA, 667 bp, Homo sapiens
tgtaatgagcattcaataagaacacttctcttagggccaggcacagtggctcacgcctgtattcccaaagtatgctcactttggaaagcataggtgggaggatcacttcagggcaggagtttgagaccagcctcgggaagagagcgagacctctgtctctacaaaaaaactttaaaaaattagctgggcatggtggtgcatgcctgtagtcccagctactctttgggaggctgaggtgagaggattgcttgaggcctggagtttgaggctgcagtgagccgtgatcgcaccactgcactccagcctgctccacagagtgagaccccgtctctcttttttttaaaaaaaaaaagaaagaaaggaaagaaatacaaaaaattagcccggcgtggtagtggtggtgggtgcctgtaattccagctacttgggaggctgaggcaggagaattgcttgaacccaggaggtggaggttgcagtgagccaagatcccaccattgcacttcagcctgggcgacacagcgagactctgtctcaaaaaacaaaacaaaacaaaaaaamaaaaaaacaaaaaacaaacaaaaaacagcgagagagagaacagctctcaatgagattgttagtattgattcctcacaaaactcctgtgaggtgtcagtcatattctttt

SEQ ID NO: 485877 - DNA, 483 bp, Homo sapiens
atgtggtcagaagaaggaatccaacttaattttttagagttagtcagttttacccacattatccaaaaaaataaatgacacttatcttcaatcattaaaatgaagtcccacctgtaacctacaccgagttccttttcatacatgtatttgcatttttcctctgtactatataatttctaaaagcacagttgtcttaaacaaacccattcattacaaagtaattgatatgtctcttaatctttgctccctcctctatctttttttctttcaaatacktgttagagtggtttctttgtactaaagatttgggtagagtttggattttgctgattgtctcctgcgatgttgtctagtatgctttcttgctccctgcatttcctgaaaatttctagttaaatcagattcaggtttgagttttaggaagaggagactacttcctagacggtggtgtgtatttgcatctagttgtctcttttgctgatg

SEQ ID NO: 485878 - DNA, 536 bp, Homo sapiens
gtgaacacaagcgctgtgacttcagaatccaggctcgccctgactttgctacaccactcctgtgcccgagataaagctgggtttccaatctccgcatcgttcacatttagggccaagtaattatttgttgttggaggctattctatacattgtagtgtccctggcctctacccactgggtccctggagtaaccctccctcccctgagctgtgaaaaccaaaaatgtcttcagatactgccaaatatctctttggggacaaaatcatctcgttgagatatcattctctatgtctatcatagaaatagaatgactaaaaagaagaaataatagaaaaatgtggcattactaaaaacaatcgtagtatgtccgtctctgtacattttgagatagaattattaggaaatatctcaaaacagtcctctctttttttgagacggagtctctctctgctgcccagactggagtgcaatggcaccattttgcctcacygcaacctccccctcctgggttcaagcgattctcgtgcctcagcctc

SEQ ID NO: 485879 - DNA, 637 bp, Homo sapiens
tttgtatttttttgagacacagtcttgctctgtcgcccaggttgaagtggagtggcgtgatctcagctcactgcaacctctgcctcccaggttcaagccattctcgtgcctcagactcctragtagctggaattacaggcacgtgccaccacgcctgacaaatttttgtatttttaggagagacagggtttcaccatgttggccaggctggtctcgaactccctgacctcaggtgatccacctgccttggcctcctaaagtgctgggattacaggcatgagccaccacgcccggcccaaagaatttttttgttccattacaaagtgagctaacatggattttatttccttgcctgctataaagagagaactacattaagtcctctggaagacataaaacaacatgagaatttcaattttatttaaagtacatatattttcactaaatatacatgtaccctaatttcaagacctaaatataccataaaacaaataatcttttaataatagttaatgttattcataaggtttcatttcatactaacccaagtaaaacactgcctgcagaaaaaagtgacttagaaataattcaagttttcccattgacatacgtaaaaatacaggcccaaagcagctcg

SEQ ID NO: 485880 - DNA, 640 bp, Homo sapiens
ctgcgtcctcctcagagtaactttgtgagccgcgagttcaaccccagaggctcagacctcatcttcaacccctagtgagggacgtcggtccacagcttgtattagggccccaagccgccttctgtgagcgatttcacatcaggtataaactgggcacttctgggaaatttcagtccgtctgaacgttagtgacccaggaagtgcgagtgtgtggattagggggtttcccacacagagaagcaactgaatcgcgatgtgtgtgtctgygctggggaaggagactcattatctggagctcggcacatgcaaattcagcacaagctacagatgcctgcacagcgctaccggcagagttcccacggaaaatcacttccctgtccgcctctcccacgacgcgttaacattccaagcccatcaacctcgcctctattatacatgttgactgaaggaggagtggtttcgctctatgttcatatttcctttctgtgaaggcatgagagcatcagcaatccatgagagcagacgttgtgtctgttactctatctggaactgcaaattacttacaaatattcctgttgcccccaattactgtcccgcctgaggttctgcagcaatgcagggctgaatgagcatcatgctg

SEQ ID NO: 485881 - DNA, 633 bp, Homo sapiens
tatatttacaacgtgtaatgatgtttattccctgttatactttaatgcctccaaaagagtttacctttagtatttattttactttgggcctgtcagtaatgaagtctaagatttgtttttgataacatttatttattttgatttaattttgaaagctatgttcactggttatagcattctatatggacagtttgtttttttcgttcagcactttaaaatattccatttcattatcttttgatttctgtaatttcccttgagaagtcagctgaccttcttgctgttagtccctccgtctttttcagtgattttctactatatacatattgaggtgaggttttatttacatttattcttcttggggtttgatgagtttctccaatcagtgggaatataytaatatctttcaccagattttaagaatatttttcctattttttctcatcacttttctttcttgctatgacttcactgaccaatatattagaaattgttattctctaaaatgtatatattcggtttttttgtattattttaatgttttcccatctgtgctttagtttagattttatttcttaactaaactgtcttcaagttctttaatcttatctttgtcagggctcagttgctgtt

SEQ ID NO: 485882 - DNA, 667 bp, Homo sapiens
aggagtgggagttgcgttctccctccttgaggacaaaatatctgcaattctacatggaagatttgtctcttctcccctatttatttattcatttgttaaatgaatataatgaataaataatgaataaatgaatgaagtgaataaataaattcattcaatcatttacttatatcagtatggactcatagttatttttccacttttagttataatccaacactatattctgttccttaaattgttccaagtttggccattaggagtcctttcaaatggctactttgcttctttgacatacccccattaatatgtgtgtgtatgtatatatgtatgcatttatttattttagcacttcttactttctgatattacaaaatgcttcaagatcatcttgtatcttttctgcaccagtcctagaatcagccatttcttcaaggagcccaggttccttttattgcagaatggtattagaaagcaagatcttggtgtgtagagtacttgttgctactggagtgtcttcgattctaggccgtctcagctaatagagttaggaaatatatgtgtgtatactaacccatgtacacrtatctatacatctttctattgcaactatttgtatctatattaagctaagtgtgggttcatactgatgtctttaatgctaagc

SEQ ID NO: 485883 - DNA, 681 bp, Homo sapiens
taggtaattctgtattatgggggttattaaaaaatataawgtttgaagatatcttcgagtcattttacctgctagaacaatacttgtctagtatcagttaactggtcacaaaggagaggtcttgtcttactctcaacagtctctgatggtgtcatttgaacactgacacatgcagatattttctctctttctttctcatatgtggtcttgttgaaactccacaataactgcgtttggaatctacagtcatataaatttagatcatcatgggagataattatactgtggaaatgatacgatatttacatgtcgaaaaggagtcataattcttcgaaatagatgcctgctagctttcttaagaactcatttcacaaattcaagttgaaacaaatgaatacatgttcctctttttgcttcctcttttgagcaattttatgattgaaaaaaaaagacacattaccacaatggaaaatacctcatttttccattaaaatgtgctctttttaaacagctatccccccacccacttccctgtttattgggttaaaaggagccatttctaggagaccaagccaaagtctcagcaaggaggtggaaagctaggtgcttggaaggctagtctgttacctaccctacactacaatgactgtggcagcatcaacaacagcaccaaaccagcca

SEQ ID NO: 485884 - DNA, 592 bp, Homo sapiens
acagtgaatggtactcagaaggtgcttaattaatggtagcttttgttctaccatcttcaagatttatcagaataaaacatttaatataaaacttccagggaaagttgcaatacttttcttaaataaaatagttgtagtactacctttagaatttttagaaagtcacagtttttaaaaaacaacccattagaatgtatgcatctactggggagcatgagccacatgaactcaaattattaatcctgcttgtgagtccatttgactagagctgagtcttctaatggaaaagcaattcagtaatcactctttgggattcagtaaatacctcataaatrcttataaaacatgtaacagaccctactgggcattgggattggcattaaggtttattatttgattgtgtttgaaatcagaaaaagctaagattgtgctacttattttttattcagagaagaaattaactggtgactggagctgattgactagaatggagcaacccactggatgtttatattagtcacatagcaaatattttttctgagtaattaacaaggattactttatagttgaaaacaattacggagcaatttgt

SEQ ID NO: 485885 - DNA, 588 bp, Homo sapiens
ctgagctgataagcataaattctattttctgtatacaactgaataaattgacttttagtgtcacactgttttaagtgaaatataggagctggtgctgaaacactttaatattggaagtggttacatataaaagaacttgatggaatacacaagacataaatgaatagactggatgtagcaaagtgctcccaaaatatagataatactggcagcacagaaaatgaagactcaagtaaaatatttgtgagacatgagtgaataaggaaaaaaaaaagataaagataaaagcagggtctcaaaacattgacctgctcagtatagaayactgtgtgaatgagaataaagatgtattttgttttcttctgggccctgtttccagaagcttaatgaaagacttaggctatcttttataattcaaaggaagaaaagcacacttttaagatctaaagaaacctctgtgtatagagtacaccaaggactcaatttcaagtatcatatccacagaaatgaaatcttaagataaatattagtagagactgtagcgattgtaatgatgtgacgacatttccatattaagtttattatggt

SEQ ID NO: 485886 - DNA, 633 bp, Homo sapiens
agtgggagctaagctatgaggatacaaaggcataagaatgatatataggactttggttagggataaaagactacacgttggatacagtgtacactgctcgggtgacacatgcagcaaatctcaaaaaccaccactaaagaacttatccatgtaatcaaaaacaacctgcaccccaaaaactattgaaattaaaaataaataaattttaaaaataaaaataatgcatgtaactcactcagcacaagccacagtgcacctgtcacatcataggyacctgacaatcagaaactcctactattagaactttatttccaagtattctgatatttattttggcatggaccacattgaaaatcctgcaaagttgaaggatttgacaaatgaataatgaaaattaattggcagaagatgaaatttcaattgaatttttattatatttgcaattatgttgattctgtaaagaaagagctcagtgaattgtacatgctttaccacaataaagatgggttttacagtacactgccaagcactggaaatatgtgatcagcttttatttttaaggacatctgtggataagcttgctagctagaaactcaaatacacagtttctccagtttttaaatacatgtgtgt

SEQ ID NO: 485887 - DNA, 638 bp, Homo sapiens
tacgtgtcaatttgttaatttctaatcgtcttgcattatttagtttttctggaatttggaacctgagtgattgtatgatatgatgaaacactgytttgaagaaggttcaaagggctagtgggtgagatccagagggaggcctgggcagatttctggagctataagcaatgttaggtgtgtctgtatgtgtgagtatatgtgtgactgtatctgttggtctaactgagtttgagaagtgaggaacacttcaggctaaaaaggcaagagagttcttatccacttatcctcttgagccaaataagagatatatgaagaactgagaaaacatcttacaaaaggaaatacattgtgaggcagttatttttcatatatttgtcttctctcctaggtgtttctcagcacaagacggggtgcatggatgtggagccaggtctgagattatgggatgctcatggacactgccctctttactcattttaaatctgtcctcaacaaatttcaccctgcattcttaatcaacagatggacagagaataaattaaatactcgatttaaccatgaaatctatggtttacaatccccacataggtatgttttgggatttttaaaacataatatggggtcttttggggtcagca

SEQ ID NO: 485888 - DNA, 550 bp, Homo sapiens
tgtagcgcctcacctcacccagacccgacagatttagtaaccagcacggtaattatcagcattagccaaccagatgtgaataggtgctctgtgcaaaataactctgtaataatctcacactttcctgcagctagccaggtaaggttacaacagaccaaaggtgctagggaaggacagaaaaatgcaggaaatgatggagatgttccagccaggaagtgctccagggaatacaatctggcttcagcacttgaacttgtgagggtttagcccagtgggccaggcagtcctggttggaaaatttctcatttctctgatgtcctcratgtccatttgctcagttcatgtcagtgtctgctcagagctccagcccttccccacccccaatcccgtgagagacctcttgtcctcccacattgcccaaacacagctttcttgaggcacatgcacacggttatagactgaattgtgcctctccggaccaaattcacatagtgaagccctaacccttagtgtgactgcatttggagataaggcctttaaaggggcaatt

SEQ ID NO: 485889 - DNA, 229 bp, Homo sapiens
ggttgtcggatttcctggtttatttcaacactatcttctggctcccagttaggcagctcgggggtgaaagctgcccttgatgtaagtaatgagcagtagaacttgcgttgtaggctgaccccacaggacactgaatgattctgtaattatgccacacagtattcattgaaggccatgcatgtgctgtacrctaacaacaacaatagcaataacagcagcagcagcaaca

SEQ ID NO: 485890 - DNA, 392 bp, Homo sapiens
ctggtgcctgtgccttttctcctgcctgtgattaggacacggtctgcacacgtttataggtaagggcattrgcacagagtaactaacatcctcaggtcacaggcagagcatccaatcccgtggctgagctggtggagtcacagctcagtgcagagccctaggttatctgagatgtgatcagtgcactgggtagcccagaatggattgctcaccaacaagcatttgtccagggcttgttaggtgtgggctctgtgttaggctggtgggaaaacaaagataaatacaacctctgccttcaaggagcttaccatacagcaggaaattggcgcccacattgtgctgaaagaggtaaggaatagggccgggcaaggtggctcgtgactgtaatccca

SEQ ID NO: 485891 - DNA, 534 bp, Homo sapiens
gttctttcaagaatgaagatacagtagagatatttttagattaaacaaaaactgagtctatcaggacagggcattcagcaargtaacatctttggaattaaagtgatcccagaaggtctttctgagatgcaagaaggaaaaatgagcaataaaatggtaaaaaaaaaatgtaaaaacattgtctttatacagtaacaacaaaactattattaatttttattattataactggcagggctaacaaagggcaaagactaaaatactatgcaaatgccaagagtaggggttcagagttaacatgtcttgaagtccttgtattgttatagaagggggttaagataatctcagagtttgttaagttaaaacgtatgtaaagtttcaaagtaaacctctaaaaaaacaaaagtagaggtataaatcccaaatcaataggggtaaaaaaaaaatgggatttagaaaacaagaaccttctgatgatggcagagacaggccatctggagtggccactgccatcacgctggctgcagcagggag

SEQ ID NO: 485892 - DNA, 534 bp, Homo sapiens
gttctttcaagaatgaagatacagtagagatatttttagattaaacaaaaactgagtctatcaggacagggcattcagcaaagtaacatctttggaattaaagtgatcccagaaggtctttctgagatgcaagaaggaaaaatgagcaataaaatggtaaaaaaaaaatgtaaaaacattgtctttatacagtaacaacaaaactattattaatttttattattataactggcagggctaacaaagggcaaagactaaaatactatgcaaatgccaagagtaggggttcagagttaacatgtcytgaagtccttgtattgttatagaagggggttaagataatctcagagtttgttaagttaaaacgtatgtaaagtttcaaagtaaacctctaaaaaaacaaaagtagaggtataaatcccaaatcaataggggtaaaaaaaaaatgggatttagaaaacaagaaccttctgatgatggcagagacaggccatctggagtggccactgccatcacgctggctgcagcagggag

SEQ ID NO: 485893 - DNA, 553 bp, Homo sapiens
ctttggaaattgggtctttgcagaggtaaccagttaagttaattgttctggatggtccagtgtttggcatctataaggaaaaggagagggggattcagattcagagacacagaaacacgcaggcccagaaggccatgtggtgacagaagcagggatggggtgttacagctacaagccagggaactccgagcatggctgagaatcatgagaaacaagagaaaggcaaggaaggactctcgcctggagccttcagagagagcatggccctgctggcgccttggtttttgacttctagcctccagaatgctgagagagtaaatttctattgtgttaagctaatgatctagtggtaatgtgtgacaggagtcctaggaaactaatgtattgtggattcaattgacccgtaagaaattgcagatgttcaactgctttgagccacacaaacagcaayattataggattcatcctaccatgttatgagcttgtaagaggaaaactttgtcagagaaagcttctgtgaggaatttctagtggaactgaaatctagaaaaca

SEQ ID NO: 485894 - DNA, 596 bp, Homo sapiens
ggtgaaatgctgttccttttaaagagttttgacatttagaaaagaacatcaattgtgacaaaagcagaggtgctgtgactcagttgttattcttacacattttctaaaagaaaacttaaaaaacagataayaattttaaaggacaaatgaaggtgacagaacactcagttcaccaatgacacagactgagagattcactcatggtcattaataaaataagaaagaaggtactaggtatttctagctttgatctaagtgctttgaaaactcaatttaaagaaaaaggaatattaaagggaaagttagaagcaatcaactgtgtcactgattattcctctctagtgtttcaataatggaagtccttcagtgtaaatgggttttaaaatggaaatagctttatgatttagggttctattatgaggacatcagatcctcctttaaagatataaactcaggataagtttagttttaatttgacagaaaatcctgttaagcctaattttttaaggcatttgaatccagatacatatttctgaagtattagaaaaatactgagataatatttctctagtttcatgaagctatacagaactcat

SEQ ID NO: 485895 - DNA, 594 bp, Homo sapiens
aaagtctgaagaagaggatgttcatggttgaagatcatgtaaggaggaacgatgctgtctcccttcctagaggattctgctgaactgtaaatgatggctttctgcaattcaccatttaaaaattcaatctgtgtcatttgccaacctgaaaaccatttaagtgtttgagacatgttgataagtctctttgaggtgaggcatgaaacaacaacccactcccatacctctcttttatcatccaccatgttccatatkatttgaaagtggcgaagatcattgtaacttaaaagctggtcctcctcagtggaataaaacaaggagaaattctccacaattatggcttttaaaaaaagaaaaattcagaagttagaccattatgctaatctgtcatattttagaaagagtaaaacatctattattaataatggattctatcacctatatcataagccaaatttttaaagtgcttttagtatggtttccaaattggcatgtttacacttggactaagctatttctccagctcctgcctttccaaaacatgagggtcgtaagcacaaacacacattctgtgtatagagatagtcatgccag

SEQ ID NO: 485896 - DNA, 621 bp, Homo sapiens
actagtggggattgacagacagacagtataaacatggtgctaaamtaacattgtgagaaccttggggaggattcaatgagctaatgcacacagtaggtatatcataaattgcagcattgtacgggtgcttctgattatcatctgaacacatttctgaataaatctccacaatttaacatctgctaattctctaaagcacccaccatttcttttccacctttcatccctctgtatctcttctccttcttttcttagttctgccagaagcctataaaggcattgcgctggctggctgctggcccttggaaaatgggtagatggcacacaagactggagaaagaagctcgtagttgcaagggtaggcacacaccggcttcggtactcacagagctgccatggcgccttttctgaaggatccatcttcactgcaatcactctaatcaccgtggcaaccgtgcacccatagactctggcaacaatgccaatgatagtgaagagcattctcttaaacttgcactggagagggagaaaacacacctgtgagagcacatggctcttagtcccctctctccctctcagaagggctgagcctgaagcgataccctcatttcatagacgcca

SEQ ID NO: 485897 - DNA, 653 bp, Homo sapiens
cattgctgatagagttcatcaagaagtcacgacagctgcatccaggagagagaaagtcagagtacagagagctgtcccagcatcatagcagcatatcccttgaggaactcaaagccaccttttatagcaaacaacaattgtttattaatcttcacacataktgtaagcggtattgtgcagccctggaaatagtcaatggaaagagtattaaggtgtaaagtcagaagacatgggtataagtcttaatcacgtaatatttattccttttttcattcaaaaagtggctgggacaggtagcagataggcaaaggtgaataagacagattcattgtggataggctgtgtcatcaagatcattagttgtatgactttaggcaagtccctgaacctctctgggacttgggctcacaaaaaaggtcattacatattggctgtccaatgtccatgccttcctttggtacatcagtacattttcctctcgtaaccaacctcttctatattctcagtcatctatttctgatagaattgattcagatctttgactccaagattagacatatgacccagcctggccaattagggattacagttccttggctatagtgattggttcaggattgagggcaagactcaatccattgagaggcagaact

SEQ ID NO: 485898 - DNA, 653 bp, Homo sapiens
cattgctgatagagttcatcaagaagtcacgacagctgcatccaggagagagaaagtcagagtacagagagctgtcccagcatcatagcagcatatcccttgaggaactcaaagccaccttttatagcaaacaacaattgtttattaatcttcacacatagtgtaagcggtattgtgcagccctggaaatagtcaatggaaagagtattaaggtgtaaagtcagaagacatgggtataagtcttaatcacgtaatatttattccttttttcattcaaaaagtggctgggacaggtagcagataggcaaaggtgaataagacagattcattgtggataggctgtgtcatcaagatcattagttgtatgactttaggcaagtccytgaacctctctgggacttgggctcacaaaaaaggtcattacatattggctgtccaatgtccatgccttcctttggtacatcagtacattttcctctcgtaaccaacctcttctatattctcagtcatctatttctgatagaattgattcagatctttgactccaagattagacatatgacccagcctggccaattagggattacagttccttggctatagtgattggttcaggattgagggcaagactcaatccattgagaggcagaact

SEQ ID NO: 485899 - DNA, 636 bp, Homo sapiens
acctaggaatagttctaatagaaaaaatttattgtagtttagaaatattagctaaataactactccaaatattttaaaagctattatattttattatatttatattcatttaatacytttaaaacttaacaaatggattaatgtgagtatgtcaacactatcttgagtgtggaaaaactaaataccaaaaagactaagtgatgtcttagattacacatttagttggaactagagtcaaaattgaaaggtgttctaacactctagttaccacctctggttcctaggctctactgacaacaaataccacagaacaaacatgttttgctttgaaaaactaataattatttacaaataatgtaataagtagcattattaataacttcaagtaaagaaggattgagtattcatgaggttttctatcagttaccattattctctaacaaactatcccgaaacatcgtggcttaaaacaacagtttattatttcttaagattttgtgggttgactgggaagttcttttgctggtctcttctgggctacctcatatccctggattttttcaaaccaaagatttccctagttggaagatacaaaatagcctcactcatagatcggacaattggtctactacctgt

SEQ ID NO: 485900 - DNA, 636 bp, Homo sapiens
acctaggaatagttctaatagaaaaaatttattgtagtttagaaatattagctaaataactactccaaatattttaaaagctattatattttattatatttatattcatttaatacctttaaaacttaacaaatggattaatgtgagtatgtcaacactatcttgagtgtggaaaaactaaataccaaaaagactaagtgatgtcttagattacacatttagttggaactagagtcaaaattgaaaggtgttctaacactctagttaccacctctggttcctaggctctactgacaacaaataccacagaacaaacatgttttgctttgaaaaactaataattatttacaaataatgtaataagtagcattattaataacttcaagtaaagaaggattgagtattcatgaggttttctatcagttaycattattctctaacaaactatcccgaaacatcgtggcttaaaacaacagtttattatttcttaagattttgtgggttgactgggaagttcttttgctggtctcttctgggctacctcatatccctggattttttcaaaccaaagatttccctagttggaagatacaaaatagcctcactcatagatcggacaattggtctactacctgt

SEQ ID NO: 485901 - DNA, 453 bp, Homo sapiens
tccaaaagattttgtgtaccattctggcatgtggcccctatcagagaaaagaaagaaaagctgatgaattatttaagttagaaagcatggaaataaaatgagaaacatctgtttgctagttcaaatgcataaaatctatcatttcccatgcctttgaattcatggccgagctaccatatttgctttgctttagaaccacattttctaagggaaccaaattacgaagtggtcgctgaaagaccaacaaacatgaaatgctactttctaaacaccattcttcatgaagtyaccaagaaaaaatgacgtgtttgtttaaggcattctttgcattagacaaaaagtcagaatttccttcatgaccctcaccatataaaaaaatcagaatcagaacataccttaagtcaactctgcacatgtaggtgagtttggattttcctggcccacagggttcaa

SEQ ID NO: 485902 - DNA, 409 bp, Homo sapiens
gagatcaggagttcgagaccagtctggccaatgtggtgaaaccccattgcttctaaaaatataaaaggtagccaggcgtggtggcaggtgcctgtagtcccagctatgtgggaggctgaggcagaattgctttaaaccagaggcggaggttgtagggagctgagaacccaccactgcactccagtctgggtgacaagagtgaaactccatctcaaaaaaaaaaaaaaacaaaaccaaaaactgatgtccaagctgaagaaagagcaaaagagcatgacaggcagtgaacagcacaggtcttgttgccaaatcatgttttaaaaatctgccatggagaacaaataagtaacaacaccccatataacaaaatgataggttttmattttgatgtattgaaacattttcagag

SEQ ID NO: 485903 - DNA, 409 bp, Homo sapiens
gagatcaggagttcgagaccagtctggccaatgtggtgaaaccccattgcttctaaaaatataaaaggtagccaggcgtggtggcaggtgcctgtagtcccagctatgtgggaggctgaggcagaattgctttaaaccagaggcggaggttgtagggagctgagaacccaccactgcactccagtctgggtgacaagagtgaaactccatctcaaaaaaaaaaaaaaacaaaaccaaaaactgatgtccaagctgaagaaagagcaaaagagcatgacaggcagtgaacagcacaggtcttgttgccaaatcatgttttaaaaatctgccatggagaacaaataagtaacaacaccccatataacaaaatgataggttttcaytttgatgtattgaaacattttcagag

SEQ ID NO: 485904 - DNA, 478 bp, Homo sapiens
gctggtcctcagtctgactacatgctagtatttcaacttgagtattatactgctaaaacttcaaataggcatatagccctaggccctttggacctgttaaccctgtccaactctacctcttaacctcattcccactgtcttttaaagcaggtgtctccttttaccttttaaattttgtcagggtactagcatctctcaggcactaaggctcaatgttttggaagaactgtgaattmaatgtaattaacaatagacctatccagggctttaatgcagaaggtttaaatcaactggctgtgaggagaatttccaaggtcttcttggatggtaaaaaatattcatttcagtaatccctaaatgaaaatttagctatttctttaattatgaacataggcataaaccacagtagtatgaattgtgactttgtcactgtagtaattatgaatactattatatttcattatctttgttgaagatg

SEQ ID NO: 485905 - DNA, 478 bp, Homo sapiens
gctggtcctcagtctgactacatgctagtatttcaacttgagtattatactgctaaaacttcaaataggcatatagccctaggccctttggacctgttaaccctgtccaactctacctcttaacctcattcccactgtcttttaaagcaggtgtctccttttaccttttaaattttgtcagggtactagcatctctcaggcactaaggctcaatgttttggaagaactgtgaattcaatgtaattaacaatagacctatccagggctttaatgcagaaggtttaaatcaactggctgtgaggagaatttccaaggtctycttggatggtaaaaaatattcatttcagtaatccctaaatgaaaatttagctatttctttaattatgaacataggcataaaccacagtagtatgaattgtgactttgtcactgtagtaattatgaatactattatatttcattatctttgttgaagatg

SEQ ID NO: 485906 - DNA, 562 bp, Homo sapiens
gttgtttggggtggggggattgatcatgggggatcaaccataaygagttttgatgtatcatgcttggaaatgtttctcatgttttcccatatatcatctgtttgctaaaactgtcacaaatctacttctaacaacatgagaggctgggaagtattgtttgcctgtgtgtttagaaaaaagaggaaatgaggtaggtgatgagtttgcaatttctgtaaaattctactatttgggacatgaaaatataaatgtaattttcttttaaaatatggaatatacttacatccactgcatgagagacaaaccaaagttccctccaatcattgtacccaagatctttggatctagcagagttatgtccatcaattctggattggttcctcacatctatcaatgaatgaacttaaagcaacaacattttccagcccagacagatgatagccacaataactgcatttctcgtgtagaagagggaagaatagaagacacaaagcaattcttgataaaaatattatgcatgctgaagacttccgaatttatgggtagggcatgtctcttgatt

SEQ ID NO: 485907 - DNA, 588 bp, Homo sapiens
actccagtgttggcctcccaaagtgctgggattacaggcgagagccaccacacctggctggatagaaggyttttaaacctcagcactacaacattgataatatgggccagataattcttcagtgtggatggctgtcctatgcattatcacatgcattgctggtctctacctgccagatgctactagcaacaactccccccacttccaggttgttacaacaaaaaatttctttagacaaggccaaatgtcccttggagatgagatcctcataacatcctttaccactgatttagtgtgagtgatttcttcaggcctcccccggtattgatattgtaccattccaactaagatggttaacatctggaggttgacagcttaatacttggtggttgatagcctattcaatgcccatgtgacaaacaaaattctccataaacaccacttattctctggaaggcaaaattgttctcagttgaaaactaattgtataatgtatgtgatagaaaaaagagtttaatacatttaaaaatatagaaaagtaaaaaagtatagaaaccatcctcactgacccatgtgttttaaattaat

SEQ ID NO: 485908 - DNA, 385 bp, Homo sapiens
atcaaaaacctacttgattaatatctcctgactttaaagtcttcaatggttcctctgagcctyaatgccctcataaactgaccccagtctctttcttacagccctccttgcctcttattcctgcttgtccctgtcaaaccaccatggtatctatgcttgagtcaaatgtatctgctcactattctctgagcaagttcaaccacctccccaccccgacttttaaaggtttcacatattttctcatccttgaaatatttgttatctcttcccacatactgaacaaatacatttcaagtgtttggtgacactttccctgactactcttccagagttagatatgtctttattgatgcccctttaatattgtgtagatgtataacttttg

SEQ ID NO: 485909 - DNA, 588 bp, Homo sapiens
actccagtgttggcctcccaaagtgctgggattacaggcgagagccaccacacctggctggatagaaggcttttaaacctcagcactacaacattgataatatgggccagataattcttcagtgtggatggctgtcctatgcattatcacatgcattgctggtctctacctgccagatgctactagcaacaactccccccacttccaggttgttacaacaaaaaatttctttagacaaggccaaatgtcccttggagatgagatcctcataacatcctttaccactgatttagtgtgagtgatttcttcaggcctcccccrgtattgatattgtaccattccaactaagatggttaacatctggaggttgacagcttaatacttggtggttgatagcctattcaatgcccatgtgacaaacaaaattctccataaacaccacttattctctggaaggcaaaattgttctcagttgaaaactaattgtataatgtatgtgatagaaaaaagagtttaatacatttaaaaatatagaaaagtaaaaaagtatagaaaccatcctcactgacccatgtgttttaaattaat

SEQ ID NO: 485910 - DNA, 588 bp, Homo sapiens
actccagtgttggcctcccaaagtgctgggattacaggcgagagccaccacacctggctggatagaaggcttttaaacctcagcactacaacattgataatatgggccagataattcttcagtgtggatggctgtcctatgcattatcacatgcattgctggtctctacctgccagatgctactagcaacaactccccccacttccaggttgttacaacaaaaaatttctttagacaaggccaaatgtcccttggagatgagatcctcataacatcctttaccactgatttagtgtgagtgatttcttcaggcctcccccggtattgatattgtaccattccaactaagatggttaacatctggaggttgacagcttaatacttggtggttgatagcctattcaatgcccatgtgacaaacaaaattctccataaacaccacttattctctggaaggcaaaattgttctcagttgaaaactaattgtataatgtatgtgatagaaaaaagagtttaatacatttaaaaatatagaaaagtaaaaaagtatasaaaccatcctcactgacccatgtgttttaaattaat

SEQ ID NO: 485911 - DNA, 643 bp, Homo sapiens
tgaaaaagaaaagtgaaataaatcactggagggccactcaacatggaaacacacccggattgataatagcctgaagtatctttctaaatcaggaaacaaatatttattgtctttctcttatgtttttattcagagaaagatcatctgatttgttcttaacaactgcccttggagaaatcgtagtactctaaatcacagtgcaaacatgccttgccttggacatatgtagaaatgtgcctttatttccagtcagtcaggtattgccaaaaaggaaataaggaacatatgaataaaagaaagcagagagaaggagcctgttgttttgagaaagactgtctttctgctggcattgtaacggtagacacgcctgagttctgagacccatgtatttcagcttggccaccattcctactgaggagaagaccctggaaaaggtgaacaggtatttgaaatccatacatgtagaatacttggggaagttgtcagaatggacaggtgcagtggtaaatatgagaaaagaatagttagcgtttggctgccatacagtataccagttcagccaaatatgagttcttcggcawcagccctcaagttttcttgaggatgtgctgcttcattggggcaatttgccctttggcaccca

SEQ ID NO: 485912 - DNA, 570 bp, Homo sapiens
tgaatgcaggaggtattgcgaacagaaatgggaagtagatttttggaaagactattcacytggctatatttactaagcacatctcctgtgtgtcagacgttgagaggggcataggtggtagaatgaagaagcgatccttgctttcacaaaagttacactttagtagacaagacagctattaaataataaaacaagtaaataatataatttccaactgttaaaagtgctaggaaaaaaacagaatgttatgagagtgaatgatagagaaaatttactcaggaccataaggacagctactcaatggcttcttaagcaaataatatcagaggaatgcttaaaacaggaggtgataattggaaccaatgggaattgcaaggttgcaatgactgtgaaaggcattgtgaggataaattctgcagactgatttgttaatttatttagtccaaaggataaaagaaaaagaagatgccaatatgactgattttttgggcctggatgactagggacttagtagacccttcagcagaaataactatgttgggaaagagtttttaagaggaaaagagacta

SEQ ID NO: 485913 - DNA, 501 bp, Homo sapiens
attgcgaacagaaatgggaagtagatttttggaaagactattcacttggctatatttactaagcacatctcctgtgtgtcagacgttgagaggggcataggtggtagaatgaagaagcgatccttgctttcacaaaagttacactttagtagacaagacagctattaaataataaaacaagtaaataatataatttccaackgttaaaagtgctaggaaaaaaacagaatgttatgagagtgaatgatagagaaaatttactcaggaccataaggacagctactcaatggcttcttaagcaaataatatcagaggaatgcttaaaacaggaggtgataattggaaccaatgggaattgcaaggttgcaatgactgtgaaaggcattgtgaggataaattctgcagactgatttgttaatttatttagtccaaaggataaaagaaaaagaagatgccaatatgactgattttttgggcctggatgactagggacttagtaga

SEQ ID NO: 485914 - DNA, 564 bp, Homo sapiens
tcgtttaggcaaacagactataacatttgcaaatggacaatgatcatgagatgttccatactctttgtatttttttaaaatgatattaagattttgataccctctaacatcaatgaggagtcataaagttaactttaactggaaactactgaaaggttgaaaaaagtgattccaaatatttatatctaaatttaccttaatattttgccatagttgagtgtatagctccctgaattcagattaataaacaaagcattactagcaccctggaaatcctctgttttagttagggttctccagagaaacagaaacaataggatgtgggtacattctttacatttayaaagagatttattgaaggaactggttcatgcagttatgtaggctgacaagtcctaagatcttcaggctgagtcttctagaccaaggagagctaatggtgtggttgcaggccaaaggccagcaggctccagatccaggactaactgatgtttcacttcaattcccaaagtaggacaaagctggtgtcccagttcaaatgaagtcaggcaggagcaattcact

SEQ ID NO: 485915 - DNA, 496 bp, Homo sapiens
gctaccatgtctatctttcatctatcatctatttctatatgtatccatcatctatctatctatcatctatcaatcatctattatctatcatctatttatctagcatatcaatttatctatcatatctatcatctaactatcgtatctatcatatctattatctatcatctctcatctctacatatctatcatatatatcatctatcaatctatcatatctatctctttatcatatcattcatctatcaatcatatctatctattatctatctatctatctatctatctatctatctatctatctacctagtatctgtctatctatctaccttcctgtctttctatcctatctatcctattcagccttggtttcttatttgaaasaaagacaagtaggcactcttcccttcatctattagcctgttcaaacctccaattatttaactgttctttaatttctgtggaacctgttctaggcaagagaactgaaagcatc

SEQ ID NO: 485916 - DNA, 552 bp, Homo sapiens
atttcaaacagaggcaaagccctctaagaagcgggccacgtaaatcgcttcagctttggcagaggtcaggaaagagaggtgttcaccatacaagccaaaatctttttttttttttttcaggtaaggtctcactccaccactcaggctcaaggacagtggtgcaatcatagctcactgcagccttgaactgctgggctcaaggkatcctcccacctcagcctcccaaagtgctgggattaaaaaccatcacacccagccaccaaaatcttaaaagttcttgaaggccaagtgtgggccagtgtgtctggaacaggcttttctccacggggcccccatgagaagtattgggctacgtcaggagccagaggaggccccctcgacagccaggtgtgtaggaggtgacctgtgactgtgcaggcaggggtggagggaggaacggacacaaagctttcaccgcttctccagatctttccctcatgtgaagcaaaaacagaccctctcacctttatttttatttttgaaattgtggtaacatttattctgagaataaaa

SEQ ID NO: 485917 - DNA, 541 bp, Homo sapiens
ctgtcccacctcagaagccccagcttgtcctctccgatactattttttactcttcagagccataaagcaaagactgatcctatatttgaccttggccttgggcacaaatggagggaagttatggtttgcacaggtaggaggagagcttctggtgactggcaggggtaggggtaggggcaggggtaggggcggactgactagggaccccatttgcaggtctgttgagaagttctccttgtcagaaataaccccaggggcaggacacaaagagcccacattctttatccaataactccttgatcctgttgccgctagggaaaggcaccagtgcccaaggaggagccgtggtgttggaagcagcatggggaggctrcttctcttcccaagtccagcagcctgcagcctccttccctccgccagcccagaaggcatgtgttccaaagcccctcattaggcctctcttagcaagcaaacaagtatcattaatcttggtaaagtgagtgaaagcacattcacctgtccgagcaagagaattaatgtt

SEQ ID NO: 485918 - DNA, 610 bp, Homo sapiens
gtttcttccatgtatttttggaatgtggtttgttttcaatgcgactttgcaggctctgcatttttcaggaactctttcacaatttctagtgtaccaaagaatcttcttactttttccagtatggttatcaaaagacactctactaacatgtaatttaatacaaaratgtgttctcaaacaagaatcactaaatatttggtgaaactccacattatgacagccagtaacctcaacaaatggagaaaatgttacacaagaaagcataattactagaagtagcataacagtaaactaacttcaattaactacctctaaaacatattaaaaatataatatgtgcatgtatacatacatatgtgtgcagtaatcatttagagatcgtagatactaaaaactagattgttgaagtcataaattcaatagatgcctacaaagcaaaatgcacctgggagaagaacgattaacaagctggaagtttaagtcaaggaatcttaccagaatgaagcagaaatgaataaatacatgagtatgacagctaaatgaagacacaaggccaaaagttttatcatctgattaaaaagagttcaagaaaagaaaataaagaaaatgt

SEQ ID NO: 485919 - DNA, 610 bp, Homo sapiens
gtttcttccatgtatttttggaatgtggtttgttttcaatgcgactttgcaggctctgcatttttcaggaactctttcacaatttctagtgtaccaaagaatcttcttactttttccagtatggttatcaaaagacactctactaacatgtaatttaatacaaagatgtgttctcaaacaagaatcactaaatatttggtgaaactccacattatgacagccagtaacctcaacaaatggagaaaatgttacacaagaaagcataattactagaagtagcataacagtaaactaacttcaattaactacctctaaaacatattaaaaatataatatgtgcatgtatacatacatatgtgtgcagtaatcatttagagatcgtagatactaaaaactagattgttgaagtcataaattcaatagatgcctacaaagcaaaatgcacytgggagaagaacgattaacaagctggaagtttaagtcaaggaatcttaccagaatgaagcagaaatgaataaatacatgagtatgacagctaaatgaagacacaaggccaaaagttttatcatctgattaaaaagagttcaagaaaagaaaataaagaaaatgt

SEQ ID NO: 485920 - DNA, 419 bp, Homo sapiens
agtgtcagatacttcagaagacagggtagaggggacctgaaaacaggaattgtttagtctgtataaggaacagttagaaagacccgccaaactcggctcctgtagtcccagttactcaggaggctgaggtaggagaatggcgtgaacccgggaggcggagcttgcactgagccgagatcgcgccactgcactccagcctgggcaacagagcgagactcttgtctcaaaaaaaaaaaaaaaaaaaagaaagaaaagaaaagaaaaagaaagacccgctgaactcatatcacttaattacatagtcaagtgatcaactttcccatctttagggaattggaagtatattatctggaaaatgaggacaaragaactccaggcttggatcagctagcatggaggaggtagggggtgaaatgcca

SEQ ID NO: 485921 - DNA, 633 bp, Homo sapiens
aagtataaaaccataagctggcagcagaccttgctcagggaataacaggggggtcagtatggctgtaataggatgaactggggtggagggagacataaaggatgagtcagagaagtggtgggatgagggtagagtacaggcattttggctttcactctggagaagtcacagtggagagccattggagagttaggagaaagaataactgatcaggcttacatattaaaagggtagagaatcagcaataaataagagtttttgtggttggaagtactgtgtcatttgtgatataaaggcccaaggcttgagtcatggttagaacatcaagagtgcaagcacagctctcccctgggtcctcagggaaactgttcacattttcagatgaaagttctatcttttttctacttttatgttagaatcaggaggtacatgtgcaagtttgttacaaaggtgtataaattaactcaagatggattaaagacttaaatataaaacttcaaactataaaaatcctagaaaaaaataggaaatatccttctcaatattggccttggcaatgaatttatggmtaggtcttcaaaagcaattgcaacaagggcaaaagttgataactaggacctaattaaatgaaac

SEQ ID NO: 485922 - DNA, 444 bp, Homo sapiens
gggattatcataataatgtgagaataataacataatatcacaagcactggtcttagagaaggcaaggcaagttttccattaggccaatattgatgccaayaatttctttgtatattataattttaaaagttctttcccaggtattgtttttataatagcccttgtgcagaaagtgaggcagtttttaaattattactaacttacagatgagttacctgaacttctaaaggagttaacagatctccctaaagtgatcaagctattaagtggcatggccaggactaaagtgtaggctttggcctccaagtccttggtttcttccaccctcctaagagagtgggcctttggaagctttggcaatggggtaatggtactttgtcttggttcctgagatgagtaagtggatgttttcaggtcactgccaaaggctgaccacagatcctc

SEQ ID NO: 485923 - DNA, 444 bp, Homo sapiens
gggattatcataataatgtgagaataataacataatatcacaagcactggtcttagagaaggcaaggcaagttttccattaggccaatattgatgccaacratttctttgtatattataattttaaaagttctttcccaggtattgtttttataatagcccttgtgcagaaagtgaggcagtttttaaattattactaacttacagatgagttacctgaacttctaaaggagttaacagatctccctaaagtgatcaagctattaagtggcatggccaggactaaagtgtaggctttggcctccaagtccttggtttcttccaccctcctaagagagtgggcctttggaagctttggcaatggggtaatggtactttgtcttggttcctgagatgagtaagtggatgttttcaggtcactgccaaaggctgaccacagatcctc

SEQ ID NO: 485924 - DNA, 444 bp, Homo sapiens
gggattatcataataatgtgagaataataacataatatcacaagcactggtcttagagaaggcaaggcaagttttccattaggccaatattgatgccaacaatttctttgtatattayaattttaaaagttctttcccaggtattgtttttataatagcccttgtgcagaaagtgaggcagtttttaaattattactaacttacagatgagttacctgaacttctaaaggagttaacagatctccctaaagtgatcaagctattaagtggcatggccaggactaaagtgtaggctttggcctccaagtccttggtttcttccaccctcctaagagagtgggcctttggaagctttggcaatggggtaatggtactttgtcttggttcctgagatgagtaagtggatgttttcaggtcactgccaaaggctgaccacagatcctc

SEQ ID NO: 485925 - DNA, 377 bp, Homo sapiens
aaaaaaaaaaagaaaaagaaaatgtttatgtgctattggggtcagccttagtgcaagaacattagttaagtgtgcttttaataatggaaggagttccaattaaggtaggatttggacaacttcagggaagtttggtttatgttgggaaagggaaccctgacctcggatttgctgtcttgggtcttttccatcccaggccttcaccttgccgggttcatttcctctccctgtaccctaaacactttcaattatggacactctcttgtctctgaactcggataaatgctaccttgtyaactaatagtaccactgagtatattaatgattaatagctaattagtcataatactgtaatacaatggaggcttcctttaccg

SEQ ID NO: 485926 - DNA, 592 bp, Homo sapiens
tgtcatcctgactgcatttgggtggctatttgattgatgtctgctccccattacactgcaggctccatgagggcaagagccagcctagcccagtgcctgccacatagtaggtgctcaataaatagttgtttgagtggggcctgaatgagtgagcaaagccttaaccaagccaggaccaggagctcagagcccttggctccccagggcgggaagacggttatttaccaaggcaggaccaggagctcagagccctcggcaacccgggaagggaagatggttaagtgcccgaggctagctggggaagccacagtttgtgccctactggaagagaatgccaccagctctgtgcttgggccagcaattggtcactatttgaaaacagagyttgccccatagcaagcagccccacagagactggatgtggagggtgtggaggagggtgccagttagagcagtgaatcccgccacagtcccactgctgctgtactctcgcaggggtctggtctttgggttttgggagcctagcgcttgctacctctttacttttgagatggtcctccccaggcacaccccagagaagagaagtgggagg

SEQ ID NO: 485927 - DNA, 596 bp, Homo sapiens
agaaatacttaaaaggttaaggaaactcttttaaaaattagaatgactgaatgaacagcttctctccacagtttctataatttttaatgatgaaactatagtaataccccaagcacttaacacaccttacatttatgaattcatgtttcatacaggcaatttcactttattttctgttttatattctatgatgtgtttatctgatagyacctaaaaaaactcttataccttattccttatgatacttatctgtttattctttggttttctgttcaattttcacaatccctcacactgcataaacatagtcatctgtctatgaaacaaaacccaaattgcatgtcatagcatttacccaattgcacaaataaattaacaaaaactgcaagtaaatacttaaccaaatatcaccaaagactaaaatgatgtattgttttgccagtatgttttctaatcatttcaggaatattgcaaaaactctaacaaccaaaacatacagacctcacatatatcctagggacatcctataaacagcataattatagcaaagacaagaatagatataccttttctctccattgctgagaccagaaggc

SEQ ID NO: 485928 - DNA, 598 bp, Homo sapiens
ggccagcctgtgcccactcctcgcggacctgggtactgcttccagagatccttcagtcctgggagtttaatcattctgtcccggcctctttgctcccagccctcccctggcagttgctgctctattgttctagctcagttttcactttttgcccttgcaatgcacaagggttagcaattcttgatggtacagtctctctgttcgaagagctggggtggtttctacttctagctggaccctgagtgatccttcaggcaggggtctctgcgactggagacatgctgtgtgcatgaggtcccatgtacactcagattgcatcccccatccctgcccagccctgagaggcaggcgagrcagtccccctctcaccatctctggggtgggcctggatttattggctgaagaattacaccctctttgatggtatgcagtttaattccgtagatcaaagctatgtctagattttaaataaatgatagggatttaaaattgtatataaaacacagtcattgtatcttgctttctttgggtatgtattctttctttaattgagcaggcaaagaattttaagagaaaaatataaaatgcagctatagta

SEQ ID NO: 485929 - DNA, 602 bp, Homo sapiens
gggaacttggaggcctgaccatggacggagtgctccctgtgcgggccccggacctggaacgcccacttgtgaaaccccagcctgctgaccttcgggtcatggcgcaaagtgaagcctgcctgtgacttggaggcaggagggcgactggagtggcgggaaatgatggcagccatctggctgtgctatttaccctggctgcgaagccaccctcctccagctcttcttttccctycccttcagcatcctcgccccaagcatactgccacgcccactgacagcgatcaaataataacagcagcagcgacatgtcctgagctcccactgtgtggggtgtgcattctcccctttcttgtcactctccctgggtccctcctgcctccctggctgcacctcttcagtcttctgtgctggacccctcgtctgcccagccctggcctagctcactgacggccgtgtggttctggcctgaaccaaactctgtcctctgcttggttttcacccaccactggacgtgctctagaggcacagggctgtgttgactgtgtaatgtctagaacctaagcgccaatggggtggcctagccctggcacagacgcgatacc

SEQ ID NO: 485930 - DNA, 589 bp, Homo sapiens
ttaaacccaggtggtcagacatccagctcatattctgcctcccgacagccctgatgttgcacaaactcatcagccaaatgaccctgagaacaggttcaagccatacttcgatgaggtcacacttgatggctgccttcaggagcctggcccgctctccaagcttggagaacgaagctggggagatggcttcctgaaaggaggttaaccacaggtgaaccagagtctaagcccacgtgggccagccctgcttccctggagagaagactcagcaaagatcttcctacctgggcaccctctgagaaarcaatgctgctgagcttgcatgagagagcagagcaaaggcctgcagtccacggccagagccctggctcagagcctggctggggccctcattaggtgtgaggctactcctgttagtgttgctgcataaagtcccaaacttggtggcataacgccgccatttattgtattcacagatgctgtgcttcgggaattcggacaaggtgcaacagcgtctacttgcttcatggtgtctagggcttcatctggggacgcttgaaaacaagggttgggggatgtgacttgacag

SEQ ID NO: 485931 - DNA, 532 bp, Homo sapiens
tgctaaccttattgtgaatgtatggtgtgtccagcacagagctgatcatttccacatttgatcctatttaacctgtacaccagctagcaaaggccagaactcatatttgaacccatgagccaatgcamttcatctctatgctatcccacttctgacaaacaatctgtaagctttttttccccagcaataacaatatattacccataataatggagcaggcacaaatgccatggcccatgctctcatgtgtgcaaagattcaactttatttgcctttccatgagaaactgcttcctatctttagtccccatttctccctaatgacaaaaaaacaaaaggtaacctagtcatttccatggaaaaccaattgaattcggtgatttctcaagttaggttaaagcttgttgaaatttaggatttttctccctgaaatgacatctcaatttcacagggaatgtacagatcattgtgtctaagacatgcctggtttgtggtggtgatagagatgatattaggttttcccaagccccgtt

SEQ ID NO: 485932 - DNA, 532 bp, Homo sapiens
tgctaaccttattgtgaatgtatggtgtgtccagcacagagctgatcatttccacatttgatcctatttaacctgtacaccagctagcaaaggccagaactcatatttgaacccatgagccaatgcacttcatctctatgctatcccacttctgacaaacaatctgtaagctttttttccccagcaataacaatatattacccataataatggagcaggcacaaatgccatggcccatgctctcatgtgtgcaaagattcaactttatttgcctttccatgagaaactgcttcctatctttagtycccatttctccctaatgacaaaaaaacaaaaggtaacctagtcatttccatggaaaaccaattgaattcggtgatttctcaagttaggttaaagcttgttgaaatttaggatttttctccctgaaatgacatctcaatttcacagggaatgtacagatcattgtgtctaagacatgcctggtttgtggtggtgatagagatgatattaggttttcccaagccccgtt

SEQ ID NO: 485933 - DNA, 502 bp, Homo sapiens
tcctcacttttcaaagagttaaaagatgaagctaactaaagtagagatgttggctgacattcatactcaaagcctcgtaagaagggcccagggcttccctaatgacatactttaatggcgtgaggattttttaaayggaccccaaaataaggcaaaaataaacacaaaaaagcctccagcagggaggcacgaagcctgaaaggcaaatggcatcccttcctgccctcctcagctcacgaggcagcttcttcctgccttctgagtacaggcgactgacctgcacacagagcacctggagccttctgaccttcatgaaagactcttgtgtctgaccacccctcatcctgggaatatcccacagcctctaggggctgcctgcatccctggggactcagagtgtccatggtggacctgaggccacagctgagattgttggtggggacattcctagggaggggtctgtgcagtgtgggtggcacattaagcaggcagccagaggagc

SEQ ID NO: 485934 - DNA, 502 bp, Homo sapiens
tcctcacttttcaaagagttaaaagatgaagctaactaaagtagagatgttggctgacattcatactcaaagcctcgtaagaagggcccagggcttccctaatgacatactttaatggcgtgaggattttttaaatggaccccaaaataaggcaaaaataaacacaaaaaagcctccagcagggaggcacgaagcctgaaaggcaaatggcatcccttcctgccctcctcagctcacgaggcagcttcttcckgccttctgagtacaggcgactgacctgcacacagagcacctggagccttctgaccttcatgaaagactcttgtgtctgaccacccctcatcctgggaatatcccacagcctctaggggctgcctgcatccctggggactcagagtgtccatggtggacctgaggccacagctgagattgttggtggggacattcctagggaggggtctgtgcagtgtgggtggcacattaagcaggcagccagaggagc

SEQ ID NO: 485935 - DNA, 624 bp, Homo sapiens
gcaggggtttgtctcctaccaggcaccaacctcttcctctcccgcsacccttttagtactactgctccccactcccatcccacacagaaagttctagatctcacccaagccacacagaaacccagggaacctcctctatggcatctcagattccctccatatctaaacgtttcacaccatcatttctcctctactgaagccccccagcatgggtgtagatcaccttgcaaggcagtctctgcctggaattctaaacagaaagtggagcacaagctttcagattcttctttggaccatctgaaatgtccataatctctcctgcactctaggtatagtgtcttaatctaataatctcattaactgaaaatgtctctcatctctgccccccacatcccagcccaagaagggctgttcaccttgctgggggacagggaactgctcttgggtcatttgtgaatccttctctacactatggtgtgtggtgaaaaccccatgcttgtcctctaagattattgtatttaaaagaaatgtatgcgaatttaggaaaccctttcctctcttaatggcccggctcttgcagttgaaatcttggctttcagtcctcctgttcttgagtttatttaa

SEQ ID NO: 485936 - DNA, 624 bp, Homo sapiens
gcaggggtttgtctcctaccaggcaccaacctcttcctctcccgcgacccttttagtactactgctccccactcccatcccacacagaaagttctagatctcacccaagccacacagaaacccagggaacctcctctatggcatctcagattccctccatatctaaacgtttcacaccatcatttctcctctactgaagccccccagcatgggtgtagatcaccttgcaaggcagtctctgcctggaattctaaacagaaagtggagcacaagctttcagattcttctttggaccatctgaaatgtccataatctctcctgcactctaggtatagtgtcttaatctaataatctcattaactgaaaatgtctctcatctctgccccccacatcccagcccaagaagggctgttcaccttgctgggggacagggaactgctcttgggtcatttgtgaatccttctctacactatggtgtgtggtgaaaaccccatgcttgtcctctaagattattgtatttaaaagaaatgtatgcgaattkaggaaaccctttcctctcttaatggcccggctcttgcagttgaaatcttggctttcagtcctcctgttcttgagtttatttaa

SEQ ID NO: 485937 - DNA, 536 bp, Homo sapiens
ctgcgagtggagcccactgcctctgctcctccactgctccacactgccctgcaaaaaggaggaggccagtctcgtttcttggggaaggtgggggcttaagaccccagggccgagttgctccactgtttgggagcatttgcttcaatctgggaattcaatcatctgggaattatttaaaagaggtgtagaggccttgaaaaatctcagcttgggttgactgggggagggagagggacagtgtcctgtgttttccattttcttttttttttttttgaacttttattttaggttcaagggtacatatgtagatttgttatatagataaactgtgtgtcacgggaggttgctgtaaagactgctttgtcactcaggtgataagcacagttcagacaggtagtttttctgctcctttccctcctcccactctccactctcaaggaggccccagtgtgtgttgttcccctcttggtgtgtccatgtgttatmatttagctcccatttataagtgagaacatacatgtggtatttgggtctcc

SEQ ID NO: 485938 - DNA, 616 bp, Homo sapiens
gaccctcttacttttgcagcctgggtgcctccctcaccttgccccacaccaggacctgctcagaagggggatccctggtcatctgcagcctccggattcgccctcaccaccggccgcccctcctccacccaggcccctcccctcccttccagaaaatactccaatgtccttattttttcgggggagggccttgatgggtccagcgggggagtggggtctgggcagaatgctaatgaaatcagaggagcccgggttgggggcaggccctgggcaggggagaattaagcaattgcwggcaggctcttttccatatttgattggcgctggctgagggacagccacctgcagggaagccccctgcagagggggtgggggagtagtaaaggggacagatctgcttcttcaggtgccctcctcctacttggctgaggcaggctgcaggccgggcatggtgtaatcccagcacattgggaggcctaggtgggaggatcacttggggccaggagttcaagaccagcttaggccacagaatgagatcaccaactctataaaacattaaaaaagaaaaaaagtcggctgcattcaacatgcacagatgcttcatggaaggaaaggg

SEQ ID NO: 485939 - DNA, 616 bp, Homo sapiens
gaccctcttacttttgcagcctgggtgcctccctcaccttgccccacaccaggacctgctcagaagggggatccctggtcatctgcagcctccggattcgccctcaccaccggccgcccctcctccacccaggcccctcccctcccttccagaaaatactccaatgtccttattttttcgggggagggccttgatgggtccagcgggggagtggggtctgggcagaatgctaatgaaatcagaggagcccgggttgggggcaggccctgggcaggggagaattaagcaattgcaggcaggctcttttccatatttgattggcgctggctgagggacagccacctgcagggaagccccctgcagagggggtgggggagtagtaaaggggacagatctgcttcttcaggtgccctcctcctacttggctgaggcaggctgcaggccgggcatggtgtaatcccagcacattgggaggcctaggtgggaggatcacttggggccaggagttcaagaccagcttaggccacagaatgagatcaccaactctataaaacattaaaaaagaaaaaaagtsggctgcattcaacatgcacagatgcttcatggaaggaaaggg

SEQ ID NO: 485940 - DNA, 619 bp, Homo sapiens
tgctgaaggtaagagtaggatcaataggtagacattaggacaggcacagtggctcatgcctgtaatcccagcactttgggaacaggagacaggaggatgacttgaggccagttcaaaactagcttgagcaacatagggaggcaccgtccctgcaaaaaatttttagaaaattagccaggtgtggtggtgcacacttgtactcctagctacttgggaggctgaggtgtgtaggattgcttgagccctggaggaagaggctgcagtgtcatcactgcactccagcttgggcaacagagccagaccctgtctcaaagaaaaaaaaaaatagctggaagttataagcggtaaatttcaactcagattggagtcagccttttaactagaaagttcagcaaggaagaatgggtttccttgaaagcagggaactcacagttcctgaaagtcttcagacaggttgaatgacctttcttatcgattatttctaatgttattcccaactctgagtccacaattcccaagaaaagagactctacagaatctcttatttcaggatctaaaatttcatctttaaatgagstcatctaccttctagcctaagagttgtttttttccatgtaca

SEQ ID NO: 485941 - DNA, 583 bp, Homo sapiens
actcttatcacatgcagttatataaacttatattactgaggtgggaaagttcagtagacagtataagtcatgggcattaagactaaagtagagaacgcagttgaagcaataggttcaggagccattggcatttgcgtgataccatattcccaccatgtatcaaaccctgtatattataataaattaccttgtcctgactccccaggaatttgctcatacttcagtagatgaaacagacaaatgaatcggttaaaatacagagtgacaaaaatcatggtaaaataatatataaatgtcctttgggatctagagggagaaattacctctaatttggtattagaatggaggatagaaatttgctcaatgcagaatggtggaagagcaggccagggagaaggccagagttggtaaagccatggaggtggaaaagaaaacacaaaattttgaaggactcattatggattcatcrtggatagcaaagggtgaatcaaatgtacatgaactgaagagatagcccgtagtgccttgtgaagggtgttgttagtcctataaagaattttgaacttgtttttgttggggaaat

SEQ ID NO: 485942 - DNA, 576 bp, Homo sapiens
ggtcaatttagtggctggctaaactattatattcagagaaaaagtttagtatttttaacattatagatataattatttattgtctaactctaacagattcctaaattcacttctaaaaatctgtataatttaggcataaaatatattctacagagcagktgtcaccacttttgtttctggtggcagagaatgaggctgccctagagccctatccactcaagcctgttagcagaaccactgttatgaaaagccatggctggctttccagtggctaaccactgccgcctctaaaatcagtgtactacgtggtatgtgttttaagtgatgaaacgtttgtcaccctgactgacaatccattggttctctttagtggattctttcgcatactctccacagaggcaattctaaaacttttaactttccaattccaagcttgctgactcattctcagttgatgatctggccccctgctttgctgagataattctgaatctctgcaactcaaccatacctcaaagtatcattagttcttcataagtattaccttctcttgattcagagggaacaatatccctt

SEQ ID NO: 485943 - DNA, 598 bp, Homo sapiens
tcatctcctaactatgatgaagaccagaatctggagaaaaaagggaatctgcattgtttggaatatctttaaataagaaatcctagagaatggttctggattttacatgtagaaacgttaatcaacagcaataaactctgtgctgacgacatatttaaaacaaatgaggacttaggaaaaaacaggaaatttgaccaaacgactctcctagtaacaggttttgtgtgtctttgttaagagcatcgcagcttgttttaattctttttttacttcctttccaaaatttgatgttaagtttcttcacagttttatatacagcttttatttaataaccactcttcacttcaaacgaactgatttctgtaacaggaattacaaatgaaaggaatctgtaatgaaattgaartgctgcatttcagtccataggcatattggtgttataaattgctgattagtgagtcttttgctaggctagggcttaaactgctttcaagcccacttttaattggtaacattacttggcattttgtagggtggaaatgccttttgcttaccattcttagccttatttttatattcttaatttaaacttgaccct

SEQ ID NO: 485944 - DNA, 605 bp, Homo sapiens
tatttttagtttttcagtagtttgataatgatgtgcctaggtatgttttcctttgtatttttcctgtgtaaataaacttttgaagctttatatctctcaccaaatttggaaaattttaactatttttaaataaatgatttcttttgaaatacttttagatttaccaaaaagttgcaaacatagtatagggagttcccaattcatcatccagcttctcttcatgttcttataatcatggtatatttattaaactaaaaatgtagccctggcatratgcttttatctacagtttttccactaatgtcctttttgtttgtttgtttgttttaggatccagtctaggataccacattgcattttatcatatcccctggacacctccattctgtaacactttgtcagattttacttgttttttatagccttcacacttttgaagagtactggttaggtatattttagaatgtccctcagtatgggtttgtctgatgtttcctcatgcttacactgaagtttcaggaatactacagaggtaaggtacccttctcattgcatcatcctagaggataatgataacaatatgacttatcactggtgatattaaa

SEQ ID NO: 485945 - DNA, 637 bp, Homo sapiens
tgcttctgaaataaatttctaagtgggcattttacatcattgatcttcaaaactcttaattatcaaaaagcttttaatctgtagagggacaattataactaytagatctacctgtgttggaaggtctaggatttgactgattacgaaggagaagaaaaagccatcatttccaaaaagtcttaggttgtctacatcaaaactgtcatctttttaacatccaattttagaatatttattatgcctgtatcttcagtctaagcattcagaaagggactgtagttaatgacaaggaaagtaggtcatttttggcttattcagatttaaggtacaggttatttctttttactttcgcttttttattattttttgagagcaagggactattctcttcaaaatataaaaaagtctttcatcataaaaatgagttgctctttattaaaatagcaatcacaaaacgtagaaaacgataaagaagttagttggacttacccaaaatctcccccgcttcctcattaggattagtatcattattcattctttgaatgaatctacctagatgtttttctttccctaattggaatacgtacataattttattttgcaaaaatagcagagagtatatgcaatgctttatagg

SEQ ID NO: 485946 - DNA, 637 bp, Homo sapiens
tgcttctgaaataaatttctaagtgggcattttacatcattgatcttcaaaactcttaattatcaaaaagcttttaatctgtagagggacaattataactattagatctacctgtgttggaaggtctaggatttgactgattacgaaggagaagaaaaagccatcatttccaaaaagtcttaggttgtctacatsaaaactgtcatctttttaacatccaattttagaatatttattatgcctgtatcttcagtctaagcattcagaaagggactgtagttaatgacaaggaaagtaggtcatttttggcttattcagatttaaggtacaggttatttctttttactttcgcttttttattattttttgagagcaagggactattctcttcaaaatataaaaaagtctttcatcataaaaatgagttgctctttattaaaatagcaatcacaaaacgtagaaaacgataaagaagttagttggacttacccaaaatctcccccgcttcctcattaggattagtatcattattcattctttgaatgaatctacctagatgtttttctttccctaattggaatacgtacataattttattttgcaaaaatagcagagagtatatgcaatgctttatagg

SEQ ID NO: 485947 - DNA, 637 bp, Homo sapiens
tgcttctgaaataaatttctaagtgggcattttacatcattgatcttcaaaactcttaattatcaaaaagcttttaatctgtagagggacaattataactattagatctacctgtgttggaaggtctaggatttgactgattacgaaggagaagaaaaagccatcatttccaaaaagtcttaggttgtctacatcaaaactgtcatctttttaacatccaattttagaatatttattatgcctgtatcttcagtctaagcattcagaaagggactgtagttaatgacaaggaaagtaggtcatttttggcttattcagatttaaggtacaggttatttctttttactttcgcttttttattattttttgagagcaagggactattctcttcaaaatataaaaaagtctttcatcataaaaatgagttgctctttattaaaatagcaatcacaaaacgtagaaaacgataaagaagttagttggacttacccaaaatctcccccgcttcctcattaggattagtatcattattcattctttgaatgaatctacctagatgtttttctttccctaattggaatacrtacataattttattttgcaaaaatagcagagagtatatgcaatgctttatagg

SEQ ID NO: 485948 - DNA, 426 bp, Homo sapiens
taaaaatctatctttatagtttttagcagtctatgcaaaaagaaatcttttttcttcaataaaagtgacattttttccatttgtttaacatgtgaaataccactttgtaatagcttaagcctaccacatgctatcaaaaaaacacaggaataattaagagaaattataaagattattcagaaatcttgtgatctagggcttttgtgattccacgagagctatttaaatatttttcctattttccaccaatatctcagtyttgttacaggaaaaatgttgaagactttaaagatgagattgtctgtgtctttttctctaattaaaagctcctactggaagctctccgttcttctccttctttacttatatatagttccctctgcacttattttcacgtaacgtttatgattgcatttatccatataa

SEQ ID NO: 485949 - DNA, 562 bp, Homo sapiens
gcctccaaaattcctgcaaagaggcctacttaatgatttaggaagagttttcttttcttttcttttttttgagacagaatctcactctgtcgcccagcctggagtgcagtggcacgatctcggttcactgcaaggtccaccttccagattcatgccattctcctgcctcagcctcccgagtagctgggaccacaggcacccgccaccacacctggctagtttttttgtatttttagtagagacagggtttcgtcatgttggccaggatggtctcgatctcccgacctcgtgatctgtcctccttggctgcccgaaktgctgggattacaggcgtgggccaccgcgcccagcccaggaagagctttctcacaagacaaagtttccaagctgacacttggcctgaagaagactgcacgttcagtactcaccgtccagttctattcccccagtcccaaggcattcacttgctaaaagagtgactatttgctaaagtgagagtcttcccctttgatctattatatgaacatttgtcctccaatttctggataattactaacataca

SEQ ID NO: 485950 - DNA, 378 bp, Homo sapiens
gggggattcacagaggcagtttacaggaagtttgatattccagttctttcagctaatgcaagtattatttcttttttaaaataaatgattttcaacagaattgcatgtggcataattcagtaaagtgaaacacagtatcaaaatatgaatcataaacttacctggaaaaacgctcaagaacaggttttccatggacataagtcacatggccattccttctttttmtgctcctgtatagaaaaccgaatagtcaacacaatgtccattggcatgacagtagcccatgaattattcgctctcctgtggagatgtcacacactcattctgtgagcaggattacaatagtcttataaattcaaatgggtttggcacatgtgt

SEQ ID NO: 485951 - DNA, 517 bp, Homo sapiens
ttctatgcacttggcttctggtggtcatgcatgatcaccaggcctccactgttcagaatccagtcatccatcccatttgctactggggtcccagtcctgtaacggcagctctggctacagagggcagccctcactgaactgctcagtgatgctgatgcccctcttggctgcacattactcattgctttggtagaatggtgtctcttccatgccatcctccagagcagtttaggctagctggaactctaaggttgacatcctttccatcatctggtcataagggaccctgattctgccttaggtgtaacatgggggaaggacatagtgacaagtracctggagtcagcactacctgtgttgctgagtgtggcctgcatgagtcccactcatgcctaattctggatgtatactccactgcacatatccattgatcaagaccaagttaattttcataaaagatatttcatataagccatcattttcattttcagaaagataaatcagagaaaaaaaagga

SEQ ID NO: 485952 - DNA, 517 bp, Homo sapiens
ttctatgcacttggcttctggtggtcatgcatgatcaccaggcctccactgttcagaatccagtcatccatcccatttgctactggggtcccagtcctgtaacggcagctctggctacagagggcagccctcactgaactgctcagtgatgctgatgcccctcttggctgcacattactcattgctttggtagaatggtgtctcttccatgccatcctccagagcagtttaggctagctggaactctaaggttgacatcctttccatcatctggtcataagggaccctgattctgccttaggtgtaacatgggggaaggacatagtgacaagtaacctggagtcagcactacctgtgttgctgagtgtggcctgcatgagtcccactcatgcctrattctggatgtatactccactgcacatatccattgatcaagaccaagttaattttcataaaagatatttcatataagccatcattttcattttcagaaagataaatcagagaaaaaaaagga

SEQ ID NO: 485953 - DNA, 517 bp, Homo sapiens
ttctatgcacttggcttctggtggtcatgcatgatcaccaggcctccactgttcagaatccagtcatccatcccatttgctactggggtcccagtcctgtaacggcagctctggctacagagggcagccctcactgaactgctcagtgatgctgatgcccctcttggctgcacattactcattgctttggtagaatggtgtctcttccatgccatcctccagagcagtttaggctagctggaactctaaggttgacatcctttccatcatctggtcataagggaccctgattctgccttaggtgtaacatgggggaaggacatagtgacaagtaacctggagtcagcactacctgtgttgctgagtgtggcctgcatgagtcccactcatgcctaattctggatgtatactccactgcacatatccattgatcaagaccaagttaattttcataaaagatatttyatataagccatcattttcattttcagaaagataaatcagagaaaaaaaagga

SEQ ID NO: 485954 - DNA, 473 bp, Homo sapiens
atgagaattgtgtccagaatctagttagaagatgagacacatagaatagggccagtggtcccagttaaggccatcttaaattagctaccagccagccaaccaccagagtgagcccagctatgaccagaagaatcactaagcagacctatgatcttgtgagcatagtagatgtttgttttaagccactaagttttggagtgtttttacattagtgtggcaatagaaccccttactatatgggttcctacatggatcttgcacatgacaaagmctgtttcctgctacaaacctagcagtccaaatgtagtctcaacgttcccttatcctcttgggagctgggcatgacctagaatgagttaatcaaatgcttacctatgagactttgagtgctgctgcatctattaatgaaagtgtcaagtctccagtgtctttgtttcttggtgttgtttgcgccagactgactgatgacagca

SEQ ID NO: 485955 - DNA, 565 bp, Homo sapiens
gctcctgaaaggctataggaatgccacaggccttaggctggtgctggggaggtgtgaggtcagccacatctgcacagggaggaccagagaagatgctgatcttccatctgtatcccagaatcctgtgcagagcctctgaaggagatcartcagggtggtgggaaaagttgtaagttatagggaaagacacaaaccttcttgacaggtcaggaggttttgcaaagctttgggagagaataaaagctgaaggcagctaattctcttactctgaggcagagggcaagaagtaggtgcaagggaatgtagggaagtttatctagataagtttattcatgttgtcgggaaaccaacctttggtcatccatgcgcaagactgctccctgcaaggggggaacgacaatgttaattatccacaggttgtgttggctccaggcctttgtcattaaatctgtactgaataaatacaagcttctccagcttatccacactgctaactctttggcccctagtgccggcagtcccctagcccactctttcactggatacttgtgtctgagtactcctt

SEQ ID NO: 485956 - DNA, 431 bp, Homo sapiens
ctctttctccttgctgtagtccaccccagcgcttcttgtagggtgttccctggaccagcagcctcagcatcaactgggaactgcttagaaatgcaaagccttggccccaccccatgcacacaaaattggaaaggctggggcgggaccagtagtcttgttttaatcacatagagcygctctctactctgattcaatgcgtgacttcaatgcacactcagtctgagaaccaccattctagctttgaatactttagtaaatatcaggactttaaaagaataaagaaaaatcaaacgagagcagttacaataattctttggctcttaggtgaaggcgtggccatctttatgtatactaggtcatagttggttaaaattagagtttaactgaaatcatctgcttgttttcacttagctaaagaattcctgacccac

SEQ ID NO: 485957 - DNA, 632 bp, Homo sapiens
gcttagcaaacattccatctgtgacataaatctgcttttgcctaatatgtaacctaatatagtcacaggattttttctgtgaccatgattctgccaaacacacaattcacacctaacttgtagtcccacatccatccatgggctatttcacatactggtcccctacctggagagcaccttctctcttacataagcccaccccactcccattgtttgactaattcytatggcccttcaggatccagctatcacatccttccttctctggcaagcctcctataagcctgtgaggttgggatgagtacttccattctgcattccaatgagccctccatgcttacctgtaagggatgcatagtaagccattacttattgtactctcctagagaaacattgtcccatttaactctatatccagagtgactagcccaattcctcgcatctagtacgtcctcaacacagacctagccattcagatccattccagtctgctgtatttaactcctgggttaaactgcactcccaggacctccataatcaacccaaaggttctttttcttttctatttttctaaaccacttctcattttgtctccacttccttgtttgccttttatgtaagcatatgtgtat

SEQ ID NO: 485958 - DNA, 564 bp, Homo sapiens
actcacatcttctacagccaaagacatagatagccacaagatattattgtaatgtactgaggagaccaatctggctctcagatccaaccatgagacctaactccaacttcatactaatctcagctcagccagcatgtttcagaraagcaatctctacgttaccgtatagaatacagtgttccttactttatgaatccctcagtgtggtggtgagatgcttacacatgccaactctttgaagctcaacagagcactgtgtgcatggttatttagcacagagtcaccagaatttctcctgggaagcctttggaattagagtccagctcactatttgttttcagttcatctaaatgggcctgtgcaaggaatattattctgtttgcttcaaagtaccctggtgtaaaccaggatagcatcatcagctggttgttttcacagtgagaatattcttagctggtgttcttcacaaaattctgaaagaattaatatctataaaccagcattgcagtgttcagcaaccatcctattggcaaataaataccacttgtaatgtttggttctaca

SEQ ID NO: 485959 - DNA, 191 bp, Homo sapiens
tcacacagctggtcaccttggtgggamcagtgaagaaatgggatgcaatctcttataccgaagttccttcactgcctccatcactgttctaaagagacaacatagtaaactcaaagcaatacattcttaaaagtattatttcatgtaaatttatatgtagatgaattacaacaagatgaaacccttggtgg

SEQ ID NO: 485960 - DNA, 546 bp, Homo sapiens
ccatctcattggtgattgggttttaacatgtgcatgtggggggcttcaaacattgaggccagagcacctactcagcagtattccagtaccagcaagcatattatcatcagctgagtgcatgagttttacacattttctcattctatttgtattagtccattctcacactgctacaaagatactacctgagactgggtaatttataagagaaggagatttaattgactcagagttctgcatggctggggaggcctcaggaaacttacaaccatggcggaaggtgaaggggaagcaaggcacgtcttacatgctggcaggtgagagagagagtgcaggggtaactgccacttttaaaccatcagatcttgtgagaactccctcactatcatgaggacagcayggaggaaaccaccccccatgaaccaattacctcccaccaggcccctcctttgaaaagtggggattacaattcaagatgaaacttgggtgaggacactgagccaaatcatatcatattctattggagtgaatgtgcacaacaaaata

SEQ ID NO: 485961 - DNA, 502 bp, Homo sapiens
tggtggggccacagcatggaggtcctcaaatactcggatgcagagtttgaaccratattcttatctgtgctgaattacgactggtcaaagtgtacactacaaaattcttaatgcttcagcaatctttactaaccactttttttcttctacttgtaaagccaaagagggacaagaaagggctagaggaatgtctctagaatcaaagtcaagacctccagattctagtactacctgtgttgctacttaattatatgaacttgtgcaaatcttgttattcatctgtagtttaactttgcatttgcaacacgagatggtaaaaccgatacataactcagtatttctttaaaaaaaaatggaaacaataaatgcacaaaacccaaaagttagcatttagggatatcaagactactgttgtcatcactgtgattctgcaagttctccagaaaaattcacgttaggacatatagatgcagggctaccttcagccatccatccattcaac

SEQ ID NO: 485962 - DNA, 624 bp, Homo sapiens
cttttgttacaaaggcagataggacagagaaggaaattgattgacttagcgatgcatcaattaactcttcaaggtctggaataaacttagaatttgaaggtgcacactcttgagctatacatttgaatattgactgcaattgcacgtcctatatcaatactcacctgtgttttttaaactgtgaaaccagtaaagcatgatgatgattggcatccctctgcagttaaaaagaagcctaatagtgttaaaaattcaattcatccaacacaaagttctaaaatttttatgccttatagaattacttgagcactctccaaaatcccatatccatgtcacaaccaatattaagtccaaatataaccagtccttttctttttaatagtcttcatttttttaagagcagtttgaaatccacagcaaagctgggcagaaagtacacagaatttccatatctgaccccgctctcaaacatgtgcagcctctctatcaacatcttacaccagagcggtatatttgttacgatcaatgaacatacattggcacatcattatcatctaaagttcscagatgattctaacgtgcagcagagtttaaaaccgctaatccaggaattggatataaaca

SEQ ID NO: 485963 - DNA, 454 bp, Homo sapiens
ctttcttccttccttcctttctttctttcttctttctttctttttttctttcttcttttcttttctttctttctttctttctttcttcttttcttttctttcttttcttttctctctttctttcttctttttctttttgagacagggtctcattctgtcacccaggctggagtgcagtgatcaattcgaccccattgtcttctcaccaagatccaagaagggcttttggcaagtaaaatgcaatttattcctaagcttagagaaaatctctgcagtcccagcratctttcttgtcaaaggaaggaaaggttaagaacattgcttaattctaacatcttgagtgtgggaaggagggagccagagggaaggaggaaggtatccttacatttcaccttggccttggtttctctctccatgttcccagcctggaattcgcatccactgctgggagggg

SEQ ID NO: 485964 - DNA, 565 bp, Homo sapiens
ctgaaacaccctgccttggtctccaggaaacggcactgcccagtctgcagacctccgcatccgcaggcagcactcctcagacagcgtctccagcatcaacagtgccaccagccactccagygtgggcagcaacatagagagtgactcaaagaagaagaagcggaagaactgggtgagtgcacatccactctcctggggactgacggacagagtcagttgcagaactggctgctgcatctccccagataaagtccagcccagctactatctgtggaacatagcactttgggcgtagatcccaggaaatggtttgtggatgggtttttactaaaatcaatattgtactcagcaaaacactagaatctgtaacatccctaccactttgtatttttttctctttcatgagacttttcataaagtactcatctttcatttcatatgtgtgtcatttcttcctcattatatgttggccacaaagtttcaggtactagaggaaagttattcttaaatggtttcttcatagatccaaaatatttttttgagcatattgctagttatcccatct

SEQ ID NO: 485965 - DNA, 565 bp, Homo sapiens
ctgaaacaccctgccttggtctccaggaaacggcactgcccagtctgcagacctccgcatccgcaggcagcactcctcagacagcgtctccagcatcaacagtgccaccagccactccagcgtgggcagcaacatagagagtgactcaaagaagaagaagmggaagaactgggtgagtgcacatccactctcctggggactgacggacagagtcagttgcagaactggctgctgcatctccccagataaagtccagcccagctactatctgtggaacatagcactttgggcgtagatcccaggaaatggtttgtggatgggtttttactaaaatcaatattgtactcagcaaaacactagaatctgtaacatccctaccactttgtatttttttctctttcatgagacttttcataaagtactcatctttcatttcatatgtgtgtcatttcttcctcattatatgttggccacaaagtttcaggtactagaggaaagttattcttaaatggtttcttcatagatccaaaatatttttttgagcatattgctagttatcccatct

SEQ ID NO: 485966 - DNA, 565 bp, Homo sapiens
ctgaaacaccctgccttggtctccaggaaacggcactgcccagtctgcagacctccgcatccgcaggcagcactcctcagacagcgtctccagcatcaacagtgccaccagccactccagcgtgggcagcaacatagagagtgactcaaagaagaagaagcggaagaactgggtgagtgcacatccactctcctggggactgacggacagagtcagttgcagaactggctgctgcatctccccagataaagtccagcccagctactatctgtggaacatagcactttgggcgtagatcccaggaaatggtttgtggatgggtttttactaaaatcaatatkgtactcagcaaaacactagaatctgtaacatccctaccactttgtatttttttctctttcatgagacttttcataaagtactcatctttcatttcatatgtgtgtcatttcttcctcattatatgttggccacaaagtttcaggtactagaggaaagttattcttaaatggtttcttcatagatccaaaatatttttttgagcatattgctagttatcccatct

SEQ ID NO: 485967 - DNA, 565 bp, Homo sapiens
ctgaaacaccctgccttggtctccaggaaacggcactgcccagtctgcagacctccgcatccgcaggcagcactcctcagacagcgtctccagcatcaacagtgccaccagccactccagcgtgggcagcaacatagagagtgactcaaagaagaagaagcggaagaactgggtgagtgcacatccactctcctggggactgacggacagagtcagttgcagaactggctgctgcatctccccagataaagtccagcccagctactatctgtggaacatagcactttgggcgtagatcccaggaaatggtttgtggatgggtttttactaaaatcaatattgtactcagcaaaacactagaatctgtaacatccctaccactttgtatttttttctctttcatgagacttttcataaagtactcatctttcatttcatatgtgtgtcatttcttcctcattatatgttggccacaaagtttcaggtactagaggaaagttattctkaaatggtttcttcatagatccaaaatatttttttgagcatattgctagttatcccatct

SEQ ID NO: 485968 - DNA, 577 bp, Homo sapiens
gctgtaatcatcttccaagatcagccagtggtacagtaactgcctgctatccccgcacacactttagatcctttgctttatgatgctgttttggatttgtaaaaacattttatgttcacaaaaacaaaaaatatttttatagaagagaacgttatcatactttaccccttgtagaaatcttgtgagactggtcattgagagagccttgttttatacagcaaagttgcagaaaccaaatattkcagaactgtcagcctgtgtattttaagtttaaatcaggccaggcacggtggcttatgcctgtaatcccagcactttgggaggccaaggcgggcagatcacctgaggtcaggagttcaagaccggcctggccaacatggtgaaaccccatctaaactaaaaacacaaaaattagccaagtgtggtggcgtgtgcctgtaatcccagctactagggaggctgaggcaggagaatccatgaggccgaggttgcaatgagccgagatcgcaccactgtactccagcctaggtgaaaaagtgagactgtctcaaaaaaaaaagtttaaatcagtgtatgt

SEQ ID NO: 485969 - DNA, 423 bp, Homo sapiens
acaccaaactctgaaaccattaccgtaaagcactgaatggaagggccctccatgtggtcccaggggagtttgcaacagcgggtcaaattgaagaaaatctaagaatgaaaaactactttaaatcctcacagactgcacagaaacattgcagaaagtctttccagccctaagtgctacttttaatgatgcaaaaatcattgactataacatttcttagctcattccattgacgtctgaaggcaaagcattygattgaaaagattagcctacagagagaatttctgaacctaaaaaggaaatgatacctgtttgtacagttaacaacgacacacatacattatttccggtgatgtcaattttgatgcagtgccaacaaaaatatgcattaattccgcaggctacttatttcaaaagaaaaagaat

SEQ ID NO: 485970 - DNA, 423 bp, Homo sapiens
acaccaaactctgaaaccattaccgtaaagcactgaatggaagggccctccatgtggtcccaggggagtttgcaacagcgggtcaaattgaagaaaatctaagaatgaaaaactactttaaatcctcacagactgcacagaaacattgcagaaagtctttccagccctaagtgctacttttaatgatgcaaaaatcattgactataacatttcttagctcattccattgacgtctgaaggcaaagcattcgattgaaawgattagcctacagagagaatttctgaacctaaaaaggaaatgatacctgtttgtacagttaacaacgacacacatacattatttccggtgatgtcaattttgatgcagtgccaacaaaaatatgcattaattccgcaggctacttatttcaaaagaaaaagaat

SEQ ID NO: 485971 - DNA, 666 bp, Homo sapiens
ctattccagatgctctgaagagaccaaaaaggggttaaccaagccaggtgcagttactgtcgcctgtaatcccagcgctttgggaggccaaggagggaggattgcttgaggccaagagctggcaaccagcctggtcaayatagtgagactctgtctctacaaaaaaaaattttttttaatcggtcaggcatggtgttgcatacttgtagtcccagctacttgggaggctgaggcaggagggtcacttgagcccaggaatttgagactccagtgagctgtgatcaccctgtactccagcctgggtgacagagtaaggccatgtctctatttaaaaaaaaaaaaaaagttaaacagattctccacccctgagaagagtaaatactagtggagacatgacatagtacagttcattctactcctgaactttcactctgaaggccccattctcagttgtggttacgataaagtacaacacaaagttcctactcatggaccctgtataccaagagaggagatgaatgttaaacaaataaatcctgaataaactaggaaaattagagagtgctaagggctaatgctgtgaattaaaacagtgctgagatacagagtaccttggcagcaactttagatggggtggtcagaaaagagccctctgagtaggtgaca

SEQ ID NO: 485972 - DNA, 666 bp, Homo sapiens
ctattccagatgctctgaagagaccaaaaaggggttaaccaagccaggtgcagttactgtcgcctgtaatcccagcgctttgggaggccaaggagggaggattgcttgaggccaagagctggcaaccagcctggtcaatatagtgagactctgtctctacaaaaaaaaattttttttaatcggtcaggcatggtgttgcatacttgtagtcccagctacttgggaggctgaggcaggagggtcacttgagcccaggaatttgagactccagtgagctgtgatcaccctgtactccagcctgggtgacagagtaaggccatgtctctatttaaaaaaaaaaaaaaagttaaacagattctccacccctgagaagagtaaatactagtggagacatgacatagtacagttcattctactcctgaactttcactctgaaggccccattctcagttgtggttacgataaagtacaasacaaagttcctactcatggaccctgtataccaagagaggagatgaatgttaaacaaataaatcctgaataaactaggaaaattagagagtgctaagggctaatgctgtgaattaaaacagtgctgagatacagagtaccttggcagcaactttagatggggtggtcagaaaagagccctctgagtaggtgaca

SEQ ID NO: 485973 - DNA, 571 bp, Homo sapiens
aaaaactccccaaatccagcatcatgccttccctgatggagtaattccacttctattccatgctcaggaagtcatccaagatgcagacagttcgaggtgctaaggctgaaggcagcatgacccagtggtctagaatacaggctttggagtcaggctgatctaggttcatgtctcagctctgccactgactcaccgtgtgaccctaaactctgagccttgataatccaatttgaaaaactggctkttggggaaaaacaatgacctgatttgaagcatttgccaacatccatggtacaatcccaccatgactgacttcaaaccactgacatgatgtcactggatgtggagttggaaaaaggtgctatcagctttcaagagccagctctagtactccatttggtgcatctacccaaagaatactgcctacataccttgggttctgggcaccaacactgcaggcagaggtcacaatggccctggcttaatatttactttgattttgtattgagacaaggttttgcaatgttgctcaggctggagtatagtggcatgatcatgctccctgtggcct

SEQ ID NO: 485974 - DNA, 571 bp, Homo sapiens
aaaaactccccaaatccagcatcatgccttccctgatggagtaattccacttctattccatgctcaggaagtcatccaagatgcagacagttcgaggtgctaaggctgaaggcagcatgacccagtggtctagaatacaggctttggagtcaggctgatctaggttcatgtctcagctctgccactgactcaccgtgtgaccctaaactctgagccttgataatccaatttgaaaaactggctttkggggaaaaacaatgacctgatttgaagcatttgccaacatccatggtacaatcccaccatgactgacttcaaaccactgacatgatgtcactggatgtggagttggaaaaaggtgctatcagctttcaagagccagctctagtactccatttggtgcatctacccaaagaatactgcctacataccttgggttctgggcaccaacactgcaggcagaggtcacaatggccctggcttaatatttactttgattttgtattgagacaaggttttgcaatgttgctcaggctggagtatagtggcatgatcatgctccctgtggcct

SEQ ID NO: 485975 - DNA, 622 bp, Homo sapiens
ctttgtgccaggtaccgtgagaaatgctttacgaataccttgcttaaccaccgtgcaactccaagaggaagtactaatatccgtgatttacagatgaggaaataggcccagggaggagagaagccagaattggaaactaagtatgttcaattccacggcccactagtttggcccacttggtccatgtggcaggacatgctcacagccagggcagtgtcacctgtagttctgcagagaggactctgcagggggccttagrgcacagagactaaagagtcctgtgggccaccacggctgcagtgtgtctctagggtggccacggctgtctgtctgtctgtctgctctccctgccctcccgcgaatcctgccgtggagagggtacagagagcaaggtgctgacaacagtgtgaagctgagctctgaaccaacaaaaccacgtctttccaaggggaaggagctggggccacctagccccaccccctcatttaccagatgggccaatcaaggcctgaagagcagagcccgctgagaaaggctgtcaggcagagcccgatttgaacctagaacctcagcttcctttgccaggcctttttcctctccacccctcctgactgacaccacc

SEQ ID NO: 485976 - DNA, 622 bp, Homo sapiens
ctttgtgccaggtaccgtgagaaatgctttacgaataccttgcttaaccaccgtgcaactccaagaggaagtactaatatccgtgatttacagatgaggaaataggcccagggaggagagaagccagaattggaaactaagtatgttcaattccacggcccactagtttggcccacttggtccatgtggcaggacatgctcacagccagggcagtgtcacctgtagttctgcagagaggactctgcagggggccttagagcacagagactaaagagtcctgtgggccaccacggctgcagtgtgtctctagggtggccacggctgtctgtctgtctgtctgctcyccctgccctcccgcgaatcctgccgtggagagggtacagagagcaaggtgctgacaacagtgtgaagctgagctctgaaccaacaaaaccacgtctttccaaggggaaggagctggggccacctagccccaccccctcatttaccagatgggccaatcaaggcctgaagagcagagcccgctgagaaaggctgtcaggcagagcccgatttgaacctagaacctcagcttcctttgccaggcctttttcctctccacccctcctgactgacaccacc

SEQ ID NO: 485977 - DNA, 622 bp, Homo sapiens
ctttgtgccaggtaccgtgagaaatgctttacgaataccttgcttaaccaccgtgcaactccaagaggaagtactaatatccgtgatttacagatgaggaaataggcccagggaggagagaagccagaattggaaactaagtatgttcaattccacggcccactagtttggcccacttggtccatgtggcaggacatgctcacagccagggcagtgtcacctgtagttctgcagagaggactctgcagggggccttagagcacagagactaaagagtcctgtgggccaccacggctgcagtgtgtctctagggtggccacggctgtctgtctgtctgtctgctctccctgccctcccgcgaatcctgccgtggagagggtacagagagcaaggtgctgacaacagtgygaagctgagctctgaaccaacaaaaccacgtctttccaaggggaaggagctggggccacctagccccaccccctcatttaccagatgggccaatcaaggcctgaagagcagagcccgctgagaaaggctgtcaggcagagcccgatttgaacctagaacctcagcttcctttgccaggcctttttcctctccacccctcctgactgacaccacc

SEQ ID NO: 485978 - DNA, 448 bp, Homo sapiens
ccaaccctaccccacgcccggggaggccttccggccgccccaggtcccgctctgccgcccagcgccgccgccagcccccaccgggccgccctactcggccatsgctcactttcccgagagtgaatgcttccaggagtgatccgaactggagtaatccccaaagtgagcaataaagaaacgagagtcagggaaatgctgtgggaagtctggatttatgagcaggagaggttgggggacgggagggagctgctggcagggtctccgtgccgctggcttagaaggagcagacgaagggcagttgcttgtcgcattgagctcgtcgccaataacctcctagcagcacagagcacagtgaagtccaccgccctgcggggtctggcctgggcttcacctctttccctcctcaggggccccctatgtccccatctatggccatcgtcatctgcca

SEQ ID NO: 485979 - DNA, 584 bp, Homo sapiens
gaacttcctttatcgcctgtccttcccacccccacagacagacaacactgttcttctagaagcatagcatcaaaagtgggcttattctaaagcatgactctccaataggaaaaaaagaaaaagaatgggcttattcatataaaaaagaaaagctcagtatcactgatcattagagaaatgcaaatcaaaactacgacgagataccatctcaccagtcagaatggctattactaaaaagtcaaaaaataacagatgctggtgaggttgtggagaaaggggaacaygtgctcccttggtgggggcgtaaattagttcagccattgtggaaagcagcatggcgattcctcaaagagctaagaacagaactaccactggacccagcaatcccattactgggtgtatcctcagaggaacataaatcattgtaccatgaagacacaggcacgagaatgtttattgcagcattattcacaatagcaaagacatggaataagcctaaatgcccatcaatgacaaattagaaaaagaaaatgtggtacatatacactgtggaatacgatgcagtcataaaaagaacaagatca

SEQ ID NO: 485980 - DNA, 584 bp, Homo sapiens
gaacttcctttatcgcctgtccttcccacccccacagacagacaacactgttcttctagaagcatagcatcaaaagtgggcttattctaaagcatgactctccaataggaaaaaaagaaaaagaatgggcttattcatataaaaaagaaaagctcagtatcactgatcattagagaaatgcaaatcaaaactacgacgagataccatctcaccagtcagaatggctattactaaaaagtcaaaaaataacagatgctggtgaggttgtggagaaaggggaacacgtgctcccttggtgggggcgtaaattagttcagccattgtggaaagcagcatggcgattcctcaaagagctaagaacagaactaccactggacccagcaatcccattactgggtgtatcctcagaggaacataaatcattgtaccatgaagacacaggcacgagaatgtttattgcagcattattcacawtagcaaagacatggaataagcctaaatgcccatcaatgacaaattagaaaaagaaaatgtggtacatatacactgtggaatacgatgcagtcataaaaagaacaagatca

SEQ ID NO: 485981 - DNA, 457 bp, Homo sapiens
agggtggacttggtctgtcactctacagaggtaagcctgcagcctgcaactggctaagacagctgcaaaaaggattagaaatgaaccagtgagttcaccatgttgcccccttcattaagcccctcacctgcaacatagggcaggtggcagcattgcccggtggttagggacactagctctgctacttcttcactgtatgacccagggaaagctgcttagccttcatgcctctcactgctcatcaataaaatgcagaaagccctagggaagttgccagccacccactccccctggagccagcatctgcctcgctggagcattgagacaagatccatgcttgtgtgactcggtgcctctcctggctcgctttcttttccagttagtgtgcgtatgtacagccattgtccaacacttctgttggacrcctttggagatgggttctcttactctggtgtga

SEQ ID NO: 485982 - DNA, 610 bp, Homo sapiens
aacagactctatttgatgaataataatatttctgtgtcctgtttcttccataacgtcctttgctttcctcccagagacataacctaaaatgagaggaaacaagctcaggtggtggccrgttccaagatgtgaaactgtaaggaatcaaaggcacgaggcaacacggctttgtggcctggcattagcattcagtgcaaataggggtagaatgccttcctttgtacttcagtgcagtgaccatccacgtcaagggaggagaccgaggacatcccgcccatggtccagagagcaatgtagcccaaactcaagaatgagaatgaactgggacagggagagggccagcttcacggtgtacgatgaatgcagtgtgtgcaggagggactcacacttggtttaacactctgctgttgccatcttgaaattcttaataggtttttcccccccgcagacagggtcttactctcttgcccaggctggagtgcaatgctgtcatacctcactgcagccttgaattcctcccacctaagccccttgagtatctggtgtctgccaccatgcccagctaattttttaagttttatctagaaacaggttctcactaagttaccca

SEQ ID NO: 485983 - DNA, 610 bp, Homo sapiens
aacagactctatttgatgaataataatatttctgtgtcctgtttcttccataacgtcctttgctttcctcccagagacataacctaaaatgagaggaaacaagctcaggtggtggccggttccaagatgtgaaactgtaaggaatcaaaggcacgaggcaacacggctttgtggcctggcattagcattcagtgcaaataggggtagaatgccttcytttgtacttcagtgcagtgaccatccacgtcaagggaggagaccgaggacatcccgcccatggtccagagagcaatgtagcccaaactcaagaatgagaatgaactgggacagggagagggccagcttcacggtgtacgatgaatgcagtgtgtgcaggagggactcacacttggtttaacactctgctgttgccatcttgaaattcttaataggtttttcccccccgcagacagggtcttactctcttgcccaggctggagtgcaatgctgtcatacctcactgcagccttgaattcctcccacctaagccccttgagtatctggtgtctgccaccatgcccagctaattttttaagttttatctagaaacaggttctcactaagttaccca

SEQ ID NO: 485984 - DNA, 610 bp, Homo sapiens
aacagactctatttgatgaataataatatttctgtgtcctgtttcttccataacgtcctttgctttcctcccagagacataacctaaaatgagaggaaacaagctcaggtggtggccggttccaagatgtgaaactgtaaggaatcaaaggcacgaggcaacacggctttgtggcctggcattagcattcagtgcaaataggggtagaatgccttcctttgtacttcagtgcagtgaccatccacgtcaagggaggagaccgaggacatcccgcccatggtccagagagcaatgtagcccaaactsaagaatgagaatgaactgggacagggagagggccagcttcacggtgtacgatgaatgcagtgtgtgcaggagggactcacacttggtttaacactctgctgttgccatcttgaaattcttaataggtttttcccccccgcagacagggtcttactctcttgcccaggctggagtgcaatgctgtcatacctcactgcagccttgaattcctcccacctaagccccttgagtatctggtgtctgccaccatgcccagctaattttttaagttttatctagaaacaggttctcactaagttaccca

SEQ ID NO: 485985 - DNA, 610 bp, Homo sapiens
aacagactctatttgatgaataataatatttctgtgtcctgtttcttccataacgtcctttgctttcctcccagagacataacctaaaatgagaggaaacaagctcaggtggtggccggttccaagatgtgaaactgtaaggaatcaaaggcacgaggcaacacggctttgtggcctggcattagcattcagtgcaaataggggtagaatgccttcctttgtacttcagtgcagtgaccatccacgtcaagggaggagaccgaggacatcccgcccatggtccagagagcaatgtagcccaaactcaagaatgagaatgaactgggacagggagagggccagcttcacggtgtacgatgaatgcagtgtgtgcaggagggactcacacttggtttaacactctgctgttgccatcttgaaattcttaataggtttttcccccccgcagacagggtcttactctcttgcccaggctggagtgcaatgctgtcatasctcactgcagccttgaattcctcccacctaagccccttgagtatctggtgtctgccaccatgcccagctaattttttaagttttatctagaaacaggttctcactaagttaccca

SEQ ID NO: 485986 - DNA, 626 bp, Homo sapiens
tgcagccaaactatgacatatttgcatctttaaggcttgaaacgttttttcagtttttaaaatgagtttattttggggaaatgtatgatttcttgaactaatggcaaattaagttaataaaattcatacctgctgtgggcaatgatgattatatatcaaaggaaaaataaatcaaaggctaaattctacactctgtaattgatcacatttcccattcatttccatagaaatactttctgtttgggattataatgttgaggcatagagcaatgattctcccttttaagttgcttctctctctggccttctactgctgacactgtctctttcctcctacttggtcaccgaartgtcagagtttgctcatcacaaatgttgactacttggcctacacttacaatactgcaatattccttgcccttaggaagaatgtttgtttgtaattgtgtttgctgatgatttgttaacaccaatcacattttaaaaacaaacttgaaaaaaagctggtgcagaatgggacacaaagctggaattcaggcatctttcccacaaggcctttctggctctatttagccaaattctggctccaatacccagattctggctctatttagtcaatgacataa

SEQ ID NO: 485987 - DNA, 626 bp, Homo sapiens
tgcagccaaactatgacatatttgcatctttaaggcttgaaacgttttttcagtttttaaaatgagtttattttggggaaatgtatgatttcttgaactaatggcaaattaagttaataaaattcatacctgctgtgggcaatgatgattatatatcaaaggaaaaataaatcaaaggctaaattctacactctgtaattgatcacatttcccattcatttccatagaaatactttctgtttgggattataatgttgaggcatagagcaatgattctcccttttaagttgcttctctctctggccttctactgctgacactgtctctttcctcctacttggtcaccgaagtgtcagagtttgctcatcacaaatgttsactacttggcctacacttacaatactgcaatattccttgcccttaggaagaatgtttgtttgtaattgtgtttgctgatgatttgttaacaccaatcacattttaaaaacaaacttgaaaaaaagctggtgcagaatgggacacaaagctggaattcaggcatctttcccacaaggcctttctggctctatttagccaaattctggctccaatacccagattctggctctatttagtcaatgacataa

SEQ ID NO: 485988 - DNA, 626 bp, Homo sapiens
tgcagccaaactatgacatatttgcatctttaaggcttgaaacgttttttcagtttttaaaatgagtttattttggggaaatgtatgatttcttgaactaatggcaaattaagttaataaaattcatacctgctgtgggcaatgatgattatatatcaaaggaaaaataaatcaaaggctaaattctacactctgtaattgatcacatttcccattcatttccatagaaatactttctgtttgggattataatgttgaggcatagagcaatgattctcccttttaagttgcttctctctctggccttctactgctgacactgtctctttcctcctacttggtcaccgaagtgtcagagtttgctcatcacaaatgttgactacttggcctacacttacaatactgcaatattccttgcccttaggaagaatgtttgtttgtaattgtgtttgctgatgatttgttaacaccaatcacattttaaaaacaaacttgaaaaaaagctggtgmagaatgggacacaaagctggaattcaggcatctttcccacaaggcctttctggctctatttagccaaattctggctccaatacccagattctggctctatttagtcaatgacataa

SEQ ID NO: 485989 - DNA, 626 bp, Homo sapiens
tgcagccaaactatgacatatttgcatctttaaggcttgaaacgttttttcagtttttaaaatgagtttattttggggaaatgtatgatttcttgaactaatggcaaattaagttaataaaattcatacctgctgtgggcaatgatgattatatatcaaaggaaaaataaatcaaaggctaaattctacactctgtaattgatcacatttcccattcatttccatagaaatactttctgtttgggattataatgttgaggcatagagcaatgattctcccttttaagttgcttctctctctggccttctactgctgacactgtctctttcctcctacttggtcaccgaagtgtcagagtttgctcatcacaaatgttgactacttggcctacacttacaatactgcaatattccttgcccttaggaagaatgtttgtttgtaattgtgtttgctgatgatttgttaacaccaatcacattttaaaaacaaacttgaaaaaaagctggtgcagaatgrgacacaaagctggaattcaggcatctttcccacaaggcctttctggctctatttagccaaattctggctccaatacccagattctggctctatttagtcaatgacataa

SEQ ID NO: 485990 - DNA, 571 bp, Homo sapiens
tgatattaattattgagagcctgcactaggccatgttctatacatttcatatagattctaactcatttaacacaacaatcatatgatgtaattactagtgttttcccatttgaggaaactgaggcacagagacatgcctagtaaatagtggagacagaatgtccacccagtcagtctggctttagaatctgcaagcttagtaagtgagtggacagatgggtgccagcctacctaccctcacagggctgccgagaaggccagacgacactaaagtactgcatacgcatgaagccttcttgtgactaagccccgggaaaggaaggagttccagctcagaccctgcttctccctgggcttttgtttcccatctatgcagtaaggactggacttgataatatcagggctcttaacactctcagtggtgcccgtctgcaggcctagggtgttaacagarcaggagaaaaaaaagatagttgagccaagagagacctataaacagtgtggttgctaggccagcccagcctggagcagagggcaggccagtggccagcagagccaggaggggccacgc

SEQ ID NO: 485991 - DNA, 600 bp, Homo sapiens
gtgtggtttgggaaaattatgtatgggctctgaaacttagcttctctatctttaaaatgggaataataatataccatasttcaacattttacagtgcccttttcaaggaaaatagtcaataaatgatagctgcataatcaaaggtaaggaaaaaacccagataggtttattgataaaagccagagcatattcaaactgcaaagatgctctgagtttattatatataatagcctcacttgtggacaaagcaagactgagaaagtagctgggagatgttcaagattatacagtagaattatcagatttccagctcttagctggaatgtatagcaccatcttttttatttttgttagactttctggtataactccttggtgtggacattccttacttcccagtataaggaactcaacactgctcaagaaaatcactccattttgggggggctggggagaggggagcaactgtaagagttagatttttttctttctgctgtataagtctattttacttcgtttccaatcattttgaccttcgtgtggctctggcagttctattttctcttctgcatgacagctcttcagccttctgaaaacagt

SEQ ID NO: 485992 - DNA, 437 bp, Homo sapiens
gctgccctcagatgtcactgggggagggtatccctaataactgttgtgtaaagtgtaagaagctcagggcactgactcagrtgtgcaagaaaaatcacttttttttttttttttgagatggagtcttactctgttgcctaggctggagtgcagtggcacaatctcagctcactgtaacctccgcctcctgggttcaagtgatcctcctgcctcagcctctcaagtagctggaattacaagtgtgcaccaccacacccagctaatttttgtatttttagtagagacgagctttcactatgttggccaggctggtctcaaactcctgacctcaagtgatctgcccgcttcggcctcccaaagtgctgggattgcaggtgtaagccaccgcctcccaccacttgtttttaaccactcagcagtgtttctgacatcaagac

SEQ ID NO: 485993 - DNA, 561 bp, Homo sapiens
tgccctcagatgtcactgggggagggtatccctaataactgttgtgtaaagtgtaagaagctcagggcactgactcaggtgtgcaagaaaaatcacttttttttttttttttgagatggagtcttactctgttgcctaggctggagtgcagtggcacaatctcagctcactgtaacctccgcctcctgggttcaagygatcctcctgcctcagcctctcaagtagctggaattacaagtgtgcaccaccacacccagctaatttttgtatttttagtagagacgagctttcactatgttggccaggctggtctcaaactcctgacctcaagtgatctgcccgcttcggcctcccaaagtgctgggattgcaggtgtaagccaccgcctcccaccacttgtttttaaccactcagcagtgtttctgacatcaagaccttggctgaactggcagagaaaaagtagcttccaattttcctggtgaacttcctaccctgctcagggtcctgtcacagcggcagagacctctgagggaccagagcagcaagtaggggccaggaggg

SEQ ID NO: 485994 - DNA, 431 bp, Homo sapiens
gcctgcctcggcctcccagagtgctgggatgacaggcgtgagccaccacgcctggcctattcctctactttcttaataaacttgctttcactttacggactcaccctgaattctttcttgcatgagatccaagaaccctctcttggggtttgcatcaggacccccttcctgtaacacaactgtagttggctgtgactcagggggttcgggggaggcctgggctagaggtatgaacttggatgtgatccacgaggtgcaagcgtgagtcgggcacacccacagtasaggccggcccatgaggaggaagatggggcaagagtggggagaagaccaggtgcacgaggcccctggaggccctggagggagtgtttcaaagaagggagggtgagcacctgggtcctatgctctggtgattgagtaccacagagctg

SEQ ID NO: 485995 - DNA, 566 bp, Homo sapiens
accagctattggactggagaagtatttaagtactagattgaggatgacttggatttgtatttttgttttgccactgatgctccggtattgcttcttttgtaatttcctttctgtttaaacaccttccttcagccaatcttcaatgttagtgtagttttttttgytttgttttttttggtccaagaatgtctggattttcctctcattccttaagggtagtttcgtgggaaatagaattcatagttgatagttctttctttcagcacttgaaaaatgttgtgctgctttcttctgtccttcatggtttctgatgagaaatttgctgtcatttgaattggtgttatcctgtaggtaaaatgtttctctctggcttctttcaagacttctttgtttttaattttcagatgtttaattatgatgtatcttagtgtagatttcttttgagtttatccagtatgagagtcacgcaacttcttgaatatgtttggtgcttcaccaaatttgggagtgttttagccattatttctttgaatattcttttagttcccctcttcctctcctctttt

SEQ ID NO: 485996 - DNA, 566 bp, Homo sapiens
accagctattggactggagaagtatttaagtactagattgaggatgacttggatttgtatttttgttttgccactgatgctccggtattgcttcttttgtaatttcctttctgtttaaacaccttccttcagccaatcttcaatgttagtgtagttttttttgctttrttttttttggtccaagaatgtctggattttcctctcattccttaagggtagtttcgtgggaaatagaattcatagttgatagttctttctttcagcacttgaaaaatgttgtgctgctttcttctgtccttcatggtttctgatgagaaatttgctgtcatttgaattggtgttatcctgtaggtaaaatgtttctctctggcttctttcaagacttctttgtttttaattttcagatgtttaattatgatgtatcttagtgtagatttcttttgagtttatccagtatgagagtcacgcaacttcttgaatatgtttggtgcttcaccaaatttgggagtgttttagccattatttctttgaatattcttttagttcccctcttcctctcctctttt

SEQ ID NO: 485997 - DNA, 566 bp, Homo sapiens
accagctattggactggagaagtatttaagtactagattgaggatgacttggatttgtatttttgttttgccactgatgctccggtattgcttcttttgtaatttcctttctgtttaaacaccttccttcagccaatcttcaatgttagtgtagttttttttgctttgttttttttggtccaagaatgtctggattttcctytcattccttaagggtagtttcgtgggaaatagaattcatagttgatagttctttctttcagcacttgaaaaatgttgtgctgctttcttctgtccttcatggtttctgatgagaaatttgctgtcatttgaattggtgttatcctgtaggtaaaatgtttctctctggcttctttcaagacttctttgtttttaattttcagatgtttaattatgatgtatcttagtgtagatttcttttgagtttatccagtatgagagtcacgcaacttcttgaatatgtttggtgcttcaccaaatttgggagtgttttagccattatttctttgaatattcttttagttcccctcttcctctcctctttt

SEQ ID NO: 485998 - DNA, 566 bp, Homo sapiens
accagctattggactggagaagtatttaagtactagattgaggatgacttggatttgtatttttgttttgccactgatgctccggtattgcttcttttgtaatttcctttctgtttaaacaccttccttcagccaatcttcaatgttagtgtagttttttttgctttgttttttttggtccaagaatgtctggattttcctctcattccttaagggtagtttcgtgggaaatagaattcatagttgatagttctttctttcagcacttgaaaaatgttgtgcygctttcttctgtccttcatggtttctgatgagaaatttgctgtcatttgaattggtgttatcctgtaggtaaaatgtttctctctggcttctttcaagacttctttgtttttaattttcagatgtttaattatgatgtatcttagtgtagatttcttttgagtttatccagtatgagagtcacgcaacttcttgaatatgtttggtgcttcaccaaatttgggagtgttttagccattatttctttgaatattcttttagttcccctcttcctctcctctttt

SEQ ID NO: 485999 - DNA, 574 bp, Homo sapiens
tgcaatctcaaaatttaccatttactatttcatcgttttgaaaggcaatagcatcagggaaaaagaagaaaactagttcttatatttttctgggttttcaaaaatcaagtttgcttcttcactacactcccaccatgcacccttctagttctttctaaattatccctgagcctttgcctgagggtctttacttcctgtaacttccctaattttccttactagtgattaatttagacggatatagccagttatttctttsctcacactcaggcacctaaccactgatttttgccaacaagaacaagagacaaagggtaatgaaatgcattcttgagctcacctgtgaagagttccctctcctgtacagaaggaaaacagagtatatcctgtatttaaacatgagctaaaataaactgtagttacagtttgcccttctctgcccatccctcagtttagcaatatgtacagaacacgcgttgtgcgtagaacgaagtgtgaacatcacctcgactggcaggcaggcaactaactgcagtgttttagcgccgtctggtgttggcgcctagaaacgcag

SEQ ID NO: 486000 - DNA, 633 bp, Homo sapiens
tgaaagtgtaaaattttataatcatcagtggtaccagtttatcaaatacagtaaaacctgagtaattcagaatttataatgatgggaggtccctataggagaagcaatgacctatggtggaaaataaaatctatttcaaatagaaatggatttgaatttttactctactatttattagatatgcaggctttttcatgaaattatagaagtattttatacttagtattctagcatgattaataaatatctaaaatcactgaatttcttaagctttgtatgtgagatttttaaaaattccctgtgtcagtaaatataattctattgtagtcaatgattgtggttcacaaagcaaatatttacttccttatcttgggtcacaggcttttcacagtacagtactgctgattggctgttgaaatacacaggttataattcaagagccatggcattacagtaaaacagacacaacctgggggaaattatgacataaatggaatgagcaggtgagtgtttatttcattttaaaaattwtcttgaatcttcccaataatatagtgagttaaatccagtgaagtctcttgtgaaagttgtcactttctctattttccagtctctatgaaaggtgggagcctg

SEQ ID NO: 486001 - DNA, 615 bp, Homo sapiens
gtgagagatgaggccaacttgaaaagcaatagtacaggtaagcactggtgtgggctgaaagacccattgcaaatgtggtggggaagcaaccacaaatgtgagtacttgatgaattggagaacaaagcacagtgccacaatgattctgcatgcaggtgtggaacgggggaagctggacacctttcccatgcttctctttggttccaaaggttgaatgatcccagaccaccagaccatawtcacaagaaagtttaaaaatttaacgaatatcaaaataatcggtttctgtattattgtctagttaggattgtttcatcacctactccaattgtgcagataatttggaatagactaacctttctctcaactctttcctattttcatattttattaattttcatgtactcacaatgtatcaaatatttaggatttcattagcaaataaatgttataatgtttatttttaaagttactaaaactagacttagttgatacaagttctcactatgattggttttttatgtttcatgttttatgtttattgtgaaaaatgatgcagtgaacaagtgaacattgtcatataactatctctttgagtctttttttcaattatttt

SEQ ID NO: 486002 - DNA, 617 bp, Homo sapiens
aaaaacaaaaggcctggaaagaacaaaagagttagaaaaatcaccattttgcaaccactaatgaaaagatggacctagacaggatgatcagggcatgccaaactcattaggtgaaaggttgactggagaactttgccrtggtgggaccagactgacatcatgcagattaggaagacttgacattacacacccagaatgtggtagaaaaggaagtacaatactcacaatatgttcgaagtcatctagctgaaaaaatggagcctgaatataatcatactctaaacttactgccactttataggaaatactggggataaaagaacaacttaaataacaagaagggataaaagaaaaacttaaataatagcaggaagaagtaatcaactaaattcataatctacaaaagaaccaatttctctaacaagccaatggtattaaaaggtggggagaagggacactattaaaaaataaaggagacttaagagacataattaaccaatacaatgcatgaaccttgtttaaatcctgatttcaatgaagcaattattaaaaggcaatttttgaatcaatctgggaagtgtaagtatgactggttaccagtgctactcaggattatt

SEQ ID NO: 486003 - DNA, 613 bp, Homo sapiens
gagacagggtctttactgaggtaattaagttaaaatgaggacattaaagtaggctgtattccaatatgatttgtgtccttataaaaggaggaaatttgggcacagagacagacacatttagagaaacgatgatgtgaaaagacacagagaaaacacggccatctacaagccatggaaagaggcctagaatgaatctttccttcccagcactcagaagaacccrgccctgccaatacattgatctcaaacttccagcctccagagctgtgggacaataaatttccattatttaagctgcctagtctatgatatcttgttacttgcaaactaatacacacccttccctacaagcacacatatacgcatattactatatttgagtataccttaaaaatacataaaatatatcagaattcacatataaattcagggaattcatagttcaccccagaacacccttgggctcctcttgaaggacgcttgcaaatttttatttcctgaaaacattccaatgcctataataataatattaacaaaaacataaaacaattactgttctaagcaccatcctaagggcttgtattaacccacttaattctcccgacaaccccag

SEQ ID NO: 486004 - DNA, 485 bp, Homo sapiens
ctgacccaatatacttcaactcttctgtgggcaaagcaggtggacggacatgcatgtgtgattctgttccacacagcaaagacatcaatgcctcctcctgttctcctggctaatctgagctacagccacatgtgctgccagaggcatttggcagactaacccaatgttcagttaggtgtgtaaagagtaagtcagtagctcaatggggcarcataattagttcaaatatgtgggcccagtcctcatagatatcgtgccctgagcagtgggatttggtgttaaatggagttggagacatgctgggtcacaaacagaagctacacctcaggcttgatttctggtctgtgaaatgggagtcgagtgggcaaggagcccccaggattttccatgaggaggcactgagcactattccaaggggagaaccataagatctgtctgggtttaatgctaagtcagaaaccagagtggaagccctatccaaaatt

SEQ ID NO: 486005 - DNA, 636 bp, Homo sapiens
aagtattgagtgatcactttgtaagaagagttcagaggagattsaagtatcttaggatggatcgaacttccaggtccctttctacttagacagtagtatttaagagatctacagtataaatggcttttgcttgctcatggaagcaaagcttatactcaagaggtaaatcctcactcatttaataaacatataggcagtggtgcatagtgactaagaatgtgggctctggaattcgagttctggatttcttacttactaatgtatgaccttgacaaagttactgaacatctccaaactttagtttccttatctgtaaaatgatggtaatagtattactactgggatgttgtgaagtaatgcataaggaacacttaacatggtgcctggcacagaggaagtactcaattgttattaatactaattgttattatattactactcaaatgttgttactattagggttctacctttattcctcctctcctaccaggagccttagcctctgtctgtgttctgcatttccttggggctgccaaaatccttcccttcctggtaatgtcttagacttcaggcaggaaaggtcagggaggttcccccagagaccttagagcttgtgcctctgagcatatagttgac

SEQ ID NO: 486006 - DNA, 595 bp, Homo sapiens
tcactttgatatttaaaaacccagttactatcatgtgcccaaagtaataaatgttttagaatttcaattaarcaaaatgagaagagctggatctcttttctctatctaatgagtcacacagacccattaccccactatccattaattataacaaggtcagcacattacccaaagtctcctcatgactgtataatgaacctatgcagtgctgtgctgtgagcagacccacagagagactccaagccagggcttctagagtttctgtgtcatttctcttggcaatcaaaacagaggccttgaagccaaggaaggttcagacacattaaggccagaggtcccaggaaaaacatgtctgagatttacacatctaacctggaagtcaggaagcaccaactgtcatttctattgatgttcgagtgcagcattcttccacagtgtgttttccatctgttgtttctgtctcctaccctagaatttctacttcttacaagaagacatcttaatacttattgaccacctacaatgtaccaggcacgtactggacatcattatcatcaccattttacagaggaaaaagggtctcagcctcagagga

SEQ ID NO: 486007 - DNA, 595 bp, Homo sapiens
tcactttgatatttaaaaacccagttactatcatgtgcccaaagtaataaatgttttagaatttcaattaagcaaaatgagaagagctggatctcttttctctatctaatgagtcacacagacccattaccccactatccattaattataacaaggtcagcacattacccaaagtctcctcatgactgtataatgaacctatgcagtgctgtgctgtgagcagacccacagagagactccaagccagggcttctagagtttctgtgtcatttctcttggcaatcaaaacagaggccttgaagccaaggaaggttcagacacattaaggccagaggtcccaggaaaaacatgtctgagatttacacatctaacctggaagtcaggaagcaccaactgtcatttctattgatgttcgagtgcagcattcttccacagtgtgttttccatctgttgtttctgtctcctaccctagaatttctacttcttacaagaagacatcttaatacttattgaccacctacaatgtaccaggcacgtactggacatcattatcaycaccattttacagaggaaaaagggtctcagcctcagagga

SEQ ID NO: 486008 - DNA, 526 bp, Homo sapiens
tatatttcatttcacttgggcatatacttagaagcaggattgctgaattatttatttttttttaagtcaagagttgtttaaactcttttggaacacattttggaaaatcaacattgctcatggtatctgaatcagcaatataatgctcctgtatacatgtgcatggggagtgctactggtcacagtcatagacatagaatcacatatgcatcagtatatcaatgcatattctatgcataggtagagtatgtgattctgtgtgtaagtayatccatgattctatgcgtaggtaaagcatgcagttctatgtgtaagtatatccatgattctgcgcataggtatagtatgtggttctatgtgtaagtatatccatgattctacacataggtacagtatgtggttctatatgtaagtatatccatgattctatgcataggtgtagcatgtggttctatgtgtaagtatatccatcattttatgcacaggtatagcacgtggttctatgtgtaggtatatccatgattct

SEQ ID NO: 486009 - DNA, 526 bp, Homo sapiens
tatatttcatttcacttgggcatatacttagaagcaggattgctgaattatttatttttttttaagtcaagagttgtttaaactcttttggaacacattttggaaaatcaacattgctcatggtatctgaatcagcaatataatgctcctgtatacatgtgcatggggagtgctactggtcacagtcatagacatagaatcacatatgcatcagtatatcaatgcatattctatgcataggtagagtatgtgattctgtgtgtaagtacatccatgattctatgcrtaggtaaagcatgcagttctatgtgtaagtatatccatgattctgcgcataggtatagtatgtggttctatgtgtaagtatatccatgattctacacataggtacagtatgtggttctatatgtaagtatatccatgattctatgcataggtgtagcatgtggttctatgtgtaagtatatccatcattttatgcacaggtatagcacgtggttctatgtgtaggtatatccatgattct

SEQ ID NO: 486010 - DNA, 526 bp, Homo sapiens
tatatttcatttcacttgggcatatacttagaagcaggattgctgaattatttatttttttttaagtcaagagttgtttaaactcttttggaacacattttggaaaatcaacattgctcatggtatctgaatcagcaatataatgctcctgtatacatgtgcatggggagtgctactggtcacagtcatagacatagaatcacatatgcatcagtatatcaatgcatattctatgcataggtagagtatgtgattctgtgtgtaagtacatccatgattctatgcgtaggtaaagcatgcagttctatgtgtaagtatatccatgattctgygcataggtatagtatgtggttctatgtgtaagtatatccatgattctacacataggtacagtatgtggttctatatgtaagtatatccatgattctatgcataggtgtagcatgtggttctatgtgtaagtatatccatcattttatgcacaggtatagcacgtggttctatgtgtaggtatatccatgattct

SEQ ID NO: 486011 - DNA, 606 bp, Homo sapiens
agttcagaggagattgaagtatcttaggatggatcgaacttccaggtccctttctacttagacagtagtatttaagagatctacagtataaatggcttttgcttgctcatggaagcaaagcttatactcaagaggtaaatcctcactcatttaataaacatataggcagtggtgcatagtgactaagaatgtgggctctggaattcgagttctggatttcttacttactaatgtatgaccttgacaaagttactgaacatctccaaactttagtttccttatctgtaaaatgatggtaatagtattactactgggatgttgtgaagtmatgcataaggaacacttaacatggtgcctggcacagaggaagtactcaattgttattaatactaattgttattatattactactcaaatgttgttactattagggttctacctttattcctcctctcctaccaggagccttagcctctgtctgtgttctgcatttccttggggctgccaaaatccttcccttcctggtaatgtcttagacttcaggcaggaaaggtcagggaggttcccccagagaccttagagcttgtgcctctgagcatatagttg

SEQ ID NO: 486012 - DNA, 541 bp, Homo sapiens
gaaccctaaagagctccggcggtgctgcctgctgcaactcctgcctgatcaatatggttgcagtcagctatagactgttttactgagaccggacaacattagttcagtcgtttgtggtaaacatctacgtgtacaagcacactttataaacatttttttctttcttttttttttttttgagacggagtttcgctcttgttgcccaggctggagtgcaatggcccgatctcagctcactgcattccacctcccgggttcaagcaattctcctgcctcagcctcctgagtagctgggattacaggcatgcgccactgtgaccggctaattttgtatttttagtagagacagggtttctccatgttggtcaggccggtcttgaactcctgacctcgggtgatccgcctgcctcggcctcccaaagtgctgggattacaggcgtgagccaccgcgcccggccaaacatttttttctttcaagacggaggcttgctctgtsgcccaggctggagtgcagtggcgggatgtctgttcactgcaacct

SEQ ID NO: 486013 - DNA, 504 bp, Homo sapiens
aatgtttgtttaacttcggaattctaaataaatatttttcttatagttttattagaattgggattgatatttatgtaataataatggtttgattgtcacttatctggaactctgatttaccagcacagttcaattatctaagttaatatttttcagttcttcaaaaccatgtttctatttgatagttgtaaaaycacctcttcatctttgctattgtctgaaatttaaaataaatataacttgttttttaaaaatcaaaagaatcaggtagaaagtactgctttgttttcaaacttactagcacacctccaatgtattgaattctatttaaatttacaaaacagaagtttcttacatgagtttcatggaccacttcagaggctcattaaatctgatattatatataaagttttatccatgtgggaattcttttgagatgaaatatctgtagctttattggagtcttgacgctttccatcacctaaacaaggttaaaaactattt

SEQ ID NO: 486014 - DNA, 557 bp, Homo sapiens
tgttcaaagcaggcttattcagaatagccaataccggtttattcagaatagccaatacccaaacactcattatcagggtagggatggggtgggaatggcaaacaacctgtgctatttccctgtaatggaatactactcagcaatgaaagaggaatgaacttctgcttccactaagcaatggatagagccagagacattatgcagagagaaagaagcatgtagaacagagtagatgcaccatgattccatctgcatgaagttctagaagcaaaggtaaagtgaaaacaatcaggagagtgattgttcacaaataaggcagaagacaatgacaatgatttttataattctagtgattatgttattgattgaatagtcactaaatccaggcatgtctgacaacagcagtgtaaggcagagttctcaaagtggcccaaccttccatagaaaattgttgaggcacataaaatttaagatasttaaccaaggtcaggcaagggccgacgtagatttccaaaacagaacctgggttcttggacatagattagactggacctgcc

SEQ ID NO: 486015 - DNA, 507 bp, Homo sapiens
ttgtattctacagattaaaattaatcagttaagcacctccaataaaatttcccccaaatattttttgccaaatttgggtgactttgtttctgtctttgcacaatatgaagtgctaacatgaggtaagtgctaaggtctagagaaggctgtggaagagatgacaaactccagcatgatgcctgagtgtccagtgtgctctgctgaggcagcatatttttgtacattgctgtatttgcaaaaaccctacaagattcacgaaattggacaaccatctttataacactactagtggtaaaacaactaaggatggctggtttgcagtcatctgagcaacctctctagtttcatagatatggtttctctctgatattgaacggcttccaatttcaagtagaatgytacatcacaagaataacgatgtgaaaagaactggtttcttttgtaatcccaaacgttctagtcagtgtattaaaagccattatttgaagaagggtgcacaggctccag

SEQ ID NO: 486016 - DNA, 502 bp, Homo sapiens
ctgcccgccaaagaggtcctcagcaacacaggctaagaacccgtttctggccgggcgtggtggctcamgcctgtaatcccagcacttgcggaggccggggcgggcggatcacctgaggtcaggagttcgagatcagcttggccaaagtggtgaaaccccgtctctactaaaaatacaaaaattagccgggctgtaatctcagctactcggaagcctgaggcagaaaaaccgtctcaacccgggaagggaggttgtagtgagcggagatcgtgctactgcactccagcctgggcgacagggcgagactccggttcaaaacaaaaaacaaaacaaaacaaaaatcaaaaccctcttccttgggggagaccagcggcgcggaagggaggaaaaagaaggagaggcaaacgtcacttctcccgcaggctgtggcagcatgttgttcggctgagtggcggagggtgggatggaaaagctgactgggacggggaaggcgctgtcagtg

SEQ ID NO: 486017 - DNA, 502 bp, Homo sapiens
ctgcccgccaaagaggtcctcagcaacacaggctaagaacccgtttctggccgggcgtggtggctcacgcctgtaatcccagcacttgcggaggccggggcgggcggatcacctgaggtcaggagttcgagatcagcttggccaaagtggtgaaaccccgtctctactaaaaatacaaaaattagccgggctgtaatctcagctactcggaagcctgaggcagaamaaccgtctcaacccgggaagggaggttgtagtgagcggagatcgtgctactgcactccagcctgggcgacagggcgagactccggttcaaaacaaaaaacaaaacaaaacaaaaatcaaaaccctcttccttgggggagaccagcggcgcggaagggaggaaaaagaaggagaggcaaacgtcacttctcccgcaggctgtggcagcatgttgttcggctgagtggcggagggtgggatggaaaagctgactgggacggggaaggcgctgtcagtg

SEQ ID NO: 486018 - DNA, 502 bp, Homo sapiens
ctgcccgccaaagaggtcctcagcaacacaggctaagaacccgtttctggccgggcgtggtggctcacgcctgtaatcccagcacttgcggaggccggggcgggcggatcacctgaggtcaggagttcgagatcagcttggccaaagtggtgaaaccccgtctctactaaaaatacaaaaattagccgggctgtaatctcagctactcggaagcctgaggcagaaaaaccgtctcaacccgggaagggaggttgtagtgagcggagatcgtgctactgcactccagcctgggcgacagggcgagactycggttcaaaacaaaaaacaaaacaaaacaaaaatcaaaaccctcttccttgggggagaccagcggcgcggaagggaggaaaaagaaggagaggcaaacgtcacttctcccgcaggctgtggcagcatgttgttcggctgagtggcggagggtgggatggaaaagctgactgggacggggaaggcgctgtcagtg

SEQ ID NO: 486019 - DNA, 501 bp, Homo sapiens
tgaagggggtaaccggcaacctgctttcaggacccttctctttgctgagggctttcctttcacttaataaattctacttcactgactctctggtgtccccccgctccacctaattcttcctggtcgtgagacaagaattcaatggagcagaaagactgaaataatattggactagaattaatgaactcttttaacatttagggtagttttagttacttattgactactaaattaccaacttggataattgttcagttttagaaaatttgaaggaatgctttgtattgtattgtaataatgagagctgtaagctagagagcatcatcaaagttgttttcatcattgtggaaattagagtttgttataaaaataaccaagttacagatttaaaaacaaaatgaatccattgattaggaaccacaaaaaatgcagaactatatggaattscaggatcagccccttcatttcttttgattataatataacacttttctctcacat

SEQ ID NO: 486020 - DNA, 633 bp, Homo sapiens
gtcacaaatatttctggggaattttttcatgtatgtataggctgtttggtatattaaacatatttttaaaaataaaaggcaaagagtttcaacatgctagccatttttgaaggcatggatgggtttacatagaggtaggacttgtgtctcttatttgcaaaataaagtaggattctgctaagagacatactcagtaagtcaagtaggattaatgtgaacaaaaccctgtgagcatgatggatcagggcctaatcttgttgagtagctgttatttattagcaactgctggaatccttataatcattttctgacttagctcttagarctctgaggtgatttattatttttagcctcgtgttctagttatttcttgctgaataacgagctaccccattttaatggcataaagtaaccacattatatgatgctgtttgttctgtgatcagaaatttagactgtagatgtagcttgcctctcttcccatgccttagttaaggtgactcaaatggtagaggggagaaagcatctgcatgcttcttcactcaggtatcaggtatgtgtggagtgtctttatatgagcaagctgagtgtggtggcccacacctgcaatcccaatgtctgggctcacattca

SEQ ID NO: 486021 - DNA, 597 bp, Homo sapiens
acacggtggctcactcctacaatccctgcactttgggaggccaaggcgggatgatcacttgagcccaggggttccagaccagtcggggcaacaaagggggaccttacaactacaaaaaaaaaattttttttttaattagccacacctgggacccaagtacctgggaccacactcacctgtcccgtggctcacgcctgtaatcccagcactttgggaggctgaggcgggtggatcacgaggtcaagagatcgagaccatcctggccaacatggtgaaaccccgtctctactaaaaatacaaaaagtagctaggcatggtggcgctcgcctgtaatcccagctactgrgagggtgaggcaggagaatcgcctgaacccgggaggcggagggtgcagtaagccgagatcgcgccactgcactccagcctggcgacacagcgagactccgtctcaaaaaaaaaaaaaagtgtcttcaactcagataggagtcaatgagaaggttcttaaaagcccgaagacctatttcccagaaaactctaattaaccttataatttgtatagttagttacagtgagtatgagctgtcttgctctgtactt

SEQ ID NO: 486022 - DNA, 446 bp, Homo sapiens
ttttggcttctccatgggacaggtccagaagtagcatggggtgggcttgaattttgaagccgaatctgcatcttagacacttttctgttatgaccctcagttgcctcatctataaaatggagatgaagggaagaaaatgtaatttctttttttaaccgtcataagttctcagttgaggtgctgtcctgaaaacaaaggtcagattaacaagagaaaaactagcaggagtttattgacacttgctgtgtgcccatgatgtgggagggacttaagttctaacatatttctcttaargcagtggtttaggggccttgcttcgacagtattttaacaaagagccataaatcctataaagacaaaacaaagctaagtttgctcccagattttcttatctctgctggcctcctttctgagctggtaagagcccagagctgtccccagtaaga

SEQ ID NO: 486023 - DNA, 503 bp, Homo sapiens
atttccatcttgttttcccttagagctcaggcaagttcctttgaggggccctgcctctctcagctgtgctaacatgaaccccacacgggccacagcatcccacagagcagcagccccggggactgccctcgaggaaccagaggagtggagcccgagaaccccacagtaaagtggaactccacgaaggcagataggcaatgaggctgaccacccctgcccgcgtggaaagtctccttgcactgcttaaccttgaaggtcctgagttttatagcattaagagcggtggcattccagccagcatggtggctcacacccgtaatcccagcactttcggaggctgaggtgggagaatcacttaaggccaggagttccagaccagcctggccaacatggcaaaaccccrtctctactaaaaacacaaaaaattggccaggcgtgatgggtgcacacctgtggtcccagctactcgggagaggctgaggcacaagaattgcttgaactgg

SEQ ID NO: 486024 - DNA, 435 bp, Homo sapiens
ttgggtcttggagggtgacaggccagtcaccagacaatccctgaagtctccatatggcctctcccagggctggcttgcaagagaaggtgagtgtgtagtgggggtttagggcggggtagaggccccccaggcttccacaaggatcgtcctgggcttccaggaaggcgtgaccaaggcagaggcttgcctgggaattttctaggaaagaagtcatgccctgagttgccccatttttatgattggagaacaggaacactgatacatcgaatggcaggtatcctggagccaggactgtcccctctggtctatagattctgccatggccctggctcagtctctstggaactcagagaatcgtggtggtctgggatgcaggaatactccagattagcagcagaaggtgtgcaagcatatgcatgcatgcagaatttgtaa

SEQ ID NO: 486025 - DNA, 604 bp, Homo sapiens
atctgtgcccagttgtccctcagaaatgtgggagaggtgacagagatggaggatgaggtcaccagagcgcacaggatccctgagcacccagtgtgctggttctgctcaggtgacctgccaccccagggatgatatgcacagggctggaggcagacattctcagcagagggctcaggagtgtggaactccttgtatggacgccctgcccagtggacacaggctgcagcatagctctgcccaaactcccatcccagacccagagacacctgtcttgagtgcccaccatggcaggctcagagatctgaaggaatagggccaggctgtgcttaggggagcctttgaagtcaggcgcctggtgcagaaygctctgggagaggtcagaatgcatagcttctcacctggagggtaagacctccttggctggcttccccctttccctggaacctgtcccttccctctccttggtgcagggcccagctagggagatgataccaccaaaggaacagagtctcagcctagacttgagcagcaagatggggatggcaggtggctggaggtgggtgggaaagcagggcagcatgggtgtatggtgcataaagtccaa

SEQ ID NO: 486026 - DNA, 612 bp, Homo sapiens
tgaggcttgtctgagaggagttggagtgctggttttcaccctggttggtgtgctttgctttgagggcacttagaaagcccagcccagcccttgctcctgccctgcacacagcggagcgacttttctaggtatgctcttgatttctgcagaagcagcaggtggcatggagccaagaggaagtgtgactgaaactgtccactcatagcccggctgccgtattgagagggcttggtgggaaactaatgctggtggctgatgcaagcagccaggtcccagggctgtttgctgtcctgcttcctccctgtccctgggacttgggggaggtgctggtcctgtcctgtcggggcattgttctctggactccttcgctcttttcccagatgagcttcccttcaggggaggggtttccagcctgttaccctgaggagctcacagccctggaagaggtgtctggagtagtcagagcactgggagcttctctctcccccaggcggcccccagcccagggagcctgtgcctgtgggaagcccaggagtcactgccctggagcctgtgytttgtgcctggccctgcgctcagagctttgtagccattctcacctcagtcctcaca

SEQ ID NO: 486027 - DNA, 612 bp, Homo sapiens
tgaggcttgtctgagaggagttggagtgctggttttcaccctggttggtgtgctttgctttgagggcacttagaaagcccagcccagcccttgctcctgccctgcacacagcggagcgacttttctaggtatgctcttgatttctgcagaagcagcaggtggcatggagccaagaggaagtgtgactgaaactgtccactcatagcccggctgccgtattgagagggcttggtgggaaactaatgctggtggctgatgcaagcagccaggtcccagggctgtttgctgtcctgcttcctccctgtccctgggacttgggggaggtgctggtcctgtcctgtcggggcattgttctctggactccttcgctcttttcccagatgagcttcccttcaggggaggggtttccagcctgttaccctgaggagctcacagccctggaagaggtgtctggagtagtcagagcactgggagcttctctctcccccaggcggcccccagcccagggagcctgtgcctgtgggaagcccaggagtcactgccctggagcctgtgttttgtgcytggccctgcgctcagagctttgtagccattctcacctcagtcctcaca

SEQ ID NO: 486028 - DNA, 602 bp, Homo sapiens
aaattccatgttcttgtgggtgtcacggggagtgtcgcagccctgaagttgcctcttctggtgtcaaagcttttggacattcctggggtgagtatcctcaccagataagcatggcagcctccggcatgggaggccggtgctcccggggatggcccattgctctgcagtacatgcaattttctttttctttatcatgttaatcatgcttgtggaggtcctgtgtgtgtggtgctctgtggaggattcaggagacagagaccagtgcccagtgtaaccaggggctagattagatagtacagacagggcatgaggggagactgggaaaggacccagtgaacggagggtttgggctcccatacattaaccctgagaatccgtgaagtcctgtgtgggaggagggctggctggagaagtgcagcaagttctcagtaycccctcctgccttgggcttccccatccctgctttcattccgccttgaacactgcggctgtgttctccctcctcgtgagacctcatggttgtcttgtcagtcaaatgctctgaaaccccattgtctgaagctctaggttcaaactttgctccttcaggtgttcagagctgc

SEQ ID NO: 486029 - DNA, 602 bp, Homo sapiens
aaattccatgttcttgtgggtgtcacggggagtgtcgcagccctgaagttgcctcttctggtgtcaaagcttttggacattcctggggtgagtatcctcaccagataagcatggcagcctccggcatgggaggccggtgctcccggggatggcccattgctctgcagtacatgcaattttctttttctttatcatgttaatcatgcttgtggaggtcctgtgtgtgtggtgctctgtggaggattcaggagacagagaccagtgcccagtgtaaccaggggctagattagatagtacagacagggcatgaggggagactgggaaaggacccagtgaacggagggtttgggctcccatacattaaccctgagaatccgtgaagtcctgtgtgggaggagggctggctggagaagtgcagcaagttctcagtatcccctcctgccttgggcttccccayccctgctttcattccgccttgaacactgcggctgtgttctccctcctcgtgagacctcatggttgtcttgtcagtcaaatgctctgaaaccccattgtctgaagctctaggttcaaactttgctccttcaggtgttcagagctgc

SEQ ID NO: 486030 - DNA, 466 bp, Homo sapiens
ttattacaatgtgtattcccaggtccctcctgggagaatctgatcctgttggtttagagtttagcccaggtaatctgttttttgtttgtttgtttcgttttcttttttggttttttgtttttgttttgyttttgagatggagtttccctctgttgcccaggctggactggggtggcatgatctctgctcactgcaacctccgcctccctggttcaaacgattctcctgcctcaacctcccaagtagctgggactacaggcggctgccagcacacccggctaatttttgtatttttagtagagtcagaatttcgccgtgttggccaggctggtctctcactcctgacctcaagtgattcgcccaccttggcctccccaaagttctgagattttaggcgtgagctaccacacctggcttgtttttgtttttttgagagggagtctagttttgtgcccaggctggagtg

SEQ ID NO: 486031 - DNA, 608 bp, Homo sapiens
tctatattaattcattcaaaatattaattgtctgtatcacatgacaggcattgttgtgggtgctggggatatggcagtgaacagcacaaaagttgtttctgcttgtggaggtcacatttcagtgagacgaaaacaacaaagtgtgtgtgtgcatccctgccccccctcccccaccgtggcactgagtcacccggggagctgaactctcctttgcctctacagccagcacatgaaatgcagctcaaagccacttgaaagcactcacttggtaacaggcygctccctagtgtggcagacaccactggtgccctactcagcatccattctccttttcttccttactaatacaaccctgattttattggcagaggcaatgtgcccagctaaaaggtattttccagccttccatgccaaataggagtgactgtatgacagtttaggccaatgggagataaacagaaatggttggatagggctttttggagctaattaaatggggatgcagactcggctggcatgcccattgtccctttgcccttccttcttccagcttcttgcaatgcagccatgatggctggagttgagaagccctctcaaaactcttgagg

SEQ ID NO: 486032 - DNA, 566 bp, Homo sapiens
gacaggcattgttgtgggtgctggggatatggcagtgaacagcacaaaagttgtttctgcttgtggaggtcacatttcagtgagacgaaaacaacaaagtgtgtgtgtgcatccctgccccccctcccccaccgtggcactgagtcacccggggagctgaactctcctttgcctctacagccagcacatgaaatgcagctcaaagccacttgaaagcactcacttggtaacaggctgctccctagtgtggcagacaccactggtgccctactcagcatccattctccttttcttccttactaatacaaccctgattttattggcagaggcaatgtgyccagctaaaaggtattttccagccttccatgccaaataggagtgactgtatgacagtttaggccaatgggagataaacagaaatggttggatagggctttttggagctaattaaatggggatgcagactcggctggcatgcccattgtccctttgcccttccttcttccagcttcttgcaatgcagccatgatggctggagttgagaagccctctcaaaactcttgagg

SEQ ID NO: 486033 - DNA, 605 bp, Homo sapiens
gtctccactccaggcagcaccaagcatatgagctactaatactgaacaacatggtaggactgctctcaaattaycttcctgtgtcctatcaaggttggacccctaccttcattcatccactcagtctctgttcctctaagctcatattctccagaaaatatttagcgggttccatacagtcactaaatttttttttagtggctgtgtggagcccactacatatttttttctctttcgatttgtatgctggtccctttcaaaggagttgaagagtagttccaaagaaggggcagttgtctagacaggtagtctagatagagggcatcactgagcatcacttttgtgccctgtattttgaaacatacagcatcctggcaggaaacaggattgggttagatgtttccatgaagagactgccaagaaagaactacttgcagaggaatgagagtgttaagggaccagacaaggaatgttgaggcatcctgagaccagcaacaatggggagctgttgccatttggggctgagacagaaaatggcataacatactttcatctctaaacaaggggtaaagaaaaaagaaagacagaggccccaaaagccttca

SEQ ID NO: 486034 - DNA, 555 bp, Homo sapiens
tccaagagatggtctccctctctcagcctggcccagggcatggacaacaggaacttctcctaagagggctagtcttgggacatggtcttccagccttggtttccctacccaggacatttattttttttttcttttttcttttctttctttctttctcttttttttttttgagatggaatctcactgtaatgcccaggctggagtgcggtggttgcaatctcagctgactgcaacctctgactcctgggttcaagcgattctcctgccccagcctcctgagtagctgggattataggtgcctaccaccacgcctggctaatttttgcatttttagtagaaacggggtttcaccatattggccaggttggcctcgaactcctgacctcaagtgatctgactgccttggcctcccaaagtgttgggattacaggcatgagccactgtgccyggctgccatttcttttctattggtttaccctgctcttttctttcatagaactcatcacaggtttaatctgatatttaattgttgatgtgtttactttttacaagccc

SEQ ID NO: 486035 - DNA, 623 bp, Homo sapiens
ctgaatccgggatgctttggcctctgctttgaccaaaacatgaggtagatttaggtcactggtatcatcaacaactcctggrccacacttcagtgcagatatgttttgcttggcctgtaaactagaggctcacacaatgttctaaagatatttagaattagttggcaatgttggaggatcaggagagtttacataatcacctggaatttcagcttttcttgaagagtcagcagacctcacagcattgggtctgatgtggtttggctgtgtccccactcaaggctcatcttgaattgtagctccataatacccatgtgttgtgggagggacccggtgggagataattgaaccatgggggtaggttttcccatgctgttctcatgatagtgaataagtctcatgagatctgatggttttataaacggcggtccacctgctcatgccctctagctggctgccacgtaagacatgactttgttcctcctttgccttctgccatgattgtgagacctccccagccatgtggaactgtgagtccattaaactctttttctttatgaattacccagtcttgggtttttcttcatagcagtatgaaaatggactaatgcaagatccataaa

SEQ ID NO: 486036 - DNA, 623 bp, Homo sapiens
ctgaatccgggatgctttggcctctgctttgaccaaaacatgaggtagatttaggtcactggtatcatcaacaactcctggaccacacttcagtgcagatatgttttgcttggcctgtaaactagaggctcacacaatgttctaaagatatttagaattagttggcaatgwtggaggatcaggagagtttacataatcacctggaatttcagcttttcttgaagagtcagcagacctcacagcattgggtctgatgtggtttggctgtgtccccactcaaggctcatcttgaattgtagctccataatacccatgtgttgtgggagggacccggtgggagataattgaaccatgggggtaggttttcccatgctgttctcatgatagtgaataagtctcatgagatctgatggttttataaacggcggtccacctgctcatgccctctagctggctgccacgtaagacatgactttgttcctcctttgccttctgccatgattgtgagacctccccagccatgtggaactgtgagtccattaaactctttttctttatgaattacccagtcttgggtttttcttcatagcagtatgaaaatggactaatgcaagatccataaa

SEQ ID NO: 486037 - DNA, 470 bp, Homo sapiens
ttaatcttttagggcactcttgtctggtaaggtttaatttacattaaattttctaaaaggaagggcagaatggtcaaagcgagatagcaagacagacaagaggctgtctttcataaattaataagcatcaccgaccgcctttcttgaccctttaaactctgtgaaattaatataagtagacaactaaggcccgcttggcccccctagagccttgcaagttcacttaagcaatccaagtttccttaaagttttataagccagctttyagagcaagtcctttgtacttattactggtgacagtgagcattacaggagccaatgaaccttactgacttacgaccccaatatggtcgagcactgttatcaggggaaatatcagaatcaatgcttgtatattacattgaggtcctgacttctgaaagagtcccctatagacccttcagaatatgtcagtgaaataaacagctaat

SEQ ID NO: 486038 - DNA, 659 bp, Homo sapiens
gctgaggctgccagtgtcaaggcacttctagcatgggagccgagcccgccctccaaagaagagagctttgcakttcctgtgtatcacctgcctctgttgcaaaattcccatccatgcctcaggaagatattgcagagagtgacaacctcccactattcccgttatttttcattgtttgatattcaggtcttttctgcctgcccagctcaggaattccactctccctaaacgaagagaccgtgaagaccctcataactcccatccatcacagacagaaataccacagattaggagccagtaaagaaataaaacacacattttcgcatgcaattatatgtgaaattactgcatagacagatatccaaactctcaggaatccaaatcagaaataacattaattactccgaaagggtaactagccaaaggaaattgaagtcttctagggaggctgcacaaggattttaattttcgattaagaaaccatttgcgggttccaatccccaatagatgcaaataaccctatttccatacactggatgcagagtcagttttatgtatctccaaaaacaggacagagaaactctgaaaatatttgtcaatcgtttctgcacaacgtgctgtgcctgcagtctttgcacgcccacatgcagggctgtgtt

SEQ ID NO: 486039 - DNA, 659 bp, Homo sapiens
gctgaggctgccagtgtcaaggcacttctagcatgggagccgagcccgccctccaaagaagagagctttgcatttcctgtgtatcacctgcctctgttgcaaaattcccatccatgcctcaggaagatattgcagagagtgacaacctcccactattcccgttatttttcattgtttgatattcaggtcttttctgcctgcccagctcaggaattccactctccctaaacgaagagaccgtgaagaccctcataaytcccatccatcacagacagaaataccacagattaggagccagtaaagaaataaaacacacattttcgcatgcaattatatgtgaaattactgcatagacagatatccaaactctcaggaatccaaatcagaaataacattaattactccgaaagggtaactagccaaaggaaattgaagtcttctagggaggctgcacaaggattttaattttcgattaagaaaccatttgcgggttccaatccccaatagatgcaaataaccctatttccatacactggatgcagagtcagttttatgtatctccaaaaacaggacagagaaactctgaaaatatttgtcaatcgtttctgcacaacgtgctgtgcctgcagtctttgcacgcccacatgcagggctgtgtt

SEQ ID NO: 486040 - DNA, 367 bp, Homo sapiens
  misc_feature (1)...(367): n = A,T,C or G
aggccatgggccaggcggctgagtgagcgcatggcctcggtgctggcttggtgttgcagggggcggtgggggtggagagagaggtccctgccagctcccgcagtagtgtctgatttttgaatcagcggcrttcatgttccctccaagggagagagccgggagaatgtgtgactgagagtgcacacccggcttccctcccggcaggaggcctctggccaaaaagtccacccgaggcaagggaaggagaacagacactctggtctttttaagaaatggctttcgggttacattttttcctctgcaaaaggtctagccttctcagtacatgaatttctcatgggggggcctagcanaaagtctcaccggg

SEQ ID NO: 486041 - DNA, 656 bp, Homo sapiens
ggtgagaatgtaaagaagagggaactcttatacactgtttgtgggaatgtaaattagtacaatctctatggaaaacggaatgcagatttctcaaaaactaaatgtagaactaccatatgacccagcaatctcactactgcatatttatcccaaggaaaaaaaaaaacaatataccaaagagtagaatgatagacaccagattgggaagggtgtgttggtggggttgggagaagatgaagaaaggctgcataataggtaaaaacttacagttagataaaaggaataaattccaatsttcagcagcaggtgactgtagttaacaacaatacactgtatatttcaaaatagctggaagagaggacttgaaatgttcccaacacttagagatgataaatactcaagatgatggataccccaaatgtcctgaatacatattctatgcacgtacaaaatatcacataaatatgcacaaatattacatatcaataagcaaaagtttaaaaattttcttcaagcataaaaacaagcagcaatttttataatttttgaagttttgacattttaaaaatgtcaaaaataacatatcttctaataaaagcaatttcttaaaagcaccttaaagacctacttatgaaaaatctagctctatttttcca

SEQ ID NO: 486042 - DNA, 630 bp, Homo sapiens
tggacagtctagactctgtttcctcctacacctttgaaaggtaaatacagaaaatgaggctgagaaaacacctttagaatcagtcccctttcttagcacttcagtggttcctgcacagggtgcagatgccgagctctccttaggctccagcccccaggctggctgggctggttccaccgtacatagcccagaggctcaccccaatcaggcaaggggctccccatgtcagccaggctcctcttatctggtgtctgacaccrcaaacgcagcagcccgaatatcccaacctggcttccttctcctcactgcttccctgattcctggcatggcccttccggaggaatggcaaatctttatttccactacacagggagacctgttattatccctaagaagccaagcaatgtgtgtgctgaatctactcaatcaccaggtacactggacttttggctttattgtagtcattactgttacaatattgatagcactgtggactgcatttttataaggtcatctgaagaatcctgagcccttgtttcctgtagaaagagtggtttcctttaaaattaaccacaaaagccctaaatagtgttacaaaaatgagtatctacttcttatgaagtagtttag

SEQ ID NO: 486043 - DNA, 636 bp, Homo sapiens
tgacttgaaacccaaggctccagtgacagttttctaagctgtcttttgccagttgactttcatgactcacattccaggtggtcatttttgacacatcctcgtagatgtcaacatgttagggaagaacacaaagtctgtaacatccaagaagcctctaagtctattctgctagtaggtaagagtgaatgtaaaactgcactttcctgaacaataatttataaaaatatcacaaagactgattgttgaaataaagtatgttagaaatgctgtcaatgtaggccaggtgcggtggctcacacctataatcccagcattctgggaggcctaagcaggcggtcacgaggtcaggagatcaagaccatcctggcttacacggtgaaacactgtctcttctctaaaaacaaaaaaattagccgggcatggtggagcgcacctgtagtcccagcttctcaggaggccaaggcaggagaatggcatgaacccaggaggcggagcttgcagtgagtggagatygcaccactgcactccaacctggatgacagagtgagactccatctcaaaaaaaaaaaaaaaaaaagtcaggaaagaacagatgctacttcctataggatcatcatgattaccacatttagatgt

SEQ ID NO: 486044 - DNA, 661 bp, Homo sapiens
agggcttaagttttctttccagaaacctagcttaaaaccaattctctgccagacgtgctctccaggaattcttgactgtgaatatccttctcacccagttaatttatggcataagcacccccatcttgaaacagattgaattaggcaaaattagaagtctggatcatctcttgagcctacctccagggacaagaagaatgatgaagacatggagattccagataaaattggacaaaatgaacacaattattcctcaactggaattttggaaggacttaaaaaccagttctaggccaggggcagtggctcatgcctgtaatcccagcattttgggaggctgaaatgggagtattccttgagcccaggagttcaagaccagcctgggcaacatagtgagattcattcctataaaaaatttaaaaagcttagccaggtgtgtgatgcatacttgtagtcccaactactcaagaggctgaagtgggaggataacttgagcccaggaggtcaagactggaatcatctgtgatctctcctctgcactccagcctgggcaacacagtgagaccctgtctctaaagaaacaaacaaatggaaaaacaacaacaacaacaacaacaamaaaaaaaaacagtcctttgtcacttcaacccattgacgtgct

SEQ ID NO: 486045 - DNA, 538 bp, Homo sapiens
atcatgagcaacactgcaatttaaactaaggtatgtgtggacccagacatgctcacagtggagtgaatttcccccaggtctcagatgtaaggggcaaagtcaaggaaggctctaaccctaatcttctgggtccagatctagtccactttcatcccaccatgtggtgtagccctacaaataagttgaattccaaattctaagcaagcattgactaatgcaaaaatggttaaaaggccagaaccctagaggcaggaaatgtcaccttccttgattaaacctgggaaatgtacccattatggataagatttgctgtctacaggaaaccgtcttagacataaactgatcctatcttccagccaaagtgatttgaagatggcttaactaaggagatttaagtagcwgactaccttgaaggtaatctatgaaaagggacctctgtcttcggaaagtgcgtctaccacaaaagtctgtgaggatgatgggtgtggttctgtgataagtgcaatcagaaagtccatatgagttctgaaaaagtgca

SEQ ID NO: 486046 - DNA, 480 bp, Homo sapiens
tcctcttttatctcttacccagttcttatttatttatttatttatttttttaagagacagggcctcactctgttgcccaggctggagcacagkcaggtcacagctcactgcagccttgaattcctggactcaagagatcctcctgcttcagtctcctgagtagctaggactacaggaatgtgccaccatccctggctagtttttaaattttttgtagacatgaagttgcccaggctgattttgaactctggcctcaagcaatcctcctgcctcggcctcccaaattgctgagattgcaggtgtgtgccactgcacccagccaccagttcttcatttcttatctcctctattgcattgcaacttccttgtgggggtgtgggggaggaagtggggggtgctggcacataacagggtgtgcaaatatttttttgtgtggcttaccaggcatgaacccctacagaacttgacttgagacttacc

SEQ ID NO: 486047 - DNA, 480 bp, Homo sapiens
tcctcttttatctcttacccagttcttatttatttatttatttatttttttaagagacagggcctcactctgttgcccaggctggagcacagtcaggtcacagctcactgcagccttgaattcctggactcaagagatcctcctgcttcagtctcctgagtagctaggactacaggaatgtgccaccatscctggctagtttttaaattttttgtagacatgaagttgcccaggctgattttgaactctggcctcaagcaatcctcctgcctcggcctcccaaattgctgagattgcaggtgtgtgccactgcacccagccaccagttcttcatttcttatctcctctattgcattgcaacttccttgtgggggtgtgggggaggaagtggggggtgctggcacataacagggtgtgcaaatatttttttgtgtggcttaccaggcatgaacccctacagaacttgacttgagacttacc

SEQ ID NO: 486048 - DNA, 584 bp, Homo sapiens
gagtagaatgagcaaaaacatgagarcagaagaattcagaaagaatcgggaagagaacaagtggtccagtttggctagatcagagaaatgtgaggaaaaggtgggatgtaaatctgtacagacaaggtggggccatattgggcaatatctccagcatcaggctgagaaatctgtttatgacagatgggaagcagaggtcaaaaacttcaaagattattttattcatccagtgttagggtaggaacgaaaataagaagaaaaaaaaagaaagaaatacagatatttgaaaaaaaagaaaagttgccccaaagtaggtaactatttaaatgagaaagggagaagtctaaagaatactctcattgttttcagcttcaatgactatgaggctattgctccctttatcagaagtaaggaaatcagaggggaaaaaatggtttgctgaaggaagtgatgcttttagctttgaatatgttgagactgaaggtgctaagtcaacatccaagtggacatgtttcactggcagtagaaacgcaggagagaaattggatactaaacacagagatctgtccagtgtctattaataa

SEQ ID NO: 486049 - DNA, 595 bp, Homo sapiens
gctgcccagctaataataaaagcgtgtgtgggaaatgagggaaggttcctctacttctatctgggctgaacctgtcagagttcctctctttcctttcccttacgctaagaccagagcccactacataatttgtggggtcctgtgcaaaatgaaaatgtggggcccctagttcaaaatgtgtcagcatttcaggaggtgacagcagggcattaaacgaagcacaggccccttctaagtgcggggtcaaatgcactgttcctatgcctgtgaagcaggctctagctaagactatatttttcctaacctcagtttctggcttcgcagattcacagccctgctctgatgaagaagcctgctcagaagtcttcctccccaccaacagtgactacgactccagcgatgccctgagccccagagacctggacctggtctacctatcatctcacgacattgcgcagcagacccttagcggcctaagcggcagcgcccccgacgtcctgcaagtgcacgacgtgaaaacccctctggggccgggccaggatccccagggcgagggcycaaatcccgatcactcatgtgccgagtttctccatag

SEQ ID NO: 486050 - DNA, 609 bp, Homo sapiens
catttttcagaaggtcactttatcctgtgtctcctcgagcgttggaacatattgattttctgcttggcttgcatgtagggattatgttataggtcatgtatctttaaacactagcctcacacrcagcaggaagagatacttattctatgagaggcagttgggaactgaggccagtttgagagatcaagagattctttgtcccccacatcaagcttgccttggacttaggcttattgggtggaagtatttcagaatgacacacacactacttaaatgatttctctttgtcccttttatttatttttattattactattttcaaaactttaagcctgggtctcactatgttgcccaatctcgtctaaaacccctgggctcaagcaatcctcctgcctcagcctcttgagtaactgggattaccggcacatgccactgtgcccagcctacttaaatgatttcttttcctctctatgttgccgtcatatatttttgagttcatatttgttaaatgttcatgtaatgtaatcttccttatctgctgcacatcattttgcacttgtccaattatctctttggtgtaaattcctagaagtgagattacaggccaaa

SEQ ID NO: 486051 - DNA, 498 bp, Homo sapiens
agaagccactggttgtataaaacatagacagagggaacaataatgtaagagccttaaggtgggratgagcttagcatgttggaaagacagaaaggagacgagactggccagaggagagtaagcaagagggaagaagtgtgggccgagatgagtggtcatgaagagctctaaaactgtgctaatgaatctggattttgtaagagcaatgaaagattttaaacagaagagtgacacgatttggtctatattttagaaatgttgccgagtagagagtggtttacaaaaagctaaaatagaaccaaagagacaactgagtctgatggtagtagtcaaagaagaggaataagggcttgaccttaggttgtgacagtgggaatgaagagaagtggacgtctgagatttatttggaggcagaactgacaggacttagtgacggattgagtgtagagggtgagggagagggagaaattgaggatgactctagtatgataaatggcc

SEQ ID NO: 486052 - DNA, 498 bp, Homo sapiens
agaagccactggttgtataaaacatagacagagggaacaataatgtaagagccttaaggtgggaatgagcttagcatgttggaaagacagaaaggagacgagactggccagaggagagtaagcaagagggaagaagtgtgggccgagatgagtggtcatgaagagctctaaaactgtgctaatgaatytggattttgtaagagcaatgaaagattttaaacagaagagtgacacgatttggtctatattttagaaatgttgccgagtagagagtggtttacaaaaagctaaaatagaaccaaagagacaactgagtctgatggtagtagtcaaagaagaggaataagggcttgaccttaggttgtgacagtgggaatgaagagaagtggacgtctgagatttatttggaggcagaactgacaggacttagtgacggattgagtgtagagggtgagggagagggagaaattgaggatgactctagtatgataaatggcc

SEQ ID NO: 486053 - DNA, 628 bp, Homo sapiens
gaaagaaggtggccagagatggctggtgttccaatgtagcaatggggagccagggcccccagtgcccctgggctgtgggagtctgagcaacggaaagaatagacagtgagggtagaggtggaagtgggggtaggggttggggtggctgggagctgaccatgtgggtgtcagagctgagagggtagggtgttaccagggatagcaaagtaatgctcatcccggctcctcagggtgagccagctctccttctatggaacagcttcctccacagcaaagcctccactctataaacatctacactcatgagtacaaaaagcttcagcctttattaaacaaaggaggaggtagattacagataagggaacagttagggatcccttctttcccctatacatacacagacatacaaacacacgcacccgagtgaatgacagggaccatcaggcgacagattgaagggcagagggaggcagcaccctccgagagttggcccggacccaagggtgggctgagacctgggccaggggcagccgttccgaggggttatgcctgagcagtttggagatgaggtcctgggctcccrtgggcacggaagcggggaactttaggtccacctgcaggtgtgaag

SEQ ID NO: 486054 - DNA, 473 bp, Homo sapiens
tttttgttgttgttgttgttgttttcttcccacagccttataaccatctgaagctatcttatgttattttttgctttcgtagttattgtctgtctttccctctgtaatataagcttcaggaaagcccagacccaatgtactccttacagtactcggcacacaggaggcaccccataaatatgggctgaccgaataaatccagcagctgcgcacacaggcatatagatagatgcactttttttttttaacagtttccttctggaggccacggttactacttagcgctaagaacagagcattggcagtcacagatacaatccgaggacgagacagagacccagaccctggcgcaaataaaacaggttgaaagaaacgggagggacagctccagggtgarttccagagacagagacccagatagactaaggccgagacccagattcactcagcgaacctgagccccgagcccacag

SEQ ID NO: 486055 - DNA, 376 bp, Homo sapiens
tggagggatcctttggatctaactcctgtgagaaagaaagggaagggtggagagctgtgtaggaaggagctcaggctataccacagttataaaaatatttcgtgtagtctgatgtggagtcctcaagacttacaytaattggcctgaattaatatctctgccatgttcagtaattggctgaaattggcctattatatgagtgtcttcagcataaatgccatgataaattgataaaagcagaagttagaatgatcagttattctccctttagcaaaaaatctcagaggggcatttttataatcaccaacaggctcctatgctagctatgtttcttttctctccacatggtcatcttgtcctttaaatcctctttgct

SEQ ID NO: 486056 - DNA, 632 bp, Homo sapiens
ggacttgatctgtcctttcctataagtgccatctgtgtttaaatgaggctgttactctaactcaaagcagacttgcaagagtaaaataatcaatcttcatcatattgctgcactttcgacagttaattttctagagtaatttgtcattgtgaggagcataagatttgtctgaatttgtgtcaaaggttattgactgaattgccacctcatcttttcagtcaatctataaatatgggcaagtttgggcagaggctaatggccttctcactaaggggatgagattgtccaagttaggcaactgataagaggtagaaatatctattgtgtcacccatttcttgtggtagcattgacttagagttaatctcagaaacttcacttaaccttcttartccttttcttcctgtaaaacaaggctaaaaattgtcataactatattctagtttccacaaaagctaatctaagtattaaaatttttattgtgactttgtgagagtgatcctgtatttttcacaaaactaagaagaaaatatttttatttagtgtttttctatgaatagcttttggtttttggaaaaaccatctgatctttattactaagattcttgcttcttaggtcaaattcttgttccc

SEQ ID NO: 486057 - DNA, 654 bp, Homo sapiens
ggattttgtcaccccttgagcaatactttattgttcccaggcccattacctgccatgtggaataaaaaaaactggcttcaagatttccctaagtttacagggagccagaatttttattccaacctttggctgtgacctctgatttacctttgtaatgtcttttcattcattcagatacgaaactcattccacttatttttttaatttatattagaccagcctgttacataaagtatgtgtatatgtgaaagacattattactaaaagtgatgaaaaaattataggggttacagtacagcaactcaacttaaaaccttgtcataatgattttgagtactaaagggccttaggatatttctccattttattccctgccttctgccttgtctggcaataggacaccctatttcgtttctgccctcttctcttctctcttctttcacccctactggcacccaccaattttcctcaaatttccattcatttctgaaagaagagtttggtaactcctctcatgtcttgccccttaatgacccagtgattctcattrcttcatctgcccacagtggttccctactcactagtagtttatcaaaaccaggtactttgttgtttttcttttgtttgtttttgttttgagatggagtttcaccc

SEQ ID NO: 486058 - DNA, 522 bp, Homo sapiens
tgttgtaggactgagtctctcagcttctagaggccactcctttctaaagcagttcacagcatggtttatccttcgccctggtggccagcagaatcccactgatacttcaccttctttaaaggtctcacctgattaagtgaaccccacacaggataatctctcttttgattaactcaaagctaactctctcaattagaaagcttaattatacctgcaaaactgctatatttttgccatgtaattatggttgtcagataaaatgatacccagttaaatgtgaatttcaggaaaacaacaaagtgtggttttcttttctctgaatacagcaccttgtccttccagctttcaataaatagacatgctgcttaccttacggtaatctaaattaaatgtagatgtattgtctagtagactttgcctatttatctgttaataaacacatttagtcagggctcaccccctgtagttgccataaaccctgcttactactgtcttatattcawactttattgttcatttttc

SEQ ID NO: 486059 - DNA, 443 bp, Homo sapiens
tttcttaggagagaggttttaaaattcctcttttttttcttcaaatctagtgaagaaggcttcctttggaccacttagagatattaaaatgtgttctctrtactgggaggaggggaaacatactgaggtctgattcatgcttgaggaaggtagtagaatgcaggttaccgtgtacttcctggatttgctagggcaaggtgagagagctatctggaagctctttaatcctaacccaagaggtcttctgcttctggacaagtggatcccaagagtaatgtctctgtggggtaacaacctctggaaaatcagagtttgagggaacatttctatttccatctaaaggaaaacatgcatttcccatgtcaaggagctacaggaagttcctaacgcatggaaatttcccaggatcccacacagataccaaggaaagagtgagccttaaa

SEQ ID NO: 486060 - DNA, 616 bp, Homo sapiens
ctgcggctgggtgccccaccctttttttgagcggctcagagcgtgcggtggaggctttgcgtgaaggcccgcggctccccggtggtcgggaggggcgggggttcggacggccgctccctacagcctccgcccgcgccttctgcgctcaygtcccgagctccgaggccaggaccatggtcagcgccccccggaccccctccgagcaccgcaccgcccttgactcctgctcgcagcgtgagaagagccaggaaggctgtggagtcacccgaggaaaccgagacgctcctaaatagcctatgtggggaacaaagttccaataagtgtctcagccggggcttcacagagcgctccccaaaccgctatgtgggaggcgctttaggaagcggggaactaagtggattatgttcaaagggtcaaaaagacaagaaaagggggaaaacccctcgcactcgaaatagactgtcgaagaagactaaacccccttttattgtgttaatgggggaaacaaaggccaatttggtcacgcttgattttagaaaatgtttgtcactttctgacaaatatgaacagtgagcattttcagcgcagtaataatctcacaccacaattctttctt

SEQ ID NO: 486061 - DNA, 618 bp, Homo sapiens
gaagggggcagtttgaggaaaaagagctccaaatcctgacactggctgggttccctctgtgttccacacggtgaagcccatcagtcaacaggtctcggcagtgcaccagaacattcagtcagygtttttgtgcctcattcttaaatggtacatacagaaggtcaagatttctggatatttgcagaatgcatccggcatgaaaaacagagaccaaaacaaacaaagaaaagggactcagagggaaaagaagcaatactcggaggaaaagacaaagaaataaaaaattacctacctcctcagatgacaaaaggaatgatcaaattcatggaacaaaaccaggaggacttaaaagaaataagaagaggttttggaaatttaaatatgagagcaggaattttttaaaatgctagaagagaaagttaaggaagtttccagaaagtataacaaaagatagagagaaaggataaaaaaatgagagggttagtcctggagaataatttgtgtgtagtggaaattctacaaataaagaacaagaaaaataagagggaaataattatcaaagaaatagcaccaggcatggtggcttactcctgtaatccagcactttgggaggacaag

SEQ ID NO: 486062 - DNA, 498 bp, Homo sapiens
tcaactaaagttaagatgtcataataaaatcttggtaaaaatataaattatttaaaatttaaytattataagaactataaggggctggctgtagtggctcatgcctgtaatcccagcactttgggaagccggggcaggcagatcacttgggcccaggagtttgacaccagcctgggaaacattggcaaaaccctgccactacaaaaaatagaaaaattagttggccgtggtagcatgtgcctgcagtccaagttacttgggaggctgaggtgggaggatcacttgagcctgagaggtcaaggctacagtgagctgtgatcacaccactgctctccagattgggcaacagagtgagaatttgtctcaaaaacaaaccaaaacaaaaaaactataaaacacataaaaacaaaaattaaattcctatggaatacatgtagaaaaaggcatgctatatttcttgatggcaaaattatttttaaagcaataagtatctgccaa

SEQ ID NO: 486063 - DNA, 593 bp, Homo sapiens
cctgcatctaagccttttgagctccttgggggtgagggagcagtcagcactgggactgataactacctaacacgctaagctccctggacatgggaagggcagcagccatctctatacctccaggctgtacttttttcctgctggagccagggggtctggacagcttagtcccaagaggtgtcccccacagcccaacacaccagctatggcagtctgtaactggagttcctcttcaggtctgatcctgactgttccctttctcactgggcagggcctccctacaagaactccaacaactccacccaggggtgcagagacagaaccctgatctccctggtcctgagcctctagagggaggggtagccagagtctctgcagaccagcagatgttctgaggtatccaggcagcccagacgagtgggttttcccccagagaagcacaccacctccacaaagggacagtgaaagttcttcattaaacaggtcctgttttccatgccacccaactgagtgagacactccaacaggggttgccagacaccctatacagcagcgatcatactagcrtcaggttggtgccccttgaggtcaga

SEQ ID NO: 486064 - DNA, 543 bp, Homo sapiens
ctgggacataggtacagttgtccctcagtatactcagggcgttggtacacagtaatcagcatctatgcaagtcctatattttagttcagagtttggttgaaaatatctgtgtatactagatctatacagttcagacctgtgttattcatrggtcaactgtaattgaatgttgttttactagaaatttccaagcaatttttaaaaatggttctactttttacctcccaccatcaacacttgcaagtcaagttgctccacatcctctttaacatttgtcccgtatttcatagttgttattttttaccactctatgtatgaaatcacttatttctgtgtttttaatttgcgtctttctgatgactaagcatgttgagcatttttctcatagactcattgaatagtaatatatattcttattgaagacatattcaagtgcttgacactgtgttcccttacctgtgttttatgttgtagtggacctgaaagatatgccatctagatccctctttaagagaggacattgatacatcagggtttgattca

SEQ ID NO: 486065 - DNA, 513 bp, Homo sapiens
gtttgtactacagcccctgagccaagcccttgctgcatgtacccatgttccagccactggctcagccactgtagagagctagaccatacactgactacagagctactgtaactttgctcatgcctgtgttcccattcttagctacctggttacttcacaaatatctctaccatacatactattatcractcaacattagggttgtctgtgctcaggacaccagagtaaatactgccccaattccagagatgtactccttctacatgtgcccatgcttcaggcctgagctccgtggctactccatggacacatcacttatcaaacaccagtgcaaccaccactgcaagcaagccaacaggccagattcagtgccaagagagattctggcaatcttagcaggtatggccaccaaaggccttaacacccctcagtgtcattgctgacattcataacatcagccacttttcaatctttatcaacaacaacattatcaatgctgcacagagactaaca

SEQ ID NO: 486066 - DNA, 513 bp, Homo sapiens
gtttgtactacagcccctgagccaagcccttgctgcatgtacccatgttccagccactggctcagccactgtagagagctagaccatacactgactacagagctactgtaactttgctcatgcctgtgttcccattcttagctacctggttacttcacaaatatctctaccatacatactattatcgactcaacattagggttgtctgtgctcaggacaccagagtaaatactgccccaattccagagatgtactccttctacatgtgcccatgcttcaggcctgagctccrtggctactccatggacacatcacttatcaaacaccagtgcaaccaccactgcaagcaagccaacaggccagattcagtgccaagagagattctggcaatcttagcaggtatggccaccaaaggccttaacacccctcagtgtcattgctgacattcataacatcagccacttttcaatctttatcaacaacaacattatcaatgctgcacagagactaaca

SEQ ID NO: 486067 - DNA, 638 bp, Homo sapiens
tgtaatctctcatgtgattatttacccttgctgatccacagtatattttccagttaaaaaaacgaaaacaaaaaatactgccacacatgattgaagtaggaattgcagagttaatatatggaagcccctactattgtgcctagtttagaaaatgcagaatacattttagctagttrtaatatgcatgaagtccaacacacttactggggggagatttctatttcaggtctgaatttctagaaaccaaagcaaacagagactataatcagttataagacaagatgctttcgaagtccgaaataaatttttcctgcagatcctcataaattatgacatggtagacaacactgtagtagtattcccacaacaaatacaacaagttccataaaacattgtatctatcaatgagacataatgctgtcactaatgaggagtattcacaacacaaactgtggaagatcattttaaaagtcctttctttggttttttttttgttgttgttggcatcattgataatgttttgcttttgctggttcactgccactatgttgttggtttaagtttaattaatttgtcctttatgtatagcgaatgtatagccagttactcccatcttttgtggctttttacctttcctc

SEQ ID NO: 486068 - DNA, 362 bp, Homo sapiens
ccatataagaatgcagcccacctgacacattcataacagctgagcagaggacccaattaaaccgtgcctggactcttcatccacagaaacttcgagataatcaatgcatgttgcgttaagccatgacgtttgtgataattcgttatgcagcaataaatgactaacacactcctttacacagctctagtcagcttttctttatgtgcagccaaactgatacatagttggtggatacacagatgatcatctagggagacctcccaaaatgggaggaacgggaactgatgcttagagraggtagaagagcagggattgtcagcaactgaagagacagctgcagtcttagacatttttctcccaag

SEQ ID NO: 486069 - DNA, 636 bp, Homo sapiens
agcattcttaggtttctagcaagtgtacaatatattatgaacagatgttcagcttagcgggaagtctcactaaagacctgaaatcctgagcctttccagaaaatgtatagcatctggcatggtggaaatagaactgatctcatttactcatccacagaatggtactcctgtgtgtttaaatggtatgactcactttcctggggatgacttaactcaacttttctcatgagaaataacttagaattgtcaggaaaaatatttaaaatgaagaaaacagcatcatatgttaaggccatggctggcagcagtatttcccttattttgatttcaggttaatgactggtactgtcagaatactgtattttaattcagatctgtttcacatatactctatggaacaagttgaatttcaaagaattagctattttactgatgttcttatccttccaagagtcacattccgctttagagtgcaattaaaattgctttaatttgtctttttaaaatgtcaggtacgtatttatagaactatgcgatttatacttctgtgattttttttaaaccagactcaaatatttgaagattttcaaaactctgctgcaacagcrtgcttctgtaatacttacacctttccat

SEQ ID NO: 486070 - DNA, 626 bp, Homo sapiens
gtaacagctaaactccctcgtggtcctacttttgaattggggatcagctaggcagatctgcttctgcagctaattgctggccctcttycacttgtctcatccttcatgtgtctatcaccaacctgcaggaggccaggcttgctatggacacatggcatgaacaaagattaggggagaatgtcagtagaagcatgcaaactgcttaaggtctgggttagaactggccactctattacttctgcttctttttatttttttggccaaagtaagtaaaactatacctgatacaagtggtgggaaaacagattctgcctcttaatgggagtagctgcaaagccaaattgccaaggacatggattcaggaaaactcttaactggggccatccagacaatctggctatcacaatgggtcacaagtattcaagtttactaaaaataatatataatgatttgcactgaataaattgatgatcttgaatttgaatccatttattttcttcatgtagcataattgtgttaaaaaattacagtgtactgagggttagatggttataactgatatctctcaagttattaagggggttgtaggtagtagtcacttaagaactcaaaatgtcacttgatta

SEQ ID NO: 486071 - DNA, 543 bp, Homo sapiens
ctgctctgttgaactaaaagcaattgcttaaaatagtgttaatctctgtaaaaaaaaaaatcattttagtcatgcctattgtattaaaaatactgaccataaccccccctaccaaaaaaaaaaaaaaaaaaagaaaagaaaaatagagtcgactttctcactggggctatttttatttttaaattgttagactcaagagtgactttgatttatttatgacttctgtttttatgactcatacataatttacagaaatatattggcaataggtaggcaacattgaatgaaactttgtgaaaactttgcttgggtttaccgagtataggacctgactgaaaacagacacttagacatttgttttaaggtatacttctgctggaatagtctttatcctttgttggctaaacaacataatcaaatgcttatgaatggtcttgaatttgctttctaactytatgtggctaaaagataaccacatttatggttgtatggcatctaaatcttttgtttccatatgagttagattttactttagggaagatt

SEQ ID NO: 486072 - DNA, 569 bp, Homo sapiens
ggtcaaggcagaagttaactgggacaaagtagtgagcaggacttggccccaagcaacttcccagcttgaagaagktctgagatgcaagagtgtagacgaattaatagtaggacaaatttgaaattttgtttactaaatgggattgagtattgtaattactgaattgaggattgtttttaactttaaagtaaactctcagttagccaaagatgagaagaaaagccactaaatctatctcagttcttatgtggaataagattatcccagttgaataaaatctaaaggaatggcaaaaggtaaaattgtgttaggaagaattatatgctgtttgttcaacacaacttatcattatgattgtataactatagcttttcctccaaaatggaataatttttcccccttaagaatgcttggtaattgtatgtcttggtaattgtataagtctttgtaattgcataattttgtttaatagtaaaacatttgtgttatacatttctctctgagtactataatgaaaaaatgaaagtaaaccacgagcttctccaataaatagataacattgtatgctt

SEQ ID NO: 486073 - DNA, 569 bp, Homo sapiens
ggtcaaggcagaagttaactgggacaaagtagtgagcaggacttggccccaagcaacttcccagcttgaagaaggyctgagatgcaagagtgtagacgaattaatagtaggacaaatttgaaattttgtttactaaatgggattgagtattgtaattactgaattgaggattgtttttaactttaaagtaaactctcagttagccaaagatgagaagaaaagccactaaatctatctcagttcttatgtggaataagattatcccagttgaataaaatctaaaggaatggcaaaaggtaaaattgtgttaggaagaattatatgctgtttgttcaacacaacttatcattatgattgtataactatagcttttcctccaaaatggaataatttttcccccttaagaatgcttggtaattgtatgtcttggtaattgtataagtctttgtaattgcataattttgtttaatagtaaaacatttgtgttatacatttctctctgagtactataatgaaaaaatgaaagtaaaccacgagcttctccaataaatagataacattgtatgctt

SEQ ID NO: 486074 - DNA, 525 bp, Homo sapiens
ccacagagcagtggctttcaaaacgttttgatcaagtcaacagtaagaaatgtattttacatgataaccctgggtatgtgaatgtgtgtgcgtgcatcttagaaaaggttcaccatacttttttcacaatacttcaatacttccctttattattgtgatataatctgatacttttttcctattgtatggacacaatatactaaatttatttcatgactcagtaatgtgtggtcacctccagagagagggcctgttttcctgaggaatcgcagatcagatctctctgttggaattatcagagaagtacccaaaagatacttttccctttttcctgcctggaaaatacttgcctggtggctagaagtctgraagccaaactgggtagaagctggagctttgatatttgaaaagtgaactgtcattaatcacctcttttcaagttcaagtccctcacttcagagacccttatcttatcttgtaaagatgacagacctctagtcttgtgattgaggggcagccactcag

SEQ ID NO: 486075 - DNA, 482 bp, Homo sapiens
aggagccaatttcttccctaatttattgaccaccctgactctttcctcatctttctgattaatagtttagttgggggtgctaggaaatttacctccagttgttaccatagcaaccagctctcttgtacaggatcccatagacaatgcattttgggtcttcggcaggagctgggatttacraggatctcagcatgtaccagggcagaatgggcaagatgatgttccactgatatgcttaagaattatgcgtggggataggaaatggtctcgccacacggtaaattgggaaggatggttttagtgcctttcctttcctcttggctttgtctctctcttacaagagacccctcccccacaacattctctcttaggtcctcggaaaactagttcctcacaggacaaaggcagggccagtttggtggaagtcatggggaggctcattccctttcagcaaaaggaagaatttgtagtgggtagaacca

SEQ ID NO: 486076 - DNA, 473 bp, Homo sapiens
gcttggagcaagaaagggtttgttgctctccatgtggaaggtagagagcatttagcaggagatgggaatttcggtccaaatgcagttgagatcatatcttggctttgttccccacamacgcacagttatttgtatttcagcataaaattcaaactcccagaacctgattaacaaaggcagtgcaccacgcattcccccagaggccagccagatggaaagcccaacggaattccactttgaagtgttctgtgttatctgactcatttgcaaaagaaatgagctttatgggatgttcgaatgtttccagacataaccagttgcccccaagcgagaataaagttatactctctccttcaccttgtgcacatgcaggcgggcacggatgtacacagcacagttagaatcaaaatatgcttcccttgccaggctccccagggggctggcagaagagggaataaaaataaaaatgcctt

SEQ ID NO: 486077 - DNA, 627 bp, Homo sapiens
gcttggagcaagaaagggtttgttgctctccatgtggaaggtagagagcatttagcaggagatgggaatttcggtccaaatgcagttgagatcatatcttggctttgttccccacaaacgcacagttatttgtatttcagcataaaattcaaactcccagaacctgattaacaaaggcagtgcaccacgcattcccccagaggccagccagatggaaagcccaacggaattccactttgaagtgttctgtgttatctgactcatttgcaaaagaaatgagctttatgggatgttcgaatgtttccagacataaccagttgcccccaagcgagaataaagttatactctctccttcaccttgtgcacatgcaggcgggcacggatgtacacagcacagttagaatcaaaatatgcttcccttgccaggctccccagggggctggcagaagagggaataaaaataaaaatgccttggatgaagtgatgatggatttgttyctcccccactttgacagtggaatcagaacaactgtatggctagtctaacaaatagcacatgcctttgtcattaggaaaatgcaaaataggtttctaggtatggtcagtcatacagcctctaaagctctg

SEQ ID NO: 486078 - DNA, 597 bp, Homo sapiens
ggcggatccagtgcccagtgcaagcagctctgccgtgtgagctgtggctagcaggacttggggccggtagcagagttcttggtactctgctctgtgacagcttctggccatggtcctggcctctgcccattttctaatcctggttctgcatctgtcccatgtattctgtgagrtcctcactgttctttcactaaatttgccttctgcttgttaccagcaagaaggctgtttctattgcttgctagtaggagccctgacgtggaaagcaatttagcattctgttaccagaccaagcaggttagcagagaattctttctagccatgcatggttctatctttgcgcagtgttttaggaaatatattttgttatattttcagaaatgttctagtgccctatataaattactaccccaaatagtggtcctgccagttcgctccttaacctggtccttggcatggctggcaccaccctgagaaggaggttgtgttgggacatcacatagttgtggtttgcagcagctccagtcacactgaagagccacctcccatcctgagcattggataggaccaggggtgactgtccacagcttcacagga

SEQ ID NO: 486079 - DNA, 624 bp, Homo sapiens
gcggatccagtgcccagtgcaagcagctctgccgtgtgagctgtggctagcaggacttggggccggtagcagagttcttggtactctgctctgtgacagcttctggccatggtcctggcctctgcccattttctaatcctggttctgcatctgtcccatgtattctgtgaggtcctcactgttctttcactaaatttgccttctgcttgttaccagcaagaaggctgtttctattgcttgctagtaggagccctgacgtggaaagcaatttagcattctgttaccagaccaagcaggttagcagagaattctttctagccrtgcatggttctatctttgcgcagtgttttaggaaatatattttgttatattttcagaaatgttctagtgccctatataaattactaccccaaatagtggtcctgccagttcgctccttaacctggtccttggcatggctggcaccaccctgagaaggaggttgtgttgggacatcacatagttgtggtttgcagcagctccagtcacactgaagagccacctcccatcctgagcattggataggaccaggggtgactgtccacagcttcacaggaactgaaagacctcttgagctggattaat

SEQ ID NO: 486080 - DNA, 569 bp, Homo sapiens
ccatgaaggtgtttctggatggatgaacatttaaactggtaggcagtaaagccgactgccttccccagtgtgagggggccttatccaacctgttgaaaacttgaatagaatagaagactgagtaagaaaggattattttgctctgcctttgagctgggacattggttctcatgtgccttcagactcaaatgcagcctagaacttacaccattggctctcctgaatctctagcttgtcaacagcattcttggcacttcggagcctccataactgcataagccagttctctatagtctctctctctctctctctctctctttctctctctctgtttctctctctctctgtttctcttgggaacccagactaacgcactttccctttagcaaagcacttgacacaaacacactgggctgtcatcacaaatccacatgtgttttccttatcaaattgtgaattccttggggcagagtctgcctggcttatctcagagccaagcayactgtaggtgctcaataaatgctaaattgctgaggcagttaccaaaggccctgggtctgcagaagatc

SEQ ID NO: 486081 - DNA, 580 bp, Homo sapiens
tttcccctcttgatgctagtagcagktgcacaatctacaccttcctcgctcccctacaaaatggctttcatgatactatatccccagtgcagccttttgtgataagatggactcaaagccccaaattccattccgaggaaaagccagtgctccccaagatcactctaaatccccagaggactttcccctggtcacctttggctctgagtgagttccctttctgaatcatctttttatctcaccagtgctgtttctttcctacgctgttgtggaggtggaaaatacagcccttttcattattttcacaaaaataagcagactttccccaaatagagtaaaacttgcacttggccatcatagcctcttggcctccagagcccatttcttccccctcctctcacctcctcccaggattccccctgggaactccaaattctcactttcttgcactggggctctgcagctttgtccagtccccgctctggaattttgcaggacctacctttgcctgcctgggtctaccgagtgtacacaagaacaaaagggcctttaatctcccggctcctctcccatccgagtg

SEQ ID NO: 486082 - DNA, 636 bp, Homo sapiens
gaagggctgggatgggggcctggtcctcatgcccttcaagggcgcatcctcagatctttcccctcttgatgctagtagcaggtkcacaatctacaccttcctcgctcccctacaaaatggctttcatgatactatatccccagtgcagccttttgtgataagatggactcaaagccccaaattccattccgaggaaaagccagtgctccccaagatcactctaaatccccagaggactttcccctggtcacctttggctctgagtgagttccctttctgaatcatctttttatctcaccagtgctgtttctttcctacgctgttgtggaggtggaaaatacagcccttttcattattttcacaaaaataagcagactttccccaaatagagtaaaacttgcacttggccatcatagcctcttggcctccagagcccatttcttccccctcctctcacctcctcccaggattccccctgggaactccaaattctcactttcttgcactggggctctgcagctttgtccagtccccgctctggaattttgcaggacctacctttgcctgcctgggtctaccgagtgtacacaagaacaaaagggcctttaatctcccggctcctctcccatccgagtg

SEQ ID NO: 486083 - DNA, 636 bp, Homo sapiens
gaagggctgggatgggggcctggtcctcatgcccttcaagggcgcatcctcagatctttcccctcttgatgctagtagcaggtgcacaatctmcaccttcctcgctcccctacaaaatggctttcatgatactatatccccagtgcagccttttgtgataagatggactcaaagccccaaattccattccgaggaaaagccagtgctccccaagatcactctaaatccccagaggactttcccctggtcacctttggctctgagtgagttccctttctgaatcatctttttatctcaccagtgctgtttctttcctacgctgttgtggaggtggaaaatacagcccttttcattattttcacaaaaataagcagactttccccaaatagagtaaaacttgcacttggccatcatagcctcttggcctccagagcccatttcttccccctcctctcacctcctcccaggattccccctgggaactccaaattctcactttcttgcactggggctctgcagctttgtccagtccccgctctggaattttgcaggacctacctttgcctgcctgggtctaccgagtgtacacaagaacaaaagggcctttaatctcccggctcctctcccatccgagtg

SEQ ID NO: 486084 - DNA, 563 bp, Homo sapiens
gatttactggctatttaattttgtctttgagactaaatcataggggaacgctccaagaaactgctaaccttgggggaaagcccaccaacagccagaaaacaagcgctgcctccatcccttctaggccctcacagcagtacgtttttgagttatagaaaatcactatgaaagtgagacactgaacttaaaaaaattaatatctgagaaaaaatggaggtagtaaagacaatgggctgactataaatagaaaattctaagaaatatgaaaaaaactamatttgtgagatcttgacaaattttaaattctatttaaatgtaaataatgtaatgtaaataaattctatttaaatgtaaagtaaaacaaacattccttgtggtaggcggaattccaaagtggcccctctaaggtttctctttataatctctgggactgtaattgtgttatgttgtagggcaaaaaggtgtttttcagatgtagttacggctactagtcagttttgagttaatcaaaaaagactattcaaatggttgcaatctaatcacaggggcccttcaaaatgaga

SEQ ID NO: 486085 - DNA, 586 bp, Homo sapiens
agaactacatcagtggggcatcttgccctctagattctgagtgggtttatcaaatagaaagcactggtaacaaattaaaggaagagaggagtttgaggttaaacatttattatcatgactgcttctctgccagtttgtcataggttgattatttccctctgctaaagggcacagctcctacaggaagcctcttcctgcgattacagcttctccatcctttggaagtttggccatcccttgctttccctcaattctctctaaaacataaatattctctttattaaactccccttaatttgttgtgtaaaatgcatgtgcgatgtcttctgctaggactgtgacaaattaaacaagtggtagaaaaatggacctggaaaacaaactctttttattggattcttgggtaggcaactcaaatgttcaatgactgtgtgggtctcatctttgccagtgaaaatgtgtccctggcaatccatgggatgcatgccatcatacttattcaaataacctagtagargcaggaataaaggacaataaaggtatgtagtttaaagggaaataattacagtaattatagtgattatgg

SEQ ID NO: 486086 - DNA, 598 bp, Homo sapiens
tctcaaggagtttacttttgaattggagaaaagtactattccagcaattcatgcatgtaataaaaatatatataaccttaaaatcaatggcattatctagtttggaagatagacaaatataagggattaaataggaagaggatagacagtagaaaaagcaattcagaaaatgggaactacatcaagagggaatgcaagtagtccaattcatagaacctgtggagaactagacaaactgaagaggaaatcttcrcacctgagactaagaatgcctctaggcaaagtccaagtatagaatgtccccaccactccctatccatatggctcctacttctgacctcaggactagaagctgttggttctacccagagccacacactagagattaaatttccttcttgcttttggaaaatgtagtggcaaagttttttaaaaaaataaataaagagaagaagattgaatcatttcatgtgaggttgaattttttttttaatcttaatctcattattacccattttaactagacataggcacataaacttagaacacatgtggtctttctcaaaatgcagtctttttatttcttctgtttttacta

SEQ ID NO: 486087 - DNA, 598 bp, Homo sapiens
tctcaaggagtttacttttgaattggagaaaagtactattccagcaattcatgcatgtaataaaaatatatataaccttaaaatcaatggcattatctagtttggaagatagacaaatataagggattaaataggaagaggatagacagtagaaaaagcaattcagaaaatgggaactacatcaagagggaatgcaagtagtccaattcatagaacctgtggagaactagacaaactgaagaggaaatcttcacacctgagactaagaatgcctctaggcaaagtccaagtatagaatgtccccaccactccctatccatatggctcctacttctgacctcaggactaraagctgttggttctacccagagccacacactagagattaaatttccttcttgcttttggaaaatgtagtggcaaagttttttaaaaaaataaataaagagaagaagattgaatcatttcatgtgaggttgaattttttttttaatcttaatctcattattacccattttaactagacataggcacataaacttagaacacatgtggtctttctcaaaatgcagtctttttatttcttctgtttttacta

SEQ ID NO: 486088 - DNA, 652 bp, Homo sapiens
ttcttcttacatgtaataaatatttctcttctggtgtctccaaaaagtaaatggcaaagacggtaaaytttccactcgaataaaataatgcaaacttttgcttatacttgaggcaggtgttcagcctaagctttgctttcatgtaaggacagtctacacaactacaagaaatcctcctatgttgaatacactgccacttttagtaaatttaattagatccttgaaaccaactagttctgagtgaaggcctataggtcctgttatccacagaggcagttttctttttcttattatagggatgaagtgaaagttggataatcctacacttccatacttctatatttagcttcaccatctgtagaaatatgccaatgtttctaagttctagtaggttttttagatcttgctaactggaaaacagccaactacatcatctttgatgacttcccattgaagttcgttctctgccttgttggttatgattctgcatacttttaagtttacatcttactttatttcaaaacataccaggaataacattcccagttatatctgtacccaattcaaagttaattttggagaaaattgtgatctatgcaaaattattctttgtgactgtataaaccaagatttgcaaaattcagatccttga

SEQ ID NO: 486089 - DNA, 652 bp, Homo sapiens
ttcttcttacatgtaataaatatttctcttctggtgtctccaaaaagtaaatggcaaagacggtaaactttccactcsaataaaataatgcaaacttttgcttatacttgaggcaggtgttcagcctaagctttgctttcatgtaaggacagtctacacaactacaagaaatcctcctatgttgaatacactgccacttttagtaaatttaattagatccttgaaaccaactagttctgagtgaaggcctataggtcctgttatccacagaggcagttttctttttcttattatagggatgaagtgaaagttggataatcctacacttccatacttctatatttagcttcaccatctgtagaaatatgccaatgtttctaagttctagtaggttttttagatcttgctaactggaaaacagccaactacatcatctttgatgacttcccattgaagttcgttctctgccttgttggttatgattctgcatacttttaagtttacatcttactttatttcaaaacataccaggaataacattcccagttatatctgtacccaattcaaagttaattttggagaaaattgtgatctatgcaaaattattctttgtgactgtataaaccaagatttgcaaaattcagatccttga

SEQ ID NO: 486090 - DNA, 433 bp, Homo sapiens
ttggtgtactataattattaattttatgtgaaaataggtgttatctttatgttcacaaaatagaaactaccaatgaatatatattatttgcataatataaatgattaatgtagttctttttttttttttttttgagacggagtctcgctctgttacccaggctggagtgcggtggcgtgatctcggctcactgcaagctccgcctcccgggttcacgccattctcctgcgagtagccaggactacaggcgcccgccaccgcgcccggctaattttttgtatttttagtagagacggagtttcactgtgttagccaggatggtcttgatctcctgacctcgtgatctgcccgcctcggcttcccaagtgctaggattrcaggcgtgagccgccgcgcccggccaatgtagtcctttttcatcaacagtttctgt

SEQ ID NO: 486091 - DNA, 542 bp, Homo sapiens
tcctttaaagcccagttgcatggtccatctgttcaagctggcccttatcctgattcayggtggctgcaggaggggggtgaggaaatccacttgctggggaaaaccaagcaatgttgtattaattaagaatttgcatcactgttgtaaatacacccagaggccagggtgacgagtacattttataaatcaaataaatgaataataacttctagaggttaccaaatgtaaaatgtttgaagaacagaaaccagatgaatccaaaccgtggccaagggttacccttgctaattaaaacatagactgaaaacattaacctgattcataatctaaataaaactccatttctggataactttccatctttatgaattttttattacaacagaaggtaaccacatgaaagtcattcttaatgaactcaatatttttaactttctgaaataaaaagacaaaaaggaagaaacatgaagagaaacataaaaaacgccacacttataattatttccctgcacataccacatctcaaacacttggcctttcca

SEQ ID NO: 486092 - DNA, 456 bp, Homo sapiens
agatagaagttcccgtatccatgtctgctcctgggcactggtgccacctttctgttggtgtagaactgtactcttttcctgtagagcccagaactgtacccatgtctctgctgggagggatgcatttaccttcttctcacaagyggagagatctctggcagaagagagcgcacaatttggtttcctttctcccagagggtgctttggtatgctgcatgcttcccctagaggcagcctatgctgagggttgaactctaggaacatgcagcaccccagggtcccaccagccctttgcagttgtcacagtctaaaataattctgggaaatatttgtggaagatatagtgatgcaaagacataagggctgagaattcctgggcaggatagaggcacacaattgatgcacaaccagtatggtgccctctacctcagctcaggtgttgggggaaagtgagtg

SEQ ID NO: 486093 - DNA, 520 bp, Homo sapiens
tcttgaaaagctgattgtctttgaatatcactatgggctccatakcaacttgagaagacaaaagaataatcagggagcatcaacctcaattgtcacattgaaccttcagaatgtgttcagcatcagaggtgacggtgaagcagttctctccttctcaagttctgtcagcctgtaagcaccacatcagataccaaagtgttttctgtcaaattgaggtgatcgtccagcaagatttcagtgaacataaataaagaacactgttggagaacaatggttttttgactattttttcttgtccctcttaatgaaaaaggtagctgaaagaatgtgtacttcagggagatttttataattctgctgaaaagacaagggaatcagattaaatatatgtctatataagacagatgttcaacaaaaattaggtgactgactaaaggctcttttcccttagtgtttattcagaggattgacatgtcagttctcaccaatcaaacagggtttaaagcatagaagtcccttt

SEQ ID NO: 486094 - DNA, 595 bp, Homo sapiens
ctgtaggagttgagcctgcactgtgtcccttcacattttccattaattcataattctgggccacgcatgttatatcctcactcttttcaatactcacaactttaagtttagtttatcataattcctgtcttgaaagaagtgtttacattttagtcttccattgacttctctattcttagctcttatcatttgaatagtctgagcttgttcaactgtttcctttgtcccaccaacaaatttaaccacaagttttggggttgagattaagaaaaataaataggcatagatttatattaagttactccaggttataagaaaaagcaacaagaaatgggcaggtgcagcatagctagatgacttggagatgttgttttctttcacatctgtgaaaataaaggtatatgaggaatctacctcgtggaatgycttgaattttagaataatagaatttcagatttagagtggactttaaacataatcttgctgaaacttttgaccaatactgtgtatattactgaaattaagacttagtttctacatctataaaacatgggtaacaaaataaagttaaacacagaattcccatatgacctag

SEQ ID NO: 486095 - DNA, 616 bp, Homo sapiens
taaagtaatgtgaggttccttaatatatgctaatkaatgaagggaattcagtttaaaaaatcatatacatacgctctccactcttctctactgtgaaatatttttctgctctctttagtgcattgaaattgcactagtttctttctacttaaagaatatctgatagtttgtatacatattaatttgattacttgcaggttgattagtgagcacttttggggaaggcatgttgattccaattttgattaaaaataagcagagaacatctgaagtttgatttgggcaaatgaaccaatgtctggtgtaataagtggaagaatggctcttagctaaagacacttgagagttatcacagaagattgggaataaaaggtacttaaaagtttgaagcactatataatacttcatgaaataatcactctttaggaaataaacaatgatgacacaataacacaatgattttggaataattaaagaaaaatttcaattcattttaaaattcttactgcagaaaaactctcattacctactcagaactttttagaaactgatttgtggctttttttttcctcaattttttgagtcctcttgggattttgatgctatttttgaggga

SEQ ID NO: 486096 - DNA, 586 bp, Homo sapiens
ccccaccattcctagctctgctcaggtcagacattcaagatgaagaagtgttgggaacaagcctcccaaaatctggccataaactggccctaaaactggccataaacaaaatctctgcagcactgtgacatgttcatgatggccatgacgcccacgctggaaggctgtgggtttacgggaatgagggtaaggaacacctggcccgcccagggtggaaaaccgcttaaaggcattcttaagccacaaacaatagcatgagagaaccgtgccttaaggacatgctcctgctgcggttaactagccccatctattcctttaattcagcccatcccttcgtttcccataagggatacttttagttaatttagaatcagtagaamcaatgctaatgactggtttgccgttaataaatacgtggctaaatctctcttcagggctgtcagctctgaaggctgtgagacccctgatttcccacttcacacctctgtatttctgtgtgtgtgtctttaattcctctagcgctgctgggtcaaagtctcccggaccgagctggtctcggccaagaagcttcataaaaagatataag

SEQ ID NO: 486097 - DNA, 567 bp, Homo sapiens
ttaataccaaattaattcaagatgaatcatagacaaatgtaaaagctaacaccataaagttcccaaaagaaaatatatcactgggttgtgatattacatcatcagatattatgtcatcaacaacatcatgtgatattacatcatcaacaattatgtgttatttggaaggattaaaagaaaaagacattagaaaataatttttgttggttttttttttgtttgttttgttttttcttagacagaatcttgctctgtctcccaggctgcagtgcagtggcgcgatctcggctcactgcaacctccgcctcatgccattctcctgcctcagcctcctgagtagctgggactacaggtgcctgccaccacgcctggctaatttttttgtatttttagtagagacaaggtttcaccatgttagccaggatggtctcratctcgacctcatgatctgcccgcctcagcctcccaaagtgctggggattacaggcgtgagccatcacacctggctgaaaataatgtttttaaaattttattttaaacacatttttaaatgactctataaaattt

SEQ ID NO: 486098 - DNA, 637 bp, Homo sapiens
ggtcattacaattttgaaaataaatatcgaaaacattatagatgcccttgttcacttaatagccaagaaagcatatcctataacatacaatatgcatctaagatcatctgccacagcacttggcaatgtataatgatatgaaaattaaaatccactagataatccttaactatcaaatactaataaatacacatattaaatggaaagagggaaaaaataaataatctaggttaaaaataatagataayatgttctaacttttcacattttttcttattttctcattttttcctcactcattccttattgtaatcctagcactttgggaggccaaggcaggaggactgtttgagcccaggggttggagactagcctgggcaatatagcgagaccccatcactacaaaaaatttaaaaattagccaggtgtggtggtgcaagcctgtggtccctgatacttgggaggctgagctgggaggatcacttgagcctgggagatcaaggctgcagtgagctgtggtcatgccactgcactatgtcctgggtgacagagtgagaccatatctcaaaaaaaaagtgggggggcaggggaaaggctttcacagcataaatagaggtagtggaatgaatcacttaat

SEQ ID NO: 486099 - DNA, 294 bp, Homo sapiens
aagaagataatagtactatccacactttacagatgaatgctactatccccattttacagatgaaaaaactgagactcagtaaaaatatgagactcaggatgtagaacatgatctgatttcagaatctaagttctkaaacatttagctttatgacagttatctccaaaatggggcattctttctaggaggggtataaaataatccctaggatacagggggaaatgttagaaaatctctgtagatttatacttatatttaatatatggattgacagtgacaatcacactaggtgca

SEQ ID NO: 486100 - DNA, 597 bp, Homo sapiens
tctcatcttcacaatgagcttcgctggctgataaccacagggtcctgagaaattaagcagacccacaaattacctacataacattctggctagatattcgaaagttgaattaattgcctgaaaataaatgaacgggtagggccaagaattgcctcattagtattcagcaacagtgctgtcttttgaagaaaaggagaaaaggtgggggasgaaggcaaaacaatgggaaatagggaagggagggaaacagagaataatgagagaaatcgttattttacaagtgcattatgggttccctgtttatctgactagttacaaatttcctggtctggcccaattcaccatgcctaggtagactacacctgtgctttctgatatagccgacacactcaggagcccagcaattgatacacgcctaaaatacaaagtgattaactatgtggacactttccctttacttcccaaatgagagtcagcagcattcacgtgtttttctttggcaagaaaggggaaactggagagaaacagtgcccaacaggtgcaccactcagacacattcatcaatggctttattccagcaagcactacagctaaagc

SEQ ID NO: 486101 - DNA, 407 bp, Homo sapiens
acagactggtactggtctgcaggaccattaggaaccgggcggcacagcaggaggtgagyggcagggtagcaagaattaccgcctgagctccacctcctgtcagatcggtggtggcattagattctcataggagctcaaaccctattatgaactgcatatgtgcgggctctaggttgtgtgctccttgtgagaatctgatacctgatgatctaaggtgaaacagtttcatcctgaaaccatcccctccaacaacatccatggaaaaactgtcttccacaaaactggttgcttatgccaaaaaagttggggaccactgcactagagaacaaaataaaattggaacacagatctcaagggacagtcttgctctcatttaacatgaggactgatggcatagatcagcatcc

SEQ ID NO: 486102 - DNA, 407 bp, Homo sapiens
acagactggtactggtctgcaggaccattaggaaccgggcggcacagcaggaggtgagcggcagggtagcaagaattaccgcctgagctccacctcctgtcagatcggtggtggcattagattctcataggagctcaaaccctattatgaactgcatatgtgygggctctaggttgtgtgctccttgtgagaatctgatacctgatgatctaaggtgaaacagtttcatcctgaaaccatcccctccaacaacatccatggaaaaactgtcttccacaaaactggttgcttatgccaaaaaagttggggaccactgcactagagaacaaaataaaattggaacacagatctcaagggacagtcttgctctcatttaacatgaggactgatggcatagatcagcatcc

SEQ ID NO: 486103 - DNA, 470 bp, Homo sapiens
ataactactgacacagctactgcrcatttcttaagttttctgttaattacataaaatttaagtctctaatgaatttcaattaaaccaaagtagggcatcagatggaaggaaaagttggtgaagaatgacttgctaaaaatgcacactgctgagcagagtatgatttatggtcagggtttaatatttcctattggattctaactgatttatcatagcttcttggcagacacgcagcctttaaaatcatgttcatatcagcatgcccaaccaacgtagtagaaagtaagaaaaaatgtctagcagccataattaaatttgaaggataacaggatactcattttaagtaattattaacaccatgccccttaatagaaatttcaggtttaattttaactttaacttcttggagctaaggattgtgtctcagagttcttttcagttcagagcatactacagaacatgggatattg

SEQ ID NO: 486104 - DNA, 580 bp, Homo sapiens
aaatcaatttatatttattgaatgcctgcggcagatgggaaggcaatttgcctgagattatgcttcagtaaatagggaactttaatgcctgtttctgtgggaactataagtgtttgagagatacttcctgtctgattctccaatttcagcactacggagcatatgtgagacaggaaccatgcctcctcaggagtaaagaagtttgcttgaaaatatcaaaataagatttatctactatggtttacttggcttcagaaactgacctactacaaacagattctgacctatcaataaatggcataaaaatgtctagttggtaatacctataagtgaacatactgaaatccatggtactacagaagtagaactactgatgactaatataataaaatttatacatttaaagataaaatataagatagttaaaaatcaaattatatatagcaactcaaacatataaaatctttacacaatcatttcaaayaaagcacttaccagcattacttcctaaaccattaagaaaactgaaaagagaaatattagtaggacatataagaaagacatccatgttgctaatgat

SEQ ID NO: 486105 - DNA, 677 bp, Homo sapiens
ctggtcagtagttgacaaatcacttaatcttccaggcttgttttctcctgtgtaaatgtggagaagtgtattagatattctaatttgaaaatcctgcaattttaagaaaaggtaagaagaatggaaaatagaaagtgtgaggagaatgatttcttttaaaaaaaaaaaggtaaaatattttcatgaaaccactagttcataaaaggctacagggttttagtttcaactgataggaaaaaatgaaaaacatttcatacaacaaagggtgaacatcaacagaagccagggtgtttgcaaacaggaacttctgtatactactggtgtgaatgagaatttacacagyacttctagaaggcaatttggaaacaaatttcaaaagcctatacattatgactaagaacatctacttctagggatttcacctaaggaaattatgtccaaaaaatacatagcagccaaaggcccatccacaagtcttttatatgcagtgttgtttataagagcaaaatatttgaaaacaaatacgttcactagtaacaattttgtgcagaaaaatatttattgtcgtggaaaagtgttcatgggatactactaaatggaaatagtatttttaaaattttgtcctttatgatccaatgttaaactataatgtctggagatgccacaaatttaataac

SEQ ID NO: 486106 - DNA, 529 bp, Homo sapiens
gggccatcattacttctctgtatagtggacaagtatctttcacatattmatattctgcagcctaaatctataatcatatttttataagattgcaggaacacaggaaatagtgtctttagtattatttctaatcttctcaattattttgttcacatgatagatttaatgctttctaacttctggtctcacatcctaaccttggaacataataaacaataaatttgctatagtcataaaattatttgtacataattctatttattttccaacttagaaaataaagttcattagtggaaaggaacaggaagagaagctgcaagtataatccataataatgtgtaaaaattccattaaaaatttttccacttagaagccactgactgtaaaaaatagaaagattcaggttttaaacaatgaatacttgttcttttctttctaaagtacaactgttcttcagtatatattctctgaaagttcaccaatacaggataaattcatgagatacagcagctcatgggttatgcaagat

SEQ ID NO: 486107 - DNA, 553 bp, Homo sapiens
atgtctttataattcttttttcaaatttagtagttttgaaattcttcctgatccagccaagtcatccattaaattttactctttagggtatcagtacattgacaaggcatataactcctttgactaggaatttgagtggatacagtgttttaattggatgtaatcatatatgatgtggtaaacttgtatcccacttttacatcttctgtggaaacttgaaacattttctaactcagtagatgttttataatttccatttgataattttgatagttttgcttatgtggaaacatttcatgggagacatttaagttttgtttgataatgtatagattcccatagattttgatagctctcataatgctgactattcacaatgaggtcactcattctgtgtattcttgcctgcattttaagtgtccaagtgaattttgttcactgtcctaartgcaaccctaagacaaaatttattggtttctatgctgatatagcatatccttaattggatattactgttatccttgttctgtttactgacaatgttctgtggcca

SEQ ID NO: 486108 - DNA, 553 bp, Homo sapiens
atgtctttataattcttttttcaaatttagtagttttgaaattcttcctgatccagccaagtcatccattaaattttactctttagggtatcagtacattgacaaggcatataactcctttgactaggaatttgagtggatacagtgttttaattggatgtaatcatatatgatgtggtaaacttgtatcccacttttacatcttctgtggaaacttgaaacattttctaactcagtagatgttttataatttccatttgataattttgatagttttgcttatgtggaaacatttcatgggagacatttaagttttgtttgataatgtatagattcccatagattttgatagctctcataatgctgactattcacaatgaggtcactcattctgtgtattcttgcctgcattttaagtgtccaagtgaattttgttcactgtcctaaatgcaaccctaagacaaaatttattggtttctatgctgatatagcatatccttaattggatattactgttatcctygttctgtttactgacaatgttctgtggcca

SEQ ID NO: 486109 - DNA, 580 bp, Homo sapiens
tccataatattttatatatgccacaaggaataatacaatatcttgtttacagcattttcatatttaagtgtaaagaaggaaaaactacacggagtggtgaatcttaatttgaattttatttaaataagtgtctaataatggcactcaaaatttggtccttagaccatcagcatagcaattacctcagagcttgttaaaaatgcagaatctcaggtcccaccccagaattgctgactcagaatatatactttaataagatccccaggtgattcttatgcaagtttaatgtctgaaagcactggtttagcaggaccctcaaaagatcctttatttttcattgctctgcctctaggtaaaactacatctaaagcatcttcaagatctcagtacttacttaaagatttgtgaaagcaattcctctctgttgtcccaaaccacatatctatcagtcagtccctcccaagyggggaggctgctaacgtcactactggactggagcatcattgttttagagtgagttagcttctctctcaggtcagacctcaagggcaactacttatgggactttcatttgtcatcc

SEQ ID NO: 486110 - DNA, 611 bp, Homo sapiens
ctgttaggatcagcgtctctgacaaataaaaccacacagaatggggtggccctgaaacagaaggctccctggcctaatctcatagatgcttctcttggagaccttccatccacacaacgtaggggaagggcgagaagggatggcttcccctccagactgaaccattatttctcttgctatacctgtctcccttagtggtcacagcaattgagcatatacattttcatatcacaaactattttcacaacactagaagagaatcttgagttcaaaataatcagtttaagaaacacataggagattcatattatttggttagcttaacctacttccaaatcaatcattctattccaaatcctccygactgagtcaccagcaccctttgataaacaacttattgctttgctgctggttactcttcctactgctatgcaaggtctgagtcatgtacctcagcaatcttgacctttgaaaaagaggaggcttttctgtctgggccacaattatcatgtttatttcaagtagcaactaatctcttgtgttgagctcttactcgccagggtccatgaactctgcacccagaaattctccataccagggtacaaagcacc

SEQ ID NO: 486111 - DNA, 620 bp, Homo sapiens
tcaggctcagtaactcataattgtcctctgtgactacagcagtgccaggacagagtaggcgctcaacaaatatcactgaaggaactgatgaataaataaattaatgaataaaaatttgagactacagtagattaacaatagcagattttactgccatgtatctcttgcctcagcttttagagtaaaaacaactcctcattaaattgttttaaaggtacaaagtgctttgccattagttgaaatttttgtctgcttttgcctgactcttcctgatgaaaacatataaaggcttgaatacaaaatagcatgatatcactatcacagactaatgttaagcattcattttccagtacaataaacaatgtaccaaagatcgaccccaatttttatactcgtatttcatttcaaatcagaacagcatttttgagagtattttaatgacatacaaattcctaaaaattaaacaaaatgaattagtagattaaattcttgaaaagatagcttcaactaagctycttaacaacaatttccttgacttttgaaatttaacgtcaagcacactggagtttgaaatggctccagcatgacacggctccagcatgacagcatgacatggatcc

SEQ ID NO: 486112 - DNA, 423 bp, Homo sapiens
gcttctagggaacctctataccacatttctagaccagaatatttaacatatataatttgccacaattctttttaagttacagtctttcttcttcctaaatacaaaaaaaaaaaaattcattaacaatcaattttgtttttttaatcccctgtcctcccatgtaatgaatgctgatgagatcctgaaatattccccaaagtaatgaaaaaaaattaaaaatgcccagttcatatagctcctaaaatatgcctccttttaggaaatacaagttacttttctaatctggttttgtagcttatgaaaaaaataaacattcttgaatacacaggtaaaataaacgtaacgaatactgtttgtctttccataaagatgttttgtcacartaaaggcaagaagatcaactctcacacacaaaactgcagc

SEQ ID NO: 486113 - DNA, 630 bp, Homo sapiens
catgagtcacccaccatcctctaaaccctaatgtcaccccagccagctaccaccatgcatgtccctcaagaaaccaagcatgactatcacacaagtccacaatcaaccccagacctcaggcaaaatagaaagctttcctccaagattaggaataaggcaaggatgcctactatcaccactgctattgagcacagttctggaactcctaaccagagcaattaagcaagaaaaataaataaaatgcatccaatttggaaaagaagtaaaatgactggatatgacaaaatcacacacaaagaaaaccgtaaagattctacaaaaaaatcctgatagtattaatatacaaattcagtaaagttgcagaatacaaaatcaacatacaaaagtcactaagatttctatgtataaacaacaaactatctaaaagggaaattggaataacaattccatttacattaacaagaaaaacaaaaaattacttagtaattaactaaaaaggtgaaagacttatacactgaaaattataaaacactgattaaggaaatttaaaaagacataaataaatagataccccatgttaatggattggaakaatattgttaaattggccataatacccaaagtgatcta

SEQ ID NO: 486114 - DNA, 665 bp, Homo sapiens
agagtaaggagtgaaaagagtattcatcagcatttactggctaatctatcctttccctaatgacttggaattccacctttgtcgttgcatcagtaattacttgctgtgaaacaaactgcctcaaaactcagtatcttcaaacaactatctatttgctccctgcagtttgacctgggctcagctagataattcttctcgtctcacctaacataaccagctaggtgataactggtcctggatggccttaatcccttgcctagggttttcagaagggacagccaggacaactgagcctgtcccttcatgtgatttctcactcacaaggaggctgacccaggcttccttacatggcagttactgaagaataagaaagtgagggcragaacagaaaccatagacccgtgaggctaaggcttggaagtcacatatcacttctacagctttcaatgggccaaaacaagtcacaggtccagaagttcaagaggaagggaaacagagtccacttcttgataggagaaacagcaaagttctactgcaaaggggcatgtattcagaaatggctcaacttcttctggccatcttttgcaaatactgtataccacagtcatatattaaatttcctcaagtatttagatgtatttctagactgttttaaaaaatctctt

SEQ ID NO: 486115 - DNA, 655 bp, Homo sapiens
tgcattcttgtaaaaacaaaacaaaaagaccctgtataaacagatgcagaggaaaagtctggaaggtaagtagggactcsatatgcacgcaggtgggtagatgcgtcgggtggagacttccttcacctcacatttctgtattatctaaacacatttaattacataattccactttttttttaactaaatatgtaaactctcttcatacaagtgtatgtggatcagcccagtcttattctttttaatgactgcactgtactcgcttggggggatgtattacagcttttgtaactttatgcaaaatgcttacagtataatgtcaaatgggggagaagacgacgaatgattgtatgtaactacaactacaaccacaaaaattcctacgtatgaataaagacaagggcttagaaagatgagattacggactaatttcatcttttagggtgaaagaactgactttttgtatgtatgtgacattaccattataaatgtagttaggaaaaatatatttctctaattttcccattaaggggtctataatgtctgtatagtaaaaaataattccttttttgaaaaccagaaaacaggtccttggttctagaatatctgctctctgtaacacagtgacagcaatcaccaaaagatagtgctgcag

SEQ ID NO: 486116 - DNA, 655 bp, Homo sapiens
tgcattcttgtaaaaacaaaacaaaaagaccctgtataaacagatgcagaggaaaagtctggaaggtaagtagggactcgatatgcacgcaggtgggtagatgcgtcgggtggagacttccttcacctcacatttctgtattatctaaacacatttaattacataattccactttttttttaactaaatatgtaaactctcttcatacaagtgtatgtggatcagcccagtcttattctttttaatgactgcactgtactcgcttggggggatgtattacagcttttgtaactttatgcaaaatgcttacagtataatgtcaaatgggggagaagacgacgaatgattgtatgtaactacaactacaaccacaaaaattcctacgtatgaataaagacaagggcttagaaagatgagattacggactaatttcatcttttagggtgaaagaactgactttttgtatgtatgtgacattaccattataaatgtagttaggaaaaatatatttctctaattttcccattaaggggtctataatgtctgtatagtaaaaaataattccttttttgaaaaccagaaaacrggtccttggttctagaatatctgctctctgtaacacagtgacagcaatcaccaaaagatagtgctgcag

SEQ ID NO: 486117 - DNA, 604 bp, Homo sapiens
cattaatcactcttctctccgttttgtcagacccagcagcctcctgaagatgctgcataaacacatttaacctttaaagggtcgggtggcagccccagggagggaaagctcaacatcctcacccctggggtaagcccccctccctcctctgctctcagactctcctggtcaaggaagaggagggagtttaaaacaagaaggaagggctcttggtgaccctcactccacccgtcaagctgacagagctccggctactgagaatccaggggaggttctccaaggaggacgagggtctaggagwgatgtcagcaggagtggctgcgcctgtctgtcatcgcttccccaggggcctctgccactgtggcccctgaggatggggcctttcctgtccacaggagcaagaagcagtgagggtcccaggctgggggaaggggctctgcctggggcctgacacctgggggtctgcttggctggaggggggcctccgccaccccttccctttttctccctcccacattcattcagcaaaatcaggagccgcttccaggttccaggcatggaacctgggaaccaacgatgaaaggagaaagaaaagacagtgtct

SEQ ID NO: 486118 - DNA, 510 bp, Homo sapiens
ttgtccacatcagtcctggctatcaactgtggtcctggtataattaagagctccccactccctggctttcattctcagaagcgtcatagttagcacaataggttaaaaggtcaccatagtaaaaactgtcatttttaaggtatgaagctggagctgtatgagaatctcattcaggattctggggctatagtcatataataaccaagatgaatgaaggacttcactgtttaaagtgtgcttttgcctaagtgctcccattagttctgcaaaacaaccttgtgcagtggggcaaagcggtgtccgtattgcccttttactgaggcccggagasattaagtgacttgcctggggttgcacaactaagaagtggtaagaatacagattggaactcacggcttaggttttccaaatgctatgctcctgtctactttgtcctgtgatcagaatctgctagctcccaaagtagggtgtgaaggctggattctagaagttcgtattgtcagtttcttc

SEQ ID NO: 486119 - DNA, 485 bp, Homo sapiens
tgcctgtggctctggccgcttttctggcccatcattccccttgtccttgtttacgctgtgcagcaaccaagctaaaacacccatcttgctttaaatgtgacttgagcttctttgcattgtgttgcctttgcctcacatacttttctcctttatcttgtactaaatagtaaatcctacctatcctccaaagcccattgtggacaacaccttctgtggccagaagtaagggctttcttcttagacctctcagagccatttggctttctccctcggtggcatttgccacagtctcacatgttaactatctgaatgtgtctcatctcatccctttgattgaaagtttactcattaatgctggcattagcaaccaatcctcacagcagtcctgtgaggaaktctcctgctcatcttgaagattaggttaggaaactaccatttggtgaggttaagcaagttgcctgtgaacatggtatattaagtgctgg

SEQ ID NO: 486120 - DNA, 537 bp, Homo sapiens
atccatcaccatgtggcatactttctatggagtctgactcttgcagatttagtttctaactcaacaataacacaattccctgaacactcatcctcaagtcatctcttgatttctaaacttaatttttttaatgaaagatgagctgatttattatggtcttcaaggctcttcacaatctatgctrtagctagaatctgtttctcatcgttgccacgtatattgtacttgtttgtatggctgtcttcctactgaatatgtatttctttaaacacgggatgtgcatcgctaaagagatgagagttgcttttacgttgtactatatggtgcacttcataacagttaaggataagtggaaaacattctcctttgccttcccttgagtccttctaatgactggagaagggctaagttttgtgctagtatgtccttaacaactctttcgtatttaataatctccttttttatcaaacagacagcaaatctaggcttggagccttcagcaaataaagtagctgggttgaatttagttatatatac

SEQ ID NO: 486121 - DNA, 537 bp, Homo sapiens
atccatcaccatgtggcatactttctatggagtctgactcttgcagatttagtttctaactcaacaataacacaattccctgaacactcatcctcaagtcatctcttgatttctaaacttaatttttttaatgaaagatgagctgatttattatggtcttcaaggctcttcacaatctatgctgtagctagaatctgtttctcatcgttgccacgtatattgtacttgtttgtatggctgtcttcctactgaatatgtatttctttaaacacgggatgtgcatcgctaaagagatgagagttgcttttacgttgtactatatggtgcacttcataacagttaaggataagtggaaaacattctcctttgccttcccttgagtccttctaatgactggagaagggctaagttttgtgctagtatgtccttaacaactctttcgtattyaataatctccttttttatcaaacagacagcaaatctaggcttggagccttcagcaaataaagtagctgggttgaatttagttatatatac

SEQ ID NO: 486122 - DNA, 534 bp, Homo sapiens
aaaacaaaaacaaaatggcaacaattaaaaacaattactgggtacctattctgttcatcactcaacttgttttctatgcacacatatctgtgtgtgtgtgtatatatatatcacacacatagatatagacaagtatatatatcctcatgtagatgtgggtatgtatgcatgtgtgtatctatatgtgtacataaatacatatttatgtgtgtgtgtatatatgtgtgtgtgtgtgtatgtatgtgaccagtgataaaggcattcacccttttcaattagaacactgaatctcagagtttagaaaatgtgctcaaggttatacacttagtaagtgaaagttctcatgactttgtgtatatcatagaaccttcctgagctttagctaacccctctggaaawtgaggaaaataatacctgccaccaggagttgatgaaatattgttcataaggatacctcacctggcacaaaccagcagctcattacacataactgcaataaatttgccccctcgaccacgcaatgtcatcttcatg

SEQ ID NO: 486123 - DNA, 627 bp, Homo sapiens
tggattattcccttttatctgttgtactagttttctgcatttctcaccacctttaaaggggtttctgtgtatgtttttccattttctcatctcccactccatcctggcttctactcccatcacttcttggcaatgactgtccagaagaatccagtgatgttcaggccaccaattccaygcagactttgcactcatcctctttactggacctatgagcaatgctgaccactatatttttgagatggaactcttttaaattgcctgagacactgttctcctgtttgaacctaaacctttggtcgctgcttgtcagagccgttcccagttgtcgtttttctactttataaacagacctccaggaactctgagttcctcaccactattttgtcaccttagtctagagcttctccctagatcatattttctctgcctaaggtttcattaatacctcaaaggctatggctttccaggctctagatatgtgcctgcttatccaatcactgacttgacatttttatctggatgtttcacaggtaaatgcaacctagtacatcccaaactgacctcataatttcccccccaaatatgctacatctctagtgcttatcttaataagtgacatctcca

SEQ ID NO: 486124 - DNA, 519 bp, Homo sapiens
aaacacgtttcttgctgcccagtgaacatcttacatagatcgcttagagtgtaatatcttaatagaagagcaccctctgctgtcttgacaagaaatatcaccacaaatggggagacaattgcattttcgatttttccagtaatcagttatggcaaattaaaatcaaggtatgacagcatagtcaacttttcatttaaacccagtatcatggggattatggagataaaatatacatggtctttgtgcttacatcttatttttctcttccgatttttctctcccctgaggcytttgtgtggaatcaatacagttcctatgattctataacctgattaaaaacactctctgagactctcaaaaataattactcaacctgggcaacataaggagaccctgtctctgcaaataattaaaaagttagccaggcgtggtggcttgcatctgtggtcccagctactctgaggtgggaggatcacttgaggttgggaggtcgaggctgcagggagccatgatcatgac

SEQ ID NO: 486125 - DNA, 519 bp, Homo sapiens
aaacacgtttcttgctgcccagtgaacatcttacatagatcgcttagagtgtaatatcttaatagaagagcaccctctgctgtcttgacaagaaatatcaccacaaatggggagacaattgcattttcgatttttccagtaatcagttatggcaaattaaaatcaaggtatgacagcatagtcaacttttcatttaaacccagtatcatggggattatggagataaaatatacatggtctttgtgcttacatcttatttttctcttccgatttttctctcccctgaggcctttgtgtggaatcaatacagttcctatgattctataacctgattaaaaacactctctgagactctcaaaaataattactcaacctgggcaacataaggagaccctgtctctgcaaataattaaaaagttagccaggcgtggtggcttgcatctgtggtcccagctactctgaggtgggaggatcacttgaggttgggaggycgaggctgcagggagccatgatcatgac

SEQ ID NO: 486126 - DNA, 570 bp, Homo sapiens
aaacatgttggtaaaaattcttaacaagtctagacaaaatctagactactcaggctctctgcacacaacaaaaacggacaacaggccccgctcctagctggcatgagcaagtgctgcttctctactaaatacagatctagccctctctgttcctccccagttctagaaaaaggtaatgacrtccaatcctattacccctgcttcctgacagcacctggaccagatcagactcatatattcgtgagtctccccaacctgaaaatcacaaagcacaagtacaaattccatgcacatttcctcctgacaaactgactgagcgatcctatggttcctccagtagtacaatcttccttgatacaagtaccaggaaaataaactttgcctcatgacagttgtgttcctggtggtttttgactaaagatctttgattgatggtttcatgttctctgtctttatcttcctcacaacatttctggggaagtagcgtgggactacaaaacttatttgatgccagtataagtggtttgttcaaattcacatagataccaaattcacagttaagagtcaaag

SEQ ID NO: 486127 - DNA, 527 bp, Homo sapiens
acctctttgcccagaggacaggaatggaatcatgtttttcatcaatgaccagtaaatagcccaaagactcagcaacatgggcagagctggagcctggagcccacagcccagtgcccaaagcctgaatgaggaaactgcaaggagaagacaagatttaggggctcagttaagcttgtagcactacagccctgcagatcaccaaagtaaggcccagaaatataaggtcagttcttggaacccaaatgccagatgccaagcgagggcccagagccagaggcccaggcctcaagcagagcccatgacccctagttcaggatccaacacacagagcctggagcttcctcttcttcrgaaaactgagatcactgcccaagcacagtacagggtcaatcccacccactggaaccaagacccagggcctagactgcagagtccagggtcagaagttcagtgaccagagcagagggagcagatttagaatcctaattctcttttctgagctcaaatacccaatcactaagggtgtg

SEQ ID NO: 486128 - DNA, 572 bp, Homo sapiens
cccacaggaacccatacacagaacacagccttttctcttgaattcaccacaatcccttcaggagagtcactgtggtgtgggctaggttcctactggcatgaccaaggcagtggcagggagttctcagctgaggaccaaataccagacacrcagtttcttgacagatgctgaggacccacctgtaactgagaaatattcaccaggacatttttcttcttataaccatcccaaggatccctttaccctcagagatgctttgagcaagaggccgatacacacaaccctccggtgtcagcccggtctgtcctcctgcccagcctcccctggagctcagtccctgaacgtctccgagtcagccacatgaagctccatgaagttctctagatgggctgccccatcctagtcccagagcacagacatactctattcccccttagtggaatgcctttctatgcattttcctgtatttaattagttgctaatactgtattcatagatgaacacactctgaggacttttgaaaacatttcaggagcccaaggcctccctgataaaggcccataaaccttgtc

SEQ ID NO: 486129 - DNA, 379 bp, Homo sapiens
atgagttatcctgaaaaacckccctctcaaccacacctaaaactgcaggtaaaacattttaaacactctttggcatacaaaggtgaactcagaagaaagtgaaggaagtcctcaaaggtcccaaatgaagcaggagcacaaatccatggggccatctcagggactcgttagaacttcggggaagtgttacactggagacatttgaaattggtttatcatggaaaccaaatctggttctagtgaaaggcagcttgggctctaatggctaaagaaggaacacaggtgtttggaacttgttgctttgggaatttaacttccataaggagaggatgattttgtttggcattctaattcttggcggaaacttggtcagggaaag

SEQ ID NO: 486130 - DNA, 657 bp, Homo sapiens
tgtgtgatcttatatatgttacttaacctctctgagtttcttcctgtctaaagcggaggctactggggtggctgttggctttatgtggtacctttgggtaaatctgaaaaaggtccccctctgggcagtggcagtcctagcccatagaactgttgtgaagattaagaaaacgctgcggtgcctgtttatatttatatttttctggctgaagaccaatttctccagcgttgagggttaattgagtgcatggctctggtctgcctgggaaagtgccagaaaagaaagaaaggccaarttggaactggggccagggaggtggccctgttgctgcccctcccatctcttgtccaaggcataccatgctccctggtctctgccggtctcagctctgcaggtggaggagaggctgtaggctttgtattgaaccaagcatgggggctcctatggaaggttttacagatgagaggagcaatcgctggctccccaggttcttctctggtatagcatcttaggggaagggattcccagtcttcctgggcttctccttccagctcttcagagtctcgctctgtagcccaggctagagtgcagcggtgcaatctcggctcactgcaacctccacctcccaggtcctggttcaagcaattctcctgcctc

SEQ ID NO: 486131 - DNA, 485 bp, Homo sapiens
ccatggcttgggggcggtgggttggggtatcaggccctgtgatggggtaagacaggtgascattgcctcacttatctggaattgggagtggttggcacatctttgttcatctcaacacatcctcttattttgttttctattaaaggaagcagaagtccttgacagacagatggaggccactccctctcccaaccccctcctctgaagatggctgggacagagtcacaggaaagggtgggggagaattaatagtgtaaacctggggttttgaacctggcatgcaagatccccaagggatttttggatagaatttagggagggcatgcatttggatagaagaaaaaaataattctctgttttcacaaacctctgtctcatatttaccatttcctctaattataaatgcagttgacaaaacacaatagtattagacacactcttgactttctcaccaaaaaacaattacagattttttcattccatca

SEQ ID NO: 486132 - DNA, 572 bp, Homo sapiens
tctagtcgtgtgaaattgttataggaaaggggtcccaatccagaccccaagaaagggttcttggatcttgtgcaagaaagaattcagggtaartctgtagaataaagtgaaagcaagtttattacgaaagtaaaggaataatagaatggctactgtacagacgaggctgctggttgcccatttttatggttatttcttgattatatgttaaacaaggggtggattattcatgcctcccctttttagaccatacagggtaacttcctgatgttgctatggcgtttgtaaactgtcatggtgctggtgggagtgtagcagtgaggacgaccagaggtcactctcgttgccatcttggtttggtttcggctttggtgggcttctttactgcaaactgttttatcagcaaggtctttatgacctgtatcttgtgctgacctcttatctcacagcaggcctcagcctgtttttacccagcccctattcaagatggagttgctctggttccaacatttctgacaaaactgctgcctggaattttgtaattatcctgtaacccaccctgtgtttattcc

SEQ ID NO: 486133 - DNA, 563 bp, Homo sapiens
cttggcttctgcctctgtggctggaagacactccctgggaattttcctgcccagtttcccttcacctgaggcatgggtaactggctccataggtggacaccagatgccttacctgaaagaggagcccattgaccccaattgaaaccatttggaatgctgtcaccaaggtggatctgagtttgaatatgcatttttgatagatggggtgggagggtggagtgaggtagcagcatgggtccgaggtctctgtccccaccagcctggttgcacaggatgcccagcgccccccaggcagcccctgcaagtgcagtcaggaccctccatggctaccagccatgagtgacaaggatgggcacaccagggacacactctgcccttcgtcatctccctcagcagtccaacctgccctcccttttcttccaggacaggcagtggagttgtagcartaagcgtgagcttgtgtgtgtagccataaagcatgtagatgcatgtactccttaaagccaacagtgaaaaagatgagaccccccccgccccagagccaggcctgcaacacgagggca

SEQ ID NO: 486134 - DNA, 595 bp, Homo sapiens
ccaacaaaaaacaaaaagacaactcaatagaaacatatgtgaaagaaatgaacagacacttcacaaagtcagagcagaatttctgaaatgtgatgggaagagcttggtgaaactcttccccagaaagacatctattagactgatcaaaattagcaaaggcaatcattcaaatgctggagatgaatcaatgaatttacaacaaattgagaaccatttactcaacaaaatttatggaaacttggtaagaacaagagataggcatggtgttcaggctgtgrgctgcactcattccccatccacctcccttttgtgggagagctattccaggaggcttagcagccgagtggcagttcccaatcccccaactccttggggtgaagatgtattctggtggataaagcagtggctgaacactggaagatcccattttttcacagatttgtgctcccaaaacctgtaccatgtaggtggtggaagccaggctctgcccccatcccaccactcccagcgcctaatctgtaagaaggacctgagtcagtcagcgttcatcccccagtgagcactactctgtgctatggaagattagtactggtgg

SEQ ID NO: 486135 - DNA, 595 bp, Homo sapiens
ccaacaaaaaacaaaaagacaactcaatagaaacatatgtgaaagaaatgaacagacacttcacaaagtcagagcagaatttctgaaatgtgatgggaagagcttggtgaaactcttccccagaaagacatctattagactgatcaaaattagcaaaggcaatcattcaaatgctggagatgaatcaatgaatttacaacaaattgagaaccatttactcaacaaaatttatggaaacttggtaagaacaagagataggcatggtgttcaggctgtgagctgcactcattccccatccacctcccttttgtgggagagctattccaggaggcttagcagccgagtggcagttcccamtcccccaactccttggggtgaagatgtattctggtggataaagcagtggctgaacactggaagatcccattttttcacagatttgtgctcccaaaacctgtaccatgtaggtggtggaagccaggctctgcccccatcccaccactcccagcgcctaatctgtaagaaggacctgagtcagtcagcgttcatcccccagtgagcactactctgtgctatggaagattagtactggtgg

SEQ ID NO: 486136 - DNA, 610 bp, Homo sapiens
aacaactgatttctgtcttagtttatataaaactatcaaaatataaaaaaygaaactttgaaattatttttaaatcatacaatagaatagacataataatcaactttcccttccccactctaaagcttcaaattatagtagaaaaatcattatttctgttattctctattttcaatgcatatttcttccttattaatattctagctaataactttagtcggtgtcaaagaaagaatctctttttataagttccacccacctcaaaggagcagggggaaactaagaaatattacaaaggttctaatttttggacaaaagttttcaagttatctactaattagtgaagaggcacaacaaacctatattaactggcttgttacagattgcacggcaaatcatgataattttaatttggaacatgaatctatgctctttgtgtcttcacatataaaatatcttccagtttatcagacaaaacaaggaatatttgacttagtagaatttaggttgccagatgtgattcaccctactaggggaaaatgaaacgatatatcttttgagttcagatgtcaatcaatgaaaaaacaatttctataaacaaattgtttct

SEQ ID NO: 486137 - DNA, 610 bp, Homo sapiens
aacaactgatttctgtcttagtttatataaaactatcaaaatataaaaaatgaaactttgaaattatttttaaatcatacaatagaatagacataataatcaactttcccttccccactctaaagcttcaaattatagtagaaaaatcattatttctgttattctctattttcaatgcatatttcttccttattaatattctagctaataactttagtcggtgtcaaagaaagaatctctttttataagttccacccacctcaaaggagcagggggaaactaagaaatattacaaaggttctaatttttggacaaaagttttcaagttatctactaattagtgaagagkcacaacaaacctatattaactggcttgttacagattgcacggcaaatcatgataattttaatttggaacatgaatctatgctctttgtgtcttcacatataaaatatcttccagtttatcagacaaaacaaggaatatttgacttagtagaatttaggttgccagatgtgattcaccctactaggggaaaatgaaacgatatatcttttgagttcagatgtcaatcaatgaaaaaacaatttctataaacaaattgtttct

SEQ ID NO: 486138 - DNA, 610 bp, Homo sapiens
aacaactgatttctgtcttagtttatataaaactatcaaaatataaaaaatgaaactttgaaattatttttaaatcatacaatagaatagacataataatcaactttcccttccccactctaaagcttcaaattatagtagaaaaatcattatttctgttattctctattttcaatgcatatttcttccttattaatattctagctaataactttagtcggtgtcaaagaaagaatctctttttataagttccacccacctcaaaggagcagggggaaactaagaaatattacaaaggttctaatttttggacaaaagttttcaagttatctactaattagtgaagaggcacaacaaacctatattaactggcttgttacagattgcamggcaaatcatgataattttaatttggaacatgaatctatgctctttgtgtcttcacatataaaatatcttccagtttatcagacaaaacaaggaatatttgacttagtagaatttaggttgccagatgtgattcaccctactaggggaaaatgaaacgatatatcttttgagttcagatgtcaatcaatgaaaaaacaatttctataaacaaattgtttct

SEQ ID NO: 486139 - DNA, 610 bp, Homo sapiens
aacaactgatttctgtcttagtttatataaaactatcaaaatataaaaaatgaaactttgaaattatttttaaatcatacaatagaatagacataataatcaactttcccttccccactctaaagcttcaaattatagtagaaaaatcattatttctgttattctctattttcaatgcatatttcttccttattaatattctagctaataactttagtcggtgtcaaagaaagaatctctttttataagttccacccacctcaaaggagcagggggaaactaagaaatattacaaaggttctaatttttggacaaaagttttcaagttatctactaattagtgaagaggcacaacaaacctatattaactggcttgttacagattgcacggcaaatcatgataattttaatttggaacatgaatctatgctctttgtgtcttcacatataaaatatcttccagtttatcagacaaaacaaggaatatttgacttagtagaatttaggttgccagatgtgattcaccctactaggggaaaatgaaacgatatatcttttgarttcagatgtcaatcaatgaaaaaacaatttctataaacaaattgtttct

SEQ ID NO: 486140 - DNA, 648 bp, Homo sapiens
atgtgtgtgtgtattttttaatttgccaaacgggttatattgatatcgccaaataaccctaatggatatactatttttgatcattaagaaaatgaacaaatttaacatttgttatatgtttgctatttctaaggtactcttctaagtgtgctacatttttaaatcaaatctcacaactaccctatgagacaggttattatttctaatttaaatataagaaaagacgtgcaaaggtacacaataagccatgcaaaatcagagagtttatattaaactagaatttgaccaaggcagacaaactccctatttgactcttttcatctttgtattgccttatttcaaaatataaaattaagttacacttggcctaaggctgccttcttaccttgacttcctacgtagcaaattgcaagctaacatagtacgtaaacaaactgaaacctaagaagtataaaaaacacctgagttttagtaaatcacaagcagccatgtttcagccacttgcaggtagatagccaattcatcacaccagcccaaataaggaagatatataaatcaggtgatttctcaactttgtttctgtcttcgttytataaaagttcactgactgctcacattgctaggccggggtcctgtgaacttcctctg

SEQ ID NO: 486141 - DNA, 651 bp, Homo sapiens
tataatatataatacatgaaaatactcatcttcttatttactcatgcaaaagggtgtgtagccagtgtacctaaaacaacatgcagatcataaaggaatttgataatagaatgaacctaagacagaaagaatacttgtacccttcctaccagaggacagtcaggcattctgcttttcagttgttaaaattayactgaatttaggtttaaaataataataactgaggattttctgaacaaaccaaaatgtgtgaatatagcacgtaatgatgacgtactctgttgcagatatttggcacagcagattacgtaagaacacagaacatatatacaatacggttcaatagacttttcagtgatattctgcatgagaactgtccatggaggcatccattacccacttgtgataattgatcatttgaattgtggttacagcaactaaagaactaaattcttaattttgggttcatttttaatagacattatttaagactttgtatatttacagaaataatgcaaatatatttcagtgttcccacatacatcatgtaccaattttccctatgattagtatcttacattagtatggtatatttgttacaattaatgaactgatattggtatattgttattacctaaactccattcttta

SEQ ID NO: 486142 - DNA, 651 bp, Homo sapiens
tataatatataatacatgaaaatactcatcttcttatttactcatgcaaaagggtgtgtagccagtgtacctaaaacaacatgcagatcataaaggaatttgataatagaatgaacctaagacagaaagaatacttgtacccttcctaccagaggacagtcaggcattctgcttttcagttgttaaaattacactgaatttaggtttaaaataataataactgaggattttctgaacaaaccaaaatgtgtgaatatagcacgtaatgatgacgtactctgttgcagatatttggcacagcagattacgtaagaacacagaacatatatacaatayggttcaatagacttttcagtgatattctgcatgagaactgtccatggaggcatccattacccacttgtgataattgatcatttgaattgtggttacagcaactaaagaactaaattcttaattttgggttcatttttaatagacattatttaagactttgtatatttacagaaataatgcaaatatatttcagtgttcccacatacatcatgtaccaattttccctatgattagtatcttacattagtatggtatatttgttacaattaatgaactgatattggtatattgttattacctaaactccattcttta

SEQ ID NO: 486143 - DNA, 663 bp, Homo sapiens
ctgcattattttgcattcctaccaacattgcacaagggttacaatggctcacattcctatcaacagttgttattttctgggctttttagagaatcgtcattctaacagatgtgaggcaatatttcattttttgacttacatttccataatgattcatgacagttggacttttttttatacctgtgggttattttaatgtcttttggggggaaatatctatccaagtcctttaccctttatttatttatttatgtatttaatttactactaacctataggaattttttgtatattttgcatattaacttcttatcagatatataatatggcatgtccttttgcttcacttccttcatttgtatagaaggggtagtgttattacttactgcatggtgttattgaaggtttgaattgattaatattcacaatatgcttagaaatgtgtttgctcaaccatcaatagtacacaacattaacaggataaagaacaaaaatcacatagagaaaaagcatttaacacaatttaacagcttttcatgataaaaaacacaaattaatgatagaaggaaattatctcaacataataaaagtcatatatgaaaagctcatatcttatatcatactcagtggtgakaatgagaagcttttcctataagatcaagg

SEQ ID NO: 486144 - DNA, 546 bp, Homo sapiens
gctggtttgcttgttttaatagactttatttcttagagcagttttaggttcacagcacaattgagcggaaggtatagggacacgtcatatatcccctctccccacgcacgcacagcstcccccatgatcaacatcctccactggagtggcccatttgttacaattgatgaacctaccttgacagctcattatgttagcgttttcatcttgagaaaaatgcaaggatgaagcctctaagttattatcaagagcctttctgctttgttatataaagcactttctcttaaacatactcgatggttattgagtgtagcagataaaatgtttaagttggaagaaaacaagaaggcctttaccttaggaaggcacagtcaaccaatgtccctttaaagcagtggttcttggctgggtgtgatggctcacgcctataattccagcactttgggaggcccaagcgggtgaatcacttgaagtcaggagttcaagaccagcctggccaacatggcaaaaccctatctctattaaaaatacagaaatcaatcagca

SEQ ID NO: 486145 - DNA, 650 bp, Homo sapiens
aggatggagagccagggccctgctgggggggtctgtcatcttggaaggagaaaacctgagggaatacatatcctggctctctctcctcctgccctccatctcctgtttcctcccggtgttcagtcttgacccaaatccagagggcaatgggtctgcagtcttttagagttagcctcctggagcacagaagtcaggcagagaagggcaaaaattctggtggctgggagggacacaggggaggcacagtgtgaagaggcagcgtrtggtttaaatgtctatggtagtgcgcacacccagatctcggtctcagagttcatccactgtcccccagcactttgaacaactcaggtacagcacctcccacacgtgcacaaagagacatctccctgacctggacagaaatggtgtcgggttcatctgactcccagagtcactgcccatcctttacccttgcttacatttcatctaattgtcttgtttgaaattatgatacgtgtatattacatctgcaattctaaaaaaatcatacagacagaaaaaccttcagttgcatgaatgtttcttcttaggtccttttaggcaatacagcatgaagacatactctggtgggaaaccaaagggcctcattttccacactgagcatatcgagc

SEQ ID NO: 486146 - DNA, 650 bp, Homo sapiens
aggatggagagccagggccctgctgggggggtctgtcatcttggaaggagaaaacctgagggaatacatatcctggctctctctcctcctgccctccatctcctgtttcctcccggtgttcagtcttgacccaaatccagagggcaatgggtctgcagtcttttagagttagcctcctggagcacagaagtcaggcagagaagggcaaaaattctggtggctgggagggacacaggggaggcacagtgtgaagaggcagcgtgtggkttaaatgtctatggtagtgcgcacacccagatctcggtctcagagttcatccactgtcccccagcactttgaacaactcaggtacagcacctcccacacgtgcacaaagagacatctccctgacctggacagaaatggtgtcgggttcatctgactcccagagtcactgcccatcctttacccttgcttacatttcatctaattgtcttgtttgaaattatgatacgtgtatattacatctgcaattctaaaaaaatcatacagacagaaaaaccttcagttgcatgaatgtttcttcttaggtccttttaggcaatacagcatgaagacatactctggtgggaaaccaaagggcctcattttccacactgagcatatcgagc

SEQ ID NO: 486147 - DNA, 650 bp, Homo sapiens
aggatggagagccagggccctgctgggggggtctgtcatcttggaaggagaaaacctgagggaatacatatcctggctctctctcctcctgccctccatctcctgtttcctcccggtgttcagtcttgacccaaatccagagggcaatgggtctgcagtcttttagagttagcctcctggagcacagaagtcaggcagagaagggcaaaaattctggtggctgggagggacacaggggaggcacagtgtgaagaggcagcgtgtggtttaaatgtctatggtagtgygcacacccagatctcggtctcagagttcatccactgtcccccagcactttgaacaactcaggtacagcacctcccacacgtgcacaaagagacatctccctgacctggacagaaatggtgtcgggttcatctgactcccagagtcactgcccatcctttacccttgcttacatttcatctaattgtcttgtttgaaattatgatacgtgtatattacatctgcaattctaaaaaaatcatacagacagaaaaaccttcagttgcatgaatgtttcttcttaggtccttttaggcaatacagcatgaagacatactctggtgggaaaccaaagggcctcattttccacactgagcatatcgagc

SEQ ID NO: 486148 - DNA, 650 bp, Homo sapiens
aggatggagagccagggccctgctgggggggtctgtcatcttggaaggagaaaacctgagggaatacatatcctggctctctctcctcctgccctccatctcctgtttcctcccggtgttcagtcttgacccaaatccagagggcaatgggtctgcagtcttttagagttagcctcctggagcacagaagtcaggcagagaagggcaaaaattctggtggctgggagggacacaggggaggcacagtgtgaagaggcagcgtgtggtttaaatgtctatggtagtgcgcacacccagatctcggtctcagagttcatccacygtcccccagcactttgaacaactcaggtacagcacctcccacacgtgcacaaagagacatctccctgacctggacagaaatggtgtcgggttcatctgactcccagagtcactgcccatcctttacccttgcttacatttcatctaattgtcttgtttgaaattatgatacgtgtatattacatctgcaattctaaaaaaatcatacagacagaaaaaccttcagttgcatgaatgtttcttcttaggtccttttaggcaatacagcatgaagacatactctggtgggaaaccaaagggcctcattttccacactgagcatatcgagc

SEQ ID NO: 486149 - DNA, 575 bp, Homo sapiens
gcaaatgagagcaagcctgtttaatattaagattatgacgtaaattgacaaaagcccaagcattccaagtcctagttgctaggcaccttctccttgctcccatctgagtataatgatgcattgtcagccttagttgaggtacaaaagggttattagacttttgagtccatctgctacccatgcaaaggaaataatcgaactaacactgcctgctcttttccttggtttcttgccaccttaattatagttcatctgggctatgtgtgtacttgctgccttgggtagaacattttccaggactgtaagaaagcagagtgaaagctcaggtaagggaattgaagcagaatttgcagttacagcttgggrgaaggggtcatctggtgacttacccaagcaatcaaaccaacagcacgggctacccacagttcatgtggcttcaatggcaattattgccaaactatttttcatggagcttttcaattcaaacttggtcctagtttttgtttttaaatatttgtgggtgtgtatatatgctttttgttgagattgctacatcagggtgtatttctttttga

SEQ ID NO: 486150 - DNA, 569 bp, Homo sapiens
ctgcagcattagattctcataggagcatgaaccctcttgtgagctgcacatgcaagggatctrggttacgtgctccttatgagaatctaatacctgatgatctgaggtagaatggtttcatttggaaaccattccacctcccccatctttagaaaaaattgtcctggtgccaaaaagtttgaggactaccaattaaattaaccgtaagatttttttttaataagttctaagttatcagagtctagatagaagcctgattcttgttggccgaagacatgtgttattagtttctttgactgccataacacattaccactaattaagtagcttagaacaagagaaatttagtgtcacatttctggaggctagaaatctaaaatcaacatgtcggcagggccctgctctctccggaggctctagagaagaatctgcttgatgcctttcttttagtttctgatgttgctggcagtccttggcattccttagcttgtagatttatcactccaatctctgcctgtcttgtcatatggcactctgtctgtgtgtgtctttgtgttcacatggctttc

SEQ ID NO: 486151 - DNA, 603 bp, Homo sapiens
acttgacagcactaagaactcggtgggaaccattggtttaaatccattcccacgagaccatggagctctaagcgcatctcagccccccaatgtgtctcttttccttctcatcttagcattctctttagttgcaactatcaccatgtttcctatcaaactctaaaagcccagtgagaaaactcaaaggaaaatgatagccccttttacactgagacttgaatgtgatgttgaagcattttgaaaaaatgtcaaaaacagtgggtccaaaatgccgacaagggcaaagttttktttttttttttaaatttttgcttatcaggacccacacaatcctaggcctatgtttcgaaaacagatgccctagaaaaatttcccctgatgaataatgtactcctcagcttgtacctttagaaggtcaaactatgatgtacctttataaaaatcaaacaagggaaagaaaaccactgaaaaaaatgtaccctgtgtcttgcaagtattaataaaatccagtctacttctccatcaacaacccagatttagaaaaaacacaaactcagaatcctggttacctgactcagaaaacctccattgactctctgatca

SEQ ID NO: 486152 - DNA, 341 bp, Homo sapiens
aactctctgcctgagaagattaaggtcagtcaactccaagccatggcctcaagttatgcaacacatttttcttttacatccaattgtatcagggtttcatattgactctagaagatcagaaatgatcatttttggctaggaaccataatctggctagttcccatacctacacagctggccctgctgtattttgagaggttytaggaatggtttatgctccaccttggctagaattatgttatcttgtcttaagtgtctgaatgtgactgatttgtatttgaatatataaaaagtctgggctgccccaatgttcccttttaacagagaatgcctaatgtaat

SEQ ID NO: 486153 - DNA, 604 bp, Homo sapiens
tggaaatcattttaactttatttattttttcttgcgctgacaaatttaagaatttaagatttactcaagtgataatgaaatctataaaatgctgttcctccattaggaaaagttgccygagatgttcttagactaatttcttcatgtattttgcaggagcatattgtcaaatataggcatatttttggaagtgtcttgcaattgagaatatctttgaaaggtgtcctcaccagaagagattatgaaccataggttataaagcacagatatatagctgaaaggtgatgtcagggtagtaggtaaaatatgttgaattcataaaattttcaacaattttgatgagagtcatatgcctcctaaagtaaattatacttaaggattcaactagaatcatttgttatctcttccatatatgtatttttactgatgctcacatgatttaaatcactaagtcttgactaggctggtagtaatttgagattcattcctgcctacaaaaacataggtcttatttttcaattaaaaaaaaagccctaaacctacattttaatgtaaaatagaataaaatatttatttgtttacttaaaatatttgaacaagctga

SEQ ID NO: 486154 - DNA, 436 bp, Homo sapiens
attaatataggtctttttctcttcagatgtgagagatcggttctgtgatgcattacaaaggtgtccactgcaatgttatctataatcttaaaatgtagaaagaatatatattatttccagccatatctataataggaaatacatattataaaaccattaagttagacttgcagagaaaggagcagaaagccaaatatatgaagtataaactccaattgataaaagatttaggttttataattttattatgtttttcctgtgttgtttgaaacctagcttacatatcaggtaccggtaatatatttcaattgtataggaagacagtraaacaaaaacaaattttttctttgtttttcaatttccagactttcgacacaaaatgtcctaatgacaactatttttttctgaaataaaagtaaatgtcaggttagttgtc

SEQ ID NO: 486155 - DNA, 609 bp, Homo sapiens
tacacataaattatccaattggcagagaaaactgtatacagatttctggtgggagaatatagtacaatgaattgcatatatggtaagataaacataagataagaataggcactaataactgattaagtaataatgtgatctctgattgagatcaatatatgtaaattaaatgactgttcagtaatcgtgttttacatccgaactcatctgcttgaccaaggccaacttgatatgttattaccacagctgcagtctctcaattgccayatttacaagcttcttattttctgaacagcatccactgtcttctactcacccctttagtaccctgattgcaggagtcctttcatgtcatggaaatctacaaatcattgatcctaccctattttcattctactccacctcctttgattcttacttttctccttcagttattatcatattcttttatacagcttcaattttgtcatctctcttttgctttcgcacactgacattccagtttgcaaaaccctaatcacaatatagatccaactcttagcctacttcacatatgaatctattcagtttaatattactgttaaacaatcccaaaaaccaaagcacaca

SEQ ID NO: 486156 - DNA, 639 bp, Homo sapiens
aaaacctttcttaaaatttacctttttctcataattatattgtgaaatggtgcattaattttartgtcttgcttatttgcttaaaagaagaactttgaaactctcttgggaaaatatagtcaaaaaagcttgctgaagaaacagaatatattagtccattttcgtattgctgtgaagaaatacctgataccgggtaatttataaagaaaaagaggtttaatggactcacagtttcacctggctggagggcctcacaattatggcagaaagtgaaggaggggcaaaggtgcgtcttacgtggtggcaggcaagagagcatgtgcaagggaactgccctttctaaagccaccagatcttgtgagacttattcaccatcatgagaacacaatgggaaaaattcacccccatgattcagttacctctcactggatccatcccacaacacgtagggattatgaaagctacaagtcaagatgagatttgagtggggacacaccaaaccaaattacagaggaagtgagaaaagaataatccagggtgaagtttctgatctgacatttattagcaatgacttcaacaactgcctttgtttgggtggaatgagattgatattatgaaattagtaaataacctgatacg

SEQ ID NO: 486157 - DNA, 616 bp, Homo sapiens
atgaacagcagctacttcaagaattctatacattaaatcccaattatctccatctctccatgggtttagatgataggaataagatccaaatgataccactgcagagcccaactgacaaatggctttgattctcccagagtagggaggaatgacaatttccacagacatctaacagggacagaccttcaccayccactggtttgcccaaatccagcccagtcattcctgtccgttcatctggtcacagtgaacaattgccttcggaaggggcaggggcagagtcacagctactattcttggacaacccagccctgtcctggatccccatgtcatccaaggactgccccataccaccagacccaagcacctcctccatcagtcacttggcactgtcattctcaagccattggactttggtttttctcaacagccagaggatgtgctgggctttgatgtcttcgatgctgtttggaaagccttagcaggcctgactgagatggagctgccaggccaggcgtgagccttcccatccatgtctcttcagcaggtcctcctcacaccccactgctgcccttggtccaggctctgaattgcagccacctgctgcaccaaccaa

SEQ ID NO: 486158 - DNA, 616 bp, Homo sapiens
atgaacagcagctacttcaagaattctatacattaaatcccaattatctccatctctccatgggtttagatgataggaataagatccaaatgataccactgcagagcccaactgacaaatggctttgattctcccagagtagggaggaatgacaatttccacagacatctaacagggacagaccttcaccacccactggtttgcccaaatccagcccagtcattcctgtccgttcatctggtcacagtgaacaattgccttcggaaggggcaggggcagagtcacagctactattcttggacaacccagccctgtcctggatccccatgtcatccaaggactgccccataccaccagacccaagcacctcctccatcagtcrcttggcactgtcattctcaagccattggactttggtttttctcaacagccagaggatgtgctgggctttgatgtcttcgatgctgtttggaaagccttagcaggcctgactgagatggagctgccaggccaggcgtgagccttcccatccatgtctcttcagcaggtcctcctcacaccccactgctgcccttggtccaggctctgaattgcagccacctgctgcaccaaccaa

SEQ ID NO: 486159 - DNA, 591 bp, Homo sapiens
gagtcaaattactgtgtacctcctcatgccaggctatgctgcttcagcacttggcacgcgctgccgtctctgtttcgaatgccctttcccacctaactcattcctcccacccttccatacttagacaagtctgagcttttctgaccagtctttcctgaacagtcctccatcccatcatcaccttaactactgagagtgaaagcttcttcctacccaggctaccggggttcatgcaccctctttggttggtttacttatctgtcactaaactgagatctctttaaagcaggaacaagatctctttttacctaactcataacacagggtaaacagacaacaaatgtgctgactaaaatgctaatataaaaaatcccttagtgaaatgtgcaatgttacatgtgaatattggtaaggcaacataatagcaaatataaatttaaagaatatcttttaaaaaggtaacattccctaagagtattatttcaaagtttaaatttttctgtaggtaaccatgtatgtatccatttggtaatatgtgtatatgtgtgtgygtgtatatacattcacgtgtcccttaaggatgggatatgt

SEQ ID NO: 486160 - DNA, 542 bp, Homo sapiens
gaagaagaggggaagaggaaagattttgtctctttggataactcttttgtgttttggtatattccggaaggctgtaagaagagagatttcatgtgcagattccatggagcaaaatgagttttgtttttttaaacggagagtagttctgttttttttattggcctttttttttttttgctacgaatgctgattttatgaactatgaaaatggtcattrtaagatatgccacttttctcccttttatttcctttctcttttcttcccaactaatatctcacatagataggttgggatatagaatgcatttttgttctgtaatttctaaggtttgaacagatactgataaaatttctttacaaatatgtagatacttgagtatttgattaagacttttattattgttgagtcatttcccaaaaagttgactgatttgtatattgtatctttttgctggttgccattttgcacaatttttcttttaaaactatttccaaattgaggtctcagtctatttcagagtatttaaatagcaagggtgtta

SEQ ID NO: 486161 - DNA, 571 bp, Homo sapiens
ttatagtagaattaataattgggggacacttatgcaaaaaaaaggttccttttatattaacgcgtctagtaaagtaagcgacacctggtggaggcaaactagtattacaagccattaaaatggctaacaggtatcaaactccactggcatggttatggcctatggtacccccactaataatggtaatcttaatactcatattcaaaccctgtattctaaaccttcttgtaaaatttatctcttttggcctagaagcaaactttaaatggtgctgcaggcagaaccacacacggacacgcctttcttctgaggaccgttagattgaactcaggaggagccctagctgctgtccccactagatgccccttttcagcaggaagtagtcagaaagagtcactgtccaacaccctctaacagcagttagggttactrcttctgaggggagaaataacacaggagctaaaaagaaattatttaagtagctagtgagggtaagggagttctcagtaagattttctttttattaaaaagcagcccccaaatcatttcttgtctagcaaaagaagcctga

SEQ ID NO: 486162 - DNA, 672 bp, Homo sapiens
ctgggtgacccttgtccagccaacctctctctcaggtacagcacttacccctgtggcccacctgcctctggtgctatgggctattcctgggaactggaactgatggggatgggtggaagggcrtcttttcttctggtaggggctgatctcttttactctccagtaggggtggagtgagctgtggaaaggcccctcctgcttgtctctagcacccccacctctctcttcagctctggtccaccaccctcacttgtgccagaccacccgggatgtccatggccgtcactaccctggtttcttttgccctcgtctgtctgattctccagaggaagcctactgctgccacctgcaggctgcagggggctcctgctgcacccgggctgaatttgaggccctgtaccaagtcaatctgtccgctcttccgcccccgcccatcctcaggtgagatctccaaccccagagccactggaacatcgacagggtgttccagtatctggggctctgttcctaaattatggggtggtaggcttgtaacttacagactagtgaagggacagaccgcaacagaaaatcatgtagatcatgattacaattacaaaggagaagttcagggggctgtgcaagctggtaatggggagccatcctgaatctgcccatgggtggctctaggat

SEQ ID NO: 486163 - DNA, 498 bp, Homo sapiens
ttctttggcaaggcatctgtccagcccagcttggcacagcccacagctagcatattacaatcctcatgagatctgcctggcatggaacaacatattctcttaacaactggctgatcacacgtggcatggcagaggatcccgagggaaaaagtggcggatcttcctgtgtgccatgctaccgagcgccgcagtcttccatgccagactggacagtccctgctgtcagaggcggcggcgggcagggaatgtgtctgtggccgtgcagggaggacagaaagcatcagcctcccaccagaaggaagaaacttctgggcctgacaggctggggaactactgtgaaacaacamgggggttggggcttatccactgagcaaggtagctgctctgtatgagccacagaagccttaagacagaagtttttccgtcgaccacacccccttccgtaggcaccagctcgagtggagcagagtgcctcccagccccactcacgtgtcacca

SEQ ID NO: 486164 - DNA, 498 bp, Homo sapiens
ttctttggcaaggcatctgtccagcccagcttggcacagcccacagctagcatattacaatcctcatgagatctgcctggcatggaacaacatattctcttaacaactggctgatcacacgtggcatggcagaggatcccgagggaaaaagtggcggatcttcctgtgtgccatgctaccgagcgccgcagtcttccatgccagactggacagtccctgctgtcagaggcggcggcgggcagggaatgtgtctgtggccgtgcagggaggacagaaagcatcagcctcccaccagaaggaagaaacttctgggcctgacaggctggggaactactgtgaaacaacaagggggttggggcttatccactgagcaaggtagctgctctgtatgagccacagaagccttaagacagaagtttttccgtcgaccacacccccttccgtaggcaccagctcgagtggagcrgagtgcctcccagccccactcacgtgtcacca

SEQ ID NO: 486165 - DNA, 524 bp, Homo sapiens
cctaattctaaaaatttctaacaatagctgctttatgaagtgcttaatccatgctgatgtttcacatgcttttcaaatataatcacttaattctcacaatagccctacaggtggttttatgacaatatcaccatttacgcaggatccctattttattcacaactgaggcacagagggggttaagtaccaggcccgaggtcccarggcccgagcaatgatctgaaactaggaagtctggtgggatgtgtccgtgcttcagcctctacactaaacttaaggcctcaaactccttctggaccttgagtgcagggcgtcccactgggctgtttccagccctctggtctctccagcccaaggttggggttttttttttttgttttttttttttttttagacagacagagtctcactctgtcactcagactggagtgcagtggtgtgatcttggctcactgcaacctccactcacgcgtggctcaagtgatcctccagcctcagcctcccgagtagctgggaccacaggc

SEQ ID NO: 486166 - DNA, 468 bp, Homo sapiens
ctaattctaaaaatttctaacaatagctgctttatgaagtgcttaatccatgctgatgtttcacatgcttttcaaatataatcacttaattctcacaatagccctacaggtggttttatgacaatatcaccatttacgcaggatccctattttattcacaactgaggcacagagggggttaagtaccaggcccgaggtcccagggcccgagcaatgatctgaaactaggaagtctggtgggatgtgtccgtgcttcagcctctacactaaacttaaggcctcaaactccttctggaccttgagtgcagggcgtcccactgggctgtttccagccctctggtctctccagcccaaggttggggtttttttttkttgttttttttttttttttagacagacagagtctcactctgtcactcagactggagtgcagtggtgtgatcttggctcactgcaacctccactcac

SEQ ID NO: 486167 - DNA, 521 bp, Homo sapiens
attccaccgggacagatggccttrttctccctttcacctctccagtccttactgacttgtgtagttgctcagtcttttaacccagaacaaccacagaaagatgtctgaaaaccctaaaacggatcccttgtatagaagacagtcattttttcaaataccatatcccagagggggagaggagaagatccagtgagggatattgggctgcagttaggagtcatgacacagatggaccaggggctgctcctggcagagaaaggcacactcctcccagcagggagtcaggcccccgaacttgccagccattgggccacgcctagccttgactgggtgctctcggctcagcccttcacaagggctcttcccagagacagatctcaagggcctcagatgccaccaagtgcaaactgttcgttttgccctgaggatatgggggccacacagagctgccagcgtgaccagctacccgggtctgactccaggccagtgctccccatgcccgtcttgattcttaagaacgt

SEQ ID NO: 486168 - DNA, 432 bp, Homo sapiens
tgcccctacattccaccgggacagatggccttattctccctttcacctctccagtccttactgacttgtgtagttgctcagtcttttaacccagaacaaycacagaaagatgtctgaaaaccctaaaacggatcccttgtatagaagacagtcattttttcaaataccatatcccagagggggagaggagaagatccagtgagggatattgggctgcagttaggagtcatgacacagatggaccaggggctgctcctggcagagaaaggcacactcctcccagcagggagtcaggcccccgaacttgccagccattgggccacgcctagccttgactgggtgctctcggctcagcccttcacaagggctcttcccagagacagatctcaagggcctcagatgccaccaagtgcaaactgttcgttttgccct

SEQ ID NO: 486169 - DNA, 374 bp, Homo sapiens
tgcagagtggggtgcaagatcctcaacccagaggctccctaggccccacttgccccagctcttgaaagcctggttctgagctctgccaggactggggctcagcactgcccatggaaacaggcatgkcagcgaagaaaatcataaccaaatatttgtagtcacctctctcctcccttctggaaagggagggtccctggtttgtgggctcttggcctcctggacattattctgtagtgaagggagaaaggttgagatgcagagttggagaaactaacagaggccaaactggtccatttgaggaaagatgggggatcccaggaggggaggaggggacaccctggggaaccgggggccttctcaggtggtccaagtag

SEQ ID NO: 486170 - DNA, 660 bp, Homo sapiens
ctgccggatctctatattccacgsaggtgcctgcctggttccctaagatccctgggcattgtaccgggaggatggcacccaatggcaagattgcctgtttcaacagtgccatcgtgtgttaggacaagcaacaacagccaaaactctgggacacccttgtcttccggttttctctgctggaggagacagcatccaagaatcaaggaatatccctgagggaggagagacgttggagttatcacagaagaaaggatagcaggggaaaaatacattctcactacaaatggtatgggataataaagtgagctaagttaaatattaagataaatatgtgtctcaaggtgatgaataataagaataaaacgagctatcttttgttatgtgctctctatgactcaggcatatgagatgctttgctcattgactcttcacagcagaacctattaggcatttatttattttccttatttgaggaaactgaagatcagaaacattaaggaacttgcccaagttccacttgcaaagtcatggtaaagtggccgctcaaatgtaaaactgtctactctcaaatccaggttcttttcatgattccagagaatatgggggaaataaaggaatgaatgtccgcagaagggaagggtccctcattacactctctgg

SEQ ID NO: 486171 - DNA, 508 bp, Homo sapiens
tgcattgtgaggactggaaggaagatggatcaagatgagaactgcagggcatcttagaccagattttatttctattttattttatttatttttttgagacacagtctcactccgttgcccaggctggagtgcagtggygcgatcttggctaactgcaacctccacctcccgggttcaggcgattcttctgcctcagcctccccagtagttgggattacaggcgcacgctagcccacctggctaatgtttgtatttttagtagagatagggtttcaccatgttggccaggctggtctcaaactcctgacctcaggtaatctgcccgtcccagcctcccaaagtgctgggattataggcttgagctaccactcccggcttctttctctttaatacttagtgcttgcacagtgacatgcacataaaagacttgcaacaatgtctgaagaatttaaaagaggtgctagttaaagccactagttcaggtgagatcaagtagaggagaccaaga

SEQ ID NO: 486172 - DNA, 508 bp, Homo sapiens
tgcattgtgaggactggaaggaagatggatcaagatgagaactgcagggcatcttagaccagattttatttctattttattttatttatttttttgagacacagtctcactccgttgcccaggctggagtgcagtggcgcgatcttggctaactgcaacctccacctcccgggttcaggcgattcttctgcctcagcctccccagtagttgggattacaggcgcacgctagcccacctggctaatgtttgtatttttagtagagatagggtttcaccatgttggccaggctggtctcaaactcctgacctcaggtaatctgcccgtcccagcctcccaaagtgctgggattataggcttgagctaccactcccggcytctttctctttaatacttagtgcttgcacagtgacatgcacataaaagacttgcaacaatgtctgaagaatttaaaagaggtgctagttaaagccactagttcaggtgagatcaagtagaggagaccaaga

SEQ ID NO: 486173 - DNA, 496 bp, Homo sapiens
tgaaagaaagaaacttgttaagggtggctgccatagttttatattcactcaggtttgcaaaagatcccccccttttaagtaaaattataatgsaaagccacaaaggtattataaatcaacactttttttttttttttttttttttgagacagggtctcactctctcgcccagacaggagtgcagtggcgcgattctggctcactgcaaccctccacctcccaggctcaagcgattctcctgtctcagcctcccaagtagctgggattacaggcgcacgccactaccacctggctagtatatacagggtttcgccatgttgtccaggctggtctcgaactcctgacctcaaatgattcacctgcctcggcctcccaaagtgctgggattagaggcatgaaccactgagcctggccaaatcaacaacagtctttatgactaacacagaagtgctaagagaagactgctgacccagtacccactgggtttcttaccgct

SEQ ID NO: 486174 - DNA, 560 bp, Homo sapiens
ctgtctgtgaatgggggcgggaacttgcctccccaggtcaggccactgggattgtgccaattaccttttacctgccaagtggcaaggtatcagaacgtctagacctcaggacaccagattatcgataacaactattatttattaatcatttgctcattactacatatattataagtataatatagttcatatttttattatgaatatgaggttgtttatatttttattataaatataaagttgtttatatttttatcattatataaatatagttgtttatatttttwtcattatataaatataaagttgttcatatttttatcattatgtaaatataaagttgtttatatttttatcattgtataaatataaagttgtttttattattaaagttgtttatattattatgtttataaattatttatcacttactatagtaataagagccattaattattaagtgccttctatgcatcaggcatttaacaaatatttttattttgtcttcatagcactcagcatggaagataatataatcccctatagagactcagaagatt

SEQ ID NO: 486175 - DNA, 260 bp, Homo sapiens
ctgagggtggaattgggggcctgggcctgggcagcatttatctgagyactgctctgccccgggatgcccatgtgaattcctctgtgtcctggcagttggaggagaggtcagtgctctttgcggtggcctcagcgctggtgaactgcaccaacagctatgactacgaggagcccgaccccaagatggtggagctggccaagtatgccaagcagcatgtgcccgagcagcaccccaaggtgaggggccgccagaggggctag

SEQ ID NO: 486176 - DNA, 538 bp, Homo sapiens
ttggttagctcatttaacccctccaaggttcagacgacactaaataaactctaagtactcttactacactaagtaaccctctctaatttcctcatgtgggcccagtgtccttagactctccaacttatgggtgaggataataataatatctccaccatacagcatgaagattaaacaaggtaataaaattaatgaaataattgcaatgtgtggcacatcataaagttcaagaaatgtaataaccctgagatttggatagcataggcgttatgctgattaatasatgaggaaacaggagctgaaaaagtttactcattcaaggtcatagggttgggactggatgccaccacaagttgaaacaagttctcctgacttcaaagtcagtgttctttcaaagccacccatggcacaggtatttgaacaacaggcatattttctcttgccctattcactttccaggaaatgaaattgtatcatactttcctcctggctctcattggtttaccgttttgtctgtattcactttgatttctatgtc

SEQ ID NO: 486177 - DNA, 567 bp, Homo sapiens
agctctaccattttgaagctgtgtgaacttggttagctcatttaacccctccaaggttcagacgacactaaataaactctaagtactcttactacactaagtaaccctctctaatttcctcatgtgggcccagtgtccttagactctccaacttatgggtgaggataataataatatctccaccatacagcatgaagattaaacaaggtaataaaattaatgaaataattgcaatgtgtggcacatcataaagttcaagaaatgtaataaccctgagatttggatagcataggcgttatgctgattaatagatgaggaaacaggagctgaaaaagtttactcattcaaggtcatagggttgggactggatgccaccacaagttgaaacaagttctcctgacttcaaagtcagtgttctttcaaagccacccatggcacaggtatttgaacaacaggcatattttctcttgccctattcactttccaggaaatgaaattrtatcatactttcctcctggctctcattggtttaccgttttgtctgtattcactttgatttctatgtca

SEQ ID NO: 486178 - DNA, 568 bp, Homo sapiens
agctctaccattttgaagctgtgtgaacttggttagctcatttaacccctccaaggttcagacgacactaaataaactctaagtactcttactacactaagtaaccctctctaatttcctcatgtgggcccagtgtccttagactctccaacttatgggtgaggataataataatatctccaccatacagcatgaagattaaacaaggtaataaaattaatgaaataattgcaatgtgtggcacatcataaagttcaagaaatgtaataaccctgagatttggatagcataggcgttatgctgattaatagatgaggaaacaggagctgaaaaagtttactcattcaaggtcatagggttgggactggatgccaccacaagttgaaacaagttctcctgacttcaaagtcagtgttctttcaaagccacccatggcacaggtatttgaacaacaggcatattttctcttgccctattcactttccaggaaatgaaattgtatcatactttcctcctggctctcattggtttaccrttttgtctgtattcactttgatttctatgtcag

SEQ ID NO: 486179 - DNA, 253 bp, Homo sapiens
aaaaattagagaactgaaaaatgacagaatgatacaatgtactacatggtaatagccttggcttggcagggaaaggagggaaggagcyctgttttgagcgacccctcctgctgtccctgggcatcctctgtttcagaccccacacctgcacagatacttacctgtgttctcatttatttgttcaagtacactgcaaccactgcaaagacctagtaacgtgcaacttagttgagtgaaaatagaatcaatgaaa

SEQ ID NO: 486180 - DNA, 606 bp, Homo sapiens
atgaagcatggacccctgttgaaaggaaaaatttcaattgcacaagaagaaaatatgctgaaatagactacagaatatttagatcttggccactgagtgaaaatatgctggaatagactacagaatgtttagacccaccactctcctaccgtaaaatacaacccggttctggttggattggccttcacctgcctaacctattttccttggtcttttcacactctgtgatttaatatttatttcaattccctgattcaaaccaaccatgtgtccagagtgactttgtaaacccagtccgggctgaacygaggctgaaactccaagtccctctgggcttttaaggtttacagatctcaggagtgaacattttcttaccaagtcactgctctcaaaacaaaccctggaatggaagcttcattatcttgtggccatcagtccacgtttcttccccttctgccctgttgagtttatgtgtgttttatctccctcccgagagggactatactttgttggtgttaaagtgatcacgctggagagtttatatattctctcattttcaaaaaaatctatctttgattcctaaatgcctacattcacagcacttta

SEQ ID NO: 486181 - DNA, 411 bp, Homo sapiens
tgtcccaactgactgagtagtagctggaatttggaacttataaaaaaattgcactatactcattttactccattagcactgtggcagatgttgaaattttacatcttctgattttttaagccctcccctctcgtttttggaatacctgcacccagatcatgtaaagggaaagaaggaggcaagagccggattgtttaattaagcttttctaattggaaatttttataagtgaaaatctaattctcctgcttaattttgcttataaaactttcccaattaaaacctattggaaaagaactttaaaaaaaaaaattaaagctttgaaaaattccctaataccwcaatggaaaactgttaggtactgttctatttgttcagaaagtttactgctaggaaaatctcataacttgt

SEQ ID NO: 486182 - DNA, 375 bp, Homo sapiens
gagagcttgtgcagagaaactcccgtttttaaaaccatcagatctcgtgagacccattcaccatcatgagaccagcacaggaaagccccgcccccgtgattcaatcatctcccatcggrtccctctcacaacacgtaggagttatgggagatacaagatgagatttgggtggggacacagagacaaactatataccccataaatatatatacctactatgtactcacaaaaacttcaaaagataatttaaaaaaaataagtaaaattaaaggcattgtgatgaatgccaaaaaaaaaaaaaaaaaaagagtaaaagggaaaaagacagcaccttagtatatccagggaacgaattcatgagaaggttttgtgcta

SEQ ID NO: 486183 - DNA, 646 bp, Homo sapiens
attgtgagagggacctggtgggagataattaaatcatgggggtggtttccctcatactgttctcgtgttagtgaataggtctcacgagatctgatggttttataagggctttccctttgtacttggctctcattctctctttgcctgctgccaccatgtaaggcatgcctttcaccttccgccatgactgtgaggcctccccagccatgtggaactgtgagtccatcaaacctctttcctttataaattacccagtctcaggtatgtctttattagcagtgtgagaacatactaatacaaggttcttcagcttccttgaaacccgattgggttgctagacattttggctttaatttctagggaaggtataagaagcctatagcattttgtgtgttggtctctgaacctgagcctggcacagatgtgagggtttctaccattaacacccgccccccttaggctcactggcttttctctagggctctgcttctgaccctggggagggagagtcaggcaagacctttcaaggcttccaaaagtgaccaacacactccaaaatcttgatagttttctaataaatctcctcatctttactctcratagacatctgtcatgagctccaaagcatagctgccagtttagccag

SEQ ID NO: 486184 - DNA, 612 bp, Homo sapiens
ggctggagtgcaatggcacaatctcagctcactgcaacctccgcctcctggtttcaagtgattctcctgcctctgcctcccacgtagctgggattacaggcgcctactatgcccttgcttcactttctaacatggcccagcacagtgaccaggtcagagctgagctgcagcctcagtttctagccactccatcagggtctgctttcctgagcccctacactcctgctggggctggaaacccccgcccacagagtagcgatcaccmcactgcttgggtgctatgtcctaggtgctttatttatatcacctcatctgaatctcacactagcattgaaatacagagtatcatcccattttacagatgaaacagaaaccaagcaaagtgcagattttcccatctggaaagtggttgtcaccgggtctcgttatggatttgatattcttcccagcatactgtagtgctgctccctggaccctggcatccagcctgccgctggccaggcccccgtctcagagtcttctgccaggagctggggctctgctctgaaggcacaagtcaggcagcggccgcatgctgtgctgtggtctcacctgtggccttgcccgcctgtg

SEQ ID NO: 486185 - DNA, 642 bp, Homo sapiens
gtaggattataaattggtaaaacactttaaatgctttctgacaataactagtagaataaagcatgtgtccatgctatgacccagcagtttgaggaatgtgtcctagagaggttctggcataccctgaggagatgtacatggcaggacgttcatcaaagcacttttgtacaggcccataatccactgacttttcccatcaaatctctatttgctttgaaccaatcagagacaatgtggccaataatacaattccagcggctacatttcatgctaagaaaacataaatatgaaacaacaaagcaagtatgaatggcaaggtgggaactactaatatgccaagtgcaaaatctgtctcaaactgaactgggaattctaacacaacataacacactggaagtccataagaaacaggtgatacacaagcatgacttgggagcgtggacatgaggaaaaagaagtcttagccctctctagcatggggtccatggtgggcttgggtgataatataacaaagcagagaaatagtagcaaataagccagggtcattgtagcygtctttaaaaaaggtttacagaagatctaggaagaattttttaatggaagtgctttttaaaagttcatgaaactactcaccgcccccca

SEQ ID NO: 486186 - DNA, 612 bp, Homo sapiens
gtttccacatgtggaaactgaagcacagagacattaagtaattttcttaaggtaatatacctcgtaagtktcagggctggaatttgaatctaggcagaatctacctccttaatcatctccactgtgctaccctctagggaagaaatatctggaactgtggcttgatgatattactactgctttttatagacaacgatttttttcctcacttggtatcatctaatgaataaagaaggaacgtgttactgtacttctatttcaagatgtgtactgagcccattggtttatcttttttctcctcttagatcccagtaaaaaaagctaaaaaaagaattcatgatctaacaataatgaggataattggagaaaagctatatggatctgggagatttcaataaatttccagaagtcagaaagagcgtggaaagatgatgcagtggggcagaggtagctttgggctagtgtgtttgcagagggtcctgaatcaaaaaaagagcccaagttgcccatcagaacctcggaagtttcagtctgagagaatggagatgggatggaggaggagatagagaagtgagtagaaaatgaggatgaatttaaaggtctgtgtattga

SEQ ID NO: 486187 - DNA, 579 bp, Homo sapiens
tgtgaaggaggaactgtcaaacacttacaaaatatcagaccatgtgcgaactcactcactatcatgagaacatcatgggggaaaccacctcaatgatcaaattaactccaccaggtcccttacttgatatgtggggattacaattcgagatgagatttgggtgggaacacagagccaaaccatatcagcttaggaaacaaaccagcaacttgttaaatatacaaccttggcgattctaactcaggtaatacgttattaagtccacgaatctgcattttaacaagagtcacagaatattttagaagttctcttgagtacataytttgaaaaacaatgtattgtcaattatcaccactatagaaaatattagtaattttgctgattttatctcaagcctacaaaacaccatgtaatttaaatcgacacataacatcaaattttcccttaacttttgtctccttttcaaagggtagacagaataatattagcaatgaaataaaacaacatacgctagttgttaatcttttgtggtaatttagattttgaccacattattattaagaatttggtgaagagaga

SEQ ID NO: 486188 - DNA, 538 bp, Homo sapiens
ctaatgtcatgctgatgacaggtccaacctgatatgatgctataacaamagggtcttccatctctggggtattcttcccagaaatttcataaagctagtctaatcatgagaaaatatcagatcaacccaaatcaaaagacagtctacaaaacacttgaccagtgtattcaaaaggtgtcaagattatgaaaacaaggaagacacagagaaattgtcccagactagactgtgatgataatgactaaaggcaatgtggttttctctattggattctggaatagaaagtggtcagtagtcaaaaaactgatgaaatccaaataaagtctgtaggttagttaggggaaaaattgtgaataattctcctgttcaatttacttttcaatcacatttttgtgtgtgcaaaaatcaaagtaggagggcattgaaggaaataagtgagctgatttagcatcaaaaacacgttttcttgaaatgtcaaatttatcactatggttggtccactggcctcactctctagataaggtgccacattactgta

SEQ ID NO: 486189 - DNA, 499 bp, Homo sapiens
cattaacctacaattagagttatgacaaaataagcaaaaaaaaaaaaaaaaaaaaaacagtctaaaatgggaggggagcattcatttagactccattgtgtgccgaagtttatggcaggcatgtaagcatataacatgtgttattttacataacattttcaacaatcccgcaaagtatttatccttatcttcattttagaggtaggtaaactggagatcaaaaagttttaataayttgccaaaattcccagagctagtaagtagcataaagaatttgtagcaagattagcctaacagtttgttctcatctcattgtacccaaaatgcaaaaatttaaaagaaaatgtatatgacagttgagtctcagctcataaaaagatccttatgggaaaactaaggcaataataaaaaatagtaattcttattgtatggtcattatattttagtttgcagtggaagaattcctatctctgattaaggaaggtaggaaaaattggta

SEQ ID NO: 486190 - DNA, 555 bp, Homo sapiens
ctattatatggttcattaattgcccaaattctagataacttcatggtgtgtgtgtgtgtgtgtgtgtgtgtgtgtgtgtgtgtgtgtgtgtgtatgaagatatcatcaatgtagttttctcaaatgatcatttcctaaactttgttttaggatgtttaccactgatgtcawgattaaaaaattacctgtagtcagtaagataaagattctataatttcaataaaattgtatttatttatttttaaggctagtcaaatgaagcagtgggagaaaatctaactaaactatagttttatttaatttgcaccagactattttggtgggagaggacaggagtgcaagggaaaggaagttgaaaagcacggttccccgcattccagggagactgtatcaatgctgttatacctgatgttaatacatttgctgtttttgaagcagttttaaacttatgaggtcattgttcagtgagctggaggtcttgacactatgcgcattaattgtctaaaaaggtaaagctcagggtgaactagagtagttgaagaaactaagaaagag

SEQ ID NO: 486191 - DNA, 555 bp, Homo sapiens
ctattatatggttcattaattgcccaaattctagataacttcatggtgtgtgtgtgtgtgtgtgtgtgtgtgtgtgtgtgtgtgtgtgtgtgtatgaagatatcatcaatgtagttttctcaaatgatcatttcctaaactttgttttaggatgtttaccactgatgtcatgattaaaaaattacctgtagtcagtaagataaagattctataatttcaataaaattgtatttatttatttttaaggctagtcaaatgaagcagtgggagaaaatctaactaaactatagttttatttaatttgcaccagactattttggtgggagaggacaggagygcaagggaaaggaagttgaaaagcacggttccccgcattccagggagactgtatcaatgctgttatacctgatgttaatacatttgctgtttttgaagcagttttaaacttatgaggtcattgttcagtgagctggaggtcttgacactatgcgcattaattgtctaaaaaggtaaagctcagggtgaactagagtagttgaagaaactaagaaagag

SEQ ID NO: 486192 - DNA, 476 bp, Homo sapiens
gcttggtgatgatcacaatatttgctgaccaacgattacataaacaaatctcagccatctttgggagaaaggtctagttcactcacacaggaaagcatcccagaacagcagcaggtcagccatggtggtggaggaaggagttagatgttggtcattggttataatttctgggccaattgcaacaatgcagactatagtttgtcccaacaaccattctcccccttttttctttcagttgttgagactagcactgattcaaagagctagrgagagagtagacttagaaagcataaacggacacgaacagtgcagggtgggaggtacagaggagagtttacagcagcaaacaccacgttcctttaaccccactgattctggcacaactatgcttgataaggccctccacttctgtcctctcttcaagcatgcattgtagctttttaactgttataattttgttgaagatgcagaatgtt

SEQ ID NO: 486193 - DNA, 568 bp, Homo sapiens
ctttatactgtttttcataatggctgtactaatttacattcccaccaacggtgtataagagtttccttttcttcacatcctcaccagtgttggttattttttttgtcttattgataatagccattctaactgggggaagatgctatctcattatggttttgatttgcatttccttgatgattagtgatgctcagcttttaaaatatacttttttggccgtttgtatgtgttttttggagtaatccgttcagatgctttgcctactttttagttggaacatttcttatttgtgaatgatcatgtcttctgctcatgttcacatttttctggggagatttttatcttttctgattaacctttaagagatcttaaaaaatatattcaagatgaagtttatctgtgcttctaatcttccttttattatttctaatgatgtattttatttttagtattctaatgggtatttttgagccacagwaatgtgtgcatttaaagatttcatgcagtgaaatcttacatgttgtgtggggctattatttgttttgttttgcgtttggtgtaacttttg

SEQ ID NO: 486194 - DNA, 490 bp, Homo sapiens
tggggtggactaggctggcagtctgacctgaaagaatcgaaagctttagcaccattggagaaattcatcattaatcattgaatcaggtaaaggaaaaatttaaatttggaggccttccccactttctaccctctccagcccggactttaaaaggaaagcaccacaaaagggagcactaaaaagggtggaataaggaaattcagaaaatcaagagaaagaagcagcagaaatctaggtctctttgtgcagcattttccttgacatcagtaactggggcagcagcctgctgattctcatgccgaaatgattatgaggactcccttttattttgaggtttaaggatctaaggaaattatcttttttwtaaacctttgttctttttttctcccctagtcaaaaaaaacaaaaatatgattttacacaaattactttgaaaatcatcctctttctaattaaaacagacaaaaataatcatttcccagactccaag

SEQ ID NO: 486195 - DNA, 490 bp, Homo sapiens
tggggtggactaggctggcagtctgacctgaaagaatcgaaagctttagcaccattggagaaattcatcattaatcattgaatcaggtaaaggaaaaatttaaatttggaggccttccccactttctaccctctccagcccggactttaaaaggaaagcaccacaaaagggagcactaaaaagggtggaataaggaaattcagaaaatcaagagaaagaagcagcagaaatctaggtctctttgtgcagcattttccttgacatcagtaactggggcagcagcctgctgattctcatgccgaaatgattatgaggactcccttttattttgaggtttaaggatctaaggaaattatcttttttataaacctttgttctttttttctcccctagtcaaaaamaacaaaaatatgattttacacaaattactttgaaaatcatcctctttctaattaaaacagacaaaaataatcatttcccagactccaag

SEQ ID NO: 486196 - DNA, 449 bp, Homo sapiens
cactttgagttgtctacgatgttgaataagttatgacagtagccaaacccttcccctacattcttaaggggaaagtgttcagtctcttatgattaagtgtgatgttagttgtgggattttatttttttaatattttttaactaacataaaattgtatgttttatcatgtacagcaagtatgtgtagattgtggaatgattaaatctagctagttaacaaatgcgttcgctgtcataggtatcctttttgtggtaagaacacttaacattcactgtctttgcattttcttaggtgccctttatcaggttagaagtagcctcctatgtctagattactkagaaattttaatcatatatgaatgtcaaattttctaaaatgctttgtctgcacctattaaggtgattgtttgactttttgttttttgttttttaataggatgaattaccctg

SEQ ID NO: 486197 - DNA, 425 bp, Homo sapiens
gtacttgatccactaagggaagaaaaaggactctaacctgaaagagctgcagagtctggtgagcaggtgctaacatsagccaggaggctatgatgttagagacttggtgcagaaagtcttatatcaaggatgtcataacataaaacaggaaaagagagagtttataatttggaaacttctcatatatgatgaggtttaaaattctgtcagggacacaggaaacggtgttaatctggtagaacagcaattaaaagcctggagaaggcaatacctctcactaagttaaaaataaaagccatagcttgctgctaaagcaagcaataggaaaaggaactgagaagctcggtgaaatgggatgttggagtggacatatactttttaaggctgaaaaccaccagttattttaagggaggcctgaagggcac

SEQ ID NO: 486198 - DNA, 525 bp, Homo sapiens
ctaagggaagaaaaaggactctaacctgaaagagctgcagagtctggtgagcaggtgctaacatcagccaggaggctatgatgttagagacttggtgcagaaagtcttatatcaaggatgtcataacataaaacaggaaaagagagagtttataatttggaaacttctcatatatgatgaggtttaaaattctgtcagggacacaggaaayggtgttaatctggtagaacagcaattaaaagcctggagaaggcaatacctctcactaagttaaaaataaaagccatagcttgctgctaaagcaagcaataggaaaaggaactgagaagctcggtgaaatgggatgttggagtggacatatactttttaaggctgaaaaccaccagttattttaagggaggcctgaagggcactccatttacacagatgctaactcattcattgatgagaaactaagcaatggtttccctgtagaccctataaaacaggtatgagagttgcagaaactgttacaaaattgggttc

SEQ ID NO: 486199 - DNA, 541 bp, Homo sapiens
ttcaccattgtactctttattttcaccagaacaaactaattgcagacatagatttgtctttcttaaccagcatcgttgtctaaagatttatgtagtgatccactgatgtaagatccctcattacatcacattggaccaagcagatgatgtgcatcagtgagcacatcaacatgacatttatgaattccatcacaaaccacacacacagcaacctctaacytgaaagggaaatgaaacatactcttgaaggttcaactaagacttcaacttggagatggcaccttacaaggatgggcagtcattcctttggatgcagtatacagtttacaccaatgataagtatatagttctaggtatacgatatatagaataaatgggtcagggaatcaaggactgtaaaaatggtcttgttcactatcactgttagtgtcccacttggaatttttgctttctgcttccagaaagaaggtatacaactcctagttagcagaagtagaattttacaagaatcaacaacaaaaataaacaaacaaaaagtaaa

SEQ ID NO: 486200 - DNA, 541 bp, Homo sapiens
ttcaccattgtactctttattttcaccagaacaaactaattgcagacatagatttgtctttcttaaccagcatcgttgtctaaagatttatgtagtgatccactgatgtaagatccctcattacatcacattggaccaagcagatgatgtgcatcagtgagcacatcaacatgacatttatgaattccatcacaaaccacacacacagcaacctctaacctgaaagggaaatgaaacatactcttgaaggttcaactaagacttcaacttggagatggcaccttacaaggatgggcagtcattcctttggatgcagtatacagtttacaccaatgataagtatatagttctaggtatacgatatatagaataaatgggtcagggaatcaaggactgtaaaaatggtcttgttcactatcactgttagtgtcccactwggaatttttgctttctgcttccagaaagaaggtatacaactcctagttagcagaagtagaattttacaagaatcaacaacaaaaataaacaaacaaaaagtaaa

SEQ ID NO: 486201 - DNA, 592 bp, Homo sapiens
aacttttttttttaacagaataattgcaagtaaagattttaaaaggatgaaatggaaaactataaatttttttaaaagacaagagtatagtaatgtttttaccaaaaaaaagcatgtcaaaagttattcagttgtacacttgaaatacacatagtttaatgtacctaaattgtacttcaataaattcagaagaagaaaaaacatttaaagaaagaaaagaaagatacaaatgaaaagttaattgccgttttatctacaagaaggcttaatgtgaagaaacatgatacaggtcaaaatyccaatctacagaaagaagtacaaaacactggaaatataaaaaagatgaatatagtgttacctcaatttctcccaaaataaccactaaattataaaataataatgtttaaatgaatgacaatgatggtagcagggattggtaggaggaatgagaaaaataatattaagtggtcctttgttacacatgaagtagtataacattatttaaaggtatatttgttagagtagtagctaggaatacatgagcagggcaagagagggacccctctcaggaacatcaggtgagtgagtatca

SEQ ID NO: 486202 - DNA, 592 bp, Homo sapiens
aacttttttttttaacagaataattgcaagtaaagattttaaaaggatgaaatggaaaactataaatttttttaaaagacaagagtatagtaatgtttttaccaaaaaaaagcatgtcaaaagttattcagttgtacacttgaaatacacatagtttaatgtacctaaattgtacttcaataaattcagaagaagaaaaaacatttaaagaaagaaaagaaagatacaaatgaaaagttaattgccgttttatctacaagaaggcttaatgtgaagaaacatgatacaggtcaaaattccaatctacagaaagaagtacaaaacactggaaatataaaaaagatgaatatagtgttacctcaatttctcccaaaataacyactaaattataaaataataatgtttaaatgaatgacaatgatggtagcagggattggtaggaggaatgagaaaaataatattaagtggtcctttgttacacatgaagtagtataacattatttaaaggtatatttgttagagtagtagctaggaatacatgagcagggcaagagagggacccctctcaggaacatcaggtgagtgagtatca

SEQ ID NO: 486203 - DNA, 592 bp, Homo sapiens
aacttttttttttaacagaataattgcaagtaaagattttaaaaggatgaaatggaaaactataaatttttttaaaagacaagagtatagtaatgtttttaccaaaaaaaagcatgtcaaaagttattcagttgtacacttgaaatacacatagtttaatgtacctaaattgtacttcaataaattcagaagaagaaaaaacatttaaagaaagaaaagaaagatacaaatgaaaagttaattgccgttttatctacaagaaggcttaatgtgaagaaacatgatacaggtcaaaattccaatctacagaaagaagtacaaaacactggaaatataaaaaagatgaatatagtgttacctcaatttctcccaaaataaccactaaattataaaataataatgtttaaatgaatgacaatgatggyagcagggattggtaggaggaatgagaaaaataatattaagtggtcctttgttacacatgaagtagtataacattatttaaaggtatatttgttagagtagtagctaggaatacatgagcagggcaagagagggacccctctcaggaacatcaggtgagtgagtatca

SEQ ID NO: 486204 - DNA, 348 bp, Homo sapiens
aatcctcacttaccagattagaaacctaaattctttagagaagagtcttaaaccatttgactagaatatggtctgtagaagtcagatttctccatagttgacagcagaagaaagagtagagttattaacataattactatgattattattaatgtaaaaataatattaaaagttaattttatttttttgatggtaaatatgatagaaaatmaaataagttaaaatcattaaaagcataaatacatattctatgcaaattatttagagtatactacatccttcaaattttgttcaaatttttttccactgaaagcagcataaataatgttataggtttaatataatata

SEQ ID NO: 486205 - DNA, 348 bp, Homo sapiens
aatcctcacttaccagattagaaacctaaattctttagagaagagtcttaaaccatttgactagaatatggtctgtagaagtcagatttctccatagttgacagcagaagaaagagtagagttattaacataattactatgattattattaatgtaaaaataatattaaaagttaattttatttttttgatggtaaatatgatagaaaataaaatamgttaaaatcattaaaagcataaatacatattctatgcaaattatttagagtatactacatccttcaaattttgttcaaatttttttccactgaaagcagcataaataatgttataggtttaatataatata

SEQ ID NO: 486206 - DNA, 567 bp, Homo sapiens
agtatagaaagtgttcaaatagaacttttcatgagattccatggctacccaagaaattatctctgcttgaggctgagggagaagaggagggagcagagaagactgcaatgaatgatggttttatatctgagctttgaagggtgatgtaagttttctaggcagagaataggtggaagggaaatccaggcagaggacayagcatgtgcaaagggagtgtgtcctgggatcagtgaagagttctgtgtgtctggagctcaggggcaggtgccaaggacagaagcaggtgaacagggtggcagcctgactctatggcagatgctgtctttctccctgcagggtttgtgtgattggacttagcaggggtaagaggctgagattaattccatcctggactgaggtgggagtagacattctgtctgatgcctctcccactgggcagggactgttgttcattttaaaaatgataccttaatgaggaacctcatgatgtcatcctgctaatattattcccattttatgaatgagcaaactgatgagcagagaggtaaattactcattcagatgaca

SEQ ID NO: 486207 - DNA, 493 bp, Homo sapiens
tgccccctcatctagtccaaggagctaaaattctcaatgatgctttccaaccgtggacgaagaagcaggtaggaatcatgtcacaaatgccctagggcaggaaagcggtgacaggtgggagcacctccctggagacccagcagcaatgtccagggcttgtcctgcttcagtaagatccggcctggcagggtcggtggtgctctcctgcctggcttggcccagggtgtgaatttgccccagacaccccatgggtctgtcccctgctctccactgactgggccacttgagagctgggggaggacagatgtaggtgcagagcaccctccaccaggggctcacaagttggtgggaggagggtgggcaggtgaccatgtgtcctgggaggaaagtgggtctgcgrgtggaggacagatggctcatggtgggatgacactgtgtgagcacagaaaggcttggaacctggtgggggcagagaaggactgggggagtggct

SEQ ID NO: 486208 - DNA, 380 bp, Homo sapiens
ttttttcctgtgactttgcattataagaagaacatattatataatataaagagtgttgtagtcgtcataaaatggtttcataattttgatctacatttgccrtttgatttctttgtcctctcacatttgtgtttatacgataaggttaaaaatagcaatatttatacctatttttctgtgttgctgggacactaggtttataactatgatgtaatttattttgtgacaatcatttgtttaaatatttgtttcccttgctaacttatctgttcctcctacaaagagatcagatgtcattaatctttgtatctctagtgcttggcatggtgtctcagagtaataggaaacttagtgaattattttgaactattccccactgt

SEQ ID NO: 486209 - DNA, 380 bp, Homo sapiens
ttttttcctgtgactttgcattataagaagaacatattatataatataaagagtgttgtagtcgtcataaaatggtttcataattttgatctacatttgccatttgatttctttgwcctctcacatttgtgtttatacgataaggttaaaaatagcaatatttatacctatttttctgtgttgctgggacactaggtttataactatgatgtaatttattttgtgacaatcatttgtttaaatatttgtttcccttgctaacttatctgttcctcctacaaagagatcagatgtcattaatctttgtatctctagtgcttggcatggtgtctcagagtaataggaaacttagtgaattattttgaactattccccactgt

SEQ ID NO: 486210 - DNA, 675 bp, Homo sapiens
gccctgcatgtcgtattctgaacaagagacatcatcactctgtastacagccagaatgctacactacaactggggcactgcacgatgctgtttgagtgatctaagggccatgggggtagccagaagaaaatctactactgcaccttacgaaatgactaggacctgttataaaaaagtaaaagtcataatcagccttttaccctctggcctttttcccttactttgtcccctgtaacctgccctaaatatatttctcccattttctctctcaattcatcttgccccttctctgtgggtgagcaaaacataacccatagctgtatggtttcatccaaatcacggtctagcaatgtctggagacatttttggttgtcacactgagggagtgctactggaattagtggggagaggacagggatactgctaaaaacatcctgcaatgcacaaaacagccccccatcccctccccacacacactgtgaagacttatctagccccaaatctcaatagttctaaggttgagaaaccctaatctagaccttaacctgtccagtagaactttctgtgatgataaaaatgttctatacagtagtcattactataggtagcagttgagcactggaaatgtggctagggcaactgagaaactgaatttttaatttaacttttatttaa

SEQ ID NO: 486211 - DNA, 675 bp, Homo sapiens
gccctgcatgtcgtattctgaacaagagacatcatcactctgtactacagccagaatgctacactacaactggggcactgcacgatgctgtttgagtgatctaagggccatgggggtagccagaagaaaatctactactgcaccttacgaaatgactaggacctgttataaaaaagtaaaagtcataatcagccttttaccctctggcctttttcccttactttgtcccctgtaacctgccctaaatatatttctcccattttctctctcaattcatcttgccccttctctgtgggtgagcaaaacataacccatagctgtatggtttcatccaaatcacggtctagcaatgtctggagacatttttggttgtcacactgagggagtgctactggaattagtggggagaggacagggatactgctaaaaacatccygcaatgcacaaaacagccccccatcccctccccacacacactgtgaagacttatctagccccaaatctcaatagttctaaggttgagaaaccctaatctagaccttaacctgtccagtagaactttctgtgatgataaaaatgttctatacagtagtcattactataggtagcagttgagcactggaaatgtggctagggcaactgagaaactgaatttttaatttaacttttatttaa

SEQ ID NO: 486212 - DNA, 675 bp, Homo sapiens
gccctgcatgtcgtattctgaacaagagacatcatcactctgtactacagccagaatgctacactacaactggggcactgcacgatgctgtttgagtgatctaagggccatgggggtagccagaagaaaatctactactgcaccttacgaaatgactaggacctgttataaaaaagtaaaagtcataatcagccttttaccctctggcctttttcccttactttgtcccctgtaacctgccctaaatatatttctcccattttctctctcaattcatcttgccccttctctgtgggtgagcaaaacataacccatagctgtatggtttcatccaaatcacggtctagcaatgtctggagacatttttggttgtcacactgagggagtgctactggaattagtggggagaggacagggatactgctaaaaacatcctkcaatgcacaaaacagccccccatcccctccccacacacactgtgaagacttatctagccccaaatctcaatagttctaaggttgagaaaccctaatctagaccttaacctgtccagtagaactttctgtgatgataaaaatgttctatacagtagtcattactataggtagcagttgagcactggaaatgtggctagggcaactgagaaactgaatttttaatttaacttttatttaa

SEQ ID NO: 486213 - DNA, 470 bp, Homo sapiens
tcttgttgcccaggctggagtgcaatagcgctaccycggctcactgcaacctcccgctcctgggttcaagtgactctcctgcctcaggctcccgagtagctgggattacaggtgccccccaccacacctggctaatgtttgtatttttagtagagatggtccatgaagtcaaaactattttttaaaaaaattttttgagacacagtctcacttactctgttacccaggctggagtgcagtggcacaatcttggctcactgcaacctccgcctcccaggttcaagcaactctcctcagcctcccaagtggccaggctggtctcaagctcctgacctcaggtggtctgctcgcctcggcctcccagagtactgggattacaggtctgagccactgtacccgacctctctgctatgtacttaataaatactatagaagtacagttttaataataagagtaattattaactaag

SEQ ID NO: 486214 - DNA, 470 bp, Homo sapiens
tcttgttgcccaggctggagtgcaatagcgctaccccggctcactgcaacctcccgctcctgggttcaagtgactctcctgcctcagsctcccgagtagctgggattacaggtgccccccaccacacctggctaatgtttgtatttttagtagagatggtccatgaagtcaaaactattttttaaaaaaattttttgagacacagtctcacttactctgttacccaggctggagtgcagtggcacaatcttggctcactgcaacctccgcctcccaggttcaagcaactctcctcagcctcccaagtggccaggctggtctcaagctcctgacctcaggtggtctgctcgcctcggcctcccagagtactgggattacaggtctgagccactgtacccgacctctctgctatgtacttaataaatactatagaagtacagttttaataataagagtaattattaactaag

SEQ ID NO: 486215 - DNA, 557 bp, Homo sapiens
gctgaagcattaataacttcctgctatcttaaatgtaacagtcactttgaaaaagcctcaatcattagttgggtcccctgtggacgttagtgccaagttcagttgaaatagttgcttgtgggacaccaaggcatccttccagcaaaattttaaaaattgaatctagtaagacctcattgcttaaaaaaatttttttgcatattttaaaatttatatccaatgaaatttactcatttgatgtgcaatagttctgtcagtgttgatacatgtataatcaagatgtaaaatggttttattaccccctcaaaattcccctgtattgctcctttgtagtcagcccttccctcctgcccccagctcctggcaaacccctgatctgttctcttcccctggctcctttcatttagcataatgcatttaagattcatccatgttcttggatgtcagtggtttattcctttttattgatgaatggtrttccattatgagaatgtaccatagtgtatccattcactagttgaaggacatttgggtgatttccaggttttggtgattat

SEQ ID NO: 486216 - DNA, 530 bp, Homo sapiens
ttaaatacacaaaattccagtgttgtggcattcaaacaccttcccagccattcaaagagcaacatggggtcctgggccataccacgtccttacactttccacaccaaaactaacatcaccagagctatgctactgactaggggttggcaaactatagcatgcagtccacatcaggtctgccatctgtttttctcttacctgagaactaagaatggtttttactgacaaacatctataactgacttgataatagaaaacagtaactttgtactccaattcagcaaaatgttatgccccctgaaacaawatccattcttctcattagcaaatgtgtattttaaaaaaactgtactcaataattgtcattatattttgaatttcatcagtaaaaattctccgtaaatgttttctctcttgttatgttaaatacgtacacaaaatcctcaatattgcatcctgatccctgaaagcctaaaatatttactatctggaccctttacacacataaaaaaaaagagtttgctgatccc

SEQ ID NO: 486217 - DNA, 530 bp, Homo sapiens
ttaaatacacaaaattccagtgttgtggcattcaaacaccttcccagccattcaaagagcaacatggggtcctgggccataccacgtccttacactttccacaccaaaactaacatcaccagagctatgctactgactaggggttggcaaactatagcatgcagtccacatcaggtctgccatctgtttttctcttacctgagaactaagaatggtttttactgacaaacatctataactgacttgataatagaaaacagtaactttgtactccaattcagcaaaatgttatgccccctgaaacaatatccattcttctcattagcaaatgtgtattttaaaaaaactgtactcaataattgtcattatattttgaatttcatcagtaaaaattctccgtaaatgttttctctcttgttatgttaaatacstacacaaaatcctcaatattgcatcctgatccctgaaagcctaaaatatttactatctggaccctttacacacataaaaaaaaagagtttgctgatccc

SEQ ID NO: 486218 - DNA, 657 bp, Homo sapiens
tgccctgcgcagttcacagggctgcccctgtggagtgacaagagataccagataaaaagagcatttcacaaacaataacgcgttcagtcaatcaggcaaaaaaaaaaaarggggcaggggccaggctcagtggctcatgcctgcaatcccagcactttgggaggctgaggtgggtggatcacctgaggtcaggagttcgagaccagcctggtcaacatggtgaagccccgtctctactaaaaatacaaaaattagggctgggtgcagtggcttctgcctgtaatcccagcactttgggaggccggggcgggcagatcacctgaggtcaggagtttgagaccaacatggtgaaaccctatctctgctaaaaatacaaaaattagctgggtgtgtggcgggcccctgtaattccagctactcgggaggctgtggcaggagaatcacttgaacccaggaggtggaggttgcagtaggccagatggtgccacggcactccagcctgggtgacagagtgagactctgtctcaaaaaaaataaataaataaaaataaaggaaaaaaagaaagaaaataaatcctctacaaagaaagcaagtctgagttcgtttgggttatcggtatattctgtcttccccgcgaggtggtggccctcttctgc

SEQ ID NO: 486219 - DNA, 657 bp, Homo sapiens
tgccctgcgcagttcacagggctgcccctgtggagtgacaagagataccagataaaaagagcatttcacaaacaataacgcgttcagtcaatcaggcaaaaaaaaaaaagggggcaggggccaggctcagtggctcaygcctgcaatcccagcactttgggaggctgaggtgggtggatcacctgaggtcaggagttcgagaccagcctggtcaacatggtgaagccccgtctctactaaaaatacaaaaattagggctgggtgcagtggcttctgcctgtaatcccagcactttgggaggccggggcgggcagatcacctgaggtcaggagtttgagaccaacatggtgaaaccctatctctgctaaaaatacaaaaattagctgggtgtgtggcgggcccctgtaattccagctactcgggaggctgtggcaggagaatcacttgaacccaggaggtggaggttgcagtaggccagatggtgccacggcactccagcctgggtgacagagtgagactctgtctcaaaaaaaataaataaataaaaataaaggaaaaaaagaaagaaaataaatcctctacaaagaaagcaagtctgagttcgtttgggttatcggtatattctgtcttccccgcgaggtggtggccctcttctgc

SEQ ID NO: 486220 - DNA, 433 bp, Homo sapiens
gtaatcctcttaaccattacttggtgaatagtgagttccactaytatccccatttcatagaggagtaaactgaggcacagggagatggactaacttgctcatagtcacgtagttacttaatggtgaggctgggatctgaatacaggcagcctgagaagtggctcttccgtccacctccaacctccttttagccgagggttttgagctcatttcaacacagccactgtgtccagggataccagcaaagaattagatcaatgtcaggctctgacgcacaggcaggctcagtaataacaacagtccacacacacatacgataagttaactcaccgcagcctcacaccgcgccaggaggcaggcactaatattatctcaattttacggatgaggaaaccgaagctcagataggtcagatgactggcccaaggtcaca

SEQ ID NO: 486221 - DNA, 255 bp, Homo sapiens
gtggattatctgttgtcccagcaccatcttttgaagagaatattctttacccattgaataaggatgcatttggcatccttgttgaaaatcaattaaccataggtggatgagtttatttctaaactctctattatatccctttgatctggwgagaaagatatagacctcttatgttcagagttaaaaagaaacccttgggaaacttgctggtgtttcaggacaccctctttgtcacccgctctttggaatacagca

SEQ ID NO: 486222 - DNA, 538 bp, Homo sapiens
tgtgaacctaaaactgctctaaaaataaagtttattaattatttttaaaatagtaatattgccagtgaggaagagcctgcagaaatggagcaactaattaaaggaaggtatttctaatgcccccttttgcaagtattgataatcagataagtccacctgcagatggaaaagtatgtggatatgttgtcttttgctatgtraaaaattaccccagactcagtggcttaaaacaacatatatttattacgtcaccatttctatgggtcaggaatccaggctggattctctgtgaagggtttccaactggctacaattagggtgttagctggcctgcattcattcctgcagctcagggtcctctttagttcctgaaagttgtaggactgaggctctcattctctgctggctgcttgccaggggctgctctcagctcctggaggtttctggggttccttgctacttggccccatccacagcttctctcatgcttagaatctttctttcttcagaaagggcctttaagaatcttacctgacta

SEQ ID NO: 486223 - DNA, 538 bp, Homo sapiens
tgtgaacctaaaactgctctaaaaataaagtttattaattatttttaaaatagtaatattgccagtgaggaagagcctgcagaaatggagcaactaattaaaggaaggtatttctaatgcccccttttgcaagtattgataatcagataagtccacctgcagatggaaaagtatgtggatatgttgtcttttgctatgtgaaaaattaccccagactcagtggcttaaaacaacatatatttattacgtcaccatttctatgggtcaggaatccaggctggattctctgtgaagggtttccaactggctacaattagggtgttagctggcctgcattcattcctgcagctcagggtcctctttagttcctgaaagttgtaggactgaggctctcattctctgctggctgcttgccaggggctgctctcagctcytggaggtttctggggttccttgctacttggccccatccacagcttctctcatgcttagaatctttctttcttcagaaagggcctttaagaatcttacctgacta

SEQ ID NO: 486224 - DNA, 571 bp, Homo sapiens
aaaataaataaataaatgataagaaaattagctttagtgacagataactacatcaccttctctactgggtccaaacactatttgaccctaccatgaatattttttacatcatcagcagactacaaaaacttgttcttggttttcagtgttaagaattaacatatagacattttacggaagatttaattctcmttagcgaacagtgtgctataaactctgccaatgccagggcatgttgagaggcatatgaagcataggtaaagaggaagacaaagggagggggcaggggtgccaagtccctcaccttacccgggagaaaagagataattagtgtggggtggggttcgggcccagggtagggtggcaagagagttttttagtgggtaggacattgcgggtggaaagtgaggtgaatgagggctgggaggccgcaggggacgctgaatggaaaaagcaggttaaagcagggggtgctgagcagaaggggcagagcagagcagagggtgctgggcggaagggtcggggcagggcgagggcagggcgccacctcgtggctggggtgcctgcgcaa

SEQ ID NO: 486225 - DNA, 571 bp, Homo sapiens
aaaataaataaataaatgataagaaaattagctttagtgacagataactacatcaccttctctactgggtccaaacactatttgaccctaccatgaatattttttacatcatcagcagactacaaaaacttgttcttggttttcagtgttaagaattaacatatagacattttacggaagatttaattctcattagcgaacagtgtgctataaactctgccartgccagggcatgttgagaggcatatgaagcataggtaaagaggaagacaaagggagggggcaggggtgccaagtccctcaccttacccgggagaaaagagataattagtgtggggtggggttcgggcccagggtagggtggcaagagagttttttagtgggtaggacattgcgggtggaaagtgaggtgaatgagggctgggaggccgcaggggacgctgaatggaaaaagcaggttaaagcagggggtgctgagcagaaggggcagagcagagcagagggtgctgggcggaagggtcggggcagggcgagggcagggcgccacctcgtggctggggtgcctgcgcaa

SEQ ID NO: 486226 - DNA, 604 bp, Homo sapiens
acccacaacaaataagctgttatcaattcattaatggctttccaaaacatggtattaagawtatacaaaaataaatctatatttagataaaatatttagcattgaaccacacaaaatatattcctcaaaattaaaactgacagccttgctcatatattcttttgtaagaaaaatgtaaatatcatagacaaatagactgaatatttaaaaggcagtagggttacccatgaagctaatgacatagctacaaagcatcttaaaactttatactcatcctactgaacaatcttctaggtctttgctgagttctttctcattcttcaggattcagttaaagtgtcacattctcaaggagccttttcctaataacctctggcccctgtagcaatccttatctgcatatgatcccttattgcattatgtaattacttgtttagtcttagcatctccactttgataaaaacggttttctcttccttcttcagcattattttccagtgcctagaactgtctctggcaggtaggaagtactatacaaatacttgttgaaagaatgaatggatagacaatgttaagctcacttagaaaacctgaggccaggttt

SEQ ID NO: 486227 - DNA, 604 bp, Homo sapiens
acccacaacaaataagctgttatcaattcattaatggctttccaaaacatggtattaagaatatacaaaaataaatctatatttagataaaatatttagcattgaaccacacaaaatatattcctcaaaattaaaactgacagccttgctcatatattcttttgtaagaaaaatgtaaatatcatagacaaatagactgaatatttaaaaggcagtaggkttacccatgaagctaatgacatagctacaaagcatcttaaaactttatactcatcctactgaacaatcttctaggtctttgctgagttctttctcattcttcaggattcagttaaagtgtcacattctcaaggagccttttcctaataacctctggcccctgtagcaatccttatctgcatatgatcccttattgcattatgtaattacttgtttagtcttagcatctccactttgataaaaacggttttctcttccttcttcagcattattttccagtgcctagaactgtctctggcaggtaggaagtactatacaaatacttgttgaaagaatgaatggatagacaatgttaagctcacttagaaaacctgaggccaggttt

SEQ ID NO: 486228 - DNA, 594 bp, Homo sapiens
tcccaaacaagtatgttattgggccttgtgtctgagaacgcagtacagtaacacagttgtgaagttttatcgaagtagctgaagcctgctacaaattttatgtcctgcaaagtgatagcattttgtttatttttataaggaagaagggtgtcatttctatgtcctcaggagggaaagtaataagtaacatgggagacatttggttggcttaggcccaggaaataaaagttcagaggccttgattggcagggccttttactgttggtcactcttaagccctagatccctaaactagagctctgagctggcagaacaaatggttctgtgtttccagaattccagtcttttattttctctctggcgaggtagattgctttctgtaagaggagmttattcatttgaattaggccttctcaccatgtcttcattaaaaatagatagagtccatgttacatgacatccatccatagtctagtgtcctagacattgtaatggcataactatatttaaaattgaactttactctcagaaatcttcattgcagtgaagaggtttttgctttgtccctctaacatatatctagtctgaaaactt

SEQ ID NO: 486229 - DNA, 562 bp, Homo sapiens
gttaccattctttttttttttttttttttttttttttggagagagggagtttcggtttcactcctgttgcccaggccaaagtgcaatggcgtgatctcggyttactgcaacctccacctcccgggttcaagtgattctcctgcctcaccctcccaagtagctgggattacagccatgcaccaccacgcctggctaattttgtatttttggaaaaaacggggtttctccatgtgggtcaggctggtctcgaactcccaacctcaggtaatccacccacctcaacctcccaaagtgctgggattacaggagtgagccactgcacctggcctatgttattattattgtagatttaagctatttgtttaaaaatagagcaaaaaataactgaaccaaaaaaaaaaaaggcctctgtgtcaataaatgagtagctatacatcactcagaggaggacttaaacttgtttgatttaaatgtttcttcttgaattgtgtgattttaactgaaattttatcatacaattgtaacatgaaagatcattaagtccactaaaacagtgttttaa

SEQ ID NO: 486230 - DNA, 562 bp, Homo sapiens
gttaccattctttttttttttttttttttttttttttggagagagggagtttcggtttcactcctgttgcccaggccaaagtgcaatggcgtgatctcggtttactgcaacctccacctcccgggttcaagtgattctcctgcctcaccctcccaagtagctgggattacagccatgcaccaccacgcctggctaattttgtatttttggaaaaaacggggtttctccatgtgggtcaggctggtctcgaactcccaacctcaggtaatccacccacctcaacctcccaaagtgctgggattacaggagtgagccactgcacctggcctatgttattattmttgtagatttaagctatttgtttaaaaatagagcaaaaaataactgaaccaaaaaaaaaaaaggcctctgtgtcaataaatgagtagctatacatcactcagaggaggacttaaacttgtttgatttaaatgtttcttcttgaattgtgtgattttaactgaaattttatcatacaattgtaacatgaaagatcattaagtccactaaaacagtgttttaa

SEQ ID NO: 486231 - DNA, 562 bp, Homo sapiens
gttaccattctttttttttttttttttttttttttttggagagagggagtttcggtttcactcctgttgcccaggccaaagtgcaatggcgtgatctcggtttactgcaacctccacctcccgggttcaagtgattctcctgcctcaccctcccaagtagctgggattacagccatgcaccaccacgcctggctaattttgtatttttggaaaaaacggggtttctccatgtgggtcaggctggtctcgaactcccaacctcaggtaatccacccacctcaacctcccaaagtgctgggattacaggagtgagccactgcacctggcctatgttattattattgtagatttaagctatttgtttaaaaatagagcaaaaaataactgaaccaaaaaaaaaaaaggcctctgtgtcaataaatgagtagctatacatcactcagaggaggacttaaacttgtttgatttaaatgtttcttcttgaattgkgtgattttaactgaaattttatcatacaattgtaacatgaaagatcattaagtccactaaaacagtgttttaa

SEQ ID NO: 486232 - DNA, 597 bp, Homo sapiens
caaatggacagaagcagattcaacccttgatgctttgtaagaacaagtcgataatagactaagtgactagggacaaaagtgcaattgaaggccctaggtctacacccatttcccacccacccgtcttcccacccctggctctgtcctgttcccccagggtcctcagcctcagagcctacatgtggactcttagcctgaaagtccaaacaacttctccccacgtcgtcatgcctatcccttgatcacaaatgtatttgagttccaggtgcacaatgggaatgcatcagtgaaagatcattctatgccttaaatgggggtggactgtgagctttagggcagagaattccagggacttggttatgtgaaacttggtctagaagcaaccaaaattcttatcrgcctgtcccttggagagggttgtgatgagagagatgagaagaaagccggagtggactctttgacactgtgcttttcaaacactcatgtgcatacaatcaccattaaaatacagatggtgattcagaagggctgagcttttgtatttctgacaagctttcagatgaagctgcacgttgatgaagctgactgcacttgagt

SEQ ID NO: 486233 - DNA, 212 bp, Homo sapiens
aagttgttaaagataagaggcctcgattaggaatctttagacctagcacatctccttaatatggcagaaaaaagtaaaawagactttaaagatgaaaataatggtgaaaagaaaaggtttgggcagttatgcctgaataaaatctagatgagctgctaataaaagtattagctattttggccctttgactttgtccaaatcctttaaaaacg

SEQ ID NO: 486234 - DNA, 515 bp, Homo sapiens
tttttaaacacagaacagccctgcacgggcatattatttggataaattagatctgcaaacacactttagctwtgctgatgaaaataatttagaataaagaaggtaaccatgcctcacatgttgattcaacaccttataacatctttctttttttttgagaccagttattgctcccaggctggagtgcagtggcatgatcatagctcgctgtcatcttaaactcctgggctccagccatcctcccacctcagcctcccaagtatttaggactacaggtgtgcaccaccacaccaggctaatttttaaatttcttttatgtagagacaggatgtcactacgttcagctcaggccggtctcgactcctggtctcaactgaatctcccaccttggcctcccaaagtgctgggattacaggcatgagccactgtacccagactaatttataacatctttattggtctcagttacttgaatgtcatatacatgtttttagctacgtttttaaacacagagg

SEQ ID NO: 486235 - DNA, 597 bp, Homo sapiens
ttatagatttaaatgactgcaaatcagattaactgtacaaatgaaagcatacaccccaagaattttcagaatttgaaactcrtcccgaaatcatttgcacacattatctcattctggtttcacaatctccctacaggttgggcagtgtaagttcacccctaccatgtgctaggggaactgaggttaaggagcttgcccaataccacagggtgatttgtgcagccttggagtagtggctaaaactggggccagtcccccttacaacacaaggagagctgtgatgccagggttcttgaagaagttaagtgtggcacaatgatgaatgtggtatgaccatgatatacactatttcttgacagtgaatgctttgctgttacatgctgcagagtgggctctgggcagaaatggactgtttccaatctcacccttcctgtttccaatatcataaatgcaagcatggggcagacacactcaactatgatcaggtccacattttttcaccttgtgagtttcaataatagacttctctgtaatacacatggcaggcatggcaggctactttgtactgtccagcaactacagaaaaactggtcattc

SEQ ID NO: 486236 - DNA, 624 bp, Homo sapiens
tgtgtatgatcctcaaatttcccctgcagacttaattgttatctatgagcttctctcaagccttgtgatgtccacctctgaaatccttagtactttagtaactttgctggtgcagcgtctggggcaagggtctttgatgctgacaagaagttagaactgtcttgtctattcaggtagaaaaagaagctagcactcatttgtaacaggcgaaaacagggatagtgggcatggatatgcggggaaagcaggcttaaaaatgcaaaaaggaagaamccttctctctgacacttaatgagagaaggctcatgtaaaataatatctaaaggagcctctgggattctccagagttgtgaaatacagttgctgaagctgggaagattgcagaggaattttttaccttccttttccctccctcccatgttttcttttaaactcctaaagtggaactgcttagaatatttcctacacagctcaatatcttatcatgaaggtgagagactagaaaatcttttggcagcccccaaactgcctcaccctcatgaaagaggatagaatttgatatttttaatgcttttccaattgaaaaactgtatgcttgttacaggctttctgataccttataac

SEQ ID NO: 486237 - DNA, 532 bp, Homo sapiens
ccttaagtgataaaaaaaagagaacacttttaagtagtagtgaattcttaataaaattaggtagcatggagtctgcaccaattccaaaaagcaatgtaaaacaaaacacttattacatattgcttttaagttgtaggagaaaaatgggtttgtactagagttacaaatgtacaagagcacagatggatgattctgttcctatcaggtatgggaagacaataaaagacatgacagagaaaggtgatttgtgttggattctgaagagctgggtagagttttgacaggaaaactttcaagataagggggtttgtrcacacagaaaaacatccgaaagcctgtagcacagaacatatttagacagcttgaccagggcatgtgcacttacaggaggtagcacgtgacaagggaaaggatgaagaggtgcttctctgagaacttaattctcccccttgagcttcagtttcttcgtggagtctaaattttcctatcttggacacacaattaacatctgcccaaaagtggtgaccctcag

SEQ ID NO: 486238 - DNA, 437 bp, Homo sapiens
atatttgtttagatgccataacagaggtgtctgtgcaatgctgggagacccaggggaaatattcactgcctagggtatgtcttgatgaatgaacaggaggtggtggggaagagaaggaggtttcagagaytggggagtcaatactcaaatatgtgaggcaaatatgtttgtattgagaacatggggtgattcatggtggctgggggagagaaaggagctatgctgtgtaagaataaatgccaggcttgtaggactggaagatcctaagcagcctgaagggttctgaacaaccccgtgaaggagttgggatttgtggtggtgcaaaaggatccataccagatgtttaagaaggaggcaagaaccagatttctgaattggaactattgctgtgtccacacagatctgtttgtaattatgttcataatagcattgtttat

SEQ ID NO: 486239 - DNA, 597 bp, Homo sapiens
ctacgttttcctggaaggcaaagacacctccattttaaagttagttttaaaacatgaaatcattgttctttgaaacagccatctggtcaaagacccctttgtagagtacatttttaaacaacaatttttaaaaaccactaggagctttgtaaatattttctttatctgggttatgaattattttcagccttttgagtaattgttaaaatgatgaaacttactggaataaaacagatgtctgttttttgttttgtttttaggggaaagaggaaaatgtcattgggatattgagatttacttggtaccttgacagtgaaatctgaataaatggttgttagtgtccttcttagcaatccatttatcatccttttttttctctctgtaatgccagaatataagcttcatgagaatagcaaccttatctctgttcatcgctatgtacccctaagggcctagcacaatgcctggcacatagcttctcaagacatgtttatcaaacaaataaatcaagaaatgaataccataggaacattatacagaaygacttttcatgtaatcagttacataattcatttgtccttccattttcttctacag

SEQ ID NO: 486240 - DNA, 635 bp, Homo sapiens
cacttacagtaaatgtgttttgcaatgctcttatatttaaaaatattttctacaaatttttaattcttatttaattttctattcatgttttattatcatttgctctttgctatatcaagagaaggaaataacagatcaaatatcaaatcaactgaggtccaaaaaactcgtccctttggcaatgaatcatggtactttgagacaayaggcaacggtcaacctccaatttgaatggttgttgcattgatctttgaggatgctatagaaagataaggaaaaaagtatttataatatatataaaatatatatatatatacacatgcacacacacacacacacacacacatatattttttgagacaagatcttgctctgttgccaggctgtggtacagtggcactatcacagcttatttgcagcctctaactcctgggctcaagccatcctcctgcctcagcctcccaaagtgataggattacatgagccactgtgtctgaccaaggaaaagtattttaaataaatgagggatactaagctaattcaaccattggcgaacactttattctgtcatgcattcattgcaaattattaccaaacaccagcgctgtgcttaggttctaagaggaacatgtccc

SEQ ID NO: 486241 - DNA, 450 bp, Homo sapiens
aacaaaatttacttttatattttaaaaagactatatgcattcagtataggagaggcctggttttataggaggtcacgtgcrcaggacctaaaggcagtggaaataataaatgataaaagtgtttgaattttgtatatttttcttatatatttaccttatgtttggcattgtgttaagcaagctcttcacatatataatccatttttcattataataagcctcaagttgatattataatccccattttataggtaggttaacagattcagaaaggttgcctcatgcaatgtcacataagataataaatggcacaaaatggatttgagcaggtgttcatggtctttaatatatcctgaattttactcatcttacattagcaaatatttattgtccagaaaacaggcaaaagttccaccaatatcttttcttgcatctggagatttgtgatca

SEQ ID NO: 486242 - DNA, 584 bp, Homo sapiens
actatgatgttagtctgaatatgcagataatgtaaaacaggaagaaatatgaatatattttttgccagaatcaggattcagacatctgagcaaactagaaggatgggcccagactaacacaatgaaatataataatgctaaacaaaatttacttttatattttaaaaagactatatgcattcagtataggagaggcctggttttataggaggtcacgtgcacaggacctaaaggcagtggaaataataaatgataaaagtgtttgaattttgtatatttttcttatatatttaccttatstttggcattgtgttaagcaagctcttcacatatataatccatttttcattataataagcctcaagttgatattataatccccattttataggtaggttaacagattcagaaaggttgcctcatgcaatgtcacataagataataaatggcacaaaatggatttgagcaggtgttcatggtctttaatatatcctgaattttactcatcttacattagcaaatatttattgtccagaaaacaggcaaaagttccaccaatatcttttcttgcatctggagatttg

SEQ ID NO: 486243 - DNA, 519 bp, Homo sapiens
tcaggattcagacatctgagcaaactagaaggatgggcccagactaacacaatgaaatataataatgctaaacaaaatttacttttatattttaaaaagactatatgcattcagtataggagaggcctggttttataggaggtcacgtgcacaggacctaaaggcagtggaaataataaatgataaaagtgtttgaattttgtatatttttcttatatatttaccttatgtttggcattgtgttaagcaagctcttcacatatataatccatttttcattataataagcctcaagttgatattataatccccattttataggtaggttaacagattcagaaaggttgcctcakgcaatgtcacataagataataaatggcacaaaatggatttgagcaggtgttcatggtctttaatatatcctgaattttactcatcttacattagcaaatatttattgtccagaaaacaggcaaaagttccaccaatatcttttcttgcatctggagatttgtgatc

SEQ ID NO: 486244 - DNA, 450 bp, Homo sapiens
aacaaaatttacttttatattttaaaaagactatatgcattcagtataggagaggcctggttttataggaggtcacgtgcacaggacctaaaggcagtggaaataataaatgataaaagtgtttgaattttgtatatttttcttatatatttaccttatgtttggcattgtgttaagcaagctcttcacatatataatccatttttcattataataagcctcaagttgatattataatccccattttataggtaggttaacagattcagaaaggttgcctcatgcartgtcacataagataataaatggcacaaaatggatttgagcaggtgttcatggtctttaatatatcctgaattttactcatcttacattagcaaatatttattgtccagaaaacaggcaaaagttccaccaatatcttttcttgcatctggagatttgtgatca

SEQ ID NO: 486245 - DNA, 642 bp, Homo sapiens
actataatctgacatttataaatatttaatggtataagtaaatgaccatgatataacagtaagtgaaaaagcatgacacaagataatagagaactagagaggaatagagggtgggagggagagaaatagaacctcaactatctgaaaaataggtacaatgaaagggtataagaaaataaggttatggtcccgttccaagatgaccgaatagtaacagctctggtctgcagctcccagcgtgatctactcagaagatgggtgatttctgcttttccaactgaggtacctggtttatctcactgcgaccagttggacagtgagtgcagcccacagaggacgagccaaagcagggtagggcatcacctcacctggggttggggaatttccctttcctagccaagggaagccgtgacagactrtacctggaaaaatgggacattcccgactaaatactgtgcttttccaatggtcttagcaaatggcacaccaggagattatatcccacgcctggctcagcaggtcccacacccacggagccttgctcactgctagtacagcagtctgagattgacttgccaggcagcagcctagcagggggaggggtgtcccccattgctgaaacttgagtaggtaaacagagca

SEQ ID NO: 486246 - DNA, 628 bp, Homo sapiens
tttagaatctcctgagtctctgctgytctgatgaaggcatgtaaactagtactgagcttggctgcagtgtggcagactcactactattctctctagaaaacctttttattctttattattttcagtgtgttttcataagctgctctcaaataatactgtcttcaaaaatcccatttgaatatttggtaggggagttagttgtacttaattttctttcctgtcgattctttaaatggcttgctttgtggttttactaagtatttttgtattatgagtcactctgagcaactgactgggaatgtaggaagacgtcttcttttgctattttaatttactgtgtgattgaccctgggccagtcattgaacctaatcaagtaacttcattcattgctaaataaagataaaaggcagcctcaaaaaatgggttaaaattagattctgttacctaatgacttactgtgttaataactgactcacacaaattttaattagctttttcctataacattttcatttggaaaaactctcctttattatcctttcctagttgtaccccttttatacttctctagtccatcctctcttacctctccatttgcttatttaactttactgctaagtttcagtg

SEQ ID NO: 486247 - DNA, 628 bp, Homo sapiens
tttagaatctcctgagtctctgctgctctgatgaaggcatgtaaactagtactgagcttggctgcagtgtggcagactcactactattctctctagaaaacctttttattctttattattttcagtgtgttttcataagctgctctcaaataatactgtcttcaaaaatcccatttgaatatttggtaggggagttagttgtacttaattttctttcctgtcgattctttaaatggcttgctttgtggttttactaagtatttttgtattatgagtcactctgagcaactgactgggaatgtaggaagacgtcttcttttgctattttaatttactgtgtgattgaccctgggccagtcattgaacctaatcaagtaacttcattcattgctaaataaagawaaaaggcagcctcaaaaaatgggttaaaattagattctgttacctaatgacttactgtgttaataactgactcacacaaattttaattagctttttcctataacattttcatttggaaaaactctcctttattatcctttcctagttgtaccccttttatacttctctagtccatcctctcttacctctccatttgcttatttaactttactgctaagtttcagtg

SEQ ID NO: 486248 - DNA, 628 bp, Homo sapiens
tttagaatctcctgagtctctgctgctctgatgaaggcatgtaaactagtactgagcttggctgcagtgtggcagactcactactattctctctagaaaacctttttattctttattattttcagtgtgttttcataagctgctctcaaataatactgtcttcaaaaatcccatttgaatatttggtaggggagttagttgtacttaattttctttcctgtcgattctttaaatggcttgctttgtggttttactaagtatttttgtattatgagtcactctgagcaactgactgggaatgtaggaagacgtcttcttttgctattttaatttactgtgtgattgaccctgggccagtcattgaacctaatcaagtaacttcattcattgctaaataaagataaaaggcagcctcaaaaaatgggttaaaattagattctgttacctaatgacttactgtgttaataactgactcacacaaattttaattagctttttcctataacattttcwtttggaaaaactctcctttattatcctttcctagttgtaccccttttatacttctctagtccatcctctcttacctctccatttgcttatttaactttactgctaagtttcagtg

SEQ ID NO: 486249 - DNA, 611 bp, Homo sapiens
tgctgctgctgctgctgctactgctgctgtgcctgtacgtgctctccccacaccgtgctggcagcrgaagcacccaagctgctctcagtgctgcctggaggtgcccagattctgagttccatgtttcagtctgcatcaattctcaattctcaattaatgaaaactcaattcacctgacatgaggcgtttctaagggcagctacccttagctctatatccccaatctcaaaactggattgttttaaataaattttagggactgcctttttctgttagcaaaaagtcacctacttcattatttgtgataatttgcttgtatggtcctagcacattttcagtgtcaacaatgtaatgaaacaaactacagtgattataataaaatgtattttatacaaccccatcaaaaaaacaactgggcaaagcaaatgtggaaggtagacacaggcagtaacaaccctataggggcatttagagttccaatactttgcagatttctgtatgcaattttctatgtcttgtggtcaccaatttattcctgagaatggttaacatgggttcggcttccaaagtgttttccctagacactcagctatcactatttattgatgata

SEQ ID NO: 486250 - DNA, 608 bp, Homo sapiens
aaggcccttgatgtggggcagaattaatctgacasgcttctcctgctgaacctgatattacactccagacacagactctcccaccagcctcctttcccagggctgcccatcaaggctgtggctcagtgaaacttcggggatcatttgcaatagaattagagttgaatttgcatgtgagggtggttttcttttttcatttgcaaggactcgttcccagtcaagtgtccaaacacattttatcaggacctggaggaggctgagcagacagaggcatgatggaagccgctggaaggaggcagagcttggcaaatgggaacttctgctttgatttaagcagagttgggtgagggagagatgtaacaacactaaggcaggatgagaaatgagccaagcagagtcgttccagtttcctgagcacttactacgtgctggtgccacactgggtgagggaggcagacgccattcaggagcaagggaaaagacaactgaagaagcctttggaactatgagccgttatcctcagaagggcccaactggggacaggcctcatccttcacctcccaggtaaagaaactgaggcacagagacaataaattaaatgtagccag

SEQ ID NO: 486251 - DNA, 337 bp, Homo sapiens
tttatgaagggcctgagtagctagcaggtttttatcaggagccctgctgggggcttagacaccaaaagagaagwctcatcctctgtagttcttcttgtgaatgtccttttagaaaaacaattagaaccaaccacaagcaccaaagtcctaatgggatctcctgcgagcacatatcaagcaggattgttgctatttctcctcactggctctttggacagactgtgtgagctcctggagggttccactgtatctaccctttgacactgaccagttggcacatggtgacatattccaatgtgttgattgcaaatgtgaacgtacagccagtgctgtgtgc

SEQ ID NO: 486252 - DNA, 337 bp, Homo sapiens
tttatgaagggcctgagtagctagcaggtttttatcaggagccctgctgggggcttagacaccaaaagagaagactcatcctctgtagttcttcttgtgaatgtccttttagaaaaacaattagaaccaaccacaagcaccaaagtcctaatgggatctcctgcgagcacatatcaagcaggattgttgctatttctcctcactggctctttggacagactgtgtgagctcctggagggttccactgtatctaccctttgacactgaccagttggcacatggtgacwtattccaatgtgttgattgcaaatgtgaacgtacagccagtgctgtgtgc

SEQ ID NO: 486253 - DNA, 531 bp, Homo sapiens
atacctattgaatgaatcagtgaatgaatgaatgaatgtagcctccatgtagcctcctccccagggtcctttctctgggcctttgtagcacagagctctgagtaatggctccagtggggtgggcaggggccaggctaaagttctccagagagaagggtcaacagcacatccaggagcttcccagggtaaacactgacacaatgcccacagtgagcacggaagactcttttgtctcatctgccctctgtctgtggttcatgtgccytggggctgctaggatgctgtgctgttgccagggaaccacctcactgagcatccaggaaaggaggacctacagtcaccgggggtcagaggcccagtcctgctccctgctgctgagaggaccctgcggggatttgtgatgggatcaaatgagccctcacctggaccatcccttgtactaactgagagctttgtccagtgcccaatacagtttacgcacgggatgaaattagaagcccaggttctcctagaaagaaacaatggctgcca

SEQ ID NO: 486254 - DNA, 511 bp, Homo sapiens
actcgagctaggctgctctaaacttgtacaaacagaattacaaatcagagtgccaatttatctgtagggtttgtttaagcagttcaratctgaaagactgctggcagagccctgaactggactgagaacaaacgtttttatgagccatcatcatccacctccacaaagtgcctgccttactctagggtttttctcagccaaatctactcatctgatcaggatgccctcttgcctggacaatgtcagaggaacaaggaaaacaactgagctttccagctcttccttttcaacattccatgttagtcaccaaaaagtaacacataatggaaattctctagattacagcttatttcctgtttagtgcattctgtgttgatgtcgtcctttaacagtgaggtagctcagggcatccttagagagactgaagtgttcttggtctgatatctgataccagcaacacatttctttctttttttttttttttgagatggagtctcactctttggcccag

SEQ ID NO: 486255 - DNA, 538 bp, Homo sapiens
aagaggttaatttagcaaaatagagtatttcataaaatgtactgactactgtatacattactaagttgctctttgaaaacatggtctgggcctgaggtgaggcaaacttaggtttatggcaattcatggatgacagattcataatagaccctcaaagatagctaatggtattttgggggatacattctgatctttcagagattaatgtcatgaaagaccacaaagcctgggccatgtgtcagaaaaacaccaggctggatgccctctgggtcagccgacctgtgggtcacgacccttgggctggtcaacagcagcraacaagcaccctctaatgggaaccatgaaactagcccttcagtaagtttgtggcaattgaggggcaaataaaacaatgaaacaaagctttcagttatccaaaagtagttccctagtgcttttcatgccctccttcatttttcaatacaatgaggaatatttgtgaagaataagaatatctagatttctgtcaggagaattaaattagaattttaattaatag

SEQ ID NO: 486256 - DNA, 537 bp, Homo sapiens
ctcaggctggaggaaggggaaaaggccctgggaggatgagtggcagatggtgggcatgcctcgcaggctgagccgctggcccttcttccctgacagatacaatctgtggggagagaagaccagagtaattgagaagaatgtcaattttttttttttttgagacagagtctcactgtgtctcccaggctgcagtgcagtggcaccatctcagctcgctgcaacctctgcctcccgggttcaagagattctcctgccttagcctcctgactagctgggattacaggcttgcaccaccatgcctggctaatttatgtatttttagtggtgatgggattttgccatgttggctgggctggtctcgaatccctgacctcaggtgatccacccgcctcrgcctcccaaagtgctgggattacaggcatgagccaccacgcccagccaaaaagaatgtcagtttctttccaaacttttgttcttgtacaaatattcttaaatagtactctttttactcaaatagcaagcaccatcagctcaaag

SEQ ID NO: 486257 - DNA, 323 bp, Homo sapiens
gttcctcatcagtttcaccaacacagtgtgttagcaaactttacaacttccgttaatctgataatgtgaaatggcatcttagcattcctcttattatgtgagtttttaaaaatattttcaagatctttttctattttctgtgatttgtctggggaatttgtctttttttttttttaatgttcctcacttataacctttggcaagacacaaaaacaaaaaaccttaaaggaaaagatgaataaatttaacaacattcaaatcacaaacttctrtatataaacaataccatgaaatgttaaaagatataacaggaaaaaaaaaag

SEQ ID NO: 486258 - DNA, 584 bp, Homo sapiens
aacatagagagcggggtggctgttcagtaccacctgcctcggatgggcagactgatgggcaggaatgatcaggccttcactctggcggggtggggyggcggggggtgacacaggaacaaagggctgctgaaggccaggagtggaggctgtggcacccggcctgtgaatgaggggtctgcaccatgacctgtgagatgttccctttaaaatctggccagtagatcacccacggagagaaaaggcagagctttgggccccagggctgccatggtacctgactttaggtcatcacgtgtggtctagtgaataatacccctggagttgtgcagtgcacagcctgagcagcaggtcatggctgtgccagatttgtggcatggcttgtgtcggacaagagctaaaaggaggcagtgaaaggactcttacactgccaggagaatccaggtacaagagaaattgttatcggggcccagagaggatgagatagatcttcagaaggtgaatccagatgggttattaccagttctcaatctctaggggagatttcagttacacagaaaggcatcatttatggtggccccagtcta

SEQ ID NO: 486259 - DNA, 584 bp, Homo sapiens
aacatagagagcggggtggctgttcagtaccacctgcctcggatgggcagactgatgggcaggaatgatcaggccttcactctggcggggtggggcggcggggggtgacacaggaacaaagggctgctgaaggccaggagtggaggctgtggcacccggcctgtgaatgaggggtctgcaccatgacctgtgagatgttccctttaaaatctggccagtagatcacccacggaragaaaaggcagagctttgggccccagggctgccatggtacctgactttaggtcatcacgtgtggtctagtgaataatacccctggagttgtgcagtgcacagcctgagcagcaggtcatggctgtgccagatttgtggcatggcttgtgtcggacaagagctaaaaggaggcagtgaaaggactcttacactgccaggagaatccaggtacaagagaaattgttatcggggcccagagaggatgagatagatcttcagaaggtgaatccagatgggttattaccagttctcaatctctaggggagatttcagttacacagaaaggcatcatttatggtggccccagtcta

SEQ ID NO: 486260 - DNA, 447 bp, Homo sapiens
tggtgtccttgtttgagccaaggatggtgcagctcaawcagagaggttccacctcaagcctgtgaccctgggcctggaaccccttatcccccatttgaggcctctgtgacttgacctgtgtttggaagtccagtgtggcaggacacagaatacgaggacatggctggacagtgtccctgccccagccacttgcctgggccatgtctgggtcagattggccagaagctgtgatgttttctcacatacatcttcatatgttatgagacttcatggctggaggtggcctggttctcctgttctacctgttaagcaggttgggagacagagaccagaccctttcagtcaagggtccctctttgagatccggcatcctttcccctttcaaggacagagtgtgaactttcagagaccatggaggctttagggactggggacttcctggtagga

SEQ ID NO: 486261 - DNA, 589 bp, Homo sapiens
acagacacccaccaccgcacccagctaatttttgtatttttactagagtcccacttttgggaggctgaggttggaggatcgcttgagcccaagagtttgagaccaggcctgggcaacaaagtgggatccagtctctacaaaaactttgccaggcatggtagtgtgcacctgtgaggaggctgaggcaggaggatcccttgagcccaggaggtcaaagctgcagtgttcacaccactgcactctagcctgggtgacagaacaaaactttgtctttgwaaaaaaaaaaatctagggagaactttccatcaagtgtgaaagttgtcagtatcaaaaacggagtggcttacatcaaaccctaacaaaaggaagccatgaagaaaaggccctcgcgcatgactgcgggtaacagaaactgccgggaagggctgtccctgctggaactttccagttaagccacttctgtgaagaccctctcctagcagcagccaataccaccaagaacaaaagccccctcctgagataagcctctgtaaccaacggtctttgtttcaaagcagcttatatgaccttctttttcctctaaaagctt

SEQ ID NO: 486262 - DNA, 636 bp, Homo sapiens
cctgtcttagaatttaaatatgagtctgcctaatttaagatgtcctataaaaacccaaccatcttcccacccttccccaccttgccacatctctgctctggtatctctgctgagagatggtccctcccacacagcagcagcattcaacatgatgaaccccataggtcagtggttctcacttgggaacttcttagaaacgcacattctctggccaagaatcagaagctctaggggtggggcctaggaaactttttttatttttgagacagagttttgctccttcgcccaggctggcgtgcagtggcgtgatctcggctcactgcaacctccaccccccgggttmaagtgaatctcctgcctcagcctcccaagtagctgggattataggcgcccgccaccacacctggttcatttttgtatttttagtagaaacagggtttctccatgttggtcaggctggtcttgaacgcctgaccccaggtgatccgcccgccttggcctcccaaagtgttgggattacaggcgtgagccaccgtgcccggccggaaactgtgttttaactagcccccaggtggttctgtggcattagcactgccacacttaacagagagccattgcaggctcctggccccagtg

SEQ ID NO: 486263 - DNA, 594 bp, Homo sapiens
cagtcttctaaagacactgtctctgggaagaccaatgaaatcgagaaaaagtatcttgaagctgctagcccacctccaacaggacaaagcatgctwccagagggagctttcccatagctccttctaggagctgctatttactgggcattcactgcagaccagaccctggctgggcacttcttacgcctgttctcacctcatctgcctaagagcgctgaagtcaggaactatttgcttcaatttttttttttttttttttttttgagacagagtcttgctctgtcacccaggctgaagggcaatggtgtgatctcagctcactgcaacctctgcctccaaggctcaagcaattctcctgcctcagcctcccaaatagctgggattacaggtgcccgccaccatgcccagctaatttttgtatttttagtagagatggggtttcatcatgttggccaggctggtcttgaactcctgacctcaagtgatccacccacctcagcctccctaagtgctgggattataggcgtgagccaccgcgcccggcctgcttcaattttcaggtgaggaacttaaaagaggaatgaagagaggtta

SEQ ID NO: 486264 - DNA, 594 bp, Homo sapiens
cagtcttctaaagacactgtctctgggaagaccaatgaaatcgagaaaaagtatcttgaagctgctagcccacctccaacaggacaaagcatgcttccagagggagctttcccatagctccttctaggagctgctatttactgggcattcactgcagaccagrccctggctgggcacttcttacgcctgttctcacctcatctgcctaagagcgctgaagtcaggaactatttgcttcaatttttttttttttttttttttttgagacagagtcttgctctgtcacccaggctgaagggcaatggtgtgatctcagctcactgcaacctctgcctccaaggctcaagcaattctcctgcctcagcctcccaaatagctgggattacaggtgcccgccaccatgcccagctaatttttgtatttttagtagagatggggtttcatcatgttggccaggctggtcttgaactcctgacctcaagtgatccacccacctcagcctccctaagtgctgggattataggcgtgagccaccgcgcccggcctgcttcaattttcaggtgaggaacttaaaagaggaatgaagagaggtta

SEQ ID NO: 486265 - DNA, 594 bp, Homo sapiens
cagtcttctaaagacactgtctctgggaagaccaatgaaatcgagaaaaagtatcttgaagctgctagcccacctccaacaggacaaagcatgcttccagagggagctttcccatagctccttctaggagctgctatttactgggcattcactgcagaccagaccctggctgggcacttcttacgcctgttctcacctcatctgcctaagagcgctgaagtcaggaactatttgcttcaatttttttttttttttttttttttgagacagagtcttgctctgtcacccaggctgaagggcaatggtgtgatctcagctcactgcaacytctgcctccaaggctcaagcaattctcctgcctcagcctcccaaatagctgggattacaggtgcccgccaccatgcccagctaatttttgtatttttagtagagatggggtttcatcatgttggccaggctggtcttgaactcctgacctcaagtgatccacccacctcagcctccctaagtgctgggattataggcgtgagccaccgcgcccggcctgcttcaattttcaggtgaggaacttaaaagaggaatgaagagaggtta

SEQ ID NO: 486266 - DNA, 563 bp, Homo sapiens
gctggggctttgggctttagaaagggtcctgagcctccaaggtgtctggagtttctcacaagcatggacagggacrgggaccaaaccaccaggcccactacctcccaagggcacacttgagtattggcagctgaaaattcattctcttagacatgtctctgatgagagggtcaaagtgctgctgacatcgcatgtggttggtttaagcagtgaggacagaacttgggctggctgaacagaggctatcttctcccaccagcagccgcatcctttcttaggccatcaggaataggaatatgagagctccaaggattcgttgtcctgtcccaagagtagggtatagaaactcctttcccgtgggagtagagggaggtgggcgatacccacttctgtagcacaggtcaccaaccatcgtaccatctctccgcgtctccagttaagggatgataaggtcatcgcatcacctgtaacccagtttccagcgccacgttgagcagggtgctgtcagtactactgttagtgggagtagcaatcttgaacgcattttgggccagtttgaagat

SEQ ID NO: 486267 - DNA, 563 bp, Homo sapiens
gctggggctttgggctttagaaagggtcctgagcctccaaggtgtctggagtttctcacaagcatggacagggacagggaccaaaccaccaggcccactacctcccaagggcacacttgagtattggcagctgaaaattcattctcttagacatgtctctgatgagagggtcaaagtgctgctgacatcgcatgtggttggtttaagcagtgaggacagaacttgggctggctgaacagaggctatcttctcccaccagcagccgcatcctttcttaggccatcaggaataggaatatgagagctccaaggattcgttgtcctgtcccaagagtagggtatagaaactcctttcccgtgggagtagagggaggtgggcgatacccacttctgtagcacaggtcaccaaccatcrtaccatctctccgcgtctccagttaagggatgataaggtcatcgcatcacctgtaacccagtttccagcgccacgttgagcagggtgctgtcagtactactgttagtgggagtagcaatcttgaacgcattttgggccagtttgaagat

SEQ ID NO: 486268 - DNA, 563 bp, Homo sapiens
gctggggctttgggctttagaaagggtcctgagcctccaaggtgtctggagtttctcacaagcatggacagggacagggaccaaaccaccaggcccactacctcccaagggcacacttgagtattggcagctgaaaattcattctcttagacatgtctctgatgagagggtcaaagtgctgctgacatcgcatgtggttggtttaagcagtgaggacagaacttgggctggctgaacagaggctatcttctcccaccagcagccgcatcctttcttaggccatcaggaataggaatatgagagctccaaggattcgttgtcctgtcccaagagtagggtatagaaactcctttcccgtgggagtagagggaggtgggcgatacccacttctgtagcacaggtcaccaaccatcgtaccatctctccgcgtctccagttaagggatgataaggtcatcgcatcacctgtaacccagkttccagcgccacgttgagcagggtgctgtcagtactactgttagtgggagtagcaatcttgaacgcattttgggccagtttgaagat

SEQ ID NO: 486269 - DNA, 563 bp, Homo sapiens
gctggggctttgggctttagaaagggtcctgagcctccaaggtgtctggagtttctcacaagcatggacagggacagggaccaaaccaccaggcccactacctcccaagggcacacttgagtattggcagctgaaaattcattctcttagacatgtctctgatgagagggtcaaagtgctgctgacatcgcatgtggttggtttaagcagtgaggacagaacttgggctggctgaacagaggctatcttctcccaccagcagccgcatcctttcttaggccatcaggaataggaatatgagagctccaaggattcgttgtcctgtcccaagagtagggtatagaaactcctttcccgtgggagtagagggaggtgggcgatacccacttctgtagcacaggtcaccaaccatcgtaccatctctccgcgtctccagttaagggatgataaggtcatcgcatcacctgtaacccagtttccagsgccacgttgagcagggtgctgtcagtactactgttagtgggagtagcaatcttgaacgcattttgggccagtttgaagat

SEQ ID NO: 486270 - DNA, 600 bp, Homo sapiens
atcctgtaatatgctacaatatgaatgaaacttgagaacattctgctaaatgaagtaagccagtcacaaaaggacaaatatgacatgattccacttacatgaggcatctaaagtaaccatcagaatagaaagtagaatagtggttgccaggagctgggggaaagaggaaatrgggagttcctgttcaatgggtataaagtatcaatcatgaaagatgaaaaagttctagaggtctgctgtacaacattgtgcttatagttagccatgctgtactattcacttaaaaatttaagagggtagctttgtgctttaattagcctctccccctatggaagaacaaacatcaggagtaggcaacagatggcactgaaacgtgaaggtgaggggaagtccatgatgctgccaagactcctgaaagtgattgagaaatgtgtaaagtgaaaagacttgagcagagttcgtcatcaagaatgggaagacaggatgaaagcatgaccatcactagcatttactgagcatttactatgtaccaggtttcatgctaataactacattatcatgacagccccatgaggtatatgtatccccttttacagagta

SEQ ID NO: 486271 - DNA, 258 bp, Homo sapiens
cacttccggacccctcgaccgcccggcaccagcgcgcaagggacccttcagccggagaccagagtccagtcccggtcrcgaggccaccgccgctgcccgcctcgagaagcaccacgcgggctgagccgtcggctagcgggtcactcccgagcctctgtctgcaccgcgccagccccagaccacggacgctgagcctccagcgcgtgccagcctgggccgctgggctctcggggccagcccgcgacgatcccctgagct

SEQ ID NO: 486272 - DNA, 258 bp, Homo sapiens
cacttccggacccctcgaccgcccggcaccagcgcgcaagggacccttcagccggagaccagagtccagtcccggtcacgaggccaccgccgctgcccgcctcgagaagcacmacgcgggctgagccgtcggctagcgggtcactcccgagcctctgtctgcaccgcgccagccccagaccacggacgctgagcctccagcgcgtgccagcctgggccgctgggctctcggggccagcccgcgacgatcccctgagct

SEQ ID NO: 486273 - DNA, 258 bp, Homo sapiens
cacttccggacccctcgaccgcccggcaccagcgcgcaagggacccttcagccggagaccagagtccagtcccggtcacgaggccaccgccgctgcccgcctcgagaagcaccacgcgggctgagccgtcggctagcgggtcactcccgagcctctgtctgcaccgcgccagccccagaccacggacgctgagcctccagcgcgygccagcctgggccgctgggctctcggggccagcccgcgacgatcccctgagct

SEQ ID NO: 486274 - DNA, 258 bp, Homo sapiens
cacttccggacccctcgaccgcccggcaccagcgcgcaagggacccttcagccggagaccagagtccagtcccggtcacgaggccaccgccgctgcccgcctcgagaagcaccacgcgggctgagccgtcggctagcgggtcactcccgagcctctgtctgcaccgcgccagccccagaccacggacgctgagcctccagcgcgtgccagcctgggccgctgggctctcsgggccagcccgcgacgatcccctgagct

SEQ ID NO: 486275 - DNA, 517 bp, Homo sapiens
acttgcagtgttactatggggctaacctgttaaggggcaggctctttgggatttgtcatgactgtaatgctgtgtgtggatgactcagtttgaactttctctatttgaacttctgagaaagcttgcttcttacagggctgtgatattctttcattttagttaacatggccatattacaccttgggattgggtctgcctcccttttctcatyaatgttttttttttttttttcatttggtaataattttattttatttttattctgtcatgtccatttaagttgtataatactttcagatatagaatttgacaaagttcctatggcaaatatgaagctgcataaaatctgcttcctgacccagagagcttggaggttgttgtgattatgattatcttatattatgctcatactacttaaaactcatttgttctttcttagttattataatttcttaggacttttagatcacagattattgtcccattactttgtaatatatgttttgcttttaagaaa

SEQ ID NO: 486276 - DNA, 462 bp, Homo sapiens
tgctgatatacctaggtgagggccacagatggtggctgcattaggccattcttgcattgctataaaagaataccagagactgggtaatttataaggaaaagtggtttattggggctcatagctatgcgggctgtacaggcggcatggcacccgcatctgcttctggtgagggcttccggaaattcccaatcatggcagaaggtgaaggaggagaaggcatatcagatggcgagagtgggagcaagagacagagggaaaggtgccacagtcttttaaacaactagatcttgcatgaattcagagcgagaactcactcattattrtgaggacagcaccaagacattcatgaaggatccactgtcttcacgaaaatacctctcaccaggccccacctccaacaatggggattacatttcaacaagagatttggagggaacaaacatccaactctatcaatggcta

SEQ ID NO: 486277 - DNA, 645 bp, Homo sapiens
agctgatggaaaactattctgaaatcctgtgtgtgaaagtaacctgaaaaataaaatgtgtgagagcaacgtaaggcatttcttttcttatttatggctcatagagcttgcttgaggcatttcrgcatttcccctgcaatgccagcaaatcctaatctaatataaaactcaaaacaattgacaagacagaacagctccagaaacataaggaggccctcgtggttgaagagtaagacaggatttactggcatggctcgtgtattgtgccaaggcataatgctagatcccatcacattgtggggccgtcttagaacagaaatctcagggaaacagagcttcttaccattctagcaaacaccatagttctgttctttgccaaaatgtttttaagttagccttatggcagaagtaaaattgttaaaatatgctgacatattgtgaacattttattaatcaaagagttactattcaggtatttaaggccgtgcatgttgatatggggcaaaaaaatcactgctaggtttagagaaatgcaagaagagggcagctcttcctatgatctgccctgttcttttgccctagttggttgggaaatgatggctatgttggtgcttttaagtaagagaagtagccctgcaaggaact

SEQ ID NO: 486278 - DNA, 614 bp, Homo sapiens
ttcaatttttctgcagcctggctaacacttgctattgtagtcatctcagggggtgtgaaatggtgtcttattgtgagttttctttgcattttccctaaagactaatgatgtcacccatcttttcatgtgcttattgaccatgtggatgttgtctttggagaaatgtctattcagaaccttctcctactttcgaattgagtgatttatctttttattgttgagattttargtatttttctttaaattatttttggagattcctagagaggaggatgccaggttccatccagttaagtcctagctttggagatgaagtgtatgtctattgatttgggtaataattaggtggaaaaacttaacaagcactcactttttgtgccaggcacgttgaaccctttactaatactgcagagagaaagcctttgcctgggccacatgtccctcccttgggtgctcaccaagatcagcaaagcttttcttcggagaatcatccatgtgtttccctgcccccatcaaggaagggagaactttcattaaggtgtagaactagcagaggagaccatctctggtaggtaaagtctccccacgttttaaatatcttgaacaaactagtc

SEQ ID NO: 486279 - DNA, 588 bp, Homo sapiens
gtgcctatctaggaaatcagaggtctatttctaacaatttagttcaataaacttttactatgcacctactaaaagtgcctcagcattttctagggcctagaaaaagagaagagtamaataatccctgtcttcaaggaccttataacctaaagggcagaaaaacccatgtacttatatctttcatgccatttacttacatctttgctccattcacaaaagattttaggtactataaatgacacaaagaaaaacaaaaactgtaataataactgaagtcaagagaaataaaataggaagttaagacaaggtgttaagtagaaatgcaagcatgaagattcttgggtcctcagtggttattaaacttaagtcataatttgatcctaagcttgctggcaggagaagccaaaaagaaaacacaataatttacaaaattttggctactcataaataaaaacacagcgatcccttcttcatgaagtaagattcttcatgacagtttgttttcaaaggaatgtttcaaatcgattttacaaaagggatgccgataggcacaatgatcaatgtcctcaaaaatgtctccagagtaag

SEQ ID NO: 486280 - DNA, 551 bp, Homo sapiens
ctagaggcctcataagaggtttagagaatctatgtgcctgggagaagtggagaggatataacctttatccttagaggtaaagtctagagggcttgaagaccagttggatgaggaagaactataagattatcatacttaacggctgaggtactggtagatggtgagcggtgtaggagaacccaggctcagaggaatgtggrtgttaatttttctttttgaatttggaatttgaggtctatctacctgaaaatttcatgtagctacttagatctattgctctgaatagcaagaaagttctgggatagagataatgaatttaagtcataatgaaatataatgaatctcatttatagaaaacattctatgtgccaggacctgtttacacacacacacacacacacacacacacacgatgttatatattatctttttaaaatcttcagtataattctaggaacaagatattatcttcattttttttttgacaagtaactaaggcttagagaagttgaaaacatgtgcaagcttccacatctaataattagcaggcc

SEQ ID NO: 486281 - DNA, 594 bp, Homo sapiens
  misc_feature (1)...(594): n = A,T,C or G
nnnnnnnnnnnnnnnnnnnnnnnnnnnnnnnnnnnnnnnngacttggccaggactcaagtgtatgtgattgcatttcatctatttgctatctcaacaaatggatcttttccttgagtatttgtagtttgtccttcagcaatgactagatataccaatgactgtagattccagtgaccagaaagagttaatgatgcttttctgtagaatgtttctcatagtagtttaaacatttatagatccaataagcaactgagagttttccacactttttcagatctttggaagttgtctccaaatcctgatccaaagmaaatgaggccatttatcttcccaggggtttccatgccctctcaacacctatctgttaatgggataagtaagggtagtttttacttcttgaaacctgcaggctatcaaatagagaggaaaaaaaaatgggaaggttactgtttcctctgtctaccaggttttattatggaaactgttcgccagataattgggtttaatttgtaacagaggggaagatttgtattgtaaacaagaaagttctttgaagataaatctcatcagtagctgttggaaggatactggag

SEQ ID NO: 486282 - DNA, 610 bp, Homo sapiens
aacagccctctccacccacttctgcatgaaaaaagaaaagaaaagaaaactgataataccatctgcatgcaagcaggaggacaaaccttgtgggtctatttgctgcactccagcatgaacctagagcagccacaaactcctctttaggctctatttcattccgtgaacctaactgatactcccagttattgtacatttggaggaatacacagtgattttattttttaaagattctggcggtgtcacgacatctattggaaaacttttcaagcagagggcttctgaytgatttgcttggggtcatgtggaggtaaaagaaaaagtttaaaaaaataagcacttacaagtggcaaatggcaaatccaaccagcaaaggtgagtgcatttcaaaagcttcctctgtgatgactacacagaaacgtgctatgggcatgtactatgtgcgccaaaataactgccgatggttgcgatatggctatttccaattcatgtgttacaatgctaaacacgctcctgaaacactaccttctgcgagagaggaaactttcacacagagacgaaatgaacaggacaaatatacactgtggtagtactaaaaggaaatttagac

SEQ ID NO: 486283 - DNA, 655 bp, Homo sapiens
tgaaacagccctctccacccacttctgcatgaaaaaagaaaagaaaagaaaactgataataccatctgcatgcaagcaggaggacaaaccttgtgggtctatttgctgcactccagcatgaacctagagcagccacaaactcctctttaggctctatttcattccgtgaacctaactgatactcccagttattgtacatttggaggaatacacagtgattttattttttaaagattctggcggtgtcacgacatctattggaaaacttttcaagcagagggcttctgattgatttgcttggggtcatgtggaggtaaaagaaaaagtttaaaaaaataagcacttacaagtggcaaatggcaaatccaaccagcaaaggtgagtgcatttcaaaagcttcctctgtgatgactacacagaaacgtgctatgggcatgtactatgtgcgccaaaataactgccgatggttgckatatggctatttccaattcatgtgttacaatgctaaacacgctcctgaaacactaccttctgcgagagaggaaactttcacacagagacgaaatgaacaggacaaatatacactgtggtagtactaaaaggaaatttagaccgaataaagcagattgataacacgggtggaaaacatcctcgg

SEQ ID NO: 486284 - DNA, 552 bp, Homo sapiens
ttaacagctcagaactgttttctatgtctaaatttcaggttaacgatatcagccaaaatctatcttctcatacctattctcaaaggaacggtcttacaaaactaataatctggtcgagtgcggtggctcacacctgtaatcccagcactctggaaggcagaggcaggcggatcacctaatgtcaagagttggagaccagcctgaccaacatggtgaaaccccgtctctactaaaaaatacaaaattagctgggcatggtggggcattcctgtaatcccagctacttgggaggctgaggcatgagaatcacttgaactcgggaggcggaggttgcagtgagacaagatagcaccgttgcagtgagacaagatagcaccattgcactccagcctgggcaataagagctaaactccgtctcaaaaacaaacaaacaaamaaaaaaaattcctgctttttctttgcctaaatttttatcaaatattttgaacagaagccacatgtatttctacactacaagaaaagcataagttcagaaataagtaatcatacccc

SEQ ID NO: 486285 - DNA, 601 bp, Homo sapiens
gctgtgggaacatcaccatcatttcrgtagggagaagctgaacttcactatccgtggtttggctcctgttcttcaaaggacttggagttgatcctgtttcctgccctgtcttatccagacattttcatccccctttttctggcctagaccagtaagggaatataccatccatctcctgagaattcaggccactgctggaacctggagaggcagcaaaggagggtgtgtgtgaaaggctgggaggagagttcccatggacactggggacatgtgaaggccctggggagttgctgtgaccctgggtctctgcctagagcagtgaatgctggggagaaaaaaggacatcatctgccaaacaaatttccagtgctgcagagcccctttaggataaacacacagggctgagtaatctagggaagaaacaaaggcctgggatagagtgggatctccctagcacaccctatctttttccatttgcttagcacatactttttcttctcctaaacaagggtgccaggatatactagcattcctaagcttcagtattcatctggaaagggcttccgtttaaccagccccctggaggttagtattgcagtta

SEQ ID NO: 486286 - DNA, 599 bp, Homo sapiens
gctgtagtgagagcctgagcatggtgctagagggagacaagggaagtccaaagaaatatctgaagaactccttcacaaggctctcttctatggagacaaagctcttggcaaggacaaaagtttggtttcagcggcatctctgctacctacccttcaaaccacaggcaaagccaacttggttacatccccatcccagccaataaaccaagcactcagattgattactcccagtgctgccccctggtgtctgaaaagcagcatctcctcccactcagaaactccctcacctattaaayagaagtctatttacagacttctcagatttagaggatcattgtgcactggaaggaaccaaaaaaggtcaccttgctgtggatcctgtcagggcagggccaagctaaatcaccctcagtagactcaaggtctctactgaggcaggctctataaattttttttattaatccattccagtctgacataagatactaagtatttttcagcactaataaattttaattgctattttatcttgttgctaggttttgctgttttgtccaccggaatggccacacacattttgtgtatgtgtgtgtccactg

SEQ ID NO: 486287 - DNA, 473 bp, Homo sapiens
tagggtggacagcagtggagccagttggttcttatctggagctgtgcaagtgcccacccctaagtcctcgcctggcaccctctgaaccactgaaataagctaacatcctcacccccttcttaccagtttcagagttggtggcggcaaccggcatggtgaaggaggcaagggctctgaaacgtctctcctggagaggggagagaggaggatgagcagatacaagggcaaagcaatggggaagggaataggaagagcctccccttcaggacgagccagaaaggtaggggagaaggtgctgcccagaaagtgggggttggagaacaacaatgattccaacrgtcctgggaagcaggaagagcaggtattactcgcctatttctctgaggaggaggagaccagggaggataagggaggttaactgatttgcccaagttcacaaagctaataaggagagctaaaatgaaaatccaggt

SEQ ID NO: 486288 - DNA, 539 bp, Homo sapiens
ccccacgccccacagggatcttctcgttgccctcctcattggggttcacctaccctgggctcaccctgtgcacctctcctctctgaggtgcctgaggacagagcggggaacctcctgcccattccctgccaccccataggggcttcaagccctctgacacctctacttccagctcgcttccctgaggtactggtatggggagatgtggagccctgggaaggggagaagctgccatccamccctccccaaaaatggcctttttccaggccagagccatgtggggggctgtccccaccctcaccagtacagactgtaggagcacccgccatcacccaaggcagactgggaatctgcaggttcttggcagcagacctcagataaagaaacaagcaaagaggtcaagtaatttgtccaaaggcatcacatgggtcagtgtagagctggggcttgaccccaggcagttggcctcaggctccactgcagatgctgcacctcgctttgcaggtactatcattaccttcattttatagatgaagcag

SEQ ID NO: 486289 - DNA, 337 bp, Homo sapiens
tgtcctccgcagcgcgccccctccactgcaaccttctaagagccctggctcaagtctcctgctgggacacaccttccacaactacctggctgggcctacaagccccctgtccccgaccccccaagacccaasccaaagggagcctccagactggagtgcagagaggagggggggaaatgggagtcgggcttccactatgcaggaggggggacccctatctcatgaggccctccaaaggtgctctgcagcacgtggacctcaaaaagtcctccttaggaagaggagaaggagagtcatgactgattcattccgcaaacatggagccagcccgcagcgc

SEQ ID NO: 486290 - DNA, 440 bp, Homo sapiens
tagcagttggcagagtcaggacccagtcgtaggtggtttggctttgaagcccatgstctcacccctgaactctcatacacgggccttgattacctgtgagttgggtgggctcagcttccccacatgacttggaggggcagcacctcatggccagctccaacagcctgggcgccgctagctttggagaaactcctcggagctttcaaggcagtaaagagtgagtgtggagtgtggtgaggagtgaggccactgacaagtacccggggtccccaagggagagatggggggtgggagaagcacacaggtctagagggtttagctagagttgggaaaggactgaggaagtggggccacagaagttgacagaggcaggtgggcaggggcagtcattgcctagaaccaggtctcccccttcccttccccacctctgtccctgtccg

SEQ ID NO: 486291 - DNA, 444 bp, Homo sapiens
tgtgtgaccatgagccagtcccccactgtttctgagcagagtttctgagggtcgagtgtgaaaatgtaagtgctggctccaccccggcttccagagagcgctcaggcaagactcacatgccctggggctagaacctaccctggcatgcaaagcttatcccctgaaccaacatgttggcttgtgtcttcccctctagtctttgatcaagggcagggccacgtcatatttgcggttgttcccagtcttggcactgtgcctgctgcgtggccgtataatccacgaatggctgtggaatggagctacagggagcggcagatgggatccttcacacagcatgtctgcccacgtaggacctgarcatagctgggccccttcagcctctgtcctacccctgcgcccaccctatagccatgcagcacacacacggccagttcccaacgtgtg

SEQ ID NO: 486292 - DNA, 572 bp, Homo sapiens
ctcagtccctctttaactgcgccccgcctcctcccgtaaatatgtaaacccacactgcaagggtggatggagggccatgtggccgggcggcttctgtgctttagctttggagccttaagagggtgagggttgaatacctgtggctttgggtgggtggtttgctttatggggcctctctttcttcctatgccaaaggtactgacctctcccaaggcggtcaggaggactgaatgaaattgtatgagtacagtactgggtacttggtagggactcaatgaatggtggcagtgcttacgatgttttctattttgcatataaggaaactgaagttcagagcaggagagtgacttgctcaagctcacacagctcagagtggttaagctaggatggaagcgtaggtcttctaagtgctctgggatgtgtgttcaacacagccccctcaccccctctaatactggccttgtctgccaccaccccatactacaaatggaaatgacacagagggtgacatcaacwggtccctttttctcgatagccactagatcatggtgctgtgggctgagcagatgatt

SEQ ID NO: 486293 - DNA, 465 bp, Homo sapiens
tgcagctgggatgcactaacaggggggyggagttcttgtctcaaggtggcttgagaatcagggatctgctgacccgtgcagcccagttgccacctctgcaaaggtctggcttggaggaagggactgagctcctacctctccaggaatggtaaggggctggacctgcagcctctagaacctggctctgaaccagtggctcagatcagcaatcagagatgtactttgaatagtaatggcagtcactgtcattctcggtgactcactggaaggatgatcctttgttggaggggcgctaacacgctatttggcacttaaaacagcaagggatgggcattacccatttccctcaaacaactgtgtgagccacgccctcactcgctgtgtagtgcacacagatccgcccagaagaacacggcagagccaccagatgggcactcgggccggactgagcacttctgagggact

SEQ ID NO: 486294 - DNA, 465 bp, Homo sapiens
tgcagctgggatgcactaacaggggggcggagttcttgtctcaaggtggcttgagaatcagggatctgctgacccgtgcagcccagttgccacctctgcaaaggtctggcttggaggaagggactgagctcctacctctccaggaatggtaaggggctggacctgcagcctctagaacctggctctgaaccagtggctcagatcagcaatcagagatgtactttgaatagtaatggcagtcactgtcattctcggtgactcactggaaggatgatcctttgttggaggggcgctaacacgctatttggcacttaaaacagcaagggatgggcattacccatttccctcaaacamctgtgtgagccacgccctcactcgctgtgtagtgcacacagatccgcccagaagaacacggcagagccaccagatgggcactcgggccggactgagcacttctgagggact

SEQ ID NO: 486295 - DNA, 473 bp, Homo sapiens
tagatgcaggaattgtggcataacttagggtatcctaagattatctgagatggctttctactagcctagtgagaaaggaggctaaggtcaaatgtggagaacatttaaaaatgggatttgatgtgtccctgtttgtaagtagaaatttatacctgtgattattacctagccataatgacaaaggaagaaagagaaagaaggaaagaaagaaaaagagaaagagtaaggcaggcttgtgtagttccacatttctcttgagttttaattgtcaagttgctcctcaaaattccacttaaaatctgatgctttctgtttmggaccgaaacctgtgggagcctaactatacaaaagtgaaaactcaaaatggagtccccaaatttaaaaagcagcccagtgaaatcagatcaaatagaagtccatctggtttgccactacatcatgcctgcagttcctctcaggtgtacaaatgcagc

SEQ ID NO: 486296 - DNA, 473 bp, Homo sapiens
tagatgcaggaattgtggcataacttagggtatcctaagattatctgagatggctttctactagcctagtgagaaaggaggctaaggtcaaatgtggagaacatttaaaaatgggatttgatgtgtccctgtttgtaagtagaaatttatacctgtgattattacctagccataatgacaaaggaagaaagagaaagaaggaaagaaagaaaaagagaaagagtaaggcaggcttgtgtagttccacatttctcttgagttttaattgtcaagttgctcctcaaaattccacttaaaatctgatgctttctgtttcggaccsaaacctgtgggagcctaactatacaaaagtgaaaactcaaaatggagtccccaaatttaaaaagcagcccagtgaaatcagatcaaatagaagtccatctggtttgccactacatcatgcctgcagttcctctcaggtgtacaaatgcagc

SEQ ID NO: 486297 - DNA, 530 bp, Homo sapiens
aaattgatttcagttgagtatttcccaaaatgtgacttatgaggcaygtaagatgcttttaggttgtatgtggacaagttttttattgcatcagttatggatatattttaatgagcattgaaaatgttatcccttaaatctacgctgttacggttattatctggttaggaagagaccaagtaaaaacagtgagtcaatttaagggataacactatataaataattgtaccaatggtgcatgacgttggtacaaatcatgagagtggccagggaattactggcatttgtgaaacattgttttagtcttccttttccctcatcccatagcactgtctattcactgttctagggttatataatgaaacagaggtggggtggcagttctgaaatagcagttatgaaatcgtggaaattttggtgctaaataataactgcactagtattattcccggcaatctctaatctccagagatctgggctttgaattgtgttaacaaatcaactgctgtctgccggcaggtcagtgatta

SEQ ID NO: 486298 - DNA, 645 bp, Homo sapiens
gcagtgaagtgaattaattaagtrgggtaggaattgtggcaaaccaaagactacttatttcttctaaaggtatccttcatagacctcagggcactaggagttgctcaattccagggggttggcatatttatataacataggtacaatttcattgtattaattttacttaggatacaagctaagtggtgccctttgagtttataaaataatgtagttttgtgacactatcgctgattttcagtatgtggaaattcaagcttagagttgtcagatcttgcattttttttcaagagaagccacaattctatgtgaaatcttccaatttaattttttgcaagtaattcaagtcaaaaacaactctgtgtgagccaacaaaatatgtctgccggccaaatttgtcctataagcaaagataactgccttccatctacatcctttatgcacaagagaaacgttttcctaactgccctaataagttgagagattgtttttcttacagcaaggattgtacttcacagtataattagaaatactctacctcttgttttgcctgaggcagttctggtttatggctataatcacaatacccagtttgctttagtgtttttcttagatttttcatttttaagcatagtgttatattga

SEQ ID NO: 486299 - DNA, 645 bp, Homo sapiens
gcagtgaagtgaattaattaagtggggtaggaattgtggcaaaccaaagactacttatttcttctaaaggtatccttcatagacctcagggcactaggagttgctcaattccagggggttggcatatttatataacataggtacaatttcattgtattaattttacttaggatacaagctaagtggtgccctttgagtttataaaataatgtagttttgtgacactatcgctgattttcagtatgtggaaattcaagcttagagttgtcagatcttgcattttttttcaagagaagccacaattctatgtgaaatcttccaatttaattttttgcaagtaattcaagtcaaaaacaactctgtgtragccaacaaaatatgtctgccggccaaatttgtcctataagcaaagataactgccttccatctacatcctttatgcacaagagaaacgttttcctaactgccctaataagttgagagattgtttttcttacagcaaggattgtacttcacagtataattagaaatactctacctcttgttttgcctgaggcagttctggtttatggctataatcacaatacccagtttgctttagtgtttttcttagatttttcatttttaagcatagtgttatattga

SEQ ID NO: 486300 - DNA, 645 bp, Homo sapiens
gcagtgaagtgaattaattaagtggggtaggaattgtggcaaaccaaagactacttatttcttctaaaggtatccttcatagacctcagggcactaggagttgctcaattccagggggttggcatatttatataacataggtacaatttcattgtattaattttacttaggatacaagctaagtggtgccctttgagtttataaaataatgtagttttgtgacactatcgctgattttcagtatgtggaaattcaagcttagagttgtcagatcttgcattttttttcaagagaagccacaattctatgtgaaatcttccaatttaattttttgcaagtaattcaagtcaaaaacaactctgtgtgagccaacaaaatatgtctgccggccaaatttgtcctataagcaaagataactgccttccatctacatcctttatgcacaagagaaacgttttcctaactgccctaataagttgagagattrtttttcttacagcaaggattgtacttcacagtataattagaaatactctacctcttgttttgcctgaggcagttctggtttatggctataatcacaatacccagtttgctttagtgtttttcttagatttttcatttttaagcatagtgttatattga

SEQ ID NO: 486301 - DNA, 603 bp, Homo sapiens
gtttatataagacgtaaagagagatgaatgttgagaggcgagcaagggatcgtgcactcgaataatgacaagaggcattcttccattcggtcctccttctacttcatctgtactcagggccttttgatgtggtgtcaggctctgcccgtgtgactcaagcaaggagattacatgtttcactacataatcaaagctacacgtgtcatctggcctaatttaaaagagagcagaaatcatacccctttacatgcagattgatatggtttggctgtgtccccacccaaatctcgagttgtagctcccataattctcacgtgtcatggaagggatccaatgggaggtcattgaatcatggggtgggtttttcctgggctgttctcctgatagtgaagtctcatgagatttgatggttataaaggggagttcccctgccacgtgagatgaccctttgctctttctttgccttctgccatgattttgaggcctccgcagccatgtgwaactgtgagtccattaaacctctttcatttataaattacccagtcttaggtatgtcttttttagcagcgtgagaatggacgaatacacagacattcaaatgta

SEQ ID NO: 486302 - DNA, 543 bp, Homo sapiens
agcagagaagaagtgtgggactgatcgtctgctggaaccagttctctgaatatgatggtttatctggcaaggtttgattccctcaaggaagttccaggctaaaagaggagctaagcttctacagtctctgagctttttgtgttactgatcttgagtcttattaaaaaaaaaaaaaaaaaaaaaaaaaccctgactttatctggccgtgccaggctcccttctgggcccttgctgccgtgtgtcagtacgctgtaactagagatggattatgtaagaaatgtttttgtcrgaagaggctgttgcagtattttatgtgccctggtgcacagcacctctgctgtgagtcccctccccgtgtgagttgcagcctcgctggatacacctgctactggtctcaagcacctgtgatttattggtcatgaagcaggtactgggactcctgcttttattatctgcacggccatccctcagccagtatagatgcccaggctagacttgcagagcatgaagaaggaagcagaaccagtttgggaccttcgcctg

SEQ ID NO: 486303 - DNA, 543 bp, Homo sapiens
agcagagaagaagtgtgggactgatcgtctgctggaaccagttctctgaatatgatggtttatctggcaaggtttgattccctcaaggaagttccaggctaaaagaggagctaagcttctacagtctctgagctttttgtgttactgatcttgagtcttattaaaaaaaaaaaaaaaaaaaaaaaaaccctgactttatctggccgtgccaggctcccttctgggcccttgctgccgtgtgtcagtacgctgtaactagagatggattatgtaagaaatgtttttgtcagaagaggctgttgcagtattttatgtgccctggtgcacagcacctctgctgtgagtcccctccccgtgtgagttgcagcctsgctggatacacctgctactggtctcaagcacctgtgatttattggtcatgaagcaggtactgggactcctgcttttattatctgcacggccatccctcagccagtatagatgcccaggctagacttgcagagcatgaagaaggaagcagaaccagtttgggaccttcgcctg

SEQ ID NO: 486304 - DNA, 400 bp, Homo sapiens
tttgcccttccaaggtagaaggagcccattctctggctccagcctccgctagatgacctgagcacttgcctcctccacaacagcagactgggaaccacagggaggagaaataacgagaactggatacagttgggtttctggttaagtgacttcaatatattaacacagggctgttctaccataacaaacagaagcacgttacaggacggacgctggggacgaaccctggggatgagagggaacactatgtacagcccaaggcgccggcctgcacgggcccgaccyagcccgcggcatggtccccagccctcacccctcagctcctgggctgggaatcattatcatgtatgtgtgtgtgtcttttttttttttgtacaaaatctgcacgcagagcgcccca

SEQ ID NO: 486305 - DNA, 514 bp, Homo sapiens
tgaccccctcccagccaatcgcaagccagatgtcaggaagggggaaaaaaatcgcttctgcttctgttgattccctagttgagactaagtgtgtgctttgaaagtaagacttggatttcttttaaaaaawatatatatatatatatatatgtaagggaactggtttggtggtgaaggaggggtgcatgtccctgagcagggccttgggactcagggaaggagagctgtactaccaggaaatctctcagccccagctaactttgctgtgctgtggccagagccagggctagagaaacccctgtattttcaatctggtttcatgttttatatctgcccccttctaaaattacatcctgatttctccaagggaagaactccctcccagcacaggaggggggtccctagaaatcctgcaggaaatcctgttttgacactccatggagtgagtcccatcactaaactagtatttttttcaccaataattaaaaaaaaatcaaaagtagaaagaaatttc

SEQ ID NO: 486306 - DNA, 485 bp, Homo sapiens
tgtgaccactactcttccccattgtgtatagagtccatgagagaaagcagaccccaatggggatgggtacagggaaagtgttctgtgagggtgggatgggaacaaacatttmagaaagaactttgtgtcttccctctgggctgtgtctatagtttcaaaatgtggtaggaatgaaggggaaaccccaaatattcagccctcctcattagctttcacctaaagtctaataattacatggaaaaaattgagggctgagctatccagataatctccctagttcccccacttccccttgaaagtgttgcgtgacctttattgacagggatgagggtggagtagaaaatggagttagaagtgatatatattggttttagtttctgtgaaattctcagagcctaaagaaacagaactggtaatattggtttggatgacaggcatctagggtttagggttatggttggtgcaagggatgtagacagtttcct

SEQ ID NO: 486307 - DNA, 567 bp, Homo sapiens
gtccctttaaatctcccagctcccgcctcctttggcctacctgagatccaatcagcacagactttttccctttcgccccgccccacctcgaggggagggaaccccaggagacctggccggggcatcacgtgcgcagagcgggtcacgtgggcgcgggaggggtgctgagaggtggagagcgggagccggcggatttcttaatgaagtgtctccgcatgcgtagagggaatgtagggagggaggtggaagcactaggaggaggggaggggtggagagaaaagaggggagggatggggggaggggaaacaggagcgaggtgtctccctagctcgctgcctctggcaagtggagtttttaaaaagctccagcagatcatgtcatgacgacttcgctgctcctgcatccacgctggccggagagccttatgtacgtctatgaggacagcgcggcggagagcggcatcggcggcggcggcggaggaggaggcggcggcacgggcggagcggggggtggctgcagcggagcgakccccggcaaagccccgagcatggatggtctgggcagcag

SEQ ID NO: 486308 - DNA, 607 bp, Homo sapiens
gattttctctaaacttcatccacagtcaaacctcactgcctcatccccgaaggccggcggggcgcgcccgggtgagcaccgcagccgagggtttcagcgccaggccctggaaaggctttctagggcgagatcgccttggagatgtaattactacgtttctagtggtgcatattctcctggagtgtttaatttgattttacttgtgtctcagcgagatccacatttttttttcgggggagggggaagaaaccaccccaggcttaaagttaattaaccagcaaggctttactttccaccgccctcctgcaggctcttgcctcggcgcctcccttcccgatcccggctcgccccagacttggagactgcgtttgcaggcgcgaaaggtcttggggaaccaagcaaaagaagagggaattgytcagagcaagcggacttccccagccgcctttagcgcccttagcccaaactttcccctccagccttcccactcctccaagtcgctttaggggcctacaacttcggctggtcttcttgaggaagaggactatggttccctttctttcttctcgccactaaattttggccgcatagtgctcctaataaatgg

SEQ ID NO: 486309 - DNA, 641 bp, Homo sapiens
ctattaattttatttattgcttggccgccctgcacccagatccttcacgccgttctggttcccactcccgccattctggttcctactcccaaaggctggggacgtgtctttgagtcctggcccgcggaaaacgggtccggcgttgggcctgaccggggagggagccccaagaatggggtgggcgtttcakgccctttgtttctcctggcagccctgcagaaccctgtccacagcgccccactacttccacctgggagcagcacttcacagaaggggaggccaggatctgggttccacttctactacccgcggctggaaaaaggcaggcgtctccacccacccacccccaccagccaggccttaggcaagggggccaacgtcatacaacccagtctagacttggccaggccctgtttgctctcctcgttttaccttgaccttggactccagcagcaggataagcagtttcctagcagagccggctcccagcaagaccctatcttccactgggctcatctctccccgcccctccctcattgccctcaatgcacactcgagctggtctccttatgtcttaactctctttctgttgtatttttcctcctaatgccagcccagcccgcagcctgctttctgaactc

SEQ ID NO: 486310 - DNA, 624 bp, Homo sapiens
gaggcaggaggatcgctgaagctcaggastttgaagttacagtaagctatgatggccccactgcactccagcctgggtgttagagcaagaccctgtttttataaaataaataaaaataaagattagctgtcaaacgtagtaagtctgagaggttcaggccacatgccggcttatcattgatgtttctactcaaataccaccttccctgagagaactttcctcgcccccgctgtaacatctctcgtactaatatgatctcgcacacactaatataatgtgtagcatccattgaagtgatcttgtttgcttatttatttgtcctcacccaaactcaagttgcacaacagaaaggacattgtcttcttggtctcagttgccctagagcctgtagcaatgcttgcctctagtaggttctctataaatatttcttgaaagaagacgttcttcccattgtcaaaaaagataactgtccaaacttagtgttttacagatgagacactgaactttgatgaagaaaaggtgtttgcctggagtggcacagcaaatgagtggcaaggccaaaccacctacaccccaaattcaaaagaatagggggccacaactcagacacacccagtgtatcag

SEQ ID NO: 486311 - DNA, 624 bp, Homo sapiens
gaggcaggaggatcgctgaagctcaggactttgaagttacagtaagctatgatggccccactgcactccagcctgggtgttagagcaagaccctgtttttataaaataaataaaaataaagattagctgtcaaacgtagtaagtctgagaggttcaggccacatgccggcttatcattgatgtttctactcaaataccaccttccctgagagaactttcctcgcccccgctgtaacatctctcgtactaatatgatctcgcacacactaatataatgtgtagcatccattgaagtgatcttgtttgcttatttatttgtcctcacccaaactcaagttgcacaacagaaaggacattgtcttcttggtctcagttgccctagagcctgtagcaatgcttgcctctagtaggttctctatamatatttcttgaaagaagacgttcttcccattgtcaaaaaagataactgtccaaacttagtgttttacagatgagacactgaactttgatgaagaaaaggtgtttgcctggagtggcacagcaaatgagtggcaaggccaaaccacctacaccccaaattcaaaagaatagggggccacaactcagacacacccagtgtatcag

SEQ ID NO: 486312 - DNA, 582 bp, Homo sapiens
ggcaaaatgcccctggtcgatcactctctacttgacctaacattgcgtgctgactttaaaatctaagccctacctaagctgtagctctagtccatatttatgagactcctgtaaagatgccgtagacgtgktgattggggcttacagaaataccatgtgttgacattggggagggagagacaggtagaatctacctgtgacattctcttaaatcattcattcattaaatatttactgagtgcacgtgcaaggcactgaacaaaggcctgggtgcagcaggggaaggcggagatttagtccctgccctcatgaagcttctactccacttctttgtgctcatgaagcatgaagcatctaattatagattaaataaattgcagcaggtgctctatagggaaggtcaggatggcctgaccaagctggttggggggtgaggggccagagaaagtgccattgaacgtgagacctgaaaggtgaccagatgatggggcggagggagcatgagtgtccctagcagaggcgacagcaggcgcaaaggccctgaagcaggaagcctcttaccacatttgatgggctgaaaac

SEQ ID NO: 486313 - DNA, 667 bp, Homo sapiens
ctgccagcagctttgtattcagcactttcctgggtcaccagatagcagggaaacctctccaagatctctgtgtattatagaaaactaggggaattttctttatgcaacatccttatcctaacagtgcagcatctttttgtctccggaactcactgtataaaaagaagtaactattgttgggttgtgcttatctttattgttgtmtgtttgggtttatgttttcaaacaagggatggaggacctggcaatcagtcagaatcatgatgctggcatttaagagattcattctggctcaagagcttggcctggccttccagagctttcccattgacacccatgtgcctgattagagtacacttgtaaaaattaaataagatgacctatgcagtgtgccccacatatgctccataaatgtcagttcacatttcttgttaaacttttataaggttgatcttaagagacgacaattgagtctgtctaagtgaaccatctggggggtgagcatgttgatgtatcttccacagctttagttttccaggaagcacatgggatatagtcaaatcaagagacaggatggtactgatagtttctttagtctcttgcttgcttgcagttaagctagttagcctgaatgcactccttctctcatagcagtctccagagtgac

SEQ ID NO: 486314 - DNA, 627 bp, Homo sapiens
ctgagaaccactgatgtagactaactctccttctggagctggaatcttgagatttctctccgtccctaaggaatcatccagaatctgtttgattaccttgagagatggaagctcataatcattggtcagctgtgaccactggatcattctttcttatgtcagtctgaaatcctcccctgggtcgctgcaccataagagacatcagaacagcagagttatctttaagaattttccaaccacttttaaatatgggaagaggagcagacttattttcatatgcctatggctgtttccttaagcctaccactytggtattttgtaacaagttgctatctctctgaaatttagggatgcttcatggggctgattagcctttattctacttgtgagcccttaactggcctcaaggttgagacagcagggatgtgtgtgtcagtctgtagcaacatctcctctatctcagctgcacccctagaattcttcatttggttgagaacccttagggttgcccttttccatttcagtggggacagtgctggaagaacaagtcagtgtcctccactggcacaggttcttccagactcttggactcagatcccctgcctgccccaggtctccaaaccaaca

SEQ ID NO: 486315 - DNA, 583 bp, Homo sapiens
ctgtgactgcctttggagttcagttgcaatattggctcttgctggcctttgatgggaccatcagctttccctgggtctcctgaatcactctgctgatgttggatttaccagcttccataattgtgtgagctgattccttatatttttctatatatctctacctctatttctatctccatctctccaagtctctatcgcctattggttctgtttctgtagagggccctgatgaatagaatgttttctactgctcttctataccatctgcctttctattcccatgaacttcaaaggccttgtcctgatatgatctatctcttgcactcaggagatccccatttgtcctgggacagcatcaacaggagtggaggtcttgggactgtcacatctagtgaaaatattcacatttactacacagacctttatcctgggagtggtgcccttattagatgatgcaagcaggctgtgaaggactattttcacccctttctattaactacttgaactctgcctcacacagtagtagtgcrctaacaagcttagcccttttcatttattttacatgctttgcagattcttagag

SEQ ID NO: 486316 - DNA, 320 bp, Homo sapiens
tggaggtcagttctcagcagaaatgaagagcttacctactctggtttttagaaaatatatttatttttataccatgtctacattttgaatggagaaaagcagagtcgagagttactttaattggtacaaagaaaacgtcaaagacaatgtattggtctactgatttcttccttgaaaaagctaaaaaatgtcatttcacatttrgaaatgaactctcactttgttctgttttgatcgtatggcttgctttaaagaatatactgtagctactctggtttgtatgtcttacagtggcttttaatattctgaccttacctatt

SEQ ID NO: 486317 - DNA, 643 bp, Homo sapiens
tagcatatataatatacaataacgtgggtgaaagcaaaaagaacacattcatatctgcttataaatggttatagcatgtgtggaacagtacacaattagacaaaatgattgcctctgtgtatggaatataatagtaggggtataggaagggaaggagactaactcttcaatataaactctttcatatcttgcaaattttacatcattgttatacactatttgcacataaaattttaaaaaagaaaacaaaaaggcaaataatcacaagctaaaaagacaatagtttttcatactacattttgcaaagaaaaagtgaaactgatttttttwaaaaaattaagattataggaagagattgtaagagaggtttagaaaaggaaaagtcaagaaagtgctatatagaagaaatccacttttaacctatgtttttatatttaaagaaaaagggtgggaaaacccataacatttaaacattaaccataagaaaattacaattattaaaaacattatcagggacaaagaacaatacttcataatgataaagaagccaaactatcaatgacacataataacctaatgtgtatgcacctaataaccatataaaaatacctgaagcaaaacctgacagaactgaaaagagaaa

SEQ ID NO: 486318 - DNA, 596 bp, Homo sapiens
ccatccagagctgactgccatagaataactgctgtaagtttagtgtccaatgccccacctagagcacttaaaacagttgctagacttcaactcacttaaaacaaggaaaggcagacagtgagataatacaaatgcttaagtaacacctttgtggtgaggaagaagaaaagttyttagttatcccttcctgaatacactgatttgtttttcattactggtttcgaagaaccttggcttccaaacaactggctcctttcatctcaggctccagtgactccagtgactgccttcctgatgaagagagaggtcttacctgaccaacgctctgaagtgaaaggtgttctttatttcagttagagcaagtccccagcccccaagccagggatgggtactggtccgtggcctgttaggaactggactacacagcaagaggtgagtggcaggccagcattaccacctgagctccgcctcctgtcagatcagcagtggcattagattctcacaggagcgtgaaccctattgtgaactgcccaagtgaaggatctagactgtatgctcctgatgagaatctaatgatgtgagatggaacagtttta

SEQ ID NO: 486319 - DNA, 557 bp, Homo sapiens
tgacctcacattcttgttcctagaagaacaagggatgtcttacctggtagcaggcaagagagagcttgtgcagggaaactcctctttataaaactatcagatctcatgagacttattcactatcataaaaacagcatgagaaagacccacccccatgattcaattacctcccactgggtccctcccacagcacgtgggaattgtgggagctacaattggatatttgggtagggacagagccaaaccatatcaccctctctcgtcacctggtcccttaagcaggctgcttatgcctcatgtccctcatgaaaacagctcctccagcctctgcytgtgctcagtggggctcaaacacaagtctgtgggaccaagctggggaccaagagctgagcagataccctgttctatcctccccaaccctgtcttgccttcaactccagccaaatggcactttgcagtatgaggcaacccaactcgtgcatttatcacacatatctgaatcccagtttagactttagctgagttccctggtatgcttgaaaggtgaaagtcccccc

SEQ ID NO: 486320 - DNA, 557 bp, Homo sapiens
tgacctcacattcttgttcctagaagaacaagggatgtcttacctggtagcaggcaagagagagcttgtgcagggaaactcctctttataaaactatcagatctcatgagacttattcactatcataaaaacagcatgagaaagacccacccccatgattcaattacctcccactgggtccctcccacagcacgtgggaattgtgggagctacaattggatatttgggtagggacagagccaaaccatatcaccctctctcgtcacctggtcccttaagcaggctgcttatgcctcatgtccctcatgaaaacagctcctccagcctctgcctgtgctcagtrgggctcaaacacaagtctgtgggaccaagctggggaccaagagctgagcagataccctgttctatcctccccaaccctgtcttgccttcaactccagccaaatggcactttgcagtatgaggcaacccaactcgtgcatttatcacacatatctgaatcccagtttagactttagctgagttccctggtatgcttgaaaggtgaaagtcccccc

SEQ ID NO: 486321 - DNA, 557 bp, Homo sapiens
tgacctcacattcttgttcctagaagaacaagggatgtcttacctggtagcaggcaagagagagcttgtgcagggaaactcctctttataaaactatcagatctcatgagacttattcactatcataaaaacagcatgagaaagacccacccccatgattcaattacctcccactgggtccctcccacagcacgtgggaattgtgggagctacaattggatatttgggtagggacagagccaaaccatatcaccctctctcgtcacctggtcccttaagcaggctgcttatgcctcatgtccctcatgaaaacagctcctccagcctctgcctgtgctcagtggggctcaaacacaagtctgtgggaccaagctggggaccaagagctgagcagataccctgttctatcctccccaaccctgtcttgccttcaactccagccaaatggcactttgcagtatgaggcaacccaactcrtgcatttatcacacatatctgaatcccagtttagactttagctgagttccctggtatgcttgaaaggtgaaagtcccccc

SEQ ID NO: 486322 - DNA, 574 bp, Homo sapiens
ctctacacctgagaaatttgctgcagaagccctaaggmagccagatttcaaagtgcatgctatttgtttttcctctcacctccagccataacgctttgtttgcaacatagtaattgttccacagccagtgattcctccatcataaacacaagaatatgactctgggaatgtagtgagcagtaggagacgacaaattgttcaggcatggcctttccagcaggctggtcctgatgtcagagcctgtgctgccttggtgcttgcctctcacagccctcctcttcctgcccacactagatgctactctcgagcccaggcccaatgcaggctgcagagaaacacccaaatgtctgctcataactcagaaaccactgtccagctttggagcttaccgtggggatcaggaaggtcaatgcccagccctcagcaagaactgccagcttcttttggtatgggcacccaggcctccagcctgtggtacagaatgcacctgtgtgggaatgcatgtgagtgcccgagtctgtgaacattcagcctgctgtgcaggcctcatgagttctgtttggctacctgggct

SEQ ID NO: 486323 - DNA, 574 bp, Homo sapiens
ggggtgcacatgcttggggcagtgctgacatggtagcctcctgccacctcagccccctctggactttgggtgctgaccagcatggaaaggaggtcagggggtgaggggatgagaacagcctggcactggcctgcaggtccccctttgagatgaacagtctgggcaccatgaatggtagcaggaggcagacaggttcctgggaagaagggggtgggtccctggtgaagccccaccttcaaactggggatggcctgaagcctggagaccaggcctctggtccctcagaccacagggggaacttgtggtattttcccctgggccttccaatggccgcccatggtccaatcagcaggcacttgcttctctctgagacccattaaaaaaccctgactcagtcagactggaagaaaggatagagaaataattgggagatgaagagacgacctgcctgcagagaggagcaacccactccagggcctcttcactgctgagagctgcagacaatgggatgatcagaaagggtyatctatgggatggtctaccaatgggatggtagaaaggtctaacaatgttc

SEQ ID NO: 486324 - DNA, 540 bp, Homo sapiens
ggaccccatccatgcactggtcccatttttgtaaataaaattttattaaaatacaaatcattttttcctgtaagtatgacttatgcaacaatcrtgatatacttaaactacaaaaatgttttatggcttatctaaaattcagatttaactgggtgtcctgtattttatctggcaaacctatgcataatctcaaagactaaaatatttactatttggaccttttatagaaaatgtttgccaaaccctggttggaaaggaagaaaactgtctctaaaaattatattatcaatatttccaatcatttaaaactgtgctgtcattaaaggaattcataaaataaataaagcataaatatatttgtcttcgttcagctacaaagattgaaatattatacacaaaattttaacaatatggctattttcaccagttttaaaactttcatctaaccattctaaatgtgagagtatactatattctagagcagcagatcataaacctgcacatcagatcaacctaggatgcttttttaaagaaaagcac

SEQ ID NO: 486325 - DNA, 644 bp, Homo sapiens
tctctaggcctctttttagtttgaacttctgcttctgtcttctctctaggtgattctgataaaattccaagagagataatgtgatttttccagctcatctgttcacactggcaatgtcacggcttgttgattatcctgtgttttacctgctctgaatcagtccttttcctgccccagtttgcagatagagggagtgagtggctttggttatctggcctgattctgataatccactaagcagaagctgcagacaagctgttttcacaaggactcaactaaaggcattgcagatacctaaacaaatccaaaaatagatcaatgttttaaagttttgagatttagttcaatgaggttcagttacctgaaaaatatgctttaggtagaaatacattccattaccattctacaaataaaaccctactctctctatatttcatatcaattcagggttctaataaaatattactaactttattatgcattatgtgtctttttccccaaaattattccgaaagaasttctgtgttcttcctatcctatgttactcacccataagcacatttccattatcgtccttgatattcgagggttggatgtaattgatccatggcctctaccatttcctcctcttctccttattccct

SEQ ID NO: 486326 - DNA, 646 bp, Homo sapiens
tgctttttttccttggcatcctttcctgaaataatgaatcaaaacatttctctctgtaacaagaagtgctttgtgctgatgagaactcaggattgtctgtaggggtatatcccaagacattcatttgaccttaatgaacaaaagtgagctgcttttggatctacctcataaggatgacatgarccttgtagttcaacctaataaaaacaaatagcactccccaaactcccacaaatcattttgtctgccctttaaagagaactcagaagtttccagtgaaaagattccttacagatagtttacaaatctatcacaaaatgcacaacaatttgagaaatgaaagaaaatctaatagttaatacaatgatgagttaagctgaaaatgcttagggtatgaaattatattttttccagtaccatatgcttaataaatccagagttttctggagctatagatgcttgatgcttcagaggaatataaaataacaaactatacatccaaactgcattaatgtgcagtcaacttttgcatatgaactaaatatctaaaaacctggggtgtaattacttataaattaatttgtaggcctgagttgttttatggtccacatcaggaattgtctttgccaacaggggctgataaaaa

SEQ ID NO: 486327 - DNA, 615 bp, Homo sapiens
tagcggtgtgaaagtcatcatataaaatcctaaaaaatccccaagtcctagtgcagtctctccaaacagccaaatgccctttggtccagttcctcactgatgtttctgggcaaccaatcactgcacgtgtgaatcttccacagggtaggagccaaagtggacctccagaaatatgtggagaggatyactgggcctgagaaagttgcttaaatgaggcaatactctgtggttgaatgaactactgatacatttattaaaaatcatttttagtaccttatagctattcctcttccatgagtgaaagataaaatgttagttcagaaagtgctgtaggtgggaagagaaggaagcagtcaatgaaggcaagtgtgaggtgttcccttctcctggtcaaatggcccctacgcatcctttagcctgttctcatcagtctctgtcctcctccttcctctcctagggccattctcccaggactacagtgtttatcactgctcatttaaaatggcaagcatcataaacagcctagtgaaaggttaggtgaatctaggttttgtgggtttcctttattttgtttgtttgtttgttttttctgttggacaatcccaaactctagta

SEQ ID NO: 486328 - DNA, 414 bp, Homo sapiens
tttgaattccagaaagtaaagagctgaggcgggagggtcgcttgagccacaagttcgagaccaggctgacaacatagtaagacacctatctctacaaaaaaactgataaaaattagccagatgaggtggcacgtgcctgtagtcccagctattcaggaggctgaggcaggaggattgcttgagcctgagaggtggaggctgyagtgagccatggtagcaccactgcccttcagcctgggcgacagagcaagatcctgtatcaaaaaaaaaaaaaaaaaaaaaaagggaagatgagggatcagaagggcggaaagacaaggctaatctcatgattcttgaccacatcctagatgcaaatcagttcatcttgatcaaatgtcccctgcgcagatgacgggggtggggctaggggaa

SEQ ID NO: 486329 - DNA, 414 bp, Homo sapiens
tttgaattccagaaagtaaagagctgaggcgggagggtcgcttgagccacaagttcgagaccaggctgacaacatagtaagacacctatctctacaaaaaaactgataaaaattagccagatgaggtggcacgtgcctgtagtcccagctattcaggaggctgaggcaggaggattgcttgagcctgagaggtggaggctgtagtgagccatggtagcaccaytgcccttcagcctgggcgacagagcaagatcctgtatcaaaaaaaaaaaaaaaaaaaaaaagggaagatgagggatcagaagggcggaaagacaaggctaatctcatgattcttgaccacatcctagatgcaaatcagttcatcttgatcaaatgtcccctgcgcagatgacgggggtggggctaggggaa

SEQ ID NO: 486330 - DNA, 651 bp, Homo sapiens
ttttaatttaaattttaagtaccagggtacatgtgcaggatgtacatgtgcaggatgtgtaccgacatccttatctcttaaccgtgcttctttgtgcagccattcctcaggcaactgcacagccacagagctcccttggcctcagaactccaaaaccctcagtttcacattacagtgcagctctggggcggctggagatgattgcttttcacggcaacccatcattgcatgtttgttacgtaggtaacattacacaggtttgttacataggtaaatgtgtgccatggtggtttgctgcacctatcaacccatcacctaggtattaagctgaacatgtgttagctatttatcctaataccctccctcccctgacccaccccccgacaggccccagtgtgtgttkttcccctcttgtgtccatgtgttctcattgttcagctcccacttataagtgagtatatgcagtgtacacacatatcttattgattccttaaaatatatattccttaaaatataattccttaaatatacttctctctgtgtgtatacatattcctaataattatacctaattccttaaaattaagtaagaaatatattttaaggaattatggaggctggcaagtctgaagtcttcggggtgggccagca

SEQ ID NO: 486331 - DNA, 581 bp, Homo sapiens
gaggggacagaagaccaacgagatgaccatcagatgaagggaggmgtgcacagaggacttggaaacccagagtgaggaggggcacaggatgcggatggcactggggagccacaggagagggaagcagggatgcagcttttctaagctgtaggtgagacagaaagggtcctgccccctataagagccacctatcctccttggctcccaaacacctcaaaatgagatcctccctctgtggcattcttgggggctccctggaccccttagtccactctgctgaggatgacctttgattgcacacaaggtcacttcctcagctcaccctgggaattccctctgctagggagttgcgtaattcagtgctttgcacacagtagaaacccagtaagtgattgttgaaaaaacgaatgaatgaatgaatgaatgaatgaatgttacagcttttgttgctgctccacccttacttcctaccctccagtccaactcagagttgtacctgtttgcccccaagtctgctggagaagcaggtcctcttctgctttgagcccagatctctccagtttggcgtctgcctgaagcag

SEQ ID NO: 486332 - DNA, 558 bp, Homo sapiens
tgattataatgcagtagtttgaattcatggatgaatgtcctctgcattgtctcatgcgaaggttcccagtaatcttgtttaggaaggactggtgaatgaattttgcttggaggaccccaggcttgggatgtggtagctactgccgcagcctctactcttttggctatccagttaaagttaggccttcacaggagggggctgtgtgtctctgggacacctgttgacctaagtgctgtccctcctatggctggctgagaaaagacccagctttctgggggtctctctgtcagcacaaggcctggctcttcatccccgctgccacascctcttccctggtgctgagacctgttgggagtttgggaaatcgtagccttggctgtttacccaggaaccttctctttttctcagtgggttgcaggagaacagaaagggaggtcaaagcgtgcttgcttgtgtctgcaggggaagactcgttcatgtagaggagtaaagcctaccccagtgccaactctgagacttgggaaaaatcaccgttttatcagagtttataccaaggca

SEQ ID NO: 486333 - DNA, 647 bp, Homo sapiens
gaatatcccctggagaagtcatttacataattaaaccttggagtatctgaacatggttcagactgtgacctactcttgcatctgaggtgcctcagaagcagtgtcatatcatacacgtcctgctgctgcttgatcagcttcgcttctctatcaagccttctcattgtgacctggagagcttcttcaaataccacctacgagctgcctttcctccccatttcccactttgattttgctgaaaactcactttccttaacttaaactaatttaatctttttgctgttttctatgtgccctggatatcggagggattatttaagctgttttaatttttaatataaagaatatagggctctgattataatcatctactgagtacctaggaatgaatgtcatactctgctctgtttggacaatttgtgttttctttgtacagataattcagctccctcatgtaatacccatgttaacccagagaggtacatattatwatccctattgtacagaagaggaatctgacccttccaagttaagttagaaatgggagggacagtgataatgattgaaacctaagatttgactcctgaatcccactgctcttaacctttggaaaatattgcccatcaacttctctttattcaaagtgc

SEQ ID NO: 486334 - DNA, 647 bp, Homo sapiens
gaatatcccctggagaagtcatttacataattaaaccttggagtatctgaacatggttcagactgtgacctactcttgcatctgaggtgcctcagaagcagtgtcatatcatacacgtcctgctgctgcttgatcagcttcgcttctctatcaagccttctcattgtgacctggagagcttcttcaaataccacctacgagctgcctttcctccccatttcccactttgattttgctgaaaactcactttccttaacttaaactaatttaatctttttgctgttttctatgtgccctggatatcggagggattatttaagctgttttaatttttaatataaagaatatagggctctgattataatcatctactgagtacctaggaatgaatgtcatactctgctctgtttggacaatttgtgttttctttgtacagataattcagctccctcatgtaatacccatgttaacccagagaggtacatattataatccctattgtacagaagaggaatctgacccttccaagttaagttagaaatgggwgggacagtgataatgattgaaacctaagatttgactcctgaatcccactgctcttaacctttggaaaatattgcccatcaacttctctttattcaaagtgc

SEQ ID NO: 486335 - DNA, 492 bp, Homo sapiens
ttattttctgagaggcagtaagtagaatgtcaaggttacaacatggactcgagttcacatcccagctctgttatttacaggccgtgtgggtttgggtctagaacttaactgctctgggccccagtttcctcacctgtaaagttggggataaggtatccatgtaggagcattttcaatgcattttcattagtcaatgaatcaaaggactcctcgaatccaacagaggagttaatgagttaaaataggwaaagtgcctagaagagtatttggcacatggtaaatagaaatgtgagctgtgattattatttcttagtgggagaactctggaatatattctagaagtgcaagtaatttttttaaaaaagtaaccctttctgtgtcaaccaacagtagacagtgacattgtgttgaaaacttggggaaaaatctggcattgtctcttaccgtgccgacaggccccttattcagcaaatgtgagctctccctacccca

SEQ ID NO: 486336 - DNA, 413 bp, Homo sapiens
aaaggttttccaagttcaatttttagaagatgcaaagaatatctaagcatttttaaaagaatgaaacaacctctttatttctattatttgcatatctgagatataataaacactcatcaaatactcaatgattaatttatcataaagattctaaaattaagagccaccgctactattaccttctacttcaacgtcctacattaacaaaacatttttaaaatgccatataccaacgaataaggcctcagttccaagaacgaaaacaaaagtagagaaaggaattctattttrccaagctgccatgcagccacaaaacatcttggtaaatgatttacacatgttgcccatttaatatagtgacaacccagtaagataacgattgttatccctcttttacagatgagaaaattgag

SEQ ID NO: 486337 - DNA, 409 bp, Homo sapiens
gaaaacattttaagtaaggatttttttaagggctacattaatgtggatagcctcattctggcattatagaccttttgcaagtgattttcatacaacttagccatgcctgcacacaaggctgctgtctgagtttctgtttgacattcatattcagataaaatctgattagcccaagagatggaagcaactgcagggtgcatgccaccacttatgactgctttgtctatgggagacacggctgttggatcacracacttttccactgagtccagcctcaagcatccactactactcagtctgaattgacacttgagatagattctacttgccattcttgagttgaactgaactcaatgggcaggtttgggagcagaaaacaaaccacataaagtcagcctgaaatgtacca

SEQ ID NO: 486338 - DNA, 574 bp, Homo sapiens
ccatcctgcactttgtcaccatattaatcttcttaaaatgtaattgtaattctttcacttcctactcaaaagccatcaacaacaaaccctgccttttatttccactaaatctctgtccacttttcccaccttgcctctgctactcttcatgaaccctacattctagccagactggtcttattcatcaacacctgagtatgtctcttgcattcccacttctgctcttgtgttgtcagttgtcctcctacccacctttgtcttgcccatctaaatcctgtgtcccacatggataagtgcargtctttatgaggctttctttgatatccaaagcccacaattacatattccctacttaatgcctttggaatccattatctataccaattatttgatttgggcatttgctactttatatttcaacataggtcataaactctttaaagatcagggcatcttaaacctctttattccccctacattacctaacacagcacattgtacctagtactgccttatatcatactaaaactggaagacaataattagaaataatttaatccacctcttcgatcta

SEQ ID NO: 486339 - DNA, 574 bp, Homo sapiens
ccatcctgcactttgtcaccatattaatcttcttaaaatgtaattgtaattctttcacttcctactcaaaagccatcaacaacaaaccctgccttttatttccactaaatctctgtccacttttcccaccttgcctctgctactcttcatgaaccctacattctagccagactggtcttattcatcaacacctgagtatgtctcttgcattcccacttctgctcttgtgttgtcagttgtcctcctacccacctttgtcttgcccatctaaatcctgtgtcccacatggataagtgcaggtctttatgaggctttctttgatatccaaagcccacaattacatattccctacttaatgcctttggaatccattatctataccaattatttgatttgggcatttgctactttatatttcaacataggtcataaactctttaaagatcagggcatcttaaamctctttattccccctacattacctaacacagcacattgtacctagtactgccttatatcatactaaaactggaagacaataattagaaataatttaatccacctcttcgatcta

SEQ ID NO: 486340 - DNA, 477 bp, Homo sapiens
tagtacagtaccaggaagaaacctcttttgttctctttagacatcttctacttgctcttggccttgagatcgtgtaacaaaatgaaggagggctctcttctttcttcctcatcctactcaaaaacttcccgagagcagtggtggttttgagggttttgacttctattacttttggcagcctggaaagttgtgtcttctgggaaagagaccyggggaggccaggagtagctgagggtcctttctgtgcccttaaaccgcccagaggagccctattccactctggttttaggctgatctgagagggtctccctttgttcctttctggagcatttctctaacgtttattacaattaggagggggaccccacatctgtgagattctgtttcatttgaggtttacagaaaaaaaaaagtggccagatgtgttccccccatgggtgagaggcctgggcaactgcctggtgaatgtgtcttgcg

SEQ ID NO: 486341 - DNA, 614 bp, Homo sapiens
cagctgcccatgctctacaccaaactccaggaaaccaacccgagacaagcaatgagtccacctccccttcctctttctctccaacttctctcttccctgtactgccctggctgtgggatgggctattctctcttacaagtttctgccggctgtggttggggatctcctctctcccatcttgaggcctggggaagggcattcagggagggcrtgagggccttgaagctgggctgtgtgggctgaatcctccgggggcaaggtccaaggttctggcacgaggtacagggtgatcaggtaagtagtctttgaaaaacaaaactgcgatggggtgggggtggaaagtcccattttaccactgggttgctaggctgctctgtggtcacaggcagagaataaagatagagatagatacttggctttgctggaacccctgagactctagagctcagcctttgggctcatgacatccatgtagataaattgattctcaccctgattaaagggtataggggatggcctggcagtcagctagctgacacgctcctccatggctgttcccatccttaattcaggggaacaaaggggaaaggctttcactgcagcagcctacaata

SEQ ID NO: 486342 - DNA, 609 bp, Homo sapiens
gcccatgctctacaccaaactccaggaaaccaacccgagacaagcaatgagtccacctccccttcctctttctctccaacttctctcttccctgtactgccctggctgtgggatgggctattctctcttacaagtttctgccggctgtggttggggatctcctctctcccatcttgaggcctggggaagggcattcagggagggcatgagggccttgaagctgggctgtgtgggctgaatcctccgggggcaaggtccaaggttctggcasgaggtacagggtgatcaggtaagtagtctttgaaaaacaaaactgcgatggggtgggggtggaaagtcccattttaccactgggttgctaggctgctctgtggtcacaggcagagaataaagatagagatagatacttggctttgctggaacccctgagactctagagctcagcctttgggctcatgacatccatgtagataaattgattctcaccctgattaaagggtataggggatggcctggcagtcagctagctgacacgctcctccatggctgttcccatccttaattcaggggaacaaaggggaaaggctttcactgcagcagcctacaata

SEQ ID NO: 486343 - DNA, 606 bp, Homo sapiens
ggggagcttttaaaagcacagatgcccagggcccaccctcaaagtttctgacttaattggcctggggttcagcctgagcacagagatttttaaaacatctccaggtggttccaaagtgcaccagggctgagactcactgaagtgggttcwtttttttttttttttttttttttttttggagacagagtctcgctctgtcacccaggctggactgcagtggtgcgatctcagctcactgcaacccccgccttccgggttcaagcaactctcctgcctcagcctcctgagtagctgggactacaggtgtgtgccaccacacctggctaatttttttgtattttagtagagacagggttttaccgtgttgcccaggctcatctcgaactcctgagctcaggcaatccgcctgccacctctcatcggaatctttcccccagatccaagggaagatggttttcttcctgctacactaagggtcagacagagaaggcatgcttgggcatcccttgtaagacagggactgtattttgtttatcactgtatccccagtggcccacccatgcctggcacagatgaagggctaaatgaacactagtggaatgaaat

SEQ ID NO: 486344 - DNA, 505 bp, Homo sapiens
agtatatgctgtatggttcttcttatctgaagttcaaaaacagataagctacattataacgttacaagtacgagtaatggttatccttgggaggtgtggagcaggtataggaactgaaagcaccagggagcttttaagattttggtaatactctgtttctttaactggctgctggttacacagggtgcattcactttattaaaactgaaatttgtgatttatgtacttctctatatgtatgttatgacaatagtcacccaaaaatgttacatgcataaaataatttaacctgaatattttmtaaatcatctaattagacatatgctgttcataggaagaaaatacaaatgctcaataaatatacaaagaaatgttcgacttcactattttcaagaaaatgcaaattaaaacaataaaactccattcccctctcctgtagattgttaaaaaaaaaaaaaaaaaagttttgcccctgatattctaaaaatcattgttggtgtccttg

SEQ ID NO: 486345 - DNA, 628 bp, Homo sapiens
tgcggtggcaggactgagggagggatccctgggtggatctgggatctgggaggttgggagtatgtttgggctcccaccccaggccctggtaaggtgggaaggtgtgcgagaagcgggtgggttagccacgtgtccaccaccaagggccctgggggactgaatgtctcagaagccttctttcccttaacagtcccacccaccaagatctctccttgtggaccattccacttgtagtatgatttgtggttttcggagcaatttgcatcccttttgttactatcactgcaactctttgatgtaaacaagacaagaattctttgtaaccaatgagaaactgaggttcccagaggccatggtttgctcaaagtcacacaacaatttagcactgtaggcaggctgaggacccagggctcctaattcctaaggccaacaccacactgcagagtcaaagctgctcaaagtcaaagccacccagggcaagactgacsacatcacacaggtcctggttcaggtgtgctggccttcctcccaggcacaggggacaaaagggaaaaaaggatgtcttaagcttctctactcagccctccatcactgcctagagtgtgccaggtagcagggccctggccaa

SEQ ID NO: 486346 - DNA, 531 bp, Homo sapiens
gatcttaacaaaaagtacatatatttaattaaatcagaactgtatcttgtaagtaaatgaagtgaaacaaaaactgctttaaacaatgaagtggaattattggatgatgacattgaaaaaacctaacagcctcaatctagttagactccacatccattcatctgccattctggcattcttctctgtgttggcttagttctcaggctgctttaccatgtaactgtcagacaggtgcaagcagcaactatagctatggcttcctcattttcacccatgtggagagggcattgttgcaccagaaaatcaaacaaatgcctgtgattcyccttgattgagggactcccagttcagaccctgtgagcacagaaaatgccatataccaatttggaaaggaccattatctggtccagtatccatggcagtatccatggtaaagattgtacaattagggttcatccaatgctgcacaatgatggatgaaaaattctccaaagaaaattctagtttctgttaggaagagagaagagagag

SEQ ID NO: 486347 - DNA, 524 bp, Homo sapiens
tggtaaaaaagactagtgagttctaacttggcctatttctattgcaaagatagttgaccatatgcctagctaacatattatgcagagtgtttagcctaatagagatacactttttttttcataatgagttatggagatgacttagtctctgtactttatgcttttaatatcaccaaaatcttttcagrtgcttttttcaattaagccttttcctttacttcctgctaatagtgataacatatttataatagctatttacagtactattaacaagtattacagtgctggttcaaaggaaataaaaactttattaataaaataagagattttgcaaaagtcatccaaccaaactcccttttatacgtcttgccaacgattataaccatacccttgagcacattaattctttttatctcgctagagattcagagacatacacttccatctatgggggtagatgagagatttcaagcaacaatattccattagaagaaaagaaagtaatataaggatattagcttatc

SEQ ID NO: 486348 - DNA, 524 bp, Homo sapiens
tggtaaaaaagactagtgagttctaacttggcctatttctattgcaaagatagttgaccatatgcctagctaacatattatgcagagtgtttagcctaatagagatacactttttttttcataatgagttatggagatgacttagtctctgtactttatgcttttaatatcaccaaaatcttttcaggtgcttttttcaattaagccttttcctttacttcctgctaatagtgataacatatttataatagctatttacagtactattaacaagtattacagtgctggttcaaaggaaataaaaactttattaataaaataagagattttgcaaaagtcatcmaaccaaactcccttttatacgtcttgccaacgattataaccatacccttgagcacattaattctttttatctcgctagagattcagagacatacacttccatctatgggggtagatgagagatttcaagcaacaatattccattagaagaaaagaaagtaatataaggatattagcttatc

SEQ ID NO: 486349 - DNA, 524 bp, Homo sapiens
tggtaaaaaagactagtgagttctaacttggcctatttctattgcaaagatagttgaccatatgcctagctaacatattatgcagagtgtttagcctaatagagatacactttttttttcataatgagttatggagatgacttagtctctgtactttatgcttttaatatcaccaaaatcttttcaggtgcttttttcaattaagccttttcctttacttcctgctaatagtgataacatatttataatagctatttacagtactattaacaagtattacagtgctggttcaaaggaaataaaaactttattaataaaataagagattttgcaaaagtcatccaaccaaactcccttttatacgtcttgccaaygattataaccatacccttgagcacattaattctttttatctcgctagagattcagagacatacacttccatctatgggggtagatgagagatttcaagcaacaatattccattagaagaaaagaaagtaatataaggatattagcttatc

SEQ ID NO: 486350 - DNA, 557 bp, Homo sapiens
cagaagagggcccacaccagaacctgaccatactggcaccctgatcttggactttctaggtggcagagccatgagaaatatatttctgttgtttataaggcctccagtcttgcaccctgcactgaccaagacagctcatattctatcttttaatccagtggtgtggcagtagactggctctctgaaaaaaataaggccccagtttgtggtgcttgctgatttccaaggcacaratattcccaacaatgcttttttcaagctacccacatgaggtcatttaaacagttgaaaagagaagtgcacaatcaactcttgctagtttcctaggctatggcctgcctctctactcctctctccattttctctgtctgaaagtgcctgtatatggctttcctcttctgtcttccagtctggaactctggtgtgaggacatgagtttactcccttagaatctctatcaccaaccttcgatcctttccatctaataatacctctttctggtatcaatacaacaatctaccatttgactcaaattggatttctgggaggactgtgaa

SEQ ID NO: 486351 - DNA, 557 bp, Homo sapiens
cagaagagggcccacaccagaacctgaccatactggcaccctgatcttggactttctaggtggcagagccatgagaaatatatttctgttgtttataaggcctccagtcttgcaccctgcactgaccaagacagctcatattctatcttttaatccagtggtgtggcagtagactggctctctgaaaaaaataaggccccagtttgtggtgcttgctgatttccaaggcacagatattcccaacaatgcttttttcaagctacccacatgaggtcatttaaacagttgaaaagagaagtgcacaatcaactcttgctagtttcctaggctatggcctgcctytctactcctctctccattttctctgtctgaaagtgcctgtatatggctttcctcttctgtcttccagtctggaactctggtgtgaggacatgagtttactcccttagaatctctatcaccaaccttcgatcctttccatctaataatacctctttctggtatcaatacaacaatctaccatttgactcaaattggatttctgggaggactgtgaa

SEQ ID NO: 486352 - DNA, 353 bp, Homo sapiens
aaactaataaatattaggttggtgcaaaagtaattgcaatggcaaaaactgcaattactttttccaacctaacagtaccggagataataacacacaaggaccctatgctcaaatcttctccactatgygcatcactggcacctccaactcaacataccacggctctcccttgcccgagggatgcgtaaacctgcttgtgtccatgtatgtgtgtgtggaggggtggatgtggggcgggggtgaggtgtgtgcacaggcagggctgaagacatgggagaagcagggtcagggttttcgtgatggcagcacccatgtgattttgggtgggagcgagaagggtggcagggcaagtc

SEQ ID NO: 486353 - DNA, 353 bp, Homo sapiens
aaactaataaatattaggttggtgcaaaagtaattgcaatggcaaaaactgcaattactttttccaacctaacagtaccggagataataacacacaaggaccctatgctcaaatcttctccactatgtgcatcactggcacctccaactcaacataccacgkctctcccttgcccgagggatgcgtaaacctgcttgtgtccatgtatgtgtgtgtggaggggtggatgtggggcgggggtgaggtgtgtgcacaggcagggctgaagacatgggagaagcagggtcagggttttcgtgatggcagcacccatgtgattttgggtgggagcgagaagggtggcagggcaagtc

SEQ ID NO: 486354 - DNA, 353 bp, Homo sapiens
aaactaataaatattaggttggtgcaaaagtaattgcaatggcaaaaactgcaattactttttccaacctaacagtaccggagataataacacacaaggaccctatgctcaaatcttctccactatgtgcatcactggcacctccaactcaacataccacggctctcccttgcccgagggatgcgtaaacctgcttgtgtccatgtatgtgtgtgtggaggggtggatgtggggcgggggtgaggtgtgtgcacaggcagggctgragacatgggagaagcagggtcagggttttcgtgatggcagcacccatgtgattttgggtgggagcgagaagggtggcagggcaagtc

SEQ ID NO: 486355 - DNA, 606 bp, Homo sapiens
aatgagtataaagcctacaaacacggtcaaggagatgactgggagtaactacatctgtgcctagagaatggtcttgacggtttgcaagaaccgtttcatcagcattatgggcaagaacaagaaggccaaggcatacttaaaatcatcacaaagcctctttctagcactaartgtgaagtaatgaagccatcacacagcagatgaaggcctttgcacacaaagctctcttcctcagaaaagctctattgattgatcttgaaatacagatttttagttctaaaactgtgtggatagctagttaaaattcactctctttccctccgaaatgcattaaaattctaaaacatgcaccaaattctaaaaattaagaattctaaaattctaaaatatacaccaaataaaatttatttttagtattaaaatacctgatgctcatttcatcaagtctctgttctctcgtctctgttcaacgcagttaggcagatctgagggtgctgcggagagtatctgaggagaaatgccaggcagagagcgagcaggccctgagctgcagagacaatgctccaggcagaaaaccatggctggcaggaaaccaggagaaattgt

SEQ ID NO: 486356 - DNA, 416 bp, Homo sapiens
cattctgtttgttttatcccaacccaacctggtatctaacaaatgcttctccttctagttcaaagcaaggctatgacgtcacagaatgaaccccaacctcaatgtctgcactaagggaagggtagagcagctttctctatggggccacattttcagtaacttagtcccgtacttagaatcttatactccgccttctaataggtcttcacagcagctctagaaatctcargcttcttttttaccactatattagggtacctttggttgaacgttcccaaaaccccttgagaaaatttaaggaaaatatgaacacacccccttttcatttgttgtaagtacaccggggtctctgggaactggagggctacacagaggaacttgagcatatctcttgatttttttcccttctccacgca

SEQ ID NO: 486357 - DNA, 356 bp, Homo sapiens
ccgtcggcttaaactcatcgggaatgtccgtgtattttaccgatcagggaaataaaagggtgtatataaattagtggaagcgggtgggaaggaacaagggatgcagactgtcgtgagtaaaacgcctcgcggcttggtgagaggttgtttcttttttaagccactcatttcagactgaaatatcaagccagttcaggtcatttcctgagtagcactacaagttaaaacaagatccagaaaatctaytaatcttcaattgcgctgcctccagactgggagcacagggggatagggtgtagggctgtggggaggtcgaggggagggggatttgtggaaaagcaaacgcccgagaaacc

SEQ ID NO: 486358 - DNA, 190 bp, Homo sapiens
ggctacccatcacagcttctctcctttggtagaataaagtgaactgaaccaccaygcctaaggtatttgccttatttcttcctcagctggttcatggttacattgtcaaagctggcaaagcattcaagacctgatttctcagaccgagtgtatgtgtgaatataatatactcatttgcacaaatataaac

SEQ ID NO: 486359 - DNA, 597 bp, Homo sapiens
tcaccccctcagggagaaggatgttttctcttccaactactgaaatcctaccatccttaaagagctagtgccaaatgacctcatgcatgaaaccccacaggcagctcaggcagcagtagacttcattcttttcgattgtttacttgtgcctcggttggcacatagtgtctttcactggagtcatgctgggagtcacttctattggtgatatacctatgggtgagataccgtaagtaatgggaaatatcttcattcccatctcccttgcttgtgccaacacctagtgctgggttttagaagcattgctggatggatgaatgaccctctttcctgacatcaggctctcatgacctgggtcacagtcrggtgcccaggaggttagcaggtgagccctgatggaagtgggtgaagtgagcaagagggagcagtagggcccatagcaacctggagaggtcatgtctcatttactaccaggcatctgcttctcaactccagcatttgttgctaggtgggaatatgggccccatgttgctagatactatgattttgtaagaaaatccagaaatagggatttttaagtgaaatattttgatgtat

SEQ ID NO: 486360 - DNA, 613 bp, Homo sapiens
ctgagccatgggcctccactgttcctttccttctccaaagtttcattctgccaaatgttggaagccaggccaaaccttggtttctggaaaacaattcaaaggygctggccatgcctagtgtgtttatccttctttctgtttaaaaccggtcactggctcaattgcctcctgaacgaagttagcaactcccagccaggagctcaggccttgaggacgggctcatggctctgggacacacctctcaggactgccctccgtttgcccaatgctctagccaagcaacaacatggcagttcttagcacacctagcatttccttctctctttccttgcttcagctctgctaacacccttcctctgcttctgccacccatccaacacccggcttgagccagattcaaattttgttcatggagccatgcaatggattggaacatcaatatagttcaatacccaccaacagtaaacagatgacaggatccattctacactgcaggcaaagtcaacacacacaaatctggttaagatgtgtctttggatagcatacatggaaatatcaaaattatctaaatctacataattgattctaatagatctggcttctctaataaatt

SEQ ID NO: 486361 - DNA, 536 bp, Homo sapiens
tctgtttggtcaagcggattgtaatactttgagatattagcttatactaatttaataatctcttgctaacagttcaaatagagaaattattagttttagctcaacgaaaacggtctttagttaggctttattataattataagcggttgtactttttaaaaatgttaatctcaatataggcctaattaatgctgccttgttactgacaagtagttcatcaaatatctgattcamagattttcataatgagtatattaattaaactatgaataatctaaaggtggttatatttaaacaatacctcattataatgattaaatactgatttcgaatattatgtcttaacaattgtcacttagaaaacacaacctttccttatgtatgagtctgtaatggcaaaatgcaattttgggatttttttcccttgttcaaaaaatgtgaaactcattttaaaacacttctgaaataggttacacacagcttaatgattatcaaaatgactcttttctgcaaaaaaagaccccaaagtgcgcgta

SEQ ID NO: 486362 - DNA, 591 bp, Homo sapiens
ctggaaaagaccttgggaatctggtggtaaaatgtcagagctgagggcccaggagctgtggccgcttccctgaggctggagcaatgctatgtcttgccccataggagccagctagagagcctgggtggagccgggtgctgtagctggcaccgtgaggtagaagaaagggaagtggagaaggtggatggaaagggaggagagaagtggagaagggcttgccccatgaggaggccagggaacaggggaccactggtcctcagttgttgccatttcctcccctgtctgccaggaaggcaccttakatcaatggaaaaccggtaccccagagattaaacatcagagcgggaaactggctcctccctcatatcatcagcctgtcttagtttgggctgctatcataaattactgtagactgggggcttgaacaacacacattttttaaaaacttttattttgcctggcgcagtggctcatgcctgtgatcccaacactttggaggccaaggcaggggatcacttgaggtcaaaagtctgagaccagcctggccaacatggtgaaaccctgtctctactaaaaatacaaaaattagtg

SEQ ID NO: 486363 - DNA, 595 bp, Homo sapiens
aggtgccaaggataaaggagaacacggattagcagaagaagagacaagttcattcgggtctgagtgtggacttgaggatgatagtcctctcagtgaggcaggtgctaggtacagggtgtgcagtcaggggaggtagcagagggcactggatccttaggagtgggtggcagatccccagatgggcaacagggaaaatgcatcccagggaaaggaattccatgcaaaggcccagaggcctgaagagcaagtggggccccagagactgggagtaacgctgctggggcccagggcacctacagkgcagtgatgggcgagaggagggatggctctggtgctgtatggacagcaggctggagggggtgatgctccatttagaccagggaggagattggagattgtccaggcaagcaatgagggaggctcgcagcagtgggatggaggagggccacaggccagtggctaaggaggggcctaagcaggacttagggagaggtcagatgtggagggtgatggagggtgatggagaagccatcaagtcccagtttctggcttaggtggaggttggagggggcagggatatactggaggaagagca

SEQ ID NO: 486364 - DNA, 595 bp, Homo sapiens
aggtgccaaggataaaggagaacacggattagcagaagaagagacaagttcattcgggtctgagtgtggacttgaggatgatagtcctctcagtgaggcaggtgctaggtacagggtgtgcagtcaggggaggtagcagagggcactggatccttaggagtgggtggcagatccccagatgggcaacagggaaaatgcatcccagggaaaggaattccatgcaaaggcccagaggcctgaagagcaagtggggccccagagactgggagtaacgctgctggggcccagggcacctacagtgcagtgatgggcgagaggagggatggctctggtgctgtrtggacagcaggctggagggggtgatgctccatttagaccagggaggagattggagattgtccaggcaagcaatgagggaggctcgcagcagtgggatggaggagggccacaggccagtggctaaggaggggcctaagcaggacttagggagaggtcagatgtggagggtgatggagggtgatggagaagccatcaagtcccagtttctggcttaggtggaggttggagggggcagggatatactggaggaagagca

SEQ ID NO: 486365 - DNA, 475 bp, Homo sapiens
tgtgaactgtgaggtgctgggggtcgggggttttgatgaagggagggaaggacatgtatcttgctagggaccttcatcccatttggcttggccccctgctatgacatgggttgagatttgaactattccctcagaaagattgccaccccagcctgcttgacatcgctggcacactgaagccctggaaagggcagttcttaataaaaagtaccatgtatgaccctgcatttaaaaagcgatgatctgatgggctaaggaaaagctttttcttttatctaataaacaatattctagaggtgagtgtgggcccagtacaaagtcatacttcaaaccagctccctccagtgctggagggggttcgattcctgtggtctccctcgaggctgccatgtcaggtgtttgccgctacatcagcatccccagaagygaatccgaaaggagctgaaagaaagaatcccgtgagccatgtgagccc

SEQ ID NO: 486366 - DNA, 426 bp, Homo sapiens
tcaaacaaagtatgataatgtgctgttggtctgactgtaaggaaacgctgtacactgatggtggaaatcaagacagttcagcctctgagaagggcgatttggtaatatctatacagttaacacattcatatcctttctcccagcctggagctaccatgtgcccatgaactgtcttctaggcttgtttgctatgagataatgaggccttacataattaaacttttattatgttgggttttctggtctgtgagaccaaaatgaaaactgataattgtagcaattccacttccaggaatttattctaacatgttttccctacgtgtttttcatagcaatgaattgggaaccacccacatttccatctaaagaagagtagttaaatacrttatggcgcctccatgtactgccatgcagggaatacagtat

SEQ ID NO: 486367 - DNA, 519 bp, Homo sapiens
gactttggacacatcccctgacccccctgagcctcagtgttctcatctgtaaaatggggataataatactgtctccaggccacatgcagtggctcacacctgtaatyccagaactttgggaggccgagatgggaggatcacccaggagtttgagaccagcttgggcaacatagaaagaccctgtctctacttaaaatttaaaaattagctgggtgtagtggcacatgcctgtgattccagctacttgggaggctgaggtgggagggtcatttgagccagggaagtcgaggctgcagtgagccatgatcatggctaccctccagcctgggagacacagtgagaccctgcctccaaaaaaaaaagaaagaaagaaaatagtgcctccctcctagggcagccatgaggattggatgaggtaatgcctgtaaagggctcagtccagagtaacctcctgatgaatgccaaccttagttcatgactgtggtaacagaggcaggctccctgaggagcggctgctcc

SEQ ID NO: 486368 - DNA, 462 bp, Homo sapiens
gagaggagagagtaggaaaaagcctgtttttttctcccatatatcttaggcgcaktatctgaaagccctaaaccctggggaaggagggtctgggctgacacattttgcctcaccgggggcctcttccactgcaggcggggtggcagcttctgcagcagggagccactgccgatggagctcagggtggccgggaagctggtgtcttcaaagaggcagccattcctcaggcactctgccagcagggcctcaaagtcctgttggggttgctgtggagacgccctcctagagtaccttggcgccagcttccatctgcatcggaaaggtggccacagagacatggcaggtggtgggtacagtccagtgagtcttcctgaggagtctctgctgctcctgaaatggagagaggacggtcagtttcctcacttcctccttgtgctttgccattgccacagagacgagggg

SEQ ID NO: 486369 - DNA, 634 bp, Homo sapiens
gtgatcccattcagaaatcagcaagaagaactcacttcgaccccctatgatgttatcgtaagcctgaccaatcagcactccacactttccgagcccataccagccaaataatcyttaaaaattctgatccccgaatactcagggagactgatttgagtaataataaaaatccagtctcctgcccagctggctctgcatgaattactcttttgccattgtaattcccctctcttgatacatcagctctatctaggcagcgggcaaggtgaacccattgggcagttacaatggtgtcataaaagaggtgtgggcctgaatattaggagaacctgattctagaattatgtcagctacttaccatgtgaccttggggacttcatttcacctcctttaagcctcagttttcccatctgtaaaacaggggatgggactagatggtctctttggtctcatgtttcaatagtcaggataggctagattttgctgtgataacaaagaacccccaaatctcagtggcttaagaagcaaatctttttttttatttttgtaaattatttatgatttagaaggattatcttcaaatcagtacaaatatttcataaataatatctggccattttctaaccaattgagg

SEQ ID NO: 486370 - DNA, 634 bp, Homo sapiens
gtgatcccattcagaaatcagcaagaagaactcacttcgaccccctatgatgttatcgtaagcctgaccaatcagcactccacactttccgagcccataccagccaaataatccttaaaaattctgatccccgaatactcagggagactgatttgagtaataataaaaatccagtctcctgcccagctggctctgcatgaattactcttttgccattgtaattcccctctcttgatacatcagctctatctaggcagcgggcaaggtgaacccattgggcagttacaatggtgtcataaaagaggtgtgggcctgaatattaggagaacctgattctagaattakgtcagctacttaccatgtgaccttggggacttcatttcacctcctttaagcctcagttttcccatctgtaaaacaggggatgggactagatggtctctttggtctcatgtttcaatagtcaggataggctagattttgctgtgataacaaagaacccccaaatctcagtggcttaagaagcaaatctttttttttatttttgtaaattatttatgatttagaaggattatcttcaaatcagtacaaatatttcataaataatatctggccattttctaaccaattgagg

SEQ ID NO: 486371 - DNA, 543 bp, Homo sapiens
ctttgatacatggtttagaggagtttcaaaaccgatttggaaaggaggtcagcaatatctaacacctctacatgtgcattcacctataacccattaacctcatttctatgattcttccctaaaacatcacatccatgaatatgattaaataaataagcaacctaatttattcaaatattacttgaattagtaaaagattagacagcccaaatgtccatcaatagggcattggttgagtaaattatggcacattcacacaattacctactgtccactaaaaacaaagaagacttccatgtattaaatacattactttcttggatacattatttaatgtattaagtgtaaaaagcagtgctctarcagtggaatgattagaaatagagatggtcttctctgacaatgattttaatatttttgttaactttaaatgataactttaaatgatgtgggtatcttacatatttgtaaattaaatcaaataaaactaggaaattaaaccaagaaaaaataatgaaaataaacataaataaaatcaatata

SEQ ID NO: 486372 - DNA, 493 bp, Homo sapiens
acccgccatctgcgtcagtctcactgggagctacagaccagagcgcttcctattcggayatcttgccagcaatcctagctttttattttatgctcttcaaaatttttttcatctttcgttcatttctcaattctaaagctacttacacatctcagtcatgtgatacagtaacaccccacttccaggtaccagtatctgtatctgtttcttatttctgctgctacaaattaccatatacttagtggcttaaaaaatgcaaactcattaccttacagttctgaaaatagaaagtctaaaattcaagattttgacatgactttgttaattctggaggttctaggggtcagtaaattttcttgccttttctagcttctagaagcttctttcattttttgacttatggctccaactttcatttttaaaaacaccagtgtagcatcttctctttgaccatgatcttcttccctccctcttataagaatcctgatgatta

SEQ ID NO: 486373 - DNA, 493 bp, Homo sapiens
acccgccatctgcgtcagtctcactgggagctacagaccagagcgcttcctattcggatatcttgccagcaatcctagctttttattttatgctcttcaaaatttttttcatctttcgttcatttctcaattctaaagctactkacacatctcagtcatgtgatacagtaacaccccacttccaggtaccagtatctgtatctgtttcttatttctgctgctacaaattaccatatacttagtggcttaaaaaatgcaaactcattaccttacagttctgaaaatagaaagtctaaaattcaagattttgacatgactttgttaattctggaggttctaggggtcagtaaattttcttgccttttctagcttctagaagcttctttcattttttgacttatggctccaactttcatttttaaaaacaccagtgtagcatcttctctttgaccatgatcttcttccctccctcttataagaatcctgatgatta

SEQ ID NO: 486374 - DNA, 493 bp, Homo sapiens
acccgccatctgcgtcagtctcactgggagctacagaccagagcgcttcctattcggatatcttgccagcaatcctagctttttattttatgctcttcaaaatttttttcatctttcgttcatttctcaattctaaagctacttacacatctcagtcatgtgatacagtaacaccccacttccaggtaccagtatctgtatctgtttcttatttctgctgctacaaattaccatatacttagtggcttaaaaaatgcaaactcattaccttacagttctgaaaatagaaagtctaaaattcaagattttgacatgactttgttaattctggaggttctaggggtcagtaaattttcttgccttttctagcttctagaagcttctttcattttttgacttayggctccaactttcatttttaaaaacaccagtgtagcatcttctctttgaccatgatcttcttccctccctcttataagaatcctgatgatta

SEQ ID NO: 486375 - DNA, 650 bp, Homo sapiens
ggcgtaacattaacattgttaaatctggtggtgttacagtagacaccgattattctctgtacttttcaattttaatatatttcataataaaaacaaaaacattcacagaataaaaaagattgaatcactgctaccattttcagattaatcaggcrtgctaaaatacaatacacattttctttcccaaataagacaatattaacagaagatgttacatacttggtaatgtacatttttataaagtatccattgattactatattaaaaatacacaacaattaaagagcaggatttaatgcttctacttcaaaacctctacctttacttgagtcaaaggatttaatttcacaccacaaacaggctttccttgctttaagagtatccctttgaattttgttctatgtcatttcctttaaacgtgactcagaataaaaggtttcatgtacaaggtatagaagagacttggctaactacagttaaataatactaataaatacatcttagaataaaccgacagtggctcaatccaaaaatgataattatcaccagtacaaaaactttttttcagtctgaaacttttaacctgcaagagaaatacacatgatctttgtttaccaaacatgtttttttcttgtcaggaaagctttccc

SEQ ID NO: 486376 - DNA, 617 bp, Homo sapiens
caagttgctacttccctggtttataattattagaccaacatctgaatagaagcttcaagggcagagatcgttttattcatctttgtatccccccaaagtgcttaacaccatggttttattacacatagtaagcagcgcccttttcaataacatctgttataatataaatgaagacttttaatgctatttcaattagcaaaattatattttgttttgtgactcttctcatttaagggacacctttgagagcagtttcattattaagcctaactcaatgatttccgtagtatattcttagacactatatgattatggaagagaaaaacatattaacaaatttttgttgccatacattgttatttttaattgccaataaaataattactaagagatatttgtagttaaaagtgtggggtttttggtggggcttattctgtaaaataggaaaaggcttaaaagatgatagttaaaaatggccgggaatggtggctcacgtctgtaatcccggcactttggtaggcygaggggggcagatgacttgaggtcaggagtttgagaccagcctgccgacatggtgaaaccccatctctactaaaaattagctgggtgtggtggtg

SEQ ID NO: 486377 - DNA, 612 bp, Homo sapiens
ttaatgaggtggcaggcaatacagacagcgagcacttgggctcagtttgtttctgaccctccactaatgctgagatttttctcacccattcccacaggcctgtgaggtgtgtccctccagactgagaggctatgactcagggttggactttatggaaaaaaagaagtttataaaacaagtaacccagtttctccaacctttactgtggagcaacagcgtcaagcaacaaaacccagcaaagttttgcttgtcacttacaagggtgttactgaaatctggaaggcgaacaattagaagatagcccaaacatgctctattgctctacactgaaatacttgcctccaataatagaaaaaacctgttttcgtgcaattgattgattagcgttctgcagcagtccctggacaattttaaagacattttgtgtttgtggccaaaattagaaacaagcagacacacacacaaaacaaccatattcaagacacrgttcgactgtttccttgacactacccacgaagtttaaagcattttttatgttattttcaaactttcttaagtgatcccatgaaataaaagtcgataatagaaattaaaacaacacagagcaaagaa

SEQ ID NO: 486378 - DNA, 474 bp, Homo sapiens
cttgccacctggaatgaggtctcaatacatactaatgcacaatgcctttagaccctccaaggctgatattcctaaatctgaatcacaagaccacatagggtttatatatcacggctgcttcaagcaaatgatttttgtcagaatgcggcttctgatgatgatggcaaggtaaaaatagctgcttcgctagggcacaaatctgtgatatattttctacttaagtgtttagctttttattgattatgaattggtacaactagttgatgtatttttattcttctccagctatgcttgtctcaataggtgacaaagaaaagraaagaaaaagaaccaacactttttagtgaattaagacctgaaatggctaagtttccagattatgtatttcttcatttatttcaaaagaatctgtatgtttggcaagagttgagtcattgtgttaaaatgaaataacgccaagaaaatctcacctta

SEQ ID NO: 486379 - DNA, 684 bp, Homo sapiens
tgggacgcttgtctttactactatttctccccaccccaaccccatttttgtttccatcttttaaaggccactgcttagacattcagttcagtcagtcactagacctatcagtctcagtggaaactaagttatggccaggaagactgaataatgactttaaacatttaccatagacactacggtaatttcttttctgtttccttgatcacttataagattagactatcatgaaacactgtccaggaagagtttattttccaccacctgaaacyaacactttacagtttaagcctgaaagaaaacgaaatgcttttcctattggcagatccaagggatataatactgaaatttctaagttgagacagttccacaactttctaaggaaataaaaatctctggctgaggatacacttgattgttgtaaaaaatcaagtgtttcctttttttaaaaaaattgcattttcttcccttttggcaaattaagatccacttgcctaaaaaacaaacccagaattcttacattcttcactggaattatttcttcctttatcattgagctgtttacctattcttgaaattgtgacatatgggaatttcacacctagtgaatacattttcatgtagcttgtggcatgagtgtataatcattaaaagaatatacacaagtaagagtaactgcaacag

SEQ ID NO: 486380 - DNA, 643 bp, Homo sapiens
cataacgttgaagttgatctatcatttgatttctgtgggcatctctaacttttgcctgtcctccttcactaagctgagcctctggtgcattctgcttttctttctcctagcttcttgcttccttaccttrattggcagccactaagagcccacttagacaaaagcattatgagatcatctggcagcatttggccttaggtacggaacagaggagtatatcacggtggagtgatgcaatgaattgaacaaaaggtcaggtcacaaaatagaaaaatactggggaagtgtagtcaagaataatattttgtttagcattactcttgctatctaattaatgtcaatccatatcaattccattaaaatggtcccccataggctaggggacagaaatccctagctgaatgtggaggaaccttttgaattatttgctgctgccagaccctctttcaatccctcatttacttccccagtatttgaattgatggatgcggttcaacaattctggcattttgaatcagcacatgtggttaaaattaataatctgaagctctccaactttgagtctagttagcattgacttccctttggactatgcttcttaactagtcttacttatgattagtaatgatttcaaaccttttaa

SEQ ID NO: 486381 - DNA, 601 bp, Homo sapiens
cataacgttgaagttgatctatcatttgatttctgtgggcatctctaacttttgcctgtcctccttcactaagctgagcctctggtgcattctgcttttctttctcctagcttcttgcttccttaccttaattggcagccactaagagcccacttagacaaaagcattatgagatcatctggcagcatttggccttaggtacggaacagaggagtatatcacggtggagtgatgcaatgaattgaacaaaaggtcaggtcacaaaatagaaaaatactggggaagtrtagtcaagaataatattttgtttagcattactcttgctatctaattaatgtcaatccatatcaattccattaaaatggtcccccataggctaggggacagaaatccctagctgaatgtggaggaaccttttgaattatttgctgctgccagaccctctttcaatccctcatttacttccccagtatttgaattgatggatgcggttcaacaattctggcattttgaatcagcacatgtggttaaaattaataatctgaagctctccaactttgagtctagttagcattgacttccctttggactatgcttctta

SEQ ID NO: 486382 - DNA, 564 bp, Homo sapiens
tgttatagtccacagctgctttcttttctttactcagtatttttctgctttgttttatctttgcatatcttacataaatcaacagtagcttgtgttttctgctgcttctgtgtcatccaaagatttataaaagattgtctcccattaaggaaggggttctgtgacaacttgatgcatccatttatgtgtcaggaaacagtggaactaaaggatgtaatatttacttaattatttatcaaataataagacaccatttatcatctaattgcatgtattgtgatattaagatatgaagggacaatggtgaaaattctaggcagatgacttcgacatctgcctagaattttacactcataatatattttacactcataattatgttaattctacctttgccaaaatgccaatatgttttgtataatttatattaccagcataatgtacattaccaagcatatttagaaatgtcactatgtttgaaacraaagctaaacaatacaaaaagatacaaaataggaactgaaaatcccccacaatcctacctcctggagaagataacactga

SEQ ID NO: 486383 - DNA, 617 bp, Homo sapiens
aaatagaggaagttttgcccgcctacccatggctcacctcctgctgtgcggcccacttcctaacacgccacaggagttggagacccctgctctacacaaacactgaaagccagacacagcagccggaaggatgagagagtaaaggacgactctttggtccctagcttggatgactgtacagatggcgaggccatcacggagacagatgattccagagaaagaacagtttctgatattttgacattccaggccaagaaactaygtaaggacaaacaaaagatcctgaattatacggccccactagtggttgaagtctcacttcaagaacatgatggcttgactacatatgcaataataagagaagatgaaatcacactccagagagccagtacaccaccgtggaagaaagatatttgaaaatttctcttttgttttccagatttgctaaataatgtttaaaatcacctaaccaagttaaaatccctgttctcaatgaactcgcacgtgattcaagtcagtgtcagagagagtgttttaatatacaaccaatactatcattttcctactaggaaaaaaaacaaaactgcgataaagctataagactagcctagtttgat

SEQ ID NO: 486384 - DNA, 417 bp, Homo sapiens
agatgccaggaacacttcgcgagtgagcatgccaccacatttgagtgcatatagaaagttagctgtttgctacaactggggacacttcctattagagccgcatctgctggggtggagggctgcatgggttggagagtagggtgtgacttcttccagcaagaggaaagagaagtagcatagtgcccatcgcaggcagagagcacatgtttgacttgctcttggaatttctgtagagtaagggtggtcaggttgccagactacccctcaaacgaggacatggtgctgctgggtcccagggtagagctctgctggcaccttcaaggccctgatttacacctaagggcacacaactgggatctgaaaactgggatgcacagtasagactgcagatttacagggcggggctgtctctcatct

SEQ ID NO: 486385 - DNA, 549 bp, Homo sapiens
ccatatcgtggcctctgagtcaattatacaggcatctcggcaacttgaagttttgagtcccaaaacaacagattccatagcataaacagtgcaacgtaaatcctgtcccttgtccctcttccattggatacccttgtttatgttctctctggcaactgcctgtagcagggacggatgctggaaatcctggcggggccacgtcttctgtgctttgtaggcagctatggctggatggtgcttgctgtttctgtgtgtaaatgttgggatttttaaaagcccttcccygcttaatgcgttgtggttgagcagcacatttaaatgcctgaagtgtaagatgaagtctcttggatgtagagggcagtggtggtttttatttttcctggttgaacttggcctttggattgctgactgcgagctcacggtactgttaatgattttctacctacagtcacctgctgtgctgagcacatcaaatacagtgcggttagttccaagctatgaagcgcctgtcacgcatgtataacaggcagacctcattaggagggggcc

SEQ ID NO: 486386 - DNA, 697 bp, Homo sapiens
ctatttatgttctttaattttgcaattatatctactcctcaattaaaatacagaaatagaaggaattattttctgcttagtgtctgtataagcacatacagttctggatttgaagccctaaacattgacatgctcatttttttttttaattgttaatatctaaaacatctcaacaggataggggattgaaagtattctttagtaaaaacaaccccaacatacaaaaattaaaacttctgtaagtgataaaataacttagaactttgcatggaggaacctgacctagtaaacactgtgataggtgacagcaygggaggtggatgaggtagtgtgttatagtgaagattctgggcatgagagtggccacaggaagatgaattatcatttaagaggcagaattcagagacaagcatgacacaagagtttccaattcagtctcacttaggggtttcaatggctaccatttgctgattacactgtttttaaaaagtagtttaactctatgactaattcttgaaaatacatctgggccgggcatggtggttcatgcctataatcccagccctttgggaggccaaggcgggtggatcacttgaggtcaggagttccagaccagcctggccaacacggtgaaaccccgtctctacagaaatacaagaaaattagccaggcatggtggtgtgtgcctgtaatccca

SEQ ID NO: 486387 - DNA, 528 bp, Homo sapiens
tttcttcagcagtctgcagctggcttgcctctaacgttttttatacagcagtgtcttcaaagaagctgaaattgttctaagcgctgctgtttaaatcgatcaaatgaactgcaaaaatgttttagcatgccactctttatttcactatgctaatgaattatcactatttccattaaaagaagtcttcatgaattatgtataaaaacaaaaactaaaatctttcaataaaacctggaaatgtgggcttttggtaatgataagtaattaacattaatcactttacatctggaatgccaacatccccaaaagagcagaagagcagaataggaaataaggtcatttgttttctactccaagggraccaaaaatgtagaaatttgagctttctaagaagagaggtacttgataaatgccatgcataattaggagtttctcatcgctcatttcttcatactttcattctattatgcccacatccttgcacgcccaactccattcactctttccctctttctcgcatgagaggac

SEQ ID NO: 486388 - DNA, 585 bp, Homo sapiens
ggaaacctcgcctaggaacatttgcctggaatgtcctcttgtgttatgtctcttgggcagctaaggaagagagtaggtggctggacagtgcatagtttagttttgctgaaactctcgtaagaatcagaaaataytttttatctataaaaaattcttaattatttaataagttttcagttactttcagaacattttgcttttttaaggagagaagtaaattcataacctttattattggatgttttcattaaccaaagttttgtttgtacatggcttagaaaatcaaatattctttgaggttttgacagcggcatccctgaactacctgctataccctcatttctgatttccagaggaaatttggatatactctcccaattctcatattaaacattttatatttgctatcatattttaaattccctagaactaatttttgatttctgaatgctgacaaggatttcctcctcaggctctatcaaactttcttcctgactaggccttggcctgctgagcccagttttagcaagaattcttctatgccagtttactgagaatcccccattcttaatatccaatcaagtt

SEQ ID NO: 486389 - DNA, 531 bp, Homo sapiens
ttattacccataatagcccaaaactcaaaacaacccaaattcccattaataccagaacagataaattatggtacattcatacaatgagatgttatacagcaatgagaatgattaacccacaactacatggaacaatgtgggcaaatctcatgaatgtaatttgagagaaagaagccagacacaaaagaatacacattgcattattctatttctataaataacaaaaacaggcaaaacttcattatgttgttagaaatcaggataccagctacccctgggggagatggggtacctacccttgcaggaaggagacctgagggaggttccagggatgctggtgatgatctgtgttcctcttccaccagtgagttcagttcatgaaaattcatcaacccataaacttaggatatatgcatgcgtatatatatatrtgtgtgtgtgtgtgtgtgtgtgtatgtatatttttatataaaatacttcaataacaaggtttttttaaaatcacctcctcatgaagtttatattctagca

SEQ ID NO: 486390 - DNA, 683 bp, Homo sapiens
ttttaatgtgttatttctcaaatgatggctttgatttgttgaaatgttttagagccctgaacatctgacagaataaattaaacccttcctaacggccttcccttgattatcccaagtacccactatagataagattgtattttacatccagcttgaaaaatcataaaattgtctccattaaaataattaggactccttactttcattttaagatttggcctctacatatttacagcactcatttttatttacattttcacatcrttagaacagggcaatcatttttattgtgtggcacacatatgatttaagatacgtagtttccaaatgtcactggtgaaagctgaaatccattatcatttacccacagaaatgaagtccatcatgctgtgcacttgcagaaaagaataaagaggtttaaaccagaatctgcataatcccaggtagaggcagcagcagcagtgggggtggggtggggtggggagaagcatcatttctgatatgcaaaccatggaaaagaatggcatgtattacaaatcaggccatctgaatgcagaggacccaagaatatgctcaaataagtacacatattgtaatgaatcaattagaagcattgatgatcatttgctaagatgtttgataaaagttcctcagatatatatgcacagttttgcagttaacaa

SEQ ID NO: 486391 - DNA, 683 bp, Homo sapiens
ttttaatgtgttatttctcaaatgatggctttgatttgttgaaatgttttagagccctgaacatctgacagaataaattaaacccttcctaacggccttcccttgattatcccaagtacccactatagataagattgtattttacatccagcttgaaaaatcataaaattgtctccattaaaataattaggactccttactttcattttaagatttggcctctacatatttacagcactcatttttatttacattttcacatcattagaacagggcaatcatttttattgtgtggcacacatatgatttaagataygtagtttccaaatgtcactggtgaaagctgaaatccattatcatttacccacagaaatgaagtccatcatgctgtgcacttgcagaaaagaataaagaggtttaaaccagaatctgcataatcccaggtagaggcagcagcagcagtgggggtggggtggggtggggagaagcatcatttctgatatgcaaaccatggaaaagaatggcatgtattacaaatcaggccatctgaatgcagaggacccaagaatatgctcaaataagtacacatattgtaatgaatcaattagaagcattgatgatcatttgctaagatgtttgataaaagttcctcagatatatatgcacagttttgcagttaacaa

SEQ ID NO: 486392 - DNA, 683 bp, Homo sapiens
ttttaatgtgttatttctcaaatgatggctttgatttgttgaaatgttttagagccctgaacatctgacagaataaattaaacccttcctaacggccttcccttgattatcccaagtacccactatagataagattgtattttacatccagcttgaaaaatcataaaattgtctccattaaaataattaggactccttactttcattttaagatttggcctctacatatttacagcactcatttttatttacattttcacatcattagaacagggcaatcatttttattgtgtggcacacatatgatttaagatacgtagtttccaaatgtcactggtgaaagctgaaatccattatcatttacccacagaaatgaagtccatcatgctgtgcacttgcagaaaagaataaagaggtttaaaccagartctgcataatcccaggtagaggcagcagcagcagtgggggtggggtggggtggggagaagcatcatttctgatatgcaaaccatggaaaagaatggcatgtattacaaatcaggccatctgaatgcagaggacccaagaatatgctcaaataagtacacatattgtaatgaatcaattagaagcattgatgatcatttgctaagatgtttgataaaagttcctcagatatatatgcacagttttgcagttaacaa

SEQ ID NO: 486393 - DNA, 683 bp, Homo sapiens
ttttaatgtgttatttctcaaatgatggctttgatttgttgaaatgttttagagccctgaacatctgacagaataaattaaacccttcctaacggccttcccttgattatcccaagtacccactatagataagattgtattttacatccagcttgaaaaatcataaaattgtctccattaaaataattaggactccttactttcattttaagatttggcctctacatatttacagcactcatttttatttacattttcacatcattagaacagggcaatcatttttattgtgtggcacacatatgatttaagatacgtagtttccaaatgtcactggtgaaagctgaaatccattatcatttacccacagaaatgaagtccatcatgctgtgcacttgcagaaaagaataaagaggtttaaaccagaatctgcataatcccaggtagaggcagcagcagcagtgggggtggggtggggtggggagaagcatcatytctgatatgcaaaccatggaaaagaatggcatgtattacaaatcaggccatctgaatgcagaggacccaagaatatgctcaaataagtacacatattgtaatgaatcaattagaagcattgatgatcatttgctaagatgtttgataaaagttcctcagatatatatgcacagttttgcagttaacaa

SEQ ID NO: 486394 - DNA, 460 bp, Homo sapiens
ttgagtgaatgtgctactcacaaaactgaaaaattaatagcaattagtttagaccaggcactgcaggatactatgttcaacttctgtcagtgttcatatcctttttcactatctccttgataacaaagacaagaatatctcttcaacagagacagtcagttgtgccaaaattagggaagatttctcacctgtctcttagggaaacaatcatggtaaaagacagtacttctgatgtctagaaaaaaactatagagttcttctttcagtatctagacacacattagccaaatggccagaaagaataagaaacactgaaatgaacgataatgatacgtaaacaagatgtcaaaaagcacagaaatctgataaccaaactcaatcctgtctgcctacagcatagattgaacaaaatgtctgaacrtgtaatgctgacatacattctaagaatgggctaagcagg

SEQ ID NO: 486395 - DNA, 577 bp, Homo sapiens
acataggactgctgtttacaatagcaaagtcatgaaaccaacctgagcgtccaccaacagttggttggataaaaaaaaatggtgtgtgtataatatatagtatacaygatggaataccacacagccacaaaaaagaatgaaatcatgtcctttgcagcaatatggatggagctggaggccattatcctggtgaactaataaagaagcagaaaatcacatatcatatgttttcacttataagtgggagctaaataagggtgcacatggacataaagatggggaaaattggctctgaggactccaaagcgggtagagtgggaggaaggtaagggttgaaaaattacctactggatacaatgttcaatatttgggtgatgggtacaccaggagcccaacccccatcattacccatgtaatactcatgcaacaaacaagcacacgttccccctcaatctaaaattaaaacaaaacaaaacaaagcaaaaacctaggagtgctatctggctcagaaacttaggtgtaaggataatggttttcatgataattatcattgtaataatttatatacattgaatga

SEQ ID NO: 486396 - DNA, 566 bp, Homo sapiens
agctgggacaatggggaattgaaggtcagttttgtacgcacttcttgcaagcactataacttaaattcaagcctcctaagcagtgacaggggaataaarcccagggctgaatgattgattttgttgtccttacttcagtactacatatcaagtatattttttagtggaaagcttttggtatacctattagtatggcaggcttttaccctcgactcgagaacttgtgagaaaatgcttgaggctggtgcaaagagtgctaaggggatgtactatatgatctttatcataatgcaataagaaaagaattgagtactctttgttgtaaaagaagagaatttgctttgaacacatcagacttgagaaattgaacgggcaaaggagcctggcagctcaacttttatgggattttttttcctttaaaatattagaatctcttatataactcatggactatttttttgagtagcacttgaatgtgagaagagtcctttagaataatctctgtggaataaattttgtgtcagcatcttttttttttttttttttctgcatggcatggtgggctt

SEQ ID NO: 486397 - DNA, 566 bp, Homo sapiens
agctgggacaatggggaattgaaggtcagttttgtacgcacttcttgcaagcactataacttaaattcaagcctcctaagcagtgacaggggaataaagcccagggctgaatgattgattttgttgtccttacttcagtactacatatcaagtatattttttagtggaaagcttttggtatacctattagtatggcaggcttttaccctcgactcgagaacttgtgagaaaatgcttgaggctggtgcaaagagtgctaaggggatgtactatatgatctttatcataatgcaataagaaaagaattgagtactctttgttgtaaaagaagagaatttgctttgaacacatcagacttgagaaattgaacgggcaaaggagcctggcagctcaacttttatgggattttttttcctttaaaatattagaatctcttatataactcatggactatttttytgagtagcacttgaatgtgagaagagtcctttagaataatctctgtggaataaattttgtgtcagcatcttttttttttttttttttctgcatggcatggtgggctt

SEQ ID NO: 486398 - DNA, 481 bp, Homo sapiens
ctcattacactgcaaatgtctcttctgtatttgcatagaaactaaaggcagtttttaaatcaagagttaattttttaaatgtgtaaattttatttgcatatattgatctgtcctgacttttaaatactcattcatttatttactatcaaatcagcctttttcagcaaatttggcagttaatgtcatggcagacataaaagctgattttattaatattcatttgctctgctgctgcttatatttatgagcaaacaaatattaatagaataataaaaatagctattcatggttaatctcctcttgttcttattttttatgaatatttgttaatggtctggttttttgttgttgttgttgtttgagacagggycttgctctgtcaccctggctggagtgcagtgggatcatcacagctcactgcagcctcaacctcctgggctcaaatgatccttccacctcagcctcctgagtaggtgggcat

SEQ ID NO: 486399 - DNA, 634 bp, Homo sapiens
agttatccagatattttaagcaaatgtctggatatttttaagggcatggtaataatgtttattgtttactctgtgacaggcacaactctaactgtttcmcatacattgtacaggtgaatagcgacaaaacaaattatgagataggttcattgttattcccattttatggatggggaaactgaggcacacaaagtgagattactaatttatccaaggtcacaactacttctctaaattagccagattaaacatttgcataaattaccaaacttatttcttcttcttgaataaaaaaaaatttttaaatgtcatttcatattgtccatgagattatttcagtacagtatgtagtttatggacttacagcagcaacatgttctttgtatcaaagttattttcagacaaaatttactttccttgctttggtatccttacttgggatggtttctaaacaataaacccactagtgtctcattcctctaccagtaatgatagtcctaattttacttcctgagcacctttctttcctccaaaggctgcaaagttcaggatagagttacatagtaatagaaagcaatttctcttacaaaagaggcatgagagagatagcaggccttggcatatgctccgtttc

SEQ ID NO: 486400 - DNA, 380 bp, Homo sapiens
aagagtgggtgtctccgtctgagtcgcgcgttgggggttccgcggctcctccgagccacaggaagaggcggagccttcgctgttgccggcccgcatgtgcctcggcccctggctggcgcgcctcctccctgtctgtcgctctctggtcttctagcccttaaacttggattcccattggattcaagtgggaaattaaaaaaagtaccgacgcctgggccccaccgccagagggattggtttaattacttctgtgcgrcccggcgtctgatttttttttttcaagctctaatgagccgtgaagtttggagccactaccttattccatcaactcagttaataaccctcgccctttccccctcgctttcttcgtcctcttctgt

SEQ ID NO: 486401 - DNA, 296 bp, Homo sapiens
aatctctacgtctcagtaaagtctgttcccccaagaccctgaactgtgacacttkgtaccagagtcatatggggcagaatctaaaatgggattttgactcttgggacccactgagcgacccattaaactttaagtttcaggtgcctcttggtcactttgtgctcctcagaccagcaggtaaggagaaaagtcaccatcctaacagagacaatttaccttgaaaattaggaggaagctcatccgtttttacacacacaggtcaaggggctaggcagagtgatgaatacctgtaatct

SEQ ID NO: 486402 - DNA, 503 bp, Homo sapiens
ggctaagatctatacatgatatataaaacgtatgtacataaattcatgtgaaggaaataacatggtaatttttgtattgtattattttaagaaagtatcaattgattcctattttattcagtgtttctgtcaggaatgggtttttattttgtcagatgcttagatctattaatatgatgaaatacatcaacagatttcctaatattgaaggattcttgcattctggaatgagtcttgcttgatcatgttgtttgcttaatatgctattggtcattttatttaaaaattttgcattcataaagtaaaattggtctgaagtttttttgttgacaaattatatattttttgtaaattgtattttcctagaasatcaagtctaagtgtggtcctaggatcccctcttcccaagatcctcttaaggggttaagattaaatttattttcgtaataatgttgagttgttacttctttcattcagattccttcacaaatatacaggggcag

SEQ ID NO: 486403 - DNA, 499 bp, Homo sapiens
aaaaaccatgaagcacaaggccatggggaggcccagcctgtactccaggagaggacatgaggtctggcttctccagcggcccagcttttctccttcttgactcctactcrctcctgctgctttctggctccagaactcttctcctggtgtcttgggactctcagccctcccttaaatgctgggtgcagctcaggagaaactcccttctacagaactgtgagcagtctctctctgcctgcagtgactgtgaacagacaccctgcctttcattagggctgggaacgagacccaacacgctggcctctgggagtgggggcactcctcagcccgcacaggcagagtactggggatgagcctccagcttctcatcagaggttggctctattcaacagcttcagcccagaggcagtgacaatccaaggatctgccctcacgcgggggctagagttggctagtgggaaggcaggagggattaaaaaaaagtcagcaggcaggaaac

SEQ ID NO: 486404 - DNA, 499 bp, Homo sapiens
aaaaaccatgaagcacaaggccatggggaggcccagcctgtactccaggagaggacatgaggtctggcttctccagcggcccagcttttctccttcttgactcctactcactcctgctgctttctggctccagaactcttctcctggtgtcttgggactctcagccctcccttaaatgctgggtgcagctcaggagaaactcccttctacagaactgtgagcagtctctctctgcctgcagtgactgtgaacagacaccctgcctttcattagggctgggaacgagacccaacacgctggcctctgggagtgggggcactcctcagcccgcacaggcagagtactggggatgagcctccagcttctcatcagagrttggctctattcaacagcttcagcccagaggcagtgacaatccaaggatctgccctcacgcgggggctagagttggctagtgggaaggcaggagggattaaaaaaaagtcagcaggcaggaaac

SEQ ID NO: 486405 - DNA, 499 bp, Homo sapiens
aaaaaccatgaagcacaaggccatggggaggcccagcctgtactccaggagaggacatgaggtctggcttctccagcggcccagcttttctccttcttgactcctactcactcctgctgctttctggctccagaactcttctcctggtgtcttgggactctcagccctcccttaaatgctgggtgcagctcaggagaaactcccttctacagaactgtgagcagtctctctctgcctgcagtgactgtgaacagacaccctgcctttcattagggctgggaacgagacccaacacgctggcctctgggagtgggggcactcctcagcccgcacaggcagagtactggggatgagcctccagcttctcatcagaggytggctctattcaacagcttcagcccagaggcagtgacaatccaaggatctgccctcacgcgggggctagagttggctagtgggaaggcaggagggattaaaaaaaagtcagcaggcaggaaac

SEQ ID NO: 486406 - DNA, 464 bp, Homo sapiens
gctgctcgggaggctgaggcaggataattgcctgaactggggaagtggaggctgcagtgggccgagatcacgccactgcattccagcctgagaaacagagcaaaattggtctcaaaaaagaaataacaaggcaggtgattggcaagctcaatgctcaattccgctttgtaatgtaacctaacattcacaggttctggggattmggatgtggatatgatggtgggtgggtaactgggggtattattctgcctaccatatggccctagtaggcttgtagcaaataaagatgtcatttctccccttcccttggaagtaatttgcttgattgctgtgcgaaggatatctaaatattttacgtgaatttttagaacatccatgaagtagggggttgtattgaaagaatgaaggttatacatcagcatacatcagaaacgtttgtgtatgagaaagtgtgagcatgcatg

SEQ ID NO: 486407 - DNA, 464 bp, Homo sapiens
gctgctcgggaggctgaggcaggataattgcctgaactggggaagtggaggctgcagtgggccgagatcacgccactgcattccagcctgagaaacagagcaaaattggtctcaaaaaagaaataacaaggcaggtgattggcaagctcaatgctcaattccgctttgtaatgtaacctaacattcacaggttctggggattcggatgtggatatgatggtgggtgggtaactgggggtattattctgcctaccatatggccctagtaggcttgtagcaaataaagatgtcatttctccccttcccttggaagtaatttgcttgattgctgtgcgaaggatatctaaatattttacgtgaatttttagaacatccatgaagtagggggttgtattgaaagaatgaaggttatacatyagcatacatcagaaacgtttgtgtatgagaaagtgtgagcatgcatg

SEQ ID NO: 486408 - DNA, 317 bp, Homo sapiens
tgggattacaggtgtgtgccaccatgctcagcttttttttttttcttttgtatttttagtagagacrgggcttcaccatattggccaggctgatctcgaactcctgacctcaaatgatccgcccgccacagcctcccaaagtgctgggattacaggcgtgagcccccgcgcccggccccctttttcccccaatcttaagataaataagtaaccaagaggctaatttaaatggtttccaaagcacaaattattctagacattgaggtaaataatagtgattctgggcaccagaagccctgaaccttgtactaagaatg

SEQ ID NO: 486409 - DNA, 561 bp, Homo sapiens
gtaatatgaattttgaagccagaactggaaatcccctgtgctgtgtcttcctcttcgtggtagtagaggttacagttatcaaatagtccagagaagcaatgggaacttatgatttctgatagaaaaattttaacagagatgtacttgtatgcaaataatatatgatgcctcagtttcctccaaagtcttagttaacagagttagaaaaaatcagattatatttgaagttctgtgttcatactggagtaattattattccaatggtacaatatacaacataactttattacattttttggtacagcataaagatgattttccctttctctgagtatttctgaaatttaaaatgaaataagtgtggtagaagccattatttatgaattatcatgctaaattaattaactcattaattcattsagggcacacccagttattccccaaactgagtgatgtatttctgggaatagacttattaagcttgagaaaacccaaaggatcattataacagcaaacaggaatgtaggcatccacatagtggatgactttagtgacctggca

SEQ ID NO: 486410 - DNA, 631 bp, Homo sapiens
tgcacagccaacttagtatattgagacttgatacaatatatttcacaaaaaaatggaaaaagaagcacagaaaacacatcctttatataaaatatcacagaacctaggttgaattctcctcttgaaactttgtggtcttaggctacgtaaaagtaatgcaatgtgaaatagcagtgttaaactgaagctctgtgaattttaaattaggttgaaaaatttacccacactgcatcataacaattagaagaccatgatatagaaaaaagaaagcagcatgtcaatactgcaaatataccattataaaaggaaggaataaaaaagaaagaaagaaacagataaaagaaagagaggaaggaaagaggaagacgaatgaccaaggagrtaggaaggaataatggactacaaaaatgaaataaaaaatcaactctagaagaaaaatattacctaatgaaataaagaaaaatattgcactgtttcttggcaaagaacttacagaaaacacattcaaggtatcagtatactaagtttacaataataaaatagcagattaaagtgaaaatacagagctaagagcaaaactgaaggggaaataacagtattaaaaaactaaaaaataattggaaaataacag

SEQ ID NO: 486411 - DNA, 492 bp, Homo sapiens
  misc_feature (1)...(492): n = A,T,C or G
nnngttgtccactctgcatctgggaaaccactttagagcctatggctctctatccccagttaacttcttcatctctcttagagacctagggaaggtgtgggccttccctggggtcatgggaaattagtagtgytgcttcaggcacttcaggcatgtgaagtctcaggcaatcatctctactgtgcctgcaatatggtggcatctgaaactcctgttacggcttctgggggtcccacatgtattgtccttattgctattttgaagagggatttaatagatctcttctattattgggtctagcatcttgtgagtctcctgccaccttccttcttaatgctaagttggagcaggttcaggactctgtcttagagaattcccaccccaccaccgtattagtctgttttcacactgctataaagatactacttgaggctgggtaatttataaacaaaagaagtctaattgactcacaattccacatggccagagagg

SEQ ID NO: 486412 - DNA, 492 bp, Homo sapiens
  misc_feature (1)...(492): n = A,T,C or G
nnngttgtccactctgcatctgggaaaccactttagagcctatggctctctatccccagttaacttcttcatctctcttagagacctagggaaggtgtgggccttccctggggtcatgggaaattagtagtgttgcttcaggcacttcaggcatgtgaagtctcaggcaatcatctctactgtgcctgcaatatggtggcatctgaaactcctgttayggcttctgggggtcccacatgtattgtccttattgctattttgaagagggatttaatagatctcttctattattgggtctagcatcttgtgagtctcctgccaccttccttcttaatgctaagttggagcaggttcaggactctgtcttagagaattcccaccccaccaccgtattagtctgttttcacactgctataaagatactacttgaggctgggtaatttataaacaaaagaagtctaattgactcacaattccacatggccagagagg

SEQ ID NO: 486413 - DNA, 621 bp, Homo sapiens
tgttttgggaatgggcccagcaatgagcttgttgggaaagttttcatcttgaattttggtgcacactaaactacagcaaggacagattcggcaggggcgggatggcttgtcaattttgattgagtgacctcttcttttatgtaatgagtatcaagataatcctttttgcaaagtggtgaccctrtggtagagtttggatctggggattgcagaatgtcactgggtgcattgaagctgaaggcgtgcatttctctgagtaatgagaagcacccttgagtcaccaaggcactggcatatcaaaaagcggtgccgctgtccatatcttgacgattgtagacacagttgtagctgtagagagatgatgggattccgtcatcatcagagacctgccccatctgttgacccccaggctgtgactccaggcaccctgcagggcatcccaccactgctcagagcaattctagggcccattctggtttccagcctaagtgctgccccacccagagggtctttctggcccttgcttccgtgtgttctgtgtgtttttctacagcagagctttgggtggcttggttacaggatgggttgctacaggattcactgtgggatgagggagaggca

SEQ ID NO: 486414 - DNA, 621 bp, Homo sapiens
tgttttgggaatgggcccagcaatgagcttgttgggaaagttttcatcttgaattttggtgcacactaaactacagcaaggacagattcggcaggggcgggatggcttgtcaattttgattgagtgacctcttcttttatgtaatgagtatcaagataatcctttttgcaaagtggtgaccctgtggtagagtttggatctggggattgcagaatgtcactgggtgcrttgaagctgaaggcgtgcatttctctgagtaatgagaagcacccttgagtcaccaaggcactggcatatcaaaaagcggtgccgctgtccatatcttgacgattgtagacacagttgtagctgtagagagatgatgggattccgtcatcatcagagacctgccccatctgttgacccccaggctgtgactccaggcaccctgcagggcatcccaccactgctcagagcaattctagggcccattctggtttccagcctaagtgctgccccacccagagggtctttctggcccttgcttccgtgtgttctgtgtgtttttctacagcagagctttgggtggcttggttacaggatgggttgctacaggattcactgtgggatgagggagaggca

SEQ ID NO: 486415 - DNA, 621 bp, Homo sapiens
tgttttgggaatgggcccagcaatgagcttgttgggaaagttttcatcttgaattttggtgcacactaaactacagcaaggacagattcggcaggggcgggatggcttgtcaattttgattgagtgacctcttcttttatgtaatgagtatcaagataatcctttttgcaaagtggtgaccctgtggtagagtttggatctggggattgcagaatgtcactgggtgcattgaagctgaaggcgtgcatttctctgagtaatgagaagcacccttgagtcaccaaggcactggcatatcaaaaagcggtgccgctgtccatatcttgacgattgtagacacagttgtagctgtagagagatgatgggattcygtcatcatcagagacctgccccatctgttgacccccaggctgtgactccaggcaccctgcagggcatcccaccactgctcagagcaattctagggcccattctggtttccagcctaagtgctgccccacccagagggtctttctggcccttgcttccgtgtgttctgtgtgtttttctacagcagagctttgggtggcttggttacaggatgggttgctacaggattcactgtgggatgagggagaggca

SEQ ID NO: 486416 - DNA, 604 bp, Homo sapiens
tttatttggaccatcatgcacagcacccttaacagctcatcacgagagatcttgttatctttatccaaatcatatagtcgaaaagcaaactgcagtttgttgcttcggctgttgagtggttcaggtccattcacaactttgctcttttcattatcctcaatggtttggaaatgagccagagtttgcaggaatccacggaagtttacctggtcctctccctctggaaggaaggcattgatgatccagtcccccactgggttgatggcaagttctggaatcccctggaaatcgtcctgttctctcctttgtccaggytgctgaaccggctgtacagacgtgtgatttgactgtgggaaaagccagtctccttcttgatctcctcaaactcttcatcgtgcagtaaggtggaggcctgagaccccatcactgtgccaggagctcctccacgaacagaaagcacggcaacaagagggaaggcaagaatttaaccttgcccaaaaagagggctggccttgctccttggctaatgacacgatacggaggcagggctggccatgcagcacctgagtgatcagtggaccaatcctgcccatgtcacagcccc

SEQ ID NO: 486417 - DNA, 600 bp, Homo sapiens
ggctacttcccaactcactccacgcctcactccactgctccccacgagctcgcctgacccttgtccctagatcccgagcagtccctccaatgccacattcttctcaccccaagggccttgcacrtgtcagaaaactctccccagatttttacatggctcttcccacttcatttaggcctcttcaggcctcccgtgcccattgtagaaagcactgacatccttctcttttccctctggaatgtcagctccatggagcaggaactctctctgcttcgctcatggttgaaatcctaggacctagatacctgccagccatatagaaggcctggagatatttcctgcgggttgaatgaatgactgtcctaaaatgtgataaggactaagacagagggacgaggggaggacaggagctgggaggagggggctggggaggggacgatgcctgggctctgtccaggtgacaactgaatggacttagccctcgatggccctccttcttggcactcagtgctgtgaactttttaaaagtatgcccatccatcacatcttacccaggattccagaaacagagagattgggaagaaagtgagcaaaatctat

SEQ ID NO: 486418 - DNA, 539 bp, Homo sapiens
tgagggcgctctggttccagtccacttcatagcgcctgcactggccaaggaaggcctcgcccgcgggccccaggcctggcactgtatagttcagctcctccgcagggctccagccacagcgctggctcagctcagccaccccaggrctctggcagtggtggtcaggtgtgaaacccaggaagacgatgcccacacagatgggcgcaaaggcagccgacagcaggcataagatgaggaaggcttgcttctggaaccagccagactccccaacctgctccagaatgtcatccacggtgggcatgatggctcagcatgctcatggccgtggccagacctgctctgggctgcagtggccaggtgcaatgtctccctcagagatctttgaaaaggagtggtttgaaatcagtttgctgtccaagtgtgaaacatctggaaggcaaccaagtagaaataatcttttaccctatggtgctggtttcaggaaaaggaagaatgcacgtggccatctgatcaaatcgtttgctttgcccgggagcgag

SEQ ID NO: 486419 - DNA, 608 bp, Homo sapiens
gtgctctctttagataatattccctcactgaaaggttagtctcaatagaatttttatgattaaagcacaaatgtggtatttatgaggactaggatttgtgtttctggcaacccgagtgtcctcaaaagcattgcagccctgtcctcatttcacaagtcctataatgttttgcagaccaccgtgtcctctatacttaaatccttctcatagactaacaagtggcaagccttcactcttacacatattataatctttgtgggatgcactaaagacttctgtgtgatgaattgtcatctccctcaacctcaaaggtaactggctataaaactgttttatgttcctagtattcctagtcctcgtgtaaaaatactagctgtaattcagtgttgggcatgtggtattattcataaagcattcagactgtacagttttagaatgtcatcrgaacttcctgattgaattacaatctagcattcagctaagtgtccttttttatgcatgaaaattactcacaagcatttcccaacatctccagggcctacatgggagttccagagggagcaacactttgcataatccttcaaaaatatcttcagggacattcaaga

SEQ ID NO: 486420 - DNA, 514 bp, Homo sapiens
caagcgtggataatttttgtatttttagtattttacttatagaattccatgatgccaaattatattttatagataacaaatagagagctgtgtcccctgacttgtcacctctacagaacacattgagataacaggaaacggccatatattctggaaagagaagaggctgaataaagagagatgaggatccttgggggagagacttgagtgacyacagtgggaaaacatgtcactccttcctggggagaaaggtcaggtgtttgagtgtgcgacccctgagtttcacagtaaaggggtctagtttggatgcagttgagaaaggccactggctactgatgtagcctgagtccaaagagcagaaagtgaagcctgttagttacagagattgctgaggaccccagaggggtgcctcagcactgcaggactgtgagtggagccacttcacaagagcaaaagcatcaaaaatgaccatcttgagctgccctgaagtgccagcatctgctcagctttgtat

SEQ ID NO: 486421 - DNA, 514 bp, Homo sapiens
caagcgtggataatttttgtatttttagtattttacttatagaattccatgatgccaaattatattttatagataacaaatagagagctgtgtcccctgacttgtcacctctacagaacacattgagataacaggaaacggccatatattctggaaagagaagaggctgaataaagagagatgaggatccttgggggagagacttgagtgactacagtgggaaaacatgtcactccttcctggggagaaaggtcaggtgtttgagtgtgcgacccctgagtttcacagtaaaggggtctagtttggatgcagttgagaaaggccactggctactgatgtagcctgagtccaaagagcagaaagtgaagcctgttagttacagagattgctgaggaccccagaggggtgcctcagcaytgcaggactgtgagtggagccacttcacaagagcaaaagcatcaaaaatgaccatcttgagctgccctgaagtgccagcatctgctcagctttgtat

SEQ ID NO: 486422 - DNA, 520 bp, Homo sapiens
ctgaggggatcaagttatacgactaccgtgtccaacatctctgactaatctggttcacctcagtcgcatacactgagaggcggccggttgggggagaagagaaagctttaaacagyacaccaatttcttagacacactaaccgttcctaggaaagccttctgtccctagtccacgggttttgcctactgttatttgaggcacttggaggattttactcttgccaagttggcatttgtttctgcagtgcaaaaatgtctggactgaagagatcacatggagatttctatgcttcaggaacacaggcaagcatctctctgcctcaggtagatgcattatagctcgtgggagtgctaatgagcactaattactctatttactccctgagccaaccagccagcaacaagaaatccctggtgaaacttgctgggttctcatatgtactatcctggctctgtttcaaagggctggtgacaaagtgatttgaagggatcagcatgaggctacccaactggattgtta

SEQ ID NO: 486423 - DNA, 628 bp, Homo sapiens
gaccacaggcacgcgccactgcttttggttaattttttgtatttttagtagagatggggtttcaccatgttggtcaggctggtctcgaaatcctgaccacaggtgatccgcccgcctggcctcccaaagtgctgggattacaggcacgagccaccgcgcctggccaagaaggcagatcttaattgttctcatgacattataaaaagaaaaaaagaaaagaaaagaaaaactatttgaggagatggatatggtaattatctgaatgtcatggttatttcrcaatatatttatgtatcaattatatgctgtaactatatacaatttttaacagtaaaataaaactgtaaaataattgtttaaatgttcagcaaaataaaaacaaattaaatataatcctattaccatgctataatttttttgtgtgtgaatttctcaacaatatttaccaaaagcacttataatttttgcagctctaattcctctatttatatctattattattttgattcattgaatatgtgaccatctttgcatatgatttttattattttaataattgcacaatatttaaccactttgttgtacaaataatttcatctatattccattgatattgaatatttaatac

SEQ ID NO: 486424 - DNA, 628 bp, Homo sapiens
gaccacaggcacgcgccactgcttttggttaattttttgtatttttagtagagatggggtttcaccatgttggtcaggctggtctcgaaatcctgaccacaggtgatccgcccgcctggcctcccaaagtgctgggattacaggcacgagccaccgcgcctggccaagaaggcagatcttaattgttctcatgacattataaaaagaaaaaaagaaaagaaaagaaaaactatttgaggagatggatatggtaattatctgaatgtcatggttatttcgcaatatayttatgtatcaattatatgctgtaactatatacaatttttaacagtaaaataaaactgtaaaataattgtttaaatgttcagcaaaataaaaacaaattaaatataatcctattaccatgctataatttttttgtgtgtgaatttctcaacaatatttaccaaaagcacttataatttttgcagctctaattcctctatttatatctattattattttgattcattgaatatgtgaccatctttgcatatgatttttattattttaataattgcacaatatttaaccactttgttgtacaaataatttcatctatattccattgatattgaatatttaatac

SEQ ID NO: 486425 - DNA, 626 bp, Homo sapiens
aatattttttaaaaaatttaaaaatgwattttccaacatatgtggaacatatttaccttagatatgtatgatatatagacatgctgaaacttatttgtttatagaccctgaataaatatttaaaccaatggagaataattaaaactctttatctgcccaagcgtatcacttctaggctcatgtcagataacccaaagcgcatgagaatcagctgaattgccagaagaattgtttcttctatgatctagttgaaaatttttctacctaattcttgaaacttcttgatatttgcagctctctgccctcaaaatatctcctcataacaaattttttaagctgctctgctaggaagaaaatctatcctcactagaatttgcacatgctcctagcatttctgcctctagtctctacaattttgcttcagactactccagtctgccaataagctctgtaaggttgggcccgagaggtctcctaagcctctgaaagcaaattagacagcattagcagaaaagaatttgacaactagtcttttttggggataattgtctctgttttttaaatcacaaaacttactgcttgaaaactaaagtgtttctccatctgtttatgttattttgtaaatt

SEQ ID NO: 486426 - DNA, 626 bp, Homo sapiens
aatattttttaaaaaatttaaaaatgtattttccaacatatgtggaacatatttaccttagatatgtatgatatatagacatgctgaaacttatttgtttatagaccctgaataaatatttaaaccaatggagaataattaaaactctttatctgcccaagcgtatcacttctaggctcatgtcagataacccaaagcgcatgagaatcagctgaattgccagaagaattgtttcttctatgatctagttgaaaatttttctacctaattcttgaaacttcttgatatttgcagctctctgccctcaaaatatctcctcataacaaattttttaagctsctctgctaggaagaaaatctatcctcactagaatttgcacatgctcctagcatttctgcctctagtctctacaattttgcttcagactactccagtctgccaataagctctgtaaggttgggcccgagaggtctcctaagcctctgaaagcaaattagacagcattagcagaaaagaatttgacaactagtcttttttggggataattgtctctgttttttaaatcacaaaacttactgcttgaaaactaaagtgtttctccatctgtttatgttattttgtaaatt

SEQ ID NO: 486427 - DNA, 657 bp, Homo sapiens
tgcctctcagggactgcactgttcctcttcacccccaggttcctgctaagatcccacgggcgagggcttgctctggactcagacctgtcaagtccccgaagcttcctgcagctccaccttgtaaaaatgctgcctttgggaatcttcgaaatatgtacacagagaaaatcacatgaaggagacctggggtccccacttgtgagtgcaactgcaagtaactctggctagagagacacatgtgtcttgtgtcaaggcaggaggataaccyggatgaccttctgaggtctcttcagcccttttcgctagtggtcacccaccaccatggttacttgccagcaacatctctattgctggatggtccctgtctataaccttgggctagtatattttttccaatatgggaccttagtcttactactgatgagttctatgggtctcttgctagggggtaaggatttttattcttgggcttatagagccagttagatcataattcttatgaaatagagagtgtcctaaatatcactgaaataaaaagtaggaaaaagaagcttgaattttaagactgaggctgctctgcagattctagtttggctttcagagttcaagagtggtggcatcttcacctgaattcttcaatgccagggtaataaacca

SEQ ID NO: 486428 - DNA, 480 bp, Homo sapiens
gaaaagacttgagcccaaatcctctgcagactgcacatagcacacgtaacaaaactgggcaagggtctcccttagccgtgggcccatgcagctaggaacccagtccccagagattgaggcagtgaccgaaagctttggcaaccaataactgcttcatttcccaccaggttcagaatgaactatttacaggtgggaaggacagcattaagtcatgatgctagaaagccctctgctcctccagctccaagccagattggtcacactccctacctcagccacgtgcacttcatagctccgtggggtggcgacatagactggcagttacctggtacttcaacascctctgcttgagacactcagccagctccttggccctgggctcagcaacacaggccccagagggagctggagaggatggctgtaagcaccgcccctcagaaggaagcaagagggagactcagtagccccctggggggcaga

SEQ ID NO: 486429 - DNA, 404 bp, Homo sapiens
accgtggggcgaggccatggaaagggggtgggaaagacccccacctccagcccagtctccactcyccgacccagcaccaggttcaggcagcacacacattgcccgctgctagcctggtgagagggcgcaggaagatggcactatgattagctcctatcgggtccgaggggtaacctaatttactgcttggccataactgcatttctcagagagcaaaggcagaagggagttagaaaccaaaatggcttttgtgagattaacaactagagatgattcttcccgctagctgcagagctgtacccacttggagatctttaagggtaggaataacaagaacaaaagtttcataaagtaagccggcttctttaactgggcatctcggctatccctcacattgtacgatg

SEQ ID NO: 486430 - DNA, 571 bp, Homo sapiens
gtgctttcaaaaatactgtacaaaatgacaggctgtgagtcccaaacccaaamattttctaaatcactgatcaaagaaataaaataaaatttatgaaaaaaaatgttttgacttggaaaacataaacgcacaggcattttaagtgatggtatccatgggactgtaaggtcttactgatgtctttcatcttgaccttgatgctggtcaaagctctcaatttttcttcatcagtagaacatgagcaaagatgcaatgaaaggacagtggaatcaacaaagcagaactggttagaagactaaaggtctacaacttcccgatatacaatccaacttccctgagtccatttcaccatcctcaaccttggcattccaggacgtctgtgccctcccaacaacagcctggcttggaaaaggaatatcccaggggagaagcgtgaatctgtagagtaaccgaaaagcaaacctggtggagaacaaaggattatatagctgaactctcctgccctggtttctctgtgcatgctcctccggctttttatgccactttctaagtaaagaggatgctcagggct

SEQ ID NO: 486431 - DNA, 620 bp, Homo sapiens
ctggcctcttgcatgtcttgacacagagcagcaccctctctcaaagcgcttcttctccaggccttccaggcccacagccgacccataagctcctctctcaatggctacagcctccgcctcctgtactgcctcctcctcctgttctctaattgtcctgggtctttccaccacttctgtctccacrttgtggtcctaggctcctccaccccagggctttaagaaccacacacatgctaatgactctcacctttgaccttctgctgatcttccagctgagcttcagactcatatgcactcctaggctacgtgctctcttggtgcccaacaggtctcaaacttgacatgtctaaaacagaagacttgcctgtagttccagctactcgggaggctggggcaggagagtcgcttgaacccaggaggtggaagttgcagtgagccgagatcatgccactgtactgcaccctgggtgacagagtgagactcggtctcaaaataaataaataaatacataaataaataaaacagaagacttgcttccctaccactccaaacccatttattccctagtctcctccgtcatactaagtgaaaccactctaccctgttgctcaggacgaaaa

SEQ ID NO: 486432 - DNA, 620 bp, Homo sapiens
ctggcctcttgcatgtcttgacacagagcagcaccctctctcaaagcgcttcttctccaggccttccaggcccacagccgacccataagctcctctctcaatggctacagcctccgcctcctgtactgcctcctcctcctgttctctaattgtcctgggtctttccaccacttctgtctccacattgtggtcctaggctcctccaccccagggctttaagaaccacacacatgctaatgactctcacctttgaccttctgctgatcttccagctgagcttcagactcatatgcactcctaggctacgtgctctcttggtgcccaacaggtctcaaacttgacatgtctaaaacagaagacttgcctgtagttccagctactcgggaggctggggcaggagagtcgcttgaacccaggaggtggaagttgcagtgagccgagatcatgccactgtactgcaccctgggtgacagagtgagactcggtctcaaaataaataaataaatayataaataaataaaacagaagacttgcttccctaccactccaaacccatttattccctagtctcctccgtcatactaagtgaaaccactctaccctgttgctcaggacgaaaa

SEQ ID NO: 486433 - DNA, 582 bp, Homo sapiens
tgcctgcctccagttgctcctcttcaccaccacctcaccttccaawgggcaagtggcggggctgtgcagtatcacaagatcagcctttgaaaatatctgtttggggtttcctttcctaggcaaatccatacaacctattccctaaacattcaaactaagacagactataggacttacagaaaaatgggttcaaaatgaggcaaagataggaaagtgcttcttacagataattttcaaggccagtgactggagagaggggtaggtctgtcaatcgagtgcttgctgactgcacatatcacatggcgtgtgacgactgctgggagaggaaagcgagacatcattccaaccctccagaagctaaagatcctggaactcaaggggaaaactaacgtaagtgcgaaagcgaacaagcaaacatgtcctcaactgggcaggcaggctgtcggggtacagagctgggatctgggaaggaacagagagggccgctcagggagaggaagcacagtgccaccggaggcacgcactcagcaggcactcgcaggctgggcagaggtagagaagcagcgctgcacaggcaggcag

SEQ ID NO: 486434 - DNA, 607 bp, Homo sapiens
ggaaaccggcgttccccgcgcaaagcagccgctgctcctaatgagctcatgggttcaccgcgctgagctagccagagcggacccggcttcgccaagggcctgctggctgtcctgacacctggcctacctcgggggtgcctgggtacgctcttcctttgcctgcgggatagaagcacaatgaaaatggggtggacgtggctgggagacagccctgctctctggcaggctctggggagtgtgtggtacgtggcatccgcactggtgggtgtcgtgcgatgatcgagacacggatactgggtgtctttcccactaggggagagagggctgcgtttagagggaaacgaaatagatccgagaaacacaaagatgtcacaaaggaaacgcttccccaccataagcaatctaaataaatgattcttagaagacatccagcaaaacacataaccttgtcatttagattcgctcgcccacaggggractggagggtactcaccgactagggcttcacagccgcatcaccgccggcggtgggcgcctgcctcggcaggggcagggtgggtgcccgcagggcacaggtgccgccgtggctgctcgcacaacccctgca

SEQ ID NO: 486435 - DNA, 616 bp, Homo sapiens
tcccatggacacttcttccttcatgtctgcatataaatttgtaagaggaaaaaaacacagaaacgtgaaaatgtaccagatgaaatcaaaatcagttaacttattatactacattaatttcttaattttgtataaggttctgtaaaaygtaacattagggccaagtgggtgaagggcatataagaatactttgtactgtctttgtagctcttcatcaagtgcaatattatttcaaaatacaaagtttaaaaaagtaccagatattgccatttaacacaaatttaatatattttgccaaattctatatactttttttctatcaatttccttaatattttatcactgccatgttaattttggctcaggaagtgtattccctttgcttaatttttctcataattcatactaatctttaaatatgtctcccttcgaacattgtttacatttttttcctcataggatttactgccccaacagaaagtataggagttaaaaacattaggaatgaaaattatttttttccaatccaacttctatcttccattgcaagaaaatctttatctcattccaattacttagaaatcttattctcctgttctgagatttataccctgtt

SEQ ID NO: 486436 - DNA, 616 bp, Homo sapiens
tcccatggacacttcttccttcatgtctgcatataaatttgtaagaggaaaaaaacacagaaacgtgaaaatgtaccagatgaaatcaaaatcagttaacttattatactacattaatttcttaattttgtataaggttctgtaaaacgtaacattagggccaagtgggtgaagggcatataagaatactttgtactgtctttgtagctcttcatcaagtgcaatattatttcaaaatacaaagtttaaaaaagtaccagatattgccatttaacacaaatttaatatattttgccaaattctatatactttttttctatcaatttccttaatattttatcactgccatgttaattttggctcaggaagtgtattccctttgcttaatttttctcataattcatactaatctttaaatatgtctcccttcgaacattgtttacatttttttcctcataggatttactgccscaacagaaagtataggagttaaaaacattaggaatgaaaattatttttttccaatccaacttctatcttccattgcaagaaaatctttatctcattccaattacttagaaatcttattctcctgttctgagatttataccctgtt

SEQ ID NO: 486437 - DNA, 576 bp, Homo sapiens
atcttttttaggaagatgccccctcattaatcatgccttcctcaaagccaagtaggagctcccttctttcagctggaacattacagtgccctgttgctcccattctacatgttgttttctcttcctatacttccccaaggctggaccaaacatcagattcatattggtattcccacccccagtataatatagtgaacatcaacaatacacatttgttggagttattaataatgtaatcttggaatttagtgctaaagggatcatgtagttcagagtatctcaaagaacagctcagtgttcagggcctgagtttaaatcctgactctgccaattattagctttgtgatatagggaagtatgtaaaaactcacttaatgctctttttttgagctgtaacaaatgaatgcccaaattacaaataaamaaaggaaaatttagaaatgtaatttctttttttttacatttacttatatagtttattttgttttcttagttcttttttttattatactttaagttctagggtacatgtgcacaacgtacaggtttctaacatatgtatacatgtgccatgtt

SEQ ID NO: 486438 - DNA, 588 bp, Homo sapiens
agatgaatataagcctattataaactaatgtatcaaggtagcaatttccaattattaccacatgagtcaaagtttatcacaggcaggagaaaagactgaaaactaggaaaaagttatttcacatattccatgaaaaagaaagtagtgacaaaaggaaaaaaatcacatttttaaatttatatccaagaaaatgaaagatttcaagaaacagtagtaataataagaataaataattcaaatctatccaaagtgtcaaaaggtagaaaaagatgaaattaaagaagaaaaccctcactcttttttatttttttgttttttttcagacagggtctcactctgttgcccaggctgcagtgcagtgcagtggtgcagtctcagctcaccgcagcctcaaactcccggctcaagtgttcccygcaacctccgcctcccgagtagctgggactaaaggcatgcatcgccacgctggcttaatttttgtatattttgtagagatgggtttttgtcatgttgtccagactggtcacaaactcctagactcaagcaatacatccgcctcagcctcccaaggtgctgggatcacaggca

SEQ ID NO: 486439 - DNA, 588 bp, Homo sapiens
agatgaatataagcctattataaactaatgtatcaaggtagcaatttccaattattaccacatgagtcaaagtttatcacaggcaggagaaaagactgaaaactaggaaaaagttatttcacatattccatgaaaaagaaagtagtgacaaaaggaaaaaaatcacatttttaaatttatatccaagaaaatgaaagatttcaagaaacagtagtaataataagaataaataattcaaatctatccaaagtgtcaaaaggtagaaaaagatgaaattaaagaagaaaaccctcactcttttttatttttttgttttttttcagacagggtctcactctgttgcccaggctgcagtgcagtgcagtggtgcagtctcagctcaccgcagcctcaaactcccggctcaagtgttccctgcaacctccgcctcccgagtagctgggactaaaggcatgcatcgccacgctggcttaatttttgtatattttgtagagatgggtttttgtcatgttgtccagactggtcrcaaactcctagactcaagcaatacatccgcctcagcctcccaaggtgctgggatcacaggca

SEQ ID NO: 486440 - DNA, 559 bp, Homo sapiens
tgctggaacacaatatccaagtttaaatcccattcaatccacttactaactatatgatctcacagtttttatctctcatccagcttcctttgcaaaatgaaaagaatttcagcatactacccatggcaattattaacctacttttttctttatggatttgcctgctgtggacatttcacataagtggaatcacacattacatggctttttgtgtctggcttctttcactyagcttaatgtttcttctgtattgtagcatgaatcagtacttcattcctttttatggcaggataatattccattgtgtggatacaccaattttgttattcattcataaattgatgcacatttgtttccactttttggctatcatatatatgctgccatgaacatctgtgcataagttcagtttctgtgtggatgtgttttcaattctcttgggtgatcacctagaatagaatttctgaatcacatggcaactctctatttcacactttcaggaactgccaagctgttttcagcagccgcaccattttatattcccatcagtaatctataa

SEQ ID NO: 486441 - DNA, 559 bp, Homo sapiens
tgctggaacacaatatccaagtttaaatcccattcaatccacttactaactatatgatctcacagtttttatctctcatccagcttcctttgcaaaatgaaaagaatttcagcatactacccatggcaattattaacctacttttttctttatggatttgcctgctgtggacatttcacataagtggaatcacacattacatggctttttgtgtctggcttctttcacttagcttaatgtttcwtctgtattgtagcatgaatcagtacttcattcctttttatggcaggataatattccattgtgtggatacaccaattttgttattcattcataaattgatgcacatttgtttccactttttggctatcatatatatgctgccatgaacatctgtgcataagttcagtttctgtgtggatgtgttttcaattctcttgggtgatcacctagaatagaatttctgaatcacatggcaactctctatttcacactttcaggaactgccaagctgttttcagcagccgcaccattttatattcccatcagtaatctataa

SEQ ID NO: 486442 - DNA, 611 bp, Homo sapiens
tctctgataacccggtcccatgggtgggcctgtcccggggcaggggcagtggtggcattctggggacatgtctcttgcagtaccatctctgcctctgcctggttagatctctgtcttcctcttcctacaggaaaagaaagcaaacaacgagaaacagaaagccgaaagggagctagaggtgagtggacggtgtgcagtttyctcctgtcctccgcagaatgtttctttccttctctttcagcactaggttggcttttctcccaaaggttcgaatccagagattgaacatacagaaagggaaactaaatacggacctgtaccacacgaaacgttctctcagatactttgaaggtgggaatctgggtaccctgtcatccttcaacctggaactttgacaggtcttcagggggagtcctttgggccccatctcaactctctcattacagaagagtccaaggatctggccgtccgtctgcaacattcattgcagcgtaaaggagagttagagcgggctctctctgctgtcaccgccacacagaagaagaaggcggagagggtgagtccaaccacctgccccgtcccctgggagcctggcttcgcagacagaggag

SEQ ID NO: 486443 - DNA, 609 bp, Homo sapiens
ctcacctgtggcagcaggagcttggccctctccagtttcctttttagctcctttacgttgagctggatctcagacttttcagattctacaagttgaagtttttcttgtagtttggcatttttctccttcagctcctcatcagttatgctatggccagaggcagtagagaaaggaatgaatgaagaacataaaagaccactttggtgattgaccccctaccctcgccccacaaccacagaaccgtggcgctggaagggaccccaggaattaaaagtcccaggtggcaggccagagagaagacatgagttgcctgaggctaccccatgagtcagtggcacagccagcactagagcttccgtgtgcacacatgaaaacatgtatgagccwctccccacactcacctggaccccccacctcccagcacaccacccatgctaagggcccccagacctcccattccaccttcccccatcctacgtgttcctgtacagttccagactcagggcgtccctctcctttgttaactcctcaatgtactgcaaatagagaaaggttaagtcaggatagagcaggcacagcagtagctggacgaccaggaacaactgctac

SEQ ID NO: 486444 - DNA, 571 bp, Homo sapiens
tagtgtgatttctttgctcacgacatgaccgctgggtttgggggcactcagatgtagaggccccaggctcatctcacccactcccagcctggggaagaaggctcacccccaagattccaccccatccccacagggtccctgataaactggtcccatgggtgggcctgttctggggcagtggtgccattctgggggcatgtctcttgctgtggatctctgcctccccctagyaagagctctgttttcctctttctataggaacagaaggcaagccaccaacatcaggaagccctaaggagggagctagaggtgagtggagggtgtgaagttccctcctgccctctggagaatgtttctttgcttctctttcagcatttgcttgtcttttctcccaaaggcccaggttcataccatacgaatccttacatgtcagaaaactgagcttcagatggcactctactacagccagcatgctgtcaagcagttggaaggtgggaatctggcaccccatcatccttcaacctggcactttgacaggcctttagggggagtcctttgggccacatctgaa

SEQ ID NO: 486445 - DNA, 571 bp, Homo sapiens
tagtgtgatttctttgctcacgacatgaccgctgggtttgggggcactcagatgtagaggccccaggctcatctcacccactcccagcctggggaagaaggctcacccccaagattccaccccatccccacagggtccctgataaactggtcccatgggtgggcctgttctggggcagtggtgccattctgggggcatgtctcttgctgtggatctctgcctccccctagtaagagctctgttttcctctttctataggaacagaaggcaagccaccaacatcaggaagccctaaggagggagctagaggtgagtggagggtgtgaagttccctcctgccctctggagaatgtttctttgcttctctttcagcatttgcttgtcttttctcccaaaggcccaggttcawaccatacgaatccttacatgtcagaaaactgagcttcagatggcactctactacagccagcatgctgtcaagcagttggaaggtgggaatctggcaccccatcatccttcaacctggcactttgacaggcctttagggggagtcctttgggccacatctgaa

SEQ ID NO: 486446 - DNA, 571 bp, Homo sapiens
tagtgtgatttctttgctcacgacatgaccgctgggtttgggggcactcagatgtagaggccccaggctcatctcacccactcccagcctggggaagaaggctcacccccaagattccaccccatccccacagggtccctgataaactggtcccatgggtgggcctgttctggggcagtggtgccattctgggggcatgtctcttgctgtggatctctgcctccccctagtaagagctctgttttcctctttctataggaacagaaggcaagccaccaacatcaggaagccctaaggagggagctagaggtgagtggagggtgtgaagttccctcctgccctctggagaatgtttctttgcttctctttcagcatttgcttgtcttttctcccaaaggcccaggttcataccatacgaatccttacatgtcagaaaactgagcttcagatggcactytactacagccagcatgctgtcaagcagttggaaggtgggaatctggcaccccatcatccttcaacctggcactttgacaggcctttagggggagtcctttgggccacatctgaa

SEQ ID NO: 486447 - DNA, 563 bp, Homo sapiens
tggcccagaaggtgcctctccaccccttccccagagtttctgggaaacaaagcccacccgagggacacatgccttcttgggagttgtaccaggcctccttcctcatccrgccatgcagtggttttcagtgcccgaaacagatgaataaaataggccctttactggatgttcttcaggaacatgcgcacttctttggatcttaccatcgttttatctctatttaaagttaaatgctgtgttatacagagtattggtaaagatgtagagctacaagaactgtcaagctggcagtagcataaaattgtataagcacattggaaacctgtttggcagcttccactaaagctatatctatgcctaccttcagaaattccatcctaagcatgtacacaagagaaacgagtgcatatgtccacaaaaagacttatataagaatgttcactgccatttttattcataagagccccaaatgaaaacaacctaaatgtccatcaacaggagagtgaataaatggtgatacagtcacatcatggaatactacacagccaaaaaagaaaaatgaa

SEQ ID NO: 486448 - DNA, 563 bp, Homo sapiens
tggcccagaaggtgcctctccaccccttccccagagtttctgggaaacaaagcccacccgagggacacatgccttcttgggagttgtaccaggcctccttcctcatccggccatgcagtggttttcagtgcccgaaacagatgaataaaataggccctttackggatgttcttcaggaacatgcgcacttctttggatcttaccatcgttttatctctatttaaagttaaatgctgtgttatacagagtattggtaaagatgtagagctacaagaactgtcaagctggcagtagcataaaattgtataagcacattggaaacctgtttggcagcttccactaaagctatatctatgcctaccttcagaaattccatcctaagcatgtacacaagagaaacgagtgcatatgtccacaaaaagacttatataagaatgttcactgccatttttattcataagagccccaaatgaaaacaacctaaatgtccatcaacaggagagtgaataaatggtgatacagtcacatcatggaatactacacagccaaaaaagaaaaatgaa

SEQ ID NO: 486449 - DNA, 563 bp, Homo sapiens
tggcccagaaggtgcctctccaccccttccccagagtttctgggaaacaaagcccacccgagggacacatgccttcttgggagttgtaccaggcctccttcctcatccggccatgcagtggttttcagtgcccgaaacagatgaataaaataggccctttactggatgttcttcaggaacatgcrcacttctttggatcttaccatcgttttatctctatttaaagttaaatgctgtgttatacagagtattggtaaagatgtagagctacaagaactgtcaagctggcagtagcataaaattgtataagcacattggaaacctgtttggcagcttccactaaagctatatctatgcctaccttcagaaattccatcctaagcatgtacacaagagaaacgagtgcatatgtccacaaaaagacttatataagaatgttcactgccatttttattcataagagccccaaatgaaaacaacctaaatgtccatcaacaggagagtgaataaatggtgatacagtcacatcatggaatactacacagccaaaaaagaaaaatgaa

SEQ ID NO: 486450 - DNA, 608 bp, Homo sapiens
agctggcccagaaggtgcctctccaccccttccccagagtttctgggaaacaaagcccacccgagggacacatgccttcttgggagttgtaccaggcctccttcctcatccggccatgcagtggttttcagtgcccgaaacagatgaataaaataggccctttactggatgttcttcaggaacatgcgcacttctttggatcttaccatcgttttatctctatttaaagttaaatgctgtgttatacagagtattggtaaagatgtagagctacaagaactgtcaagctggcagtagcataaaattgtataagcacattggaaacctgtttggcagcttcyactaaagctatatctatgcctaccttcagaaattccatcctaagcatgtacacaagagaaacgagtgcatatgtccacaaaaagacttatataagaatgttcactgccatttttattcataagagccccaaatgaaaacaacctaaatgtccatcaacaggagagtgaataaatggtgatacagtcacatcatggaatactacacagccaaaaaagaaaaatgaagtggtaggaacactcaacgacatgggtgaatagagggagcca

SEQ ID NO: 486451 - DNA, 608 bp, Homo sapiens
agctggcccagaaggtgcctctccaccccttccccagagtttctgggaaacaaagcccacccgagggacacatgccttcttgggagttgtaccaggcctccttcctcatccggccatgcagtggttttcagtgcccgaaacagatgaataaaataggccctttactggatgttcttcaggaacatgcgcacttctttggatcttaccatcgttttatctctatttaaagttaaatgctgtgttatacagagtattggtaaagatgtagagctacaagaactgtcaagctggcagtagcataaaattgtataagcacattggaaacctgtttggcagcttccactaaagctatatctatgcctacsttcagaaattccatcctaagcatgtacacaagagaaacgagtgcatatgtccacaaaaagacttatataagaatgttcactgccatttttattcataagagccccaaatgaaaacaacctaaatgtccatcaacaggagagtgaataaatggtgatacagtcacatcatggaatactacacagccaaaaaagaaaaatgaagtggtaggaacactcaacgacatgggtgaatagagggagcca

SEQ ID NO: 486452 - DNA, 607 bp, Homo sapiens
gctttctctttttggagttacctgagaaattatgacacccttttccaaacaggccaacctgctttgcaaacacgatttccataattttaacaatggtgaggccaggcacggtggctcatacctgtaattccttccagcactttgggaagcctaggcaggaggatcacttaagccaggagttcaataccagcctgggcaacatggcaaaaactcatctctacaaaaaatacacatattagccaggcgtggtggcacacacctatagtctcagctactcagaggttgaggtgggaaaattgcttcagctcaggagctcgaggctgcagtgaacggtgatcacgccactgcactccagcctgggtgacagagcaagaccctgtctcaaaaacaaacaaaacaaaacacaaaccaagggtgagagagatgttagatgtttttgtccttgttacagatgtaaatgctcagttggaaagagggaactatttagagtgaaaaastttcggtggaacacacacaaaaataggaagatcaggtataactgttccaaaaaaaagagtatggcagtatagaagaaaaggtctccatgaaaatgcagaagaacaatttc

SEQ ID NO: 486453 - DNA, 479 bp, Homo sapiens
atatttgccaaagtaatcccacaaaaacaattaacatttgactttgaaaattaagacaaaaaatacaatgatgaatattttcttgtaaaagcaaagacagtaaaaatattcagatttaaaataagcctgagaaaaagcatgatttccttgagcttacctaagtaaacttatttacaagtgactgtatcaataattagcaaaagtaaaagtcattatgaaatcctccaaatctttcaaagtaaagtactatsttacattcaagcattgagtttgcccataaaattatttaagctcaaccttttcctcaatctccaaaactctggcgtgtaactacacaaacacttcaataggggacagaatctccttttatcattcattctaccaaacatcaacttcataagaattagaatcaagtgtaataagaatgaactatatagaatcattgatataatttataggtgttcagacataacctttag

SEQ ID NO: 486454 - DNA, 613 bp, Homo sapiens
ggaattttgccagggcagaaggttaattagcgttcttatagaaatgttcctctactttgcatagtcttcaaggctgtgattttttttctaattagaaaatgtttgagtattttatttaaaatttcctttgtgtataaaattcaaatttatttaataactatttagtgagcacccattacatgccaggcactatactaaggcatagagatacaaagatataagtgactctacctactttctggttgttcacagtctggtacaaaagaattgcaatacattttgataagtgcagtgatagagatatgcactcatttaccattactctatatgcacttaaaaaaacagctgtgaagaaatactcatatggcaccaagaacaatgggacggaagaagtattactaggactaagtcttttgtttttttgaaaaacgtgtttattattactgttattttttgtagagaagaggtcttgctaagttgcccaggctgtgctcaaactcctggcctcaaccagtcctcttgccttggcctcccaaaacgttgggattacaggtgtgatccacggtgcctgcctgtyaggattacgtttgaaggaagtttaactttttatacc

SEQ ID NO: 486455 - DNA, 648 bp, Homo sapiens
tgagatgtggcccctctgttaggttgaaggaaagatacacagtaattcagacagtttatctcctgtgtcccccaacagagaaacctatttgagagaagactttccaaacattgtcactgatgtgaacctgaacaacaattggtgggaatgtgaagaaaagaaaggaaatggaggcatgtactgaggctgggactaaatatttcaataatttcttatgtgcataacagaaaaagaagtttagacttcaggtaaagttcattctcagttgtaaataaggactcagaaattgaaggaactatctgtgagatacatttcactaaggctattgaactaaaattaacaaaatatcctggcaaaacctggaagttaggaataggggatcagtcaaaagtgaaaaagaattaagagcattgcaaaactcttgtttkcaaataagtactagagaaacgtgttctgatcaggaaggcagagaaagcgcaggtaaccatttaatggggtgggtaatccaagtagaatttcaagttaggtacaaaatggagtatataacaacttgacaaaaaccaagggcagaaataacaatataaaataaagaagatgtgaggaatgtacagtaaaaaagtcattacaccaaatgtgtatagactaaat

SEQ ID NO: 486456 - DNA, 465 bp, Homo sapiens
ccaggttttgtcttgtgtgtgttcccctatacttggacttatgtaatcaagaagtctggtgctttgaaaagcaattagtgtttaaataaattatgtctacttttatgtctctgagttggtactctaccatcagctcaacatctaatccaattaaccacatactgtttccctggatttttttctttgtctcactttgtgccttcacttggaggcagaacatagtraatgcccttgtcatttcccctgaggacataggcagtacccgtagtactacctctaagaagtgtttcaagtagaaattcacttatatgatacatttagtatttcatactgatcctcccggtattatccttttatttctgttgaaattatatgcaaccactttgtgtatcagtcttcaaggtttggtttaacactgtttctcaattctttcaaaacacacaaaacatcttccttttcagtaac

SEQ ID NO: 486457 - DNA, 625 bp, Homo sapiens
caaaggttggcctgtgatgtcgttcttttatgaattttggcttgaaaatctttcattccctatttacgtacatgtactcaaaattggctagccagagaacttttcactgagaacaggatatgtggactgaaacttacctaataagcagtaagccatagaaaaataggcagtgagagtatttggggcacaggaaaaagaaatttcaaaaagccgacttctaaaattagatgaaggagttcaaagaatagaaatggttgtagcagagtatttgtggaggtgaagcagaagataaagtagatgaggtgaatagaaatctaatcatgtagggtcaagtatgcaaatgttaagatttgaagataggatttatggatttttttctgattgaatcttggaaaattgttggggaggtataggagcaagttgatactataaaagctgagaagataattcaaggacagaacagtaaagtatcttcaaatgctcctgagaggttaaaacaagaggaggagagaaaaatgatcattgamaatataaaaccacaacttgcactattatttcccatgtaaaaaaaagctctatgacataaaatacatcacataccactatactctcttcaggagaagca

SEQ ID NO: 486458 - DNA, 622 bp, Homo sapiens
ggcgaatctactattcaaacccagggctctctaaccaatatcaaaaggaacactcttatstcacatacatttctatttttgaaaatactgcacaagaaactccatagtataatatataatatagactctgtatcagctaattatcaaaattacctgagaagctttttgaaaaagaaaattacatatgtatatgtatatgtgtatgtatatgtatatgtatatctgggtttcacttctagagattctaactaggtagatctggactgacttacaaatctggatttttataaagctaccaagccaactttaacaaccagtcaggttcagcagttactgccataagagctctagaagcaggtctacacagaccaatgagagaaagtgctgaaaaatattcacattatttattgtacttttaacaattaattcagaacaaaaatgggggggaaagtagccaggaatcctaaaacatcttgattagtcaaattttttagaaaaaggaagtaatctttctttatgtgataatcagagtgtcactggaaactggctcatggggtatgaaaatagttaacctcttgtcccttgaacagtaaaagctacggtcttgccagataggtgtttt

SEQ ID NO: 486459 - DNA, 622 bp, Homo sapiens
ggcgaatctactattcaaacccagggctctctaaccaatatcaaaaggaacactcttatctcacatacatttctatttttgaaaatactgcacaagaaactccatagtataatatataatatagactctgtatcagctaattatcaaaattacctgagaagctttttgaaaaagaaaattacatatgtatatgtatatgtgtatgtatatgtatatgtatatctgggtttcacttctagagattctaactaggtagatctggactgacttacaaatctggatttttataaagctaccaagccaactttaacaacsagtcaggttcagcagttactgccataagagctctagaagcaggtctacacagaccaatgagagaaagtgctgaaaaatattcacattatttattgtacttttaacaattaattcagaacaaaaatgggggggaaagtagccaggaatcctaaaacatcttgattagtcaaattttttagaaaaaggaagtaatctttctttatgtgataatcagagtgtcactggaaactggctcatggggtatgaaaatagttaacctcttgtcccttgaacagtaaaagctacggtcttgccagataggtgtttt

SEQ ID NO: 486460 - DNA, 586 bp, Homo sapiens
cttttgaatcagacataaatctaagcaatgctgcaatatagcaaaaggggaaaaaagaccttgtctcattaaatagctaacaggagagtgtatctgatrgtaaaatcttggcagaacataaaatacctgtttactgccaaaatctagtcacacaacattaaggttacctatttaagcacagaggactggcttctcatcatatataattctatcaaggagtctccctcattgcctttaaagcgggtagaaacatgactgccaagataaccaggacccatcctcacaggaatttatagataaaaattaatttctcaaatggtgtccaaaagcaaatcagtgactaatggagactatcgagcaaaagcataaccaacctcctggagcctgtagcagccaaagcttttgaataattttccagggcagctccttagtagagcacatagacaaaatcccatctgggtgttatcaacaggaactatacagacatggtctgtttatttttcttcttcttctttttcatggccgtcctccaattattgtatttgggtgtcttcagtttgttatagggcaaccaactcatgaccag

SEQ ID NO: 486461 - DNA, 664 bp, Homo sapiens
attcaccatgtctatttgttcatgcrtattataaacattttcaatgtcttttgtgaaaatttcattataaccagctaagggcattggtttttcaaacctctggaagtgttaagaagagtttgggtagactgtcttctgaataaaagaaggattactctgattgttcttcctaaggaatattttaagattatgaatgcattgtatcatgtgcatttaactcaactctacttttttatgagcatctagtgggctcttaaaaacacaataaaatttgagacaaaattccacaaaaactcagataagagaaaattacctatttctgaatcctccttggagaatgttttagagagtttgaaaaaggacattgatggattcctgcagaagaaagtttaagaagtaataatatctgagctgagtcgaaaaaaaaacaaaaagatgctgaagtgtttccagtgtattctgctgatgctttaagttctacactgtagtaattggaatgggatttcattacgagaagtttttacccaatcacaccaactgcatccttgtaagagcgatggagactaagcgtacctgtgatgaccattaccatcaagtctccagggaaacaactcacaaagttatcaaatctataaaagtatagaggaaaagcataacatgctgc

SEQ ID NO: 486462 - DNA, 664 bp, Homo sapiens
attcaccatgtctatttgttcatgcgtattataaacattttcaatgtcttttgtgaaaatttcattataaccagctaagggcattggtttttcaaacctctggaagtgttaagaagagtttgggtagactgtcttctgaataaaagaaggattactctgattgttcttcctaaggaatattttaagattatgaatgcattgtatcatgtgcatttaactcaactctacttttttatgagcatctagtgggctcttaaaaacacaataaaatttgagacaaaattccacaaaaactcagataagagaaaattacctatttctgaatcctccttggagaatgttttagagagtttgaaaaaggacattgatggattcctgcagaagaaagtttaagaagtaataatatctgagctgagtcgaaaamaaaacaaaaagatgctgaagtgtttccagtgtattctgctgatgctttaagttctacactgtagtaattggaatgggatttcattacgagaagtttttacccaatcacaccaactgcatccttgtaagagcgatggagactaagcgtacctgtgatgaccattaccatcaagtctccagggaaacaactcacaaagttatcaaatctataaaagtatagaggaaaagcataacatgctgc

SEQ ID NO: 486463 - DNA, 619 bp, Homo sapiens
attgggtggatcttttccactcagtctactgactcacctggctatctcctctagaaacaccctcacagtcaatcccagaggtaatgctttaccagttatctaggcatttcttaatcaagtcaagttgatgcctaaaattaactttcacactggtgtatcttctgctcatcctgaattggtgtgctctccaaacgtatatcctgaatgcatttacattcttactscacctgcctcacttaggtgaacccgttgcctcctgtggcttatagtatatgaatcaagagtccaaatctatactggaaattctgacttttctcctgaattgcaaactcttatcctccaaatctttattagcattagctctttgccccacagacatctcaaagccaacatattgaacatatccaatactgaactcatgatctttccctttaaataaactctttctttatttacagggcttattcacagcaacatgtcaatggtaccaagtctgagaaatctccactctttctatatttccaatcatgggaacagtgtcaacactcaccccatgatcctgaatcttgggagtcattccacgctactcatttcatgcataactgtgcaacaaaattcc

SEQ ID NO: 486464 - DNA, 343 bp, Homo sapiens
gtttccctctttaaacacacccattaaacacaaccgggattcctcctgaggagcagcaattattctgcctcaagatagtataaataaaaggcagcatttccatcttcaggaggagggaaatgcccctcagtaattacttgagtatttttgtttctcccacccaggagggagctcctgtcccaggccattgcagggctcttgtccatgctccattgtagctgggagctctttcccatcagggagaggagcagagacttttarctctgagtctcctcacctcccacccgctatcctcaggcaggtggctctgcacacaaccaaccacttccaggaagctgatact

SEQ ID NO: 486465 - DNA, 542 bp, Homo sapiens
tcgtgctgactagaagcccgtgtcttattaggcataatcaggccatattgtggctggcaggagggaagcrcatttcacactctgggaaataggattcggcaaagagacaggaagaggtttcacgtacatgcttctctgcctgttagtctgaaagttggcagtggcatcaagccagaggaaataagtacagacttcccattccactaacccagaggcaagacagcactagggctctgatgggggcttttgtcccaggcacacatcatcccccacctgttagctgtgtgaccttgggcaagttgcctaacctttcagtgccacaacttcctcatttggaaaaatgagaataataacacaccaactccatggggtggttcttgtgatgattagatgagttaatatatatgaattgcacatagtagggccccggtaaatgttggccattattcttgcccatcagcctcctccttttgcttcttgagatgtgatgatttggttttctgctagttgaatatccaccacaaatgtacagtccaaggctg

SEQ ID NO: 486466 - DNA, 645 bp, Homo sapiens
aacaaaaaacttacttctcatggttccagaggctgggaagtccaagatcacggtcctggcagatcctgtatctggtgaggkcccacttcctggttcatagatggccatctgtttgctgtgtcctcacatggtggaaggtgcgaaggagctctctggggcctcttttctacaggccctctaatctcatcacgacccagggccctcatgactaatcaactccccaaagccccacccccaaataccaccacactggggattaggtttcaacatatgaatttgggagtaaacattctgtttgtagcaaatagcaaaggggctgatatggagagagcacagaaggtgaagactaggaaagtaatgactaatagagaaggaaatcgaagaattaacaaagagaacagagtgggggtaaatgatagcttacgggggccctcaggctggcgtaaagacttcagctttcactctgaggaatggggacacattacagggcttggggctgaggagggacaggaccagatttccattttaagtggcctgggttagctgctttactgagaatagactgtggaaggtggagacaagggtggaacaggagaccagtgaggaggctattgtggtgattcaggcaggagatgaggtgacttg

SEQ ID NO: 486467 - DNA, 549 bp, Homo sapiens
caattagaacttggaatttgaagggcattgctgatgtcttttcccagttctgggaaaagtggttccaatactttctgtaagcaattcagagtatatcctggactggaaggcacagagaagggatagactctaaagagaaggggtagaggatgagatattacatggcctcttgcccagaggagaggtctgttcctcgtcccttttcagggaggactgactgcaggaaccaggggcaagcatggctgctcagaagacccctttttttcctctgttttttttcttctgatgtagcccatctctgatttcttttctgtcttsttttaaattttcaagttaatgataatttccgcagacctaaacatatgggaatcagaattcactttttaagaattgagtcaattccatttttccttggaaataagacagtatattatctgtcatattatatacaataatcaaatctaacaaatattaggcacctgtcatatcccagtttattccctgagaatacaatggtggacaaaatatattacaatagtttattgtgag

SEQ ID NO: 486468 - DNA, 647 bp, Homo sapiens
ctggtgtgaagagaccatgattgtgctgggagtcaagatgcactgacaatctctgttttttctgacttcaggcaggaaaactcaccaagatggctctcctgtgaaatttctgctgtgcctctcactgggctgctgaggggacaaatgataaaatttccgtgaagatactttgcaaaagtaaagctctgcacagrtatatcttgctgaatggtaatgagaggaagtggaaatgaccgtggctggaagacagcagattagagccctgaagtattttctgctcagctcttccacttactagcttaggggtcttgggcatgtcacttcacctatatgggactccgtgctctcatcaagaaattgggggaataaaacctacttcataaagttgtttgagaattaaaagaagcaataggtgtgaatatgtagaaaactgtgggatgttatgcagatggaaggagttatttatcattgcctatgttgatttaattgtggccttaatccaactctccctggcccttaggtatttcctttgcaccatattcttttccactggttttcatatggctttttctttagtttgaaaattgtctctcctctgttttatatcttctcaaggcagcaataagcttccaaggcacagcctgtat

SEQ ID NO: 486469 - DNA, 527 bp, Homo sapiens
gaaacattttccatgacattcctaagctttgccactcttctgtgcaaaaatggcattttaagactttattgaggtgtcatttacatatggtaaatttggtgattctaagcatacagtttgatggactccccacatcaaaacacagaaccactccattaccctcaaaaatttccttctttctctttcacgtcaatcccctcccctgaccatcagtcccaggcaaccactgatcttctttctgtcactacacttccatctttttgagaattaaaaatggaaaatataaatcccagcactttgggaggccaaggtgggcggatcacctgaggtcaggagttcgagactggcctgaccaacatggcaaaaccccgtctctactaaaagtacaaaaattaaccgggtgtggtggcaggtgcttgtaatcccagctactcaggaggctgaggcaggagaattgcttgaacatgggaggcggagwttgcagtgagctgagattgcgcctgtgcactccagcctaggcgacaaga

SEQ ID NO: 486470 - DNA, 511 bp, Homo sapiens
cttgcctgtcaacactgtgagctccatgcttggtcctcacggatcttctctgatgctcatcttttcttcttgaggagagagagcactcccatctttgcccatgtctcagcccaagttctctctcttcagggaagycttgcctgattcccctcaatctaaatatgtccccatgacctaagctttcataggcacatgggcttttcttctgaagaacagaagatgaagaaactgagacttagaggatttagttaatgtgtccaaagttaaacagctaataaacagtgaacctgagatccaaggtcccaagaccaataatgacagatccaggattcagaactgtatttgattctaaactctctgctgctgactactatgccagagatgggaaataggtttttacctcacatggtaattttgatgagcagtgctgcctatagtgacatgatgaaaaggatttctgaggttgcatccttgctcagtggaaaagtataccatgtttaattagtgatgc

SEQ ID NO: 486471 - DNA, 596 bp, Homo sapiens
ccagcgcggtgctttgggaccggtggcctgcagcgcccaaacccaaagaacgctttgggtcgcttcggggcacgaatcgcaggctggtcggcacctgccacccccagcttctcattggcaggcacgagttggaggagggggctttggcctcacgctttgattttagactgtgaaacggctcagtgcccccggctcagagcggattgactgtctctcgttctccagggacgaattaatggagaacgatcagttaattaacaaaccctcattccggcttttaccttttatcttcgccaaggctcaggcctgggcgctgggctgaaatgaaggtgaaggtgggaagtgggaaagtggggggggagggggcatggaccaggagtcaatcaacttggcaaccgccggccggatctcatcaaacccaggccaccctccgctgtccttagctctacctcccctcakgttctctaccctcaagggtcgccgaatcctcctgaaatccccggtggggttcgggctgggctcagctttcttctctgcctatccgcggtctcggggagccaggcgcggtgtttcccttgcccaaagaaaagcttcca

SEQ ID NO: 486472 - DNA, 502 bp, Homo sapiens
cctatagttccagccacttgggaggctgaggaaggacgatcgcttgagtccaggagtccgaggctgctgtgagccatgatggtgacactgcactccagcctggggaacagagcaagaccctatctcaaaaagaaaaaaaaaaaaaaagaaaaagttttggacagggtggggtgagttccgaggtctctgctcttccacacctgagcttcctagttaatatcttgtgcctgttcagaaaatgttgatctgttcaggaaatgacagaggagcagctaaagaagtcagtagacaaacaggttgmgggaagagaagggggaagagattgaattgaggactttctccctctctcccttagaagtcctccccaatccctttcgttagaaaagcttccctgcaggttccccacaccgtctccctggcagggccactgttgcacagaaaaacagaggccatggtgtggcttttctgggcctgagacatgccttccaccattagacactgt

SEQ ID NO: 486473 - DNA, 347 bp, Homo sapiens
ctggcctcttgccccttggacttgatctccactaaagtctcttcagattgaggagtgcaggaggaaaggragggatgagagtgggtggcagggaggtgggagaatgctgcatctggcatatcctgatgctcttgagaagtgagccctcagcagggcggagcaggctcccagtgcggaggcttggagggaggaggcggtgctgcaacctgtcaccttaaagggtttgattgagctgctgactcagaagcacagggctgattacccataattacagccccatgtggtagtcttgtcaaaatgcagagacctccttagtcccagagctcttccccctaccccttctaagt

SEQ ID NO: 486474 - DNA, 347 bp, Homo sapiens
ctggcctcttgccccttggacttgatctccactaaagtctcttcagattgaggagtgcaggaggaaagggagggatgagagtgggtggcagggaggtgggagaatgctgcatctggcatatcctgatgctcttgagaagtgagccctcagcagggcggagcaggctcccagtgcggaggcttggagggaggaggcggtgctgcaacctgtcaccttaaagggtttgattgagctgctgactcagaagcacagggctgattacccataattacagccccatgtggtagtcttgtsaaaatgcagagacctccttagtcccagagctcttccccctaccccttctaagt

SEQ ID NO: 486475 - DNA, 623 bp, Homo sapiens
tgtgccccagcctgggcaacagagcaagaccctgtctcaaaaaacaaagtatccctgaggtcctctcccattcccactccccgtgtcccctgccrttcctatcctgggtttctgctgaaaaagataaaaaggaaaaatacataatagtgtagggagtgtgggtggggtgttccacctgtggtcagggaactgtgggggatgatgaggtaagccaaggagaccagaggagtaaacaggcattgcatgtagcactatccacacagcagcttgaaaggcaggtcactctgcctttactttgctttctttttcttctgaatgtttaaaatgatgggagattcatgatttattgtctggcttccccacatacctggttaagtctcattcattttgtcactccatacccagggcctagaagaatgcctgatctagaagatgcccagtggattcttattgaaggaatgtccagtgggtgttaagggtgaggctcagggaattaagcaccttgttctgggtcacgggtaagtgaggaagtgggattagacacatacccatacacacacaaaatttggtgcaaaaggactctagtgccatgttttaaaaaacacttgtgtaattttaaaatg

SEQ ID NO: 486476 - DNA, 580 bp, Homo sapiens
acaggtgcaccaccaccatacctggctattttattccttttaataaaattttttattaaatgtaattacattttatagtttcatgagactcatgagactttttatgaatatatatttttaaatggtttgcacaacaatgtgaatgcacttaatactactggactgtacacttaaaaatggttaagataggccaggcgcggtggctcacacctgtaatcccagcactttgggaggccaaggcgggtggatcatctgaggtcgggagttcgagaccagcctgaccaaaatggagaaaccccgtctctaccaaaaatgcaaaattagccgggcgtggtggcacatgcctgtaatctcagctacccaggaggctgaggcaggagaatcacttgaacctggtaggcggaggttgcagtgagccaacatcrtgccattgcactccagcctgggcaacaagagtgaaactctgtctcaaaaaataaataaataaataaaataaagatagtaaatgttatgtgtattttaccaaaattaactattaaaatttttttaaagaatgaattaagaaaaaatatcggtgaat

SEQ ID NO: 486477 - DNA, 558 bp, Homo sapiens
agcatctcttagcttctgattgttataaacaaagaatctctccttttttctttctagaaatcttttttaatcactcgaaagaattgccataatccctgacttcaaattgcttcaagtaattgtggagataagacttatacacaaatgtcttgtctgattttaaatcctacacatgcaaatctggggatttcctgtagggacaggcggagtagtgctgccgcgcaggcgccagctcctcgtttattatgcagtgatgtacagccctctagtgggtctttaatgcaacataaaaaaacgaagctgagggcaatgaartatggctttgttcattcatccattcatttgatgtacaagtgctgggttcctgctttgttccaggcacattttaggtgctgggaatactgcagtaaatcaaacaaacagcaacaaaatcagatacattagttactggagactaagaagatggagaggagaacaaatttgggatgaagatcaggaacttgatttttggcacattaagtctgggatgctcattaatcttcaagtagcttcttttaa

SEQ ID NO: 486478 - DNA, 594 bp, Homo sapiens
tcgggcctccgccctgccccgccccatcctggtgcttcagagacagttccgcaccaaatgctatgtcttggggaaaaggtggcaaacaggcttgtgcaggacagactacatctttatgtctttagatgattttgcctctgaaattgcattagtttcctgcggttgccctaacaaactaccacaaatgaggcagcctcagcaatggaaatctactgtctcgcagctctgggggcaggagccccaggtccagggcccagcagggcaggctcctgcggctcggagggagagtctgttctgggcctctctcctgtcttctccgggctgcaggcaacccttggtatgcctcgacttgtaggtgcrtgactccagtctctgcctctctcctctccctgtgtgtggcagtctctgtgtcctcccctcctcttacaaggtcaccactgatgaggtttagggtccacctgaaatccaggatggccatgtctcaagatccttaactaattacctctgcaaagaccttattaactcctttcctgaggttctgggtggacaggaatttgtcgggaccaccaggcaacccagtacagacatcctgga

SEQ ID NO: 486479 - DNA, 460 bp, Homo sapiens
ctgttcccctcctgtcccgcccgcggtcccctcgaggccggcctggggctccccgggcgctgttctgggacctcgagcagtcgcccctgcgggcctggccgccttttccgcggcccgccattcgattccgggctcagctcggtggcacagcccggctgtaagcaaccccagggcggcacggggccgggtgcagaaggcggctctgcgccaggtcggcaggggacaggcgaccccggccctggagcggagcatccgaccgtccgtttcgcaatgtggggacacggggcggggagcggcctggaggccccgggcgcgcgggcgggagcgtcgcttggacgccggccttctgggcagagccattcatcgcagggcggccgaggcggcggccgagcctggctcaccgcaccatggaagctggccggccgccgyccggggaggcttgggaaatgggcgaagtggt

SEQ ID NO: 486480 - DNA, 497 bp, Homo sapiens
gatttccccacagttcatttctgtagaagagagccttctggtctgtttttccagatggcgagcttggggtgagttagaagtgcctgattggacttcacaactcagcgtttttattggctatttttgttctaggtacaatggaggttgatggattgttacttttggttaccaaaaccaggaggaggggagggtgctgcttaggagaaacacccaaaaagaacagaccagcctttctcagggactcaggggtggtggcactgcttccaacttactgcttcatttagaacaccagataataagcacccaggactcggcctttagaagtcaatggaataaataagctggaaaaggttgaagagaaaaaagccaaggaacatgtaagtagaagattatatggagccatttaagagcacaaaaagcaagagtaacaaggcagcwgatggaatttggccccgcctggccctgccaagctcactctgggaagcactgtgtcgaaa

SEQ ID NO: 486481 - DNA, 435 bp, Homo sapiens
tccaatggagcatcaaaaacatatgtcctaaggatctccttattcccagagcccagaattcgcccatgagtttcccttaattccaccatccagagtctcagtcttggagaccaagctcttcttccaccccctttgagacctccttggtgattcattcaaaagtcaaagagacatggtggttccaaaacagatggagatcttgcccaatgtccctttgctctgttaagtatatgttaggagaactcaygtgaaggaaaatgttggaatcacctaatgtcccatgtccttagctagcatcaggatcttttcccttccatggagtcatttattcattcatgcagctacttgatatcttactcaaggctctccactaaagatgataagacctagtttctgtccttcactgttgtgtttatattctacttaagaggttat

SEQ ID NO: 486482 - DNA, 572 bp, Homo sapiens
gtgaaaaactagacagtaataccaggaggaaggccaagaaatgtatcactaatttcttgtttgatttcagagctggaaacaacttctggtggattcctgtagtgggccctttggttggtgctgtcattggaggcctcatctatgttcttgtcattgaaatccaccatccagagcctgactcagtctttaagrcagaacaatctgaggacaaaccagagaaatatgaactcagtgtcatcatgtagtggcatgctcagctctggatttgcagtcagtttgggattctcttcagaaagatggcatctaagtgtctgtgttcttgtaagcctgaggtggaatccacccagttttgtctgctagccatatgggacatctaattggaaaagcatctgcataaaagtttggaaacaatgaccacttctctaccattgtcccccacccccaccccccagaataacgctgactgtcccctgaaacagccttctctcctgccctgtttatttcatcctcgatgggaattcttgctaggtaagcactaataactcggcatcttgacgatagtcccatttggg

SEQ ID NO: 486483 - DNA, 547 bp, Homo sapiens
tccattattttacacatgccctagaagccaaaactgaaagccactggatcctggtctagctgaatcttcagagtgggaggtctccaaaaagatattaccttattgggcttaacaattcacaaggcactttcacacccattatctaatttaatcctcataatgactatgtgaggcaaatgccacattgcccatttttcagataaagaaacaaaatcttagggaagataagttgagttgtccaagagcacactgaaagttgaatgttatctaatgcattcctctacctttcagaagatcagtagctggctgasaatctttgccaaatcttccttgctagccagaagtggaattggcagcttctagaatatgtacacctctggacaaaatgttcctcaatcttaagatacaaagaccctcattgtctgggtctattcccacacttactgagtacagatgaaggaaagtggtagcaatttaatcataactttcatttgctgaaaaacattatgagaaggcctcccttcctaagccacctctggtcttgcta

SEQ ID NO: 486484 - DNA, 393 bp, Homo sapiens
cctcaagaacaaagactgccctgacctgcacgtggctgccatccacagggctaatgccatcctgcatagccagagcctgtgatggtgaagaggaagtgaacctaccccaacaagagtgcgtgagcccccgtcccccaaaagcaatggtcagatgaccttttccccaccaaaaaaaaaaaraagaagaacagtaataaagatggtgtggtaagcagaataacgactcacgaaaagatagccacattcgaaatcctggaacctgttaaaatgttaacttctgtggcaaaagagaatttgtagatgtgattacattaaggaccttgattcggggggctggtactggattgtctgattgagtccaatctgatcacatgggtctttaaaagtagggaa

SEQ ID NO: 486485 - DNA, 627 bp, Homo sapiens
cttactcactattacgagaatagcatgggaaagaccggccccsgtaattcaattacctccccctaggtccctctcacaacatgtgggaattctgggagatacaattcaagttaagatttgaatggggacacagccaaaacatactacccactttacagaggaagaacctatctctctgggtctaaataactcaccatttaaacaattgtgtctaactcttacccacttgaggacagtgggcacagaaagggtgaaaacacctgactggtggccagaagtgctaacctggaggagaggaaagagagcagaagagaaacaaagccgcttacattacaaggttgtcaacccagggtgactttaccctgactggggtaaaatttaccaactctaccacctcctggaccattgttggtaggaattttctgccaagcttggtgaataagtgggtgtgttttcaacaaaaaaccaatgtttgtataaattttccgaggcatgggaagtctccattttgtcacaatcttatttcattcctttttaccaaggtagaatttataaatcatggaactcacccgttgtaaatggatgatttgtaaatttataaatttacaaatttataaatttatacag

SEQ ID NO: 486486 - DNA, 468 bp, Homo sapiens
attcatccctgcaccaagtccttcatggtctctgcacacttgctcaccatcacttctgctccacgagtgagcacaaagcgatttctgggtaatttcagacacacagcttcagcaggttcgcactttgatcttagcaaagttgcattctgctgctctggcacgctcggctcctcctcagggcgtgggagtcracgtttaagtagatcagagtaagcggtaccctgctgaagaggtttttccaaagcctgtggtcagtcactgaggggcaacataaggaggggcaggttccccccccaacagactcacccaccagccagccagctcactgcctatgggtgggcgaggtctctctcccttgaaaatgtctgtagcacccagaagaggccctgttcaaggtgagtgctcagaaaactctgtggtgatcaagaaagagtagttgaagtaagcatttctatgctgatatttgat

SEQ ID NO: 486487 - DNA, 661 bp, Homo sapiens
cattttttgcatgtcattattccctaaacaatacagtataagaactgttcacatagcattaacattgtattaggtattataagtaatatagagattatttaaagtatatgggacactcagccccatgtgcttaggttatatgcaaatactacaccattttatatccgggacttgagtatgcatggattttgggatccgagggaggtcctggaaccagtctcctgctgattctgagggttggctgtgtcatgaaattaccaccgattccattgaaatgaatgttttatgataaggtttcagtttacaagttctagaaatggactatataaagaacaaaataragagggaagaagaaagttgtccgtgtagttgttttaataagaactaaaatatatacttattaagccccatctatacaggatatttaactccatactatgcagaaagaaaattgtttctgccaaaattacagaaatgtaggcttgatttataataatgtagaaacagttccaatgagttgttaaatcttgtttatttctgggacttcactgagttttcttttgcatgaagttattatttaaagttctagttagcgaattaatgtcaataatttaaatgaatatctttgtgtgcaattatcttggattggaaggcaataaaa

SEQ ID NO: 486488 - DNA, 632 bp, Homo sapiens
cattgtccattcaggacccaagggagctctagggacctgggcaatgggggtgtggatattctttctgctattctgcttctaaggggacacagctkcttcccccaccacccaccatccattttccgggcttctgtgaattttctagttcctatccaagatggaagcagccccttgactaaagggccacctgggtggtctctggccaacctgtaaatgggccagccttgggtcagtggtcacctctgctccagccagtggccccagggactggtgctgcttacctgagctgaggctgtggactgggtactttcaccatgaggaggaagttgaggcaggacacatgccatcactgaaaaatcctcaatatcgcttcaaatttttgttgggaaatttattttctgcatgtcctcatttgcacaagcttggggaacatccaattcatctaatcattttattctaaagataatgctatttggtatacacattttttcctttattaccttggcacaaaagtgctgcctttagcttcttgctgctttctgaaagttctctcactcagttttaggctccatactttaaccagagcttgcataaagtagagcacaaaagccttttgtgaagcactgtcacca

SEQ ID NO: 486489 - DNA, 321 bp, Homo sapiens
ggaccagcagctactgaattgagcagagggtcagaggtgaaatggagagagagctctgggaatgaatgtgtgtgcagtagactttggaagccattagctcacagtcaggtaaagtggccctctttaataaaacacccacacacacttcaaacttccaaagttcactctacaggaggttctactaggaggaaagaagggggtaatggaccatgcagtatcaaatctgcaattagagtataatrattaccactatccctatgatgctggccttgatgggctctgtttcatcatttaaatatttttaactaagcatgagcaaaa

SEQ ID NO: 486490 - DNA, 684 bp, Homo sapiens
acattatctcccagtttctatgggtcacaagtcttgggatagcttgaataaataattatttttcaaattcacatggttattggcagatttcagatccttgccattgtaggactaaaataaaatgtctcagctcacagatgtagtttcctgtgatgttgtcctctccatgggccattcatattacagcatctttcttcttcaacgcaagtaggaaagtctatctaatgcatatgtagatataattatatataacctaaccaaagggattgcattctatcctcatctcctttgtcgtattttattagaggtgagtcacatgtcctacctacactcaaggtgagagtatttataggaaatccaccaggtgctggagaacatggaacccatattagaattttgcctaatacatcaactaaaaaaaattaatcttgcgaagagagtctgttgagagtttcttcatctktttctacattttttcactagaaagaatgttctagatggcttttcagagaaccccccccccttaaatctttgtagaattacttaaatgtagatctcagtatattcccatcataaaatatatttattaatctcttccagtctaaattgtggtttaatctagctctccagagtcacaacttacttctcaggaagaaagaactctctcaatacatactgcttttt

SEQ ID NO: 486491 - DNA, 568 bp, Homo sapiens
ggacttcacagccaggcacggtggctcacacctgtaatcccagcactttgggaggccaaggcaggtggatcatttgaggtcaggagttcgagaccaccctggccaacatggcaaaaccctgtatctactaaaaatacaaaaattagccaggcgtggtggcgcacacttgtaattccagctactagggaggctaaggcatgggaggctgaggcatgggaggctgagggcatgagaattgcttgaactcaggaggtggaggttgcagtgagccaagatcatgcsagtgtgctgctccagcctgggtgacagagtaagactctctcaaaaaaaaaaaattaaaagaaaagaaaaggagccgggacttcagagtcttttatccagtatcgtcaggcactctgtgaactgctgagggtatttgaatgaatatgatatagacctgtcctcaaggagcttatggtttaatagaaacagatgtattaaaacataatttcatttatatgaggtaagtaccatgacagaaatatgagtaaagaagctttgggaacctagaggaggatcattccttgaa

SEQ ID NO: 486492 - DNA, 597 bp, Homo sapiens
ttttgttttgaagtgtgatgagaagccattggggcttttgaacaggggarcaaccaaatctgatttaggttttaaatgtaaccatggtcactgaagaacagactgtgggttggagtgtttgtctgcacgaagcagccactgtccacagtttaatatttccttccacacatttcttgtgtgtgtgtctacaagcatacaactgcaaatagatattttaagagaattttttgcatgcatagaattatattgccttaaaaattgctttttacaaaagcagtatgtcatatatttacatattggtaccagtaaatcttcattttctaatagagcctataggtagggtcagcacactttttctgtaacagatcagatagtaagtttattacgcttcatgggcaaagagaccaaatcgaggtatgtaggtactcatgagatgattacataatgagaaaaagacattttccacaaaatttttattgacactggaatacatttttttttgtaatacaggtctattaatgagaaaaataaaataatttgtggtgggggaataataacatttcatttaattggagttcagactgagtgttcccatca

SEQ ID NO: 486493 - DNA, 597 bp, Homo sapiens
ttttgttttgaagtgtgatgagaagccattggggcttttgaacaggggagcaaccaaatctgatttaggttttaaatgtaaccatggwcactgaagaacagactgtgggttggagtgtttgtctgcacgaagcagccactgtccacagtttaatatttccttccacacatttcttgtgtgtgtgtctacaagcatacaactgcaaatagatattttaagagaattttttgcatgcatagaattatattgccttaaaaattgctttttacaaaagcagtatgtcatatatttacatattggtaccagtaaatcttcattttctaatagagcctataggtagggtcagcacactttttctgtaacagatcagatagtaagtttattacgcttcatgggcaaagagaccaaatcgaggtatgtaggtactcatgagatgattacataatgagaaaaagacattttccacaaaatttttattgacactggaatacatttttttttgtaatacaggtctattaatgagaaaaataaaataatttgtggtgggggaataataacatttcatttaattggagttcagactgagtgttcccatca

SEQ ID NO: 486494 - DNA, 620 bp, Homo sapiens
aacagattcttcttgaatttatgcaaacaactatattgccatgagaataggaatattcaataagaattgacaaattttagaggaagcagggagaaaaagataaatttttcatttctacttatgaaagtttattaaattgttatcatttgtggatagcttaagagaaaagagaaatcaaaggatgtatcacaacagtttggggttttcaattatttctccagaacacttgcatcttccaggctctgctccagaaaataaccatgactccaacataccactaccatcctcactaaagatgsaaccccacatctagaaaacctcatgactggcttgccctctggacttaaaaaaactgggtttatattctgctctgaacattaatcattgtttttattttgtttccttgttctaatctatgtttcttcccttatattcaggacatagaacattcaagaaccagcaatgtttcaaacaaaggccatttaaaaaatcataaccattgtttatcagtcacctcagttccatatgattaattctggccttgcttgatcttggattagcagtgtcatgaacccatcagcttttcaactagagttctggaaatccttcctcagggcagt

SEQ ID NO: 486495 - DNA, 257 bp, Homo sapiens
gttttgtgaaaggaggaacttaacaagtaatgaaagagggtatttgacagaagaaatctttaagcaaagtgcagcatggcttctcctgattgcctatagtaaactgccaggagggaaacagattaaagacagaatgtataatcaattatttatatcaattatgaagaaaagcctcagtcacttcacaatggggaaacatagcagacagcacctttcaaaggaaccaaacatcascagtaaagggacaaagagtcacc

SEQ ID NO: 486496 - DNA, 562 bp, Homo sapiens
tcacgaaagcctaggggctaaaactctcattattaagaacaaagtgaattaaaattaatgagctcaaggagacctgatgtttgcactaatatggtctactatttttttgtcatagcatttctattcaagatttttaatcagataaatccatctaaaaaaaggatctcgtaaagcctaaaagagggcatccctgtttcttcatttttattcttcgcagaaggacaaaagatgaaagctattatttctctaccaaccctcacctgcaataaaagggatctgtactggaaagcccctttaaacacacccagggcaaaggaaaagttgaaagtattgacttttgtgaagccsacacttcggctcagcaggcggaggccttttcagagatttcttcctaacagcctgacaacacttggacaggaatcaggacgcgaacctctctgaaaagtcccagcaaacaagtcagatgaaagggccgcacttcagaaagaaaatgctggcgccctggagtctgaagttacctgcgaatcttcccttctcccagcacagggtaaacatttagggc

SEQ ID NO: 486497 - DNA, 562 bp, Homo sapiens
tcacgaaagcctaggggctaaaactctcattattaagaacaaagtgaattaaaattaatgagctcaaggagacctgatgtttgcactaatatggtctactatttttttgtcatagcatttctattcaagatttttaatcagataaatccatctaaaaaaaggatctcgtaaagcctaaaagagggcatccctgtttcttcatttttattcttcgcagaaggacaaaagatgaaagctattatttctctaccaaccctcacctgcaataaaagggatctgtactggaaagcccctttaaacacacccagggcaaaggaaaagttgaaagtattgacttttgtgaagcccacacttcggctcagcaggcggaggccttttcagagatttcttcctaacagcctgacaacacttggacaggaatcaggacgcgaacctctctgaaaagtcccagcaaacaagtcagatgaaagggccgcacttcagaaagaaaatsctggcgccctggagtctgaagttacctgcgaatcttcccttctcccagcacagggtaaacatttagggc

SEQ ID NO: 486498 - DNA, 493 bp, Homo sapiens
tgtttttaaatttgtgggtttttttcttttaatttcaattttatttggtggtgggtttcatctatattttctagaagagaaattgcctagataacactcaggctaatrtaaactccctttaaaatcctttttttttttttttttttttttttgagacggagtctcgctcttttgcctaggctggagtgcagtggcacaattttggctcactgcaacctccgcctcctgggttcaagtgattctcctgccccagcctcccgagtagctgggactaccggtgcctgccaccatgcccagctaatttttgtattttttgttagtagagatggggctttactgcgttggccaggctggtctcaaactcctgacctcgtgatccacccatctcagcctcccaaagtgctgggaatataggtgtgagccaccgtgcccagccaaccccctttaaattctaatcaaaggatcagggcagcaaaaattttattggtttgaa

SEQ ID NO: 486499 - DNA, 493 bp, Homo sapiens
tgtttttaaatttgtgggtttttttcttttaatttcaattttatttggtggtgggtttcatctatattttctagaagagaaattgcctagataacactcaggctaatataaactccctttaaawtcctttttttttttttttttttttttttgagacggagtctcgctcttttgcctaggctggagtgcagtggcacaattttggctcactgcaacctccgcctcctgggttcaagtgattctcctgccccagcctcccgagtagctgggactaccggtgcctgccaccatgcccagctaatttttgtattttttgttagtagagatggggctttactgcgttggccaggctggtctcaaactcctgacctcgtgatccacccatctcagcctcccaaagtgctgggaatataggtgtgagccaccgtgcccagccaaccccctttaaattctaatcaaaggatcagggcagcaaaaattttattggtttgaa

SEQ ID NO: 486500 - DNA, 493 bp, Homo sapiens
tgtttttaaatttgtgggtttttttcttttaatttcaattttatttggtggtgggtttcatctatattttctagaagagaaattgcctagataacactcaggctaatataaactccctttaaaatcytttttttttttttttttttttttttgagacggagtctcgctcttttgcctaggctggagtgcagtggcacaattttggctcactgcaacctccgcctcctgggttcaagtgattctcctgccccagcctcccgagtagctgggactaccggtgcctgccaccatgcccagctaatttttgtattttttgttagtagagatggggctttactgcgttggccaggctggtctcaaactcctgacctcgtgatccacccatctcagcctcccaaagtgctgggaatataggtgtgagccaccgtgcccagccaaccccctttaaattctaatcaaaggatcagggcagcaaaaattttattggtttgaa

SEQ ID NO: 486501 - DNA, 493 bp, Homo sapiens
tgtttttaaatttgtgggtttttttcttttaatttcaattttatttggtggtgggtttcatctatattttctagaagagaaattgcctagataacactcaggctaatataaactccctttaaaatcctttttttttttttttttttttttttgagacggagtctcgctcttttgcctaggctggagtgcagtggcacaattttggctcactgcaacctccgcctcctgggttcaagtgattctcctgccccagcctcccgagtagctgggactacmggtgcctgccaccatgcccagctaatttttgtattttttgttagtagagatggggctttactgcgttggccaggctggtctcaaactcctgacctcgtgatccacccatctcagcctcccaaagtgctgggaatataggtgtgagccaccgtgcccagccaaccccctttaaattctaatcaaaggatcagggcagcaaaaattttattggtttgaa

SEQ ID NO: 486502 - DNA, 618 bp, Homo sapiens
actgtcaactcacttgcttttcagttaggtaaaactgataaaaaacaacaatgtgtgtgcatgcacttctgtgtgttttacaggaaagataaaaattttaacagaatgtatatgtatttcacaaagaatttctagaattgtgtcagtagataaatatacaaatgaatcactagtgaaattatagtgctgaaacataatggacaaaacaaaaattctggttctgattgtaggcaaaaatgcttggaccagattagcacattgtcataawtcttttctctacttggagcttttatggaagtcattggtgggtaaacttttaaatttcttcctctatgacttgaagtaactttgatgtgcatcacataatatttgatggaaacatctatgttaggttaccaagatggcaaaatattttgtttaatatcaaaattcagcaagtatagtcagcttattttggaacatttttatgttttatagaagttttcctggctgggcgtggtggcccatgcctgtaatcccagcactttgggaggccgaggtaggtggatcacctgaggtcaggagtttgtgagcagcctgactaacatggtgaaaccccatgtctactaaatacaaaaa

SEQ ID NO: 486503 - DNA, 584 bp, Homo sapiens
tgtcacatctttggggcattggaattgtgctgtgttgttagtggcaatggttacagaatccatgtattaaaacacagagaactgtacacacatatgcacacacgagtaaatcttattgtttctaaatttaaattaaraagaatatctaggcggggtgcagtggctcatgcctgtaatcccagcacttttggaggccgaggcgtgtggatcacgaggtcagcagttcaagaccagcctggccaagatggtgaaactccgtctctactaaaaatagaaaaattagctgggcacggtggcaggtgcctataatcccagctactcaggaggctgaggcaggagaatcgcttgaacttggagggaggaggttgcagtgagccgagatcacgccactgcactccagcctgggtgacagagtgagactctgtctcaaaaaaaaaaaagtatatcttacatatctaacgtgctttccaaatggagatgtttgagcactggtaggaccgggctagtgtcttggtttcagaactaggtttccttctgtgtgctgaagtttacaggctcctgtaccttcaactgctgcctctgta

SEQ ID NO: 486504 - DNA, 565 bp, Homo sapiens
tgttgaaaacataccactaaggagtaactgttttgaaaacttaccaaggactgtttcttcagaggtactagtctcttctagggactttttttttctttttcttttcttttttttcctggagacagggtcttgctgtggtcacccaagctggagtgcagtggcacgatcatggctcactatagccctgacctcctgggctcaagcgatcctatgaaatggtgccaatttccatttccatgagtactatttgagtatagtatactagttttctccaaacctggcccatcaacctgatgtgagaaaaattgtttctcgtggccgttttattttttatatcatggattattagtgaggttgaatatttaaatatacatgctatttgtatttggtaaatggcttttcttttttgctaattttcctattggcatgttcacatttttcttattgacttgtaaggtttttaaatagttgaagaagttggaccctttgttacatgctgcagatttttctcaatttgtcatttttartgttgttccatttgaagtattattttggctaaacctat

SEQ ID NO: 486505 - DNA, 592 bp, Homo sapiens
ttccaaacttggcaaaagtccctgaagccaggcttgaggtgatcttgaattgtgagcacatcaraagaagcacctggaggagagatcagtgaggatttcttggatgctagggacataagcctcccaggaccctcatgtgacctaaaaggaggggtataggaagaggatcccattggggactgcaattgaattccctgctgctcagtgggatagttgcttaaagcagattaaaatttgatttagcaacgtgacattccttattcctcatccttacaatgtctgcaatttacttttagatactttagtatcacagtgtgatttcttatatgtgccaattagtttaaaccacaccctaggtgcagtcagttaccataaatcaggaattcacctcccaggagtggccagcaagtaatctaattcagaaagctcatcttatggaaatggctatgacaatctctgttgttacctttttcctttatcaataacagggaatatgctaattagtgcaatgagtttagaaatgagttttcattggtattatatgtggcttactaattagcatgatagatgttagaaaaagactcttattggc

SEQ ID NO: 486506 - DNA, 572 bp, Homo sapiens
gatgagttagtccttatgcttctgtttttctgcctgtgacatggtttgtggtcagctgctagattaaatagtgaaggctcactctgaagatctcaattggagccacaaagaagttactgaaagaaagagaaacagaaagaactgaagagtsgttgtgtaatcacccacataaaacaacttggctctaggtgactggtgtggcgtatttgattaaaacccttttcaaaatgaccttttctccacccgcgtgtactatgcatctttcaaagtctgagctaggaggcttgataagaaagggcaagccttgacagggcttctggggtgtgattcacttgataaacttgcagaccctggtgcagggcttggaggtgaaagtgggaaagataaagcagaaaatgcagaatagttaggtagtgagggaggagacctccctcttcagggctgactgcgctgacctttgggagcactctcttttttgacttccttccagttgcgtgtgtgtatgcgtgcatggggaagtgtagaggacatcttcttaatctctaccttgtgctcagatgatacaagctagt

SEQ ID NO: 486507 - DNA, 621 bp, Homo sapiens
ttgaaaaagtatatttcatcagttggaataagctcaaattaaattccaggtttgacagtcattggcttgcctaattcatgtgtaattacgtaaccaatccatgtgaaggttaagaagggcttttttttccattttgcttctcttttctatctccacttgtatacagtcacagcagtagtttcacatggttggaggtagaatgtggaaaacaagtttaaaactggtttatcattatctaaaaatgtgcaacatctgaaagtcagaaaaaacttccagaaaagcacctgcattggttgggtactatgttatctttgctctctagccttcaagtgtttgtttattgatagagatattatgaatgaaagtggctttactgtttattactccacctacctctctggttagactctgacctgaagcttagcctgmaagtttcttctctttttggatcttcaatatgtgtttgtcaatccaatatttttttttctttttagcagaaagtttggtttacaaactagctgtccactaaagtgaactagaaatgtttcaaccaaaactctttagagacaaagacaatttgctagaagactcaatgctcatcaatacccatcaactatatga

SEQ ID NO: 486508 - DNA, 565 bp, Homo sapiens
tggtggcacacgactataatctcagctactcaggakgctgaggcaggagaatcacttaaacccaggaggcagaggttgtagtgagctgagattatgctccagcctcagtgacagagcaagcctccatctcaaaaaacaaacaaaaaaaaattaacatcattaattttactattttagctgttagtactgagaataaaaataaagtttaattctcaaataaagtctgtattttcaaatataatttcaccttgttttaagaatctcaaagttttttttcttattctcactcatacattcctttaatcactgtataattatttattaaatagccaccaagttcaatgctagggttatagaggtgaaaagctatttttttacaagatttaaatagatataaaagccaaatgaattagtatcattcgtcttagtttggttacaacagagataaacctaagtttttaactactcaaggaatgaaaggcttcctttccattaagacaaaataaaaaggggccaaattctgtaacagtcattgtatatcaatatgacttaaattttttgttgt

SEQ ID NO: 486509 - DNA, 565 bp, Homo sapiens
tggtggcacacgactataatctcagctactcaggaggctgaggcaggagaatcacttaaacccaggaggcagaggttgtagtgagctgagattatgctccagcctcagtgacagagcaagcctccatctcaaaaaacaaacaaaaaaaaattaacatcattaattttactattttagctgttagtactgagaataaaaataaagtttaattctcaaataaagtctgtattttcaaatataatttcaccttgttttaagaatctcaaagttttttttcttattctcactcatacattcctttaatcactgtataattatttattaaatagccaccaagttcaatgctagggttatagaggtgaaaagctatttttttacaagatttaaatagatataaaagccaaatgaattagtatcattcgtcttagtttggttacaacagagataaacctaagtttttaactactcaaggaatgaaagkcttcctttccattaagacaaaataaaaaggggccaaattctgtaacagtcattgtatatcaatatgacttaaattttttgttgt

SEQ ID NO: 486510 - DNA, 565 bp, Homo sapiens
tggtggcacacgactataatctcagctactcaggaggctgaggcaggagaatcacttaaacccaggaggcagaggttgtagtgagctgagattatgctccagcctcagtgacagagcaagcctccatctcaaaaaacaaacaaaaaaaaattaacatcattaattttactattttagctgttagtactgagaataaaaataaagtttaattctcaaataaagtctgtattttcaaatataatttcaccttgttttaagaatctcaaagttttttttcttattctcactcatacattcctttaatcactgtataattatttattaaatagccaccaagttcaatgctagggttatagaggtgaaaagctatttttttacaagatttaaatagatataaaagccaaatgaattagtatcattcgtcttagtttggttacaacagagataaacctaagtttttaactactcaaggaatgaaaggcttcctttccattaagacaaaataaaaaggggccaaattctgtaacagtcrttgtatatcaatatgacttaaattttttgttgt

SEQ ID NO: 486511 - DNA, 594 bp, Homo sapiens
actttcaatagatgaatagacatttaaactgtggtacatttgtacaatggaacattactcagtaataaaattaaacaaattttgatatgaacaacacaaaaatttggatgaatctcaatagccttatgttgagtgaaaggaacaagtttcaaaatgttatatattatatgattctatttatgtgacattctggaagtgacaaaactatagtgatagagaagagatcaatgtgagggtttggacttgggaggaggatataattatgaagagggagcataaagaagtttgggggtattgaaatggttgcattttatgattgtggagatagttatatgaatctatacatgtaataaaatktattaaacagtactactaaactatcagtgttactgtataataataatttttaaattttagtcacgaaatattatcatggggctgatttctggatccttaattccttctcttactggactccttaagcacagttgccattattgacaaatccttctacctttatattttgtattcctttgagttgaaacatcacactcttctagtttttctcccatctcttttctaaatatactttgt

SEQ ID NO: 486512 - DNA, 626 bp, Homo sapiens
tgtagacatgatgtcctatcactcctaaataccccaatgtgtgtttcctccaaacaaggaccttctccacataaccaccacacaaccccaccaatcagaaagtcaacattggtacaataccaccactcaatcctcagactctattyagcaatggctctttccttttgggtccaggatgctgtcaaggagcatgtgttgcatgtggttttcatgtctctttagtttcctccatccggaagagttctttcatgtcctcagccactttcaagaggacaggtcttacattctctaggatgtctcttagcataggcagtctcatgtttcatcttggcagagtcaggcaggatttcctggcaggaatactgcagaagtgacaacatgctcctctcagtgtgtcaccctgggagcacacgatgttgacctgtttcaacatcagttgactccctagtcatgtcattaagttttccatcttaaagtcaccactttccttttataatttgttagtattacatatagcgccaatatcgtattcctcatctaacctctacccaccagccttggcctccatcgatgactgatcaactatcactctggtggttgccaaatggtaatattttatttccatg

SEQ ID NO: 486513 - DNA, 626 bp, Homo sapiens
tgtagacatgatgtcctatcactcctaaataccccaatgtgtgtttcctccaaacaaggaccttctccacataaccaccacacaaccccaccaatcagaaagtcaacattggtacaataccaccactcaatcctcagactctattcagcaatggctctttccttttgggtccaggatgctgtcaaggagcatgtgttgcatgtggttttcatgtctctttagtttcctccatcyggaagagttctttcatgtcctcagccactttcaagaggacaggtcttacattctctaggatgtctcttagcataggcagtctcatgtttcatcttggcagagtcaggcaggatttcctggcaggaatactgcagaagtgacaacatgctcctctcagtgtgtcaccctgggagcacacgatgttgacctgtttcaacatcagttgactccctagtcatgtcattaagttttccatcttaaagtcaccactttccttttataatttgttagtattacatatagcgccaatatcgtattcctcatctaacctctacccaccagccttggcctccatcgatgactgatcaactatcactctggtggttgccaaatggtaatattttatttccatg

SEQ ID NO: 486514 - DNA, 626 bp, Homo sapiens
tgtagacatgatgtcctatcactcctaaataccccaatgtgtgtttcctccaaacaaggaccttctccacataaccaccacacaaccccaccaatcagaaagtcaacattggtacaataccaccactcaatcctcagactctattcagcaatggctctttccttttgggtccaggatgctgtcaaggagcatgtgttgcatgtggttttcatgtctctttagtttcctccatccggaagagttctttcatgtcctcagccactttcaagaggacaggtcttacattctctaggatgtctcttagcataggcagtctcatgtttcatcttggcagagtcaggcaggatttcctggcaggaatactgcagaagtgacamcatgctcctctcagtgtgtcaccctgggagcacacgatgttgacctgtttcaacatcagttgactccctagtcatgtcattaagttttccatcttaaagtcaccactttccttttataatttgttagtattacatatagcgccaatatcgtattcctcatctaacctctacccaccagccttggcctccatcgatgactgatcaactatcactctggtggttgccaaatggtaatattttatttccatg

SEQ ID NO: 486515 - DNA, 626 bp, Homo sapiens
tgtagacatgatgtcctatcactcctaaataccccaatgtgtgtttcctccaaacaaggaccttctccacataaccaccacacaaccccaccaatcagaaagtcaacattggtacaataccaccactcaatcctcagactctattcagcaatggctctttccttttgggtccaggatgctgtcaaggagcatgtgttgcatgtggttttcatgtctctttagtttcctccatccggaagagttctttcatgtcctcagccactttcaagaggacaggtcttacattctctaggatgtctcttagcataggcagtctcatgtttcatcttggcagagtcaggcaggatttcctggcaggaatactgcagaagtgacaacatgctcctctcagtgtgtcaccctgggagcacacgatgttgacctgtttcaacatcagttgactccctagtcatgtcattaagttttccatcttaaagtcaccrctttccttttataatttgttagtattacatatagcgccaatatcgtattcctcatctaacctctacccaccagccttggcctccatcgatgactgatcaactatcactctggtggttgccaaatggtaatattttatttccatg

SEQ ID NO: 486516 - DNA, 377 bp, Homo sapiens
gtggacttatggagtcctattttgttcaatagggacgctttgatgctcaaattatcccagatttagccggcgagaaccccttcaaggtagctcctgtgtccttttgatgtgtcccgatcactccttcagcatttttgctttctagcacaaaagatactccagaatcatcctgtacttatcccatcccagcctggaatcaattgtttctctaaaaggtactagttcctttcagtggtggatggtactgaacgaccatgatcggaacatgcggtgtgccctttgtgytgtgatgtcattgcttctaggcctgtgcagcagacagagctaggaaacacatgtatgtatatatgaacacacatacacacatttgtactatt

SEQ ID NO: 486517 - DNA, 377 bp, Homo sapiens
gtggacttatggagtcctattttgttcaatagggacgctttgatgctcaaattatcccagatttagccggcgagaaccccttcaaggtagctcctgtgtccttttgatgtgtcccgatcactccttcagcatttttgctttctagcacaaaagatactccagaatcatcctgtacttatcccatcccagcctggaatcaattgtttctctaaaaggtactagttcctttcagtggtggatggtactgaacgaccatgatcggaacatgcggtgtgccctttgtgttgtgatktcattgcttctaggcctgtgcagcagacagagctaggaaacacatgtatgtatatatgaacacacatacacacatttgtactatt

SEQ ID NO: 486518 - DNA, 616 bp, Homo sapiens
gatcattctaccattgtgtggcaggagtgccacacccattgtcacctcaaaggccaggagtggggaggaaggtagtatctttttctctttttccatttcttgctcctggagggaaaatggagaaaaggagaaagcagcccagagcctccaaaccatattaagttcaggtcttgctgaggcagagaggagggccatgaatgcagatttcttcatttgttcgttcaaagtcctgttgatgggaaggttcatctgttctcattatttataattaaaatattgayggattggctactatgcatctacctcagctcactgtttaatttgggtgttaacttgcccggggaatatctctaagaaagatgccaataactcattagcagcttataaaggatccttttacttttcttccaagctattttaaaatgcaacagttgggagatttatcaagcatttgttattataagttattactgggtgtttcttataacttgcctgagggtggcagcatttacaggggtctctctaattttccagtgactccccaaatgcacactatgactttcatttttattttgaaggaattcaaggaaatttaatatcctaagagggggtgcaa

SEQ ID NO: 486519 - DNA, 453 bp, Homo sapiens
tacacaaacagatgtctacacaagcagttgtacacaartgttcatagctacattatttataatagccaaaaatggtaacaatctaaatgtccatcaactgaaaaatggacgataaaatatggtatagctatacagtgagatattataagcaataaaaaggaataaagtattgatacatgctacaacatggattgaccttgaaaatacatgaagtggaagaagccaggcacaaaagaccacatattgtatgatttcatgtatatgaaatgtccagaataggcaaatctatagaggcagaaagtagattaataaaaaggcagaatagaaggagaaaatgacagaagtgagaaggacacaggaaggggggatgaaaaaccataaaagggaaaatttaactaataaatctgaatatttttcaagtttgttttcaggaacctggcaaagtggttccct

SEQ ID NO: 486520 - DNA, 453 bp, Homo sapiens
tacacaaacagatgtctacacaagcagttgtacacaagtgttcatagctacattattyataatagccaaaaatggtaacaatctaaatgtccatcaactgaaaaatggacgataaaatatggtatagctatacagtgagatattataagcaataaaaaggaataaagtattgatacatgctacaacatggattgaccttgaaaatacatgaagtggaagaagccaggcacaaaagaccacatattgtatgatttcatgtatatgaaatgtccagaataggcaaatctatagaggcagaaagtagattaataaaaaggcagaatagaaggagaaaatgacagaagtgagaaggacacaggaaggggggatgaaaaaccataaaagggaaaatttaactaataaatctgaatatttttcaagtttgttttcaggaacctggcaaagtggttccct

SEQ ID NO: 486521 - DNA, 493 bp, Homo sapiens
tacagacttcacatttagctgttgttcttatctctcactcaggttgtccccagaagtaatgagcttgtaaactcctgtctgcaggcgcctctttccttgtgcgtgtgttccacctggaactccaccctccattcactccttctcctccctgcctgtctcacccgtgccttgattgacacttacttgtccttaatatctcagcctagaatcattctgtttgggaaacccaaggatatagaaattggaatgacttaaaggtggggtttactgcagattggccatctagataaattgacaccatatttagagctgaattattcaggtgagttcttcaccatgcattaaccttattggtcaccttcatgttctctagatctagccagagggaaattctgagtagtttcaatcagaatgaaaatcttytctcgacaactcagcacaaggtcttgtcatttactacttgtttttccttgagcaagttatttagtttctc

SEQ ID NO: 486522 - DNA, 676 bp, Homo sapiens
atttatttacatgcagatatttggttgactagcttgaactgatttgggtcatcaagtgaaaaatgaataagactaatgaagaattggtggactctttctaaaaggacaaagcttttaaattactcacatagatttggtcttttcttttgatgtaatattgtgctcttctgagctttgctactgtagtaatttgcattgtagattcaaataattaatgagcactctcacttttctaacttctgagtttgtgtcatcaacaaatatttattgagcacctactaagtgccacatgctgaataaagtactgattatatgttaatgtttatgaagattattgtttgtgacataatacctttgtaatcattagatcatttaaagaaaaatcaagagttttacaatagtctyggagtgcctcagacttccagagtaaatatgctttttgatcacatatgaggactaattcttacctgcatataaacaggacttccagttataatagaattgccttttcagaatccatttcccagctgccgtttcatgcagaggacataacaaacatcttgactttggctgtttatttgagaacaggtgggaccaaggtatgtgcatcttctcataactttgaaaatatcgttttaaaatataggtcagtatttttacagtattacattatgca

SEQ ID NO: 486523 - DNA, 676 bp, Homo sapiens
atttatttacatgcagatatttggttgactagcttgaactgatttgggtcatcaagtgaaaaatgaataagactaatgaagaattggtggactctttctaaaaggacaaagcttttaaattactcacatagatttggtcttttcttttgatgtaatattgtgctcttctgagctttgctactgtagtaatttgcattgtagattcaaataattaatgagcactctcacttttctaacttctgagtttgtgtcatcaacaaatatttattgagcacctactaagtgccacatgctgaataaagtactgattatatgttaatgtttatgaagattattgtttgtgacataatacctttgtaatcattagatcatttaaagaaaaatcaagagttttacaatagtcttggagtgcctcagacttccagagtaaatatgctttttgatcacatatgaggactaattcttacctgcatataaacaggacttccagttataatagaattgccttttcagaatccatttcccagctgccgtttcatgcagaggacataacaaacatcttgactttggctgtttatttgagaacaggtgggaccaaggtatgtgcatcttctcataactttgaaaatatcrttttaaaatataggtcagtatttttacagtattacattatgca

SEQ ID NO: 486524 - DNA, 443 bp, Homo sapiens
ttatttaatccatcaccaggtgtcttcaatgttttatatcctaaatgtctcttccatgtatctccttatccacatcaccactgccattaacctggtcagagtcccattatctctcacctagaatatacaggaatagactctaacttgtgtcctcatcttcctcttcccctctaatcagttatccatattgtaaccaaagtraaattaaaaacagaaagcaaatctgatctatcagctttccattcttcctagattaacataaatttattaacacaattcatcccacaccactatccctgccctctgttctacagcccctttttaattttctttaaagtacacacatttcttctcactacagggccattgcacatttgctgtctctgcttaaacctcttccattacttacttccattctcctggtgaaactgctaccaatcttt

SEQ ID NO: 486525 - DNA, 499 bp, Homo sapiens
gagagagtaagacatcaaaaagattgcaaacctcagggtgatttaaaagtacactcgttgtctttttgattttttgaagaagtgttgaattaggcccctgttagctaaagacttacagacccaggccaaattccaacagtctcaactccttccagccagctccaggaagctgctgtacagatttttggraagggagcctaaagagctagaaccacctggtttcagggttacttgggagcatcgagtttgcttgacctggttcattaagggccataaaataataaccaatttttctaatctgagccttattactggataataagttgcatattttattcctgccgtgggtaaggaacgctccatttgtcttgttcatccctgaaatgaaaattgcctactttctgatacgatccactgataaaaacattgtcttaacaaatttttctgaggaatttcccagaccacagtgaggtatgaaaaccaaggctctggaagccag

SEQ ID NO: 486526 - DNA, 639 bp, Homo sapiens
tattccacccctcaacaggcagaaacggacatttgtaacattttattttaaatgaggcagaaagaaataacaatgaaataatagaaagcctgctgaggaaaggatggttaatttcaaacatgaaggacaccttcttggaggaggtgactattttttccttctcattctttaagtcctcacttcctctctctcttccttcttccctctcgccatcttcccatatgtctttcaaacattctccaaagtagataggtatgtcggtctatctacttttgtgaatgtttgaaattttctccaataaaatgtttttaaaactcattaggtcattctcatgaaaaactgcaatccataacattaaaggcytggcatgttttagaaattatacttctgaaagcctttttgtggggatcaatctctgaatgcagtggttcataagagcaaacatttcaggaaataaccattttaaatacagtcatgagccgtatgatgatgtttcagttagcaacagagcacatatacagaaatggtcatctagaaaactaagatcaatttactgttgaagaaagaaaaaatatttttaataaatctagagtaacctaagtgtacagtgcttgtaaagtctacagtagtgtgcagtaa

SEQ ID NO: 486527 - DNA, 558 bp, Homo sapiens
ctgggagtatgtttcttttctctaggtttaccaatcattttttgaatttccctatgattttgctttagagcctggctaactttctttcatatattaaaaagatttgtaaacgcatcttctttgctctactagacttgaagctattaaggccaggtgctctaattcatctgggtattccacaggatttctaggagagtacctaccatacctaaaaaatccacgtgcrtatcgtgtacctacatatgtgagttatagctacctcttatattcagtttacaattgtgttgtgagaagaatcttagttaaaagcaccaactctggattcagacagaactgagttcatatgttgactccaccccttattagcgaggtagcctagggtaaatcctgaccatatctacatttcaccatcctccaaggcccaattgaaatattttctctacgtgaaaccacctgtgctctctccctcccaaatttgaaagcattatttccctcttaactcttcactcccttttctgaaatgtagacttttaaattaattttttacgtaagtatgat

SEQ ID NO: 486528 - DNA, 630 bp, Homo sapiens
tatccgtgggcccttaatcagaaaactttaatttcccgcttcccttttctcttgtttgactttggattctgtttcaaagtttctaagtcaacaatataatcaactgaacttagaacaacttcctgctcctgacaggaagaaaaaaagaaatctctttgtttctccagtggttggggagtaaacgaacctcccagggaaagaaaaatcctttggctatatttytcttgcttgagaaagagcagaacaaggagggtcttctgattttgaatccgttgcatacactggagttaaaagtcgagttgtctatagcagccaggcagataagtggttactgttcaccaatctatatgctcccctgtatttcccagtctccgttgcagttagcttaggaccatgtgactagttctggccaatgggctgttaggggaagcttctcgtatcactttcaggtcaaggttgctaacagggggcctgccttctccatctccttcctctgctgtagtgactttggaggccacatcttccatataagagagagctatctggcctttgacctatagtccacattacataaagtagaaataaatcttcagcatgaggccactgagattttcaagatttgtctagagc

SEQ ID NO: 486529 - DNA, 630 bp, Homo sapiens
tatccgtgggcccttaatcagaaaactttaatttcccgcttcccttttctcttgtttgactttggattctgtttcaaagtttctaagtcaacaatataatcaactgaacttagaacaacttcctgctcctgacaggaagaaaaaaagaaatctctttgtttctccagtggttggggagtaaacgaacctcccagggaaagaaaaatcctttggctatatttctcttgcttgagaaagagcagaacaaggagggtcttctgattttgaatccgttgcatacactggagttaaaagtcgagttgtctatagcagccaggcagataagtggttactgttcaccaatctatatgctcccctgtatttcccagtctccrttgcagttagcttaggaccatgtgactagttctggccaatgggctgttaggggaagcttctcgtatcactttcaggtcaaggttgctaacagggggcctgccttctccatctccttcctctgctgtagtgactttggaggccacatcttccatataagagagagctatctggcctttgacctatagtccacattacataaagtagaaataaatcttcagcatgaggccactgagattttcaagatttgtctagagc

SEQ ID NO: 486530 - DNA, 601 bp, Homo sapiens
tggtagggtgagaattggaacacaggggtgactttagagcccaaagtcttgaccatgaggctatcctgttgacaggctccatgtcataggaaacacggaatggctgctttttcaactgctcaaatcagtgrcacccaaagtcttagcatgggctgcagctacagcaggatccccagaaactgggattccttaagtctttgggaggcccctgaagttgcactgaaaatgttctggtgcgaggtggggaggggaagacttcactgcccagtcataattgcttcccttggcctcattactaggttttaagaggaggaaaacctaatattgccagtcacattgctgcttgctattttgaaaatgtggtaggggataaggttgaaacatccaacatttaaccctgaaactggcatactaaataacactttttcacgtttctgcatggtctttcatccaaaactctcagacgacttcacaagcagttactatttactattatattactcccttgggaactataatggagtgtggctgcttcgagacttgaagagtccctttaaattgtataattttctcctggctctttctggctaacgcatgcact

SEQ ID NO: 486531 - DNA, 582 bp, Homo sapiens
atgtgtacatattacatttcaattcaaaaagtttttttaatgagttctcaagcaactttgggtaaaaatctctattttgccactttctggtaattatattgagcaagtcatttcatactttatctctctaagattcatctgtaaagaggagacattatattacccagtattgtggtgaggatttcatgagatacatgtgaagcacttagcacagtgctgaacacmcaataagagcttaacaaatactggttacagttgatataaatgaatgaatatcaatttccatctaaactctggacatttcttccactaattgagcacatgctatattcaacaaccatggtagatattgttccagcaacgtattggttaaacccctgctgatagcttgagtcccttctaacatctgctgtacaagtaataatatttttctctctcgggaaaaagtagatagaaaactgtaattgttgtctcttttcctgaagtaaggcaaagatgtctctatgcagctttcccagaggtaaatattgcattgtataacagatggaacagataatgctggcaaattcacatgtgaagatt

SEQ ID NO: 486532 - DNA, 582 bp, Homo sapiens
atgtgtacatattacatttcaattcaaaaagtttttttaatgagttctcaagcaactttgggtaaaaatctctattttgccactttctggtaattatattgagcaagtcatttcatactttatctctctaagattcatctgtaaagaggagacattatattacccagtattgtggtgaggatttcatgagatacatgtgaagcacttagcacagtgctgaacacccaataagagcttaacaaatactggttacagttgatataaatgaatgaatatcaatttccatctaaactctggacatttcttccactaattgagcacatgctatattcaayaaccatggtagatattgttccagcaacgtattggttaaacccctgctgatagcttgagtcccttctaacatctgctgtacaagtaataatatttttctctctcgggaaaaagtagatagaaaactgtaattgttgtctcttttcctgaagtaaggcaaagatgtctctatgcagctttcccagaggtaaatattgcattgtataacagatggaacagataatgctggcaaattcacatgtgaagatt

SEQ ID NO: 486533 - DNA, 665 bp, Homo sapiens
gacagcaacgtgtctgtaggcagctccacattaccacgtaggcttgcattactataaagagtacagaagcaaaagaattattataacatcctttcagcctcttgagaacttatcacatggggcatctcagtcttatgaaggccaataagaagtatctttggcaagactgaggaatgcattattaatatgagctctgtgggcctgtttagcagaaaagtgacccatgataaaaataacaatcccckacatttgtagaactctgtatccattgatcacctttcatcttgacaaccctgagaaaaaggtattataaatgaggttcaaagagattaaggaactttcccaaggtcacatagactatcatagaggacaaatttaattcaatattactcaatgaatttttactgactttcataccctgtactaagcactggggataccaaaaaataagccaccatgcctgctttcagggagttcacagcctactgaagaccacagatgggtattcattcacttgaaaactacatattgagggtctactatgtccccactataatcggggtgctaggaaataagcaatacacaaaacacaccaggttcctgctattgaggagtgtgcattctagtgaagccagacagtaggcaaacagacaaataagacaggt

SEQ ID NO: 486534 - DNA, 511 bp, Homo sapiens
gaaaagtaacaaataggacasagaacaatgaggaaacatcaatctagctaaatcagagaaatcaggaaacagaacagtagaaaatgtagaacctgacaggtgtggtggcactgattttaatggtgaaggtaatagtgagggggaccaacgtttttgaaaggtgaataataatttttatcactgaggggagacactgaagtttggacaatgtaggcctggacagtaaagggatttataggcatcggtggtttcatttgctagttgcctgggcacaaagaattctgagaatgacccagtaggagtagcagaaagggggagctgactggacatgtgagagtgggaacactgaggttcatgctgagagtatggccataagtgtggcccatagtgtggccatggcaaaggcaaaggagatttaagacatggcatccctaggtaaagcaagttcagggtattgtgagattgcaaatgaacctgctggttctattatttcatctcagcaacataagtg

SEQ ID NO: 486535 - DNA, 552 bp, Homo sapiens
tcttcttttttattctgaaatttcaatattcacatctgtctaatgacataatattgcaagaagaaaatggagtaaattagcagtaagtgagaagatttgagagagtaggggcaggagctgggcaaagatactccatcttgtcttccccttgattaaattgtaaattccctagaggtctctcgaatctttatgcagtactagaagactgacatcatgttcagcaaacaagcttgttgctgttatttacagataatgaagggcatttctcatgcaacggggtagatactatgcctcgaaaaagctttctaatgagacaggaagtttgagtttccccttgcrtattttctccaatgttctgcatatactatatgatatgtaaatgtatacatagtacagttactacatgatcttttgtcaaactaatttgtttgcctctggcttgttttctttgctctgcccttaaaagtgagattctaatttactgccttttctcctgccactggcccaggtgtactagtttcctattgcaacataacagatgatcagccataa

SEQ ID NO: 486536 - DNA, 603 bp, Homo sapiens
caaaattatagtactatttcaagatttgattttttatataataaatggtttcataatatatgtacctcggcaatttgcttttttctcaacacataaggatttcagtttatttaatagcattccattatataaacatactacccactgtctagctgataaacattttggttgtttccaattttttcctcctataaaatttgctttgatgagattattacatcttttctttgacaagcatgagtctaggcatgaaattgttattactatcttcaaatagtactaaaaaattatcaaacaagtctaggcgcggtggcttatgcctgtaatcccagcactttgggaggctgaggcaggcggatcacgaggtcagaagatcgagaccatcctgrctaacatggtgaaaccccaaaaacaaaaaaattagccgggtgtggtggcgagcacctgtagtcctagctactcaggaggcttaggcaggagaatggcgtgaacctgggaggtggagctcgctgtgagccaagatcacaccactgcactccagcctggacgacagagcgagactctgtctaaaaaaagaaaaaaagaaaattaccaaacaagctg

SEQ ID NO: 486537 - DNA, 601 bp, Homo sapiens
agaaaataaagctaataagataaatttacaccaaaatgtatttgactgatgcctcctcctggaatccaccagagaaagttacaaattggaagagttaagctcatctaataaataagtatttgattattgaacactttcaagtggtgtgactaactggaatttctcttgtgtcacctacctgggtcttcctaaattatggggatctgatattcttcaaagtatccttattgccctacaaatattgaatatattcattgaattccttacacccaaatcagtttcttcagactattccttagtggacttttccctagacttcagtatgccgaagaatgaccttgagagctgttaaaattgcagattccaggccctcayttctaaagattctggatcagcaaattttggtgtgtccaggaatctttatttttaacaaacatccctcctaggcaactcattttttgggaaacgtcattctagggcaggatacagatactcctccaaacccgactttgctgagaacgttcctaggaactgaaatagtgtcaaagaaagagctatcagttacacctctctccagatttgtcagggactctgggaaaca

SEQ ID NO: 486538 - DNA, 593 bp, Homo sapiens
ggaaagatcaataaaacagatgaacttctagcccagctaaccaagaataaaagagaaaagacataaattgtcaatatctgaaatgaaagagagatcataactactgatcccatggacactaaaatgataattaaggaatattattaataaccctatgcccataaatttgatcacttagattagatggactaattccttgaaagaccacaactaccaaaacttgcataggaagaaatagataatctgaatagtcctatgtaacatgtgtgtatacatgttacataggactattcagattatcctgaactttgttatggagggagacagacagacagagagagagagagagaagagactgattgattataataattagctcayggaattatggggcctggcaagtccaaaatctgcaaagaggagaagaaggctagagacccaggaaagttgatgctgccattctagtctgattgccatctgctgtagagccaggaagatccaatgttgcaggtgagatccaaaggcagtctgctgaagaactctctcttgcttagattagggtaggcagtttttttgttctattcaacccttca

SEQ ID NO: 486539 - DNA, 519 bp, Homo sapiens
ttatttgcacatggtaagaaaaaataataaatagataataactcttcaaaaatcaaacaactttttatattcaaactactttttaaattcaatattaaaaatattgaatttattgtcatttgaaatccatagacaatataaaaaatgaaattgaaggaattgatgaactttaggtagatgtttctctgccaaaataaatattatttcctaagaaaaaccttaaagtttgwtggggggaaagacaggaactttgggacttctacttctagcccatatgaaataccagggacaagatacgtcctcttgtcttaaagaagtaaagaacggaatgaaatctatggaacaatagttttaatacatggaacaacaaacattgcaggaaagtgatttctgagggaaggaaaacaaataacgtaagccctatgtttgtctgagggaatttctaaagagaatttctaagcctcggaacaggtagcgtaaaccaaaaaggagcccggtagtctctctgagatgaggagt

SEQ ID NO: 486540 - DNA, 519 bp, Homo sapiens
ttatttgcacatggtaagaaaaaataataaatagataataactcttcaaaaatcaaacaactttttatattcaaactactttttaaattcaatattaaaaatattgaatttattgtcatttgaaatccatagacaatataaaaaatgaaattgaaggaattgatgaactttaggtagatgtttctctgccaaaataaatattatttcctaagaaaaaccttaaagtttgatggggggaaagacaggaactttgggacttctacttctagcccatatgaaataccagggacaagatacgtcctcttgtcttaaagaagtaaagaacggaatgaaatctatggaacaatagttttaatacatggaacaacaaacattgcaggaaagtgatttctgagggaaggaaaacaaataaygtaagccctatgtttgtctgagggaatttctaaagagaatttctaagcctcggaacaggtagcgtaaaccaaaaaggagcccggtagtctctctgagatgaggagt

SEQ ID NO: 486541 - DNA, 636 bp, Homo sapiens
gctgagaagtcttcgtgcctcagatttgctgacctacagaatgcttcagtatccttatttttgtagaatgtataaagaatgtctttcatgttggttggaatctggcatacctaatttaggtatctggccaaaaagaatacatactacagcagaaaaatatgaagaatatgaagcccagtagcaaacagaccaaactcaagcccaggagttaygcagatctcaagatagagattttgaaactatggctaaattacatactccagtaacggtggatgttgttcattgtttgtcaccacaaaaaggacagattttttctagatatgacatttggttcgggagggcacacaaaagccattctacagaaggagtcagatattgttctgtatgccttggacacaaacccgacagcttatgcattagctgaacatctttcagagttgtatcctaaacaaatccgagctatgctgggccagttcagccaggcagaagccttgttaatgaaagctggagtgcagccagggacttttgatggagttcttatggatcttgggtgttcctccatgcaacttgatactcctgaaagatttttccctttggaaagatggccccttggacatgaggatggatggtagcagg

SEQ ID NO: 486542 - DNA, 530 bp, Homo sapiens
ctggttttaatcctgactcttacagcctgccaggtctgtgtgcttggaaagataatttatccttctgtgatttagtttcttcaggtgggaaacagggagaatagcgtctgtttcattgtgtggtgaggaacaaatgagttatcaaacataaagaatttaaaacagtgcctggcacattagtatgtacaagtgtttgctattatgatgatgaaatgcttacaggaagcaaagcactttgcatacatattatgccatgtartcttcatggaagtttatgaggtaggcatcaacatcctcacctgacagaacatactgcatccttgagaaatttaatcacatgttcaagatttgacagccgaggtttgaacttctgtctgacaacaaatcctgtgtttttaacatgatactagtataaatgtcacaagatgtgttcaaagaaaatgctgtatatgtctaaaggagatagctagcacgtccaactgaagtgttaggaatctgatatcaagaaagaagaaactgacccagctttt

SEQ ID NO: 486543 - DNA, 608 bp, Homo sapiens
ctttcttgtcttcactattcctgatacttttggaaagattatgctgaactaaaacaggtgtcaaagacaggtttgaagacaaataaagccagttaaaaacaactaggaggagggggattaagacaaggccattcgtgaagttcacttgctttttgtcagggaggatggtgtttgcggtatagagcaaattcaagctaagattcagatacaactcttccctttcatttcataaatgccagcaactcaagatcctgcaatactcagggagtagaacaataggactgatttatcatatttcagcgtctttaatacctgctgccttgaagtgaataattgtagtttgaagagataatgtgtgtgcatgctttagcaattccagttggttatttctgtttaacttaatttctccgaagawaaaaacatggacaaaaggaattgacataaatgttcagaattaattatggatttataaaatcatttttaaatctctaaagagcaattcaatatgctcatttgtactaaaagacagataatttttcatttgacatatttgttgggattttgcatacttgtgctccagggagtacatttatcataaaagatggtat

SEQ ID NO: 486544 - DNA, 655 bp, Homo sapiens
aaatccaaagttaattcaaattctactgacataaaggaaygcagaatggttgtgaggacctctgataggggaagttcaggaagttcttaaagtttcagaagtgatgcttggatatgtcatgaaggatggttacacattacctaggtgtgggtgggagaaaaaggattccagcaaaataaattccaggcagtggccctaaggccattaggtgcagagtgattttgagtaatcaaaaaaaaaaaaaatctattgtgacttgtgctcagaaagctgatgaaaatgtcatgtgtcacgtcatgttgagctttgtggccatagttaagggggcaaagaaaaagcaattgtaagaactgtggaagccagtaaatgaattgtagcacgggagggaaaagattagatttgtatgttgcacatgcacacagactacagacaccacctcccttttttaaaaaatctcttcattggtacagtttgcagatccttcattgaaaatagatctttctttatctttctcccccacgtctgttctatcaaaattttaccagctttaagtcaacatgaaaagtgtttaacagaatagggttaagaaaagacttccaggcttgccaaaaactttcttttctctaataaaactggcctaaaattaaagatgaaa

SEQ ID NO: 486545 - DNA, 473 bp, Homo sapiens
ggctcttaccttttcccattgttcacattcggtaaataagttcaagcccctagggaatgtttcttagacaacgccttcacttgggaagtcaacaacttaactataacttatttttaccaagtaattgcctggtaacattttttccttccaggctgttcttttttaagatcaaagacagtctctttcattttataatatgttccacatgaatagcaaaggactaagtatgtatgatggaaacacacattttaattgagagaaagaaggaaatgrgagaggcagaaaacaagaaatggaagcaggttacagagcttcaggtcatctgtctctagtcaaggcccatcagacataaatccctactaggccctagactaggataaacctaaaccttgaggaaaagcaatcaaacaatgccatattacgtccccagtaatcccagacttttgttcagacttttgtcccagactcttgtg

SEQ ID NO: 486546 - DNA, 510 bp, Homo sapiens
ctaatgaaagtacctgggccatttgtttttcatttttcaacaagccagcctgggcttcttcagtgaatagtattcataggaatcccaaaacagcaasaaagaggacaaatcacactatgtaagaacttttcaagcctttgttactgtcattttcattgacatctcattgaacaaggcaagtcacatgactggacccacaatcataatggaaagcaaagtttcacagaggtgagtatggacacaaaagggggaagaatgtgtggccatttttgcagatttaccataaagcaatattgagttattctctaatactgtggacagcttgttctttttaaaaattaagttttaaaattataatgggaattacttcccatatgtgtcaattttcaaaaaaaaacattgtgtcaattttcccctttattatttctttattacttatttttaggcactttaaaaatactacctgagctacttatagaatgaatacaaatatctaaacattttcaacat

SEQ ID NO: 486547 - DNA, 665 bp, Homo sapiens
tttttgcacatctttggaataatgatgagatttggaaagaggaagtcaacaatggagtcttaatactctaatgcacttgaaagaaggtcaaaaaatgttcttaaattcatattgtctgccatagtgacactctggggaatagtgatccttcgaaatctctaattaacaagagatggaaaatggaaattaattatgcagtaccctcattattgttttcaaatgtacaaaatgttgttgattgttttgttgttgttctatgtgtcacatttaattgcttcrtttcattaatgtatagtggttttcttctgtccacttgagacttatatttcttaggcctatttgtctccaaacgactagttctcctcccataggggtgatttttaggttcaggttataaaagcacacattttaaggttgccaaggtagtacagtgtacttgttgtttataaaagtttattattctaaaataagtagcctggtctctgagtgtaggtcactttgcttatgatggctgaagggtgcagagtgttctcagcaggcttcattgtcttctcttcacctcctccctgcaagctctgatccctgagggggtccagaggtggctcctgtgggggccttaactctctactattctgagaccagaaagcacctcagtggtttgtgga

SEQ ID NO: 486548 - DNA, 556 bp, Homo sapiens
tgtgtgatcttggcagctcctttctcctgccaccctttctcctaataccgatgatgtcagcacttcaatctgcctaggagaaaatcgtacattgtagtacawgaccccttgtttgtctttctgccagttgcccaaagaatccccagactcctagatcatcactcaagacttgaactcttggccatatagtctggtgatgccagcggccatggtgtctgatacttgagttttgctctggccgtggttcatctggttttgtgcaccttggcttcaaagttcttctaaagctaacctcacagtcagatagctggataagtgatcaacagcagcgttacctgaagtctttatgtatcttatctgtgcactatcatccttttccataaatgtaggttgaggcctgaatactaattcaatctcactaccaccgtccatttctgaatcaatggcaaatgttgcattgtcaatatcaagctcaagcccagaatcagcagatgttttgttccacttgtgactatggcctgtttccttgttgttctgtgtggatgcatcacgacag

SEQ ID NO: 486549 - DNA, 556 bp, Homo sapiens
tgtgtgatcttggcagctcctttctcctgccaccctttctcctaataccgatgatgtcagcacttcaatctgcctaggagaaaatcgtacattgtagtacaagaccccttgtttgtctttctgccagttgcccaaagaatccccagactcctagatcatcactcaagacttgaactcttggccatatagtctggtgatgccagcggccatggtgtctgatacttgagttttgctctggccgtggttcatctggttttgtgcaccttggcttcaaagttcttctaaagctaacctcacagtcagatagctggataagtgatcaacagcagcgttacctgaagtctttatgtatcttatctgtgcactatcatccttttccataaatgtaggttgaggcctgaatactaattcaatctcactaccaccgtccatttctgaatcaatggcaaatgttgcattgtcaatatcaagctcaagcccagaatcagcagatgttttgttccayttgtgactatggcctgtttccttgttgttctgtgtggatgcatcacgacag

SEQ ID NO: 486550 - DNA, 598 bp, Homo sapiens
gggcatgcagatggtaactaaggaggccagggttcttaataactacacataaaagaaagtaaataatcataaaaaaaagaatcttttactccttccagactttcaaattttagcccaacttcctcaattaactaaatgtgcctttctttgggcaattctaaaagtatagggatagagtataacccagacgatttgtacaaaagtgcctcagcacaatgctgcgtgcccagttttcaccagtctttgacctaatcaatgcaaaagtagktgagtccactgactaagcacaacactattacagataaaatatagatgggatacaaacgcatgcaatgtaaaaagtgagaacctaaaatctagtttggcagaaatctggaaataatccaggtaaattagcttcataataataattgcattttttcgcacaacaataatgtggcaaatacttcacagattttatcttatttaatctgcacaagcacaagttgagtactgctatccacagtttagttggggaaaatgagactttctgaaacttgtaggagctagagagtgttagggtaggcagattcagcctgggtttgactggttcaaagca

SEQ ID NO: 486551 - DNA, 595 bp, Homo sapiens
tctcagctactaggggagtggaatatttacatacaaagaacattcacatttgcctgttcttcagtttgcttttgggtgggggctgatggaaaaaagggacagaaatgggagtgaggtatggcatgtttgtccaccaaaaatggaatgcttctcaactctggaactccagagctattttcttatgtgtaaaagtcaacttgtactatatccccaaacatcaactcctcttcctgtatttcagattttgattcatggcacagagatctacacaagtgcccaaggtttcctttcttctctctccctcactactcacacatccggttggacaacaaatcatgttgacactagctcctcagctgaacctcaagaatcatttccctccagttcagactccctgaccctgtcttaattttgaagaggtaatttctcctgacaacttctagtatatctatattattatatatgctagtatatgtttagtatattagttycttgccttaaaacttctcttgcttccaagccatattgtcacacttatctttccaaaacacatatattcattgtcactcctttgcttacaaacttttgccacatc

SEQ ID NO: 486552 - DNA, 578 bp, Homo sapiens
tacagcagcagcaaagggacaatccggctgtgtgacatgcgggcatctgccctgtgtgacaggcacaccaaatgtgagtagcaactgaagggaggtggggggcatggccactggccccaatgtgctgggggagagcctggaagcttatgatctccctttctacaccagacacactaggagtaaagaaactacaagtgggagtcagctccgtattttatatttcagtaaagatgaacatttgtgttcgattccaaaacatccagagataaataagacatgacctcatcagaaaagggtttaaataacagtgtgatgtgatccaaattatgtgttaaggaaatcatgcttgctgccatggggagaatgactttgaggaatagcagrgggaccagttaggagaccgttgaagggtggcctggacaaagaggtgagtggaaattgagagggcagatgggttctggacacatctttttttttaatccatgtaacctgcacagtactgcacagatcttggcaataaaatgaacaggacttgctgaactgcgtgggaggctgagaacataaaagccatctagaac

SEQ ID NO: 486553 - DNA, 578 bp, Homo sapiens
tacagcagcagcaaagggacaatccggctgtgtgacatgcgggcatctgccctgtgtgacaggcacaccaaatgtgagtagcaactgaagggaggtggggggcatggccactggccccaatgtgctgggggagagcctggaagcttatgatctccctttctacaccagacacactaggagtaaagaaactacaagtgggagtcagctccgtattttatatttcagtaaagatgaacatttgtgttcgattccaaaacatccagagataaataagacatgacctcatcagaaaagggtttaaataacagtgtgatgtgatccaaattatgtgttaaggaaatcatgcttgctgccatggggagaatgactttgaggaatagcagagggaccagttaggagaccgttgaagggtggcctggacaaagaggtgagtggaaattgagagggcagatgggttctggacacatctttttttttaatccatgtaacctgcacagtactgcacagatcttggcaataaaatkaacaggacttgctgaactgcgtgggaggctgagaacataaaagccatctagaac

SEQ ID NO: 486554 - DNA, 578 bp, Homo sapiens
tacagcagcagcaaagggacaatccggctgtgtgacatgcgggcatctgccctgtgtgacaggcacaccaaatgtgagtagcaactgaagggaggtggggggcatggccactggccccaatgtgctgggggagagcctggaagcttatgatctccctttctacaccagacacactaggagtaaagaaactacaagtgggagtcagctccgtattttatatttcagtaaagatgaacatttgtgttcgattccaaaacatccagagataaataagacatgacctcatcagaaaagggtttaaataacagtgtgatgtgatccaaattatgtgttaaggaaatcatgcttgctgccatggggagaatgactttgaggaatagcagagggaccagttaggagaccgttgaagggtggcctggacaaagaggtgagtggaaattgagagggcagatgggttctggacacatctttttttttaatccatgtaacctgcacagtactgcacagatcttggcaataaaatgaacaggacttgctgaactgcrtgggaggctgagaacataaaagccatctagaac

SEQ ID NO: 486555 - DNA, 603 bp, Homo sapiens
tgtattcaactaaccacaaatccaaaatatttgggatgagatgggggggaggatttcacaaagttccaaaaagcaaaacttgaatttgactattgtgaatgatgctgttttttctttttgtttgaacttgccttatttttgtttgtttattttttttgagacgaagtctcaccctgtcgcccgggctggagtgcagtggtgtcatctcggctcactgcaacctctggctcccaggttcaagcgattctcctgcctcarcctcccaagtagctgggattgcaggtgtgtgccaccatgcccggctaaattttttatatattttttagtagagatggggtttcaccatgttggccaggctggtctcaaactcctgacctcaggtgatccacccgcctccgcctcccaaagtgttggaattacagatgtgagccaccgcgcccggcctgaacttgccttattttgagttttaaacccaagttcagcaaaagtaaagaaatccctgcacacaaatttcctttactttccttttcttgctaaaattgtaggccactaacagctactattttttgaatttggaatctccgtgctcatgagttccccttg

SEQ ID NO: 486556 - DNA, 677 bp, Homo sapiens
ctggttattgctttgctttttctaaggattgttgcagcaggaggaagtgctgctcaagcaatgcatagtttttttgtcaaaggggaaaggttctttcaggttatactttttgctgtggtattgtttgtaattgcarctggtggatgccatctttaaacttgattcttcagccacagcttaatcatcttgattatctaacataattaaaataagatttaaacagttgaccacaaattatatttttacccttgttatccagaaacagtttattgtaccgttggatgatgcagaatttattgaaattcctttggaggatagggcctgaaggagtttgttaggtgaaagggtcagacgtatgtttgtttgtttttcgagatagtgtatggctctgtcacttagaatgggtgcagtagtgcattcacggctcactgcagccctgacttcctggacttgggtgattctcctacctcagcctcctgaatagctgggactacaggcatgcaccaccatccctggctaattttttgtatttttagtagagaagaggttttgccatgttgcccaggctggtctcaaactcatgagctgaagcgatctgtcagccttggcctttcacagttctgggattacaggcatgagctgccacacccagccaggcttatttttttgttatagaa

SEQ ID NO: 486557 - DNA, 429 bp, Homo sapiens
agtgactaagaaagtaacaaagggccctgaatgggagctggggcctggcagcagaactctgctaaagctcccacccactcccctgagttttatgcccctctcccagctctccacccccagtctcctctcttactgcaagaagagctgtccaaatctgccatgcctaagggggcagcatggaagatgtgtctaaggtgccaggcatggtggcgtgtgcctgtagtcccagctactccggaggctaaggccagaggatcacttgagcccccaggagttccaggccagcctgggcaacatagagagacctccccrcgaccaatctcaaaaaaaaaaaaaaaaaaaaaaaaattcctaaggagcctgaaaaagagaagcaccgcctacctctcaagctagatgcctgttctgctgttgacctaatcataaggg

SEQ ID NO: 486558 - DNA, 528 bp, Homo sapiens
gtccaggggcactgccactgggagagggctcccgcccagggggcctggataagggcaggggcccccagcccagcccatgccagcccatcccatcgcggggatagggggaccccaagggacggacggagagccggtgcgtgagcgcccctggggagaggattgggaccccaacgctgagcgccgaatggagcacgtacccggaaaacgtaggtggcgcccccgccacccccgccacctcccgcccagcgccgcgaccccgggaccccttcgctcccatccatcgccgcgtgctcttcaacggctcgagactccccgaggcagacgagctggctctccgggctaccctgcgggcagcgggggagggaatcggcggggcccgggagcctcccctcgctgtgctggtgacccggcaccgaggaaagcacgctcccccggcccccaggcagccctcgcccccggcgccggcgccgscccatccccactggctgcgctcactccgggacaggcgtcctctccctgctgccccac

SEQ ID NO: 486559 - DNA, 440 bp, Homo sapiens
ccccagcagcccatccctgttgggtccacccggcaacaaaagcccttgcggtcgcggccacacccctgtcaacctaaagttgacagctcattttgccacggcagccctggccaccacttacaggggtgtgctgccgctggcgagacactccccggacctaaagctggtctggccacgcccacctcagaccccaggacgccagaggaggaaagggaggggcgtgtgggcagcgaggtccctacgcttccgggaggagccttaaggagtccccacccaggggttctagtttccagccgtcagatgtgccgcagcctgctgggagctcsggtaggtttgaggccggagaggaggtgccccacgcttaaagtgggagccacacctcggacaccaggtgggggcttccaggttcctgaggacaggagcagtggagtgtgcacttc

SEQ ID NO: 486560 - DNA, 611 bp, Homo sapiens
gtctcggctcaccacaacctccgcctcccgggttcaagcgattctcttgcctaagcctccagagtagctgggrtcacaggtgtgcgccaccatgcctggctaattttgtatttttagtagacacaggatttctccatgttggtcaggctggtctcgagctcccgacctcaggtgatctgcccaactcgggctcccaaggtgctgggattacaggcgtgagccaccacgcccagcctattttttttttttttttttttaataagagactgggtctcactatgttgcccaggctggtctcaaactcctggcctcaagcaatcctaccatgttggcctcccaaagtactgggattatagtatgagccactgcacccggccagcatttaaatatataacttagttatgtagcataactatgtaagtatttggtactgttgtttgtatattcattcattcactctttaaggtttctctattatgtatgagtcagtcctatgctcttcactgaagctctgggcttggctgctgggatgggaattgagggggatggtgagcgctttctcttttccggcccctccaatggggacaggaagtcagtccccacctgcctgg

SEQ ID NO: 486561 - DNA, 712 bp, Homo sapiens
tgagggatgatagttccaatgtgttgacctaggaaaagaactacaagaggaaagagctgggctgaagagactggagagttgctgatctactgcaatggggtctattctaagaacacaatgctgttttaacattaaaaaagtaatgtaattcacacattgaacaacataaacaacaaaggagaagaatcagatgatattctgcaattgtttgttgccagtattgttcctgttccattttctctatctccttctcagacttcaattatgtgtcatacacgtctgttatactctgttctattccttccatttttcccttccccacttttttatttcattgtaaggctttggtttggaaccttttcrtaggcctctcttttgtttttctaattctgtctttgacttacagtctactattaaatccatctgttgagttcttaatttcagatattttatttgctcagttctagaatatccattttaatgtgtttttttggtagactgtaattctatgttgaaagtctttatgttctcgtttattttcctcatctttctacaattttttataagcgcatttattatatttgcttaaaagtttttatctgctaactccaatatctggattacatttgggcccagttctattgtctgttttttatcttgattactagccactgtttcatgtctgttcacatgctatgtaattttgattgag

SEQ ID NO: 486562 - DNA, 712 bp, Homo sapiens
tgagggatgatagttccaatgtgttgacctaggaaaagaactacaagaggaaagagctgggctgaagagactggagagttgctgatctactgcaatggggtctattctaagaacacaatgctgttttaacattaaaaaagtaatgtaattcacacattgaacaacataaacaacaaaggagaagaatcagatgatattctgcaattgtttgttgccagtattgttcctgttccattttctctatctccttctcagacttcaattatgtgtcatacacgtctgttatactctgttctattccttccatttttcccttccccacttttttatttcattgtaaggctttggtttggaaccttttcgtaggcctctcttttrtttttctaattctgtctttgacttacagtctactattaaatccatctgttgagttcttaatttcagatattttatttgctcagttctagaatatccattttaatgtgtttttttggtagactgtaattctatgttgaaagtctttatgttctcgtttattttcctcatctttctacaattttttataagcgcatttattatatttgcttaaaagtttttatctgctaactccaatatctggattacatttgggcccagttctattgtctgttttttatcttgattactagccactgtttcatgtctgttcacatgctatgtaattttgattgag

SEQ ID NO: 486563 - DNA, 515 bp, Homo sapiens
caatgaggaactggtctctcccctccttagagacatttccagttatttgtttatgaaaaagcctaaagggaagccagctcagaatctaaggcagcctaagaacaagtcaggtaaacaacggctgatcaaatacagaaatgatgcaaatgtaactttttacttcctcttgaggcattcaacaaatcatcactcatagttcagtgaagcagttctaggtttctatttcatttattttctctaaggttgtgagatgcattctttgggactctactttcttcacatcataaaacattttgtgttgatctattttattaatgacttgctttgataagcattgaatagtagaggaaatgattagagcacsagggagtgaatttgtgaacattagttttcaaataattaaaatgcaaatggaagagcatttatatctaccagtattctcattagatcagtaccccaaagaatatttatttgatgcctaggtggagataatgcatatgtatgcagcattaaac

SEQ ID NO: 486564 - DNA, 537 bp, Homo sapiens
ttaaggctgcagtgaactaagatcacgccactgcactccagcctgggcaacaagggcaagaccctgtcrctaaaaaaaaaaaaaaaaaaaaaaagagtacttataagagaggatgacagacagacttaaaagtaagaagagcaaccattaagtttacagcaaaattagctacaagatgtgtgctttgactaagcaacaaaaacagaaaaaaagacatagagccaagaaaatcactgtttaaaaataatacttctgattcaactatgttagaaaaattatctttttataaacatttctttgtaattccaaatttttcttgacataattctacatttgttttgtttaggaaaacatttgttttagaatttgtaagcaaattattcattaatctataaaccatcttttttttttctttttcttttttgagacagtctcactctgtcgcccagactggagtgcagtggcgcgatctcagctaactccaagctccgcctctcggggttcacgccattctcctgcctcagcctccccagcagc

SEQ ID NO: 486565 - DNA, 527 bp, Homo sapiens
ctggcagtggaatgactcttagggagaaagctgtctttgattagaaaaccacactgatgagctactcataagtagaagacagtactggcttcaataagacccaagagaccaaaggtgatgattatactcgtttgaatgggacagtaaggctaatgcctttgtgcttttaagaagaaatatagaaagagaggggggacacaaaagagggagggagtgtgtatgaaggtagaaagaagccagctatatatgacatggctggctttactggtgggggcgaagtgtcgtgtaaaaatttcttgatgcagtatctttagaaaaatctactgtgtaacctgaatctaaagttcagtttaaagtgggatgaactactagacatagatctctccttcataaattttcagtaaactctacaataattggaagtctttttgagttgtaatttatgcatattttgatgtttgtgtatatttgtgygatatctaagagggggctgaatttcatgtccctgttgaaattggtagcaaatt

SEQ ID NO: 486566 - DNA, 609 bp, Homo sapiens
gaaggctctggtcttcttggcttgggccaccagcccgtgtctgaccccatctctgcaacccagagatagatcatactcatctgctaagccaggaccacagagtcacccctggagccagagaagggagtaacccccaccaactgcctcggagggaggggttgattcccaaaggaaaattagggtggtcagcagaagaagggggaacagatgtccaccaccccaactccaactgcccctactttattacactactgttagcaaagtcacagatggcataccacataagtcattctacttatgtgactctggaccagccacttactctctctaaagctctttcctcactggtaaatgcagttaagaaaaagaatctgccaataagattgttgggaaaattaaatgaaaagacacagggcttaatattggcagaatactaataatacctattagaattattattgtgattgttattaagattattacttcttcagtgagatctcctgatcccgtgccttcctaggcaagacttatctcytaatggcttcccaagccaccatcgactttgttgtggaggccaccacgttggttaattaaagaggtcaagaccca

SEQ ID NO: 486567 - DNA, 609 bp, Homo sapiens
gaaggctctggtcttcttggcttgggccaccagcccgtgtctgaccccatctctgcaacccagagatagatcatactcatctgctaagccaggaccacagagtcacccctggagccagagaagggagtaacccccaccaactgcctcggagggaggggttgattcccaaaggaaaattagggtggtcagcagaagaagggggaacagatgtccaccaccccaactccaactgcccctactttattacactactgttagcaaagtcacagatggcataccacataagtcattctacttatgtgactctggaccagccacttactctctctaaagctctttcctcactggtaaatgcagttaagaaaaagaatctgccaataagattgttgggaaaattaaatgaaaagacacagggcttaatattggcagaatactaataatacctattagaattattattgtgattgttattaagattattacttcttcagtgagatctcctgatcccgtgccttcctaggcaagacttatctcttaatggcttcccaagccaccatcgactttgttgtggaggccacsacgttggttaattaaagaggtcaagaccca

SEQ ID NO: 486568 - DNA, 301 bp, Homo sapiens
gctggtggccttccctcctgtgcccccacttcctcattactgttcaagctgctgggttccgaacacattcagaaccctcttggttcagcatttaatgggatgccagggcagaggagaagagaggctttcaaaataacgactggcaaaggaaaaacaggcattcagtaaaagtgacaagcacggtcactggatttcctgacccttctggcttttttcctctccatggggaaagtgcctatttgtatttcactggccagcagccaaagaacagtgtatctsggagccacctccagatctccca

SEQ ID NO: 486569 - DNA, 556 bp, Homo sapiens
acaacagcaccaatgacaaccacttccatctaccagatacagcaccataggccaggcatcatgctgagtcatctcattacccgcgtacaaccaccagactaaatgggggttactaaatgggggttgcctttcatagatgaggaaactgaggctcagagatggtaagtaactctcccaaggccacacggctggcaagtggcatcccaggtttgtctcatgccggaccccttacccccatccatgaggctgagcctgcagggatgacgaaggccctgcccctgagaagctcgctgtcagtggtagagtccaaatttggaacttgaccctgagtatcctggatttgctgagggatagaaagagaaggctgtgggctctgccttggtatagatctctaccctgacacttcctagctctgtcaccctcttaacttctccatgcctaagtttctcatgggagaaatggggataacaaaagtgttgctgagaagatgaaatgagataactgaagctrcttgcataggtggtgtatagtaagtgctcaataaatccatctgtta

SEQ ID NO: 486570 - DNA, 509 bp, Homo sapiens
gggcctgtgcctcaagagtcagagcagaatgggtggrtctgattcagaaggtagcagggatgtgaaatggagcctgctttccggtccctgtaaagaaagggaactccaggtggctcgtccccatgtgtggggttgttccccaatcacatggggaatcagaaagcaatctggccatgaggcaggggccagggagctgtggcttgtctggaagctgcacagcaagtccagtgtgcggttatttgtggaggcttgagggagaattgatggaaactgtggggggcagccccaaccccaagccacctggaggctgcctacttttgacaactacaatatccctgccaacaagctcaggggcaagggtgttaccaggtctgctctgtgcctgaaggacttcagctcagagaggctgagctcctactcagagtcacacagcactgctggctgccctgagcactggccacagccttcctgactccctttccagggctcccctcccagagtcctgccct

SEQ ID NO: 486571 - DNA, 523 bp, Homo sapiens
ctgggtggttcttctggtctgagcctgctttgctgatttctatcagtctttcatgtgtttaaagttgactggcagatcagtctgtggctgaataactcagggtggtctcattggctgtcagccaggactaccagcaatagttcggtcttgtgcctcatcatccagcatattagcccaggcttctttgcacagtggtggcagggttccaagagcagcaagcacgcaaagacccagtgtccattcttcgtgcttcctagtgagccataggcccaaactaatcaaatggggaagcctggcttcaaggggtagagaaagagatatcgtatgttgctgaggagagctgcaaagtcacrttaaaaagaggtgtgcatgaacactgataggagttttattcataattaccaaaaatttgaagcaaccaagatattcctcaatagatggatatataaacaaactgatacatccaggcaatggaatagtatttaacaataaaaagaaatgagctatcacaccatgaaaagac

SEQ ID NO: 486572 - DNA, 463 bp, Homo sapiens
caatatcccatgttctgtagtatgctctgaactgaaaagaactctgagacacaatccttagcyccaagaagttaaagttaaaattaaacctgaaatttctattaaggggcatggtgttaataattacttaaaatgagtatcctgttatccttcaaatttaattatggctgctagacattttttcttactttctactacgttggttgggcatgctgatatgaacatgattttaaaggctgcgtgtctgccaagaagctatgataaatcagttagaatccaataggaaatattaaaccctgaccataaatcatactctgctcagcagtgtgcatttttagcaagtcattcttcaccaacttttccttccatctgatgccctactttggtttaattgaaattcattagagacttaaattttatgtaattaacagaaaacttaagaaatgcgcagtagctgtgtcag

SEQ ID NO: 486573 - DNA, 472 bp, Homo sapiens
ttgctatgtgaccttcatcaaactagtaaacccctttttcttgttggggaacaataattgtacctaccttataggattaaatgaattaatatttagagagtgcttacaacagtgcctggaattttagttattattgtttctaataaagtgcttaggagatatctcatatttccagttatgattaatctatgcacattgataattctgcaggtttaaaattgtattcattacattacaaaatggaattcgtatagagatacgagttttttcaaawgttaagatatgtttccttagttttcttattatatttattcttgagactatttttatactaattatgccaactggaatttttatagcactttataaagctttaaactaatttatctcattttatctttatggtgtctctaaatgtgcattatctcattatgccctgtaaataagatgcaatgaattgcccagtgtcaca

SEQ ID NO: 486574 - DNA, 607 bp, Homo sapiens
caagaacacatacagttcacatactagtatgcggcaattccccctaagtgacagcaggagccacattccaccttgaccttatattgtcaagggtgagaccatggcccctgacataacagtggaagctgcccttctgcagccaagaaacgggctcagccaagaaatggccacaacsgtgttttccatttggacaatctgttgagatctgccttgaaccagcactctgcagtgtggtcatgtgtcaccaccctgagccaagtgcattccttgtcacatagaacaaagagcttctctactgagtccagcatccacccagagcacacacacagggattcgaacatttgagacatctgtaccttctcccctaccacttattactcactttccccaattgcatccacctctgcaaccccagatctagaggctttccctgtgagagatggaaaagtgcaagtgagaaacagtgactaggagagcccgtgttactgctgctttgtgttttgggggaaaagaagctgcaggctcccggtgcactgtctctgactggatgctgatggcttctcccactctgcaggcttcaaatggacctagatgtcaccaccactca

SEQ ID NO: 486575 - DNA, 506 bp, Homo sapiens
ctcaatgttcatcaataagacaatgcaaaaataatgtgtggcatagtcatataacattctgytcagatttaaaatgaattattgagctatcaaaactaattgcaaatggaacattttcagaaaaaggaaagatacagagtaagatggtatcatgcagtttatgtaaactcaaagagcactatatgctatttagggatacatgtaaaaacagactgcacaagtatcagaactcccaattgtagttgccccagggtaaggaggtcagaagcaaaattgtttaaaggggatgctcttataccagaaaaacactgaattttctaaaatgcttgaagtaaataagataaaatgttagcagttattaataaaggggagatataggtatttatgatacaattttagtctttggaattttccttatttaaaaattttcacaaaacaaaaaagtaaaaccagaaaataataacttaggaagtagtgccattttccttccgtagagatgctagtta

SEQ ID NO: 486576 - DNA, 632 bp, Homo sapiens
tggtatgtgatacagcagttccccttcacttgttcttcaaaatcactttgggatttatagattatttattaagaatacacaagcctattactatcttattaaaagtttctaaaaatacagaatatatgctgaattatgcaaataatttcagtctctatgtatttaaatatttgatttttctcttatgatctcttaatatgatgyctcaatacagaaccatattagagttcctagagtaagccacacttagtggtggtatattactctttatttgtgatgtttcattctagttgctagtcttttattttgatctttgtttcaagttctattgtctatatatctttttaatttgtcagattttggtagtaatgtaatgctagattagaaaatataattgtgtgatggttaatactgagtgtcaacttgattggattgaaagatacaaagtattaatcctgggtgtgtctgtgaggttgctgccaaagtagattaacatttgagtcagtggactggggaaggcaaacccacccttaatctggtgggtgcaatctactcagctgccggcgaatataaagcaggcagaaaaaagtgaaaggagagactggcctagcctcccagcctacgtctttctc

SEQ ID NO: 486577 - DNA, 629 bp, Homo sapiens
aatataagtttccgagctctatgttttgttcaacattgtacactctgaacaaatatcatattattatgaaattatgctaaatttggtatgtgatacagcagttccccttcacttgttcttcaaaatcactttgggatttatagattatttattaagaatacacaagcctattactatcttattaaaagtttctaaaaatacagaatatatgctgaattatgcaaataatttcagtctctatgtatttaaatatttgatttttctcttatgatctcttaatatgatgcctcaatacagaaccatattwgagttcctagagtaagccacacttagtggtggtatattactctttatttgtgatgtttcattctagttgctagtcttttattttgatctttgtttcaagttctattgtctatatatctttttaatttgtcagattttggtagtaatgtaatgctagattagaaaatataattgtgtgatggttaatactgagtgtcaacttgattggattgaaagatacaaagtattaatcctgggtgtgtctgtgaggttgctgccaaagtagattaacatttgagtcagtggactggggaaggcaaacccacccttaatctggtgggtgc

SEQ ID NO: 486578 - DNA, 632 bp, Homo sapiens
tggtatgtgatacagcagttccccttcacttgttcttcaaaatcactttgggatttatagattatttattaagaatacacaagcctattactatcttattaaaagtttctaaaaatacagaatatatgctgaattatgcaaataatttcagtctctatgtatttaaatatttgatttttctcttatgatctcttaatatgatgcctcaatacagaaccatattagagttcctagagtaagccacacttagtggtggtatattactctttatttgtgatgtttcattctagttgctagtcttttattttgatmtttgtttcaagttctattgtctatatatctttttaatttgtcagattttggtagtaatgtaatgctagattagaaaatataattgtgtgatggttaatactgagtgtcaacttgattggattgaaagatacaaagtattaatcctgggtgtgtctgtgaggttgctgccaaagtagattaacatttgagtcagtggactggggaaggcaaacccacccttaatctggtgggtgcaatctactcagctgccggcgaatataaagcaggcagaaaaaagtgaaaggagagactggcctagcctcccagcctacgtctttctc

SEQ ID NO: 486579 - DNA, 629 bp, Homo sapiens
aatataagtttccgagctctatgttttgttcaacattgtacactctgaacaaatatcatattattatgaaattatgctaaatttggtatgtgatacagcagttccccttcacttgttcttcaaaatcactttgggatttatagattatttattaagaatacacaagcctattactatcttattaaaagtttctaaaaatacagaatatatgctgaattatgcaaataatttcagtctctatgtatttaaatatttgatttttctcttatgatctcttaatatgatgcctcaatacagaaccatattagagttcctagagtaagccacacttagtggtggtatattactctttatttgtgatgtttcattctagttgctagtcttttattttgatctttgtttcaagttctattgtctatatatctttttaatttgtcagattttggtagtaatgtaatgctagattagaaaatataattgtgtgatggttaatactgagtgtcaacttgattggattgaaagatacraagtattaatcctgggtgtgtctgtgaggttgctgccaaagtagattaacatttgagtcagtggactggggaaggcaaacccacccttaatctggtgggtgc

SEQ ID NO: 486580 - DNA, 576 bp, Homo sapiens
gagctagatcttaacagaggggtcaggggacaaacaagtcgcttcctcccctctccgcaaccgctcccaggttttccgggatgcgctagccaggcgcccaggtgggatgggaaagatgwgcaggtgcgggccggcgtcgggagaaaaagacctgcaggccccgggctgccgacctctctgcttccccacccctcccctgccgaggcgatatggcatccctggggcgagttcccggcgctggcggcggcagcctccgaaaggaaagttgacgagacacagaccccgagctcggagccctcttctagggcactgccgtcctgccttgcccggcaccccagggctccggcatcccgcacccctgcttccccgcaccccagccacctccgccccagtccttcccgcgccgcacggcgagagctgcagggaccacaggagatttgggggtgacgagggctgggcggggctgggggaagggaagcaacagcatggaaatgcgcattctttattttatctgcaaagaaggaaaagtccagcttcctacctgttccctgctcctgctcgcctcggtgcggcaca

SEQ ID NO: 486581 - DNA, 576 bp, Homo sapiens
gagctagatcttaacagaggggtcaggggacaaacaagtcgcttcctcccctctccgcaaccgctcccaggttttccgggatgcgctagccaggcgcccaggtgggatgggaaagatgagcaggtgcgggccggcgtcgggagaaaaagacctgcaggccccgggctgccgacctctctgcttccccacccctcccctgccgaggcgatatggcatccctggggcgagttcccggcgctggcggcggcagcctccgaaaggaaagttgacgagacacagaccccgagctcggagccctctyctagggcactgccgtcctgccttgcccggcaccccagggctccggcatcccgcacccctgcttccccgcaccccagccacctccgccccagtccttcccgcgccgcacggcgagagctgcagggaccacaggagatttgggggtgacgagggctgggcggggctgggggaagggaagcaacagcatggaaatgcgcattctttattttatctgcaaagaaggaaaagtccagcttcctacctgttccctgctcctgctcgcctcggtgcggcaca

SEQ ID NO: 486582 - DNA, 458 bp, Homo sapiens
tacaatcctgttctggtgtttagcattacctggagagtastttttgggggcctgactataagaccatcatttcagaatggactgttaaaaattaaacttctgctctaaggtggtggcgttatgttttcagaatcctgggcacaaggcaaacatcatttcctcaaacttggacatgccatctgacacatggtttaacatgatgggacagatgacagaacctggaaatgccacttagattaagttggagatgattacctaccagaaaccgagagtgtttttaggagacacaatttccatcccaagagagaagacatttctatcttgattaaggctcaataatgaggttgcaggtagctgagaaaggaagatgacctctggaacttctggggatgtcaacctcaggaagccactactgctctcaagtcatgtgtttctgagactagttcaagatacttgac

SEQ ID NO: 486583 - DNA, 670 bp, Homo sapiens
ctgacaaccactatttagctaaaactaaaatggattagagatacaagatgatgaataacaattattaacttttgtgagcatataatgtgagtcagctactacactaagaactttacatagattcccttaattttctcaataatcctatgagaactgtccttgtatgagcaaccccattttatagctgaagatacttgaggcttcaagaggttatataaacatgttcatggtcaacagttattaagcagtgagtgacattctcacgagattaatgagatcatctgtgtgagatacaaatacatctattgtgtatgtttgtgtttttaatggagaccaatggtatgacagaatgaagtccttttatcagtcagtcaagatctgatgtggctattcaaatataggcaaaactgatgttttccttttttagttaagttaaatgtaatatttaaataactgtgaatatttagaatattcacagaattgtgcaaccatcaccacaatctttagaatattttcatcatctcaaaaagatactttgtagcctttagcacccttcccactgtrcccccccccatacccctggccataggcaactactaaattactttctgtccctgcaggttgtcctattctggatactttgtatatgtggaatcataaaataggtgat

SEQ ID NO: 486584 - DNA, 670 bp, Homo sapiens
ctgacaaccactatttagctaaaactaaaatggattagagatacaagatgatgaataacaattattaacttttgtgagcatataatgtgagtcagctactacactaagaactttacatagattcccttaattttctcaataatcctatgagaactgtccttgtatgagcaaccccattttatagctgaagatacttgaggcttcaagaggttatataaacatgttcatggtcaacagttattaagcagtgagtgacattctcacgagattaatgagatcatctgtgtgagatacaaatacatctattgtgtatgtttgtgtttttaatggagaccaatggtatgacagaatgaagtccttttatcagtcagtcaagatctgatgtggctattcaaatataggcaaaactgatgttttccttttttagttaagttaaatgtaatatttaaataactgtgaatatttagaatattcacagaattgtgcaaccatcaccacaatctttagaatattttcatcatctcaaaaagatactttgtagcctttagcacccttcccactgtacccccmcccatacccctggccataggcaactactaaattactttctgtccctgcaggttgtcctattctggatactttgtatatgtggaatcataaaataggtgat

SEQ ID NO: 486585 - DNA, 669 bp, Homo sapiens
gatacaatgaccacctggaccaggtaatcttttcacatgcataatttaaagtattatttcaatagttttttgattataaaagtaaaacattactattgcaggaaacttgaaaagtataaaatagaaagttcaaacaagaaaattagaaacaccccaaatcctaccactcagaaatacccactgtcaatattctacacacttcaacataattgagatcctagtttgtatacaattgtttgttgmcgaacattacgtcataaccacttgttaaacctttgaaaatacttcttaagcattatttttaatagcaggtttacacagaagaagattcttagtttatataacatatcctctattgttgatatttagattgtttcaaaatttttctgcttctatattctgttcaaagaatgactttcttcataaagtttctttactctttagatattttggtaggatgattttctagcaatagatttatgtcaaaagatatggatgttttttagactcccagtatgtactatctttatagaactattatgttgctgtatcctctgtttaatttttgtgtttcctcttacgcttttccgatagggtgcaagattttctgacactgagaatgactatgtccaccaacgctaggccaaccactctagtgccaatcaactg

SEQ ID NO: 486586 - DNA, 669 bp, Homo sapiens
gatacaatgaccacctggaccaggtaatcttttcacatgcataatttaaagtattatttcaatagttttttgattataaaagtaaaacattactattgcaggaaacttgaaaagtataaaatagaaagttcaaacaagaaaattagaaacaccccaaatcctaccactcagaaatacccactgtcaatattctacacacttcaacataattgagatcctagtttgtatacaattgtttgttgacgaacattacgtcataascacttgttaaacctttgaaaatacttcttaagcattatttttaatagcaggtttacacagaagaagattcttagtttatataacatatcctctattgttgatatttagattgtttcaaaatttttctgcttctatattctgttcaaagaatgactttcttcataaagtttctttactctttagatattttggtaggatgattttctagcaatagatttatgtcaaaagatatggatgttttttagactcccagtatgtactatctttatagaactattatgttgctgtatcctctgtttaatttttgtgtttcctcttacgcttttccgatagggtgcaagattttctgacactgagaatgactatgtccaccaacgctaggccaaccactctagtgccaatcaactg

SEQ ID NO: 486587 - DNA, 624 bp, Homo sapiens
tgcagactggcttacaaactgagtaaggcacaaaaggaagaactggtgttgatagcaaagtgtcatcagagaaggcaggaaggacaccctgtcatactgcccrttggctccccagatatcactatttttttttcctcatccttgttaggaactggcaggtagttgtgcttgatgtctattagacttcatttcaattttgaggtccataattcaatggggatagatataaaaaggcttcctttttcattaaaagggtaattacctcgttatcagagtgctggaaagatgagagctcatggatttttcataaaattataagtttataaggagtcgggtgaagtcatcttattctgtcctcaagccagggacaaatctaattcacccttgatggatgggacattgtttaacaaggatctctagagaataagcgttgataactttcagtattttgcaaccttcagttgtgttatttcttctatcctgttgaatatattgacacagaatggaagtccataatttttttgttctctttgggtagaaagaatagtgttataaatgtacttcattttcattatgttaaagaatacttatcaaatgccttgtatgtgcttggtgccagataca

SEQ ID NO: 486588 - DNA, 624 bp, Homo sapiens
tgcagactggcttacaaactgagtaaggcacaaaaggaagaactggtgttgatagcaaagtgtcatcagagaaggcaggaaggacaccctgtcatactgcccgttggctccccagatatcactatttttttttcctcatccttgttaggaactggcaggtagttgtgcttgatgtctattagacttcatttcaattttgaggtccataattcaatggggatagatataaaaaggcttcctttttcattaaaagggtaattacctcgttatcagagtgctggaaagatgagagctyatggatttttcataaaattataagtttataaggagtcgggtgaagtcatcttattctgtcctcaagccagggacaaatctaattcacccttgatggatgggacattgtttaacaaggatctctagagaataagcgttgataactttcagtattttgcaaccttcagttgtgttatttcttctatcctgttgaatatattgacacagaatggaagtccataatttttttgttctctttgggtagaaagaatagtgttataaatgtacttcattttcattatgttaaagaatacttatcaaatgccttgtatgtgcttggtgccagataca

SEQ ID NO: 486589 - DNA, 518 bp, Homo sapiens
aacttgtttattcctaagagtccaggaaaggaaaggtggaactgcagcctgtgggcagtctgcatgcttgtcttaggagaccacaggtgggctcctgggaattgtgtcttcctgggcacaaaagaagaactgctcacctgtgctgcatcagctaagtgtccccattgtccaaattgttatttcttttcaaagttttgttttaataattaaatttatcacagcttggtgttgaaaacaaagcacagaggcatatagaaactcatgtgtgagtttttctcaatttttttcccagtgactatataaatgagtgtgcaaaagaccaccaatacggtcatactttttatatagagatgagaccatcccatccatattcctttcccactatgctgtctttctttcttttttttttttttttttttttcatgggaggacmactattccatttctagtccatgtgctttgggaagggctgacctaccctcggcaatcagatcagcagggtaattcattcagggatg

SEQ ID NO: 486590 - DNA, 604 bp, Homo sapiens
gcctggcacatacagtgagctccctctgttctcctcttttctcctgctgattcagagaatgacttaaggatctgtgatgtgtgccaattttcaatgccctggataaacaatggggagttggagtgctgttgccagaaatttgcrctagttttaattaattttatccatttagtgtaagacatctcaaagtcactggataaatttatataacatatgtttatacacataagtgtgtctcttgagagctgagaggctgtttttgctttgttccctgatgctgcagtagaggccaatgtgttctgattccttgagtgatggctgcaagccctccaagtgtcacagtaggtgaggcatccatggggacaagcatcaaggacgaatgtggccagtcagaatctgcaagcccatttggtttgttctctttatttttatagtatgttttattcattttttaggtttatcatttaatctcttataaacatctctcctaaaatgtttcttaattctacaaggggttaattgcatgaagtaagtccagaaatagtccagggcagccatggatacccaacatgccattgggaagtgagaaattttgtaatttgaa

SEQ ID NO: 486591 - DNA, 606 bp, Homo sapiens
tggtgccaggcccttaggcttcctggtcacagagcattagctgtctggggctattgagatgtgcctggcaaagcactttgcctgagagctgagtaaccagggctcgtgaaggataagtgacttacctccacagttcaggtggctctgctccatatgtgattcccatcggtcatgcttggggttttctttgagcaaatatattctagaaatgcagttaagaagtgaattcccggagaagcgagtcaaagccagcacctcagcacagactccatggctgcatgcaaagaggcctgcaagaaggcagctctgggacttgagtcacacatttgggctgctcytctagatgggattctgtggcccctgtaacagaagttatagccctgatgggtcatggggaaccctgggtaattagtgacagggtacttagggttggccaagggccctgaaacaggctgtgctgcggtggcacccaggcctggcttgtccttaggaacagtttctgactcagtaggtgccagtggggattgaggttctgattttctttttttttttttcccttgagacagggtctcaccctatctcccagactggagtgcagtagagcaa

SEQ ID NO: 486592 - DNA, 389 bp, Homo sapiens
gctgtccactctgcctgttccctgacttcctccattctgtccagtaggatgrgctggtcttggggaacagcctatgtgcacatttggtggcaagtagaagtgacacaccatccctgggagtcaccatagttcctgccaaacccagccccagaactctgcccctgaggtggttttactaaatcccaaacccagaactgtggttgtggctcaggggtcagcacctgctagtgccaggacactattgggaggctgggacctgaccaaaacccatggtgcctgtggcctgaggacagtgtgtcttggggccataaggccaggccaacaatggccattgtgtcataggggctcagccccagtgtttatccttccctggctacttctgattcagt

SEQ ID NO: 486593 - DNA, 389 bp, Homo sapiens
gctgtccactctgcctgttccctgacttcctccattctgtccagtaggatgggctggtcttggggracagcctatgtgcacatttggtggcaagtagaagtgacacaccatccctgggagtcaccatagttcctgccaaacccagccccagaactctgcccctgaggtggttttactaaatcccaaacccagaactgtggttgtggctcaggggtcagcacctgctagtgccaggacactattgggaggctgggacctgaccaaaacccatggtgcctgtggcctgaggacagtgtgtcttggggccataaggccaggccaacaatggccattgtgtcataggggctcagccccagtgtttatccttccctggctacttctgattcagt

SEQ ID NO: 486594 - DNA, 576 bp, Homo sapiens
tggccacatgctgccctggcttcttccatgttgtgctggtcactacccaccaaggggggtcagatgcaggcacgatgcaggatggttgtctctggacctgtgtcttggttatcatggagctggactrggcctggtgacagggccctgatggggttgtcctgggtggtcacgggggtgatgagaaaagatgcagaatggaattgctgtgaggatgaatgagacgactgtcagcacagaacaggcacccggtgagtgttcagggattaccctcagtagctgcccagaggccaaaaccgcacacctgatagtgactgtccccaagccaggaggaagagaggagagcaggtcccactcacctgagtctgatcagtgagctttgttgagatgtgcctgtcatctagaaaatggtccttcacgcagagctactcacagacactgctgtgtgtctctaacttctccacaacacagaggccatggggactcaggaagagtgacactgtggggtgacacaacccaccacaacgggagcctgcttgggtcaacagggcccagcgtcagggtcctctgtcccctgaa

SEQ ID NO: 486595 - DNA, 602 bp, Homo sapiens
tcctcatcactgtcaccttagagcattagagcctctataggtgctccccaatctctgccctccccacccatggtggtcctggggatgcagacagaggaggggcactgcatattgctgagagggctggcatcctctctaggtggaacacaggtcatttgtaaagttgtaggcctgccaagcaatattggattcaacacattttctcaccttctcttaccagccaccctccagggttccctgactcacctccctgcagatggaggcaaggaggctccacagtcaaaccccctgcctgaggtcacatagtggctagcaggccacgtactgactaaccgcccctgaccaggttcccagtaatgagtgatgaggcccctaatgaccactcctccattgaccaggtcccactgatcaagtccccactgacyatgtcttcctaaccaggcccgcacttaataggcctcatgggccagaccccactgaccaattttccactgagctggtccccactgacaaaaccgggttcccactgacaagaccacaatttaccaggttgctgctcacccgacccctcactgaacaattctccatggatgagtccccag

SEQ ID NO: 486596 - DNA, 642 bp, Homo sapiens
ggtcaggctataactgacattaaaagtgtcagagcaaagggaaagcataggggagatgcccttaatccactatactttagaaatctcagttctgtgctatcagcacagaatagggaccagtacatttgcagcagtgagcctgaaccattgttgttgataaccagggaccccaacagtatctgctgcctcaactaccagtagccctgtgagtaaacacaccgatgcagcctcagccacagcagtgacaatctctggaagcaaaccaggtaggtaaaatgggagaccctgcacttgccaaggggcaatatgggatgttcgtgtgaatactgttcctcagaatcaatgtcatgttgttaagcgagtaaatcactwaacctctgtaacctctgtttttgtatctgtaaaatgtgggtcaaagtgatctattttgtgaacttgggatgaggagccaagaaaatagtgaatagtgtaagtcaaagtacatttttcaaatgtggaaaggatcattattgttatcgatacagaaaaatgaagatttctgtaatttttaggtggaagttaatttaagtgagaattggttatatcatagcttaagaaattctgtgaatgcgtcctttccatttttgcctttgccacaggtac

SEQ ID NO: 486597 - DNA, 511 bp, Homo sapiens
cagcatccccagaaccctgattctccccactcaggtcatcatgactctgcatagcactatcacctactgccatctctcgagcatatttattayacttcttgtttatttcgtgttttctctctcccataaatgtaaatcacatgagacagagacctctgtctattcttgtctctgagaagtggatgtcaggcacacaggaaatgcttccataatgtgagatgggtgactggtatattcttatgcagagtgtcactatgtttaatttagcagctaccaccacagtttcatttggtgtcagcagcagttcgcagggtcccaagcaaggtaggatgaactacttaaagtcagcagaggaaggtataaatatctcataggagggcattgctcagcatatgataagcacaatatcgccggttattgatatgagaacatttagaatgttcaagtctttttctccttcctgggagcacaagaaaagcacaacatttgaagtgaaatcaagaaagtgaag

SEQ ID NO: 486598 - DNA, 511 bp, Homo sapiens
cagcatccccagaaccctgattctccccactcaggtcatcatgactctgcatagcactatcacctactgccatctctcgagcatatttattatacttcttgtttatttcgtgttttctctctcccataaatgtaaatcacatgagacagagacctctgtctattcttgtctctgagaagtggatgtcaggcacacaggaaatgcttccataatgtgagatgggtgactggtatattcttatgcagagtgtcactatgtttaatttagcagctaccaccacagtttcatttggtgtcagcagcagttcrcagggtcccaagcaaggtaggatgaactacttaaagtcagcagaggaaggtataaatatctcataggagggcattgctcagcatatgataagcacaatatcgccggttattgatatgagaacatttagaatgttcaagtctttttctccttcctgggagcacaagaaaagcacaacatttgaagtgaaatcaagaaagtgaag

SEQ ID NO: 486599 - DNA, 511 bp, Homo sapiens
cagcatccccagaaccctgattctccccactcaggtcatcatgactctgcatagcactatcacctactgccatctctcgagcatatttattatacttcttgtttatttcgtgttttctctctcccataaatgtaaatcacatgagacagagacctctgtctattcttgtctctgagaagtggatgtcaggcacacaggaaatgcttccataatgtgagatgggtgactggtatattcttatgcagagtgtcactatgtttaatttagcagctaccaccacagtttcatttggtgtcagcagcagttcgcagggtcccaagcaaggtaggatgaactayttaaagtcagcagaggaaggtataaatatctcataggagggcattgctcagcatatgataagcacaatatcgccggttattgatatgagaacatttagaatgttcaagtctttttctccttcctgggagcacaagaaaagcacaacatttgaagtgaaatcaagaaagtgaag

SEQ ID NO: 486600 - DNA, 306 bp, Homo sapiens
gggcaacaggatcatcgaccggacagacagacacaagtggaccatcagctaaagtaacagggaattatggacaatcatctgaaataccagggacaattaaatcatcatctgatgtttcagggacaatggggcaatcagatacaacatctggaccatcagttgcagtgacaaagacttctgaacaatcgtcaggagtcacggtggcatctgaaccatcagttggagtatcagggamaactggaccattagctgaaatatcagggacaaccagaccattagtttcagggttaaggacaactggatcat

SEQ ID NO: 486601 - DNA, 589 bp, Homo sapiens
tgtcatatttcttttatggcttctatggtaaagtaatatcccaatatcttcttccagtattctaaattcccagcctttttcattctcctctttcttccatcagaggccaccacttccacagaagggacaggtacttctggaactggattcaaaattggtgagaagaagcaacccatgatgtggcatcataattattaggtctctcaagcttttcttgagagagtttgtgtttattttatttagggacaatgcaagtgattcaaaatagatttgctggtggagatactttttttwaaatctactaattttaaaatggagcattactgttccatttccgaggatgggatggaatttctccatttgtgttacaactattgctagcagtttaggtggaattcagaaagttttcagtgtgtgtatgtgaaacagaaaagagccccatggacccaggacacatgcatttataagtgtatatgtgaacaaaaatgccggctcagtattttctttcttatgtctcaagttttaatacatttaaacccttttttccctcttctttctacctcacagcaggcatcacttctgccccagg

SEQ ID NO: 486602 - DNA, 555 bp, Homo sapiens
cctttctccctttcctcaataaccaaagccctatggttattttaagaatagtactcttgtctcctaaagcttttagtaattactgtgacccaytgccatttttcctccactctatttctatacctctcttagagcctagcatttaatgatatactcaactgaagatcttatatatatgtgtgtgtgtatacatatatatatgcatatatgtgtgtgtgtacatatatgtatataaatttcctagtgaaattgtatcatattgctaaattctattcatggcaagtatgcactgagtatcttatggcttgttctgtaggtttgtagctttgtactatataacaaaagagattgaatatgggctactttgctattagttagaaagaaagatttacttcccaactccccataggttttttgtatgtgcaaatttgcataattgactttttaaactacaaattactaggtaaccattatttgtagttagttcgtagcttatcactataatacagatcagcgttgttattatctgaaactcagccaaaaggactaaacttt

SEQ ID NO: 486603 - DNA, 555 bp, Homo sapiens
cctttctccctttcctcaataaccaaagccctatggttattttaagaatagtactcttgtctcctaaagcttttagtaattactgtgacccattgccatttttcctccactctatttctatacctctcttagagcctagcatttaatgatatactcaactgaagatcttatatatatgtgtgtgtgtatacatatatatatgcatatatgtgtgtgtgtacatatatgtatataaatttcctagtgaaattgtatcatattgctaaattctattcatggcaagtatgcactgagtatcttatggcttgttctgtaggtttgtagctttgtactatataacaaaasagattgaatatgggctactttgctattagttagaaagaaagatttacttcccaactccccataggttttttgtatgtgcaaatttgcataattgactttttaaactacaaattactaggtaaccattatttgtagttagttcgtagcttatcactataatacagatcagcgttgttattatctgaaactcagccaaaaggactaaacttt

SEQ ID NO: 486604 - DNA, 612 bp, Homo sapiens
tagtcttctgtgcatatattattattgtccacctgtaccatgaaatggaaagtatagatagcttgtcaaacaaataaaaattataattaacttctacctgattttttaaaatctcatttagcccttttgggagtattttcacatcttaagaaaacatttatagacattttacctccgtgattcttcttcttaaattcagatacttgcaatgatagttttctagaaagaaataaaaagacaataatatagcatggaaaagtatcctctctgagagtgaacaaattaataagaacaaaataaaataagaccagtgtaatttcaaaagattatactaaatttaaaagctcttatgttaaatattgatatgtaataattcttttttatctttatttttgatataagaatgctcttaaaatattttcttagaagtaattattttggaaatgtcacatggaacaccataaaacattctyataatggcattttatacactgatttgcatcatatcttacttttatgtttctataagaaagttttatttcaggacgagtgaattataaaagagtttattaaaatggtcatcagtacaactctgtgagaaagaccaaaata

SEQ ID NO: 486605 - DNA, 505 bp, Homo sapiens
tggggttatttagaacttttttacaacttatttagaaactttcaggtttctaaatatatgaatgaaccataatataagcctcggccaatacaatgcyggttaggcctcctactgtaaaaaggaaaataaatccccgggctcacagcattgcgggggatcatttgatattaccgctgtgaagtgtagctagctagtcagctaaaaactttgacgctagtaggaatagcaataattataatagcagaggtgaagcaggctcatgtatccacatctatccctaccataaatatacggtgggcccatacaataaaccgtaagaacccaactgatcctatagctcacactaggcccatatacctgaatggttcttttttttccagaatagtatgttacgacgtgggaaattatcccaaagcccagtgggatgaggatgtagacttcagagtgactaaagaatctgaataaatgctgatataagataggatcacctccgccagccaggtag

SEQ ID NO: 486606 - DNA, 505 bp, Homo sapiens
tggggttatttagaacttttttacaacttatttagaaactttcaggtttctaaatatatgaatgaaccataatataagcctcggccaatacaatgccggttaggcctcctactgtaaaaaggaaaataaatccccgggctcacagcattgcgggggatcatttgatattaccgcygtgaagtgtagctagctagtcagctaaaaactttgacgctagtaggaatagcaataattataatagcagaggtgaagcaggctcatgtatccacatctatccctaccataaatatacggtgggcccatacaataaaccgtaagaacccaactgatcctatagctcacactaggcccatatacctgaatggttcttttttttccagaatagtatgttacgacgtgggaaattatcccaaagcccagtgggatgaggatgtagacttcagagtgactaaagaatctgaataaatgctgatataagataggatcacctccgccagccaggtag

SEQ ID NO: 486607 - DNA, 505 bp, Homo sapiens
tggggttatttagaacttttttacaacttatttagaaactttcaggtttctaaatatatgaatgaaccataatataagcctcggccaatacaatgccggttaggcctcctactgtaaaaaggaaaataaatccccgggctcacagcattgcgggggatcatttgatattaccgctgtgaagtgtagctagctagtcagctaaaaactttgacgctagtaggaatagcaataattataatagcagaggtgaagcaggctcatgtatccacatctatccctaccrtaaatatacggtgggcccatacaataaaccgtaagaacccaactgatcctatagctcacactaggcccatatacctgaatggttcttttttttccagaatagtatgttacgacgtgggaaattatcccaaagcccagtgggatgaggatgtagacttcagagtgactaaagaatctgaataaatgctgatataagataggatcacctccgccagccaggtag

SEQ ID NO: 486608 - DNA, 505 bp, Homo sapiens
tggggttatttagaacttttttacaacttatttagaaactttcaggtttctaaatatatgaatgaaccataatataagcctcggccaatacaatgccggttaggcctcctactgtaaaaaggaaaataaatccccgggctcacagcattgcgggggatcatttgatattaccgctgtgaagtgtagctagctagtcagctaaaaactttgacgctagtaggaatagcaataattataatagcagaggtgaagcaggctcatgtatccacatctatccctaccataaatatacggtgggcccatacaataaaccgtaagracccaactgatcctatagctcacactaggcccatatacctgaatggttcttttttttccagaatagtatgttacgacgtgggaaattatcccaaagcccagtgggatgaggatgtagacttcagagtgactaaagaatctgaataaatgctgatataagataggatcacctccgccagccaggtag

SEQ ID NO: 486609 - DNA, 346 bp, Homo sapiens
tctggctgtagcttctctgatgacggatagcacagccyctcaatctgagtgctcagcagagtgcttgtgaaggcagcaccacagcaacagttgctcagagttaacggattcaggagccttgatttagcaatagagtccagggttttcagctcagtgtctttagtctgtctttgctggtcatgtcagttatgtactattcaatccaggaggtgctgtttacattgtagtacatacatagtcattgactaatgaatcatacagagagaaaagtaagttataaattatgtcccccatttgctgcaactctcagtggtaagaatgattcagttcagctataggagagtac

SEQ ID NO: 486610 - DNA, 346 bp, Homo sapiens
tctggctgtagcttctctgatgacggatagcacagcccctcaatctgagtgctcagcagagtgcttgtgaaggcagcaccacagcaacagttgctcagagttaacggattcaggagccttgatttagcaatagagtccagggttttcagctcagtgtctttagyctgtctttgctggtcatgtcagttatgtactattcaatccaggaggtgctgtttacattgtagtacatacatagtcattgactaatgaatcatacagagagaaaagtaagttataaattatgtcccccatttgctgcaactctcagtggtaagaatgattcagttcagctataggagagtac

SEQ ID NO: 486611 - DNA, 346 bp, Homo sapiens
tctggctgtagcttctctgatgacggatagcacagcccctcaatctgagtgctcagcagagtgcttgtgaaggcagcaccacagcaacagttgctcagagttaacggattcaggagccttgatttagcaatagagtccagggttttcagctcagtgtctttagtctgtctttgctggtcatgtcagttatgtactattcaatccaggaggtgctgtttacattgtagtacatacatagtcattgmctaatgaatcatacagagagaaaagtaagttataaattatgtcccccatttgctgcaactctcagtggtaagaatgattcagttcagctataggagagtac

SEQ ID NO: 486612 - DNA, 346 bp, Homo sapiens
tctggctgtagcttctctgatgacggatagcacagcccctcaatctgagtgctcagcagagtgcttgtgaaggcagcaccacagcaacagttgctcagagttaacggattcaggagccttgatttagcaatagagtccagggttttcagctcagtgtctttagtctgtctttgctggtcatgtcagttatgtactattcaatccaggaggtgctgtttacattgtagtacatacatagtcattgactaatgartcatacagagagaaaagtaagttataaattatgtcccccatttgctgcaactctcagtggtaagaatgattcagttcagctataggagagtac

SEQ ID NO: 486613 - DNA, 644 bp, Homo sapiens
ctgtgcctgtgagtgcaaggaagtcctagtctcctcaaactccatccctctggcatcccaggcctcacctctccctctgatgtagcagggacaaggtgccaacagccatggtgagccagtgactcagcacaggaaggtcaggtggggatctggtcctcacacctggccccgccctccatgcagtgcccgcttgtgtggctccaggctctgggccagtgtctgttgcaggatgccctgccctggcacagccaatacacttacacaagcaggggccccttgggggcttcctgcttccagcaccacccacccctgggacacccactgggaggatgaactgggtggcacaggtgacaggcctcaccttgaccargacagccacctgtcagtcatttgctgctttgtgcaggagaccccaagagactgagagaaaagagaaatggtcacagtgggagggtccttctgctgcccaaataagctcagagaaccaaaggcctcagcaccccaccaccacctgggtgacaaggccagaggcaggggctgcatccgggtcctgcccactgggggtgacaaccgggctgcccctcctcccccaccaaagctgaaggaagtggaccctccacagggatccagaccagatcccctgc

SEQ ID NO: 486614 - DNA, 594 bp, Homo sapiens
agtggtttctggaatgaaaaaaaaaaaacaaaaacaggagaataaaactgtttaaatgtatctccaggtgaacgctgtggccactgcaccgacccagccgatgatggcgcccagtacctgcgtctcaggaagaggttctggcggggcctccacctgaggccgcgcccctgggacctgtcccgcatccacgtgaacgcggagcgcagcattcaccatccgctccctgaaacagcggtccccgmggtgctccacaggcagggccgagctgggcgagggggagcccaggccctgcacgggccgccctgagcggcggggacgcaagaagagctcgccggctccaccagcccctaccccagacgcgggacctgggaccagagaggacctggagcccccgccccacggctgccaggaggctgacaggggcagctcctggggggctaccgccccgaggccgttccgccagaaattgagccacttgggaaggggcagcgccccacccctgaagaggaacctgtgtcctggaggcagcagcctgggagctactcctctgaggacagggcggaggcgagtgactctggtggcgcagcgcaggct

SEQ ID NO: 486615 - DNA, 594 bp, Homo sapiens
agtggtttctggaatgaaaaaaaaaaaacaaaaacaggagaataaaactgtttaaatgtatctccaggtgaacgctgtggccactgcaccgacccagccgatgatggcgcccagtacctgcgtctcaggaagaggttctggcggggcctccacctgaggccgcgcccctgggacctgtcccgcatccacgtgaacgcggagcgcagcattcaccatccgctccctgaaacagcggtccccgaggtgctccacaggcagggccgagctgggcgagggggagcccaggccctgcacgggccgccctgagcggcggggacgcaagaagagctcgccggctccaccagcccctaccccagacgcgggacctgggaccagagaggacctggagcccccgccccacggctgccaggaggctgacaggggcagctcctggggggctaccgccccgaggccgttcygccagaaattgagccacttgggaaggggcagcgccccacccctgaagaggaacctgtgtcctggaggcagcagcctgggagctactcctctgaggacagggcggaggcgagtgactctggtggcgcagcgcaggct

SEQ ID NO: 486616 - DNA, 594 bp, Homo sapiens
agtggtttctggaatgaaaaaaaaaaaacaaaaacaggagaataaaactgtttaaatgtatctccaggtgaacgctgtggccactgcaccgacccagccgatgatggcgcccagtacctgcgtctcaggaagaggttctggcggggcctccacctgaggccgcgcccctgggacctgtcccgcatccacgtgaacgcggagcgcagcattcaccatccgctccctgaaacagcggtccccgaggtgctccacaggcagggccgagctgggcgagggggagcccaggccctgcacgggccgccctgagcggcggggacgcaagaagagctcgccggctccaccagcccctaccccagacgcgggacctgggaccagagaggacctggagcccccgccccacggctgccaggaggctgacaggggcagctcctggggggctaccgccccgaggccgttccgccagaaattgagccacttgggaaggggcagcgccccacccctgaagaggaacctgtgtcctggaggcagcarcctgggagctactcctctgaggacagggcggaggcgagtgactctggtggcgcagcgcaggct

SEQ ID NO: 486617 - DNA, 610 bp, Homo sapiens
gtcatatctcggcacagccatgcttactccatcctcctaagccaaaatggaccacatattgacaaatccctaccagtcctccaagatcctgttcaaatggcaccttcatgaagcctttcctgttcttccaaytcttagatggtctctttctttgaggataattttccgattttctttataatttttttatgacacatcccatttttcacatatttttcaacagattcattaaatgtctgcagacattagacaaaatgctcccataatgctatactatttaatccttcccacagtcctaagatttgaacactttccagataaagggatgccaatctagagagagtcaataatttttttttaggttacaaagctgataggcttcaaagcagaaatgtagcccaattctgtctgattccaaaccatatactgttttcaccagatcatgttgttaaaatagaagatcatctttatgattattttgggcatgcttctttctcctctatgagattccaaggccctgggtctggactgtgtcttatttcttctggaattccctatgtcttcttgcacatgggaggaagaaaacaaaagctgatcaaattgctagaag

SEQ ID NO: 486618 - DNA, 283 bp, Homo sapiens
tatcaccttaaaggtaaaattaaactgtaaagagaaaaaaattttaactaaaataaaaatgcagtttacagcctacattacttctagcaccaaagcgtgttctatttctctatttgtatttgtaataaggacctgtagtttctmgttctctttgaagctccgctcatgctggcattccctgccatgacaaacacctatgtcagtcctttgcttccagagctgcacaaatatctgctctcttttcagatggtacttggccccaactggctaagactgtggccat

SEQ ID NO: 486619 - DNA, 283 bp, Homo sapiens
tatcaccttaaaggtaaaattaaactgtaaagagaaaaaaattttaactaaaataaaaatgcagtttacagcctacattacttctagcaccaaagcgtgttctatttctctatttgtatttgtaataaggacctgtagtttctarttctctttgaagctccgctcatgctggcattccctgccatgacaaacacctatgtcagtcctttgcttccagagctgcacaaatatctgctctcttttcagatggtacttggccccaactggctaagactgtggccat

SEQ ID NO: 486620 - DNA, 608 bp, Homo sapiens
ccagctggggagctacattgctattagccaggcaagacctggtaatgggctccaatgaggtaatgaagggagagggaaacagtatttaggaggcaaagtagtaggacttggtagtcacttggatttataaggagtagagcagagaaagaaatcaaagatgtacatttttactttgtgtattcccaagttccacaacctttttctaactcaagggaaactattgtaatatacttagatgccttagagcagattcccaagctaaatttataattatttggagctggcaaaattctgcctaacttaaccagtcatgsgttcagtaagcataatttttgaccagaaaaaatactgcattctcacaattaaggtatgatttagtcctaagaaagggctagaattctcttatttggaatcttgtcttttcctacctcaagaggtgttcctgacagagacagtctttataattcttagttatgtttatggcactttgattttagaaatcactctaaacacagatatttccataataaatattcccaactgccatccttggaaggggtaatttgattagtggtattgtattgagttgcattataattggtttcttc

SEQ ID NO: 486621 - DNA, 608 bp, Homo sapiens
ccagctggggagctacattgctattagccaggcaagacctggtaatgggctccaatgaggtaatgaagggagagggaaacagtatttaggaggcaaagtagtaggacttggtagtcacttggatttataaggagtagagcagagaaagaaatcaaagatgtacatttttactttgtgtattcccaagttccacaacctttttctaactcaagggaaactattgtaatatacttagatgccttagagcagattcccaagctaaatttataattatttggagctggcaaaattctgcctaacttaaccagtcatgcgttcagtaagcataatttttgaccagaaaaaatactgcattctcacaattaaggtatgatttagycctaagaaagggctagaattctcttatttggaatcttgtcttttcctacctcaagaggtgttcctgacagagacagtctttataattcttagttatgtttatggcactttgattttagaaatcactctaaacacagatatttccataataaatattcccaactgccatccttggaaggggtaatttgattagtggtattgtattgagttgcattataattggtttcttc

SEQ ID NO: 486622 - DNA, 612 bp, Homo sapiens
ttaaaggcaaaaactgacttttagtcattaggtatcactcctgctgcctagtactgtacctgataaatagtagacagtgaataaataaataattgtgattttattcatacagacctttctagaagtaacagctataagaacattgctatcagaatttaaagtctttgctcaggtagaaattgatttctttccttaacctttgaaccacatagacaacaaagttatagatgtaatttgaacctcaaaagggcattccgattttcccagtacaattaaatgttgggactaatgaggcagagacaatattttcttatacaaacaatttttcaagtatacaggacagtagcatctaatgactgctaccaacacaaaatcacygggtggccagcttctattttatgcagtgaggttagcaattattctgtaacacttaatttcctgttactaatgctttccccgaagcacttaagcatgatggccttatgaatatagttattagtggaacctcactcagtgtttggattcttttagaaatttgataaagataatattctcccaaaggttactgtccagataacaagtcattttatcagcaggcctgagcttcagcca

SEQ ID NO: 486623 - DNA, 514 bp, Homo sapiens
agggtacttttattctatcgtataatatttctgctattagttggttaagtggtattatattgagcctcaggattgtactaaccctagactaagaggacactttaaatatcaaataaggagcataaaaaaaaaaataaaagaaactaaaatttatactccagcctcccatttgggaaatactctttcaaactattctaaggctgagtgtggtggctctcgcctataatcccaacactttgggaagccaagacaggaggaccacttgaggccaggagttcaagaccagcctgggcaacatagggagaccccatctctaccaaaaataaaaaattagccaggcatggtggtgcacgcccacggtcctagttacttgggaggctaaggtrggatgatcactttagcccaagaggtcaaggctacagtgagccatgattgtgccactgcactccagcctgggtcacagagtgaggctttgtctctaaataaataaatatatacgtattctattttaaac

SEQ ID NO: 486624 - DNA, 635 bp, Homo sapiens
attctgtgcttctgctgcagcacttttcatagtgataacctgacccatctgtggagaatgattttgagagagaaacttatagccagacacattaaaagtctgttattcaagttacaattgagctgtttcctttctgtgcaacttctctgagtgccctcggtagagttaattactccttctgtgtcttgacacttgtgaataattctattttattctgtctccgttacatctgtctctgtacgctagatatctgtattacaagatctgcctctttcttccctaaactgttttcaaggtttgaaaaatacatattctgatacagttcttggcccatgatagataataaataattatttactaaataaataatccatccaaattgattgaacaccctattttctggcaagcgtattgtcattgtaccctttatcactaaygtccactgaaagctgtgccagaaactgtatttgcttttgcttgttacttggagtcaataatgtgtagtgattaggcgtgtggccagaatgtcttggttcaaagaaacaagcaagtttctttatcttctgtttctttgcctgtgaaatagagacaataatagctagcatggaatgtggtgaacattaaattaatacatc

SEQ ID NO: 486625 - DNA, 476 bp, Homo sapiens
tctgttacatttaagattccagggcaggccaggatgtggtggctcacaccagaaatcacagccctttgggaggctatggtgggaagattgcttgaggccaggagttcaagaccagcataggcaacatagtgagactctgtatcaaaaaagaataaaaggaaaaaaacggattaaacaaataaataagtaaattggccaggcacagcggygcacatctgtagtcctagttgctcaaaaggctgaggcaggaggatggcttgagcccagaagtttgaggttactgtaagctatgaccgtgctactgcactccaggttgggcaactgagtgagaacgtgtctcaaaaaaaaaaaaaaaaagactccaaggctttaagaaaattaaagggtgtttttttcctcagaggttactgtcttataactactcttatgaactactaaatacagacagaaactatttattttagagagagagaatt

SEQ ID NO: 486626 - DNA, 448 bp, Homo sapiens
ctccccactgaatactaacttccttccaaatgcctgcccttctgctacctgtgagtggtgacgtttcccctttcagagcttggggcatagcactcatttgcacaaaagccractaaaaatcggccaactcttgtatcacactaaactgcaagagtaaagcctgctacttaaggagctgttgtttaaggagaaacggagatgatagttcaggatccttcaacactcagaagaaggcaggagcaaattcagagagatggagtccacaatcaaattctatttagagcctgggatcagcaaaggtggaggcttacaccaaatggccagcatcacttgttcttacttgctgaggtctgctctggacctacagtctaagtctttactcccctttacgcctcaaagatgggtgaatactgagtgtttactgccctccttggttctgtccttagaa

SEQ ID NO: 486627 - DNA, 653 bp, Homo sapiens
ccaggctaatctctccaaagcaaaaatgtgaccctgtcacttaatagctttgaataatggctgaaacccttacctggcctataaaaccctccatcttctcccttgcctcctctccagattcatttcttggctcttctgctttgcctatcaaattgttactctgagtatactatttattattcctttctgtctttgcccatattggcctgaaatgwgccctctgctgaatcccctcaattctatctgtgcactggctcctaattcattctttttttctttttttgagatggagttttgctcttcactcttgtcgcccaggctggagtataacggtgcgatctcggttcactgcaacctcctctgcctcctggattcaagcgattctcctgcctcagcctcctgagtagctgggattacaggctgtgccaccatgctcagctaattttgtatttgtagtagagactgggtttcaccatgttggccaggctggtctcgaactgctgacctcaactgatccacctgcctcagcctcccaaagtgctgggattacaggcatgagccaccatgcccgcctcctaactcattcttaaggatgcatattagagtccctgactccaagaggctttctttgagtcaccaggctgggtgaagtg

SEQ ID NO: 486628 - DNA, 616 bp, Homo sapiens
tagtgaaaaaataaaacggcacttactttcacctacagaactagtcaatacaaaccagaactgtgtgaattaaagataggctttaactcttctaaagagaaaaataagtatttcctgtctattttaaggtatactttgtgtggcagaactgtttttccaagtacaatatttctcccatcctacatgtacttacgaggtagcttttacactcttcccattgaaggacttggtctgtgtcctctcctcttgaaaatgggtgggcttttgtacaggkgaagtgatattccctgacttttatggctaggttataaaaggcaatactgcttccattttgttcactggaatgcttactcctgaagcctttggtctgacttccctgagactgccatgctgtgaggaagctcaaagtagcccaaggggaaagaccacacagagaggacttgagactacacagagatctccagccatcccccactgcctcaacctcctggttcctggttaagccacagtctgactgcaattgtgccagggaccccaaacaataaccactcggcttctcaaatcattgatccttcaaagtggtaagagatgtagccttgatgtagctgtaagtcat

SEQ ID NO: 486629 - DNA, 616 bp, Homo sapiens
tagtgaaaaaataaaacggcacttactttcacctacagaactagtcaatacaaaccagaactgtgtgaattaaagataggctttaactcttctaaagagaaaaataagtatttcctgtctattttaaggtatactttgtgtggcagaactgtttttccaagtacaatatttctcccatcctacatgtacttacgaggtagcttttacactcttcccattgaaggacttggtctgtgtcctctcctcttgaaaatgggtgggcttttgtacaggggaagtgatattccctgacttytatggctaggttataaaaggcaatactgcttccattttgttcactggaatgcttactcctgaagcctttggtctgacttccctgagactgccatgctgtgaggaagctcaaagtagcccaaggggaaagaccacacagagaggacttgagactacacagagatctccagccatcccccactgcctcaacctcctggttcctggttaagccacagtctgactgcaattgtgccagggaccccaaacaataaccactcggcttctcaaatcattgatccttcaaagtggtaagagatgtagccttgatgtagctgtaagtcat

SEQ ID NO: 486630 - DNA, 616 bp, Homo sapiens
tagtgaaaaaataaaacggcacttactttcacctacagaactagtcaatacaaaccagaactgtgtgaattaaagataggctttaactcttctaaagagaaaaataagtatttcctgtctattttaaggtatactttgtgtggcagaactgtttttccaagtacaatatttctcccatcctacatgtacttacgaggtagcttttacactcttcccattgaaggacttggtctgtgtcctctcctcttgaaaatgggtgggcttttgtacaggggaagtgatattccctgacttttatggctaggttataaaaggcaatactgcttccattttgttcactggaatgcttactcctgaagcctttggtctgacttccctgagactgccatgctgtgaggaagctcaaagtagcccaaggggaaagaccacacagagaggacttgagactacacagagatctccagccatcccccactgcctcaacctcctggttcctggttaagccacagtctgactgcaattgygccagggaccccaaacaataaccactcggcttctcaaatcattgatccttcaaagtggtaagagatgtagccttgatgtagctgtaagtcat

SEQ ID NO: 486631 - DNA, 240 bp, Homo sapiens
tatcacccttgctccagtggagggagaatgctgccttgcagggcttctgaccatccccctcattttctcctctagaccttcatgggttgttccttcttgtttctctctattacttcwtcccctcactgtaaaaatactccaacagttatcaccttaagactaataaagcttgattttgcctctccttcttctcttctagacttcaccaccaggcttcgtgaacaagacctgttcaatgcc

SEQ ID NO: 486632 - DNA, 391 bp, Homo sapiens
tagtgagtggcggctctggggcgtaaacccagtcctggcaggctcctgggcctcactcatgttgctactgcaggttggcgccaggctcaggatgcagaggacccctgggtttctttgcatttggcccagcccaggaagcctcaagctgacagtcgagctctgtccaggaatttgggtgggtcctggacctggtcctgcctttgggaggctgagcagtcacaggctgccaggatggctgctaaaaagcaggatcgaaggtattgctttgtcctttgtcaagaygagtttgatcagagtgatgaatgactgagccacaaagagctgagcgagaggccatgcacctgggctgaggaagcctgaggccagccacccctgcatctgagtgctggtg

SEQ ID NO: 486633 - DNA, 495 bp, Homo sapiens
gatgagtagtgagtggcggctctggggcgtaaacccagtcctggcaggctcctgggcctcactcatgttgctactgcaggttggcgccaggctcaggatgcagaggacccctgggtttctttgcatttggcccagcccaggaagcctcaagctgacagtcgagctctgtccaggaatttgggtgggtcctggacctggtcctgcctttgggaggctgagcagtcacaggctgccaggatggctgctaaaaagcaggatcgaaggtattgctttgtcctttgtcaagacgagtttgatcagagtgatgaatgactgagccacaaagagctgagcgagaggccatgcacctgggctgaggaagcctgaggccagccacccctgcatctgagtgctggtgctgaggctgacttgcagtggtgatcrttggattcccgagggcccctccaccaggcgacctaggatatccaggacccttatcctcatggacaggagaaa

SEQ ID NO: 486634 - DNA, 623 bp, Homo sapiens
tggaacgcgtcagcaggacaaactggacacatggagttacagtgtgtacacggcagtcccgccacccagcccccttgtaaactctagtcactataaacacacccgtacgcctatccatgtccaccccacgtccaccccatggcaggttttcaactcagcccggggactgctgtagccacagttcaggcatgggactgggtaactgtttcccatccagagaccccgtgtcgtgcttacagagcctggtgcgtgggggatgctcagttmacctttggtgagggatacccacagccttgcctggtgccccttgtctagagcagggcatgaggaagccaacaaaacccccttggcccaccagcaggcccctcccacagccccaccctgtctgtttccagcccctcacaaactgagccagcaagcagtgggccggggagcagccgagaccccacctgacacgtgacaaggtcatctagccaggaagtcagggagtgcaatttgtaccccctttgctggtcagggcctgctgggtggcggatgggttgaggagggagcgctggggtgcactgacccacccctggcctgctctaggccatgtcaggcccctcagcggtggagtcccactc

SEQ ID NO: 486635 - DNA, 394 bp, Homo sapiens
ggcctcttaagtaagcaacttcccagggatgccaaggcacgggagagaatcaggataaacaaggcagtatttaaaaaaattaaatcagtaagctattgcccacaggctggctgcctgttttgataagtaaagttttactggcaaactggcaaaaaatagagagcaaaggcctcaggtgcaggccaygtgccagggaaaagcatgagacttaactgggctattttaacgcagtctgtttcacctgcaaggtgatgcctctgatgttgctcctcagggggagccttgggcatgctcacagtcatcctggggtggcggtggctttagcagggctctctttggctgtccctttccctcgtaattctgttaactgtctgcctttgttggtctcgcacca

SEQ ID NO: 486636 - DNA, 537 bp, Homo sapiens
tgcagccagcacagaagccatggggaaccatggcggtgcagttggcaagtctttttggcacacacagagccttggttaacagcagttgctgcctgtgttgtggtctggccctagcaggtggcgagctccccgtggygagtgctggccttgggggtcctttctccacagcaggcactgtgcgaggtacttcgtgcaccagtctccataacctgaagagggggactgctccctcttctcagagctcacaggtgtcttcctgagacacgcacgtggtcctcacaggggccttcgggagccttctttacctctgtcccttctgccacacctggcccagggagaacatccctccagcccccaggacgcgctctgaccagccacctgcttttcttctgcaagttcgatggatttccattttgcagatgtttaatgccagccacccatgctgagggatgtggggaccccagcaggaacagggtctgtaaactgaccaccttggcactacagatgtcatttctaactgtgctttaactcactgtg

SEQ ID NO: 486637 - DNA, 537 bp, Homo sapiens
tgcagccagcacagaagccatggggaaccatggcggtgcagttggcaagtctttttggcacacacagagccttggttaacagcagttgctgcctgtgttgtggtctggccctagcaggtggcgagctccccgtggtgagtgctggccttgggggtcctttctccacagcaggcactgtgcgaggtacttcgtgcaccagtctccataacctgaagagggggactgctccctcttctcagagctcacaggtgtcttcctgagacacgcrcgtggtcctcacaggggccttcgggagccttctttacctctgtcccttctgccacacctggcccagggagaacatccctccagcccccaggacgcgctctgaccagccacctgcttttcttctgcaagttcgatggatttccattttgcagatgtttaatgccagccacccatgctgagggatgtggggaccccagcaggaacagggtctgtaaactgaccaccttggcactacagatgtcatttctaactgtgctttaactcactgtg

SEQ ID NO: 486638 - DNA, 636 bp, Homo sapiens
ggacaagccggtgctggacaaggtgaggcggagggcaggccagggggtctcagagtgtaccagcactgccctgccatgccctcaacgcatcagcctctcggggaggcaatgattgtccccgttttcctgacaaggtggctaccgggtgtttccaccttgtctgaggcccagagccagaaggagcagaacaggacctttaacctccatgtagttttccagtgcccgacgggaacccttgagcccattaagcccagacctgagtatccggagcccggtcagtaggacccatctgtggccgggagggcctgctgcctctggtgggcttccttcccccagcacatccgctccaccttcccagtcctggccgggtcctgcgggctgcctctattgcacacgcgwcggtagggctctaccgctagtgggagaaacccaacttcaacccgcctgaaccaaaaggacttagctggcccatgtacctgccctatctcagggaccgctggctcgggcctcacaccacagcactgcaccgtggcctgtctccctcccgccctctgctgccgcttcccggggctggcctccctcgggctggctggtgtggcgcttggccgcctccaccgcaccaggctcacctaccac

SEQ ID NO: 486639 - DNA, 494 bp, Homo sapiens
ccctttccggtcacgtggaagcctcaattccttttctctactggcccagtgagtctcctcattggcgtatcctaggtcacgtggccacctgtgagccaatcactgtgcacgatgrcgtatgcctgctctgattggtcggcacagacctagacccacccctggggcagggtcccctgctctgaggactccccactccccgcagcgcgaagactccccagggaggatggagccgtcaaccgcagaaaggccagagcaagagatggccctgcccagaaatgtgtccgtccccccctcctctccccgtgggcgcagagcaggatcgcacccccctcctcctccctggcacagagagggcacgaggccctgcctgccccgggcggccagacccgcaaggacgcgcagtgaggctcacgtgcccacccggcgcccctcacgagcgcggtgcccctcgcttgcccgtaggcccgggtccggaagttcggccccaaactgct

SEQ ID NO: 486640 - DNA, 494 bp, Homo sapiens
ccctttccggtcacgtggaagcctcaattccttttctctactggcccagtgagtctcctcattggcgtatcctaggtcacgtggccacctgtgagccaatcactgtgcacgatgacgtatgcctgctctgattggtcggcacagacctagacccacccctggggcagggtcccctgctctgaggactccccactccccgcagcgcgaagactccccagggaggatggagccgtcaaccgcagaaaggccagagcaagagatggccctgcccagaaatgtgtccgtccccccctcctctccccgtgggcgcagagcaggatcgcacccccctcctcctccctggcmcagagagggcacgaggccctgcctgccccgggcggccagacccgcaaggacgcgcagtgaggctcacgtgcccacccggcgcccctcacgagcgcggtgcccctcgcttgcccgtaggcccgggtccggaagttcggccccaaactgct

SEQ ID NO: 486641 - DNA, 551 bp, Homo sapiens
gtggccacccctcaggggcacctcctctcccaccgtcaaggaaaacctaattatttcccctcggaaacccctatttccaaggaagtgccatcagactggctgggtttgttaaggtagacatcctcatgtcctcaaggggtttggtctaactcagagtgagatgcaaccccctacagccaggagccggcctgggcactggcagaggcagtggtgggagctggagcctggtccccagcgatggcgcaccttgactggacaggctgctgctcccagaggcctcgggaaataacgaagggtggcagtcggcatcatcaggtcacttcagagattgcagggagttttccttcatgcgattttgagacacacagagcctgcagtgagcggtgggcaggtgtggcatctgcatgctggctgtgagggtctgggggctccgattgctcygggggggcctcagccagggccctggggtgctgctactgtctgaggacgctggagccctgtgctctggtggcggggttgggagtcgtctggcactcctatggcagtgggca

SEQ ID NO: 486642 - DNA, 434 bp, Homo sapiens
catggctggatgtgggacatggtctcggtctctgtgagtcttggctctgtttcctccatgtgggcccctttcacaagaaagcccccaccagctccatacttacttcytgtccttaccttgccctgagcagagagagaggctctgctcagacagttcaaataaatgtcccacgaactgagtctggtggcccacccaggtgacatgcctgcccatggatttatcccagaggccagggagatgaaaggcactgagtggctgggcctggatcacatgccatcccaactgtcacagaccaacgcaactccttccccaagtggcaccagggccatgtcctcctaccacgggcaggagaggaaggacaaatgggctctgttttcagagggaagaacagatgctggccaggcagaagccgcagaggccatggccttggacag

SEQ ID NO: 486643 - DNA, 422 bp, Homo sapiens
tgcagcagggctgagccttggcaggggtcccggaaggaagcccggggctctgccctgcccgtggtctgctgcggcccagccgggcagattgcgcaggcactcaccgaagagcttttgctggggctgctgggactaaggaaggttaaaaatggagccgatgaacagcctgtgtctttggggaagctgctgggtgagccgggcaggccagccccttcactgggtggggaggtggggccggaaagggaaagcagcccctggcttcggggctgaggggctgatgtgcacatggtttgartgcatcctctactcggctggacgtttctggaagtagcccagccagccccccatcccactgcccctcatccagcccctccgtcaggctctgagagtctcacctctcaccctggtcctcctccatgctg

SEQ ID NO: 486644 - DNA, 512 bp, Homo sapiens
ctccggccgcgtcttctgacctgggccatctgcatgctctctgggattcagggcctccagtttggagcagcagcgctgacagcccctcctccccactctccaggcagggaaaggcccccagggcaaggtggggacaggggacaggggcaggggcagggagccctgcctgcaggcagacccacacctgccaccaagttccgactttggccctgaagacaagcggagcaggaccggggtatgccacaatgcacctgtgaagccygtttggctgtcggggctccgaggcaggtggccaggcaggcaggcccgggagggagaggtctggtggccccatgcaggactggggtaaagggagagcaccgctggggggccaggtgtggctcgtgactgccacaggggcctccggaaggttcgatgaaagaggaaaccagatggtgactttggcaggtctcaggagggcagtgagcctggccagggcgggggctccacggggacaggcgaggaccaggcag

SEQ ID NO: 486645 - DNA, 512 bp, Homo sapiens
ctccggccgcgtcttctgacctgggccatctgcatgctctctgggattcagggcctccagtttggagcagcagcgctgacagcccctcctccccactctccaggcagggaaaggcccccagggcaaggtggggacaggggacaggggcaggggcagggagccctgcctgcaggcagacccacacctgccaccaagttccgactttggccctgaagacaagcggagcaggaccggggtatgccacaatgcacctgtgaagcccgtttggctgtcggggctccgaggcaggtggccaggcaggcaggcccgggagggagaggtctggtggccccatgcaggactggggtaaagggagagcaccgctggggggccaggtgtggctcgtgactgccacagggrcctccggaaggttcgatgaaagaggaaaccagatggtgactttggcaggtctcaggagggcagtgagcctggccagggcgggggctccacggggacaggcgaggaccaggcag

SEQ ID NO: 486646 - DNA, 430 bp, Homo sapiens
cagcacctggctttcctgctgaaccttcaggccaagtctgtcttccactcaggctgtaccaattccccctcaaaggtccagggccaggagctgggcctggagtcaagagtccagggtgggccgggcgtggtggctcatgcctgtaatcccagccctttgggaggctgaggcgggtggatcacgaggtcgggagatcgagaccatcctggctaacacagtgaaaccctgtctctactaaaaatacaaraaaaatgggcaggcgtgatggtgggtgcctgtagtcccagctactcgggaggctgaggcaggagaatggcgtgaacctgggaggcagagcttgcagtgagctgagtttgcaccactgcactccaggctgggcgacagagcgagactccatctcaaaaaaaaaaaaaaagagtccagagtccag

SEQ ID NO: 486647 - DNA, 633 bp, Homo sapiens
ggccccttcagttctgcggtctccgtggaaggacagagcaaaaacacccatccccagcacagsgagattgggagagggtctgtcactatgggagaaggaagatcagagatattggcagagcggtctccagaactgattaaaatcaggcaccagcagattcaggaagcccacttgagtcctcagcaggccccagccctggacacaggggctcaggacacagccactactagacaggagactgtaccctccgggcctagtgccttaccaagcactgctcctgggagaatgtttgctgaacggatggtgatggggagagggaaaagagaggggaaagtgagggtgtctaagtccagcttgagacaaggccgggggattcatagtctccacccaccctctgccttcagaggtccaaggatggggtgggcaccagcatggggctgggggagccatgggggccaggggtatctgctgtgggctcaaggagccctcccagggctcagaccccagcctgaaactctcccagcactccaaaagccaaatcccacccagctctgggctgcttcatggggccccagactggagaagacaccccacgaagggtctctaaggaagaggcgctggtggtcaggcctg

SEQ ID NO: 486648 - DNA, 580 bp, Homo sapiens
gcacagggagattgggagagggtctgtcactatgggagaaggaagatcagagatattggcagagcggtctccagaactgattaaaaycaggcaccagcagattcaggaagcccacttgagtcctcagcaggccccagccctggacacaggggctcaggacacagccactactagacaggagactgtaccctccgggcctagtgccttaccaagcactgctcctgggagaatgtttgctgaacggatggtgatggggagagggaaaagagaggggaaagtgagggtgtctaagtccagcttgagacaaggccgggggattcatagtctccacccaccctctgccttcagaggtccaaggatggggtgggcaccagcatggggctgggggagccatgggggccaggggtatctgctgtgggctcaaggagccctcccagggctcagaccccagcctgaaactctcccagcactccaaaagccaaatcccacccagctctgggctgcttcatggggccccagactggagaagacaccccacgaagggtctctaaggaagaggcgctggtggtcaggcctgggc

SEQ ID NO: 486649 - DNA, 580 bp, Homo sapiens
gcacagggagattgggagagggtctgtcactatgggagaaggaagatcagagatattggcagagcggtctccagaactgattaaaatcaggcaccagcagattcaggaagcccacttgagtcctcagcaggccccagccctggacacaggggctcaggacacagccactactagacaggagactgtaccctccgggcctagtgccttaccaagcactgctcctgggagaatgtttgctgaacggatggtgatggggagagggaaaagagaggggaaagtgagggtgtctaagtccagcttgagacaaggccgggggattcatagtctccacccaccctctgccttcagaggtccaaggatggggtgggcaccagcatggggctgggggagccaygggggccaggggtatctgctgtgggctcaaggagccctcccagggctcagaccccagcctgaaactctcccagcactccaaaagccaaatcccacccagctctgggctgcttcatggggccccagactggagaagacaccccacgaagggtctctaaggaagaggcgctggtggtcaggcctgggc

SEQ ID NO: 486650 - DNA, 347 bp, Homo sapiens
gctggagagatcagccctgcggtcctgcmgcgcactccaccgccagcctctcgggagtcaagggatccgccttcagggtgtaagtggggctggggagcctcgggagaggaagggtggtgtttggggagtccaggccagttcttaaggcagacggctacgggccacgtccgctggcagagctcagcttcagataaacccagggatgaagaaaaactcaagccgctcaccctctgggtgcctcaaagtctttctatctgtaacataggctaatgaaattaccttccttgtagggacttaggagtaaatgagatgatctgggtatagcctttgcaacagtatctggaact

SEQ ID NO: 486651 - DNA, 515 bp, Homo sapiens
ggcaactcttcagagcctgctcatcgaggatttgacagtcgatgtgcgacttgtggtctgagcggggccctgcstccccttgccactacttaagaaaataattaataataattaatgaataaactgggattattgagagccatttaccacaaaaggcctcagggtacactgcactcaagcataattaaaagtggcatcttttaaacttcgatttgaaatgaaaactggctcagttgtccagcgcagtctgggcctctctctgatcccaactttgcagatggggcctgagatgatgggaggaggtgcggaggttcgtcctgaggatgagggtacagccggaaagcatggggaggacctggaggagtgtggtcccaaagatcagagtgggccttcagtctgagagggctgctgcagccatggccaccagcagagagggaacaggatggcctggaagcaggtgaccatttgctaccgagggagaggatgaaatccctggtgccaaactcaggccactt

SEQ ID NO: 486652 - DNA, 412 bp, Homo sapiens
gattattacgtcttgtgggccttgaggggtgggtgggaatactacagtagatttacacatttgatgaaagcatgcatcccaattggagaaacgttaaaatgtgggggatgtgcattcgaaatgaagaaatagggtatttagaatcaargctgttgtgggaaatcaaggctgggcagctgctcccagcctcctcactcaccatagccccttccgtgcgggaaggtagattaaatatccttggactcaataaacggtttattcgggatcccagtgcgcagaaggcagggctcgtgtgcctgcagattcgtaggtctcatgttcctcttaacccctccgtggcggacagagctttagcagtcactgcactccacacacggccatggaattggagcgtgagatcaaacatgttccc

SEQ ID NO: 486653 - DNA, 515 bp, Homo sapiens
ggcaactcttcagagcctgctcatcgaggatttgacagtcgatgtgcgacttgtggtctgagcggggccctgcgtccccttgccactacttaagaaaataattaataataattaatgaataaactgggattattgagagccatttaccacaaaaggcctcagggtacastgcactcaagcataattaaaagtggcatcttttaaacttcgatttgaaatgaaaactggctcagttgtccagcgcagtctgggcctctctctgatcccaactttgcagatggggcctgagatgatgggaggaggtgcggaggttcgtcctgaggatgagggtacagccggaaagcatggggaggacctggaggagtgtggtcccaaagatcagagtgggccttcagtctgagagggctgctgcagccatggccaccagcagagagggaacaggatggcctggaagcaggtgaccatttgctaccgagggagaggatgaaatccctggtgccaaactcaggccactt

SEQ ID NO: 486654 - DNA, 570 bp, Homo sapiens
accccagcccgggcccaggcgagccagattgcagccggcacaggcaactcttcagagcctgctcatcgaggatttgacagtcgatgtgcgacttgtggtctgagcggggccctgcgtccccttgccactacttaagaaaataattaataataattaatgaataaactgggattattgagagccatttaccacaaaaggcctcagggtacactgcactcaagcataattaaaagtggcatcttttaaacttcgatttgaaatgaaaactggctcagttgyccagcgcagtctgggcctctctctgatcccaactttgcagatggggcctgagatgatgggaggaggtgcggaggttcgtcctgaggatgagggtacagccggaaagcatggggaggacctggaggagtgtggtcccaaagatcagagtgggccttcagtctgagagggctgctgcagccatggccaccagcagagagggaacaggatggcctggaagcaggtgaccatttgctaccgagggagaggatgaaatccctggtgccaaactcaggccacttggcccctgcgtgc

SEQ ID NO: 486655 - DNA, 570 bp, Homo sapiens
accccagcccgggcccaggcgagccagattgcagccggcacaggcaactcttcagagcctgctcatcgaggatttgacagtcgatgtgcgacttgtggtctgagcggggccctgcgtccccttgccactacttaagaaaataattaataataattaatgaataaactgggattattgagagccatttaccacaaaaggcctcagggtacactgcactcaagcataattaaaagtggcatcttttaaacttcgatttgaaatgaaaactggctcagttgtccagcgcagtctgggcctctctctgatcccaactttgcagatggrgcctgagatgatgggaggaggtgcggaggttcgtcctgaggatgagggtacagccggaaagcatggggaggacctggaggagtgtggtcccaaagatcagagtgggccttcagtctgagagggctgctgcagccatggccaccagcagagagggaacaggatggcctggaagcaggtgaccatttgctaccgagggagaggatgaaatccctggtgccaaactcaggccacttggcccctgcgtgc

SEQ ID NO: 486656 - DNA, 618 bp, Homo sapiens
ctgttgggagacaattctccatgggtggctcccatttctgcactttccaagcaaaggcattaacatatatttygttccagattagctgttcaggaatgtttttatgtcaaactgccttggaaggtagaaatagtgtctctttccagggcagaaggcaggtttgttttctcactaggataataaagatattttttctttccagggtaaagtttgagcaggtttgctggcatccttttgaaaacatggaggtttccaaagtttgagattcttccgttgtgccacaaaccccctctatgtgcatagaaggggaaagttgatattccatgctgagagaatcaaggtatgaaacagcatagtatgaatgcataagtataaacgatgcagtaatgctgacaaattagagatgagatgagaagagggaagagatgacgccggagagccacagaaggacagaaccttggggactttacaggccaggtataaacttacttcataataatcatttagctaacaattttacaattatagctcttgaaaagttatgccagtttttgaacaaatctttctttttcagtagagaaatcttttcccccaagatccactaaataaatacacata

SEQ ID NO: 486657 - DNA, 533 bp, Homo sapiens
aaacattcatgttttataaccaaaagctgaacaataagaatataataaaccagacactgtcccctgcaatgatgaacgtgaaaaacagaaaagagaaaaaataaataagaaagagtgtagtgacagcttataatatactaatatgatattcatgattatttagcctttaggtaaagtattcggagtccaaggcagttaggaggcttttctgtggaaagctgggatgctattttttttgaagtgcaaatgatttctgaatttgttatcagatcactctgaactcattggataattacaattgatttttcttttactctaggtgtagcccyaactactagcagaggcaagagaatagagctatgccacttcttccatcagtaagggagcactcaatgtaaactccctaggaaagagctgctaacaaaagtctttgtgtttcaattaaaccaaggaaagtgaagtatcaggttgttgactataattgcttttatggttattgctcttagctggtatattttaatgccgtttttcac

SEQ ID NO: 486658 - DNA, 629 bp, Homo sapiens
cacatagtaggtgctcaataaaacctattcccttccctcttttgataagactggtacctaaatctgaggttgtcaacaacatcctattgcaagagagagacttttggactattcccaaagtccaaagtctattcaagcaaagccacattcttaacaaaatctgactcctctaacttgatatcaagcaaaatgtcagttctgaaggactagatagttcaataaattgcacagaactccagtgacaggcatcgcaagattgccatcagatttatgatttgaaaactcaactactcaagtaaaaatctcttcatcacaaggttatagggccagcagagtgttactattacaaggttgaaaagattcagaaaattcactatagaaataaagggttatttgaaaataaaattaaacagaaaaaaacaggtaataaaaaatagatttcacatatggtaaaacaacaaaattaaacaaggaaataggytttctttttagaaagcaaactcagagactgatttaccatctctgaattatttcacttatgaatatcatcagctcaattaagttagtaacaaagcctgcattgcgcaataaagtaaaaaaaaatcatattatgcaaaatgttattagga

SEQ ID NO: 486659 - DNA, 576 bp, Homo sapiens
atatataagtttgcaaagctaatttcgtactatttacctagacaaacaagcccttttaaagtgagtgatcatggtaatactacttggtgaatcctgggtattacatagtttaattataatgaacaaataatcaatgtatggtcggtttacacttcacttaccaatagttccaattagttcagcaagacacaatctatatttcgattacgaactaaaaatattctctgtgcattagtgacaagcaaccaacaaacatatattaagttatcattaagtcaagatctcagcagtttggacaggaaacatgagcacctttctgtaccaatggcctaccaamataaacagatgatagcagttgtccaaagtagggtttttcagtctccacatactagcaacagaatgttaccctagttccaatatccttacatatgtgagaaaatgtagatggcaaccaactttcttgacatcttaagatgtcaagaaatgtcttacattgcctaatggttcaacacaacagatatatgataaaagcagtagcaccttgattgcctgctaaagttaggacaataactgctt

SEQ ID NO: 486660 - DNA, 547 bp, Homo sapiens
ccaaccctctaattacatgataggtctttctggttagaaacccctttcctgaaactatctccacccctacctactcaccagtagtcacttcattagcacaacaaagatactcctaaaacttgaaaatgccaaggggtttgtcaggacccaggaacaaagactaaatatatgttttattataccatgttatctatttacctatctaactgcttaatgtagtttactataaaaatgacagatcctttctatacaaccacatttaaactttgagaaaatatctagttgatttgaatgagttatattcaaacatcagaaaaattcatgttttaagaacatttgccactttggtaatgagtaatgaggaaatgcagagagagattttattgattagccatgcccagaatgattctgaggaccactcacattctgctctttaaagtagttatcctaggttaaggatcarcctggtcatgttggagtgaatctaaattgcatgactggaaagagtttgcaatgttttccccttcccttttgtcaatgaagcagg

SEQ ID NO: 486661 - DNA, 535 bp, Homo sapiens
tacttcctgatttatttgtattagttaattaattaaattgttagatttttaatacaactctaatgtaagaatctgtcttgggagaaggaaagtctgaagataggttcataaaaatcatgtcaaagaccactggaaaggaaataactcggtgttctttctctttgtgtgtgttattcttatgtctcttgcaaaagaaagaattttagtcacttgacttttttctttccttttttgaagagaggcttcaatttggaaagagtgatttttcttcccaaaggaggaagagtgctgaagagaagatatgaaaggaaaataagtttgttgttttgttttgttttacaaatgtgtttggagaacacagaacattaaatctcatgctttctgaatgacctggcaatcttaaataatcctaccatacaggcaaacatcactccmttctttaagtgttagatttaaatgaatttttaaaataagcctttgttagaagtcctggtggtagaatcctgtggattccagccagtgggtccatgggaat

SEQ ID NO: 486662 - DNA, 662 bp, Homo sapiens
tttccacttgcatcttcaccttctaactcattctctcctaaccttttgtgtatacacttttacgtttctgtatcttaacaccggcyatgcccttcttcaggaaaggctatacccaggccctgactccatcaatatccagtggttactgaactagtaatttttgggaagccttatctgctgtctcttgtccatgcttctctttgattacttttgtttattattatatgtaccattttgtcttttcacctgctggattgtaaactctttgaaaaagagattctatcttataacctaagtatttccagcccaatgcctgacccattgtaagcatttaataaatattagttgattgaatgtttcatgagaaatattttaaaaggtaaccagccttaactccaaggaatttttttgtgtatgtgtgtttgcctcatttttatttatttatttttaaatttttgatctcattcttttatttacaaacatattcacacatggaaaatgataaacaaaatttattgcaggaaagtgcaaaaagaaataacatatctaggtgctttctctaaagctgaacatttttgcctcttattttttatgaaatagattttgaaacaacagtcttcattgttaagaaattaacaaagtaaaaactggctttaaaatca

SEQ ID NO: 486663 - DNA, 438 bp, Homo sapiens
tgaaataatttgagtttgtccattgttctggtattatgtagccacagttcaaaacagtcaacatactaaaaaattatgggacattgagtcataaactttgtggaactgggaaaaagacggttgtcatagattattcaactttgaaccgtatatcatgaggtaattttatagaaaattattatgatcaataatttctgtcacattcaatttaactactagttttagaaacayaaattttaagagaacataaaataaatgagaatatgtccatttctgtaacataggaaatttcagctacataatgtctgatgattctttagagtgctaatgcatctatcctcctgtgtttttattactttaaagtactgaagaatgcttggaaatttgcaacagcttgtttcaaagattacttaggggtcagaatttattatttctaaa

SEQ ID NO: 486664 - DNA, 562 bp, Homo sapiens
tcaatttttagaaagatttgttttagcatttccttagtcatctctaccttccttctagcctgtcatttgttcaaggtgatggagggtatgtgataacttggagaaattgtttgaactgaattaatcagactactattggcaataatattgtgtggctctttgagtgttttttagattatttcaggagatgtttgaaatgaaacttactggccctgaagccattttgagttacctaccaaattaagaaatggtattccctgagaaatggacataaaattgcactgcattcctagttatattttctgataaattttcatggaaagtaggtgtccttggattttataacagatgaataaattcccaactacaaaacgtcatttccagctttattccagtttccaatacgatgactgtgatggttaatattgactgtcaacttgattggattgaagtgcaaagtattattcctgggtgtgtctgtgagggtgttgccaaaggagatraacatttgagtcagtggacttggtgaggcagatccaccctcaatttgggtgggcaccat

SEQ ID NO: 486665 - DNA, 653 bp, Homo sapiens
tgacattagaaagaattccctatggactstgtttgttctatctcacaagctccaaatttgaagattggtggatttttgtgattagacaagccaaggccatgctgccttgtgtcccacataagacaccagtgcagcgtgtcctctttgaaactcaggataacgtttttgagattcagccaaactgttgcatgtatcatgcaaattcattattttctatttctgagtagtattccattgtgtagggacacaacagtttgtttatatcctagtatatccttgccttcattgagttctcaaagttttttttttttatagttctcttttagaagctgaatagctttagctttaacatttaggtttatgatccagtctgagaaaattttctgtatatttaatagtatgaaatattgaagtttttttccacatagatatccatttgcttcactactatttttgaaaaaacgatccttttcccattgtatttctgtagcacatttattgaaacataacactgtgccccgcaaatacatacaattattatgtgtcagttaagaataaaattaaaatacaaaaataaaagaaaacgaccatatatatgtgtatatacttctaaagtttctattctgttccattgagtgatatgttgatacaat

SEQ ID NO: 486666 - DNA, 653 bp, Homo sapiens
tgacattagaaagaattccctatggactctgtttgttctatctcacaagctccaaatttgaagattggtggatttttgtgattagacaagccaaggccatgctgccttgtgtcccacataagacaccagtgcagcgtgtcctctttgaaactcaggataacgtttttgagattcagccaaactgttgcatgtatcatgcaaattcattattttctatttctgagtagtattccattgtgtagggacacaacagtttgtttatatcctagtatatccttgccttcattgagttctcaaagttttttttttttatagttctcttttagaagctgaatagctttagctttaacatttaggtttatgatccagtctgagaaaattttctgtatatttaatagtatgaaatattgaagtttttttccacatagatatccatttgcttcactactatttttgaaaaaacgatccttttcccattgtatttctgtagcacatttattgaaacataacactgtgccccgcaaatacatacaattattatrtgtcagttaagaataaaattaaaatacaaaaataaaagaaaacgaccatatatatgtgtatatacttctaaagtttctattctgttccattgagtgatatgttgatacaat

SEQ ID NO: 486667 - DNA, 634 bp, Homo sapiens
caagtaatttgacttctggtcatgaattattgatctcrtcccataaaaatgcaatggggcaggtgaccacacatttttaaattacttttggcatcatcagcttctggtcatctctttatgtaagtgttttcatttttaaattagatttggcatcatcagcttctggccatctctttgtgtaagcgttttatcctacaggtaaataaactgactccagctgtcttgcgtgtcaactcttccaacaagcctgacacttagctatgatttggctgcatacaaaccaagcactgtctccaaccaacacttattttggcttctatttcctaggtccatggtatacatgaaaatttctcacgtgattttaatatagttttatccgatagagcaaacattgaatcagcatctatgttgagttagtcagacaaagtatgatgccgtatttgaatgcatttataaaaataacactactatcttaggtataagaaaggattatcatttttctggggatttgaggttttaaaagtgtgtatcttgagtgactgataacattttgttagcattatctgaggtcggggcatacactgtgatcatcttctcaagtctcctaagattcttgagactaaatttagtgaag

SEQ ID NO: 486668 - DNA, 466 bp, Homo sapiens
ctgaaagcatcatcctaagtactgagcacaccacaaagattatcaccttttggtttctacggaccrttgtaaattatgtcttctaatatggtccatctctgttaatatcactgaaccatggtaactttttgtccactctgatgttggatctttattgaaacgtataatgctgaaggatctgcatggcactgggcattatttaattgtgtttgcatctcttcagcagtaaaactctgcagtccctttgttgacatcccacatcctgtctgtgactgactccatgacgttcataaatgtaccggacccaacttggcttaattcctaattagatgtgacagatactgaaatgcactcacgccatacatgcagacacaccccttagggaaggaagagcccttttatggcaacctaagtctgtttctctggaaacattcctggagggagcttagagattctgaaaggaaga

SEQ ID NO: 486669 - DNA, 466 bp, Homo sapiens
ctgaaagcatcatcctaagtactgagcacaccacaaagattatcaccttttggtttctacggaccgttgtaaattatgtcttctaatatggtccatctctgttaatatcactgaaccatggtaactttttgtccactctgatgttggatctttattgaaacgtataatgctgaaggatctgcatggcactgggcattatttaattgtgtttgcatctcttcagcagtaaaactctgcagtccctttgttgacatcccacatcctgtctgtgacygactccatgacgttcataaatgtaccggacccaacttggcttaattcctaattagatgtgacagatactgaaatgcactcacgccatacatgcagacacaccccttagggaaggaagagcccttttatggcaacctaagtctgtttctctggaaacattcctggagggagcttagagattctgaaaggaaga

SEQ ID NO: 486670 - DNA, 635 bp, Homo sapiens
tgggcaggtaacccagatgagtgagcaggagggcagggactgaggcaggagaggaagaagcacacattgcctaaaaggcgtggctgaagcccagccccggctaatggctacggcatagagacagagcctcatgttgctggtattttgatttcttttcttcaagaaaatctggaaattctggcttttccatgagtgtcaagttgtaaatattggctagtgtggtgggctttgccacatgatatactatggccaatgacatgtgagtagcgttattgatgtgtgccattgctaagcagaagttctagagccaatgcatggttctcccacccttctttccctttgttgcaaaaggtaaaattttcctctaccaatttaggtctgaaatgatcagagggctgacagattaacaagagaaaagacaaggtttattttcatacatgcataagtggagctcccagtaatggaaaacttgaggaagaatcccaagaaaaggttgatatgtttcaaccgaaatgggtttttagggctttcatgggagagaatggaatagtccattggttttttggatgygaatggaatgggcagtctgttttcttgctggctggaagtttcccggtagtggaggtttatggcag

SEQ ID NO: 486671 - DNA, 515 bp, Homo sapiens
gctagcattcccttaatgaataactcctccaacagaggactgggggattctcgacatctggaagggtggtactggcaggaaagggtacttgggagaagctggtgatgctgagacacacttctatcacaattcatgggtcacctactatgcccagggcattgtgctgagcatcaaagaacaaaacaagataactccttccaagccaacttgtgtagtcttctcttatttgcaaaakacttccttactcatcgttctcatctgaccttgaaaaaaaatcttatgaggcaaccagagccaggaagacttgtctttaaagatgcagctattgggaaatcaatggaatgagttgataattaaataacacagaacttggccctttaattttaacttaaatacacattgttttaccaacactttgatgtagccttttatgagtgtgaacccactgattggaattgtatgttgttttccttacacaaacctcatacataatgcatcatctgtaatttctagat

SEQ ID NO: 486672 - DNA, 657 bp, Homo sapiens
agagcccatcctctaaaggaatacagaggggaaagtacatcattcaaaaagccttccttgaaagctggaaccaatgcaactggtgagacagacaagtgcctggctaggataaaggaagggaagagctgtgacccttgcattgttctcctttacacggaagcagactctaatccctccaagtagagcttgtcacctgaactaaggatgacttggaaggtaggctgagctttcagagttgattcttggaccagccttcaacctccatagacttggggttaccatctctcctgcagcacctgaccctcccttattgctgyccagctcccctctgcagccttctggcattgtttcctggatggcaactgacttgctccttcttggtcccatgtgtccacacctaggcacagcctaggtacatattgcccttgaggggctcagcctgacttctttcctggtcacattccagaatggctgacttgactcctcctcttccacatgcttgtttttctcctgtcctacatagtggcggtgatgttactattgaggtatgagctgcttgaactgaacagattaattcatctccaggcatctactgagttccaaatggttcttctgcagagaataaaccagaaacactaccttagtgcttgcctttaa

SEQ ID NO: 486673 - DNA, 585 bp, Homo sapiens
caatgcaactggtgagacagacaagtgcctggctaggataaaggaagggaagagctgtgacccttgcattgttctcctttacacggaagcagactctaatccctccaagtagagcttgtcacctgaactaaggatgacttggaaggtaggctgagctttcagagttgattcttggaccagccttcaacctccatagacttggggttaccatctctcctgcagcacctgaccctcccttattgctgcccagctcccctctgcagccttctggcattgtttcctggatggcaactgacttgctccttcttggtcccatgtgtccacacctaggcacagcctaggtacatattgcccttgaggggctcagcctgacttctttcctrgtcacattccagaatggctgacttgactcctcctcttccacatgcttgtttttctcctgtcctacatagtggcggtgatgttactattgaggtatgagctgcttgaactgaacagattaattcatctccaggcatctactgagttccaaatggttcttctgcagagaataaaccagaaacactaccttagtgcttgccttta

SEQ ID NO: 486674 - DNA, 617 bp, Homo sapiens
attcagagatttggcatcctagtcctgcccatcaatcttccactcttgtggctactcattcagctcttacttccgaattgggaaaacagactagagaaaactcttggcaagtaattaaaaaaaattctggtattgagtaagggaggagttaattttaaaagcactgattctaacatggaagattttaggcttgaaattggaagaggataacaataagaaatcctcactgagttcacttttgtggatgcctgtccgaggttagagctccggcagctctgtgaacatcctcattggccatctgagaacttcyaaagggttcattggctctcacagacccattagggttccagccaactccttctgaagataggagctgtttagaaagctttgctggaacattcaacagtggctaacaattgacggaaaagatagtaatccgcaggcttcttgaactctgcttacctctcatcagtaaagtgaatgtatggagagtgacagtataatttttttaaataccttatggaacagtgagttggtacaatcaacgtaggcttagaagatgaatcagatagccacctcctcatacccacaggaaaatcccaggacttctcagaact

SEQ ID NO: 486675 - DNA, 617 bp, Homo sapiens
attcagagatttggcatcctagtcctgcccatcaatcttccactcttgtggctactcattcagctcttacttccgaattgggaaaacagactagagaaaactcttggcaagtaattaaaaaaaattctggtattgagtaagggaggagttaattttaaaagcactgattctaacatggaagattttaggcttgaaattggaagaggataacaataagaaatcctcactgagttcacttttgtggatgcctgtccgaggttagagctccggcagctctgtgaacatcctcattggccatctgagaacttccaaagggttcattggctctcacagacccattagggttccagccaactccttctgaagataggagctgtttagaaagctttgctggaacattcaacagtggctaacaattgacggaaaagatagtaatccgcaggcttcttgaactctgcttacctctcatcagtaaagtgaatgtatggagagtgacagtataatttttttaaataccttatggaacagtgagttggtacaatcaacrtaggcttagaagatgaatcagatagccacctcctcatacccacaggaaaatcccaggacttctcagaact

SEQ ID NO: 486676 - DNA, 515 bp, Homo sapiens
ataaccatcagatcttgtgagacttactctctatcatgagaacagcaagggaaagacatgggaattcaagataagatttgggtggggacacagccaaaccatatcacagtgctactattaacaggaaggaaacaacccataaaataaatatgttcataccccaagagctattttaagccctttgaaaatagaaaatcattcactgaatatttattaagcatcaagaaaagtattatatgccaaggaccaacaggaggacattgccttcaaagaacatcaaagcytaatgggggaaatatattttaaacaaaagtgactagacagaaggtcaggtcccatccatggtagggtgaccaactatcctggttttcactgtcccagtttttgcattggaagtcccacatcctccaacccttcaatcccaggcaaacttgaaacctgtagtaggagacatttatttaaggatgtccatgataatgttgttagaatagatactggtcagtaaataatagatg

SEQ ID NO: 486677 - DNA, 510 bp, Homo sapiens
atttgtgttgataaaacattaggatcatttcagaataactgattataatatgctgtgggttttctgcctgttgtgttgtaacacctgtcagtgagttagaagtgatatccctaatgatcaatcaggtaaaatggaacaaactcgaaagtctttaaaaaggtgttcaagaaaacaaaatattccttattctacataactgatagttttttaggttcaacttatacagattaaaaaacagagtcaaaatatgtggattttagtaatagcttctaatttatctagtttttgctagaaaatatttactcagacgaaactctagcacatattaataaatgatggtctacagtgggaaaaaaatcccatagcctrtgattatctatactaatgtgaacattgtaccagaaccagaggagaagaaagctggcttagctttacttgactaatgttgattcaaaatttataccatcatactacagctaatagtgttcagatggtcatgtgcaagacatg

SEQ ID NO: 486678 - DNA, 542 bp, Homo sapiens
atgttgattcaaaatttataccatcatactacagctaatagtgttcagatggtcatgtgcaagacatgtgcctgacggaaaaaacaatttcgtagtctcactctctaacacagaatgaatatatgacatggagcaagagaataagattgccaactctattaacttctctaaaatatagtaattgcagaatacttccatggtgttatgattctctctstgtgtgtgtgtgtgtgtgtgtgtgtgtgtacctgtgtgtatgtgaacatacctacactggatctggatctcctgactttatgtttaaacatcatgtagatcccttatattaagccagatcattgtttcctaatgggtgttctgtggaacactaattatgtcaaatattttatgaaaatatgtttggagataatatatttcaaacttcggcactgtatactctgctctcatagactcatgatgcggatgacactacttacatttatgagaatttctacagcatgaaaatcttttcatttttttagttcagtgtttcctaaacttat

SEQ ID NO: 486679 - DNA, 562 bp, Homo sapiens
tggcagcaatcaacaaattttttttctgtcatcattttgccatggcatcatttagacatggattcagggatgtgaatattagcaaaatattgaacaatcaaaagaattcatgtgtgaaatagcatgtctgctttataatgaatataaaattgtgtttagctatgaacaggattgaaacaccttgcgagattattactgaggcaacagaagagccaaaaataaattgctccaaactaacgtaaggcatttattttttgctttgttctttcttgcattattttattatcaactcagaactattcaatagtttcaattttcaaattgtgagtgggtgcagatctatagctatccttcaaacctatcaaaatgtctattccttttcaaatgattgtctttggtttaacctataagggccatgctttaatttggagtttaccttttattcagaccaacttttaaataatggtaataaattgtgtattttgggaatagagatgtcttccaagcagcacatcacwtatcaatttgtcatttatttaattatttttttggaaaagaaata

SEQ ID NO: 486680 - DNA, 511 bp, Homo sapiens
atgaataaaatagtaccgctgaggctgaggctgaggctgagcacccacaatcagccccaacaggaaggatcagggagaaaatccccgcagggacgcagagcaaggaaacgatgccgtcatgaacgtaaaccaacrtgatttagttaatagactagagacttcaatggagaaagctcagtaaaaccatacggctccaggttcaaatgacacttgagtggccgcagataccaatgtgaactaactccatcagatgcgctgagaacccatgacacactaccgctcatgggtccagaggacagggctgtgttcaggagtgcccatctgaggagttcaaaaaagagcaggccggcccctttatacatggagtagaatctgctgggaaggcagagaacagccagccagaaactggaggctctcccagaggttggccgtccctggcacagcctgcactgcccctccagggtctctgcctgcagacacctcccactgctcccagcatcactggctccag

SEQ ID NO: 486681 - DNA, 509 bp, Homo sapiens
ctgcagtaaatctgccagggtcgtctcttctgacattttaaatttcacctaagggaaaaaaatccaggcaggattcatttcaggtcatgtgcactctgcagtgggcagacgtcatgatccttcatggagagccattgccggggcacgatcccgggctgctggagggagggaggcgagctctgctctgccattttcagctctgagacttgaggaagtgacttctccaagcctcaccttccttccctgtaaaaccgcataagagcagaacgcacctgcactgggcggaattgcggcccccccgcaaaattcacatccgcccagaaccttcacgtgtcaccttatttggaaatagggtctttgcagatactaaggatcttgaggtgagttcatcctggattttccggtgagacataaatccagggccaagtgtcctcgtgacaggaaggagagggacatctgaggcacacaggaaagagggccttgtrgagaccaaggcagagacaggcatg

SEQ ID NO: 486682 - DNA, 636 bp, Homo sapiens
agttccactttccccacattcttctgaacacttattttcttttttttaaaaaaaattatagccattctagtaggtgtgaagtggtatctcattgtgtttatgatttgcattcacctgttgaactcatcttttcatgtgcttactggctgtcttttttggagaaatgtctgagtcctttgcccattttttaattggattgtttgtcatcttattgctgagcgtagagttctgtacmtgattgtgtatatattgtagatactagacccttgttagatatatgatttgcaaatacttccttccatttcctgggttgtctttttactttgttgatagtgttcctttatgcatcaaagttttaaatttttgttgtttgtactttcggtgtatttttttttaactaaactgaaatttctctaaattactttttatccaaaagccatatcagaatagcctgtggtgctttataaaaacgttacatgtatcagtgtattaccatctaacaagcaaaaaaccccaaacccaataacattagcttaaattagagatttatatttctttcactgtaaagaaaatgagaggcgggcagtctgggcctgtatggcagtttcaggtgttaggggctgttcctactgtcaa

SEQ ID NO: 486683 - DNA, 517 bp, Homo sapiens
gattagaaatgatttgtgagcataattcttagtaaatttctttttctttttctttttctttttccaagatggagtatcactctgtcgcccaggctggagtgcagtaacktgatctctgctcactgaaaccgctgcctcccaggttcaagcaattctcctgtctcagcatcccaagtagctgggactacaggcgcatgccaccatggctggttaatttttatatttttagtagagatgggatttcaccatcttggccaggctggtgacgaactcctgacctcaggtgatccacccacctcggcctcccaaagtgctgggattacaggtgtgagccactgtgcctggccaaaatttcttacttgtgttagaacttatttaattttgaatattttatttatttgtggtatttgtgttaaggactagttgtttaaaatcccaaagtctcagaatcggtattagattgtagaacatctggtctgatggtcttcagaggttttattggcagtggaggcaggat

SEQ ID NO: 486684 - DNA, 606 bp, Homo sapiens
agactatcagctgatttttcctcatcaaaattggaagccagaaaagcacagaagatatttaaagtgctgagagaaactatcaactttgaactgtgtacttagcaaagctgtctttcaagaatgagggtaaaagacatcatagataaataaaaactgagaaaccgtcagtaaggaaaatcckaaaaaatgtcctggaagaaagaaaacaatcccagaacagaggtttcagatacaatcataaatggtgataagaaaaatggtaaatagcgagcaagtatagagaaacactgatggttaaaacagtacaatcatacctcgtcagtgctactagtcttttataaatacaactaaagtcctaagcatgtaagttaggacatgactattgctttaaaatagaaagaaaacataaagttcttgtattgttggtgggaaaaaaaagatagtgaagtttaggatgtgttataagtaggttaaatttttaaaggtagttactaaaataatagaaaaaaagtgtgcattttctgaaaaaagaggtcacatagagaaaaaataaactaatttaattaaaaataaagcaaggggcgggtgaaagtaaggggacaaacc

SEQ ID NO: 486685 - DNA, 514 bp, Homo sapiens
  misc_feature (1)...(514): n = A,T,C or G
nnnnnnnnnnnnnnnnnnnnnnnnnnnnnnnnnnnnnnnnnnnnnnnnnntctgcagactttattatatggtggccacagtttagtgtagacatgacttcaaaaagtcccaaatattggctgaatgcggtggttcacacctgtcatcccagcattttgggaggctgaggcagacggatcacctgaggtcaggagttcaagactagcctggccaacatggtgaaaccccatctctactaaaaatacaaaaattaactcagtgtggtggcggrtgcctgaaatcccatctacttgggaggctgaggcggaagaatggcttgaacccaggaagcagaggttgcagtgagccaagatcgagctactgcactccagcctggatgacagagcgagactctgtttaaaaaaaaaaaaaaaaagacccaaatatcaaccaaagtgaaggctcaccgaccattttgtcaacttacctgaaacatttttctctctcgtttgctcacatgtcgctttctgtgttc

SEQ ID NO: 486686 - DNA, 514 bp, Homo sapiens
  misc_feature (1)...(514): n = A,T,C or G
nnnnnnnnnnnnnnnnnnnnnnnnnnnnnnnnnnnnnnnnnnnnnnnnnntctgcagactttattatatggtggccacagtttagtgtagacatgacttcaaaaagtcccaaatattggctgaatgcggtggttcacacctgtcatcccagcattttgggaggctgaggcagacggatcacctgaggtcaggagttcaagactagcctggccaacatggtgaaaccccatctctactaaaaatacaaaaattaactcagtgtggtggcggatgcctgaaatcccatctacttgggaggctgaggcggaagaatggcttgaacccaggaagcagaggttgcagtgagccaagatcgagctactgcactccagcctggatgacagagcgagactctgtttaaaaaaaaaaaaaaaaagacccaaatatcaaccaaagtgaaggctcaccgaccattttgtcaacttacctgaaacatttttstctctcgtttgctcacatgtcgctttctgtgttc

SEQ ID NO: 486687 - DNA, 483 bp, Homo sapiens
tttcataaacatgtgtattatttatgctaatatatgagtttctaattgttatttttttgaatgttagaaatttctttattattattcttattaagtgccagcttaatactacagaaaatttcaaataacccttgataacccactttctttgctcccacccgaattcttgatcaagagtttttcaagtaaagacatgcttttctggtcttctctcttctgtataaaactttatgaaataaaggcaaaagattgtgtacatcttgctggaaaatgctgctcagggctctggagatggtggctgcctgggctcccttcactgtccaggtcctgaaagaytcttgttcatgaactgtctcttcacaaagcaagtccaccacgtgctgggttgatcattctgagggttgaaaacttgctcacaaagtctcagtccagtctcttgccttagctgttgtaaacaggctctcatcacttcatcttcctgtt

SEQ ID NO: 486688 - DNA, 447 bp, Homo sapiens
ctgacgcaattttgcacatttatctgatcctgtaattttcaaggaatcagggttttgaaggcagcttcagaccagtattggctctgtactcaaaatgtttctcctttattcctagtgaatcaaaatgctgttcacttatgtttacataaacatcacactttctccaaaccctgtgtcttagtctgctgggactgctatataaaaataccacmgactgggtgatttaaacaaggaatgctgatttctcagttctggaggctggtaattccaagatcaaggtatatagatgcagttatagatgcagttctcagtagcgatgtcttggtgatggctgctttcttgctgtattctcacatgatagatatagtgaactgctctctggtttcttcgtgtggggtcactagttaatttccaaagtcctcacctccaaataccatcacactggag

SEQ ID NO: 486689 - DNA, 585 bp, Homo sapiens
gccaaaatagcttactatttgttccagccaaaacctatctataggcctctggcctctcttttcttagagcagttactttagaaaagttgtgattayaaatcctttctctgtccctttaagatataaatttcctactacctacacattatctcctcaaggacctgggagtcatctctttgaaatgcaataatccaggaagatagttcttctatctcgcagttcctttgttaaggtaaagcagaacaaactcagatggcccagtcacattgaccaacccactttaacaccctttaatacttttccgttagcatacagcaacatttacaaagtctctcaccatttcttttggtggaattgagcccaatttacactgaaatttttctctcctactgcagcggtcccaatgaaatctgtctcgcatttttaaaaagtatctagtgattttttttgacactgctcagccactctatcaaacagatattgaccttggaaatgtggttaataacataaaaggcaatgcaaacttattcacaattatttttcagcctgttgaacaaggtcccccacattttcattttaaagtga

SEQ ID NO: 486690 - DNA, 585 bp, Homo sapiens
gccaaaatagcttactatttgttccagccaaaacctatctataggcctctggcctctcttttcttagagcagttactttagaaaagttgtgattacaaatcctttctctgtccctttaagatataaatttcctactacctacacattatctcctcaaggacctgggagtcatctctttgaaatgcaataatccaggaagatagttcttctatctcgcagttcctttgktaaggtaaagcagaacaaactcagatggcccagtcacattgaccaacccactttaacaccctttaatacttttccgttagcatacagcaacatttacaaagtctctcaccatttcttttggtggaattgagcccaatttacactgaaatttttctctcctactgcagcggtcccaatgaaatctgtctcgcatttttaaaaagtatctagtgattttttttgacactgctcagccactctatcaaacagatattgaccttggaaatgtggttaataacataaaaggcaatgcaaacttattcacaattatttttcagcctgttgaacaaggtcccccacattttcattttaaagtga

SEQ ID NO: 486691 - DNA, 618 bp, Homo sapiens
cccagtaaagtggtcactcaataacacagccatatttaacaaaaaataaaggttgtgaagaatagatttgatatttgtacaagataaagataagaagtgtttggtgaaccattagctgctgtcttcactttttttttttttttctgagtttgagacagaatctccctctgttgccagggctggagcgcgatctcagctcactacaacttcagcctcctgggttcattagattatcttgcctcagcctcccaaatagctgggattataggcacatgccaccatgcacagctaatttttctatttttagtagagacagggtttcaccattttagtcagactggcctcgaactcctgacctcaaatgatccacctgcctcagtctcccaaagtgctgagattacaggtatgagccactgtgtccggcccacaataggctgttaagttctagatatttatttgagatgtgtaagttttaacttagtggcaatatcagctagactgtagcttctgtaaaggcagaaattgcatctgacttttatataactataatcctagcatttagcttgtgctataaaatgtgctatttttttwaaaaaaaagtagtcattatttaagaat

SEQ ID NO: 486692 - DNA, 491 bp, Homo sapiens
ctgaacattttcctttaaagctaagtattctttactgcttgttttctctaaaggagaaacagtctgcctcattgataaatactcatgttataccctcataattccttccacttccagaagagcaatactttattgacctgaaagtatggttgtctataaccttctgagtgggatcaaacagcattgtttaaattatcttcctaagtggattatttgttgttgttgttgttgttgctttatttctaaagtaaaatttcatagagtacttctgtttatgaagcttataagaacagacttttctggttacagaataggggaacagcctccaggagctccatccagttgccctaaattcccttgctattcattcgctctcattcctcccmctggattaagttcttctctggaatttttgagttcaggtcaggtaaaatagtttgaagaccacttttctagttgaatccagggttactctgagtacctaagtaatg

SEQ ID NO: 486693 - DNA, 533 bp, Homo sapiens
ttgagattttgaaaagattacctcatagatttgattttgtttaactctgagaactatatatcaaattcatgatcatattctgaaaattatgtgatattttattttagtctttatagtaatctcttaaggaatgtgctgaaacacaaattattaatgtttctgatcattaccctaatagattgtgcttaattaaattgttccagttgtgaagaaartgtgtacacaactcggtaatcaatgttttgtctttcatgtaactaccactatctattaaaaaatacagctctgctactttgtatttttgcatttatacaaatgagatcaatgttgtctcataatcaagccagttgacatggtgggagagattttcttcagttttttcagttgataagagcactccagcaacaatattcccatgcactaactggaagtctgatttaatagaggagttgctgcctccacccctttcggaagccacagcagggaggcctggcttggggttcattagagtctggtacgatgacaacagactg

SEQ ID NO: 486694 - DNA, 619 bp, Homo sapiens
gccaaagtaaattttaactctcccatccagtaatcttccatctggactcccaggtgattatcttcttctggttataacctgtaaaatgactatcagcctcctccttgtctcttctctttctattatactacaagctctctgaaaacagtggacatatcttgtttactatttagtccccagaattatagttttcagtttctcctttgccagttgtagcagactatattttctaaagacagattcaccagtatatattccagactgcctggtcttattgcatggaacactgacattcctttagaccctgtcattccttgacacttgagaggtgtgtctgtctactcctatcccctaacctgagtgaacatttgtaattgcttcaatcagtagaatatggcaaaagtcatagtgtgtgacttttgaggctaggtcataaaaggcattgccttggtatcttggattgctctctctgaataagaggcctccatggagggaaatgagaccctckgccaacagcacctatttgccacatgagtgagctaccttggaaatagatcctccagtctcagtcaagactcaagtaactattgctccagccagcacctgactacaatctcat

SEQ ID NO: 486695 - DNA, 616 bp, Homo sapiens
acagaaaggcttaaggatttgctgaagtgaagtggggttcaatcaaggaagcctggcatgattccctttctagttcattcttcttctcctggaggaggacttcaaaatgcctagctcctaactctgagcagctaaaggaagccaagtgggaagagaagcttggcagagcagccgtggcgatctagaacagaacatcagtgtgaggtttggatgatgtgagcacagccaggtcatgttttcctgattctcagtggatattacacacatgcgcgcgcaagcacacacacacacatgcgcacacgcacacacwcatacacacacacacacacacacagtttcccttgttgggtcagggagcagaaggatgttggaacgtagttggagcgctggttggcagcaatgctctgtttgacctggtggcaaagtggcccacccattacccacactccaaccacttaccagagcctttatattagaattttaaacacactcaaaatcaaacacattccaaggacaggccccattttgtggggcatggagcaagaatgaaaatgaaaaccaacatatcatatgtctaaatatttaaaaattctagccaaagctaacaaacttgggt

SEQ ID NO: 486696 - DNA, 650 bp, Homo sapiens
catggctcctctgtagtacgctgtcgtgattgttcggaatctttcctgacccgctgtgtccctaaaatatgaaacaaaggagagtggtttttgaagtcatcaccagcatcactgaggagaaaccctgctgtaggagatgtaattctagtctgctcagggtgcagtggtcacagaggaaaggagaatgagacacagagggagccctttgcacatctgcaagctggaggtggtggtggccacaggagcctgtcaagagctcacaatgacctgggtgaaaaactcagaccttgataaaagcagcaacagaaaaatacacagaaaaatcctgctaggaactggtgtgttatattagtcaaacacacgtgggagggaatagagaatagttctaaattcttcgactccccgagatagttataatcctttttgtaagtgcttaatgattaaagcactttgctttcttgcctgaatgtctgatttctgtataaagcaagcaatcragctggacttattactgtgtacattctgctcagtagagcacaataaaatagatctcctcaagaacttgttcagctatggagcccatgatttcatggggacctggagttcaacacataaatcttgacaacgttttcaaagacttttaaacataa

SEQ ID NO: 486697 - DNA, 624 bp, Homo sapiens
tatgtggcccgacaatgccaccgagggtgtccccgggctccaccccgtgcctcttcattatagaatgactgggcagagataagggccagattactttgctgtattgaataattcaccataaaaatgattgcaaccaggtcagcgtatcatgatgactgcaagccacccaggaattcggcaatgcctctggctcttgaccgccctaagtccccttcactccattgcacaacccagggtcaggcgcaggattgcccctagcctccaagtgggaaagaggaggtggctctggctaagccaagctcccagagctcccacagccctcggatttttagtgacagtgctagggccacactccacagccccagtgacatggaaacaccttctggttgtagagtttaccgggcttatcccaatcacgtggcatggaaacaccttctggtcttagagtttaccgtgcttatcccaatcacgtggcatggaaacaccttctggtygtagagtttaccgtgcttatcccaatcacgtggcatggaaacaccttctggtcttagagtttaccgtgcttatcccaatcacgtggcatggaaacaccttctggtcttagagtttaccgtgcttatccca

SEQ ID NO: 486698 - DNA, 624 bp, Homo sapiens
tatgtggcccgacaatgccaccgagggtgtccccgggctccaccccgtgcctcttcattatagaatgactgggcagagataagggccagattactttgctgtattgaataattcaccataaaaatgattgcaaccaggtcagcgtatcatgatgactgcaagccacccaggaattcggcaatgcctctggctcttgaccgccctaagtccccttcactccattgcacaacccagggtcaggcgcaggattgcccctagcctccaagtgggaaagaggaggtggctctggctaagccaagctcccagagctcccacagccctcggatttttagtgacagtgctagggccacactccacagccccagtgacatggaaacaccttctggttgtagagtttaccgggcttatcccaatcacgtggcatggaaacaccttctggtcttagagtttaccgtgcttatcccaatcacgtggcatggaaacaccttctggttktagagtttaccgtgcttatcccaatcacgtggcatggaaacaccttctggtcttagagtttaccgtgcttatcccaatcacgtggcatggaaacaccttctggtcttagagtttaccgtgcttatccca

SEQ ID NO: 486699 - DNA, 647 bp, Homo sapiens
tagggaaagaagtatgtatcaccctcagggcctaattgaaagaagtatttgattgaaggatgtctcattattgggggatttaaaattttctaatgggtcattgaaatgttgtataatatatttacacaaaaatttggataggacagattacagggctttccaggcagccattgaactggaaaaatacttttacctgctataattaagtccttctaatcaagtaaaagacatttctagttatrtgtaatttgactatgatttccccaatggttgcccaaaatggaatgggcttcattgggaggccttacattttccactcaggaaatgttcaagaaaaatctgatcggccatttgttgaggatatttcaaaaggcacccctactctgagtgggaagctggcctcagtgacaccctgaatgtgagaggtttccatgttgtttccaggattggttgctcaggactgtgtcaggcactgtctataagaagctggttactgttctctgacaatcctgttgttaattctcatggaacccaaagtggaaaggaccacagaaaattgtaaataattagtgcctttcatctttcctcatgattcttatttttctaacctttttttaaaatttgagacggagtcttgctccgtcgcc

SEQ ID NO: 486700 - DNA, 491 bp, Homo sapiens
tcagagtatggctcctgggacgcttttgcttattttttgtacggctttttcgagttggcttaggcagaattcttctctgaacgataaagacgacatgcttcccactgaactttttctccaattcgcgtactagccggacttgaattttctggaaagatttcagttgaggaatgggaacaaagattatgatagctttccgaccaccaccaagttcaatttccttggctgccgtaatattcagctccctgagctgagctttgaggtccgagttcatctccagctccagaagagcctgggagatgcyggactcgaactcgtccggcttctcatcattgggcttcacgatcttggcgcttgaactgaacatggccttctcctgggagaactcgccgagcgccggcttaggaagaggtcttctttaactagaactgaaagtagttttatggttatttgggtgagaatttaagacattaacttatattggtggttct

SEQ ID NO: 486701 - DNA, 588 bp, Homo sapiens
actaaggattttataagtagaatttaattgttgcctttaactcaatgaataaatgttgaaaaaaaagtatgcatatgtatatagaccaaaactttattttatagcaaattcttgtacctagcatgaattatgtaccacatataggttttttatcaaaactgacagagaagggtaataaatcacatttaccttaaaaacccaactcacccatttaattttgtgttytttcttcttatacttaacaataaagtggttaataaacaataaaagagatggactttggttttaaaaaatgaagctttctataatttaaagaagttttatagaagacatgtttcctaacttcctagatttcccctctggtttattaaaaaacatgacataaaaaacatgataaaagccgaacaattattagtcactttctatcatttcagttgaattataaaattttttttctccagacgcttgtaaataatgtctgtttttctatatttgtctactatagacgttgtggagaaaatataataaagggaaaatgagaatggggggaaagcagaaaaaataacaccactctcaaatatgggagca

SEQ ID NO: 486702 - DNA, 588 bp, Homo sapiens
actaaggattttataagtagaatttaattgttgcctttaactcaatgaataaatgttgaaaaaaaagtatgcatatgtatatagaccaaaactttattttatagcaaattcttgtacctagcatgaattatgtaccacatataggttttttatcaaaactgacagagaagggtaataaatcacatttaccttaaaaacccaactcacccatttaattttgtgttctttcttcttatacttaacaataaagtggttaataaacaataaaagagatggactttggttttaaaaaatgaagctttctataatttaaagaagttttatagaagacatgtttcctaacttcctagatttcccctctggtttattaaaaaacatgacataaaaaacatgataaaagcygaacaattattagtcactttctatcatttcagttgaattataaaattttttttctccagacgcttgtaaataatgtctgtttttctatatttgtctactatagacgttgtggagaaaatataataaagggaaaatgagaatggggggaaagcagaaaaaataacaccactctcaaatatgggagca

SEQ ID NO: 486703 - DNA, 588 bp, Homo sapiens
actaaggattttataagtagaatttaattgttgcctttaactcaatgaataaatgttgaaaaaaaagtatgcatatgtatatagaccaaaactttattttatagcaaattcttgtacctagcatgaattatgtaccacatataggttttttatcaaaactgacagagaagggtaataaatcacatttaccttaaaaacccaactcacccatttaattttgtgttctttcttcttatacttaacaataaagtggttaataaacaataaaagagatggactttggttttaaaaaatgaagctttctataatttaaagaagttttatagaagacatgtttcctaacttcctagatttcccctctggtttattaaaaaacatgacataaaaaacatgataaaagccgaacaattattagtcactttctatcatttcagttgaattataaawttttttttctccagacgcttgtaaataatgtctgtttttctatatttgtctactatagacgttgtggagaaaatataataaagggaaaatgagaatggggggaaagcagaaaaaataacaccactctcaaatatgggagca

SEQ ID NO: 486704 - DNA, 660 bp, Homo sapiens
aagaagttatggtgctgacaatcccccagggaccagtggtccactcacttcttatgtcggggaaatccactcgacagcaaagggctctgtgctggctgggaatccccactgcagcagcaatctttgtggggctgagctgcaaacgcttttcagatttagcacgcagcctcatgaggaggaakagttgcagttgcctctgctgagaaacaaagctgatgacactgaaacatctgggaaatgggaatattatttctagaagatgaaaacaaatgtccaagctggaagtgctgctggcactgacctttgtgtgcctggttctcccacccccaaatcaatttgtacactcctaggatctgtgtaggtggaaagactttgctgtgtatttgtaactcagctcattatctgagggtaagaagaaaagaggcttggcgtggctttcagaggaagtaaggtgaagactgttctcccccaaacaactaaataaaccacgtagacctttcatgactcagaaaccacagactccacagctaacatgcatctattcattcttgtctacaagtattgattgagagcctgttgtgtgactaacacagtgcttgggttgagaacgtaatggtaaaacaagattcactctctcccttcaaaagcaggtaatcccac

SEQ ID NO: 486705 - DNA, 350 bp, Homo sapiens
acaatttccttaaaacatcaataaaacagagataaacaatcaccattttatctgmtagtaaatgttagctgcacaaaaatacacttccaaatagctctaaaagtagcttaaggtaacaatttatttagtttttattgctgctgagcagttctattctaggctggtcttggctggtctcaggcttactcatgcatctgtgatcagcttgtgtgttgtgtgttggctagggctggctggtcatggatggcctcagtcccgtgtctggttattgcctgagatgaaagagaagcaattgggccacacatgtctccacgtgagttctaaatgcagaaatatggcatacaccattc

SEQ ID NO: 486706 - DNA, 316 bp, Homo sapiens
aactgaagccacagggatgcatgagatgagctcttaacataaaacattyatttcgctgtgtagtaaatagaaatttatcttttcattgtcaatctttttctactaatagatatctctggagctaggtaattcatagttaaagtacatttttgttccaattaatccctcaaagatagaacctgtgacaatccatttctataagtataccaatatctattgttaatttattaattaaacatattatccttctactttaatacataaacagaaacagaattacactttacttccaactcttaactgagttatagaaatc

SEQ ID NO: 486707 - DNA, 316 bp, Homo sapiens
aactgaagccacagggatgcatgagatgagctcttaacataaaacattcatttcgctgtgtagtaaatagaaatttatcttttcattgtcaatctttttctactaatagatatctctggagctaggtaattcatagttaaagtacatttttgttccaattaatccctcaaagatagaamctgtgacaatccatttctataagtataccaatatctattgttaatttattaattaaacatattatccttctactttaatacataaacagaaacagaattacactttacttccaactcttaactgagttatagaaatc

SEQ ID NO: 486708 - DNA, 617 bp, Homo sapiens
ggtccccctgcaagctatgatgtcctccaacccacacctgatcacaaccagctccttcttaaatgactctccattgccctcaagagaaggtgcaaacatccccaagactggcacctgctttcctctccagccttcctctcccacaccccctccccacggactctcagcccttaggaatccactcagagatgtttaatacaaggatacctgtttatgctaggaggttttgttctttttcttatcttccttcaaattggtattctcatttacaaatgccaagtgtctccacccagtaagaagtaaacttctgcaaaataaccataagccatcaggcacatatgatgtagcaggaatcatgcccactaatttacataaaatgcckcattttaggctgaacactccaaacttctttcagttcctaggccgaccatattttctttctccttggggactttgatctgcagtaatcgccggctaaaacctcctccccagccccacctctgccaggccaacatctacctgtcctctggatctggaatccatggtctcttccttgaagacaaggaggagtccctgaaattcgctgtcttggtgccctgtatttgcccctgtatttt

SEQ ID NO: 486709 - DNA, 617 bp, Homo sapiens
ggtccccctgcaagctatgatgtcctccaacccacacctgatcacaaccagctccttcttaaatgactctccattgccctcaagagaaggtgcaaacatccccaagactggcacctgctttcctctccagccttcctctcccacaccccctccccacggactctcagcccttaggaatccactcagagatgtttaatacaaggatacctgtttatgctaggaggttttgttctttttcttatcttccttcaaattggtattctcatttacaaatgccaagtgtctccacccagtaagaagtaaacttctgcaaaataaccataagccatcaggcacatatgatgtagcaggaatcatgcccactaatttacataaaatgccgcattttaggctgaacactccaaacttctttcagttcctaggccgaccatattttctttctccttggggactttgatctgcagtaatcgccggctaaaacctcctccccagccccacctctgccaggccaacatctacctgtcctctggatctggaatccatggtctcttccttgaagacaaggaggagtcccygaaattcgctgtcttggtgccctgtatttgcccctgtatttt

SEQ ID NO: 486710 - DNA, 592 bp, Homo sapiens
ctcagcctcctgagtaactgggatgactggcgcatgccaccacgcccagctaatttttgtatttttaatagagacgaggtttcatcatgttggcctggctggtctcaaacttctgaccacaggagatccacctgcctcggcctcccaaagggctgggattacaggcgtgagccgctgcgtccggtgccttctactttccgtctctatgattctgcctactctaggtgctttatcaaagtggaatcacacagtgtttgtctttggtgactggctcttttgcagaatgtccccaagcttcwtccatgttgtagcaggtgcccacccttcattccttgttaaagctgaataatcctccattacttggatgcaccattttctttcttcattcattcactgatggacacgtgggttgcttccaccttttggctattgtcaataatgctgcagcgattcccaggctggctgagtaattggtagtctacaaagctgcttggcacagcgtccccaatctatagagagtagttgtgggttcaaagaaaacccacaagactttagagccaaaatacatctggtttccaatgtttgaccggcc

SEQ ID NO: 486711 - DNA, 589 bp, Homo sapiens
aggctgtgctcccaagtccgggcctcttttgattttgtctccgcgggctgactcctttggagtctcccgttaagaaatcaaatcactcttcttcctggcagctcccctgcrgtgtgtctttccactctagcttgaaattctgactttttggcctcttctaaaagggtaggccctcttctccccacatctgcagccctttccacagatgaggtgctgctgtggggtacagactgagctggacctcagtccacgatcttggtgacaggcaccatcacagagccccagggtgcagctgccaagtgatttcaatttgctgtggccttgtgcgaagcatcattgcatgtgaattctatgtgcctccagctacattttggttagtgactctggcccaagaaaaatatgcagcatcttgtgaaggcttggtgagagccactttctccactgcccccatgtcctccagcttgccagagtccctactccctttggcccctggccaggtgctgtgcagtgctcctgttaaagtgtggttggacatctctgtaaagctcttggggtaggttagcattgagacatgaatagtcaccgacga

SEQ ID NO: 486712 - DNA, 589 bp, Homo sapiens
aggctgtgctcccaagtccgggcctcttttgattttgtctccgcgggctgactcctttggagtctcccgttaagaaatcaaatcactcttcttcctggcagctcccctgcggtgtgtctttccactctagcttgaaattctgactttttggcctcttctaaaagggtaggccctcttctccccacatctgcagccctttccacagatgaggtgctgctgtggggtacagactgagctggacctcagtccacgatcttggtgacaggcaccatcacagagccccagggtgcagctgccaagtgatttcaatttgctgtggccttgtgcgaagcatcattgcatgtgaattctatgtgcctccagctacattttggttagtgactctggcccargaaaaatatgcagcatcttgtgaaggcttggtgagagccactttctccactgcccccatgtcctccagcttgccagagtccctactccctttggcccctggccaggtgctgtgcagtgctcctgttaaagtgtggttggacatctctgtaaagctcttggggtaggttagcattgagacatgaatagtcaccgacga

SEQ ID NO: 486713 - DNA, 635 bp, Homo sapiens
ggcccatggaagactcctgacccaggcttgttcactgaatgaaggcattccacatgttctgtgatgcgggcaagtcattcattcatttatgcatttagaatgagctttgagaatatggcagcctacaaaatggacatggtcctgccttcagggagcttctggtccagcctatggcctcttgcctggaaagagatgttaccacgttattaggaggtagtgtggtgtggtaagtgctttcgtgggaaaagcagaggggattrtgggagctcagagtggggtacccaacctggatgggaggtcagagaatgccacagaatctgtttggccttcaatcactaatctgtatagttagcaatatggacaagctggtctttaataactcataccccttcatttctaattctctgtcatgtgttctatgtggttcctgagggagatctccaaccagggagacaaatgaaagaatgaggatttagctttatggaaaaaacacctaaaggtggaacagtctccaggtacacaggctgcctcacaaggtagttattggtagcagcacagtaaaatgtctaggagatcaatgacttaagccaccgactgttttgttattcttgtgattctgtggggtgacagggctc

SEQ ID NO: 486714 - DNA, 635 bp, Homo sapiens
ggcccatggaagactcctgacccaggcttgttcactgaatgaaggcattccacatgttctgtgatgcgggcaagtcattcattcatttatgcatttagaatgagctttgagaatatggcagcctacaaaatggacatggtcctgccttcagggagcttctggtccagcctatggcctcttgcctggaaagagatgttaccacgttattaggaggtagtgtggtgtggtaagtgctttcgtgggaaaagcagaggggattatgggagctcagagtggggtacccaacctggatggraggtcagagaatgccacagaatctgtttggccttcaatcactaatctgtatagttagcaatatggacaagctggtctttaataactcataccccttcatttctaattctctgtcatgtgttctatgtggttcctgagggagatctccaaccagggagacaaatgaaagaatgaggatttagctttatggaaaaaacacctaaaggtggaacagtctccaggtacacaggctgcctcacaaggtagttattggtagcagcacagtaaaatgtctaggagatcaatgacttaagccaccgactgttttgttattcttgtgattctgtggggtgacagggctc

SEQ ID NO: 486715 - DNA, 635 bp, Homo sapiens
ggcccatggaagactcctgacccaggcttgttcactgaatgaaggcattccacatgttctgtgatgcgggcaagtcattcattcatttatgcatttagaatgagctttgagaatatggcagcctacaaaatggacatggtcctgccttcagggagcttctggtccagcctatggcctcttgcctggaaagagatgttaccacgttattaggaggtagtgtggtgtggtaagtgctttcgtgggaaaagcagaggggattatgggagctcagagtggggtacccaacctggatgggaggtcagagaatgccacagaatctgtttggccttcaatcactaatctgtatagttagcaatatggacaagctggtctttaataactcataccccttcatttctaattctctgtcatgtgttctrtgtggttcctgagggagatctccaaccagggagacaaatgaaagaatgaggatttagctttatggaaaaaacacctaaaggtggaacagtctccaggtacacaggctgcctcacaaggtagttattggtagcagcacagtaaaatgtctaggagatcaatgacttaagccaccgactgttttgttattcttgtgattctgtggggtgacagggctc

SEQ ID NO: 486716 - DNA, 410 bp, Homo sapiens
cattcaggtggaatgagcccacacattctttccagaaggacataaagaggaaaaaattattacttttacctccaaaataccttgcaagaatatgctttcctgcagtgatttgaaaaatcctcccagttaagttctcttatcaggaagggatattatcccctagtaatcagagagcagagacagacgagttgtccgatttgcagaataagcactttcakgggttacttgactcttaggatacatcactgcagatcccactgcaagtgctagttagaatcttggaatccgaaccagatgcaagcaccttttcatctgggaattaaaaacaaaatcaaaaccctagcagcacattttacaaaatgtagttgaattcattgcaaaaattattgttaatgggttatttgtaagaa

SEQ ID NO: 486717 - DNA, 523 bp, Homo sapiens
taaagagatatgatatgaccctactcctggttccattttaaagctccaagacttcccaggcgagtcccttaaacttgctcattgcctcagtttttttattaaatggataacgatatcattttggtgcaaacgtaaatgcagtaatggcaaaaaccgcaattaggtttgcatcaacctaatacttgagtgttagggccatattccttaacctccctacttggctacagaaattctgtcttacatccttatcccccaaggttccccaacttttggcaggtgatccacaaatgttgcttggtcaaattaattaatcaatccatcyatcgttcttgaccatatcaaagggacactgtgagaaagaaatggcacaaacatgaaaacacgtagtgaggtgatgaaaacgtacgagcccgaacaggctatcgcaggaaccagctgctggcaacgatgctgaagacatttaaaagtcaaatacctgaacaagaatgcagctcctctctccagagcacttcaggaggccagc

SEQ ID NO: 486718 - DNA, 553 bp, Homo sapiens
atcgttcccgttgttcctgtaaggggtgttttattttatatatttactcattaatttttttaatgctgaacaactatttggagaccgctgctcttctggctttatctaaatcatctgcagctacatgaattgttttgttttgttttgttttgttttgttttttgctacatcttcctggtaacagaatatcactgatcttcatcacctttggctgtttttcttcstgcatataattttgggttacatcctcatttagtttacgatagtgtttgtgtttgtctcttcatctttggagggtgctcttttagtggagaatatagcagaaacgtcatgacggcatcttaaaatatgagtgataatttacttctttggttcaccttagttattttctcaatatttctttcatctgcacaagaaagtacataccatgaatgtgaaaatgttttttaatatcaattaaaattaaatttaataagtggcttgaaaatataaagtttaactctgtaaaaatatattttgattgttgattattgcttttaaaacttgtatttca

SEQ ID NO: 486719 - DNA, 633 bp, Homo sapiens
ctgcagccaattattattttagcaagacagataacaaccacctgaccataacctgatagtcacctgacattcctgggttgggcagggacctctcctgccctgctcatgtctgcctaactacctactctaacatttcccccctcaagagttcaagacccaatttgttgggaaaggtcagtcttttgtaactgcttcctgctgacagagaggtggtggtggttgttctgtgggtcttattctcttgctagctgttagggcatggttgcttcgtgggttagtgaaagcagtatccagccaggtccgagagagacaggggcaggattttgcctctgtcgtgtcccacagatgggcagttgaggggtcctctgtagaagtgtgactcaaatattgagaggatattatccctcactgaggatcatctggtgattgatggcccatccctcttgtttcttctgagcctcagccatggatcactggttggttcacaggaataagcagagtcagtctaayttgcagaggaaaaaaactcaaaaacaactgatgagactagaatcaaattacaggtgtaccacaattctcaagacataatttttctctttgcagtcctcattcttattaaaaacaaattatcac

SEQ ID NO: 486720 - DNA, 489 bp, Homo sapiens
gtgtgtgtgtgtgtgtgtgtgtgtgtgtgtgtgtgtgtgtgtgwgacaagatctcactgtcacccaggctggagtgcagtggcgcgatctcagctctctgcaaaacccacttcccaggctcaagccttcctcccacctcagcctcctgagtatctgggaccacagatgtgtgtcaccacacccagataattttttgtatttttggtagagacgaggtttcaccatgttggccaggctggtctcgaactcctgagctcaagtgatctccccacctcggcctcccagagtgctgggattataggcatgagccactgttcctggctgtgaggaggaaattttgagaaacactgataacacaaaactcatttgacaagtgaggaaattcaggttcaaggagttttgtcaccttttccaaagtcataccgaaaccactaacggaaaggccctggaatcagactttaaccttatcacagaaatgtattcccgttt

SEQ ID NO: 486721 - DNA, 550 bp, Homo sapiens
ttttcatctctcggtcttaaataagaatggacagccaaaagccatcaaaaaattgaagcaagcctgtaatattaaagacagtttttgtttgtaaattgttrtcttatatacattgactctcttcccttcaagggcatttgaatgtttgtttgcttttgattattagtaatagcctcagagggacagagggatcttggcattcaagaggcagcactgagctcaagagtgcttacaaatggtggaatcaaaatctggttctgttactgatagcaatgtgaaatcaggaaagtcaccggactcatctgtacctcaattgcctcatcaataaaatgaggaataataagccctacatgcacacccggtgtcactcacctataaagaaagagctaccattgtacagggtaccattcacatcaaatgaatagaaatagctttctctggagttgtgcagtgtccaacatgcacagccatatgaggaagccctgtttggcaaaactcccagggaatgcccacagagctctgcatgcactgccctctcccaggcgtcata

SEQ ID NO: 486722 - DNA, 582 bp, Homo sapiens
catttggagggtgggcaaggaagggaagggagaacatcaggacaaatagctaatgcatgcgggccttaaaacctagatgacaggttgataggtgcagaaaaccaccatggcacacgtatacctatgtaacaaacctacacactttgcacttgtatcctggaacttaaagtaaaataaaatatatttaaaacaagaagttttaggttccatataaatcaccgaatgctctagaaatcacccgagtgctatttactttcaatattctagaggttggatcaagaacaaggccctgaggagtctcagccagaaactgacacctcagacatggatcctttagttggtttyaccattgaagatgtaaaatcagtgctggatcaagtcacagatgacattttaatcggcattcaggtactcagtattgatagtatgctcacttactttattactggttaattagccaaccttaactttaatgtctataaacactccccacactgccagcatgagcgatgcttatgacgaagttcaatttaacagcttcacataattctcagttgagtcatcagagattcagtaagatca

SEQ ID NO: 486723 - DNA, 632 bp, Homo sapiens
agctttctaggtgaagagagatgaggcagcactaactatctaaagttaatgaataggaagccaagaattgaacttagaacaaactgagagttgaaccaaaggcatttgaagtgttaatttattaaataacccttcgctttcaaggcttacaataaaaaatatttgtggtcaggaaagttaggagacaggaaactgaagtcttctaaagccatttttatgcttggaatgaaaccaaacctttatccaatcataaacctcgtgtgtttatctgcaagggagtggagagggagaaagaaagggtagcagtatttgatttctatttaaagttcctctcttcgccctggatttcggtactaacggggtgtctccatgtggcgtagaggagactgctgtctcccctgcctctccctgcctttatccacagcacccaccctctgagttgatgtgcatgcattggctcagtttccccgctttagtaaaaattcacagggaagtgtgaaacggtttaatgattaaagctgaacttgatctgtatcaaagagttcytttccatcctggaaatctgagcctcttgaaaattgtttagatccaagagagagactacccaagtgtccacacaggccagcttgaaa

SEQ ID NO: 486724 - DNA, 655 bp, Homo sapiens
attaaaatcactcttgtcaattctactgtattttcttcaacttttcactcttctcactttcattccccaaacttctaactcatctttcccaaggattaatgcttcagcaaatggtctcgcttgttatttcattaggaaaaaaacaaaacagaggtgaattttccccacatcttctaccaaccaccaacacgcccacattagtactcactcactygctctcagtcctgttaaagtggatgaactctcttggctcatccactttaacaacagcccctcgacttgtccatttgaacccactccctctcatctattcaaggtcatcaatctagcaattctcttctcttcataatcatttttttatacaattataagctgaaaaaacatgttacaacatcttcaatctcaaaattctctctagtgcctacatctccttccactgccccatttctctgtttctcttgtaagtgttttgtgctgtcacatgtcacttaactatggggatatgttttgcgaaatcatccttaggtgatttcttcattgtgtggacatgatagagtgtacttacacaagcctaggcagtatagccaactccacacctaggctatatgtatacacctagatatatacatttggatgaatctttaccatttgtaat

SEQ ID NO: 486725 - DNA, 655 bp, Homo sapiens
attaaaatcactcttgtcaattctactgtattttcttcaacttttcactcttctcactttcattccccaaacttctaactcatctttcccaaggattaatgcttcagcaaatggtctcgcttgttatttcattaggaaaaaaacaaaacagaggtgaattttccccacatcttctaccaaccaccaacacgcccacattagtactcactcactcgctctcagtcctrttaaagtggatgaactctcttggctcatccactttaacaacagcccctcgacttgtccatttgaacccactccctctcatctattcaaggtcatcaatctagcaattctcttctcttcataatcatttttttatacaattataagctgaaaaaacatgttacaacatcttcaatctcaaaattctctctagtgcctacatctccttccactgccccatttctctgtttctcttgtaagtgttttgtgctgtcacatgtcacttaactatggggatatgttttgcgaaatcatccttaggtgatttcttcattgtgtggacatgatagagtgtacttacacaagcctaggcagtatagccaactccacacctaggctatatgtatacacctagatatatacatttggatgaatctttaccatttgtaat

SEQ ID NO: 486726 - DNA, 527 bp, Homo sapiens
caagagggtaaaaaatttgatctatttactkctctatctgcaacttctatgacattgccagtaggcattgaacaattttgttgagttaattggtgaaattgctaagagtgatagttaatttttcttcctagtttatgaggttctctgcagaacactgtctcatgtgtagtcttattgatgcctcaataattatatgaatgtattactctttgctatatgttataaatgaggaaagagatttagaaatgtccaagggcttacatgagttcagaggagtaggctgtggcagaaggaagatttgaatcaaggctgtgtgtctacttggcttatgttctcaactgctactctatttgactccttacacttgaaatattctaaaatcacaatagtcttcattctatttatttagtaggactgcacgtttcttgaacctaacttttttcttctctcctcaacttttgaaagtaaatcattttgaattttaatttgagtttaggcaaagaagacatgggtgactccatttctct

SEQ ID NO: 486727 - DNA, 527 bp, Homo sapiens
caagagggtaaaaaatttgatctatttactgctctatctgcaacttctatgacattgccastaggcattgaacaattttgttgagttaattggtgaaattgctaagagtgatagttaatttttcttcctagtttatgaggttctctgcagaacactgtctcatgtgtagtcttattgatgcctcaataattatatgaatgtattactctttgctatatgttataaatgaggaaagagatttagaaatgtccaagggcttacatgagttcagaggagtaggctgtggcagaaggaagatttgaatcaaggctgtgtgtctacttggcttatgttctcaactgctactctatttgactccttacacttgaaatattctaaaatcacaatagtcttcattctatttatttagtaggactgcacgtttcttgaacctaacttttttcttctctcctcaacttttgaaagtaaatcattttgaattttaatttgagtttaggcaaagaagacatgggtgactccatttctct

SEQ ID NO: 486728 - DNA, 313 bp, Homo sapiens
aaaactgcgactcaaacccaggtcctctgatatacagaatcggtatgtattatcacatattataaataaagagagagactaacttatatttatagtcaactcaccaggggtaagagagaaattacgtcaytacacatgtccctctaatttttccttaaagtagcttttagaaattgacttcttgacctgtggacctgttcatctttaagtagatgctggtgattacttcatttttataaaattaaatttcagattaaacccctttttttcactgttttccctcatattttcaaattctgataaacacaaaatt

SEQ ID NO: 486729 - DNA, 519 bp, Homo sapiens
aactaaggagcaaaatcaagggccattttggattaaagtgacttcatgaataacctcatttgtagaatgctaggaaaaaactaaataggaggataactaagctgatttcaaaatgacaaaggtattgtttatgatttttgcctattycctcagccatcttattttaaaacattggtcaaataaataatggttgaaaattctaaacaagacagccatcaaagtaaaagaaaagataagtttaaagagtcaagtccaaagacaaagaatttggatttagacacatggtgaagttcaactggaaatattgtggcattcaggagaagggactagcctgggtaaagaaattcgatagccaacagaatataagagttgaacaaagcaacgggatgatggcgtaaaggcgagggctgtagggcattaatatttttgaatacttaccctgcttcagatgctttacacacattatccattgattctcacaacaatttataaaatggccatcatggcagaaagcataag

SEQ ID NO: 486730 - DNA, 559 bp, Homo sapiens
ttttttctgtaagttttttcatttgtaattcatatgtcaggataccttcttctgactcctttcttatctattcttctcttaatatttgtactcacactgtatatataatttgtgtgttgcatttttctcaacattactgattattaaaagcatttttatgtcattaaagtgctcttcatttttaattactacataaatattctattgygcaactgtaccatgatttacttcctctaattcagaatatttgacaaggttttgtttttgactgcataagtagtactgtagtaaacatacctgcttacaatttttttggcatttcttattattccctaatgatagatttctataagtggaattaatgtccacaaggtataaatgtttttaggcttttcaatcaaactgtagtatccaccaatttatgttattaagttttaatgaaaataatgattattaaatctataataaaaataaaaatatcaaacattaatagatgtcttttattagtttatatgataaggaatcccaagataatgcaaatttggttctcaccgcaata

SEQ ID NO: 486731 - DNA, 567 bp, Homo sapiens
ctatttttaaatccttctgttattgtgattgtgtgatattatgaaactttgctgctgaattactattgaccctggaaaktctctgcaagtcactgaacctcagtttcctaatctataaaaaaaaggtaaaaacagcaggaaagtgatgagggcatattccattaaatgcttataaggctttttgcaaaacataaaatgttgataatcacttctctagcaagagttcacttgccataaaattatctggcttgctcagttctttggaaactgctcaggccaagtagcattcttttacctgaattgtgtgctgaacagcatcctcccttcaactagcagagtctgaaaccaaatgagtgttcaattacgatgacacttctcttctaaggtgagcccatacaggctacgataataagagtcccaattaagctgaaattctctgtggatttatttatgttttactagtatggacaattctgagaggggctctggatgctaaccattgattaagtctgaaggactcttcattttcctttctctttctcccatcttgcatttttagtcattctc

SEQ ID NO: 486732 - DNA, 621 bp, Homo sapiens
attacttgccttccatatcagataggcaaagacagtctcagagacagtaaataaggatctgctcaaggacacacaagtagtaagtgacaatgcccagaccggaattcaggctttctgaccacaataccactacagaaagagctagaagtaataaaattttatagattaaggtgtataagggagtgggaatagtgtactcagaggtatagaatataagaatcagaatcaaagagaaacaagcctcaaaatgcaagtcctgaagcaagattgttaattgatagacagaataacatagaaatagatctaggtagacccaaagattttttctgtctctttaaagagccagagagtgaatatttttagttttgcagcctatacagtctttttctaaactattcaactctggcctcacagtgtaaaagcagctayatatgtcaacaaaagggcatagctatgttccaagaaaattttacttacacacatgggtccagttttttgggccatagtttgcaggctccatagtctagatcaatgtctccaaacacaatgtgataacatcacctcaggggttgtttggaaatgaagggggagcttttttgatgattaccctcatgggagtta

SEQ ID NO: 486733 - DNA, 623 bp, Homo sapiens
aacatgcaaaaggtatatttagcactgttgtctttttgaatagacacatttctagaacctcgctataatactgttcactgtatctaacaattcccctgaaaatttggagaagttccaagagggttatgtgattaaataccaagagataatagagctgcaccaaagatggtctcatggtgcatgccccaagatcgagttgtatgtagaggctccaggcaatttctttcaaagrgttgaagatctcagtctacaaccagtagctctttccaccccttggcctctgctcatggggtttgtcattgattgcaactttgcccttgaatcctccacaaacagctttgttcagatcttttgttgccggtgtgattcacagctatcgatctttcaacagtctacaagtgtgctactttgctaaaaattctttggagagtttctgttcaccctatatgcaatcttatatttctcccacaatcaataattttccaagcatgtgctctaagtaataccaaaacaattcatgatcaaaatccttcaaaaatgatcattgagtaaaatacatcatcagtactctttagcctagcattcaagattctccaggatctagcaaaaccacttctcttccc

SEQ ID NO: 486734 - DNA, 640 bp, Homo sapiens
agtgtaccaaatagtatggaaacaccctcaagacaggaaagaactccctcaaatgcaaggtggttcattcagaagtccagtgtacctagaacaaaataagtgagcggaagagtggtaagtgacaaggtcaaaaatgggaggcaaggtcaggtcacgtaggactgtgcaggacaaggcagggagtttgaatctcactgaagtggtgacacccttggataatcttccatagaagagttaaataatatggtttcattcattttaaaatatcatctttttcttgatatataggctaagttgcaaatggactaaaataaaagagccaagcacagttaggaagggattgatgaatctagaaggagatctagaaagaactagatctagaaaggactagaaggagatgatagagacaaaaataagtagatagatttaagatattttttgatagaagagccctgaatagttgctgatggattagatattagggatgaaggaaagtgtgttaacagatgatttacaggyttttggcttgagcaattgagtagatagtaggggtattttattgaagaagacagaggaggaacaaacttgatggaaagggtggaagacaaaccagttcaacttgttaagaataatattgtaa

SEQ ID NO: 486735 - DNA, 594 bp, Homo sapiens
tgaagcactagcttcttcccccaccttcaggaatgaaatcactcctccatattaaacacctggataagcattgctcaactttattaaatgaccgtttgtgaagtgtctgtgattaattgcaatcaactcatttattgagtgctatccggcactagaacagatgcatttaacaggagataggataaagtcccaacctttaaagcatatggaatttacatttatgattttttwaaaaaaaaaaagactaaagtaatcaagacaaactcaagtatctttctatgtaatctaaagcaggggtctgctttatgaaaaaaatgacatattttgacataaagcttctgtttttcctggtcgaattgaaggcaaatagctcagcatttcataaaattatgagcttcaaaatttctctctgcagatcccgtctctgccttcaatacgttcccaggtctgccttgggaaaagtttgtgacgttctagtttttaggagaccgttttgctattattctttccacctccttccactccccaaaccagagagaatatggtatcagttaagtagggactaacagaaagcgattctttcaggtgtgagcc

SEQ ID NO: 486736 - DNA, 393 bp, Homo sapiens
actcaatgggtctctcatttctgcctatcaatgagttaaacattttttcccagaagattcaacttctgggaaatccactggatttagtgggaaaataaattaatagtaaggcttttaaaatcttacttatttctccagtgtgtattcatgttggataaatccttaaggagaagacaggttaactgaaaatttattaacatttctaarggagttgaggattatgatgatcatggattattcatttacttaggagttgtatgtatctgaattcagataataaaatgagaagatggtgattcaaagaactgcggtgaatgctttacaggaagctgagagcaaagcttaacgatatgggcttaggagtcacacagacccgagttgaattcttgctgg

SEQ ID NO: 486737 - DNA, 545 bp, Homo sapiens
tgcccttgatgaatatttgcgaaaggaatgatttgctctgggagtactgaggtttaggggaagaccaagaagagcatctcatattgagccattatcataacgccctgctgcctttgtcattcttatttttattttttgagagggtgtctctgtcacccaggctggagcatggtggcgcgatctcagctcactgcagcctccgtctcctgggttcaagcgatcctcccacctcagcctcctgagtagctgggactacaggcacccaccactatgcccggctaatttttgtatttttagtagagagggggtytcaccatgttggccaggctggtctcaaacttctgaactcgtgatccatccgccttggcctcctaaaatgctgggattagaggcatgagccactgtgcccaggctgttctttccacctactaaatatatcacaagtctccttcctcctcttttcaactttaaaattacttgtttcatgtaggcccttttaatctttaattaggtgactctagtaaaaacctcgcagccatgtccca

SEQ ID NO: 486738 - DNA, 545 bp, Homo sapiens
tgcccttgatgaatatttgcgaaaggaatgatttgctctgggagtactgaggtttaggggaagaccaagaagagcatctcatattgagccattatcataacgccctgctgcctttgtcattcttatttttattttttgagagggtgtctctgtcacccaggctggagcatggtggcgcgatctcagctcactgcagcctccgtctcctgggttcaagcgatcctcccacctcagcctcctgagtagctgggactacaggcacccaccactatgcccggctaatttttgtatttttagtagagagggggtttcaccatgttggccaggctggtctcaaacttctgaactcgtgatccatccgccttggcctcctaaartgctgggattagaggcatgagccactgtgcccaggctgttctttccacctactaaatatatcacaagtctccttcctcctcttttcaactttaaaattacttgtttcatgtaggcccttttaatctttaattaggtgactctagtaaaaacctcgcagccatgtccca

SEQ ID NO: 486739 - DNA, 637 bp, Homo sapiens
ctgccagcctctaacactcccaactgggagaataaatgccctagtcctaaaggaatctgatggcacattacagggtccactaccctgattattctatgattctggtgccactggacagccaaactttacagagggctaatcagtattttagcaaggttcaagtcagaatctggggcagagtatgcaggaagaagagacaggagcgcaggagagctgactgaggctgctgctgacggagaaggcagggccgccttctaggacagtggccacctctccttcccaaagaacagcagccagttggggctggatccgcctccactttgattttcatttatggtaacttrttaatttgcgagaagttgatggtctcgttactttatcttatcttgcccttttcgggcatttgggctctgaattggagcagatggagaggacaagaacttgaaatgaaaagttactacatttgacattcgtggtcaatttttcctctagtgaaatataggtaccatgtaaaggcaaattgaaattttttcaactcccagtccttccctttccctccttttttcttctggttcttagacctcacacgtgtgtcatgttcttcctccagtctagtcacccctagctctttatttga

SEQ ID NO: 486740 - DNA, 637 bp, Homo sapiens
ctgccagcctctaacactcccaactgggagaataaatgccctagtcctaaaggaatctgatggcacattacagggtccactaccctgattattctatgattctggtgccactggacagccaaactttacagagggctaatcagtattttagcaaggttcaagtcagaatctggggcagagtatgcaggaagaagagacaggagcgcaggagagctgactgaggctgctgctgacggagaaggcagggccgccttctaggacagtggccacctctccttcccaaagaacagcagccagttggggctggatccgcctccactttgattttcatttatggtaacttattaatttgcgagaagttgatggtctcgttactttatcttatcttgcycttttcgggcatttgggctctgaattggagcagatggagaggacaagaacttgaaatgaaaagttactacatttgacattcgtggtcaatttttcctctagtgaaatataggtaccatgtaaaggcaaattgaaattttttcaactcccagtccttccctttccctccttttttcttctggttcttagacctcacacgtgtgtcatgttcttcctccagtctagtcacccctagctctttatttga

SEQ ID NO: 486741 - DNA, 423 bp, Homo sapiens
aatccatgatgaacaaaacatcaatgttgtaaataaagataggatcatcataaataagatagtgcagtgttgagtcatgttgaagctggaagcaaaaggaaaatcagcaatactgattctgtctgtatttacaatgttgctgttttcttcatcatggaygaacctcttgttagtcctggctgtgctccagagcctctatctatgaaaatctttattgcacctgctgtaggagaaagttcccccgcaaagtctcaatgtcagatggctttctttttcctttcacagtagtgacaaaagggctggcttttaaattttatgagatgacacgttggactccagattcgaagacctatttgaattgtggttgtcttttaggttgtcttgctcaaaatgcatttcttcttgatgtttatcacagtgaca

SEQ ID NO: 486742 - DNA, 601 bp, Homo sapiens
agtagtaggcacccactgttcactgttgacatgctgacagtgcagccctgcataaacacaaccgcttgccctctcacagcttatattttaaaggttgtaaaatcttgtttttgtcatatctggcaatagtattttgtaaattattttttacatgattttttaaaaatgtactcatcaaaatgagctggcacatataagctcattatatttttacattttagcaaaaacactgtcttttgcctacaacatgatagtttgtgttttttggaaaaaaaaaaaaaacaacaacaactctattatggtcttcatagtgtttctaatttctaaaatcattttggcctgtagayacttttaaaaaaaagatgctctctaaatatgaggaacataagattgtgtaactgttttcataagtgaaaaacttacacttaccattgtcatctgagaggaaataatggtttaattagtttttagataaaaagatttttgcaatcagactgtgtttgtaatggcatttataaaacaatttccccctacagtagcattgtaattaagactttcaatgaatcagaggagaagagtgcatttttccccctgtggtcgg

SEQ ID NO: 486743 - DNA, 508 bp, Homo sapiens
ggaggctgaggcaggaagatcgcttgggcccaggttgtcgaggctgcagggagacatggttgtgccaccgcacttcagcctgggcaacacagagagaccctgtctcaaaaaaaaaaacaaaaaacaaacactactctcgttgaaccccaaacagttcactctgacgtgccaatgacatgacatttcaggcttccacacacaccttgtactctgtatgaaattatcttcactacagtataacagaaaaggctaagtcaggctgtcataaaacccccaaatctcagtaaattaaaactacaaaggtttatttccgactcctgctacatgtccaacctgctcacygtggattattctctatgttgtgcctcactctggagccaaatgagatggagctgcctctatctggaatgttgctggtcactgtggaagagggaacgtacatgcatggcaaatcacacacaggttctcttaaagcttccacccagaagtagcacacatcacatctcat

SEQ ID NO: 486744 - DNA, 620 bp, Homo sapiens
gctgctgtcattctagtctggtgaagagcagcatgtatcactttattttgtcacctgaaatacaacaaaggatgtatgacattttgggtagtgttgtgggttactgggcctcatatggagatagcagctctggggtgattctgtagtgaggctcatgaggaaagggggctttctgcagtctaaaacttgggttgtaagctgttgatgatacatttgaagtcagactacctatgttcaggtccctgcttaaccacttattatatatatcttgggcaagtcattgaaactccasactcctcatttgtaagatatatattgatcatgattaagttttacaactaactcagagttaaaaatacaccaactggaggagtttggggtcaatagtaagccactctaagggtcaacatgctctattgcgaggtgtatgggcttttgaaccatatgacacacataaggctctcagcttctctgagcttcagtttccacctctatcatatgggtaatgtgaatcaaaggtggtcagtcacgaaacttggggtcatatccagcacttgcatttggtagccttaggcaaatcacttatcctcactgagcctcagtttccttcactgtgcaca

SEQ ID NO: 486745 - DNA, 620 bp, Homo sapiens
gctgctgtcattctagtctggtgaagagcagcatgtatcactttattttgtcacctgaaatacaacaaaggatgtatgacattttgggtagtgttgtgggttactgggcctcatatggagatagcagctctggggtgattctgtagtgaggctcatgaggaaagggggctttctgcagtctaaaacttgggttgtaagctgttgatgatacatttgaagtcagactacctatgttcaggtccctgcttaaccacttattatatatatcttgggcaagtcattgaaactccacactcctcatttgtaagatatatattgatcatgattaagttttacaactaactcagagttaaaaatacascaactggaggagtttggggtcaatagtaagccactctaagggtcaacatgctctattgcgaggtgtatgggcttttgaaccatatgacacacataaggctctcagcttctctgagcttcagtttccacctctatcatatgggtaatgtgaatcaaaggtggtcagtcacgaaacttggggtcatatccagcacttgcatttggtagccttaggcaaatcacttatcctcactgagcctcagtttccttcactgtgcaca

SEQ ID NO: 486746 - DNA, 620 bp, Homo sapiens
gctgctgtcattctagtctggtgaagagcagcatgtatcactttattttgtcacctgaaatacaacaaaggatgtatgacattttgggtagtgttgtgggttactgggcctcatatggagatagcagctctggggtgattctgtagtgaggctcatgaggaaagggggctttctgcagtctaaaacttgggttgtaagctgttgatgatacatttgaagtcagactacctatgttcaggtccctgcttaaccacttattatatatatcttgggcaagtcattgaaactccacactcctcatttgtaagatatatattgatcatgattaagttttacaactaactcagagttaaaaatacaccaactggaggagtttggggtcaatagtaagccactctaagggtcaacatgctmtattgcgaggtgtatgggcttttgaaccatatgacacacataaggctctcagcttctctgagcttcagtttccacctctatcatatgggtaatgtgaatcaaaggtggtcagtcacgaaacttggggtcatatccagcacttgcatttggtagccttaggcaaatcacttatcctcactgagcctcagtttccttcactgtgcaca

SEQ ID NO: 486747 - DNA, 620 bp, Homo sapiens
gctgctgtcattctagtctggtgaagagcagcatgtatcactttattttgtcacctgaaatacaacaaaggatgtatgacattttgggtagtgttgtgggttactgggcctcatatggagatagcagctctggggtgattctgtagtgaggctcatgaggaaagggggctttctgcagtctaaaacttgggttgtaagctgttgatgatacatttgaagtcagactacctatgttcaggtccctgcttaaccacttattatatatatcttgggcaagtcattgaaactccacactcctcatttgtaagatatatattgatcatgattaagttttacaactaactcagagttaaaaatacaccaactggaggagtttggggtcaatagtaagccactctaagggtcaacatgctctaktgcgaggtgtatgggcttttgaaccatatgacacacataaggctctcagcttctctgagcttcagtttccacctctatcatatgggtaatgtgaatcaaaggtggtcagtcacgaaacttggggtcatatccagcacttgcatttggtagccttaggcaaatcacttatcctcactgagcctcagtttccttcactgtgcaca

SEQ ID NO: 486748 - DNA, 489 bp, Homo sapiens
tcagtttcctcatctgtaaaatgtaagaaacaattgtgtctacctcatgggttcatggaggattaagagataatacacttggagsattaagagataatacacttgaatttcttagtatgtgcctaacatgtaattaatgtttaaaccaagttagctaatattaactgtataaaatacataactacttgtagatagcacatttgtccccataataatttatattccatccatgtacatttacactcataattcagaaactgcatttgtgttattgaagtgcagagattacagtgcacttcagaggtcatgagtataagtatttttacactgttctgaatcatttatgggttaaaaagtttataataaaatatctcaaaaattaataaaagtataagattaaaattatgtagtctgcttgcttgtgttgatggcataaacccagaatgagataaccccttcattcctttggctctttcagaaatcatcctt

SEQ ID NO: 486749 - DNA, 682 bp, Homo sapiens
aggcatagaagatgcctataattccaacagatgaaaataaaggcagaatggcatcgggctggagcaccccagcacatctgtaataaaagcaagaagcaggggactgtggctagaatgcacaacagatgtaaagaatgtggggaggggacaggcgcagtggctcacacctgtaatcccagcactttgggaggccaagacgggtggatcacctgaggtcaggagttcgagaccagcctggctaacatggtgaaacctcatctctactaaaaatacaaatattagctgggcgtggtggcacatgcctgtaatcccagctactcgggaggctgaggcaggagaatcgctygaacctgggagacagaagttgcagtgagccaagatcgtgccattgcactccagcctgggcaacagagggagactctgtctccaaaaaaaaagaaaaaaaagaatgtagggaggctaatcagagaaaagcagtcattggaggtgcccattggaatattgatctggcagcaatagcgctgggtatgctaaaggggaaacaaataagcctaaggaccagaaagatattctcaaaactgtgcgggaagtccgtacactggtgctgtatgttcaccattatctgccagatatttatgtaacatgacaactgattgggccaaggtaggggaggaactgaaga

SEQ ID NO: 486750 - DNA, 595 bp, Homo sapiens
ctgtggcttaacctagtgcctcaagaatccacacacacaagcagctattgaaagagaccagagaacacaccaagcacttgggcccccaattatgagccagcatgctgccctggtgaacagcaggcacctcagaactggatgaagcctcactagaatgttgtatgatttggtaccagttgacccaggtgaagtcaaattgggggacattgcatttaataaacacccctcctgagcctctctggactccaacattagtgagaaggacagaggaaattgtcccagtgtaagatttctcccgccgccctctgaaatatttgagcttagtctgtctgcagtgaaggctgacaagctacatccattctggtgattctgaggcaaacaatcgagaaccacacattgaaaactggtgctcaagactgcctaccccactagcacagagcaaacatctgtctctatcccrtcatactcaagtgcacaaccagtgtgtcagtcaatgtttctgagtgaatgaagaagatgcaaaagcacatcaacatctgagctcccttttggaggaggccttaatcatatgaattggaatactgtgctccttccc

SEQ ID NO: 486751 - DNA, 357 bp, Homo sapiens
gtgccccagccacatgtgccctcgtgagaaagccagcgcagatcagtgactccttgtgatttcagaaaagcaacttgatcctcttatggaaagtgatggygtttgtggttgtttcatagggtcaggaaaagcctaaggagagacccccagcctcaaactctgtccttcaataggggccgagcaaccccaacaaaaatcaaaaccaaattcctgaaccagagaaggaagcacttccaatgtgacaggtgctcagggctgggcttgtgaagttttgctttgggtgcctggaagatgagaagaaaacagaactcacttttctgtctggttctgtaggaaaccacacacacagaaccagac

SEQ ID NO: 486752 - DNA, 562 bp, Homo sapiens
gtgactgaccagagcacctacatgtggcatctccatggggtttagactctgaccgcatggcagtttgcttctaagaggagatgtcatggtccaggagcwagtattctgagagaactaggcagaagctgcaggactacttaagacttcttcttagaatgtcacttctgttgtcttccctaagccaagcagttgcttaggccagcctaaactcaagaagagaaaaattaaagcctaccttttaatgcagtgagcagtacacatgcacagagaggaaagccagtgaggtgatatcttggagactatctacctcaatgaccatatcattttcatgtgtctaactcctgaattgctcaccaatcactgggacatgaagtccaagctccctgtagtacaatgcatagactttctagagtttgcaacactgacttctccaacatcttttccttccactcccagccctccacatttattgcttatacatctctctatcccgcctctgccatagaccttaatggttattccctctcgccacccaccttaatatccttactaaaccttcttt

SEQ ID NO: 486753 - DNA, 562 bp, Homo sapiens
gtgactgaccagagcacctacatgtggcatctccatggggtttagactctgaccgcatggcagtttgcttctaagaggagatgtcatggtccaggagcaagtattctgagagaactaggcagaagctgcaggactacttaagacttcttcttagaatgtcacttctgttgtcttccctaagccaagcagttgcttaggccagcctaaactcaagaagagaaaaattaaagcctaccttttaatgcagtgagcagtacacatgcacagagaggaaagccagtgaggtgatatcttggagactatctacctcaatgaccatatcattttcatgtgtctaactcctgaattgctcaccaatcactgggacatgaagtccaagctccctgtagtacaatgcatagactttctagagtttgcaacactgacttctccaacatcttttccttccactcccagccctccacatttattgcttatacatctctctatccygcctctgccatagaccttaatggttattccctctcgccacccaccttaatatccttactaaaccttcttt

SEQ ID NO: 486754 - DNA, 558 bp, Homo sapiens
aaatggcagcaataggcatgactatgtgtgtgtgtgtctgtgtacgtgtctgtgtgtktgtttagcctttgttagctgcgaaacatatttgacaagtttaaagtcaagggtttatccccctcagtagttcttgtatagcaaagtgaatttttgctatttagaaaggaatcttcttcacttttgccaaaagtaaagttgaaaggcatgctgggatattttccccataataagggatttcaaccccttcacatttggacattttccctgcttaggcagccacagcacagagatagaattagtcacaagattagtccagcttaaataagcagaagtcaagttagtgcttcacagattggtcttttagcagatgctctgccctttcgaggaatgcaaggggcaaatgtgagctcttaaggatattttacatttgcgcaatgaagttacgctgttcaaaaaactttctcgtctttctgcctttgtgcaacctaatttctcttaccagaaacctgaggctccaaaggtaagtcatttgcttgagaaccacagctaataccactt

SEQ ID NO: 486755 - DNA, 615 bp, Homo sapiens
cgcaaggtctaaattgcagaaccaattaacagcactaatagcccttgcctgaattaatctttgagacaaaagggaggagaagtggaagtgctattagcaaatcaagctgtaccatccctgctttattgcggaaatctcagtgtctgtatgtggctattgtgtgctgactgcaattacagccctcatttaaaaatgattaagtggttataattatttttcaattaaaacttatatcttccatttatgcaacatttcagacttcaattaaacttctttttaaaagtgccactgaactaaaagattcctgttgcctcttgccaggaaaccctaaactcaatccagataggattttgatttccagcctttggaattcgttatattaaatttagacattgtgatgaaagttaacaagcaataaaatttgcagtgcctgctggaagtgatcaccaccatcaccaccaccatgggtgcggaggagagagacagttccaagctcttcttggggaggcycgagaaatttgtgactactgagaagagaaaggtgtccttgtcatcgtaaggtagtgttactagaaaagctgctgcctgaggcccaatatttagagcagcaacctc

SEQ ID NO: 486756 - DNA, 571 bp, Homo sapiens
tttttcaagcctgagatttaacggcttgctgcttattctgaggctccctrgtgccagcatcctgtcctccccctaaatatttgtgtgttctccaccctccaggctgctgttgctggatgctgccctaccattcccagaaacctctgggtaatggtaatgtcagatcttttccgtgtaccagatatttagcttaattttcccatttttcaggggaaataagaaagaacactgtactgattgcgaatctgtcccaagtttcttaagaacgtctgatatagtaattttcaaatgattaatttcttggtaatgtatattttaatcacttttaaagccatattactacttatatatcattttaattaataattcattggaacaaactagctaaatagaatttataagtagaaataacataaattttatcacagtgtaatgtcttaggattaactagcattcatactcaagatcatcaatggaaaaaaaaactaaacagtagacagcatctgaaaaactaatttttctgacttagaagaggccatgaatgatttagatttgttcaattttttacatt

SEQ ID NO: 486757 - DNA, 571 bp, Homo sapiens
tttttcaagcctgagatttaacggcttgctgcttattctgaggctccctggtgccagcatcctgtcctccccctaaayatttgtgtgttctccaccctccaggctgctgttgctggatgctgccctaccattcccagaaacctctgggtaatggtaatgtcagatcttttccgtgtaccagatatttagcttaattttcccatttttcaggggaaataagaaagaacactgtactgattgcgaatctgtcccaagtttcttaagaacgtctgatatagtaattttcaaatgattaatttcttggtaatgtatattttaatcacttttaaagccatattactacttatatatcattttaattaataattcattggaacaaactagctaaatagaatttataagtagaaataacataaattttatcacagtgtaatgtcttaggattaactagcattcatactcaagatcatcaatggaaaaaaaaactaaacagtagacagcatctgaaaaactaatttttctgacttagaagaggccatgaatgatttagatttgttcaattttttacatt

SEQ ID NO: 486758 - DNA, 571 bp, Homo sapiens
tagtggcttaatgaaagatcggtgtaaccagtcagctctaggaagtcattagatgaaagatgaaggatcagggttcaagcctaaaggacactttcacagtatctaactgaacatgtttaccagtccaaaggttataatattattgctgtgagaaaaaaagaggtgaaaacatttataagaatatcacaagttattgggaaacccgttatacttcagtggattatgaactatccatgatactgaaatcttgatataagatgcacgcccagactttaaaagaactacagagcttccttctcagggctatcacaggctccatccattttaacaggcattttttgaaaagctctatgttaattaaaatgctttatttatatactaatttctcatcccatctttcaaatgtgaaaaggaattaaatatgaaatggctaatttaaactgtcaggattcttttttccaagtcaaccttacattaagagcaggaatcctgtgcttaaraaatggttcccaattatcctgtcttgggttttgttatacattgtacagaagtcaacaaaacaagtatgtaa

SEQ ID NO: 486759 - DNA, 573 bp, Homo sapiens
tatttcaaagataaaagaaacacactttgatcttggagaaaggcaagaaagagctcatttaactcatgagaatgagaatgttcggagaaaagatcatctgaaccattggctcctaacctgtgaactaaacaactctgggtttgggagtaggagaatagagttaagagttaattcaaggagtctgcaaatgtgtatggtcaccaaacattatttatataccaaataaacaatgccttggacatgcaagtactcctattgtacaaatacttatatatatacatgttgacatgataaaagcttatttatataagttattactgcattcttagtatccttttgcccatctattttctcagttaaagcacgataagycactattatgcgaaaggagaccctggaaagttcagactttagaaaaagaaattctcataattgaaaaaacttataactcttagtaaaaagtatcagaaactcaaattgaactagcttggtaatggaagaacatgtgtcttttgtaaagaaaggaggagatgaacaaccaagctgtggaaagaatggagtggggtctcggtc

SEQ ID NO: 486760 - DNA, 571 bp, Homo sapiens
ggaacaaagcaggcagatgaagagggataattactttgctgctgagtctttccactctctctcttctcctgctggacacttggcttcctctcctcccaccctcggacttcacactccatgttcttcagtctttgaactctggaacttgcagcaaaagacttgtggggctcccaggccttcagactgaaggctgcgctgtcagttttcctcgtgctgaagcttttggasttggactgagtcactgccagtttctgtctttcaccagcttgcagataccctattgtgggactttgccttgtaatcatgggagtcaattctccctaataaactttcttttatatatacacatatcctatcaattctgtccctgtagaaaaccccaactaatacagaaaggaacaaaaaaatatttaaaaatagggtactcattacaactccccactgccaaattccattccatttctgtggaacatgggcgatgtgttcattctgcctacttcctgctgaatgaggatgtagttaaaggacattgtcatggaactgatctactggaactggaaatattctcaca

SEQ ID NO: 486761 - DNA, 571 bp, Homo sapiens
ggaacaaagcaggcagatgaagagggataattactttgctgctgagtctttccactctctctcttctcctgctggacacttggcttcctctcctcccaccctcggacttcacactccatgttcttcagtctttgaactctggaacttgcagcaaaagacttgtggggctcccaggccttcagactgaaggctgcgctgtcagttttcctcgtgctgaagcttttggagttggactgagtcactgccagtttctgtctttcaccagcttgcagataccctattgtgggactttgccttgtaatcatgggagtcaattctccctaataaactttmttttatatatacacatatcctatcaattctgtccctgtagaaaaccccaactaatacagaaaggaacaaaaaaatatttaaaaatagggtactcattacaactccccactgccaaattccattccatttctgtggaacatgggcgatgtgttcattctgcctacttcctgctgaatgaggatgtagttaaaggacattgtcatggaactgatctactggaactggaaatattctcaca

SEQ ID NO: 486762 - DNA, 396 bp, Homo sapiens
cataaaagccaaaagaatgttgtagttagagagtccaaatgcaaccctagctcttctgaattccctaaggrgctgctcaaggtaaagctgtcacagagagtttgtgattaaaccattggataaaagccagacacattgcatgcttgaaaaaggagttattttcacaagggtaattgccagagactgatgcagtcaagagtcaaaacagggtagattctcatcagaaatgtgtgcccacagaaaagactcttggcagaggacacgcagcattaggctgtgacatcagacttttgggccactgagttgcataagcaggcccagtagagcgaaaactcaccagtaagaattaacgctggtggaagtttaagaatgccaggccccaagaagcgtgcaaaa

SEQ ID NO: 486763 - DNA, 595 bp, Homo sapiens
cagttcttgtttagccaagacatactatcaaaaagtagatgactcttcagtctccatcactcatgaaggttcccatcaaagcctgaaagcaggaggatgaacaaaagaaaactgctactctttttaataataataatagctgacatttattgagtagttactgtatgccaggcactgtgccaaagacttcctatgttcaaattcatttgttattcataatagccctggcccccrtctctactaaaaatacaaaaattagctgggcatggtggtgcgtgcctgtagtcccagctactcaggaggctgaggcaggagaattgcttgaacccagaggttgcagtgagccaagatcacaccactgcactccagcctggacaacatagcaagactctgtctcaaaaagtaaaagcaaaaatagccctaagggtaggtcctattatcatccctaatttatatattaggaagccaaggcttaaaaaatagaagtaccttgttcttggctacagattgtaagtggcaaagctaggatttgaacctagggggctgtgctttctactaccagattattctgcctcctgtgtaataatggaaggaa

SEQ ID NO: 486764 - DNA, 607 bp, Homo sapiens
ccttctctttcaggcaaatgaagcagatgctgtgaccattgatggaggtttagtgtttgaggcaggcctggmcccctacagccttaagcccatcatggtagaaatctgtgggtcaaaagatggtgtgttctccctggggactggtgtctctggtctgacactgcagcaatgatgggtgtgggtggcaggggccctgtcagcattacacttagtagggaacaaagttgctggagctctttgcattgaaggaggctgtctctgatgctaactcctgagggctgggaaagtggctcttcctgggcgactgcaaactttgcacattttgatagaaactccgctggtgctgctggctgtagggtatctccagcctgagaggggagtgctatccagagtccattgctcacccagtggggtctcacccatgggaggcccctctctggagacacacaggacctgactgcgtcttccttgtgctaaccctgcctgggcaacagaacacgggcctggatttatggtgaggagaggtttgggggagtctaagaatgaggctttacctctttcccatacttggccattagtgtcatcgtgtcatcagtgtgtgtgagca

SEQ ID NO: 486765 - DNA, 607 bp, Homo sapiens
ccttctctttcaggcaaatgaagcagatgctgtgaccattgatggaggtttagtgtttgaggcaggcctggacccctacagccttaagcccatcrtggtagaaatctgtgggtcaaaagatggtgtgttctccctggggactggtgtctctggtctgacactgcagcaatgatgggtgtgggtggcaggggccctgtcagcattacacttagtagggaacaaagttgctggagctctttgcattgaaggaggctgtctctgatgctaactcctgagggctgggaaagtggctcttcctgggcgactgcaaactttgcacattttgatagaaactccgctggtgctgctggctgtagggtatctccagcctgagaggggagtgctatccagagtccattgctcacccagtggggtctcacccatgggaggcccctctctggagacacacaggacctgactgcgtcttccttgtgctaaccctgcctgggcaacagaacacgggcctggatttatggtgaggagaggtttgggggagtctaagaatgaggctttacctctttcccatacttggccattagtgtcatcgtgtcatcagtgtgtgtgagca

SEQ ID NO: 486766 - DNA, 607 bp, Homo sapiens
ccttctctttcaggcaaatgaagcagatgctgtgaccattgatggaggtttagtgtttgaggcaggcctggacccctacagccttaagcccatcatggtagaaatctrtgggtcaaaagatggtgtgttctccctggggactggtgtctctggtctgacactgcagcaatgatgggtgtgggtggcaggggccctgtcagcattacacttagtagggaacaaagttgctggagctctttgcattgaaggaggctgtctctgatgctaactcctgagggctgggaaagtggctcttcctgggcgactgcaaactttgcacattttgatagaaactccgctggtgctgctggctgtagggtatctccagcctgagaggggagtgctatccagagtccattgctcacccagtggggtctcacccatgggaggcccctctctggagacacacaggacctgactgcgtcttccttgtgctaaccctgcctgggcaacagaacacgggcctggatttatggtgaggagaggtttgggggagtctaagaatgaggctttacctctttcccatacttggccattagtgtcatcgtgtcatcagtgtgtgtgagca

SEQ ID NO: 486767 - DNA, 607 bp, Homo sapiens
ccttctctttcaggcaaatgaagcagatgctgtgaccattgatggaggtttagtgtttgaggcaggcctggacccctacagccttaagcccatcatggtagaaatctgtgggtcaaaagatggtgtgttctccctggggactggtgtctctggtctgacactgcagcaatgatgggtgtgggtggcaggggccctgtcagcattacacttagtagggaacaaagttgctggagctctttgcattgaaggaggctgtctctgatgctaactcctgagggctgggaaagtggctcttcctgggcgactgcaaactttgcacattttgatagaaactccgctggtgctgctggctgtagggtatctccagcctgagaggggagtgctatccagagtccattgctcacccagtggggtctcacccatgggaggcccctctctggagacacacaggacctgactgcgtcttccttgtgctaaccctgcctgggcaacagaacaygggcctggatttatggtgaggagaggtttgggggagtctaagaatgaggctttacctctttcccatacttggccattagtgtcatcgtgtcatcagtgtgtgtgagca

SEQ ID NO: 486768 - DNA, 498 bp, Homo sapiens
tagatgctaagaaaaccaaaaaaacaatataaaagctagtctaggccgggtgctgtggctcacacctgtaatcccagcactttgggaggctgagggcggcggatcacgaggtcaggagttcaaaaccagcctgaccaacatgatgaaactccgtctctactaaaaatacaagaattagcccaggtgtggtggcggccgcctgtaatcccarctacttaggaggctgaggcaggagaatcgcttgaacctaagaggaagatgttgcagtgagctgagatcacgccactgcactccagcctgggcgacagagcaagtctccgtctcaaaaaaaaaaaaaaaaaaaaaaggctagtctaccttcaggttgaacagaacttaaatgcttgtactagctgatacttacttatatccctggcaagggtgaagtatgtaagttatttaagacacttttcactatctcaaaagtaaccaaaatagatcaagatcaaaataaccctg

SEQ ID NO: 486769 - DNA, 498 bp, Homo sapiens
tagatgctaagaaaaccaaaaaaacaatataaaagctagtctaggccgggtgctgtggctcacacctgtaatcccagcactttgggaggctgagggcggcggatcacgaggtcaggagttcaaaaccagcctgaccaacatgatgaaactccgtctctactaaaaatacaagaattagcccaggtgtggtggcggccgcctgtaatcccaactactyaggaggctgaggcaggagaatcgcttgaacctaagaggaagatgttgcagtgagctgagatcacgccactgcactccagcctgggcgacagagcaagtctccgtctcaaaaaaaaaaaaaaaaaaaaaaggctagtctaccttcaggttgaacagaacttaaatgcttgtactagctgatacttacttatatccctggcaagggtgaagtatgtaagttatttaagacacttttcactatctcaaaagtaaccaaaatagatcaagatcaaaataaccctg

SEQ ID NO: 486770 - DNA, 498 bp, Homo sapiens
tagatgctaagaaaaccaaaaaaacaatataaaagctagtctaggccgggtgctgtggctcacacctgtaatcccagcactttgggaggctgagggcggcggatcacgaggtcaggagttcaaaaccagcctgaccaacatgatgaaactccgtctctactaaaaatacaagaattagcccaggtgtggtggcggccgcctgtaatcccaactacttrggaggctgaggcaggagaatcgcttgaacctaagaggaagatgttgcagtgagctgagatcacgccactgcactccagcctgggcgacagagcaagtctccgtctcaaaaaaaaaaaaaaaaaaaaaaggctagtctaccttcaggttgaacagaacttaaatgcttgtactagctgatacttacttatatccctggcaagggtgaagtatgtaagttatttaagacacttttcactatctcaaaagtaaccaaaatagatcaagatcaaaataaccctg

SEQ ID NO: 486771 - DNA, 498 bp, Homo sapiens
tagatgctaagaaaaccaaaaaaacaatataaaagctagtctaggccgggtgctgtggctcacacctgtaatcccagcactttgggaggctgagggcggcggatcacgaggtcaggagttcaaaaccagcctgaccaacatgatgaaactccgtctctactaaaaatacaagaattagcccaggtgtggtggcggccgcctgtaatcccaactacttaggaggctgaggcaggagaatcgcttgaacctaagaggaagatgttgcagtgagcygagatcacgccactgcactccagcctgggcgacagagcaagtctccgtctcaaaaaaaaaaaaaaaaaaaaaaggctagtctaccttcaggttgaacagaacttaaatgcttgtactagctgatacttacttatatccctggcaagggtgaagtatgtaagttatttaagacacttttcactatctcaaaagtaaccaaaatagatcaagatcaaaataaccctg

SEQ ID NO: 486772 - DNA, 606 bp, Homo sapiens
  misc_feature (1)...(606): n = A,T,C or G
acagaagtgcctgacacctggttatgctggatcagagagaaaagaatgaagaaattggagctaaggagatgtggatttaaatcttgactccacgacttataacgacaactaccatgaattcagtaatttctatgtaccaggctctgtgcattacctttttttttttttttttcagacggagtttcgctctttcgcccaggctggagtgcagtggcatgatcttggctcactgcaacctccgccttccagtttcaagcaattcytctacctcagcctcccaagcagttaggactataggcacccgccatcacgcccagctaatttttgtatttttagtagagacggggtttcaccatgttggctaggctggtctcgaactcctgacctcgtgatctgcccgccttggcctcccaaagtgctgggattacaggcgtgagccactgtgcccgggccctctgtgcattatctttaaaatccttgcaacgagataaatcagcgggccgggctggcgggtcggtgagcgcggcccgggccggacatggcggcgctctacgcctgcaccaagtgccaccagcgtttccccttccntnatngnggncttttaaa

SEQ ID NO: 486773 - DNA, 535 bp, Homo sapiens
aataaatgagattagagggtccgggggggtaaagggtaggggcaagcatgcagggtcttgcaagccaaggaaagaatcatttactgtattagtctgttttcacactgctgataaagacgtacctgagactgagtaatttataaagaaaaagaggtttaatgaactcacagttccacatggctggggaggcctcacaatcatggcagaaggcaaaaggcacatcttacatggctgcaggcaagagagaatgagaaccaagcgaaagggtgttccccttataaaaccatcaaatctcgtgagacttattcactaccaggagaacagtctgagggaaaccacccccatgattcaatyatctcccactgggtcccttgcacaacatgtggaaattatgggagccacaattcaagatgagatttgggtgggaacacagtcaaaccatatcagaatcttagactttatgagtaatgggaagccattgaaatgtttgaacagcagaatcaccaggtaaattcaacatccctcacaaaaactc

SEQ ID NO: 486774 - DNA, 537 bp, Homo sapiens
tgggcaaatcctttaagccactcacaaacagtgtatattcctttatgttagagctggaaattaagaatatgatctgtttgtgaggacaacatcaagaatcagttagtataatcactgtaacctggcttaggcatcaccatgtaggttagaaaagcaggatatttctgtgcacctcagtttccataagtgcaaggcaaacagagatccttgttcaaagtgatcatttaaaatctcacattgctatcttcagattccacacaacagatatgaacatggacaaaatgccttctaccaagggctttagtctgattaaaatgccaggagtctacagccatataaaaaaggaggccttgaaaaagtcgtccagaggatgcaaacttaccaaaaaacaaaacaaacaaacaaaaaacacacacacagcttgcttccagttccttacttatctacactaggaggatcacaaaaaatgaacaaaagacacctatgcatacagcccttcggacttaytctgaactgtcgatgtaggtaaatccatac

SEQ ID NO: 486775 - DNA, 656 bp, Homo sapiens
gctggaaaccaaaattcaaatttcccttcaagaaatttacgcttactcaacaaaaagaaaacaagaaagccagaaggagctacaaaaataagccttccaaaaactaattcaacaatgttaattcaaattcgtgtcttaaaataaaatcatagaacactacgtatcatggattgctaagtctcacacaaatagaggaagccctgttataatrcagcaatttaagtccaataaagatacccaacataataatcacgatatgcatcaaagtcggccagatgctctgaggttgcactgctttttctcatgtgagtttttctaggggctacatgcttcctgtagaagcaaagctaaataaatatgatccctagtcacaatctcattttggtcatgctaaagaagttacagaaaggaactaatgctcgatctgaattttatttcttctcttgctatgctaaaaagaaaatcaatgtttctattaaccctgtctttggagtaccacagcatatcccagtcctacttaccgttctctaagttcactaataagatccagttttttcatgactacttgaagtggaaagagttcttcatctttaaatgttttctatcagggacaggaaaaaaaggcagagaagttgcagtcaaaggtttctagggtc

SEQ ID NO: 486776 - DNA, 481 bp, Homo sapiens
ttctcttcacagataaaacaacaaaaaaaagcatgtatatatayacacacacacatatatataaaattatatatatctgttgatatatagatatgagccgcagaaaggtagaactgtatcactatagggttagggaataaagaaagctctgcagggtggctggaaaccatgccacgctgtctggattcccaccactgggttctgaatccacccccacctggaaagcacagagcacctgtggcatcatcccccggggaagggctgcacagcttcagggccaccaccagatcctgctctgaggcctccctgggtgggctggctgctcatgcatggcaatgctgcagcaaaaccatcccttggtttggagaaaagtggtcatatttactcaccaacatgaaatttaaaattacaggaaaaatagcattcaaaacagtactttagctatctgaatcaagtgctgcaaggttcagtttggaaaccc

SEQ ID NO: 486777 - DNA, 620 bp, Homo sapiens
ttgggttttaaaatccaagttagcgtaacccccagtcagaatgaagcttggttgcctgcatatagcaacaaagttaggaggaaatagtctcaatgattagactctcatcatctcagtaatacgagaaattgcaattaagggtaattcagtaaggatttggaagcctgaaattgctccagaagtaaaaagtcttgctagactcctgcatcttttggttcagttgccatttattgctgccacacaacccagtaagcatgccaatgtatactatggctaaatatgatgctctaaccttggaccattgctcagtagccagtggcagattggagtggaggtaaaagtactcataacttggtgccccacagttatttgtgggaatacatatttcctccactaaatggtaagctcccggaggacacaaaatatactttattaattcctttatcctccatcaggcctatcaagtattttgtatgtattagaaactatttttgttgttagaagtacagattctgggctcayacctgtaatcctagcactttgggaggctgaggtgggtggatcacttgagtctagaagttcaataccagcctagccaacatggcgaaagctcatctgta

SEQ ID NO: 486778 - DNA, 645 bp, Homo sapiens
tgatgggaggaaagtgggaaagtacagcaatggccttccggtaactcctattgtcattcccgctctctttccattgaaaaacctactccgaaacccaagcactctcttctagatctccactgagagtgctgttttcaagtgagattcccctgttcaaaacacgagtaatgataataatactgataatgacgagaagaatgatgtctcagaaatcatggccagtgtttaagaaataagtgtgattgagtggcttccgtttgcagtattacagtgaggactctgaaaatttatatgctgaaaatacagtaaaagtgctggataaaattggttttggattttcaaattgtgtcattgaacctgcaacaaaataaggaatcccggttgatatgaaatgcagaaatggagagagattgtgaagctaggaagccagccctgccctgattgcctctgctgatcctctgtgatgtggagcttccactctcagagtcccttggctcagggaatagaaagcaaatctaaggtctttctgaggttgaaaatatmataggagaccctcatgtatagctggaacaccaaagggtgttctactcacagagtggggagaatacacagacatcgatgttgacagagacatagatgcatgca

SEQ ID NO: 486779 - DNA, 633 bp, Homo sapiens
gtgggaaagtacagcaatggccttccggtaactcctattgtcattcccgctctctttccattgaaaaacctactccgaaacccaagcactctcttctagatctccactgagagtgctgttttcaagtgagattcccctgttcaaaacacgagtaatgataataatactgataatgacgagaagaatgatgtctcagaaatcatggccagtgtttaagaaataagtgtgattgagtggcttccgtttgcagtattacagtgaggactctgaaaatttatatgctgaaaatacagtaaaagtgctggataaaattggttttggattttcaaattgtgtcattgaacctgcaacaaaataaggaatcccggttgatatgaaatgcagaaatggagagagattgtgaagctaggaagccagccctgccctgattgcctctgctgatcctctgtgatgtggagcttccactctcagagtcccttggctcagggaatagaaagcaaatctaaggtctttctgaggttgaaaatatcataggagaccctcatgtatagctggaacaccaaagggtgttctactcacagagtggggagaatasacagacatcgatgttgacagagacatagatgcatgcaa

SEQ ID NO: 486780 - DNA, 522 bp, Homo sapiens
tgcaaacagtgctccataatcactgaaacttgttggtaatgcaggtcactcatctcagtctccatactgytccttccatcactggagaccagtgagttgtgagagtttcattcctgggagagtggataatgaccatgcccgttcattcaacggcacgaaactaaagataagagaagctcctggcaagtgctggctcaccatggatacatccatgctgaagggttatccctttctgaagggtcactggccacagccttctctggggcaccccatgatgtcactcacaccttcttctctcatgctttccaaatgtacccttctgctctcaagaagtgtggaaaacacacaaaaacccagcaattgcatagagtaactagaatactgcattaaagagcctctagacttacattgcttcagaagttcagaaagatggtaacatcatcattaattctgtcttcacattactaaccaggatgacatggagggtgggaagcagaaggctagagaccatgatctgtgcat

SEQ ID NO: 486781 - DNA, 522 bp, Homo sapiens
tgcaaacagtgctccataatcactgaaacttgttggtaatgcaggtcactcatctcagtctccatactgctccttccatcactggagaccagtgagttgtgagagtttcattcctgggagagtggataatgaccatgcccgttcattcaacggcasgaaactaaagataagagaagctcctggcaagtgctggctcaccatggatacatccatgctgaagggttatccctttctgaagggtcactggccacagccttctctggggcaccccatgatgtcactcacaccttcttctctcatgctttccaaatgtacccttctgctctcaagaagtgtggaaaacacacaaaaacccagcaattgcatagagtaactagaatactgcattaaagagcctctagacttacattgcttcagaagttcagaaagatggtaacatcatcattaattctgtcttcacattactaaccaggatgacatggagggtgggaagcagaaggctagagaccatgatctgtgcat

SEQ ID NO: 486782 - DNA, 532 bp, Homo sapiens
taattttatatcactccccttctcttaccctgggaacaatttgttatttaacatgattatagaaagggtgtatttaatgagaaagacrtgccttttgaggtcaaattgcttagtaaaagcaagggtcctgttaaccattttatcttaagcaagtcactgagccacttgagcttttgtaaaatgggaatgacgatacttgtacctccaattctctgagaatcaatgagtttatatctgtgcaagaacttcgcagattgcagggttgtatatttttcttccttttccaagagttaaagagttatagtcttccaaaacactgtctaccaggctgtatcactctaagatgggtgttactcactaattctgttttagagaggaggactgtgagaaagggaagaattgaaacttacatttatctaaatagatatcctgtctctggaaaggattcatagcccaaagaaggaggtctactttccttgaaactttttgttaaatacgctgaagtgcctagaacttctgaagcaaacccaga

SEQ ID NO: 486783 - DNA, 478 bp, Homo sapiens
gaggccttacagcagtccggagaactaagacctataagacactaagaaactcaattacccccaaccattgaggcaagagagtggtgatgggcaagcaattaggtggcaatcattagaggtaaagtagggaaagttgatctaatcctttctcagtgctcctcacacttcagtgtgctacacatcacctgagaatctcatgaaaatacaaattctgattcagtaggtctggggcagagcctgagagtttgcatttctartaagtagtatagaaataatatagtatctaataatcagacaatatgtacactaatgacccatgacctatatttcaaatgacaaagatctatttcagaccagcctcaaaggaaatctgtgtcagggctctaaggatgaaattggaaacctaaaatgactacattcatcttaagaacctgggagcacaattcagggctgcatttctctaacatgtcagagttgg

SEQ ID NO: 486784 - DNA, 543 bp, Homo sapiens
ctggagtggttgcaggatttggacccctgaggcatctcttgcctttttggtctgctgcagtaaggaggggcctgtcccgctgttccttcataaggggctcctgaatctgagtcttccagggtctgtccctggtagggattcccrtggactgcagggccttttctttttcttttttttttttttgacacggggtctcgctccgtcacccaggctggagtgcagtggcgcgatctcggctcactgcagcctccacctcccgggttcaagcgattctcctgcctcagcctcctgaatagctgggattacaggcacgtgccaccacacctggctaatttttgtatttttagtgagatggggtttcttcatgttggtcaggctggtctcaaactcctgaccttgtgatccgcccgtcttggcctcccaaagtgctgggattacaggcgtgagccactgcacctggccagggccttttcttagaagccagcgtcctttctgcagcccatgaggaaccccttcccccactcccacaaaccaggacagtga

SEQ ID NO: 486785 - DNA, 373 bp, Homo sapiens
ctggggatgaagctgcccctggttcatacggattcacacagacagagcaacttgggctcctcatttcagttctgtcactttgcaaagctcttggtagagggcgagttgtcctagccattcagtccttgtaccygagaagcaggagagaaaatgtcccagcacccaggggacatgtgacatgggcagtgcccaccctgtgccccactgtatccttagcacctggtgtgtgctcagcagaaccaacagatgtttcctgaatgaacgcatgaatgcatgaatggaggagcccagtgggcgaagcatcattcaggtattggaggggacggtgtggcggaagtgcccgagacagggaaggaggcaccagcacagacca

SEQ ID NO: 486786 - DNA, 620 bp, Homo sapiens
ttccatcaagttcttatttgattgaagtaaatgggccaacctggctggaaagcatgttaatattttaaatttctacattaacaactgtacacgtgcccagaggatgggtgatgaccacctcacataattgcaaaaaacaaaastgataagaataaataaatccaagcaaattggattaccatttgcagaagaactgccagcaaaggcaagggagagaatgtcactgatacatgttcctacttcagcaaggtatttgacaccttctcttgtgaattgcatgaatggtgttaattcaagttggctggcctatgttttcagcatgggctgaaggagtgcacccagcatggctaggctggggctgaacaaccgacctttctctctgaatattaatccccagtactgcccactcatatgacttaaatgtcacttcacctcgtgggacttagtgtttccatttttgcaaagaggataatgacagcactttcatttaactcagcgggcaccttttgtcattcaaggagcatcacatacttaacacatgttctttagtcatacaatatcccactggtaagtattcttatatttatttaacatgtgaagaaagtgaaaaacgggaacct

SEQ ID NO: 486787 - DNA, 620 bp, Homo sapiens
ttccatcaagttcttatttgattgaagtaaatgggccaacctggctggaaagcatgttaatattttaaatttctacattaacaactgtacacgtgcccagaggatgggtgatgaccacctcacataattgcaaaaaacaaaactgataagaataaataaatccaagcaaattggattaccatttgcagaagaactgccagcaaaggcaagggagagaatgtcactgatacatgttcctacttcagcaaggtatttgacaccttctcttgtgaattgcatgaatggtgttaattcaagttggctggcctatgttttcagcatgggctgaaggagtgcacccagcatggctaggctggggctgaacaaccgacctttctctctgaatattaatccccagtactgcccactcatatgacttaaatgtcacttcacctcgtgggwcttagtgtttccatttttgcaaagaggataatgacagcactttcatttaactcagcgggcaccttttgtcattcaaggagcatcacatacttaacacatgttctttagtcatacaatatcccactggtaagtattcttatatttatttaacatgtgaagaaagtgaaaaacgggaacct

SEQ ID NO: 486788 - DNA, 658 bp, Homo sapiens
ctgcacccttatagtatctattagtcgtcctgaaggaatccactaaaggatacgtagagtcttgtatttcctcatttgtcttagtctcaagactcatctagctcatggtctgttagtattacttttctgttgtttttacgttctactgtgtaccaccaggatctgaccaacacattgtccagcatgcttgaggtctcaaaacagacacacccttaaaaagcccaacccttgccccttatcacaagatcwtctgcgaatgcatgcccaggagaagttttctgaaagcagatttaaaactgttagggccagaaactgacgtcaactgcaaaggccttgttctccaagaggacttgtgcagttcacgctcatgcctgctggttgttttctctttgtagttggaactggatatattaacgacagataggcaagtcaaccatttaagtgtaaccaaatttaaaactaacctttattccagtttctttaaggatttcagttgtttcagacccaattttctttcctggaaagcaaacctataaattttcttttcatctctgtctctgagctatctccacgttcctaggactgctgaataacctggtccctggtaattatgtataacagatatcaacatcttaaattgtaaatatatatgtatata

SEQ ID NO: 486789 - DNA, 358 bp, Homo sapiens
atatcacataactgcaacatgttagctcatattgaccttactgtcactttaagccttgaagtcatttttcacatatcgtctattctatacttgtaagataggctttttggatataagtgtagtagtttccatttagccctacagaaatgtatttgatttggttcagtgtttaaaatcttctagttatttttagaaatattcttatgttattaccagatacacgaagtattccttcctgtttcctatcagtttccaatttgatcagtattctaccastgttctcacccaggtcattaacaggcagaaagcagagccttgtcatataccactatacacttttctccaggaatcagccaca

SEQ ID NO: 486790 - DNA, 536 bp, Homo sapiens
gctgtgtgtaactaaggagcttgtgtgctgttgataccgcagaggtcatttataaaatctgcttgatttattttttaatttgctcactctaggccaagcctactgcctccttgcccggcctctaatcacatgtacaaatggacacaagcagakgcaaatcaatttgttctcatcatggttggctccataccccgtatcatcaggcaagggaagcctggtgaagaggggctcctgtttgggctactgaaaagacgccggcagaggccggagcgtcagggaagccagttgaaaaccagacttccttccatgggcaaaactgacttctagcctttaaatgcacatttaaatcttgttcattcttcacatcctgggcagggcacagtgttagcacacacagacacctcacaacaaatgttcacagagagaaatacaaaatgtagatggggcaaagggaggggaggaaggaagggagaaagaaggaaaagaggaaagaagacaagaagtcaggaattcgaaggagtgaagcaagaaactgg

SEQ ID NO: 486791 - DNA, 647 bp, Homo sapiens
tgtataaaactagagtctttatttcaaggcataaagttgatatttattagagaggatccgtgggatttcattgacataatttggaattttgcagatctggatcctgagtattattagagttcgaccattctgatggactttcttcttgacaattaatgggtcttccaattcaactaaagaagacaggcccctggaaaatactttattwttgtgatttctgggttattcattttgtaatcaatttttgtggagacaggttgacatataattggaccttagagaattctgtttttatgggggcattgcagggtagcattttgtttcataatgctatagtaaccacacataaggtcagcttgacattgctcaatgtctatgccagaactagtttatttcacatatggcctgcatgttggattggcatacactgaagttgtttgggatagaatgagtcattacttttgatttggggccaaagtttgggagctgtgtttggctggatattgttataaaggaaaaatggatcaaattttttttattgacaagctaatagttctgcagagagctgagagtataactctctgggtccgtatcactctatattctcttgctttttataataattccaacacaatagatttcaatcc

SEQ ID NO: 486792 - DNA, 647 bp, Homo sapiens
tgtataaaactagagtctttatttcaaggcataaagttgatatttattagagaggatccgtgggatttcattgacataatttggaattttgcagatctggatcctgagtattattagagttcgaccattctgatggactttcttcttgacaattaatgggtcttccaattcaactaaagaagacaggcccctggaaaatactttatttttgtgatttctgggttattcattttgtaatcaatttttgtggagacaggttgacatataattggaccttagagaattctgtttttatgggggcattgcagggtagcattttgtttcataatgctatagtaaccacacataaggtcagcttgacattgctcaatgtctatgccagaactagttyatttcacatatggcctgcatgttggattggcatacactgaagttgtttgggatagaatgagtcattacttttgatttggggccaaagtttgggagctgtgtttggctggatattgttataaaggaaaaatggatcaaattttttttattgacaagctaatagttctgcagagagctgagagtataactctctgggtccgtatcactctatattctcttgctttttataataattccaacacaatagatttcaatcc

SEQ ID NO: 486793 - DNA, 605 bp, Homo sapiens
attacagtgttgtatgtgctacacagacttatttttcacagtcagagagaaggaagaataaggcacatgagaatctctatagtgatgatgctcttgcatccgtgatttttggattacaaatataaggaaagaaaaagaaaacaggaaagggagggatattgctgagcaatatgaaagtgatctctttcggcctccataatgaatttatgaggaggtttaaaaggaccataaaataaccctttaatagaatatcaggttgagggatcatggagagggatatcaacattattataatttaatgcagtaggattttctatcctaacagttttatttaaaaaatattaaaatagaagttgttcagtttattgttttttgtaaatacaaaacatgttgaatgtgtggctcattatggaaaaaaaaaacctaaagctgaaaccaaacttcatgagattgactagataatatggcacagaagtatttccttaaagctcagtttaagttatggttatttatcccaaaaggagwagtttaattctgtttaatatttggattaaacggaaggtaaactgaaggcaagcatggggtccctgcctccctataaaagc

SEQ ID NO: 486794 - DNA, 426 bp, Homo sapiens
acttcatcacccgtctacaaggtcatgcttaatgagtcacatcactgttcatatcacttgttaaaatgtacagaattttctacggcctgtctctttcattttaagtgtaggctcaagggcttagattcagaaaaatctggggaaatctgacaggctttaattccaaaaatgagaatctctgatatttctgttgttcttccttttaagtagctcactgaaacattatacattttacagattgagaagtgtggattttagtgttaactgtgttctctttccccatgcacacatctttacaccaccttttcaatgtaactgaagatagaagagcaagacagagagagattagaactgtcagaactttaaaatgggaagcaccctgacagactagaagaaaaaaaartaaaccaagacttgttaacgcta

SEQ ID NO: 486795 - DNA, 537 bp, Homo sapiens
acttcatcacccgtctacaaggtcatgcttaatgagtcacatcactgttcatatcacttgttaaaatgtacagaattttctacggcctgtctctttcattttaagtgtaggctcaagggcttagattcagaaaaatctggggaaatctgacaggctttaattccaaaaatgagaatctctgatatttctgttgttcttccttttaagtagctcactgaaacattatacattttacagattgagaagtgtggattttagtgttaactgtgttctctttccccatgcacacatctttacaccaccttttcaatgtaactgaagatagaagagcaagacagagagagattagaactgtcagaactttaaaatgggaagcaccctgacagactagaagaaaaaaaaataaaccaagacttgttaaygctataatttcactgagggtaggtatcttgttgttgttgttgttgttttttttttttcatttggttgttttgcaagcttagcactgtggaagaaaaatagaatgtcaataaattc

SEQ ID NO: 486796 - DNA, 491 bp, Homo sapiens
gcatagggatctgatgggaggctgggggtggtcttggggactacctttgtttttgtttttgtttttttgagacggagtctcactctgttggccagcctggagtgcagtggcgcgatccctcctcactacaacctctgcctcccgggatcaagcgattctcctgcctcagcctcccaagtagctgggactacaggcactcgccaccacgtctggctcattttttgtatttttagtagaaacggggtctcaccaggctgcccaggctggtctcgatytcctgacctcgtgatctgtctgactcggcctcccaaagtgctgggattacaggtgtgaaccactgcgcccagcctagggaaccacctttcattcatgcagatattgagatattgattcagcactcactgagaatctgctgcagggccctgaggacactgtggggacaacacgccccttccagagaccaggccaaagtgggagacagactttaagta

SEQ ID NO: 486797 - DNA, 602 bp, Homo sapiens
aattcataatttcccaatcaaatgggtatccagtttatgataaattgtggatgggaaagtcaaaaataaaacaagcaaacaacaaatgtttatgttttctatctttaaaaagttgtatttgacatttgctgcgagtcctttttgtaaagattgagtgattgattgagattcacatagttgctcaaatgctttaataattccaccttgactgattcatttcatagratatttgtgtattagctcaaccctttacgaatataagaggatcataattttacactaatcaacagtaaaattagtaatttttttcaaagcaatatcctttgaccaggagcttcaaattattttctttctttttcaacttaagaagcttcccagttgtgaaattttgtttagcatgactctgtaattattccagttccttctctaagaacaactgtaaatctgagcgcaccactttattttctgtcctccatatatagcatgttcttttgaataatttcaatctttattcttttctacttcaggtttctctccacagaatcaccagttcaccttttcctttggaataaccatcttttattcctgttttccccatttat

SEQ ID NO: 486798 - DNA, 617 bp, Homo sapiens
aaatgttagagaagagtgtgaacattctgaacttgcatattagcccttaaagcatgttctttgattgtgatataacttatgtagacccataattgtaggagctataaactttytctactttattaatatagaggaatatatatatctttgctgagagaaaatcaagctgttgtgtgttttggaagtagatgacatcctttgtttcttgggcagtgtttatatcattagtcatatcattctgcctaaatgtaaatcatcagcacaatacgattccagaaaagtgatatctcaggcaagttatcaacaatttcctaaatcagaacaaaaaaatattattttcctactgaataacatttatcactgaggtagattcctgagattcataagaaatcactgcttttaaaaataatccagttaagtacttgttcttacaaactcttgactgtaagtcaccctatcaccagacagaaaaatagattgatgtaaacaaacatactgaccaaaggtaaagtagaaatatagagtagctacaaaccatacaaccataaacaggaatatctttctgatttcacttagcaaaccaaagaaattttcgaactcagcttttttctgtataa

SEQ ID NO: 486799 - DNA, 643 bp, Homo sapiens
tatgcatacatgtatatcaaacgtttattttccgtccactattttgagtaaataaggtatctgggtcctagacagagatttggtcactaagaatcatctaataggaaactgcaatgacagtactaatctatatgtgcccctgaagcaggaagagtgtctttgattccatgccatagaatttctgatccttcccatatgtgaagctccttggtcaagagcaatttagaggccaggattgcatcactaacaaattccttggatggtttgtgcttacattacttaacttccttagtttataaacgtatatacacttactgaccttatccttttgttgagaaaaatgatrcgagaaaaagtaatatccacaacatcaaaataatggttgtgtaatggttttaaagagcacatcacagagagtgttcttttcaaatcactgtgaaattctctaaagcatatccaagcaaagttttgactgtcaacattctctttccttaagagtcatgattcccaaactgctccaatagaacaccagaccaaggtgccggatctacagaatcaaagagtggtagtattttccaaatttacacaaaacttctctcatgatcaggcacagtggctcatgcctgtaatcccagcactttgg

SEQ ID NO: 486800 - DNA, 549 bp, Homo sapiens
tgtgcagtgccactcctccagggcgctcctaaccccatccctcagtcatccttcccagccgtgctgtgttgtgcacgacagcatggccagcccagggcccaggagtccttgtccccagaccgacgctcctttacgctggcgtattaatttcaaactatggattctcaggccccacctaaggaattataattcagttggcttcacatggaacctagaaattcatattttcaaaaagtatcctggcaattctgtcaagtggtcaggtatgggacccacttcgctatatcgcaccagccccaccctttagccctgccattcttccattggggacagggtctcaccgcactgtcaggaatccctgagcawtactcagcaaaggctggaggcctcactgtcctccctgaatgcaagtgagccaaccacagccaagtgtccacatggcacagccgcatgtctccttggggactaaggccccacactgagtgagtggaagaaggactcctaggaaaaaggaaacttggggccttgggttgcggggctaacagagca

SEQ ID NO: 486801 - DNA, 471 bp, Homo sapiens
ttagtggttttaaaggtactcttgtgtgtgaaaaaagtccttactatatagacaagttaaaaaatcaatatcatgaacatctaaaactcagaaaaaaaatgcatgaaggatttactccatttgccagaaaatgctgatgccaacggataaccccacagacttattatagatacattcatactgtgctacttatagcatatcttgatcaaaggacacccacgttaggtcaaaatgaatgactggccagatgaagaacaactaagaaaatatttttcaytttagtgactgaagagccagtgtgatgactacaacaatgagattaaacctacattaatttggtatcatattttaggctagttggaaaacaggttgcttaaaaaccaaatattctgagtattgtggatctagacttaatttcagggaattaattgggagctgcctgaatttttaaaatctgatcacctgtaacca

SEQ ID NO: 486802 - DNA, 619 bp, Homo sapiens
gcaggtggtgacaaatgattggatttgggctataatttgatgttaaagccacagaatttcttcttttaatttgcattaatttactagtgagttaaacattttatcaggtagatggatcacatgcatgctttctttgtgattttccaatgtatatgttccatcataataaaaaatggcagcccaatgaaggaaacaattttgacacttattttcactcagtaaacagattcaaartcccccaaacaggacatttgaagactttcagattatgttgccttttctctataaaagtctcttgaaaaaaaactcaaaccttcattaagctttcctttagaatgtttggtttgtgtcaatccatctgaaacctgattttttttaaaatattttcttttatactattttaagtccttacataccagttatttgtgattgttatggactgaattttatctcccaccctcaaatttatgttgaagccctaacccccaatatgacagggtttggagatagggcctttaatgaggcaaggttaaatgaggtcataagtgtagagccctaatccaatagaattgatgtcattgcaaaaagaagaagagaaaccagggagctctccctctgt

SEQ ID NO: 486803 - DNA, 622 bp, Homo sapiens
aaaattagtttgggaaagatcattttgctcagttgaaatctatagactgtattgcaaggtataaagaatgtatctaattttgctttaaaaacaacttgctattagaagttaaattatcattttataattttctatgaagtgaaagaaaagtgtttttaatttagttacccctgcctaaaggatattctcatggggatgattattatagtaataatggagtgtattcttattggaatgattattatagtaaccaaaacatatcataataagccattatactctttccaggaatcttttggttctttggttttctttggaggtgctaagtgagtacaggactgacacaatattattcaacatgcagatactttttaggatcataatgttggttgtttttactaattcaggctgggtttgatggcttatgcctttaattccagcactttgggaggccaggtgggaggatcccttgagcccaggagttcgggaccagccctggcaaaatagcaagaccctgtctctacaaaaaaaccaaaaaattagctgggcatggtggcacacacctgtaggcccttytacttaggaggctgaggtgggaggatcacttgagcctaggaggtca

SEQ ID NO: 486804 - DNA, 505 bp, Homo sapiens
tttttaaattgtggatttgttattgtgaaaatattacaaaggttaaaaactaaaggtttttacatgtagttataaatttgttattaccttcattaatgactgacaccactcaattctcagtatttattctagcacactgtcttgcagatagcaaaaactcaatgttgattgctatattgagaaataaaacagaatggtgtacatccaaaaagacaattggaaatataaaaatttagttatatgctttcaaaatagtagtgtaatcccactaatcaaatagaaactctatactaaattttgataaratcaatctttttaaaggattcttataaaaataggctatgtaaattatattgaaagaataagttggccaagttttatttaatttaaaatatcttatcgtgttcaatgggccaagaggataaagtaagttagacctatgtaaacatatcccattcaaggtagactctgctgtatgagttaggtcaaaataacagcagttgtg

SEQ ID NO: 486805 - DNA, 617 bp, Homo sapiens
tagtgtacatgcatagtcatacttgtagcaaaatctccactttgaataattcataattaagccatttcttctcttctttaagttaccccacaaggtttcaagaaaagtgtggtaaggagtattggcttatgcttgcctttccagatatatgattagaacaccccttacagaattcgagaagggaaagcaaggaagggatgatcacmtagtaggaatctttttttttttttttttgagacggagtcttgctgtgtcccccaggctggagtgtagtggtgcgatctcggcccactgcaacctccacctcctgggttcaagcgattctctgcctcagcctccccagtagcgggattacaggtgcacaccaccacgcacagctaatttttgtattttaagtagagatgcagtttcaccatgttggccaggctggtcttgaactcctggcctcatgatctgcccatcttggccgcccaaagtgctggggttacaggtgtgagccaccgtgcccggcccatagtaggaatcttaaggagaagatgcatatggagttctaggggcagtaaagtaaatatataagggagggagaaaggattgaggaaatgaaagaaagcatgttt

SEQ ID NO: 486806 - DNA, 604 bp, Homo sapiens
tactttctgttttgatgagtttaactaagttagatacttcctatagrtggaatcacacaggatttgtctttttgtgactggcttacttcacttagcgtagtgtccttcaaggttcattcattttatagcatgtgacaggattttcttattttttttaaggttgatcaatactcttattttacatatataccacattttaaaaaatccattcatctatagatggacattcgagttacttccacctcttggctattgtaaataatcctgctataaatatgggtatgcaagtatttctctgagatcctgttttgagttcttttggatatatatccacactgggctggctgatcattttgaaggtcttgcagctatttcaaacatttctagttttcaaacttattttgttaaaaatttgtgttcatctctttggtgctattactatagactttaagtattaacagccaaatactctaacacacagctattctaaaacaacacacaaatctgattgttcattatttatttttgaagataaaagggttacccaaaatttattttgaatttttatttggctgcttagctacttaatgataaattctggtga

SEQ ID NO: 486807 - DNA, 538 bp, Homo sapiens
acatgtttatattgaaaaacatcatttattagcaaccttggtgataatgcaaacctctcccccttccaggtcttcagcagcagcaagggcagaagaccaaatgaggaaggggctgccacaatggtggatagtctactgctcacaaaagcacctgctgagcttctcccaattctggattcctgccatgcagcaaaggtgaagagtcaggcaagcaaggccacagggcttcataaacatttgatttactcatagtagttgcagccctgctggttagtgaaacaagcttatacagtgtacaaatttctcttaaacatacagaatcagtatatccctttatttacctttcaatttatttttgatgcagcccccaatgcaaccccagtcacttycctaagacagttcagaaaacctcacatagttccactcttgaaatacttttattcctctggtgaggttttgcttactgaactactcatgttttaactgatagacactgccagttttccaaactggttgtaccaactcccacaggctacat

SEQ ID NO: 486808 - DNA, 584 bp, Homo sapiens
tataaagttaccatttaagtggaagtaggcttctcatagaactctgtctattgaacagaaaaggctgagaggcagttttgggttaaatacaaggcagacatctctggaaactaaagccagctagaacgtctgatttactccatgagaagagcttcccagcatgaggaactgactgacactgggccttctgcattggtaggaattgcactaattgagytctaggtctttaagaaactagaatgtgaaaagtaagttttatggaaaagtgtgaggctctcctcatgttctgtcaagatggtatgttttctagctacagctatatctgtgcttcctttgctatttaattcccaaaactttgacataaaataatggtatagagattcctgttactcgaattggaataatcaaaagcttcacatttatttgcataaaatgtataaattacctttgtagtgaaccacgctttttaaaaattatcatcaactttttaaaaattttgattttagttcttctctaaattttttcttctctatttttctcacctgttcattaccttgtttaaattcaaccatgtataacaaatg

SEQ ID NO: 486809 - DNA, 634 bp, Homo sapiens
agttcttcatatttttatccttttaattaagttatgtgcattgttaatattcgtagagtttgtttttaaaaaataccatccaaaagattaaactatgatgcatcattgaaaaaaatgttattatatacacagaaaaggaatttgtatgatggagcatacatttaatattaatgaagcacataygcatggtttggagaataatggctgttttatattttcttgcaaagtaacacaaagtgctttctgataacttagaaaggatgacacccacaagtaaatgaagacatattacattttttactgatatacgtaaaaagtattgcctttcacaagccaagaaatgcccctaaagaaagtaacattaaatgataaatatttctgtctaaatagtccaaaataactctttaatatcaaattccaatacatttattaaagtagtgatatatttattaaaatatttttacatttattacatttttaaagtaataataaatcattcatataagtggtaacatttgttagtagtacataaaataatgttttatcttaaaatcaataacaagatttgactaaagacaatatatgacagccactgtggtagatagcaaaagtgcaaagggaaataattcacagt

SEQ ID NO: 486810 - DNA, 535 bp, Homo sapiens
ccttttcgtgtttgttatgggatccaattttcacatctctactcattctttttattctcctttaaacctcctaccactggtgatcacaatgtattttcaactcacattaagtgtgctattacttaaatcccctaaatatctggtatatatgatgctatgaaataattctcttcagattaatcacaackttttttcaaccagagaaccctatatttatccctgttatcttttttagatctgtgtttctttttttttcctatcgaaatgtttaccactcatctctgatttgtgtcatcagagagaaagctttgtgagggttttcagaccgaatgtttttgttttttcttttttaaatttaatttaatttaaagttccaggatacatgtgcagaatgtgcaggtttgttacataggtaaacgtgtgccattgtgttgtgctgcacctatcaacccatcacctagtattaagccctgcatgcattaactacttaacttgatgctctccctttccccacatccccaacaggccacagcat

SEQ ID NO: 486811 - DNA, 535 bp, Homo sapiens
ccttttcgtgtttgttatgggatccaattttcacatctctactcattctttttattctcctttaaacctcctaccactggtgatcacaatgtattttcaactcacattaagtgtgctattacttaaatcccctaaatatctggtatatatgatgctatgaaataattctcttcagattaatcacaactttttttcaaccagagaaccctatatttatccctgttatcttttttagatctgtgtttctttttttttcctatcgaaatgtttaccaytcatctctgatttgtgtcatcagagagaaagctttgtgagggttttcagaccgaatgtttttgttttttcttttttaaatttaatttaatttaaagttccaggatacatgtgcagaatgtgcaggtttgttacataggtaaacgtgtgccattgtgttgtgctgcacctatcaacccatcacctagtattaagccctgcatgcattaactacttaacttgatgctctccctttccccacatccccaacaggccacagcat

SEQ ID NO: 486812 - DNA, 601 bp, Homo sapiens
tttcaggagatagtgcgattctgggacaagtagtgcaatcgtggagccattttatttttagaaatatcattctcagtctcacgtctgttgtcaagagtaataacagtgaacacactgcaaggatgcctttagaagtagaggggctgcaggtattcgggtaatggtctgcagtaagagagatgctgggataaaatgcctttctccagagatgatagaaaggaaaagcattccatagtgagtcatctcttgggttcatctgcagtctactttttgccctttcaccagaaagcgtaaaagtaaagagagtgaaatscaatgttctatgccttttgtctagctgagagatgcagagaaggcagccacaacctcctgagcagcccacctctaacattcttcccagaagtcatgctgtatgcagaaaaacctgaatacagatcctgagactatagatcttttggttacagaaatctcaaatttcaggcatcttacacgtgttccccaaactgacagtccattcagacttccctttgtcttggtcactggtgatgcgttgtgctccatcagccatgttcctgctctagctgtagatgcttggcagtgc

SEQ ID NO: 486813 - DNA, 627 bp, Homo sapiens
ttcgcacctaatatatgggaaactttgtgactacaagtatttacctttgaccttgcatgctgaagctcataactcctttacagtacagaattgtgagatctaattgtggcaagccaagtaaaaatatactctcctgattttttttggttgaagtttcaccgtaagtaattctagagaaacgcaggctcttctaagagatgaacatgtaaagttcctttcagtgctgcctttcagtgtttgcaaaaggtaaaaatccagcactaccacaatttctttttagggttgtgcctccagaatacttaaaatatgtatattgccagaatatattataaagtgtttaaaatctccataatgtktagatgaattcattttttatttataaaaaactttttttcttcatgatgatggacaattactccgcctgtcttcattaagtggatatttgttaagcctcatttttatattcatatatacctttctctgaactagcacaatcacgatgtgggctttgtgatcctgtcaccaaagactttgaaaatgttcataccttgcacactgcagatattaaatatcccaaatgtcagagaactcccatacctgtagtcaatggaatgatttggttttacc

SEQ ID NO: 486814 - DNA, 612 bp, Homo sapiens
ctggggagggaaactgccaagctctttagggaaatcctcattaggccaagaggaggagctcagtctttgcaaaaagaaccagacatttactccaatggcagaaatccttccaagcctattcttgcaataaatgactccactggagagaccctgaggccatggagagagaaactaacattttcaacaggcttctgtatggtgtagttgttgttcaccttgcagatgttgttctgacttatttcattgttactctatctatttgtgtgttacctactatttattaaatgcatattgtaatatctgatttagacaaagtgagtttttatcattaaactctcaaaaaccacacctaagagtgcttaactgttgtccttggatcactatggggagaatcctgagctttatcccagaccaacattcatcagaatatctggaaggcttcccccaaatcagcatttttaaacaagtgttctaggtgataaagaaagtcactaaagtttgagaagcattggcataaagtggtgaaagtgcttttctgagatagcacaggcttactaagtgaaaacrgccccagtggcatttaatgaacaaaagaggaaatggtacaagaaa

SEQ ID NO: 486815 - DNA, 525 bp, Homo sapiens
  misc_feature (1)...(525): n = A,T,C or G
gaagagaaatagagagtaatttccctcaacttgaatagagaacatctacaagaaacntgcatctagcagcatacttcaatagtgagaaattcaaagatttcccgtgagaycaagaacaaggcaaggatggctccctgtgaccatagcttttcaacatcatcctggatgtcctagaattctttcaaggttctactcacaactggatttctccataatcttacatctcctcatgcacaaacttatcacatagcacacagactggtcttacataatattttctttctcttagctcattaagcactttgtacatctcgtggcccttttcattttataatgtgtatgcattttaccttacagggtgtctcctgtgacataagcctttggagagacacaataatcatgtcatcttctgctctgtcattcacacaatgtatagaacaatgatttgaccaagtaagtgctcggatttgttgatttttaataagatactatcaagtgcttataccagtgctggagatcagagac

SEQ ID NO: 486816 - DNA, 590 bp, Homo sapiens
  misc_feature (1)...(590): n = A,T,C or G
tttccctcaacttgaatagagaacatctacaagaaacntgcatctagcagcatacttcaatagtgagaaattcaaagatttcccgtgagaccaagaacaaggcaaggatggctccctgtgaccatagcttttcaacatcatcctggatgtcctagawttctttcaaggttctactcacaactggatttctccataatcttacatctcctcatgcacaaacttatcacatagcacacagactggtcttacataatattttctttctcttagctcattaagcactttgtacatctcgtggcccttttcattttataatgtgtatgcattttaccttacagggtgtctcctgtgacataagcctttggagagacacaataatcatgtcatcttctgctctgtcattcacacaatgtatagaacaatgatttgaccaagtaagtgctcggatttgttgatttttaataagatactatcaagtgcttataccagtgctggagatcagagacgacatttatgcaaaatactttaaacaggagagaggttgcatgagcacaagaaaagccttgtctcaaaagaatgctccctcattg

SEQ ID NO: 486817 - DNA, 595 bp, Homo sapiens
gtcaaggtggttactttaaggtgagattccagtccctcttcagagacacctttatatccatctgtccagatcctggtggtttaatctattcctataatgcttctaactgttcctgtatctactgcatccccttcttaaaaagctactctctgtttaaactaacttgatgttgtcaattgcaataaaaaattctatatcacctacaaaggacacaggacatgtgtatataggtaacaatacactcatttctatttttcaacatagatggcatggtgcctcaggagggaggstgggcaattgcgctacagtatttcacggggtaaacatgtggtacacacaaataactgcttgacttttacttcactgaagttttgccccacataaccctatttgagctacattaaagtccttgcaaaggatgcaaacatgtctttattcagcaatttttcccaaatgtaaacaaatccgaccaagactttggagaaatttgtgcaagttttacatgcatacgtactatgtgaacgtggaacttaccttaatatacttcagtgaaagggtaattggatgaccttaaaatctttttaaaaatcggctg

SEQ ID NO: 486818 - DNA, 595 bp, Homo sapiens
gtcaaggtggttactttaaggtgagattccagtccctcttcagagacacctttatatccatctgtccagatcctggtggtttaatctattcctataatgcttctaactgttcctgtatctactgcatccccttcttaaaaagctactctctgtttaaactaacttgatgttgtcaattgcaataaaaaattctatatcacctacaaaggacacaggacatgtgtatataggtaacaatacactcatttctatttttcaacatagatggcatggtgcctcaggagggagggtgggcaattgcgctacagtatttcayggggtaaacatgtggtacacacaaataactgcttgacttttacttcactgaagttttgccccacataaccctatttgagctacattaaagtccttgcaaaggatgcaaacatgtctttattcagcaatttttcccaaatgtaaacaaatccgaccaagactttggagaaatttgtgcaagttttacatgcatacgtactatgtgaacgtggaacttaccttaatatacttcagtgaaagggtaattggatgaccttaaaatctttttaaaaatcggctg

SEQ ID NO: 486819 - DNA, 416 bp, Homo sapiens
aaacacatcccgtataaaatcactcattcctgtttttctrtaagtttgcctggagcattgtatggcatctctcagaatgtgttgcacaactcagcagagccaaggctaagcagtgcagaggacagggtgaaagctggtattgcgcaaaaaaaaaaaaaaaaaattaacaaaaacaagcaggtgggttgtttagagtgatgcaggtgtggtttcagtaataaatcaacccacttataatgataatagcttgtgtttatgcaagttctttctttatgaagcccaatttttttaaaaaaatatgattcttttaattcaaaatgcatccctgtgattagcaagggcataggtttaattaactctgttttatggatgaggaaactcaccatgtcctctgttgataggcaagtattgcaatg

SEQ ID NO: 486820 - DNA, 510 bp, Homo sapiens
ctatttctagaatagaaacctacagtttttcaatctaagtatctttaaacatttttataataagtgatatagactcctgtagaaaccagtgcttgacaagagatttcagtattacctagaaataatactttccatgtattttgttatgaaaatatttagttttgaaaaataggctctgaagtgtttacctataaacagaaaacaacmcaatggacttatcatgatctagtcgattcctgaaattaagaggattgtgagtacatgcaaatgttttccaaaagtttattttggagatcaaaaacatcatcaaaaatgtgaaagtaatgtttttcaagaaaggccttttgcctactatcctatctctaaattttaatttggtataatgacatttaagagactaggtataaaaattatttcatcatggcatgaaatcagtgtacaaattatgttatcatgggatgaaattaaacatctagtttatagaaataaggtaaggaaaaagtaaaaata

SEQ ID NO: 486821 - DNA, 404 bp, Homo sapiens
ttccattagaaaatgatggtgttttgctagtttgagatctgcagtagcatgcaccccagtggyatggagagagctctatgtcttcctagaccccagtgtaatctttccttagcagcctttccttatatattgttgtttagggctaagatgaccccttgtttcatcatagatggattttgtattttctattttttagatttttctgttattgtgagttgatttctgtaggaagaaaatgacagagatgtctttataatgccatcttaaaattttaaggacataaatgtgcttttgattttacaaatttttttctttttccatctctatgggtgtatggcagttggcagtggagcccaacatgcatcatgtgtagcaaattttaagaggccctaaaatcccaccag

SEQ ID NO: 486822 - DNA, 404 bp, Homo sapiens
ttccattagaaaatgatggtgttttgctagtttgagatctgcagtagcatgcaccccagtggtatggagagagctctatgtcttcctagaccccartgtaatctttccttagcagcctttccttatatattgttgtttagggctaagatgaccccttgtttcatcatagatggattttgtattttctattttttagatttttctgttattgtgagttgatttctgtaggaagaaaatgacagagatgtctttataatgccatcttaaaattttaaggacataaatgtgcttttgattttacaaatttttttctttttccatctctatgggtgtatggcagttggcagtggagcccaacatgcatcatgtgtagcaaattttaagaggccctaaaatcccaccag

SEQ ID NO: 486823 - DNA, 611 bp, Homo sapiens
ctaataatgacattttgcattaccatggcacatttgtcaaaactaagaaatttaggctgggtgtggtggcttgcacttgtaatctcagcaatttgagaggtagaggcgggaagctcaggtttgcttaaacccaggagtttgagactcgccttggcaatatggatagaccctgtctctagagaaaagtaaaagaaattagctaggcatggtggcatgtgcctatagtcccatctagtcaggaggctgagtgggagcattgcttgatcccaagagttccaggaagcagtgagctatgatcacaccactgcactccagcctgggtgacagagtgagactttgtctcttttaaaaaattaagaaacttaacatgggtgcaatcctattgactacatgatagtgtgaactattatctaaggttattaatgcagtarttatgttaatatggtgaaattttttcagatttcatccgtttttgcccaacttcccatacctgttccgggatcccacctcggactcaccctctgcctttttagtcatttctccttagcttcctccagagagtacagccagacacacacctgggctgaatggtagagctgattgctcctggg

SEQ ID NO: 486824 - DNA, 567 bp, Homo sapiens
caagtacttctaattggagcacagaaactgacagatgasagttggggtgagaggtggggggaacaaactaaacttaggaaaagggagacattttatttagtaacctagaaaaatacttacatgttcaggatccagtgacttctattcattcagcctataggtatggatatacccatggcatttcagtgacccctgctcccagaccagcattaaacacaactggttataaaatttttctcaataaattgctataaatagctccaatattatattatttaataaaggcaggaaagtactaggttgagagttaactggccctggattgaaaattccttcattatgttcagatgcaccctttatcattttagagactaaaccacaaggacacaaactgaagaaagaattggaaactaaaagaatgatattcactagagacaatggaacacaatgcccttcagggtcagggacaacatctgcacaaaacaagctgtagtggatgtatgttgcacccaccagatctcccttcaggattgaagaacttagtctcctggctgctgggagtgttgc

SEQ ID NO: 486825 - DNA, 609 bp, Homo sapiens
ctgggggctgcgggtgcggactgggctccgaggccacgtggcagcgagtgaagtgcgaaaaggcaaggtcagggagtaagggaaggcaattaatgagcgggggcttactctgtgcctggagcttcagaaacagtatctcacgcagctcacagaaattaggttttattttctccactttgaggattaggaggcagcscagggaatttaagtacgttgatccagatcacacagccggtaaatggcagagtccagggctgcctgtgaaggacaggaaaagccctcatccctgcctcccagactccctcctgcttattctatttaacttcagtaaaacattattgagctgttggaaaacaatctggtggttcctcaaaaagttaaacatagattactatatgaccagcaattccacccttaggctaatacccaaaagaattgaaaacaggtattcagacaaatgcacgtacaccagtgttcacagcaacactatttacaataaccaaaaggtagaaacaactctaacgtctgtcaaaggatgaatgggtaaacaaagtgtgatacatccatctaatggaatgttatttagccattaaaaggaataaagtggcc

SEQ ID NO: 486826 - DNA, 582 bp, Homo sapiens
agatcctctatcttgtggggtcacccttctgttaatagttacatttaaatgactcaaaaccttttcccatttatgatgggaaacaacccaacaccttctccccactaagtacctttggagagtcttgactgaggactctcacagagggattctgggggctctcggggatgagacgttttcctttgtcatctctagctcccatatctcgtttccaccaaggcatatgcatctcggtggaaacaaaatattggagctagagatactggcactttggtttctttccatcctgtgctgacacaaacatgatgtggccccttwacctttggggtctacactaactctgggagtcagtgttagaattgaactgaattgttggacacccatctggggttggagaatcagacagaaacccttctgtgatggggattgctctagtggtgcctgtgcctgtacgtgtgtttggcagacctgcaaccatataggtcttggtgacagtcagaatcctgcctcatatttgcagcatccccgaaggccatattgtagctgaggtgtgggcacagtgatctaaactcagccaaccag

SEQ ID NO: 486827 - DNA, 553 bp, Homo sapiens
ctcagcctctgtctcaggcccaccgctgatggaagctggcaggtggaatgaaacccacttgccaccctggcagggcagtggcatcaaaggcctggagcctgataaagggatgaagtaaacctccctaccagcacacagtgaattctcatcttcaggagtcctgccacatcaacwgggtcactttagaaagcaacagtgattctcagtgaatggcaatggctggcttttctttgtcttccctcccctgattcctactccagtcccactgtccatcttgaccatgggccctgccagcagctggcctaacagcaccatccatatcatggagggtatggggagagtggtcaagggagcctctctttcctgcctctcccacctccctggaggccacccagggcctcatgcctgcatttcccgaggcctcccagtgtgtcctccactatgtgctgctgggctgagtcagtctgtctcagggcagtggacctttggggactttgcatggaccactcacatctctccagagcaggttgaactctcgggcgatagactcacc

SEQ ID NO: 486828 - DNA, 518 bp, Homo sapiens
tggagggcgaagcctaagagggtcccaagggagggggcagctcttctccaacacacacactcagcatctactggggttgcaggtcccacaacagaggctgccgaaggtgggaactggccttggcggctacgggtggcagaagggaggccgtctgggccccgggatctgggtgacaaatgtactacataaaaaggccagatggacgtccctgcctttggcaccacggctgctctaggaaacactgggctgcctttcataccctggattgtcgcaggctccctctctccccagctcagccaaatcataaatctagcctgccaggggagctggctgccctgaccccggcccygtgcttccccgccttggcctcacacatgccaagatccaggcacgagcagtggaaggagggactgtggggctgggcccacatggactgagagcactgtcttggtttggggctttccagaatgttcttcagccatatttttctctttttgtctttctagccttcctgtgca

SEQ ID NO: 486829 - DNA, 591 bp, Homo sapiens
caaagctccaggcctaccctgctagtccacccatttggctgcaggacagtcagctagctacccagcttctcatgaggtgtgacttcatccctgactcctggcctcctttaggccccaagtaggagcctggggctctttgttccctcttcccaggggctccactcagtgaaaagatactccaagtctcattggctcaactcattacaagaagtagagagatttacttctgaggccttcattatcacctaattgtgttcccactaaactctcattaattagccactctaaagctgtcagcacaattaaatagacttattgacttatagactttgagggtgggaagacaacttcagcaagtccaacctgtccaaccctttcatgttagaaatgaggaaaatgagggcgagagatggcaggtgactcaaccaaggtcacacaacagctagtgatggagtcggagctagaaacccaggcggtcaagttccagcccggaggccctccttcccactacaccacattcctaagggaaarcaatgccacctctcaccttctatcatctttcatttcccaaagcagtaatttagaattgag

SEQ ID NO: 486830 - DNA, 642 bp, Homo sapiens
gtggtgttttgaggggtcagtagtttgagcccaagtataggaacctagattgcatgatgtttgtctaggaccattgtctggctggtgactcattctgaagcttgattttgtcaccagtcccatctgacattggatatgcatggactgagattgatttgccctctccctgcctccttccatttcttgggacctgggaggccatggtggccagtggggcccagtcagaagggccagagagggcttctgaaggcgacatcatacccggctgcggagggaagygggtggcagagttccattgtgtcagccacttcactccctctggattttccagccctggctgctggaactttaaaatatttcctcctgtaggctctcaaaagtgcgacacaatggttgtcttttcacatttgtcatccttgagggttttttcaaagctgcaattaaggtgctctggcaaaggtagttgtgacagtaaagcagcagggagactgtgtcaccaccagccaccttgtcctgaactttggggcaagggagggcccctgcgagcctccctcctcctagcagatgatgacctaggactggcacacagtcacgctgcggaaacaggctccagagaggtcaggcggctgcctaaggttttgc

SEQ ID NO: 486831 - DNA, 642 bp, Homo sapiens
gtggtgttttgaggggtcagtagtttgagcccaagtataggaacctagattgcatgatgtttgtctaggaccattgtctggctggtgactcattctgaagcttgattttgtcaccagtcccatctgacattggatatgcatggactgagattgatttgccctctccctgcctccttccatttcttgggacctgggaggccatggtggccagtggggcccagtcagaagggccagagagggcttctgaaggcgacatcatacccggctgcggagggaagtgggtggcagagttccattgtgtcagccacttcactccctctggattttccagccctggctgctggaactttaaaatatttcctcctgtaggctctcaaaagtgcgacacaatggttgtcttttcacatttgtcatccttgagggttttttcaaagctgcaattaaggtgctctggcaaaggtagttgtgayagtaaagcagcagggagactgtgtcaccaccagccaccttgtcctgaactttggggcaagggagggcccctgcgagcctccctcctcctagcagatgatgacctaggactggcacacagtcacgctgcggaaacaggctccagagaggtcaggcggctgcctaaggttttgc

SEQ ID NO: 486832 - DNA, 620 bp, Homo sapiens
actatattagtaaatgacatttagtgagatcttactctctagtggtaagcatrttatgtgcccacacaacctggcaattagtaacatgagtatctccatttaacataagaggaaaccacagcttgaagagattaacctttcacaaggccacatggttagcaggtggcagaatcagaaatgtggtctatacagagtcagagctgtgttcttaatgtctattctaaatagttcatccagtcaacttaaaataagaagatggctggttagttaatggcattgaaggaaaagtagccagtaggagagttagctgggcttttttgtttgtttgttttcatttttctccaggtcatttcactttttttaggcctcctacggcctgtgtcaatctatgcctatgattcaaaatccaatgcatgtggttttcaattttcaatgaaatcataccatgtacgactaaatacagtaagtaactgaccataggaaaaggagcaaaagttttccaagagttgtttttaaagtatcagtgaaactcagttaagactatgccgcatactggttatgtgttgaaagaagcagaatacttttcttgctgtgtaaaaattataaacacaattttagaa

SEQ ID NO: 486833 - DNA, 620 bp, Homo sapiens
actatattagtaaatgacatttagtgagatcttactctctagtggtaagcatattatgtgcccacacaacctggcaattagtaacatgagtatctccatttaacataagaggaaaccacagcttgaagagattaacctttcacaaggccacatggttagcaggtggcagaatcagaaatgtggtctatacagagtcaragctgtgttcttaatgtctattctaaatagttcatccagtcaacttaaaataagaagatggctggttagttaatggcattgaaggaaaagtagccagtaggagagttagctgggcttttttgtttgtttgttttcatttttctccaggtcatttcactttttttaggcctcctacggcctgtgtcaatctatgcctatgattcaaaatccaatgcatgtggttttcaattttcaatgaaatcataccatgtacgactaaatacagtaagtaactgaccataggaaaaggagcaaaagttttccaagagttgtttttaaagtatcagtgaaactcagttaagactatgccgcatactggttatgtgttgaaagaagcagaatacttttcttgctgtgtaaaaattataaacacaattttagaa

SEQ ID NO: 486834 - DNA, 620 bp, Homo sapiens
actatattagtaaatgacatttagtgagatcttactctctagtggtaagcatattatgtgcccacacaacctggcaattagtaacatgagtatctccatttaacataagaggaaaccacagcttgaagagattaacctttcacaaggccacatggttagcaggtggcagaatcagaaatgtggtctatacagagtcagagctgtgttcttaatgtctattctaaatagttcatccagtcaacttaaaataagaagatggctggttagttaatggcattgaaggaaaagtagccagtaggagagttagytgggcttttttgtttgtttgttttcatttttctccaggtcatttcactttttttaggcctcctacggcctgtgtcaatctatgcctatgattcaaaatccaatgcatgtggttttcaattttcaatgaaatcataccatgtacgactaaatacagtaagtaactgaccataggaaaaggagcaaaagttttccaagagttgtttttaaagtatcagtgaaactcagttaagactatgccgcatactggttatgtgttgaaagaagcagaatacttttcttgctgtgtaaaaattataaacacaattttagaa

SEQ ID NO: 486835 - DNA, 503 bp, Homo sapiens
ctgggtgatttctctatgatcccataattaggtattcaacaacagaccaaaaaatgtcaataatatataattatttgctagtaaaattttagtcaggctatagaatcccaggayattataaagtatgcttatgaagtgagtacatgcttcattgcacattataacagaacttaaaagacacatgttccttcaattcccaagccattcatcccttcctgaaatagtataggaattaaagttttcccaaaaacaacctaagtggaagaaggccaaaccactataaaggtaaaagtaaattttaccttttagatttagtgatttttaaaattgatattcaccatcctatagaatgaggagattcagctatattaagtttcaaaaattgtagaacaatgaagtttcttttattttctttttttattatactttaagttctgggatacatatacagaatgtgctggtttgttacataggtatacatgtgccacggtggtttgctgcac

SEQ ID NO: 486836 - DNA, 503 bp, Homo sapiens
ctgggtgatttctctatgatcccataattaggtattcaacaacagaccaaaaaatgtcaataatatataattatttgctagtaaaattttagtcaggctatagaatcccaggacattataaagtatgcttatgaagtgagtacatgcttcattgcacattataacagaacttaaaagacacatgttccttcaattcccaagccattcatcccttcctgaaatagtataggaattaaagttttcccaaaaacaacctaagtggaagaaggccaaaccactataaaggtaaaagtaaattttaccttttagatttagtgatttttaaaattgatattcaccatcctatagaatgaggagattcagctatattaagtttcaaaaattgtagaamaatgaagtttcttttattttctttttttattatactttaagttctgggatacatatacagaatgtgctggtttgttacataggtatacatgtgccacggtggtttgctgcac

SEQ ID NO: 486837 - DNA, 607 bp, Homo sapiens
ctttagtttctgctctgctgcgatggaggtgctaggagatatccaaatcccctgaatgcctgagtgatggatctgggctctggaaagcatggttcaagtgtgtcatgtgacactaggagaccagacacatgggggtggtgagtgaaatgaacaggggrtccaacctggccatggagaagcattgcagggactagaacaggcccaagaacgccctgagcatctccactgagttgctgctgaagctacacatacactcagaactaaacgggctggaaaccttcattcaaagcctagctatgttatactttggtacagctcctgtagctcaacctcaggctgggataaggtaaggtatgaatgtggggcaagtcctgagctgccatgattttgtattgtagagaggttcctactcgtaaggatggaaagcaacctttctgcatctcttcaaggtatcttgctctcctgattccccatttcttattcctcctatcagcccatcactgttgagagggccgcagattctcccatgcacctaggggagatttgctctgttgtccctgatttcagggaactgaatgctgtccagaactctgcaaaaccaagacca

SEQ ID NO: 486838 - DNA, 603 bp, Homo sapiens
tgcaggagacagtcagaattcagtggttttaaatcttggctgcacattcaaatgacctgggaagcctctacaaatctggatgcctgggtcatgctccagagcaatttcaatggaatctctagaggtggaatccaagtackttcaagctccccacatgatttgtatcttcagccaagtttgaggcccaccatcaagaccagattgtcactttccagccctgggagtttgaaggggaagagacatagaaataacttccagattatttcttctgaggatcctcagtttcttctgaggatatctgagcttggcaggtgaggtgcaggcactgtttgccccaaggagatatggggttggtgagagcagaattccaccagtttttctattttctcttcccacaaccctgctgggctgcttcctgccttgggacaaagccaccacttcacaacctcatttgaaataacatccccagtcaactcaagagcttctcacagtgttctcttctttacttttctggctcctgtggggttaataggggtgagaggtgggatggacatccagcagcctcgctagttcagcatcttggcctgaactggagctacttag

SEQ ID NO: 486839 - DNA, 452 bp, Homo sapiens
aaactgattttggaattctgacccatagaactgtaagattataaatttgtgctgtattaagcaactatatttgtggttctttgttagagcaactataaraaagtaatgtgtggaaattaaaaacaaaagctgcttttgtggttacatacatttaaaattatcataatgtttatatttgtcaacttcttataactcacagtttttgttatatcctttccttcttaaaatatttattttcctacctacttctatatccataatgtctatattatttttcttaaagaacccactaaatgtatcagttttgagtccccagaaaaactggatccactaaaatggattattaaatcttggctattgcaaatagtgctgcaataaacatgggagtacaggtatctcttcaaaaaaaaaaaaatgccccaggaaggcagcaagtagagagctttaaacca

SEQ ID NO: 486840 - DNA, 278 bp, Homo sapiens
attcccaccaacaatggataagaatagctgtttccctatagccttgccaatragtgtattgtcaagctttcaaatttttgcaaatatgatggggcaagtttggatttcaaggaaaggaacacagctatgcacattaaagatttatgatggaaaaataaaaaccagacatagaaaaattgttggagagattgagggcagaatagatgaccaaatgcattttacattataagtatataaattagggattaagaagtacaatgagatgaaagaaggaagag

SEQ ID NO: 486841 - DNA, 278 bp, Homo sapiens
attcccaccaacaatggataagaatagctgtttccctatagccttgccaatgagtgtattgtcaagctttcaaatttttgcaaatatgatggggcaagtttggatttcaaggaaaggaacacagctatgcacattaaagatttatgatggaaaaataaaaaccagacayagaaaaattgttggagagattgagggcagaatagatgaccaaatgcattttacattataagtatataaattagggattaagaagtacaatgagatgaaagaaggaagag

SEQ ID NO: 486842 - DNA, 559 bp, Homo sapiens
cacgactctattctatccagtttcctggataaaacatagttcataaccggttaaaatttctggtcaattccaaacaggcgcatatttatttagatgtttagaactgctctgtggagcccagccctttatttcctccaaagaatttgttgatctactgaaaattttctttcaaaaacaaccttatggatgtgttttgtaaaagtctcatttagaacctttggggcctcactcagtcacccctgaatcctcatcttttcatgtacacacctctgtccgttttctcctcttttcttcctaattagctgcctgtataattaaacctttcctcatttagaggttctgagccctcactgatrcactaatcaccctgtggccctcctgttgcctcgtctatttccttttgagatggagggcccagcactgaacggcagtcaaggtcgggccgcccgcatttgtattacacactagttcgccattaccatggtgttcgctccttaatacagactaatagctcattctccttcatgacctccagtgagcactgtgcagccatattcag

SEQ ID NO: 486843 - DNA, 614 bp, Homo sapiens
gtcagggtccccagagtctgtgccgacctgaagcctacgcttcccttccctcccaactaaagaacagagacygcacacacacacacacaaacacacaaacacacgaacacaaacacaaacgaacacacacacgaacacccacattaacacacagacacacgaacaaacacgaacacacacacgaacgcaaacacaaacacacacaaacacccacacgaacacacacagacacacacgaacacaaatatccaaacacacccacatgaacacacacaaacacccacacgaacgaacaaacaaacacccacacgaacacacacccacacgaacacaaacacacccacgaacacacacacatacgcacccccacacgaacacacacacacgaacacaaacacccacacaaacacgaacgaacacacacacacacacacacacacacacacacacacacacgaagctggtggctcaacctgccccaaggacagatctccaagaattcaggagggaaaagcgatccctcttctttccagcccccttgggggtattcccctgggggtcttgaaagggagaggggtacctcagatgttggggataaggctctttgggagtta

SEQ ID NO: 486844 - DNA, 614 bp, Homo sapiens
gtcagggtccccagagtctgtgccgacctgaagcctacgcttcccttccctcccaactaaagaacagagactgcacacacacacacacaaacacacaaacacacgaacacaaacacaaacgaacacacacacgaacacccacattaacacacagacacacgaacaaacacgaacacacacacgaacgcaaacacaaacacacacaaacacccacacgaacacacacagacacacacgaacacaaatatccaaacacacccacatgaacacacacaaacacccacacgaacgaacaaacaaacacccacacgaacacacacccacacgaacacaaacacacccacgaacacacacacatacgcacccccacacgaacacacacacacgaacacaaacacccacacaaacacgaacraacacacacacacacacacacacacacacacacacacacacgaagctggtggctcaacctgccccaaggacagatctccaagaattcaggagggaaaagcgatccctcttctttccagcccccttgggggtattcccctgggggtcttgaaagggagaggggtacctcagatgttggggataaggctctttgggagtta

SEQ ID NO: 486845 - DNA, 614 bp, Homo sapiens
gtcagggtccccagagtctgtgccgacctgaagcctacgcttcccttccctcccaactaaagaacagagactgcacacacacacacacaaacacacaaacacacgaacacaaacacaaacgaacacacacacgaacacccacattaacacacagacacacgaacaaacacgaacacacacacgaacgcaaacacaaacacacacaaacacccacacgaacacacacagacacacacgaacacaaatatccaaacacacccacatgaacacacacaaacacccacacgaacgaacaaacaaacacccacacgaacacacacccacacgaacacaaacacacccacgaacacacacacatacgcacccccacacgaacacacacacacgaacacaaacacccacacaaacacgaacgmacacacacacacacacacacacacacacacacacacacacgaagctggtggctcaacctgccccaaggacagatctccaagaattcaggagggaaaagcgatccctcttctttccagcccccttgggggtattcccctgggggtcttgaaagggagaggggtacctcagatgttggggataaggctctttgggagtta

SEQ ID NO: 486846 - DNA, 566 bp, Homo sapiens
ctaatttttgtatattttttagtagagacggggatttcaccatcttggctaggctggtctcgaactcgtgacctcgtgatccacctgcctcggcctcccaaagtgctaggattacaggcgtgggccaccatgcccagccttggctatatttcgtatagctgtgattcaatgcagatttttttttttttttatgagatggagtttcactcttgtcacccagggtggagtgcaatggtgcaatctcggctcactgcaayctctgtctcctgagttcaagcaattctcctgcctcagcgccccccgagtagctgagattacaggcacctgccaccacacccggctaatttttgtatttttagtagagacaaggtttcaccatgttgggcaggctggtctggtttcgaactcctgacgtcaggtgatcctcctgcctaggcctcccaaagtactgggattacaggcgtgagccgccgcacccggccatctgttttctgtatgttcttatatgtgaacacctgtgcagttgtcttctgtacaggtttggttccacacaggtgtttaccata

SEQ ID NO: 486847 - DNA, 565 bp, Homo sapiens
tctctaaggccacatgttctcacatgtacatttcttccagtccttacctcattcttttttctctctacagaggcattctcttcttctccctgcatgcggcttaagcaagcttcacactgtgtttaaatagtatttctaagtcccactccccaaccctggcacatgaaatccgaatgacccatacccaatcctggcctatcactttgtccaaggggcagaatcatgagatctgaaaccagctcagtgggtcctacaggattaaattttstgagatcgggctggacagattttcttcaagaaagcatagacccaggaaaaaaagaggcagaaagaatgacctgcattttaagaagacacaatagttggataaacattaaagaaatatttcttaaaaaccatataattcatttatttattttgttttctctctcctgtctttatggagattgtaaattttacaaaggcaggatttttttttctgttttgtttactgttcaagtgcctagaacagttccttgcagtaaatttttgcaaaattcgtgaataaaaacctttggataatgac

SEQ ID NO: 486848 - DNA, 500 bp, Homo sapiens
caaattgttttagaatttaaatatcagtgatttaagtcactgttccctcttcctgtataattttttttttctgaaatgcaataggtcatctaaccagtagatcayacaaaatcctgtgatgatattttttaaaacacttttcaggaagcttataaaatatgtaactggattactcaagtgaaagtaagctgtcagaagatgtggaagtgagtcaggctggaagtagaggtaagagacgaaaatcactatagcagcagactagggcaagagtcattaatgcagccaaccactatatttaattctgatcttcatcatagacaaggccaaaaaaccaaaggcagtgagatatgaaataaatctattggggaaaacgttctctttcctactattaaatcttataagaaacttatatacgcttacatgagacagagagatgttaaatttgctgcatataacaggaaaaccccaaataaaaatgatttaaacaaagtagcagctat

SEQ ID NO: 486849 - DNA, 452 bp, Homo sapiens
ctggcaaagggctcatgcacaaaagcacgtggcatgttgggaagtataaatattgagatgtggctgggatatgagggtgctgggggaggaggaatggctggaacactagaatagaatcaaggcttttttaatataggtcgggacttaaactgatggacggagtgatttctactttatccagggagcatggaaagccttggaaggttttaagcagggaagttgcaaatcagatattccctctggtgatcccttcatcagccgaggagataggacttgactggagggtgggagaccacgaggaggctgtgaccrtcatacagataagaggtggcagtggcatggtgagggaatggcactggcattggggtcggaaggagtagacagatttgggaaacagtccaggatctacttaacatggaggtgagggagggggaactctcaaggtgatactc

SEQ ID NO: 486850 - DNA, 617 bp, Homo sapiens
agatacatcttatacttcattttactacagattagtgctagcactaaaaataaaagagaaatttaaaattaagaaaattccatccattaactgaagttttcctgtatttcaaacaagactgtccttatctgagttcagtaatggaaagccttgttcctccactcttatccttcccatagaatacttttctgaaaatctttttttttcctaagttaattaacagggtgaaagtctcttttaactcatcagatgtcagacttgttgtatagtgacagagaacctactcacctgartgttctgtgtttccattcactccttctttcattaacaaatacttattttgaatgtctacaatatgtgaattacagttagttacacgtatgcaggatgcctccatgattaaaacagagaaagtccttgtccttgtggagtttatattccagtggaggaagacataaagtgagcataataaagacatagattatctagaaggtgatgaatggtttggaaaaaaataagacagcatggtgagatgatagtggtgagagggcagagagaggcagacagggtaggcctcattgtggaggtgacatttgaacagagactagagaaggtga

SEQ ID NO: 486851 - DNA, 571 bp, Homo sapiens
gaagccaagaataggagccggagaacagaatggagccaggcttatgttctgtgtctcccgtggatgaaccatgcaggagtcactctttgcccacatgacatactgattaatttatggagccactaagtatgttcgattggtcttaggacaagctctgacaactatccagtaacagtggagggcagagagaatggctttttgagtcagacrtcggtgtcaataccacttttgcctctgacttgctgggtgactttgccaaattcacttctctgaggtttagtttgctcatataaaatgaaggtaggaatgcctgccccatgaagttgttgtgggattaaagcaaaaagctttaaggatttggacagcttggacctagtaagcccttgaagaatgctagctataaatttatttttgaatcacaacacagtctaatatacctactcttccacagtgtatcaagattaatgactaattttgagaagtaccgaatcccatcctaacaaatggtctcttacaaattatttagtacaacattattcttttatggaggaaatgattgtgatccagaaag

SEQ ID NO: 486852 - DNA, 571 bp, Homo sapiens
gaagccaagaataggagccggagaacagaatggagccaggcttatgttctgtgtctcccgtggatgaaccatgcaggagtcactctttgcccacatgacatactgattaatttatggagccactaagtatgttcgattggtcttaggacaagctctgacaactatccagtaacagtggagggcagagagaatggctttttgagtcagacatcggtgtcaataccacttttgcctctgacttgctgggtgactttgycaaattcacttctctgaggtttagtttgctcatataaaatgaaggtaggaatgcctgccccatgaagttgttgtgggattaaagcaaaaagctttaaggatttggacagcttggacctagtaagcccttgaagaatgctagctataaatttatttttgaatcacaacacagtctaatatacctactcttccacagtgtatcaagattaatgactaattttgagaagtaccgaatcccatcctaacaaatggtctcttacaaattatttagtacaacattattcttttatggaggaaatgattgtgatccagaaag

SEQ ID NO: 486853 - DNA, 571 bp, Homo sapiens
gaagccaagaataggagccggagaacagaatggagccaggcttatgttctgtgtctcccgtggatgaaccatgcaggagtcactctttgcccacatgacatactgattaatttatggagccactaagtatgttcgattggtcttaggacaagctctgacaactatccagtaacagtggagggcagagagaatggctttttgagtcagacatcggtgtcaataccacttttgcctctgacttgctgggtgactttgccaaattcacttctctgaggtttagtttgctcatataaaatgaaggtaggaatgcctgccccatgaagttgttgtgrgattaaagcaaaaagctttaaggatttggacagcttggacctagtaagcccttgaagaatgctagctataaatttatttttgaatcacaacacagtctaatatacctactcttccacagtgtatcaagattaatgactaattttgagaagtaccgaatcccatcctaacaaatggtctcttacaaattatttagtacaacattattcttttatggaggaaatgattgtgatccagaaag

SEQ ID NO: 486854 - DNA, 571 bp, Homo sapiens
gaagccaagaataggagccggagaacagaatggagccaggcttatgttctgtgtctcccgtggatgaaccatgcaggagtcactctttgcccacatgacatactgattaatttatggagccactaagtatgttcgattggtcttaggacaagctctgacaactatccagtaacagtggagggcagagagaatggctttttgagtcagacatcggtgtcaataccacttttgcctctgacttgctgggtgactttgccaaattcacttctctgaggtttagtttgctcatataaaatgaaggtaggaatgcctgccccatgaagttgttgtgggattaaagcaaaaagctttaaggatttggacagcttggacctagtaagcccttgaagaatgctagctataaatttatttttgaatcacaacacagtctaatatacctactcttccacagtgtatcaagattaatgactaattttgagaagtacygaatcccatcctaacaaatggtctcttacaaattatttagtacaacattattcttttatggaggaaatgattgtgatccagaaag

SEQ ID NO: 486855 - DNA, 580 bp, Homo sapiens
attctgttgcccaggctggagtgcagtggcatgatttcggctcactgcagcctccacctcccaggttcaagcgattctcctgcctcagcctcccamgtagctgggatacaggcgcctgccactacgcctggctaattttcacatttttagtagagatgaggtttcaccatattggccaggctggtctcaaactcctgacctagtgatccacccaccttggcctcccaaagtgctgggattataggcatgagccaccatgcccggcctcaacttatattttcgttactcttgagtaaataccaagtagtaaaactgctaatatgctaattttatgtttaacagaataaagaactgtccaactgtttcccaaagtagaatttcactgtgactttaatctgcattttcctagtgataaataatgttgagcatcttttcatgtgcttattagccatttggctatttacttttgacttttagtaaatataatttcagaaaaccccatgaccaaataaagcttaaaatatgtttttgaggacccaagaaagttgtacctggcataaacagagccacttacttgtta

SEQ ID NO: 486856 - DNA, 580 bp, Homo sapiens
attctgttgcccaggctggagtgcagtggcatgatttcggctcactgcagcctccacctcccaggttcaagcgattctcctgcctcagcctcccacgtagctgggatacaggcgcctgccactacgcctggctaattttcacatttttagtagagatgaggtttcaccatattggccaggctggtctcaaactcctgacctagtgatccacccaccttggcctcccaaagtgctgggattataggcatgagccaccatgcccggcctcaacttatattttcgttactcttgagtaaataccaagtagtaaaactgctaatatgctaattttatgtttaacagaataaagaactgtccaactgtttcccaaagtagaatttcactgtgactttaatctgcattttcctagtgataaataatgttgagcatcttttcatgtgcttattagccatttggctatttacttttgacttttagtaaatataatttcagaaaaccccatgaccaaataaagcttaaaatatgtttttgaggrcccaagaaagttgtacctggcataaacagagccacttacttgtta

SEQ ID NO: 486857 - DNA, 540 bp, Homo sapiens
aatataacagcctctcattttcccccttttgaacagaaagaactatagaattttcctatgcttgccccaccattgaatgtttagtgtgtgaaaggcagatgacttatctttttagttcaaaggttttccaaagaaccttaattcaaaggctttcaatattcaagaagccttagccaaggagccttatctgygtctggaattgatttggaagacaaaacgctgaacttgaaactaatgcagtaatggaataagacatggggggtttgagggcagaaatgagtgtattttgcatgtaggagagctatataagtggttgtggttagaggatggactgtggcagattatattttcctgagatgaccccaatgatttttcccattccacatgttgtttcttacatataactctgacactcaagccttggagtctatattacctcaccttgaatttctgaccatggcataaatgaagctatctgatttcagagactggatcataaaagtcaatgcagctctcaccttgctcactgtaatacagtat

SEQ ID NO: 486858 - DNA, 595 bp, Homo sapiens
taattcctttaactttcaaacaaacctatgtagtaggtactattattatccttatttagacctgaagacacagaggaacagatatgctgagyagattatcaaatgtcacataaatagtgagtggaggcagacacggtggctcacgcctgtaatcccagccctttgggaggctgagacgggcaggagttcgagaccagcctgaccaatatggagaaaccctgtctctactaaaaatacaaaattagctgggcatggtggcgcatgcctgtaatcccagctactcaggaggctgaggcaggagaagcgcttgaacctgggagcagaggttgcggtgagccgagatcgtgccattgcactccagcctgggcaacaagagtgaactctgtctcaaaaaaaaaaaaaaatagtgagtggatgtatccaggccgactgatttccagagccatctcttttcacctccatactactctgcatatactgggatattctcagaattaagaggactaattgttataattttctagttaaagggaaagggtcaaaatttaattgtggaaggttgacgactgaagatactgcagtgccttaagaacac

SEQ ID NO: 486859 - DNA, 595 bp, Homo sapiens
taattcctttaactttcaaacaaacctatgtagtaggtactattattatccttatttagacctgaagacacagaggaacagatatgctgagtagattatcaaatgtcacataaatagtgagtggaggcagacacggtggctcacgcctgtaatcccagccctttgggaggctgagacgggcaggagttcgagaccagcctgaccaatatggagaaaccctgtctctactaaaaatacaaaattagctgggcatggtggcgcatgcctgtaatcccagctactcaggaggctgaggcaggagaagcgcttgaacctgggagcagaggttgcggtgagccgagatcgtgccattgcactccagcctgggcaacaagagtgaactcygtctcaaaaaaaaaaaaaaatagtgagtggatgtatccaggccgactgatttccagagccatctcttttcacctccatactactctgcatatactgggatattctcagaattaagaggactaattgttataattttctagttaaagggaaagggtcaaaatttaattgtggaaggttgacgactgaagatactgcagtgccttaagaacac

SEQ ID NO: 486860 - DNA, 611 bp, Homo sapiens
agtaatttcaccattgttttttgtattgctttattttcataaccagaagagtatgtaaagatagatagatagacacagatagatagattgatagatagatcgatagacagatagatagatacaggctctccttttaagggaggagatgttgccttcattcccttgaatattattgatttagataattcccaaagaaatgtataaccaaaaccacatgatttgaaaaacttctcaaaatttcctttaatcagtttaaacaaattactgccaattctatttcacttagttcttcatagggctatttaaaaycaggacaccaagttggcatggctgcctaatacagaagatagaatttactcaaaatactgcaactcaagaaactcagtttgaaatatattatttaaggacatatactgtattgaaacccaattcacatcatgctggaatgacatctattataatagctaatgtttggtgaaattacacagtccattgaaaaaaatctaaagttctggctcctagatattccattggccttatggtataccattgatagcaagatacttccaagaaataagaaataagatagtgagtacaactgtgccttattt

SEQ ID NO: 486861 - DNA, 465 bp, Homo sapiens
agatccactacaactagcacctggcaggaggcaccggcctgccttcccgtgctgcccagcgtgcgtctgcaatacacgctgctctacgcgggatcgagcacccggggctcaccccctcactaccagggatcaaggtacacggatccggaattttttattgtcataattaagaacaatgctgccattttaatttggcaatgcaaatgatacgtaaaagtgaacgatggagacatccttacaccaagcgttgcaactatttactcaagacagttcaccctgagttggattgagttgaatctcagtctcaatctctcccccacccccgtgtctctctttggcaaccccgcctccaatagtagataytaacattctcaatagggaaatattcaactctcttccgagtcataatatttacatgagataaaaaggggatcactctttaacattggaatctttggggatgac

SEQ ID NO: 486862 - DNA, 541 bp, Homo sapiens
aatttatattttccagcattgatgatgtatatgtggacagtatttctgctttcttcctgtgagttctgtggtatttaagcagttctaaccaaacagacatttcttagacctttgcttgtactatttggatttgtccaagttaattttagtacaatggccattrtgcatgtgtgcatgtgtgtttgtccatgtgcctgtgagtgctgctgatatctgaaaagcacagagcagagatagaaatgagtaaagggataataccaccagttcttactacatacatgcaccctgtgattttaaccctttttaatactttaccaaaatgttatattgagagtcaaatcctattgctattaatctgtaacaaaaatgtgttacatttttgatgaagtctggttgtggatacttcaaaacatttatcattgtttagggtcttttcttccagacttctgtccagcttgttaaaggtgacaatgctgtaatgcaaaataacatcagatgacagaattccaaagaaaggttactagtctaggttctggtacta

SEQ ID NO: 486863 - DNA, 518 bp, Homo sapiens
gaaaacaccagcatttactgaacgcaagatactctcaagagaattcattcattcactcactgattctttcaaccaaaatttaytaagcatatactctgacgggcattggtctctaggttacttaaggtctcctaggagcattaaattcttttagtttggatgacataacagtttatttttgtcatcctcagagtttttatgtgatttgttttttgtcataaatgcaaaccaaaacctctcatttttcctatctccagccaaaatttccccaatgatccaaaaacctaaattttcttctgtcagttctttttccagaagtacattatgtttaccgtagctctgcatttagtaagggggcaagaaattaacacaatttgcctgactagaggagtatttaaaaactcttctgtttggggattgtcatataatttccaggttttcacagaggaaatggaattaagatgaaggtcatcattaaattgaaacaaaatttactccttttgtagctcatcagctac

SEQ ID NO: 486864 - DNA, 631 bp, Homo sapiens
aatatttcatagcccttcagtcacagtatcctctggatcagtggtagacagtacagtaacgaggcaaacctctgacttcctgcttgtgagaatgcccttctcctttccagtctacatctgtacttacggacacagtcacactagaggcatggagtttctgagtgaataacagtagatrtaggacaaaaaatcaacttggtcgtgctaatggtagtcataaaagcatctgtttttcctaacacgttttctggtggtggctagcatagggacaattgaattgtacagatttaatttctgcattaggcagaaaatgagttaatacaagccaaatgccaattttttgtgccctctaaattattccattccaacgggatcaacacttagtagagggcacatttggttttgttccttctatctgtgaggcaaacacatctcagaagtttctgggtctgttcctaactaaatgtcacatcgtctccattggcctccatttccttattagtaaaatgaccggttacctttaaaatcccatccaactctgctgccctctctcagctggtttcttcaactatgtagtagagatatgttactgtgaagtttaaggagtttctttaaaaagaccttttacccc

SEQ ID NO: 486865 - DNA, 631 bp, Homo sapiens
aatatttcatagcccttcagtcacagtatcctctggatcagtggtagacagtacagtaacgaggcaaacctctgacttcctgcttgtgagaatgcccttctcctttccagtctacatctgtacttacggacacagtcacactagaggcatggagtttctgagtgaataacagtagatgtaggacaaaaaaycaacttggtcgtgctaatggtagtcataaaagcatctgtttttcctaacacgttttctggtggtggctagcatagggacaattgaattgtacagatttaatttctgcattaggcagaaaatgagttaatacaagccaaatgccaattttttgtgccctctaaattattccattccaacgggatcaacacttagtagagggcacatttggttttgttccttctatctgtgaggcaaacacatctcagaagtttctgggtctgttcctaactaaatgtcacatcgtctccattggcctccatttccttattagtaaaatgaccggttacctttaaaatcccatccaactctgctgccctctctcagctggtttcttcaactatgtagtagagatatgttactgtgaagtttaaggagtttctttaaaaagaccttttacccc

SEQ ID NO: 486866 - DNA, 631 bp, Homo sapiens
aatatttcatagcccttcagtcacagtatcctctggatcagtggtagacagtacagtaacgaggcaaacctctgacttcctgcttgtgagaatgcccttctcctttccagtctacatctgtacttacggacacagtcacactagaggcatggagtttctgagtgaataacagtagatgtaggacaaaaaatcaacttggtcgtgctaatggtagtcataaaagcatctgtttttcctaacacgttttctggtggtggctagcatagggacaattgaattgtacagatttaatttctgcattaggcagaaaatgagttaatacaagccaaatgccaattttttgtgccctctaaattaktccattccaacgggatcaacacttagtagagggcacatttggttttgttccttctatctgtgaggcaaacacatctcagaagtttctgggtctgttcctaactaaatgtcacatcgtctccattggcctccatttccttattagtaaaatgaccggttacctttaaaatcccatccaactctgctgccctctctcagctggtttcttcaactatgtagtagagatatgttactgtgaagtttaaggagtttctttaaaaagaccttttacccc

SEQ ID NO: 486867 - DNA, 668 bp, Homo sapiens
ctgcagtgtttagaattgcaggggcctcaaggcaagatgtgaaatatccttctgccaactcttctcaaccacatattgaggaaaatgaacctgcctctcaggattggtatgaagaatagcttataaaaatgagtgygaaaccctttgcaaataccaaatgctgtatgaatgttaagtaataataaagatctgtataaatgcagcgaagcagcccaacctccaggtgctttttcaaactggacaccagccatttaagattcatccatcattcactttcgggcatccttttctttatgaaaaaataaaataggctgtctacattgcaaggaaatggaaaaatcgaatttcaaagcatataagcccctataccttgatcattcaaagtaatgggttctgttagtgagttaatgaagataatgttcgtgaagtaatgaaggggtaaaaatatcaattacaattatggctttgttttcttctcagaaagcacaagattctagctgcaagtagattttgaagacatgaagacatgtggtacacagccgctatcacagggcaggcattattcactgtgtctatccctaactcctccaagaactcacttgtcagtaatccccaagcattgtttgtctctatgttgaagaacaaggagggggtgaaatacagtgttc

SEQ ID NO: 486868 - DNA, 668 bp, Homo sapiens
ctgcagtgtttagaattgcaggggcctcaaggcaagatgtgaaatatccttctgccaactcttctcaaccacatattgaggaaaatgaacctgcctctcaggattggtatgaagaatagcttataaaaatgagtgcgaaaccctttgcaaataccaaatgctgtatgaatgttaagtaataataaagatctgtataaatgcagcgaagcagcccaacctccaggtgctttttcaaactggacaccagccatttaagattcatccatcattcactttcgggcatccttttctttaygaaaaaataaaataggctgtctacattgcaaggaaatggaaaaatcgaatttcaaagcatataagcccctataccttgatcattcaaagtaatgggttctgttagtgagttaatgaagataatgttcgtgaagtaatgaaggggtaaaaatatcaattacaattatggctttgttttcttctcagaaagcacaagattctagctgcaagtagattttgaagacatgaagacatgtggtacacagccgctatcacagggcaggcattattcactgtgtctatccctaactcctccaagaactcacttgtcagtaatccccaagcattgtttgtctctatgttgaagaacaaggagggggtgaaatacagtgttc

SEQ ID NO: 486869 - DNA, 668 bp, Homo sapiens
ctgcagtgtttagaattgcaggggcctcaaggcaagatgtgaaatatccttctgccaactcttctcaaccacatattgaggaaaatgaacctgcctctcaggattggtatgaagaatagcttataaaaatgagtgcgaaaccctttgcaaataccaaatgctgtatgaatgttaagtaataataaagatctgtataaatgcagcgaagcagcccaacctccaggtgctttttcaaactggacaccagccatttaagattcatccatcattcactttcgggcatccttttctttatgaaaaaataaaataggctgtctacattgcaaggaaatggaaaaatcgaatttcaaagcatataagcccctataccttgatcattcaaastaatgggttctgttagtgagttaatgaagataatgttcgtgaagtaatgaaggggtaaaaatatcaattacaattatggctttgttttcttctcagaaagcacaagattctagctgcaagtagattttgaagacatgaagacatgtggtacacagccgctatcacagggcaggcattattcactgtgtctatccctaactcctccaagaactcacttgtcagtaatccccaagcattgtttgtctctatgttgaagaacaaggagggggtgaaatacagtgttc

SEQ ID NO: 486870 - DNA, 576 bp, Homo sapiens
atggagaagatgtttgacttcatttaaagtgagtcaaaaccttcttgagaggcagataacaatatgtcttaagacccactagactcagtaattccagttttgaaatttaagaatgtgccccaagatttagcaaaaattagacgctaccacagtgtccaaataaataaataaataaataggaacttattgagttctgaaatatccataaaatgaaacaytctgaaacattaaaaaatgatgtgagagaagtttatttattgtaaaagaaagatattcaagattaaagtagaaatttgacacagctattttatgtgtcatttttgggtatggccattttttcccagcttaactgagggaaaattgaaacacaaaactgtatttaaggtgtacagcaagggtgtccaatcttttggcttccctgggccacataggaagaattgttttggatcacacataaaatacactaacactactgagagctgatgagcttaaaacaaaaactgcaaaataatctcataatgtttaaagaaagtttacaaactttctttgaatgtgttgagccacattcaaagcctt

SEQ ID NO: 486871 - DNA, 576 bp, Homo sapiens
atggagaagatgtttgacttcatttaaagtgagtcaaaaccttcttgagaggcagataacaatatgtcttaagacccactagactcagtaattccagttttgaaatttaagaatgtgccccaagatttagcaaaaattagacgctaccacagtgtccaaataaataaataaataaataggaacttattgagttctgaaatatccataaaatgaaacactctgaaacattaaaaaatgatgtgagagaagtttatttattgtaaaagaaagatattcaagattaaagtagaaatttgacacagctattttatgtgtcatttttgggtatggccattttttcccagcttaactgagggaaaattgaaacacaaaactgtatttaaggtgtacagcaagggtgtccaatcttttggcttccctgggccacataggaagaattgttttggatcacacataaaatacactaacactamtgagagctgatgagcttaaaacaaaaactgcaaaataatctcataatgtttaaagaaagtttacaaactttctttgaatgtgttgagccacattcaaagcctt

SEQ ID NO: 486872 - DNA, 576 bp, Homo sapiens
atggagaagatgtttgacttcatttaaagtgagtcaaaaccttcttgagaggcagataacaatatgtcttaagacccactagactcagtaattccagttttgaaatttaagaatgtgccccaagatttagcaaaaattagacgctaccacagtgtccaaataaataaataaataaataggaacttattgagttctgaaatatccataaaatgaaacactctgaaacattaaaaaatgatgtgagagaagtttatttattgtaaaagaaagatattcaagattaaagtagaaatttgacacagctattttatgtgtcatttttgggtatggccattttttcccagcttaactgagggaaaattgaaacacaaaactgtatttaaggtgtacagcaagggtgtccaatcttttggcttccctgggccacataggaagaattgttttggatcacacataaaatacactaacactactgasagctgatgagcttaaaacaaaaactgcaaaataatctcataatgtttaaagaaagtttacaaactttctttgaatgtgttgagccacattcaaagcctt

SEQ ID NO: 486873 - DNA, 639 bp, Homo sapiens
gagttccttagctgcaccacgtgaggaagacagaccgtcaaccttcattaaagtcttcagcttggtgaaagcacaagcagaacactgagtgacaatgttgtaagagtaacggagccaatcctggaacatcactaggtatggtacaggcaacataacatattctccaagtgcacagattctgcagtggaactgcctaggctcaaactgattcctctagcaactacctgagaccttgcaaaattaacttgatctctatatttttgttccatcattatacatggattagtctctaccttatagaattattgaacagattaagttaaaatgcacataatttttttttgcaagaatggaaaacctaatcctaaaatttctatgaaattgttagggatctaaatagctaaaacaatctggaagaagaacaaagttcagtgaatcacacttcatgaawtcaaaacttctaaccaagtaacagcaataaaatctgtgtgattttgccccaagaacagacatattcttcggatagaattgagactccagaaataaactcatatatccatggccaattaactttcaagaagggtgtcaagaccattcaatgggcaaaggatagtctcttcaacaaatggtgctgggaca

SEQ ID NO: 486874 - DNA, 639 bp, Homo sapiens
gagttccttagctgcaccacgtgaggaagacagaccgtcaaccttcattaaagtcttcagcttggtgaaagcacaagcagaacactgagtgacaatgttgtaagagtaacggagccaatcctggaacatcactaggtatggtacaggcaacataacatattctccaagtgcacagattctgcagtggaactgcctaggctcaaactgattcctctagcaactacctgagaccttgcaaaattaacttgatctctatatttttgttccatcattatacatggattagtctctaccttatagaattattgaacagattaagttaaaatgcacataatttttttttgcaagaatggaaaacctaatcctaaaatttctatgaaattgttagggatctaaatagctaaaacaatctggaagaagaacaaagttcagtgaatcacacttcatgaattcaaaacttctaaccaagtaacagcaataaaatctgtgtgattttgccccaagaayagacatattcttcggatagaattgagactccagaaataaactcatatatccatggccaattaactttcaagaagggtgtcaagaccattcaatgggcaaaggatagtctcttcaacaaatggtgctgggaca

SEQ ID NO: 486875 - DNA, 378 bp, Homo sapiens
caggctgggggacaagacgagtaggaagaagacagatggtgtttttcagaatagatggcctctgatcagaagtagaggcatcatattgacattgccaaaaagatgggctctcaagctctctcctactgtagttttaaaaattaaatattcttgtcttatacaaattagaacatgtcctaaaaatatgttgggtgctcaggtgctgtactcataatgctcactasttagcaacctatctgacactttataccttacttgaaggccccaattaaatgctaatagaagttgcctttgattttgctgcagttttgtgtatttcttattttaatggaatacttcatatgtatgttttacttcaagtaggaggtaggatggttg

SEQ ID NO: 486876 - DNA, 378 bp, Homo sapiens
caggctgggggacaagacgagtaggaagaagacagatggtgtttttcagaatagatggcctctgatcagaagtagaggcatcatattgacattgccaaaaagatgggctctcaagctctctcctactgtagttttaaaaattaaatattcttgtcttatacaaattagaacatgtcctaaaaatatgttgggtgctcaggtgctgtactcataatgctcactagttagcaacctatctgacactttataccttacttgaaggccccaattamatgctaatagaagttgcctttgattttgctgcagttttgtgtatttcttattttaatggaatacttcatatgtatgttttacttcaagtaggaggtaggatggttg

SEQ ID NO: 486877 - DNA, 378 bp, Homo sapiens
caggctgggggacaagacgagtaggaagaagacagatggtgtttttcagaatagatggcctctgatcagaagtagaggcatcatattgacattgccaaaaagatgggctctcaagctctctcctactgtagttttaaaaattaaatattcttgtcttatacaaattagaacatgtcctaaaaatatgttgggtgctcaggtgctgtactcataatgctcactagttagcaacctatctgacactttataccttacttgaaggccccaattaaatgctratagaagttgcctttgattttgctgcagttttgtgtatttcttattttaatggaatacttcatatgtatgttttacttcaagtaggaggtaggatggttg

SEQ ID NO: 486878 - DNA, 378 bp, Homo sapiens
caggctgggggacaagacgagtaggaagaagacagatggtgtttttcagaatagatggcctctgatcagaagtagaggcatcatattgacattgccaaaaagatgggctctcaagctctctcctactgtagttttaaaaattaaatattcttgtcttatacaaattagaacatgtcctaaaaatatgttgggtgctcaggtgctgtactcataatgctcactagttagcaacctatctgacactttataccttacttgaaggccccaattaaatgctaatagaagttgcctttgattttgctgcarttttgtgtatttcttattttaatggaatacttcatatgtatgttttacttcaagtaggaggtaggatggttg

SEQ ID NO: 486879 - DNA, 576 bp, Homo sapiens
tctttcctatcaattctttttgtctttmttgtctgatagtacattgtaaaattataccataaaaagaatataatactaattacattgtaaaaagaatatataactaataggagaattataaatatcctgttataatccccccccctaaacgatttacaatattaactttcccaatcccttcttccaaatggtgacatcttttgtggacccttttgttgcattgaaagtgatgtcttttggcttccacagtgttattctatttctttattccattgttctaaacagtgaaaatactgccaccacccagaatatttttagttgttgggtcacttcttctgaactgaagctgtcttgacccttggcttccccaggcgctgaaagcaaactttcttgttttccttttgttttattgccctactgagtgtcatgagataacaggaaatgtactgccctaaatccatgcccttgccttgctctctgacttgagcagcccttccagtagcctgcattgtcccattgtcaagcagccaggtgtctgctgctaccacctcttctgctagactgctcatcttgcag

SEQ ID NO: 486880 - DNA, 576 bp, Homo sapiens
tctttcctatcaattctttttgtctttcttgtctgatagtacattgtaaaattataccataaaaagaatataatactaattacattgtaaaaagaatatayaactaataggagaattataaatatcctgttataatccccccccctaaacgatttacaatattaactttcccaatcccttcttccaaatggtgacatcttttgtggacccttttgttgcattgaaagtgatgtcttttggcttccacagtgttattctatttctttattccattgttctaaacagtgaaaatactgccaccacccagaatatttttagttgttgggtcacttcttctgaactgaagctgtcttgacccttggcttccccaggcgctgaaagcaaactttcttgttttccttttgttttattgccctactgagtgtcatgagataacaggaaatgtactgccctaaatccatgcccttgccttgctctctgacttgagcagcccttccagtagcctgcattgtcccattgtcaagcagccaggtgtctgctgctaccacctcttctgctagactgctcatcttgcag

SEQ ID NO: 486881 - DNA, 576 bp, Homo sapiens
tctttcctatcaattctttttgtctttcttgtctgatagtacattgtaaaattataccataaaaagaatataatactaattacattgtaaaaagaatatataactaataggagaattataaatatcctgttataatccccccccctaaacgatttacaatattaactttcccaatcccttcttccaaatggtgacrtcttttgtggacccttttgttgcattgaaagtgatgtcttttggcttccacagtgttattctatttctttattccattgttctaaacagtgaaaatactgccaccacccagaatatttttagttgttgggtcacttcttctgaactgaagctgtcttgacccttggcttccccaggcgctgaaagcaaactttcttgttttccttttgttttattgccctactgagtgtcatgagataacaggaaatgtactgccctaaatccatgcccttgccttgctctctgacttgagcagcccttccagtagcctgcattgtcccattgtcaagcagccaggtgtctgctgctaccacctcttctgctagactgctcatcttgcag

SEQ ID NO: 486882 - DNA, 159 bp, Homo sapiens
cagaaaggtactctcttttcaagtcaatttcccayttctgatcacagtcctcctcaaaacacaaataggcaatgtatgaccagccaatctgcccatgttgccccagattctttgcagctcagcatagtggtgaagaaagttacctttctaaagtcaaag

SEQ ID NO: 486883 - DNA, 624 bp, Homo sapiens
agatggtaaaaaagaacaagtaataaaactatcgttttgtccattttcactaagcctgatgatatcacatgaaaggacagatcttagaaatggaaggtgacctttgtacaatcacaaattccaatctaccttcatgattaayaaaccaaagccaagagaggtttggaaactcactcaaggactcatgacttagcataagtaaagcccagatctcctaattgaatccagtgttctttccactataccaagatgatcttatgagcaggaattatgcattttccctgtggagttccattaatagagcctcttgggtacacacagtatatccgagaagaaattttagaagaagttctgggaaaactgatgagtgtagaactctatccacagaagaacctaacaggctgccaccaggaagctcaatggctggatttccactcctatttcaaagctgctttgcctgtatctgcttcagataaagatttcctatgggaagatgggtggggcattcaacatgccgctaaaataaaatggaaaaccactgaggttttaaattttatctgctgatctgattagtgaatgttgtctggaatggactttcaccagttggatgtaactgctggcttc

SEQ ID NO: 486884 - DNA, 624 bp, Homo sapiens
agatggtaaaaaagaacaagtaataaaactatcgttttgtccattttcactaagcctgatgatatcacatgaaaggacagatcttagaaatggaaggtgacctttgtacaatcacaaattccaatctaccttcatgattaacaaaccaaagccaagagaggtttggaaactcactcaaggactcatgacttagcataagtaaagcccagatctcctaattgaatccagtgttctttccactataccaagatgatcttatgagcaggaattatgcattttccctgtggagttccattaatagagcctcttgggtacacacagtatatccgagaagaaattttagaagaagttctgggaaaactgatgagtgtagaactctatccacagaagaacctaayaggctgccaccaggaagctcaatggctggatttccactcctatttcaaagctgctttgcctgtatctgcttcagataaagatttcctatgggaagatgggtggggcattcaacatgccgctaaaataaaatggaaaaccactgaggttttaaattttatctgctgatctgattagtgaatgttgtctggaatggactttcaccagttggatgtaactgctggcttc

SEQ ID NO: 486885 - DNA, 521 bp, Homo sapiens
tgttctgagtttgcttcagttatctgggaactgagggagacttcttaaaataagtgtctcctagcactaacattttctgcttcagtggaacgagatgtagaaaatggttctccttggtcccttctgtagccggccttttgaagtcatctagcagatacacatgctcccattttgtctatctagaagctcctgggcatgtgcagaggaaattccattgtcctgatgatcacagttccactgggaaagtgttgtgatcttcattgatcttcatttctactgcttctttcccttcccctcagcattccagtgacaatagtcactgctctgaarttcattattcttcagatagccaaagaaccctttaggctcctttctggaatctttccttggacctcttggaagctgtgatctggccttagtaacatgagatataccagagatttttttcactactactactttgtgtgttagttggctaatcattcactttctatacagaatggaaacaattttattttttg

SEQ ID NO: 486886 - DNA, 573 bp, Homo sapiens
tgattctaacactgtcatttctgggtggttttctrttttcttttcctcgttatgggttttccccctattctttgcatttctggtgtttcttaatgagggtgtttttgtattcctctgaatattattttgtgtttgtgaagtcactctgaaacattttgctccttttaggacttgcttttaacgtttattagggaggatcagagcagtatttagttcaggcccaaatatttccactgctgagataagatccttctgagtactccacgtcccagaaagttgaaactgctgaggacggttctggaccaggctccgactgagctgcaggcactgtttcctggtgtctgagctgtaggtactataccaggccccgactgagctgcaggcactgtttcctggtgactgagctgcaggtactgtaccaggccccgactgagctgcaggcactgtttcctggtgtctgagctgcaggtactgtaccaggctccaactgagctaaaagcactgtttcctggtgtctgagctgtaggccactatacccggccctgactgacctaaaggcactgtatgaggccc

SEQ ID NO: 486887 - DNA, 629 bp, Homo sapiens
agctatatatattgttaagtgaaaaaggagaataataactaaaaatgtatttgtaattgtaaaaagcacatgaagtaatgtcacaatgtttaaaaacatttccatgttatgaattttctaccacttaaaaatatttctttatagttttaaataggaaactcataatgtaaaagagataattcacagactcaggcatcttaatgcgaatgakaagtgctatagatagtcctgctcacctgtttggcggtggatagaggctgagatgcttgcagcactgctgttggcattgagtggaagcaaacatcatttctcaaacagacttgaacaaacacatatcgtgggaggagtagcaagtcagatgattcctacctgcattgccagtgaactagactcttgagttatggggccaaaaacaaacccctgagcatacacagaccgtggcctccatgaagaagaactcatgcagatggtaactaatttttgagtgatactacctgtgtcaggaaaaatccataaaatcaaaacaaagataataccaccaccaccaccaccaccaccaccaccacaacaacaacaacaagaaatttcaaactttgttgacttattttacattccattcatttctgttt

SEQ ID NO: 486888 - DNA, 629 bp, Homo sapiens
agctatatatattgttaagtgaaaaaggagaataataactaaaaatgtatttgtaattgtaaaaagcacatgaagtaatgtcacaatgtttaaaaacatttccatgttatgaattttctaccacttaaaaatatttctttatagttttaaataggaaactcataatgtaaaagagataattcacagactcaggcatcttaatgcgaatgataagtgctatagatagtcctgctcacctgtttggcggtggatagaggctgagatgcttgcagcactgctgttggcattgagtggaagcaaacatcatttctcaaacagacttgaacaaacacatatcgtgggaggagtagcaagtcagatgattcctacctgcattgccagtgaactagactcttgagttatggggccaaaaacaaacccctgagcatacacagaccgtggcctccatgaagaagaactcatgcagatgrtaactaatttttgagtgatactacctgtgtcaggaaaaatccataaaatcaaaacaaagataataccaccaccaccaccaccaccaccaccaccacaacaacaacaacaagaaatttcaaactttgttgacttattttacattccattcatttctgttt

SEQ ID NO: 486889 - DNA, 629 bp, Homo sapiens
agctatatatattgttaagtgaaaaaggagaataataactaaaaatgtatttgtaattgtaaaaagcacatgaagtaatgtcacaatgtttaaaaacatttccatgttatgaattttctaccacttaaaaatatttctttatagttttaaataggaaactcataatgtaaaagagataattcacagactcaggcatcttaatgcgaatgataagtgctatagatagtcctgctcacctgtttggcggtggatagaggctgagatgcttgcagcactgctgttggcattgagtggaagcaaacatcatttctcaaacagacttgaacaaacacatatcgtgggaggagtagcaagtcagatgattcctacctgcattgccagtgaactagactcttgagttatggggccaaaaacaaacccctgagcatacacagaccgtggcctccatgaagaagaactcatgcagatggtaactaatttttgagtgatactacctgtgtcaggaaaaatccataaaatcaaaacaaagataataccaccaccaccaycaccaccaccaccaccacaacaacaacaacaagaaatttcaaactttgttgacttattttacattccattcatttctgttt

SEQ ID NO: 486890 - DNA, 446 bp, Homo sapiens
agattaagggctgaacagatgaaacattctgttaaaaaaaggacccaaggacaggaaagatgtttctgctcctcaatgttttgctcttacttgaagtacctttttggttgcttttactttttcaaagtaaattttcaaattatcaagctatctttgtcttgataatttgaagatccaattaattattgtacattgaacataatgtgcacattgtgagcacacataaaggaatgytaaggagaatagtatgttgtctaggtacggatatgtatagaaggaaaccatacaacgatgacccccaggatcccttgggtctagaagccatcactgctcctggaactttgcccctagcctggctgaacagggtaatgccctgaggacacccactgtccaatccctactgaatgatgttgaaattgaggattcagtcatggaatctgccttcc

SEQ ID NO: 486891 - DNA, 490 bp, Homo sapiens
ctcactctattgcccaggctgcagtggggtagagtgatcttggctaactacaacctctgcctcttgggctcaagcgatcctcccccatcagcctctcgagtagctgggactacaggmgcgtgccactacaaccggctaatttattttattttattttttgtatttttagtaggttttgccatgttgcccaggctggtctcaaactcctaggctcaagcgattggcctgccttggcctcctacagtgccgggattacaggcatgagccacagttcctggcccaaagcagtgaaatctttctttcttctggtatagtttgtatcttagcggattcaaaattatcactgatgatagagtcattgtaaagataaagaaatggaacctgagttactcagtttggttgctccttctaaagtaaacggtcaaatcatatcaatgttctccatctttcagccattttatctgatttttgcagaagaaaaacttcagaa

SEQ ID NO: 486892 - DNA, 490 bp, Homo sapiens
ctcactctattgcccaggctgcagtggggtagagtgatcttggctaactacaacctctgcctcttgggctcaagcgatcctcccccatcagcctctcgagtagctgggactacaggagcgtgccactacaaccggctaatttattttattttattttttgtatttttagtaggttttgccatgttgcccaggctggtctcaaactcctaggctcaagcgattggcctgccttggcctcctacagtgccgggattacaggcatgagccacagttcctggcccaaagcagtgaaatctttctttcttctggtatagtttgtatcttagcrgattcaaaattatcactgatgatagagtcattgtaaagataaagaaatggaacctgagttactcagtttggttgctccttctaaagtaaacggtcaaatcatatcaatgttctccatctttcagccattttatctgatttttgcagaagaaaaacttcagaa

SEQ ID NO: 486893 - DNA, 608 bp, Homo sapiens
tatggagtcatactgtcaccatgtacacatcccctgaactaagaaaagaaatattgccaatgtattagaactgtcccccccccgcaccattccctgtagtaacttccagcctccacacaccagaggcaactataccttgattcttagttaaccagtctttacttttaaaaatagttttaccagcagggcactgtggctcacgcctgtaaacccagcactttggaaggccaagacaggaggattgcttgaggccaggagctcaaaaccagcctgggcaacatagtgagaccactatctctacaataaaaaatttaaaaagtagccagacgtggtggtgtgtgcctgtagtcccagctactgtggaggctgaggtaggaggatggcttgagtccgggaggctgagcctccagtgagccgtgatcgcgccactgcactcccatctgggtgacagaggaagaccctatctcataaatraataaggaattaaataagttttaccacttgatatgtattttttattgtgattaagatataattcacatatcataaaatttacccttttacaattaacaattcaggggtgtttagtatatccccatagtgtgcaa

SEQ ID NO: 486894 - DNA, 670 bp, Homo sapiens
ctactattatttctcacagtgcctagctgggaacacagcacagagaaggtgtttaacacatttattttatgcttcttcaattcattgttttgtttccagtccccagagacccagtagagacagagtgtggtgaatgcttctcaccaactaagaaactctagtgagatttggccaacattgatgggtctagaatgggaaagtagaggtgatgggaggaaaaaaaatgcactttcattagtcattgatgcctcttaatataaatacaaagagaagttccacaatggtcatcctcttatccccccaaaagcagaaattattgattcagaaacttgactaacaaaatgccccaaagagaaactgttgtacaagtcaaatgagtaaataatctcagcacttttcagttctttcctttactggaggcctgggggtctcaactagaccagyatttccccaacacaattgttgttaagtataacttggggaataaaggggaaccattagtttgcacagattgaaagggaggctcaatgaaacccaatgcactgttctgtacccaggaagaggccacactgggggctcatgttttattatttcttccaatttattagacaagccttgtccttaaaatcagtgagagtgaggaatggcttcacagaggaatatgttgttt

SEQ ID NO: 486895 - DNA, 655 bp, Homo sapiens
gtctgtgctccataggagtctgggagtagtgctcagccttctggccaagataggagccttgagataagggaaagccctggagcaaaacttagttattgcagggagcttgagccatggagatccatggccgacgtggtcctaggaatacctgttggcyaccctgttcctgaagacctgaggtaagactgcagcatggttggggttctcctacccctgagagctgtggtctttattcttgaggagatagagagcagagagacttcctccagaggtttcatctggggagaggtaatctgccacctgggttggtccctagggtcagaggctgttgtgcttttcaatgttcccaaattcattgccactcttgatcgcttaaccttggtcccaagaaagagcagaatcaagagttcacaaaggaaaattcagtgcaccgaggggttctcaatagccagagagagcaatgacagcactcagacaggtaactcctttgatatgagacttgctggggaaagggagggcaagaagaaaagaaaagaggagaaaaaaaaacataaggaagaatagtgagggtatatcctaaaatggggatgctgtggtaaatctgccctctgatcaccaaggcagaggtgtgatccatgagaaggcagtctctcat

SEQ ID NO: 486896 - DNA, 568 bp, Homo sapiens
gaaagcagatattaaaaagctgtaaataacaatctcctataggcagagcaatgccccagagacacaggccccatctaaacagaggcttctgcctgccctgagaggcttttgtgtgaaacaaaggcagaaaccccgagaaagagctattaaagacagtccctaatgaaggagggtgtagagggaggtgtggctctgtatccacctagggagtctgtagagccaggctgctgccagagcccgtttataggcaaagcccgaaggctagagtaaatgtggtctgcacaggtgtaggaaagagtgtgggagaggaggaggggacaayctcatgcctttctttattaaaaacacataaaataaaccttataaaatgaaaaagttccatggataaaaaaggatagtgagaatgaaagactcaaaggcactggatgtaggtgtcttgactgagatgttaccctacctttccagaagatgacctcgatgcactgggaattcatctgaggcaacagggagctgaggtgccttgggtctgtcctgggactctgagtgattattggagggttgaatagtt

SEQ ID NO: 486897 - DNA, 350 bp, Homo sapiens
tggaaaactgcaatcagtctcaactgaaaggaaaatgtaggytgtttgggagaaagtttttacaattgaaaaactcaagggaaaattgaaaggaaaagattttaggaaagagaaagaaacagggagaggaagaaaagaggctagccaacaacctgcagtagtgattctgaggaactaataggagaggaaaaactggataaattataaaaggatgactgatacgggggcgcggggaggaggatgaaaccggggaaaatattgagagagacagaaagaaaaggagaaacttatctgaggttggaaataaagagaaggtgacattggagcggatagaaaggaagaaacggcgt

SEQ ID NO: 486898 - DNA, 350 bp, Homo sapiens
tggaaaactgcaatcagtctcaactgaaaggaaaatgtaggttgtttgggagaaagtttttacaattgaaaaactcaagggaaaattgaaaggaaaagattttaggaaagagaaagaaacagggagaggaagaaaagaggctagccaacaacctgcagtagtgattctgaggaactaataggagasgaaaaactggataaattataaaaggatgactgatacgggggcgcggggaggaggatgaaaccggggaaaatattgagagagacagaaagaaaaggagaaacttatctgaggttggaaataaagagaaggtgacattggagcggatagaaaggaagaaacggcgt

SEQ ID NO: 486899 - DNA, 407 bp, Homo sapiens
tggcatattgtagttattcctttacttattatctatctaaaccagtagattgtaagctccatgaaaacagggtctttgctggcctttttttaaactactgtgtctctagaataaagagtagtgcctgacacataatggttcacagtaattatttattggatgaatgaatgagataatgcatcaaaaatactgtgtccattttaaggcatgrtctcagttgtctattcctgcataaacaatctaccccacaattcagtagctcaaaacaaccattttattgtatcttatgattttgtgggtcagtaatttggacaggtctcagctgagcaatttgttttccccatgcagtattgactgggtcacttgctggtattcagtggaaggcagggctgctctggaggtcccag

SEQ ID NO: 486900 - DNA, 432 bp, Homo sapiens
atgggagactgcttcacacataatgcctggcaccctgatgggaactgctggtcgttgtgctcagctaggcccctccccttgtcatgtggtctcatggcctctgcacgtggtttatctagcatggtagtttgacttatccagcagcttaggccttagaagacatgtcccaagagtctcacatggaagctacaaggcttcttacttacytagcctggccagtcagacatctcttctgctgtattctattagtcaagtaagtctctaagggtagcccatattaaagggaggagaattagattccacctctcaatgggagaagtagcaagtaatttgtggtcatctttaatctactacagacactgtatccttgatctcagaatgatgcctctttgtctggaaagggcatttgttttttaagcccaaggttagaga

SEQ ID NO: 486901 - DNA, 548 bp, Homo sapiens
ttggtgctaatgaaggtgttggcttatttggaaatggaatcactagttcctcctatttagattgatgcagattgaaatcctaccagattcctgcctctctaggtaaactgtaaatccacttttgtcttccagtattctctattacatgatttttactctattaattctgaactgcttgcaattcaaagctgtttcatactttcatttatttgtacctgctgttccctctgccttgaaaaccttttctctcctattgtttatttggttaaagtttactcatccttcaagattcagctcaggtgcctttttaaatttatttattttttaattttaggatgccttctcttactctctaatcccagaatatataccaagactctaagctccttgagggcagaaaacacctcttgcccattcttttctagtctctagaatatagcatratgtagtacatagtaagtgctcagtaaatattcatcaactaaactagctgaaaagtattaaaaattagatatcctattggatttgtatctcttctgcctctacct

SEQ ID NO: 486902 - DNA, 224 bp, Homo sapiens
ctgggtggtaatcctcctcctactgttggcattgattgagtctttatttacgttgtatttctagtctggactagaacgttattccaggggtggaatgaagaarttaaggaaaaagaaggggagagccattaaggtttggaagaaacattctgagaccagagtaaagatgttatatgtactaggagaaaaaggaagaacaaagatagaagcacttccccttgctc

SEQ ID NO: 486903 - DNA, 477 bp, Homo sapiens
gtctgctctcaccccagcttcacagaagatggcagggactggttattactaacctgcctcctagtcttctgaggctccaaatggttttgtcagcaagctgagcttccccacaatcccacagactagaaggggttggaaagaacaagccttagwacaatactgctccccacctctaagggatctgctcctctgagtcccagaagttcaccgccttcatttgatttctgctacaggaagactctgggaatccagctctggacccagcacttcctgatttttgaagtagagagttgacaaccctgttgtcatcaatacagctgtgctaggtgggtgggaaaggaaaatatcttgggctcccaaaatcactaagctaaaaggaaaactcaggatcatggtggatggaagtcaggactagattgcagctccgactcggatggacagagaagcatgtggaggctcatatcatgaatttttgct

SEQ ID NO: 486904 - DNA, 477 bp, Homo sapiens
gtctgctctcaccccagcttcacagaagatggcagggactggttattactaacctgcctcctagtcttctgaggctccaaatggttttgtcagcaagctgagcttccccacaatcccacagactagaaggggttggaaagaacaagccttagaacaatactgctccccacctctaagggatctgctcctctgagtcccagaagttcaccrccttcatttgatttctgctacaggaagactctgggaatccagctctggacccagcacttcctgatttttgaagtagagagttgacaaccctgttgtcatcaatacagctgtgctaggtgggtgggaaaggaaaatatcttgggctcccaaaatcactaagctaaaaggaaaactcaggatcatggtggatggaagtcaggactagattgcagctccgactcggatggacagagaagcatgtggaggctcatatcatgaatttttgct

SEQ ID NO: 486905 - DNA, 477 bp, Homo sapiens
gtctgctctcaccccagcttcacagaagatggcagggactggttattactaacctgcctcctagtcttctgaggctccaaatggttttgtcagcaagctgagcttccccacaatcccacagactagaaggggttggaaagaacaagccttagaacaatactgctccccacctctaagggatctgctcctctgagtcccagaagttcaccgccttcatttgatttctgctacaggaagactctgggaatccagctctggacccagcacttcctgatttttgaagtagagagttgacaaccctgttgtcatcaatacarctgtgctaggtgggtgggaaaggaaaatatcttgggctcccaaaatcactaagctaaaaggaaaactcaggatcatggtggatggaagtcaggactagattgcagctccgactcggatggacagagaagcatgtggaggctcatatcatgaatttttgct

SEQ ID NO: 486906 - DNA, 477 bp, Homo sapiens
gtctgctctcaccccagcttcacagaagatggcagggactggttattactaacctgcctcctagtcttctgaggctccaaatggttttgtcagcaagctgagcttccccacaatcccacagactagaaggggttggaaagaacaagccttagaacaatactgctccccacctctaagggatctgctcctctgagtcccagaagttcaccgccttcatttgatttctgctacaggaagactctgggaatccagctctggacccagcacttcctgatttttgaagtagagagttgacaaccctgttgtcatcaatacagctgtgctaggtgggtgggaaaggaaaatatcttgggctcccaaaatcactaagctaaaaggaaaactcaggatcatgstggatggaagtcaggactagattgcagctccgactcggatggacagagaagcatgtggaggctcatatcatgaatttttgct

SEQ ID NO: 486907 - DNA, 617 bp, Homo sapiens
ctgtggaccactcacaacattttctcactttattttgcttcagagtcagtgtactgcaatgatttctcctttgcttgctttatatgtttaaaattgtcttccctaaaagctgaacttaaaattaatgtttgctaccaaaagggggtagcagtgcctrgtcatgtaggcatatgtcccactctgtcggtacagagggtaagcagcctcttcctttttaaaaaatttattatgatgatttacaaaaattgaagcttacaggataaacactcaacaaaaaagtagccagtctcaagaaaccaatttttatgtatgaattaatattattttattaatccatggccaggatgattcttaagattatttctcaattctctgaacagcttaaaagagagaaactccttcttttttatttacttgctttgaggttgatactcttaggtttttaacataactctctagctttgacaactcctcttataatttaaaatccttatagcttccatttacaagtaaggattatatctattttagtctcctcaatcagctacctaggagaagacttgccacttggaaagagaaagatagcacccactctccagttctcttctcccaaagtt

SEQ ID NO: 486908 - DNA, 617 bp, Homo sapiens
ctgtggaccactcacaacattttctcactttattttgcttcagagtcagtgtactgcaatgatttctcctttgcttgctttatatgtttaaaattgtcttccctaaaagctgaacttaaaattaatgtttgctaccaaaagggggtagcagtgcctagtcatgtaggcatatgtcccactctgtcggtacagagggtaagcagcctcttcctttttaaaaaatttattatgatgatttacaaaaattgaagcttacaggataaacactcaacaaaaaagtagccagtctcaagaaaccaatttttatgtatgaattaatattattttattaatccatggccaggatgattcttaagattatttctyaattctctgaacagcttaaaagagagaaactccttcttttttatttacttgctttgaggttgatactcttaggtttttaacataactctctagctttgacaactcctcttataatttaaaatccttatagcttccatttacaagtaaggattatatctattttagtctcctcaatcagctacctaggagaagacttgccacttggaaagagaaagatagcacccactctccagttctcttctcccaaagtt

SEQ ID NO: 486909 - DNA, 638 bp, Homo sapiens
gagacagttcttatggaggtcttacatacagaacaggtccagcataaggcagtattctgttctaaggaccactaaggatagtaaagaagctggtgtggctacagaagaatgtttgtgaactagagaatgacagacatttgcatcttccttattttccatatgtagagcacaacgccttacaaataacaagctctcaataacaatggctgactgacggaaaaataagtcagactggatcttatcttgtagtcccagatttaaaagtttttcagagaggaatgctttgatgaaaatggcattttataaagattgatctggcagcagtaaagtctcccaaagaggctactcaaaaaaccactgcaatacattsttgagttttctctcattcatttcccttaatttatacaagttatataatttaattaattttgtgaatatgttagaaataatcattgcttctaatatggatgagtcctttacactgttccaactcaacaaaaactaatcatgctaggaaaaaaaatatattggaagcattgtaatgtaatgtacttctgggagataaattcttaacagttctaggtagaatctaatagcataaaaggcactgcaaaataagctatccttgtctatggaat

SEQ ID NO: 486910 - DNA, 638 bp, Homo sapiens
gagacagttcttatggaggtcttacatacagaacaggtccagcataaggcagtattctgttctaaggaccactaaggatagtaaagaagctggtgtggctacagaagaatgtttgtgaactagagaatgacagacatttgcatcttccttattttccatatgtagagcacaacgccttacaaataacaagctctcaataacaatggctgactgacggaaaaataagtcagactggatcttatcttgtagtcccagatttaaaagtttttcagagaggaatgctttgatgaaaatggcattttataaagattgatctggcagcagtaaagtctcccaaagaggctactcaaaaaaccactgcaatacattgttgagttttctctcattcatttcccttaatttatacaagttatataatttaattaattttgtgaatatsttagaaataatcattgcttctaatatggatgagtcctttacactgttccaactcaacaaaaactaatcatgctaggaaaaaaaatatattggaagcattgtaatgtaatgtacttctgggagataaattcttaacagttctaggtagaatctaatagcataaaaggcactgcaaaataagctatccttgtctatggaat

SEQ ID NO: 486911 - DNA, 630 bp, Homo sapiens
tggatgactttcctaaagctgtctcattgtttctctctccactattatggagtgtatttcaacaacacatttcaaagtctatgagccaacaggatattacaaaacacagaggatactcacttttctaatttagtaaggcaaaaaattcaaagattgattgatttttctgataacaaaaagaaaaaagttatcaaaatagcaattttggtatttcataaaaagtgttatctaatactccttaaaaaaaaacaattttcatgagcccaagaatttccatgtttgagtgcactgtctcctcctgggatggaacagtttatcttcatgattcactcaacaaagatacattctgaaaagtatgtcattagatgattttgtcattgtgcaaacatcatagagtgtarttaagcacacctagataggataggctactacacatctaggctgtatccgtatggtttagcctattactcctaggctgcaaagctgcacagtatgttactgtgttgaatactgtaggcaattgtaactatttgcatatctaaacatatccaaacacataaaagttacaataaaaatatagcataaaatacaaataatggtacacctgtatagggcatttacaatgggtag

SEQ ID NO: 486912 - DNA, 566 bp, Homo sapiens
tttaatttaaagcctgaaagataatgcactttgyaacagcatgtaaatcaatgttttattaaagcctgttaattacaatgcagaaaaatgcaaatcgcaataaaacacatcagaagcggattcatccctgctctgttctcagtggagcaattaccacacaccttgctttggcaggttggggtagaatttaactgggctggggtcgggggtagttttacctcttgcctctggaaactgcagaatcttccaatcatttcactgcaccactcagaagtacaaaatatcccccccggccatttttttaagttgtatttttaaaatgcttatgctttcctcttcgttgactttaatatgcttagtctaagaggcttgcctggccggataacctttttacacaaaagagagcaacttacataccatagcatttctccgtaacttgtccattaattagaagtcttagatttaatatcattaagcttgtccctttgtatcattttatttattcagaatttatgtatataaactagacattcgattaaatagccagaaccatggcattaattttt

SEQ ID NO: 486913 - DNA, 635 bp, Homo sapiens
gtgtaatattactccttctactstttaaaaattgaacaatatataactttttcaatgccttttcccatcaacttgacataatatctctagagttctctgatgtaaaaggaagatattgatgtctctttccttctctccacgaaccacatctaaatttctgtcatatgaaaacccattcttttaattgggttattttttactgttgaattttagaattttagaaatcatttgtatattttagataaaaatcctttaccgatatgtatattgcaaatatttttctctcagtctgtggcttctctttttattctctttctcagaacaaaaattattgattcttatgaaatctagcttatcaattttttctttcatggatcatgccttcggtgtatctaaaaagtcatcaccaaaaactgagttacctagattttatcctgttatcttttagaagttttatagttttgtattttacatttaggtctgtgattcattttggtttacacttttttggatgttgtaaagtctgtatttagattgatttgttttctttttgcatgtagatgtccagttattacaggatcatttgttgaaaagatgattttttctacattatattgactttacttttttgtaaa

SEQ ID NO: 486914 - DNA, 634 bp, Homo sapiens
gtatgacattgactaccatcaaagtgaagtcctcagtgaaagccactagaaatgaaaatttttgtatttcttaggtcctgttggtgagtgtgcttattcagatggagcctagacagtttgtgaacactgattctgctcttatggagcttcttggtactggcactgaatggtgtgccttaaagtgaaggtaagtgatccctggatggtgacttttctcctttccacaagcttcctataagtctggtctcgtcctaatccagaccaatctccatttttctctttatatcccttgcatcttttctcatctcctcacctcctttagagtccctcaatgggcagattatctccttcatcatttttacctaatayagttatattgcataagttttcacacgtccttgagccctatgtttgaaatccaaaagtcaagaatcatcctttgtttctgtgatcttgtgtgtcatcctttctatgagtagcgaacattcaaatgactggctcaatgaggaggtggccagaagatagaaaggaatactgtgaatagaaacctcaccaattaaaatttcagaagtatcttactctgtgaggattaaaagaggctatgaatagacagtgcttaccacataccaggtct

SEQ ID NO: 486915 - DNA, 634 bp, Homo sapiens
gtatgacattgactaccatcaaagtgaagtcctcagtgaaagccactagaaatgaaaatttttgtatttcttaggtcctgttggtgagtgtgcttattcagatggagcctagacagtttgtgaacactgattctgctcttatggagcttcttggtactggcactgaatggtgtgccttaaagtgaaggtaagtgatccctggatggtgacttttctcctttccacaagcttcctataagtctggtctcgtcctaatccagaccaatctccatttttctctttatatcccttgcatcttttctcatctcctcacctcctttagagtccctcaatgggcagattatctccttcatcatttttacctaatatagttatattgcataagttttcacacgtccttgagccctatgtttgaaatccaaaagtcaagaatcatcctttgtttctgtgatcttrtgtgtcatcctttctatgagtagcgaacattcaaatgactggctcaatgaggaggtggccagaagatagaaaggaatactgtgaatagaaacctcaccaattaaaatttcagaagtatcttactctgtgaggattaaaagaggctatgaatagacagtgcttaccacataccaggtct

SEQ ID NO: 486916 - DNA, 630 bp, Homo sapiens
ctaaggttttggactgaagaaattgaagaataaaaaagcatttaataaattgatagagactggggcaagagataggatgtgtgtgtgtatgtatataatatatatcttgtcagtttattaaatatgttgtatatttrtatttgtagatatgcaaatatatcttatgcaaaaagcctttcttatataccagcctctaatatatctactgctataattgcttgcagtgaattatcaaactcctgaccacagggactatgctttattcataggaggtgagggcagagatgaaaggttggcaggggagtgggttgagatcatagtaagtttaatagatcacttgtaagttctttgacttttcttcccaaagagaaggaaagattttcctcaaagagaagggaagagggatttgagcataagtaaaatggtctggtttgcactttaaaagagcactcttttgccatattgaaaatagattatagaggacaatgcagaatcagggagaccagttcagaagctactacattgatctggaggaaaaatgattgtcattggaaccaaggtgatagcagtaatgagattcccattatattttgatggtcaaacaagacattctcatagttttcccacgga

SEQ ID NO: 486917 - DNA, 556 bp, Homo sapiens
aaatgcataaatgtggatcccagttccagcactttctggctgagtagtcttggatctatcagctcacttctttgagtatcagcttcttcctctgctrtgtcctggtttccatgttttccttgcagagctgcaataagggtcagagatgctatagaatgggtcatagtgcctagcaggctggtaaccaatgctagccatattttcagtctaaagattgggcaaatgttggtctgtccttggttgaccaacttcttcctttgagaagcacatagcatctgtacacacagaagcgtgtgcatgtgagggattcatacatatctaagaaccttctgcaaggaagtttatgaaaaaaaattcacattaagtgaattgtgccagagttaaaattctgccaagtcgacagggagtctgaagatgcctttctcaggcctaagtgaacaagtcaatgggacaattgttggaaacattttctgtttttcttgtgaaacccaagtctcaggatgctggaggagaagccattggtgggtatgggtgttctttgcagttttaactttcc

SEQ ID NO: 486918 - DNA, 556 bp, Homo sapiens
aaatgcataaatgtggatcccagttccagcactttctggctgagtagtcttggatctatcagctcacttctttgagtatcagcttcttcctctgctatgtcctggtttccatgttttccttgcagagctgcaataagggtcagagatgctatagaatgggtcatagtgcctagcaggctggtaaccaatgctagccatattttcagtctaaagattgggcaaatgttggtctgtccttggttgaccaacttcttcctttgagaagcacatagcatctgtacacacagaagcgtgtgcatgtgagggattcatacatatctaagaaccttctgmaaggaagtttatgaaaaaaaattcacattaagtgaattgtgccagagttaaaattctgccaagtcgacagggagtctgaagatgcctttctcaggcctaagtgaacaagtcaatgggacaattgttggaaacattttctgtttttcttgtgaaacccaagtctcaggatgctggaggagaagccattggtgggtatgggtgttctttgcagttttaactttcc

SEQ ID NO: 486919 - DNA, 598 bp, Homo sapiens
ctaatttctagagagaaataattaatgttactaccagaattctcttatttattgttctttgaggcccaagcagaggcaaaaccccttaagggcctgcaacagctagtaattactgtgaaagaaaaaaagcaagaacaaaaatttaaaaacttagggtctgtgatgttgagtttctagtatgtcaactgagctaaggttgaactatgtctcctcctgctcaagaggtggagaggaggtgaagcctggttctttctgtgttctgaagcttgtgcagagcctgtggtgccrtaacagcactcccatttcgttgcttatctcctggcccacccttggtggtacagcagtaggactgcagctcctgcagctcacactctatctcctcctccagctcacactctatctcctcccccagctttcctgattctgcgccagataagtgatccacacacccaggccatccaagttggaggcttagagaagtaagcaaccgaggcaagttccagttggtcctcatggctcaccttcacaggatccagtttatctttgctttctgcattttcatttcgtcttccctccccaagtgtgtgctctgtggatg

SEQ ID NO: 486920 - DNA, 598 bp, Homo sapiens
ctaatttctagagagaaataattaatgttactaccagaattctcttatttattgttctttgaggcccaagcagaggcaaaaccccttaagggcctgcaacagctagtaattactgtgaaagaaaaaaagcaagaacaaaaatttaaaaacttagggtctgtgatgttgagtttctagtatgtcaactgagctaaggttgaactatgtctcctcctgctcaagaggtggagaggaggtgaagcctggttctttctgtgttctgaagcttgtgcagagcctgtggtgccataacagcactcccatttcgttgcttatctcctggcccacccttggtggtacagcagtaggactgcagctcctgcagctcacactctatctcctcctccagctcacactctatctcctcccccagctttcctgattctgcgccagataagtgatccacacacccaggccatccaagttggaggcttagagaagtaagcaaccgaggcaagttccagttggtcctcayggctcaccttcacaggatccagtttatctttgctttctgcattttcatttcgtcttccctccccaagtgtgtgctctgtggatg

SEQ ID NO: 486921 - DNA, 658 bp, Homo sapiens
ccacaccttgcttcggggcagcgtggagctctcttgctgaggaatgaggaggaataaggggccagagatgggactcaaacctgcctgggccacctacctgctgggagactttgggcaagtgggtgctgcagagcctgcctcctctgctgtgagatgggttgatgcccyaccacggagggagccagggaagatgacagcagatatgaatgtacagtgcctggcacacacccaacgcccagttggaagtttcttttattcctggctgagctctgccaccatcgctcacttagtctctatctgagccacgagccccacaggggacagatctctattcgacaggtggggaaactgaggctcagagagatgaagtcacctgtccaaggtcccacagttagggaggtggtggggctacaaccccagccagggtcccggcgctcttaacctccacactctgcagcctcttgccaccctggaactggtgaggggcaggagaaaaagaacgggtgaggactctgagtgtttggggtgctggagtgagtcctgcatgcaaaggcctttgattcatgaagaagggacagcacctaactgcctgggcagcactgctcagcttgcaaaggacttttacagacatgatctcatttagttgaggctaagggtg

SEQ ID NO: 486922 - DNA, 626 bp, Homo sapiens
cctatgactaagaatgtctaaccccctaggaatgcagtacagcaggtctcaacctcattttacccagtccctattcaagatggagtcactctggttgaagtgcctgtaacattactaacacaaatatctgtcctgcttctgaatctctcttgatctctccaatgcaccctcgacccaggagcaacttttggaccctttgcctactcctcactgcaaaaaagaacaagatcaaaaactgctgatcctaggctgggcatggtggctcacacctgtaatcccagcattttgggaggccaaggcaggcggaccgcctgaggtcgagagtttgagaccagcctggccaacatggcgaaatcccgtctctactaaaaatacaaaaattagccaggtgtggtggcrggcacctgtaatcccagctactcgggaggctgaggcaggagaatcacttgtacctgggaggcagaggttgcagtgagcccagatcgtgccattacattccagccttggcgagagaacaagactttgtctcaaaaaaaaaaaaaaaaaacaaaaaacccaaaaaaactgctgacccagaagcagagaattgcgagacgtgttagatctgtactttaaccttttaaatc

SEQ ID NO: 486923 - DNA, 567 bp, Homo sapiens
cgcgggagccccatacagccccggcccgcgagcgcccggtccgctgacgtcccaggcagaagggagaggcccgggtgggccgggtggcacttgcggaggcggccgtcttgccctgccccgccctgcccgccgggtgcctgcggcgcctscccgcccggcagctccctctcggccccggctgagtggccagaggctgccgcaccctcgggagctgggcggcgggtcccccggggctggagtgtcgtcccggcgcccagagcgcgcgctcctttggccctgccccctgcccgggggacttcggcagcggccactcctgccactgcgctctctccagagcccagccccgggaggccgccagtctcgggttgggcagggcgctttcctcgcgccgtccggggctagctaggcgcgggtagacgccgccacctgctgcgctggctgcgctctgccctctgcgggcccggcactcggcctctagactctgtggcgggtgggcggcggccgggaggagatgtgcccggctccctccaaaggaccctcagatctgtcagtctgcggacgccagga

SEQ ID NO: 486924 - DNA, 628 bp, Homo sapiens
aatagctagtgcactatggactacctagacatggaatatactttgccagaattccctcaataagtagattattcccaccttcctctttctctttcagtctttctttctttctttcttttttttaaaaactgtggccaggcacggtggctcacgcctgtaatcctagcactttgggaggccgaggcaggcaggtcacaaggtcaggagatmtagcccatcctggctaacacggtgaaaccctgtctctactaaaaatacaaaaaaaagaaaaaaaaaaaatagccgggcgtagtggcgggcgcctgtagtcctagctactccggaggctgaggcaggagaatgatgtgaacccaggaggcagagcttgcagtgagccaagatcatgccactgcactccagcctgggcaacagagcgagactccgtctcaaaaaaaaaaatattgtaaccgtattttatttggtttgggacatttcttcaagtagacatacagtgtacatttgtcatattttctggctggtcagttaatcttatgaactcatttcctatatctgggggggacttcctaccttatgaatatcttttccttaagcaagtcaacagaaaaatgtgtaatcttagcctccttgc

SEQ ID NO: 486925 - DNA, 601 bp, Homo sapiens
gctggcattaggggtagacgtttccaggctgtcttgtggctggagtatgaagaacactgttttcagggcagtttctgggacactttctcatgcctgttcacctgccatctcaaactcaaaggcagctcccaaagggctctcttgatcaggtgaagagatccctacaatttgagttttaagagaatcatgttgacagataagatcaccacctgtgactgtccctaggcctagctccattaccttccccatgctcattgcagggaggacactagtggacccagatgacatgagagggaagtcaaggaaactccatccatgttacatttaggcacagagaaatycaggtagagttgctgctataaaaaataaatacatggaaaaaaatggtaactatgtaaaacaaaagggaacaaagcaggtgaaagacagatgaagaactattatggaagaaagtgtactgagtaaacagaaaagccaatgctttatttcatcaaagacattaagcagagcatgaatttatgaaatgagattaaagatgaaacaaatttttggacacaaaaaagggagaagtctgcagagctaggaaagaaaacaaggactg

SEQ ID NO: 486926 - DNA, 621 bp, Homo sapiens
ctaatttatcactgttgtggccagaaacatattccatatgatttcagttccttgaaatgtattgtgatttgttttgtgaccctgcatatggygaatgttttatatcaactttagaacagaatacctattttaaatgttggatgtggtgttttataattgtcaattatggtcacattggttgctaatattgttcaaatcctctatatccttactgagttttatttcaacttgttctatcaatctctgagagaaggtcttaaaattttccaactgtaattagttctgtcaattgttgttttgtgtattaaccatttattcataaagagaaaatgaagtttctctctttatctctaggaactctcctattcttgagacccattttttaattaacagtatagtttcaccagccttcttatgtttatcatttgcatgttatatattttccattctaattctttcaatctgtgtcttaatatttaaagtttgtttaaatggttcatttaaatgaatggttcgttcttttgtgtctcacacaaagatcagtttttaacagttttttgaaaagctttgcctctgtattccttcttgcagattcaggtgtttatgaagtatcatttcact

SEQ ID NO: 486927 - DNA, 504 bp, Homo sapiens
ggctgacacagatatgtatagccccaaatgcttacattagaaaatgagtagagttcaaactaataaccaggtatctatcttaagaaactagaaamgaagagcacaataaaataaagcaaacaagaaggaaatgataaaaataagaagagaaatcaattaaatgtaaaacaggaaaactacataaaaacaatcactgaaagcaaaacctgatacttggaaaaaatcaataaaattgattaagcctctcacaaaattggcataaaatatttgcaagccacatattgcataaagggttagtgctgtgtatttcaaagctcagcatcaaaacaacaaaaagtccaactatgaaatgagcaaaaaacatgaacggacattttactgaaggagacagagatggcaaataaaaaagactttaacaaagctcatgttacaataatattcttaagaaataatgactgagcaacttcagtacatattttcacatactttttatgttcctgacac

SEQ ID NO: 486928 - DNA, 609 bp, Homo sapiens
gcccttccctgaaggggactaccagtaggtggccrttggcatagcttccatgagagaagatgatgctctgagggaggtttctggcagaaaggatgaaactgaaggaacagatatgtgaaatattgcaaaggcaacctcaagagtccgcatatgtttattgtttgttcactgggctctgtgcctggtgctgagggtgtgggcagattcaggcaccattaacaaagatcctgtgcttggcaagctcacaggccagtggggagaagggaaaaaggaagtaacatttgttgcctgaggattaggtctgggtactatgccagcagcttgacatgcattatctcatttaatcttaaagccacagtctctggagggtaaagtgattagtccaaggtcatactgactaattacaggaaccctccaaagatggcgttttgcctcctataccaggtgtctctgtgggagccatctaggtctttcttgcattcactccctcactgcatatgtagatattgccacctgcttacatcccatcggtgactctctgttgctctctaaattccatgccatgcccccgtgtgatcccacctccctcttatctgccgctttccatgt

SEQ ID NO: 486929 - DNA, 436 bp, Homo sapiens
tctagactgcttctgtgtgagaataactggaaatcctatgagaaaatacggaatgtgcagggtgaagagcaatcaaagactcctcattgagctggtgtcaccttccttctctttgaagcttctgatgatactcatggaacaaactatgggtttaaaaaaaaaaagcccactagtgactttagaggcctcttttccctcctctttccacatatgcaatcaactctccagcactaaaggtaacttccactggcctgaaactacagaccccctttggcttctgtttgacctgtttttggagggcagctttgcttctgggttctcttctcttcctctgtgttttcaagggagctcttctgcaaaaatgacttctctttgaactgacatggatattttyccaagacctagggtgtccactcactaggataaatccacatga

SEQ ID NO: 486930 - DNA, 653 bp, Homo sapiens
attttccagtggatctgactgaggcctgaagaactgaaaatacttatgcaaggtctcagagtgaggtgtcagggctatgagcaaatgctcattctctctgttccataggaaaggcacttgggttccacctgggtctatgtgtgtgctttgctgtggggcagtgggagtggccactgcaaggtctcaggtcaccactgtgtgccttcttgtgtgggtgctaatatgaagatgagctgtcactgataaaaacggagtastgctggagagcaaagtacagcagcaaccttctggcttttccacagtgtgatgataccataagatcatggtctgcaaaaggcacagggcccagaaggtgagggtcctcttttgtccttgaaaggctagtaaagaattgattcctaccatgtgtttgtgtgcgtctgccattcgctttttaaacatgcacaggtttgtctgggattttggcaggatagcaagacctttcaagatgaccacagtgatctaggctgatttacaatgtgttgccttgaaaagtacatgctcaaagtcaggcttggtgcattctaggctgatgccatgttctccagacagcagcaggcttacatgaccctgtagagtgttccttaggcacccattcagtggtgtgggtgaca

SEQ ID NO: 486931 - DNA, 595 bp, Homo sapiens
aaaatagttctaaattatggaataaaatacttgcttcatgccatatgatttaaaacttattcattagcaagcaccacagattttcttatattcaaatattattttttctcaatgtcaacatataccacttttragcctaaggactatttgatcatcactttgagaagtttcttgttgcaaaataacaggttggcaaagaaaatactgaatttgccaacttaaaaatgttagtcatgatatttatgtctaaagttcatcattcgttttgtaaaacctctagtgtcttttcattattattaaatattgaagttttctaaaaacacaaaccaacaaaaattttggtatgaattatgccacattaatataaaatttccagagcttcaaaagttttttttttaaaccacataaaacagagctggaagatattttaaaaggtcacaaggttcatcctcaaccacttgcaatcaagactagtatctaagagacacattttaagattgtttactagaataatttcaatcatattcataaattgtgctctgattatttaacatgaaacatgttactggcatactcttaaattcagctgacagcc

SEQ ID NO: 486932 - DNA, 595 bp, Homo sapiens
aaaatagttctaaattatggaataaaatacttgcttcatgccatatgatttaaaacttattcattagcaagcaccacagattttcttatattcaaatattattttttctcaatgtcaacatataccacttttaagcctaaggactatttgatcatcactttgagaagtttcttgttgcaaaataacaggttggcaaagaaaatactgaatttgccaacttaaaaatgttagtcatgatatttatgtctaaagttcatcattcgttttgtaaaaccyctagtgtcttttcattattattaaatattgaagttttctaaaaacacaaaccaacaaaaattttggtatgaattatgccacattaatataaaatttccagagcttcaaaagttttttttttaaaccacataaaacagagctggaagatattttaaaaggtcacaaggttcatcctcaaccacttgcaatcaagactagtatctaagagacacattttaagattgtttactagaataatttcaatcatattcataaattgtgctctgattatttaacatgaaacatgttactggcatactcttaaattcagctgacagcc

SEQ ID NO: 486933 - DNA, 489 bp, Homo sapiens
cttgggtatcattggcagaatcattttaaatacaccyatcattagagaaccagttcacagaggtgacaacataaggggaatcatctctccctgctctcatgttctgcatctcttcaaatagaagaggtcagcttcaggtcccttggatgacagcctcaccgcttcacagatataagttgcattcctgaatgctgaggaaaaaataaagcgtccatctgcctcgtgtagccctagccttttctctgaggagttttctttggatggtacctagccccatgcattggcttgaatttgacataaacaaggtaagggaaatattgtctaagaaaaaactagtatcacatagcaggccaagtatattgcgtgtatttcctttcccaaggattccaatgtgcttcttaactggtatattatttcccatcattttagcaattaaaattcatatattcaaacttttattttctagcaatgaatgtaggctctgtgcta

SEQ ID NO: 486934 - DNA, 490 bp, Homo sapiens
gatttcagaattgctatgaaccctttttttaaccttccattccccactccttttaactgtgctatctataactattatcctttgcctgtcccactcttgtatgttgggtgtgttggggtcagacaacttgtctctttagtttcacagatctacagatggagagaaattrtgtatagaacctgtactgaatagattacatctaggaacatcatccacaccaggacctgatttagatgataagattctggacctttgagctgatgctacaatgggatgggactcttgaaaaccacgtgagtgaggtgaatgtattttgcatgtgggagaacatgaatcattggggcatgtagtagacagactctaaggtggcccatgcatgattcctacctcttggtgttcatgcctatgtgtaattcccccactctgagtgtgggcaagacttgtgacttgcttcagaccaatagataatggtaaaggtaatgggatgtca

SEQ ID NO: 486935 - DNA, 490 bp, Homo sapiens
gatttcagaattgctatgaaccctttttttaaccttccattccccactccttttaactgtgctatctataactattatcctttgcctgtcccactcttgtatgttgggtgtgttggggtcagacaacttgtctctttagtttcacagatctacagatggagagaaattgtgtatagaacctgtactgaatagattacatctaggaacatcatccacaccaggacctgatttagatgataagattctggacctttgagctgatgctacaatgggatgggactcttgaaaaccacgtgagtgaggtgaatgtattttgcatgtgggagaacatgaatcattggggcatgtagtagacagactctaaggtggcccatgcatgattcctacctcttggtgttcatgcctatgtgtaatycccccactctgagtgtgggcaagacttgtgacttgcttcagaccaatagataatggtaaaggtaatgggatgtca

SEQ ID NO: 486936 - DNA, 615 bp, Homo sapiens
aaactttatttaataaataaagaaacagtccatcacatcctctaaattgcctttaaaaacatgcagcttatattaaattctgattcataaatttaatttttattcttctaattgcaaaatttccaaacaaaacacaatcccaacaaatccttaagaaagcaggactagggaacagcaacgggtgtcatgtagatgaygtgttctaccagaatacaataccatgtgccttctgaggaaggacgtgatttatgctcgcagacattttggcttaaatgatcactggttttcagttccacagaaggtcttcacatgcatgatgtggaggaacatggataaaagccaagatctgttaattgctttctagtaatagaggtgaaatatacagtttatgcaatgcacgcatttcaaaatagtcactataatggcttttgcattaagatttcaataaccaaaaaaagtactctagaaaataagttgactccagcttcctgagatggaagcataccatgtttgcgggacttctggggcctggtgtgttttcaagtgggaagaacttatgcatggagagggagaaaaagcgttacaaggtgtcacttgatttggattgaattaagt

SEQ ID NO: 486937 - DNA, 522 bp, Homo sapiens
ggtggctcacgcctgtaatcccagcgttttgggaggccgaggcaggtggatcacgtgaggtcaggagtttgagaccaacctggccaacatagggaaactctgtctctgctaaaactataaaaattagctgggcgtggtggcacatgcctgtaatctcagtcacttgggaggctgaggcacaagaattgcttgaacctggtggggcagaggttgcagtgagccgagatcgtgccactgcactccagcctgggtgacagaacgagactccgtctcaaaacaaacaaacaaacaaacaaaaccrctacatagtcataaatgtacattttatttggcttcctattttactacctttcttaaaaaaaaaaaaagtcttgtcaacgattctcatttgcaagttgaatcctgtaaataaggcttggtgagactggctcaccactgctccagtgatccctacagaattgtttccagacctatctgtgtggaattgtttccatagagatggttaaaaccaaggactgccag

SEQ ID NO: 486938 - DNA, 513 bp, Homo sapiens
ctgttattaataaatggaaattgatttgagarcattactgaattcctagtaggtcagtatatgtttccatccatccataaaaaatacaagtacagcttggcacagtggctcatgcctgtaatcccagcactctagtaggccgaagctggcggatcacttgagatcaggagttcaagatcagcctgggcaacatggtgagaccacgtctctactaaaaatacaaaaataattaaccgggcatgatactgcatgcctgtaatcccagctactcaggaggcggaggttgcaatgagccgaaattgcgccactgtgctccaacctcggcaacagagtaagactccatctcaaaaaacaaaaacaaaacaaaacagaaaaatcaagtacattctataatgttggatgagctaaaaaaaaaatgcacgtacataaagtgaacctgtccctgactttcaagagcatacagatacattccattacatagataaattacattaaactgtagcaagtgacaaa

SEQ ID NO: 486939 - DNA, 531 bp, Homo sapiens
gaatgcaaattatcccagtgtttttgtgggggatacttctgaatattctacataaaaggragtatactctattagttattattgctgtgtaacaaattgctccaaaacttaacagcttaaaacaacaaacttttattatttcataatttctgtggatcagaaatcttggggcagcttagctggatgcttctagcccaggatctctttttcttcttttttgagatggaatctcactctgtccctcaggctggagtgcagtggtgtgctcagctcactgcaacctctgcctcatgggttcaagctgttctccagcctcagcctcctgagtagctgggattacaggtatgctccacgaagcctggctaatttttgtatttttagtagagacgggttttcccaatgttggcccacctggtcttgaacccctgacttcatgtgatccacccactttggcctcccaaagtgctgggattacaggcgtgagccaccatgcccagcctagggtctcttataagggtataattaaaatgt

SEQ ID NO: 486940 - DNA, 639 bp, Homo sapiens
gctgatgtaggtattctggtggtgctattatgctgcttaatttcccagagcactttttttgttaactgaattaatggtatgttatgttttttactgttaagtactgacatgtgaatacatgcaagaaaatgattgcttatcagtagcatataaattcatagtcgggaatgatggtgatrcaagataaccacagatagtccacatgtgtgactaagatggtgacacctttgctttctgatggttccttgtatacaaactgtttcattcacaaaactatgtaaaatattgtataaaattactttcaggctacatgtataaggtatatataaaacataagtaaattttgtgtttaggcttggatcccatccccaagataacctcattatgtatatgcagacatttcaaaagttgaaaaaatctgaaatccaaaacattttggatttcagattttcttttcatttttatgaaaagtcccaagcatttattttcattttttatgacaagtatttcagataaggattactcaacccatactagaaagcatatttcactcctttctcccaataaatccagtgataaagtacttagattatgccattttgttcaaaaattccttgatgactatattgaatataaacc

SEQ ID NO: 486941 - DNA, 639 bp, Homo sapiens
gctgatgtaggtattctggtggtgctattatgctgcttaatttcccagagcactttttttgttaactgaattaatggtatgttatgttttttactgttaagtactgacatgtgaatacatgcaagaaaatgattgcttatcagtagcatataaattcatagtcgggaatgatggtgatacaagataaccacagatagtccacatgtgtgactaagatggtgacacctttgctttctgatggttccttgtatacaaactgtttcattcamaaaactatgtaaaatattgtataaaattactttcaggctacatgtataaggtatatataaaacataagtaaattttgtgtttaggcttggatcccatccccaagataacctcattatgtatatgcagacatttcaaaagttgaaaaaatctgaaatccaaaacattttggatttcagattttcttttcatttttatgaaaagtcccaagcatttattttcattttttatgacaagtatttcagataaggattactcaacccatactagaaagcatatttcactcctttctcccaataaatccagtgataaagtacttagattatgccattttgttcaaaaattccttgatgactatattgaatataaacc

SEQ ID NO: 486942 - DNA, 527 bp, Homo sapiens
acatgtttagactcattttctttcatttacagggtaagatttgagttaatgatacttttgttttgtcgttggtagtaggcttgatcctgggtgtttttttttggcgggagggtgttgggggaaaaagagaaatcctccatcctgttaatggcttagaagtgcrttttactgagtctttcttcataaaaacgatattctgaatgttggtgacattccttggccaatccacataaagacagtcttataaaaatcttaatttatctttgtacattttcatattatagctactgtcttaggtttattgaaataggtacataagaatggtataaaatgtcataatctctaggttagtctcaaaaatctcattacttcgttttcgttctcaaccaaagcaagcatatttttctggacagtttatggtaatgagccaaaatggtgccaggcaacttccttgggacagaaaatcaaaactctaatacaaagtacgaagttcagagaaggaagatagtctttaaaagaaaattgtt

SEQ ID NO: 486943 - DNA, 522 bp, Homo sapiens
gcctctcaagggggcttcagcaggcaggccaggtggagaaaggaggctgagcatgccaggaaccacaccttgggagagcaggtgtgcccaggtggagacccccccagcaggatgggagaagcttggcagtgtgggtgaggcgcrgacggcctgtgccactccagggagccccagcagagtttgagtaggggagtggcaaggtctgatctgtgtctgcagaagcccctcaggtagcatcaggcactagggcagagcatctgatcctggggagcttccaaaagtctcggctcccaggccttacccaggtgacattatttgaagcaatctgcaaccctaacgctgagacacaggatggaagaggcctggctggctgaggttcagaatggacgacaagctcactgagcgtcaacactgggatggagcttcacaaagctccagaggaagggtcccccgtacctccctgggtggagcaccgctagggaacagtggtcagtcctggactccacatctaaggagaggagc

SEQ ID NO: 486944 - DNA, 522 bp, Homo sapiens
gcctctcaagggggcttcagcaggcaggccaggtggagaaaggaggctgagcatgccaggaaccacaccttgggagagcaggtgtgcccaggtggagacccccccagcaggatgggagaagcttggcagtgtgggtgaggcgcagacggcctgtgccactccagggagccccagcagagtttgagtaggggmgtggcaaggtctgatctgtgtctgcagaagcccctcaggtagcatcaggcactagggcagagcatctgatcctggggagcttccaaaagtctcggctcccaggccttacccaggtgacattatttgaagcaatctgcaaccctaacgctgagacacaggatggaagaggcctggctggctgaggttcagaatggacgacaagctcactgagcgtcaacactgggatggagcttcacaaagctccagaggaagggtcccccgtacctccctgggtggagcaccgctagggaacagtggtcagtcctggactccacatctaaggagaggagc

SEQ ID NO: 486945 - DNA, 548 bp, Homo sapiens
ctctcaagggggcttcagcaggcaggccaggtggagaaaggaggctgagcatgccaggaaccacaccttgggagagcaggtgtgcccaggtggagacccccccagcaggatgggagaagcttggcagtgtgggtgaggcgcagacggcctgtgccactccagggagccccagcagagtttgagtaggggagtggcaaggtctgatctgtgtctgcagaagcccctcaggtagcatcaggcactagggcagagcatctgatcctggggagcttccaaaagtctcggctcccaggccttacccaggtgacattatttgaagcaatctgcaaccctaacgctgagacacaggatggaagaggcctggctggctgaggttcagaatggacgacaagctcactgagcgtcaacactgggatggagcttcacaaagctccagaggaagggtcccccgtacctccctgggtggagcacygctagggaacagtggtcagtcctggactccacatctaaggagaggagctgacaccctcccctggctgcagtgacgg

SEQ ID NO: 486946 - DNA, 454 bp, Homo sapiens
ctgaggggctgagtgttctgcccccagaggagaagccctgggaggccagggctgcctgcaggtcctggtgggcccatcctggggcagatccaagaagacagggcataagccccatggagggtagtttttcytgatgtagagagaactctatgaaaaaactgccccataatgggtgggggcactgtcaggggaaacagaatccccaaacggccctaggctgggggtatagttggctccacccaggggcatccagggcctgggtaagcccccatgatgggtaggatggacatggccccggccccagagcagatggaggagactcgctctcctgtccccagaacccaaaaggaggggagccgagctgctgtgccatcttgccattgatagagcctgggggtaggtcaccggaggaagcacggccaagagacagaccccgcagaaggcctggggtccg

SEQ ID NO: 486947 - DNA, 454 bp, Homo sapiens
ctgaggggctgagtgttctgcccccagaggagaagccctgggaggccagggctgcctgcaggtcctggtgggcccatcctggggcagatccaagaagacagggcataagccccatggagggtagtttttcctgatgtagagagaactctatgaaaaaactgccccataatgggtgggggcactgtcaggggaaacagaatccccaaacggccctaggctgggggtatagttggctccacccaggggcatccagggcctgggtaagcccccatgatgggtaggatggacatggccccrgccccagagcagatggaggagactcgctctcctgtccccagaacccaaaaggaggggagccgagctgctgtgccatcttgccattgatagagcctgggggtaggtcaccggaggaagcacggccaagagacagaccccgcagaaggcctggggtccg

SEQ ID NO: 486948 - DNA, 454 bp, Homo sapiens
ctgaggggctgagtgttctgcccccagaggagaagccctgggaggccagggctgcctgcaggtcctggtgggcccatcctggggcagatccaagaagacagggcataagccccatggagggtagtttttcctgatgtagagagaactctatgaaaaaactgccccataatgggtgggggcactgtcaggggaaacagaatccccaaacggccctaggctgggggtatagttggctccacccaggggcatccagggcctgggtaagcccccatgatgggtaggatggacatggccccggccccagagcagatggaggagactcgctctcctgtccccagaacccaaaaggaggggagccgagctgctgtgccatcttgccattgatagagcctgggggtaggtcaccgraggaagcacggccaagagacagaccccgcagaaggcctggggtccg

SEQ ID NO: 486949 - DNA, 641 bp, Homo sapiens
cctggtcagtcctcacatgggagccagcagaggtccttttcttcctgcctgggtcaggtttattagcatgtgcaggggaggcaggctgtgtggatgtgagctggcctcgtgcatggcaggcatccatcctgagaggggaccccgggctggcggagtgagggtgtgccctacactctgcccactaggagggctggcccaccatcctgtcgctagcccacccctgcccactggagctggtgtcctgggcaggagcccctgcaggaggaatggacaaatggctccaccttacccccratcacaagctcacctgtcaaacagtggcttctccccacagtcgaaggaatcctgcaggtccctcaccaggttggcctggcctggcatgcggaacagcccctcctcagtgagcccgcgctcccggatgaagtccacacactgctccaccagcaggggcgccaggcgggggccatacttccgctcgtggtggactgtttcctctaggcgctgcccaaagatccctgagcacagagaggagctagtcacaccctccaccacccagctcagtgttgggtgctcaggacaatggagggcaggcgcactgttagggctaaaggtggctcctcctcaggaagcaaattacacac

SEQ ID NO: 486950 - DNA, 641 bp, Homo sapiens
cctggtcagtcctcacatgggagccagcagaggtccttttcttcctgcctgggtcaggtttattagcatgtgcaggggaggcaggctgtgtggatgtgagctggcctcgtgcatggcaggcatccatcctgagaggggaccccgggctggcggagtgagggtgtgccctacactctgcccactaggagggctggcccaccatcctgtcgctagcccacccctgcccactggagctggtgtcctgggcaggagcccctgcaggaggaatggacaaatggctccaccttacccccgatcacaagctcacctgtcaaacagtggcttctccccacagtcgaaggaatcctgcaggtccctcaccaggttggcctggccyggcatgcggaacagcccctcctcagtgagcccgcgctcccggatgaagtccacacactgctccaccagcaggggcgccaggcgggggccatacttccgctcgtggtggactgtttcctctaggcgctgcccaaagatccctgagcacagagaggagctagtcacaccctccaccacccagctcagtgttgggtgctcaggacaatggagggcaggcgcactgttagggctaaaggtggctcctcctcaggaagcaaattacacac

SEQ ID NO: 486951 - DNA, 533 bp, Homo sapiens
ctgatttttgtatttttagtatggacagggtttcaccatgttggccaggctggtctcgaactcctgacttcatgatccgcccacttcggcctcccaaagggttgggattacaggcgtgaaccgccacacctagcgtggtatttattttttagaaatggggcctygctgtgttgcccagactggagtgcagtagctattcactggcctgaacataatgcactgcagccttgaactcttggcgtctagccatcctcacgcctcagcctcctgagtactgaaaattttaaggtcattttgccttcagtcccacatgggagcaggagtcctaggtgagctggggttgccataaccataattgaatgtgagtcccctggcagaaaggtaacctccttttctttatatgcgctcatagaaattcatttatctattcctatttctcttttctccccacctttggctttggtagctggagctggtaagaaatctttcttattttctgtaatgtgttttataaattatgtgtggtctaatga

SEQ ID NO: 486952 - DNA, 667 bp, Homo sapiens
tttgtatttttagtatggacagggtttcaccatgttggccaggctggtctcgaactcctgacttcatgatccgcccacttcggcctcccaaagggttgggattacaggcgtgaaccgccacacctagcgtggtatttattttttagaaatggggcctcgctgtgttgcccagactggagtgcagtagctattcactggcctgaacataatgcactgcagccttgaactcttgrcgtctagccatcctcacgcctcagcctcctgagtactgaaaattttaaggtcattttgccttcagtcccacatgggagcaggagtcctaggtgagctggggttgccataaccataattgaatgtgagtcccctggcagaaaggtaacctccttttctttatatgcgctcatagaaattcatttatctattcctatttctcttttctccccacctttggctttggtagctggagctggtaagaaatctttcttattttctgtaatgtgttttataaattatgtgtggtctaatgattatatggttgtaagaaaaataccataaaggaagagtgtttgtccttagttttcatctttagttatccataaaatctgaactctaccctgaaaaatttgtcgtcattgtatttttcatctttcctcgatatctacttgtt

SEQ ID NO: 486953 - DNA, 684 bp, Homo sapiens
ttgtgtgtgcatgtgtgtgcacatgtgctggatgtgcgcttataaacrtatgtgcatatgtgtgcttgtgggcttgtgtgtgcatgggtatgcacacttcggggtggggggggggcacctgagtgtgaggagagtgccgaagtagctacacacggtgttgtggtgccaggtgctgttctgagcattttacactcatcagcacatttaatcctacccatctgataacttagggactgtcactatcactgtaaccatcaacatcattatcttgacttttgcctgttcagtttgtaggatgtttgaacggagaggcatgggggcttaagaatgtgcccaagttcactcagcatgcatgacagggacaacggtccaacccaggcagtctggctccaggtatagggaatgtactcagccacatggctgcttggcacccatgttggtgtggagatacctatgtgaggcatcccccaatccagcaccagcagttcctgaaaacatgggtcatgtgaacagacaacaggcagaggttgcaatactaacacgaagggaaagctgctcccacctgggacctggtgggcaagaccaggcgcccctgcccagaaatgggacccaaggggccattcatcagccttgagcacaggaggtgatcctgctgcaagcttggcctgctagctgccagggaca

SEQ ID NO: 486954 - DNA, 606 bp, Homo sapiens
ccagggcccaccactgacagcgtcctggcctttccaccatcccaagagtggcctgggctggtccagtgacactgagcccctgctgtctctcacctcagtcagagctcaacatctgatgcctaacagtgggccacacaggtccacagatgtgcctgtttagctcacatgatgtttgaaacatttttaaattagttatttataatcaagagatttcatatacaaatctggattcccagcttctcttaaaaaatccagacgtggtgacaccaggcctgagttccaaaaaaagcaacaattgcagagctcagtagcatctgtgcccttttgataggactcacacttgctacttctccgcagtctccaccatcccctctcacttccaacctggcccatgctcctctcatgtggtcttgacaggtattcgttcacctcttctgctttgacctctggggcacagacttcccccaaggacactggggccaggataagtaggaaargtagcaatgggaagctacacctctcaggaccagaggcctctgctaggacctcaaatgagcaggcagagggcatccaggaggaagtgcccatgggcagagggtcccatga

SEQ ID NO: 486955 - DNA, 613 bp, Homo sapiens
tgaaaactctcctgctccccacccgtccaggcctggaggagcacagtagaggctaagctcacctggaagggtcctgccctgggcagtccaccccagggcagaagtgattccctcctcctggggccgccggtcccacaccccttcctgtggcccaggtaggcttggggtcagagcccgaggctcggatcccgctgtgtcccctccgtagttcggggtggggagggatcctttgcaagtccctgcgcccccccccagactctaagtcctcgtctctacatgcgggacgcccacagccagcaggagattgaaggacgcctccggtccctgtttcttccctcggacacgcacgaccctcgccccctgggaaccgtcccgcagcaccagatccgcggtgacacccaaactcccccaggctccccgccgacccccgcgagacgcatgcgcggcgctctcgcccgctgcgccggtcccagcttcgagcgcctctmtggcccggagacgcagcttctctggcgggcccgggggcgcccgcaccccgtcccgcccctacctggggcggcgggcgcgcaacaagcgggcaagcggcaaggcggccgcgggcaagcgctgcatc

SEQ ID NO: 486956 - DNA, 613 bp, Homo sapiens
tgaaaactctcctgctccccacccgtccaggcctggaggagcacagtagaggctaagctcacctggaagggtcctgccctgggcagtccaccccagggcagaagtgattccctcctcctggggccgccggtcccacaccccttcctgtggcccaggtaggcttggggtcagagcccgaggctcggatcccgctgtgtcccctccgtagttcggggtggggagggatcctttgcaagtccctgcgcccccccccagactctaagtcctcgtctctacatgcgggacgcccacagccagcaggagattgaaggacgcctccggtccctgtttcttccctcggacacgcacgaccctcgccccctgggaaccgtcccgcagcaccagatccgcggtgacacccaaactcccccaggctccccgccgacccccgcgagacgcatgcgcggcgctctcgcccgctgcgccggtcccagcttcgagcgcctctatggcccggagacgcagcttctctggcgggcccgggggcgcccgcaccccgtcccgcccctacctggggcggcgggcgcgcaacaagcgggcargcggcaaggcggccgcgggcaagcgctgcatc

SEQ ID NO: 486957 - DNA, 501 bp, Homo sapiens
tgcccgccgcccgcccgccccggccagcgccgccccaggcccggaccctgaggcgagggaaggcccaggatctgtgagttgcctggratgccacgcccgaagtcggcccccgtgggggatctccggtgtcaaacttcacaccctttcccctaatgccccacgttcccgggcaccgcaggaatcccttccctctttgcccaggacctgctttggagcgcccgcttaacccttcgcctgggaagcaggtgttccaggtgaggcaatggaggtccagggaggttaggtaactgagtctgggtcacccagcaaggaggaggtgctggcttcacagtgggggtccaggctccaggcccttctggcctcttcctgcctgggcatcctagtgccagagatattggtttggacttgacatacagtatgcccctgagcagtctgaggggtattagcttccctatattacagagaatcagagaggttgtgtgatttgcctaaggtcataca

SEQ ID NO: 486958 - DNA, 519 bp, Homo sapiens
gtgtctcccttgcctctgggacaaagggagcaggaagcagctccttcacctagcctggtctcctctcctccagcagcagtcgcccctcccaggatgtggtttcaggagctcacacctcaggcagccctggagggcagagggaggcaatgagcaccaaactttgctcagtaagtacagagcaaggggctacgcctgtgccgatgccacctgttcatctgcccatctcccccatttctccatccatctgtccacttgttcatctgcccatctatccatctgctcatttgtctacccatctatctatccatccatctgtccrtccatccatccacccatctatccatccacccatctgtccacctctccagcaaagaaaagcagccccttaagggcaaagcacaactgctggaaacccttcagagggcctactgttcttggaataaaacccaactctgatgtgactgtgggcctccaggtccctcggaccacctctcctcccccggcccatgtcctgctgtc

SEQ ID NO: 486959 - DNA, 424 bp, Homo sapiens
attagattaattcaaaaatatttgagtgtgtgctatgcaattctgggaatccaactgtgaacaaaatgcatgctctttacccttacatgtgttttagtccaatgggaagcacagacatttcaattcagggtaatacatgtgctgccatggagaaagactcagtgttgtcttgggagtgagtatactgactgaacttgaagcctcagggatgagtaggtcttgaccaggtaaagttggggttagagtgtgttacagattcytccctgtcctctccccgcatgttggcttggaggtgaaaagattgtggtacttttaaagcagttaattgtggctggatcctgggattggagagggaggaggatctggtaagagagggccagggccaaatcatccagagtcctgaagttcctggaatcccctagtt

SEQ ID NO: 486960 - DNA, 596 bp, Homo sapiens
ctcctctccaagcaggtaggagggggtgccgggacttctcgtgtcctgttgctaggcacaccagcagttctgggtttcctcagagaatcatcaaagttcaagccaccagtgacctagagatcatcgagttacgcttgtttccctctttccagataaagaaactaaagaaactgaggttctgagtggcagggagctgggacgactgctggcatttctgacagtcttgaggcctgcgtgcctatccccattgcaggtgggagggcagaggctcagaggtgtgagggggaggcctggctaggaaatgaaaccaaatttctctgctggatgctggttccctttttgaaaaacccccagggctgctgtgcaggacaccgagtggagaagaagtcacaaagagcggcccttctcagaaatcgagtggagccagaagcctcaagkttcagtctcctgagcaaggcccgcaggacggcaaggctcgaccacatcccagcatgtggttccaggcctcagatctgtccacgtcagcccaccactgccttcaaagtcaagtcagacatgagggctgccacctcgcctggcctctgccagccttccca

SEQ ID NO: 486961 - DNA, 336 bp, Homo sapiens
tatcaaaatggaagtcaattcatgtgagttaatgtaaagctctcaaaygctttcctatttcccttagaataaaaataacctctcaccatgggcgataggccctcagagtatctggcccctgctaggcttttcatgaccccatcctaccctaccccacttcttcacagactgcaacacattgtgagacccctgtgctcaagtgttgcggggcttgctttgggagacagaagtagtagcaatgtggctggtagaaaaggatggcaatcctggtgcaagtgggggttcttggtggaggcaggagtaaggagacacagcagcagtgtgtggcaatgtcac

SEQ ID NO: 486962 - DNA, 651 bp, Homo sapiens
ccttgtactgggacaagcctgggacctgcctccaggggccgccccctccctggctgcagactgcacactgactctgtttccacccctgcagcaaaggtccccggcaggctgggcaggcattcccacttgcgtggagtcagcaggcctctgcagcgctgactgcgtgccagactgactgcgtgccagactgactgtgtgccaagtctgccagtcctagggctttcccagagctaggattcccctctctgaggctggcttccagggccagcggcccagaggttaggggccgacgcccatgtgccaagagcacrgctctccctgcaggctccgccccgtcacaggaggctccacggggcagcaagttaccttttcacactcctctcgtactcagtccgctggcggcacagctcggccctgagctcagtgaccagcccctgtaaggcctcggagcggcgcgcgtgttcccgggtggggctgtccggctcgctgggctcgctgttgctggcacccgcgcccgcctcgtccatgctgtggtccaggtccagggacttggggtcctcgctgctgctggggagcggggagggctccagggcccagtcggtgtgcagggaactgcgggcagacgagtcgctggcgcggcaggccgtgcag

SEQ ID NO: 486963 - DNA, 427 bp, Homo sapiens
tgctgagtgagccccccaccgacgactcgctggacgaggccccggaccacgccatactggccacgctgggtatgccggggaccaggcccggcgcgggcacattgtcgtaggtggagagtctctgcacggagcccgagtccttgagccggtctcccgacgaggcccggcggtgtccgcgcagggaggacagcccgttcataagccagttcccgccggaggagatgatgggcacctccagggatgagccgccccccttcgggcttcccgatagggacctcggctgccggaaggaggacttccaactgggcagggtctgcaccttcttcccagggctgcaccggctccccggccccktgggggctgttctggagagcaccgccacggccgccccgtccagggaagaggtcctgtgcgcgggcaggccggg

SEQ ID NO: 486964 - DNA, 659 bp, Homo sapiens
ccagttcccgccggaggagatgatgggcacctccagggatgagccgccccccttcgggcttcccgatagggacctcggctgccggaaggaggacttccaactgggcagggtctgcaccttcttcccagggctgcaccggctccccggccccgtgggggctgttctggagagcaccgccacggccgccccgtccagggaagaggtcctgtgcgcgggcaggccggggccgccgggctctccttggctgtccctggtgacctcctcggagccccaccccactgcgcattgcaggcccccgcgcggggaggtgggcccttccgggaccggtgccgtgaagagctggctgtgtttgcggatgaggacggtcatcaggtgctggacgagggaagtgcctgccgggaagagaggcggagaagggccttgctgccagccactcggcccaggctcgctctgccagtcatggagaagctgcagcttcgtgggagctggccctgtccccagagccaggccgcccctcaagggagccttcatccgcccagaggaaaggaccacacaccctycaactccaggcaggacagcaggatggggccgcagaaccgccttcctcaggcacagagccgcaagcagggaggaagcactgtgcctgcgctcacgccctc

SEQ ID NO: 486965 - DNA, 660 bp, Homo sapiens
tgatgactataagcatctaccttataatatacataataatatcttgattaagtaggatgctcagaaaattgggaattctagttagtttaattttgtgtcaaattaattctgaactgaactaggagagctgtcatcttttggaamctaatcataaattctgacatttctaggaagctgatgttataaactcaccatggttccatttgtgcacaggacccatgagcctctagggaagtactaccctcagagaagagaatatgaagagtccccatttggcccaaaggtaatgggctgatgccagaagggaggccagccaaggagagggaggtagtaaaaataagaagtttatccaccagaaatgaaattagtaacattttcagaatacccaggctcctgctttatatcacagaccaagcatgaagggggtgatgggtaatttccaatgttgaagtggctggtgaagtgcacactataacacaaagagaatggtggcttctacccacagacttcactgagatgaagtgggaggggaaccacatatatgcacaggaagaaggccagaagaaagtccactgtggctagagcatgaggggaagaacatagtgagctatgtgtgacactgaaaagatacttttttcctagtacatgagatgcaaatgc

SEQ ID NO: 486966 - DNA, 507 bp, Homo sapiens
ctgggacaaccctgggcaacagcaggatttgggaggatggaggaagttgaagccagaagcaggctggggaagcggaaagaaacttgagcaaaaacgctggtatttgggctctgcagaggggaaggaaggaagagcttccagaagcagagggtgattaatagtgtctgagccaccacagggcatcggaggatgagaccctgagatccaattcaggttggatttggtcaragcaatatcaggagaggccaaaatctctaaatgcaaggagttggtggggactggggggtgaggaaggagaggcaggtatgtgggccaccctctcaagatgtgcctgtcagcaagagtaggtgacagcggcccctcggcacacgcagtcatgtgagccaaaagattgcaagtgccaggctagcttcttcctcccaagcctgagccccacctcccctgaggtcatcccacactctagtatccttcgaggcctggcctggggcctccctccacggggtggag

SEQ ID NO: 486967 - DNA, 609 bp, Homo sapiens
tcctgaggaatcaccaatccagcttcagtgttcaggggcaagcatgcaaacaacccacttcctctctgggccaaaacacagccaaggcaaggctagagcattcaaccccaacctctccagcagcagagggacagcaacagagaatcaaggtggagcgggtgaggacctagacagtctgacaccagggtggctagtggtacccatagatctatcacagctrcttgggtgccagagagaagagatgaggcctcctgtgaatgctgctgttgtccatgagcagcagcctgtctggaggggacaaccccttccagagcaggggcctgtgtaaaagtgatagattcagtattataccccaggccatatgacagttgaggtgaaggtgtgaacatcagtgttggagtgattggacccaataccaggctgtgggagcgatgaagtccagcagagtcaaaggaatgagaaaagacaagttaagagagaaagtgggatcagggggccaatgttagtatggaggccgtgaaggcccggagctctgggagcccacaccatttattggtgatcaaacaaaaaaacaggtggtgaggatgtggaggttgaaaggaagcagtg

SEQ ID NO: 486968 - DNA, 609 bp, Homo sapiens
tcctgaggaatcaccaatccagcttcagtgttcaggggcaagcatgcaaacaacccacttcctctctgggccaaaacacagccaaggcaaggctagagcattcaaccccaacctctccagcagcagagggacagcaacagagaatcaaggtggagcgggtgaggacctagacagtctgacaccagggtggctagtggtacccatagatctatcacagctgcttgggtgccagagagaagagatgaggcctcctgtgaatgctgctgttgtccatgagcagcrgcctgtctggaggggacaaccccttccagagcaggggcctgtgtaaaagtgatagattcagtattataccccaggccatatgacagttgaggtgaaggtgtgaacatcagtgttggagtgattggacccaataccaggctgtgggagcgatgaagtccagcagagtcaaaggaatgagaaaagacaagttaagagagaaagtgggatcagggggccaatgttagtatggaggccgtgaaggcccggagctctgggagcccacaccatttattggtgatcaaacaaaaaaacaggtggtgaggatgtggaggttgaaaggaagcagtg

SEQ ID NO: 486969 - DNA, 495 bp, Homo sapiens
agaaaatcctcaccatgctggaacaagggctgggggccttggaagaagcaggggagggaacatggcaggtggagtttggaatccacacttccccctcccacctacctgccatggctgatgcaacattatgttctagaagaggcaatttaaaaatcactttgagagcaggctaggtttctgttgtatgttttattttttttccaggagaataagtgagggaagctcagcaataaggagccatagaagattgatttaaagtttgatgtgattgagtaaaagcttgagactggtggggagaaagtcaagatggatgggaaagcacatgcacttctaggagtggaacattaatattggacagtcggaaaccrgaaatctttaagaaagaggaaacctcaggggaagaaagagaggccatcctatcccataacttgaaagtcacaggaatatttcagcctgcagggaatcttcatttcccaccccattgtttaccaaact

SEQ ID NO: 486970 - DNA, 579 bp, Homo sapiens
ttcaagagctcccctgggtaagcattctgttcactagtcacttccacattaatcctgctgcttccctgtggcactgctcagcacccagccctgggctgccaccaaggccggggcactagtactagtgactcttcccaacgtggcatggcatctcattcccatgagcatggtcgcaggcattagaatgttcacatgaatgacaagactgagaggaagagaggctgagcctaaggccactgggtgaggaccagtagtgcagcctcaaccacagggtcttctgcaggrctcaggaatacagtgagatgaggctgcctgaaggggtagaccccaggagtgactcagggcaagtcacaggcaccctgtttggcacggagtctagtgcaaggtcctggcttaccacagagcaaccagaactttgcaaagaggacccactcaccctgaaaagggcactccctggggtttggaagaggccatgagctctgagacctgaagatccttgagggctccaccagggtttccagcttaggctgcaagtctaccccaggtctcaggccccaggccctgggctcattcatgact

SEQ ID NO: 486971 - DNA, 360 bp, Homo sapiens
agtcaagtatttttagttggacccattgctgtcatgagcaaattggggttcaacttgtaaggcagacggggtgaaagraggaatggttgttgagttggcagggagggcatgtgccgcctgagaaagaagggccctgggagcagtggacaggtaccctggggaggtggagagggggatgcagggaaggctgtgcaaagagatgatgccaggcttgggggtgcacatggaggaggctggcttttaatctctaggtactagggagctatggcaggtttctgaaggtcacgtgtttggggaagggaagactaagactgacagcagagtaccttgtgcagacaaacgagcttagttcttatttgc

SEQ ID NO: 486972 - DNA, 524 bp, Homo sapiens
acaaacctatcccagggacgaaaattatcgtcattagctatgtcttcaaggacatggtaaaatatgactattttaccagagcaaaggacatgaaaacctgagagcacacagcaggtgaggtcatcagaatagctagtgataaatattacttggctgagaatgagattctgggaatatgggacatgaggcaggtgagttttgattgtcagcaggtggcaggaaagacaggacttgtaagatctgcatgtacgaatgaaatttcagatggagacataacaggttgggggcttggtccaaaccccagttggatagaggaggaaaccccaggccagaaaggctaatgggcttcctggagcctccctgaaagttagtgktattgggctttcaaagctcatctttaacagccagatcctatggttcagcctttggcacctacttccatatgtggactcctcaatgaagagactagaatgtgtctcatttgttacaagaagatcatatgccacattgcagcttttaaatca

SEQ ID NO: 486973 - DNA, 467 bp, Homo sapiens
ctatggaagcaataataataatttatatttatctagttattatttttaagttttctcaagtttcagatcctttgccttatgcttttcatataatattgctaaagtagtcacttagcttggatacctttcacttcatttatatgtaagagaagaaaaatatcatctttaattgcaggaaattaacaatatttctaaagagttttattttttattgcatttattttgtcaagtctgtctgtatatatcctactccaaatgttgtaactcttgagccaggtactatttgtttcttaaactattatttccataaatagtacataacacataagcaaagtccacgttgctcttgctttgaagttgaccttggcrtagaattaaatttataaatatcccagttcaataatgtaattgcaaaaccatttagctttagcaaagactctcagaaacacaaaaaggggatgccattt

SEQ ID NO: 486974 - DNA, 581 bp, Homo sapiens
acaggtgcccaccaccaccacgcccagctaattttttgtatttttagtagagatggggtttcgccatgttggccatgctgttctcaaactcctggcctcaggtgatctgcccgccttggcctcccaaagtgctgggatgaagagcgtgaaccaccatgccyggcccatgctctgaattcttatttcagatcctatactgtaaacaattgtccttttttcatctatctagtgttatgcttttcacaattattgtatattttttaaatggcccaatcatagagctgaagtgctgcccagaagtataagaggctgtgatgtgctttatggacaaaatatgtgtattagataagatttattcaggaatgagccatagtgttcaatattaatgaatcaaatttatattagattagatatgtttaaagagaaacacacataatacaattttaagcattgatcagctcacaaaattttgactagaggttttcaggaacctaacactgtatttcttttaggagcaatagttcagtattcattaaggaccggtggtgactttatagaacataattgctgctaataatgag

SEQ ID NO: 486975 - DNA, 615 bp, Homo sapiens
tgactcagcctgccgagtagctgagagtacaggtgcccaccaccaccacgcccagctaattttttgtatttttagtagagatggggtttcgccatgttggccatgctgttctcaaactcctggcctcaggtgatctgcccgccttggcctcccaaagtgctgggatgaagagcgtgaaccaccatgcctggcccatgctctgaattcttatttcagatcctatactgtaaacaattgtccttttttcatctatctagtgttatgcttttcacaattattgtatattttttaaatggcccaatcatagagctgaagtgctgcccagaagtataagaggctgtgatgtgctttatggacaaaatatgtgtattagataagatttattcaggaatgagccatagtgttcaatattaatgaatcaaatttatattagattagatatgtttaaagagaaacacacataatacaattttaagcattgatcagctcacaaaattttgactagaggttttcaggaacctaacactgtatttcytttaggagcaatagttcagtattcattaaggaccggtggtgactttatagaacataattgctgctaataatgagagtcag

SEQ ID NO: 486976 - DNA, 616 bp, Homo sapiens
atctaaatcatagaattctacaggcatgatattctggatcacttctgttcagcatragaaattatcacagtggaaaatgtgtatcaaaaccccatttgaagtcacatttgtggtctgatgtcactgaacactcataagtgtaatttttacaaggagagtctgttgagtgggtggagtggacaaagaagtagttaggtcaaagcgccatcaggcacttgtttcccgttcttcatgaaggacatcttcagttagagtgtttttccttgggctgcattggttgatgatacgtgcctatgttaattacctttccttcgatgtgatttgattgttgcaggtttccattgtcaggtatcttttgcctgagggaatcgtagtcaggtactagaacatcctatgaatttgaacaaggaaaaagtatatggccatagtcccaatctctgaccaagatccagttctattctactgtgttccctccttgcttctacacagggcaaagccagctcactccatgtagcccagcttagacatgagggcaattttatctttaccttatttccttcttagatccactccaagaaaacagattcctgttattattggcctagcagctttttaa

SEQ ID NO: 486977 - DNA, 616 bp, Homo sapiens
atctaaatcatagaattctacaggcatgatattctggatcacttctgttcagcatgagaaattatcacagtggaaaatgtgtatcaaaaccccatttgaagtcacatttgtggtctgatgtcactgaacactcataagtgtaatttttacaaggagagtctgttgagtgggtggagtggacaaagaagtagttaggtcaaagcgccatcaggcacttgtttcccgttcttcatgaaggacatcttcagttagagtgtttttccttgggctgcattggttgatgatacrtgcctatgttaattacctttccttcgatgtgatttgattgttgcaggtttccattgtcaggtatcttttgcctgagggaatcgtagtcaggtactagaacatcctatgaatttgaacaaggaaaaagtatatggccatagtcccaatctctgaccaagatccagttctattctactgtgttccctccttgcttctacacagggcaaagccagctcactccatgtagcccagcttagacatgagggcaattttatctttaccttatttccttcttagatccactccaagaaaacagattcctgttattattggcctagcagctttttaa

SEQ ID NO: 486978 - DNA, 616 bp, Homo sapiens
atctaaatcatagaattctacaggcatgatattctggatcacttctgttcagcatgagaaattatcacagtggaaaatgtgtatcaaaaccccatttgaagtcacatttgtggtctgatgtcactgaacactcataagtgtaatttttacaaggagagtctgttgagtgggtggagtggacaaagaagtagttaggtcaaagcgccatcaggcacttgtttcccgttcttcatgaaggacatcttcagttagagtgtttttccttgggctgcattggttgatgatacgtgcctatgttaattacctttccttcgatgtgatttgattgttgcaggtttccattgtcaggtatcttttgcctgagggaatcgtagtcaggtactagaacatcctatgaatttgaacaaggaaaaagtatatggccatagtcccaatctctgaccaagatccagttctattctactgtgttccctccttgcttctacacagggcaaagccagctcactccatgtagcccagcttagacatgaggrcaattttatctttaccttatttccttcttagatccactccaagaaaacagattcctgttattattggcctagcagctttttaa

SEQ ID NO: 486979 - DNA, 601 bp, Homo sapiens
gcatttcccatgtgctactttctgtaattaatgcatgagaactgcaccctagccagactgccaatatcttgaagactaattcttctctctgtacctcatatcacttagcataatgtctttcatagagaagacagagtaaatatttgttgatggagtaatgagaaaatggagttactataggattaaataaatagactttattaatcaagtcttacatatcaattactatgataccacactgtactgtcacaaatttaattgttagtttaggtttctgggttttagtaaagatttattttccaaaatgtaatacattcctgttttagaaggataaatgaaatatcagaaatgtaaaagtaacacaaactaaatagaaagtcaggtgacctgctataattttagttctgcaatttatatatggagtggtgagaatattgatagctgaaatatagtgaatatggtgagcatartagtattacggaagacataatttagtgagcttcaacaaatattgtctgaatttcttatcagtatggaagaattctcagaaacatatttagaagttttgataaaagaacgtgttggaaaaagtgatttgata

SEQ ID NO: 486980 - DNA, 577 bp, Homo sapiens
tcaaaatgaatgaattactattataaaaacatgaatttcacaaatatgatttgagcagaacaaatcaagcacagaataatatatactatactactccacttgtataaggttcaaaagaatgcaaaacagtttgggggcatagttagtgggaggatgcttaatgccagtgaatttatttcctgatttgggtgatagttacatgagtgaatttgcttgagtttaccaagatgttgaatttatcaagctgttgactcaaattttgacattgtttcccttatagtttaattaaaatgacaattaggaccattgatagtaaaatgctgaaaaggctagcatgaatacacaaataaggaaactatccagtaatcatagttattaatacagaagcaagaattttatgtaaaattgtaatatatcagayccactagtaaattaaaaacaaaatatgccaagataaagtagagtttactttatgaattcaattctggtttaatatattatcttctttctaaatgctaaaatgcatttgaaaaaatacaatatccattctaaataaaaattattagtaaaacaaaga

SEQ ID NO: 486981 - DNA, 464 bp, Homo sapiens
gctccctgccccttggagcctgagctgacttggtgccctgctttccagggaatcagtgtcttggccagtctaagcagtcacaccccccactgcatgagagctgaagcactgccctgcttcacagrgaatcagtgtcttggctgagctgagcagccacacctgccagggatgagccaacatggcacccccatatcccaggaaaacggcattggctgaactggggtaccttgcccttcaggacaaacaactgtagaaccctgcttccttggaactggactagccctggagaatctgagttgcccaggcacctgcctccccagggagagaagtagttgctgtactggtccctgcccccgagggctcaagccacagtagtgctccaccattctggggtccttgctgatgctgtgcctggcctttcagagactgagatgctgctgtgtcccaccactgcagggtccaga

SEQ ID NO: 486982 - DNA, 577 bp, Homo sapiens
tattctttaaaacattcccctcccccaaccatttaaaaacgtaaaagccattattaacttgtgggccacacaaaaccagacagcagggcacatttagcccacaggccatagtctgccaaaccctattttaatacaacakctaaatgaatgaactaggaaaagatctagatgaggaactacacatagagcagaagttttctcagctcaaagatttgcaatacatttttaactggagaaaaagctaaagctttaattttgtgagtaatataaattacttttaaagacaaactcatttccttgctccaataacctggtcctctccacatgctgtctatctcaatgatatacccagttgcccagcccttcaattagacattatctttgattcttttctctctctcttaaacttatccaatcacttgctcctgccagatgttgcccttaaataactttcaaaattatctgtaatgtattatcctgttatagaccaccatcccttcaagcttagattattttaacaaccttttcactggtctagatgccttcaggcttactggactccagtccattatcttca

SEQ ID NO: 486983 - DNA, 549 bp, Homo sapiens
gatgctttaaggcacctatgagaaccaactgcggatctctctatgggccccacatgcttcctgaggccacagtggggataagcttgttggagaagggccagcyctgctgtcctcactatggccaccacagtgggccgctccctgcctcagcagctctcttgcaaactggaaagcagtggtgattccctgtactggatgggtcaggggtggctccgaccccgctgctacactccaccttctcccccttgaccccagcctgggtacagaaacctgccaggtcactgcggaggagggaggaaccgagacccagtgtttctcctgttctgtacccaacatgctggtttctaatgtacctctaggccatcttcaatttcaaaccatgcatggtgttcttgaatccacatatccttctgcttaaattgacacaggacttacttgggtcaaggactgtgctggtgtctggggtcacaaagatggtgcaggatttggggcagacacctggaggagcttcagaaaaggaggatggccttactgtccacctacctaatg

SEQ ID NO: 486984 - DNA, 549 bp, Homo sapiens
gatgctttaaggcacctatgagaaccaactgcggatctctctatgggccccacatgcttcctgaggccacagtggggataagcttgttggagaagggccagctctgctgtcctcactatggccaccacagtgggccgctccctgcctcagcagctctcttgcaaactggaaagcagyggtgattccctgtactggatgggtcaggggtggctccgaccccgctgctacactccaccttctcccccttgaccccagcctgggtacagaaacctgccaggtcactgcggaggagggaggaaccgagacccagtgtttctcctgttctgtacccaacatgctggtttctaatgtacctctaggccatcttcaatttcaaaccatgcatggtgttcttgaatccacatatccttctgcttaaattgacacaggacttacttgggtcaaggactgtgctggtgtctggggtcacaaagatggtgcaggatttggggcagacacctggaggagcttcagaaaaggaggatggccttactgtccacctacctaatg

SEQ ID NO: 486985 - DNA, 619 bp, Homo sapiens
ttttgatagagctcattctcttttttttttttttttttttttgaattgctggcctgaatgtccatcatggcccgggacagaagccctcaccttcctgagctgcaggctttcagtgggttagaaaacggattagaaggggttggggatactcaatggatgtccttcatccccctggagaggcagagtgtatggcagggaggcagcctggactgaatcccactttgccggtcactggcgctatgagcttgggcttgtttccagttatcttgatttgtcagctggggataatcacgaattatyggtaagatggaaatcagggtcatgagaatacaatgaattaaagaagggtgcctggcatacagtaggcacgcaaggaagatcagctttgttcctgttcttacgttcactgcccatgtgaagagcacgtcaggtgccatcacctgcaagctcgccgtggcgcagtgaacgctgcctggggttccagatagcgtggggtgtaactcactcctttgattcccgttagcccacccacgttggaatagacactttgtgacggttcaaatagacactttgtaacagttcaaagatgagaagcgtggacctggagaaggttagcgac

SEQ ID NO: 486986 - DNA, 507 bp, Homo sapiens
cgagctcctcattttcctggcaagatagggtgtctccaaggacaggaacctttaagattccagcgcagtgggacaagaggatctcgtgtgctgccgtgtcaaatgctggagcaggggagcgcggggctgttgtggaaacccttgctatttttacctcctgtctccgcagcttctgcctcccactgaaatcccagtgagcagcagcagccccctgggcccctggcgtgccaggtagggctatttttatgaccctccgatttgcccatagatcacatcagaccacgggcagaaggaaagggccacagaacccagtatcccacgtaggtcggggttgctgcacccctcccccatgctgcatgcgggcaggattagggttaggttcagcatctgccagcccccccatgagagtgaagcccagctccatcctcatccccagcaaccctgtgggtgcccatgcacacagcmccatgacgtccatgtccccaggagtgctggggcagcaggcat

SEQ ID NO: 486987 - DNA, 470 bp, Homo sapiens
ccttcccaaacactgagcaggtgacatttccggaacgcagagttagcgtcttcctgctgcctctgagctggtgtttggacacaaggctgcccagagagcctggctgcaggtgtcgacacagctctccacaggacgtggttggcggcagtcacctggtcaccacaactcttctaagcctcccagctcgggaattctggacctcttgcatcctctaaattggatgctgtctgatatttccaaaaggataccatgcttgatgagatcaaaggaggagaggatgactcagaaaagacccagaagagctcacagtgctcttagcaggatgcttagtgacatggagtcctctgacagcaatagtgcttggagacatttttacacctatggccacaggcacatgcatacacacacaccccaccaccrcaacaaaacctgctgcacagatggttcttccttaactgagcaaagtgtaa

SEQ ID NO: 486988 - DNA, 652 bp, Homo sapiens
gccaaggcggggagggtgaccccccaagcacttgctacccctgggtgcctttgctaggcccasctcgtgcctggccaaggtgggacctggagacaaagcgaagccatggctctgtgtacttgctcgcgcactcacacactcatggaagacaggggagggtgtgcagtgactggggagaggggaagagtcaccaggggctgggaggtccctggcagcagggagggggcaggaggcaccccctgagccgcgcatctgggaggagcaggtggagtatgcagagcagagcccgcgggagggagtgccgggcagcaggtgcggcaggggcaagggtgtggaggcccttccagggcaccgtgacgggggaactggctatgcgaggagatgttttaactgggttgttcgagaatgttttgcctgatgcttctgagcagggattgaacgggcagaatagttaaaacccgagggaggtcgagtgaaggtgtgtgaaggtgacttcaaaggtgaggcgcatttcatgatgagcgtgagggcgccagtgggccgcctgactcccatacccagtccacacgctccacactgacagctcagggtgcctgtagctgggctggcaaaattcagccaggcttcaccaaccacaggcagagtccaggag

SEQ ID NO: 486989 - DNA, 575 bp, Homo sapiens
ctgcttgctgattctcggggtgggggagagggaggactccagttcctcctaaaattgccagttgttaatccctatcatgtcaggggataatgactttggtttgggatacggtttggtttgagttggtctggaatataacgcggtggaaggtctcgccttatcgtgtgctgctttcaaaccttcagcccttgtggaactcccttccggaatggccatccgtggggaccgtgccacggagtgtgttaggaactaagtcctakggaaaataaaggaagttttgactatagtcctcagtgaccacagggctgctaggcactggccgaggcaggtcggggcacatggctggctgcaccaaatgggtggctaccttccgagccgctcccggctctcccatcccggggttgcagttacatggaatggatgggaagggagcgtggccaactttaaaagtgcacactctctttgtcataccttgtgtaatttttattgtggggaaaaaaatgtgtaaataaatgcgtgtgagccagctaagaaaatatccacctatttagagtgcacattgcctaaaagaagga

SEQ ID NO: 486990 - DNA, 613 bp, Homo sapiens
cttgctgattctcggggtgggggagagggaggactccagttcctcctaaaattgccagttgttaatccctatcatgtcaggggataatgactttggtttgggatacggtttggtttgagttggtctggaatataacgcggtggaaggtctcgccttatcgtgtgctgctttcaaaccttcagcccttgtggaactcccttccggaatggccatccgtggggaccgtgccacggagtgtgttaggaactaagtcctatggaaaataaaggaagttttgactatagtcctcagtgaccasagggctgctaggcactggccgaggcaggtcggggcacatggctggctgcaccaaatgggtggctaccttccgagccgctcccggctctcccatcccggggttgcagttacatggaatggatgggaagggagcgtggccaactttaaaagtgcacactctctttgtcataccttgtgtaatttttattgtggggaaaaaaatgtgtaaataaatgcgtgtgagccagctaagaaaatatccacctatttagagtgcacattgcctaaaagaaggaaacagttgggtggaatattaatcattttcagacacaaaaca

SEQ ID NO: 486991 - DNA, 575 bp, Homo sapiens
ctgcttgctgattctcggggtgggggagagggaggactccagttcctcctaaaattgccagttgttaatccctatcatgtcaggggataatgactttggtttgggatacggtttggtttgagttggtctggaatataacgcggtggaaggtctcgccttatcgtgtgctgctttcaaaccttcagcccttgtggaactcccttccggaatggccatccgtggggaccgtgccacggagtgtgttaggaactaagtcctatggaaaataaaggaagttttgactatagtcctcagtgaccacagggctgctaggcactggccgaggcaggtcggggcacatggctggctgcaccaaatgggtggctaccttccgagccgctcccggctctcccatcccggggttgcagttacatggaatggatgggaagggagcgtggccaactttaaaagtgcacactctctttgtcataccttgtgtaatttttattgtggggaaaaaaatgtrtaaataaatgcgtgtgagccagctaagaaaatatccacctatttagagtgcacattgcctaaaagaagga

SEQ ID NO: 486992 - DNA, 575 bp, Homo sapiens
ctgcttgctgattctcggggtgggggagagggaggactccagttcctcctaaaattgccagttgttaatccctatcatgtcaggggataatgactttggtttgggatacggtttggtttgagttggtctggaatataacgcggtggaaggtctcgccttatcgtgtgctgctttcaaaccttcagcccttgtggaactcccttccggaatggccatccgtggggaccgtgccacggagtgtgttaggaactaagtcctatggaaaataaaggaagttttgactatagtcctcagtgaccacagggctgctaggcactggccgaggcaggtcggggcacatggctggctgcaccaaatgggtggctaccttccgagccgctcccggctctcccatcccggggttgcagttacatggaatggatgggaagggagcgtggccaactttaaaagtgcacactctctttgtcataccttgtgtaatttttattgtggggaaaaaaatgtgtaaataaatgcgtgtragccagctaagaaaatatccacctatttagagtgcacattgcctaaaagaagga

SEQ ID NO: 486993 - DNA, 561 bp, Homo sapiens
gcggtgcctcagcccctctttcctcccaaggaagcgcattgttattaactgggaattctttatagccgggctggaggaagttttggctgtaaactgtcatgcactgcagccttcgctgaaaaggcggagggagtgggcctggtcctgggaaccsaggaacaaagatcagaaaatcagccacagaaaggggaggaaaaataaacgttagaaagtgaagacaggtgacactacacaagtgctggccaaagtcggtgacttccaacctctacctcctccgacgtgggtggttcaattcctgggtcgtactcttcaatgcttcagacattctctctggagagtagaaattttattacgcgtgttagaaacggaatattctttcctgctgaagttgtattcttatttggccgtgcccctcctgttcggaacagttttagagcgatctgttaaaccctccagtcttctttggcgcttcccgactgtgggaaaagcggccgcgacgccgtccgagcggaggggagggatccagccttcgggactcctttgccctgaagccgcaggaga

SEQ ID NO: 486994 - DNA, 561 bp, Homo sapiens
gcggtgcctcagcccctctttcctcccaaggaagcgcattgttattaactgggaattctttatagccgggctggaggaagttttggctgtaaactgtcatgcactgcagccttcgctgaaaaggcggagggagtgggcctggtcctgggaaccgaggaacaaagatcagaaaatcagccacagaaaggggaggaaaaataaacgttagaaagtgaagacaggtgacactacacaagtgctggccaaagtcggtgacttccaacctctacctcctccgacktgggtggttcaattcctgggtcgtactcttcaatgcttcagacattctctctggagagtagaaattttattacgcgtgttagaaacggaatattctttcctgctgaagttgtattcttatttggccgtgcccctcctgttcggaacagttttagagcgatctgttaaaccctccagtcttctttggcgcttcccgactgtgggaaaagcggccgcgacgccgtccgagcggaggggagggatccagccttcgggactcctttgccctgaagccgcaggaga

SEQ ID NO: 486995 - DNA, 561 bp, Homo sapiens
gcggtgcctcagcccctctttcctcccaaggaagcgcattgttattaactgggaattctttatagccgggctggaggaagttttggctgtaaactgtcatgcactgcagccttcgctgaaaaggcggagggagtgggcctggtcctgggaaccgaggaacaaagatcagaaaatcagccacagaaaggggaggaaaaataaacgttagaaagtgaagacaggtgacactacacaagtgctggccaaagtcggtgacttccaacctctacctcctccgacgtgggtggttcaattcctgggtcgtactcttcaatgcttcagacattctctctggagagtagaaattttattacgcgtgttagaaacggaatattctttcctgctgaagytgtattcttatttggccgtgcccctcctgttcggaacagttttagagcgatctgttaaaccctccagtcttctttggcgcttcccgactgtgggaaaagcggccgcgacgccgtccgagcggaggggagggatccagccttcgggactcctttgccctgaagccgcaggaga

SEQ ID NO: 486996 - DNA, 561 bp, Homo sapiens
gcggtgcctcagcccctctttcctcccaaggaagcgcattgttattaactgggaattctttatagccgggctggaggaagttttggctgtaaactgtcatgcactgcagccttcgctgaaaaggcggagggagtgggcctggtcctgggaaccgaggaacaaagatcagaaaatcagccacagaaaggggaggaaaaataaacgttagaaagtgaagacaggtgacactacacaagtgctggccaaagtcggtgacttccaacctctacctcctccgacgtgggtggttcaattcctgggtcgtactcttcaatgcttcagacattctctctggagagtagaaattttattacgcgtgttagaaacggaatattctttcctgctgaagttgtattcttatttggccgtgcccctcctgttcggaacagttttagagcgatctgttaaaccctccagtcttctttggcgcttcccgactgtgggaaaagcggccgcgacgccgtccgagcgsaggggagggatccagccttcgggactcctttgccctgaagccgcaggaga

SEQ ID NO: 486997 - DNA, 405 bp, Homo sapiens
gattatggaaggccatgatcccactataagaatgacaactttgaatatttgttatttcttaatttttgcaacaactgtgaaaggcaaataactaaggaggccctgaatcctagytgttagaggaacaggcatccatcagctttgtgaccttgggaaatcctttcaccagctccatagagttgttaatagaagaattcttgagctgatacataaaaagcacttccttcgtgtagggctgagacttaataaacaataaatagcagcaatcatttgattatctgacaagcaagaaacataaattcctttccttatgtgacttgtccaagatcccacaattggaagaagttgagccagggctgaaatgcaggctcagctctgttttacattccaagtcccttcttcact

SEQ ID NO: 486998 - DNA, 487 bp, Homo sapiens
gtacctgtttgtgacaatggagtgaacacaggcttttctccccttcatgtacaatgtctaccagctcctacacgtttaccaatgcaaactccgtaacttcctgtaaaacctggcttaaaaatttccatcatcaaacctgcctgatstgtgctaccaaaatttatactgtatcatattctacatttatcaagcaactactagctgtaaggcctgaagatttaatgtcctaagctgtttgcaatctttttgtgcaaagcaaacataaaagatgatagcaaatagcagagaagggcatatgtgttcaaagtggggaagagggagagtggtgaagagaggatgggagtgggcgagactgataaaggctagaagacaccatgtaaaaattggatagaagatatttaacgaatgggagaggaatggcacggcaccttggagaccaggataatggcaggacccttaatggaaatgagcatctggagctgttttg

SEQ ID NO: 486999 - DNA, 487 bp, Homo sapiens
gtacctgtttgtgacaatggagtgaacacaggcttttctccccttcatgtacaatgtctaccagctcctacacgtttaccaatgcaaactccgtaacttcctgtaaaacctggcttaaaaatttccatcatcaaacctgcctgatctgtgctaccaaaatttatactgtatcatattctacatttatcaagcaactactagctgtaaggcctgaagatttaatgtcctaagctgtttgcaatctttttgtgcaaagcaaacataaaagatgatarcaaatagcagagaagggcatatgtgttcaaagtggggaagagggagagtggtgaagagaggatgggagtgggcgagactgataaaggctagaagacaccatgtaaaaattggatagaagatatttaacgaatgggagaggaatggcacggcaccttggagaccaggataatggcaggacccttaatggaaatgagcatctggagctgttttg

SEQ ID NO: 487000 - DNA, 442 bp, Homo sapiens
cttagtgaatgatcccataaacaatgctaatatgaacataagtttcagagaagattttccactttcaaaaatggccatttgatggctgggcactgtggctcacacctgtaatccccagaacttttggaggtcaaggcatttggatagcttgagcctgggagttcaagaccagcctgggcaacacgacaaaatcccgtctctactaaaaatacaaaaattagtcagacgcratggcacgcaattgtaatcccagctactcaggaggctgaggcaagagaatcgcttgaacctggaggcggagtttgcagtgagcggagattgccccacagcttgggcgacagagcaagattcagtctcaaaaaaaaggtcatttgttaaattttgcagtcttctggttttaagcgtttctgcatttcatgattctagtgtctaggttttcttc

SEQ ID NO: 487001 - DNA, 587 bp, Homo sapiens
gctgtcaaaaggattctagataaagcacagcctattgacaagagtaaggctgtccctcggcagtgccacgggctagcgtccccacacacgtactttgagaagcatgtgtttctcactgggcgtcaaatacatcctgttctcgtagtaatccacacacagattcacaatatctgccaggagctcttcgtagccagaaatcacttcgagctgctgctgcagagactgaaacacagagcaagagactcatgcatgggcccggcgcccggccggctgcttggcccatcaacctgagtgtgcaaacaccagccttacctgtgtgatcttgttatgattggccaggaacatggacagattctgcgattcctggatggactgtggatctgccattttacgtaaaaactgagcggccctttgaaaacaaaaagaattcatcccaaaatgcaccaacgtgccacattwaaaaaaaaaaaaaaaaaaaaaaaagcctggttcgagtgggatccctttcccctacagtcatctgcagaaatgtgggtcaatctcagaagccacctatgatttcagccttttcaggcgtctctggccct

SEQ ID NO: 487002 - DNA, 405 bp, Homo sapiens
tggtattactgatgccttccgtaaaaatgaratagaacttgcctatgatgacgacaagttctgtgatgtgaactgtgctttctcagtactgtctgaaactaacgaaagcatttgattttcatggggaggaaactggtgatgccagcccccagtgaccttgtgctctgctgcagctcacctctggatgatgaactccctggcgccatcccacaggtgcccgtgcacgatccactcgtccaccgtctgcaggtaaggccgcaccgtttccacccagagagagaaaaggagggagacctgaggcagagagtgtgcacggtcagctctcagggttccctggtcactaggataaaaggaggtttaaacatttctgaaatgcctttaaaaaagtgatcggatttctatgtt

SEQ ID NO: 487003 - DNA, 628 bp, Homo sapiens
ggcattaaacgaaattgcaaatatgtggcactattttcccaacttattccttctatgccaaaggcagtcatagctaatcaattactaaacattccactgaatccatctgcagggtcagacttcatctcaacacgatgctacaagaagccacttctgttctttggagtactttcaatgccaagaatgtacatgagattaaaacaaaagaaagctactgctctttttggcactagatattttctgaaayctctctcagttctgttatattctaatagatccatggtggactttttctatatttggacttagtttctagtctctgagggtgaccatgaggaggagaccatgcacagatccctgcaatgggtgggttctttcatgatgagcccaggcataatcaccatcctgtgagtgaccagtgtcttttatttttttcaggtctaatgccaatgactcagtcacataagccaacaagggtatccacattaaatgcatctgagcagagtgaaaatcagtcataattggggacagatgtggatgcaaagttctcatgtgtcttttttcttctcagtggactactgcaaaggaagtgttaactgattttggcactctcatctgctttccagaa

SEQ ID NO: 487004 - DNA, 616 bp, Homo sapiens
ttttccactccaagttcattacattcaaagtaaactgagtgagtgaatgactgrctaatcccaaacacccctcacccagaaagtcaatggccacatagcactgtcatctcataaaaagccttggacatctgaagctctattatatggagtctaaccatgaagtcaggaagactccaaaactactgaaattccctttgtttcttaaaacgagctcctggccaagctgtcttattttctttccatagtgggaccttaagttttgtgattcctttactttctcatttctattctacatttaagtaaataagaagaattatacatttctaaacagaacaaagggacttgatgagctcgacataatacatcaattcagaaatgccaatggggcatttcagaagatttcatgtgaggtgacagagaggttccccaatgctgaaaaacaatgcaactcctctgccttgagatttctgagcttgtttgcaataactgcctttgcccactcatgccatctcattcagggaaggctctgatgtctttccacaattgctctgctctgatgtggacttgaaaacactcctccacatggatgcactaaatcacccagcattaaatgaga

SEQ ID NO: 487005 - DNA, 540 bp, Homo sapiens
acaacttaaatagatggagtgatgacatgtttaattatttttttttacttagttygtcccttatttaaagatgaaaattccaataaccaaaacctggccagctctagatcattctgttgtgaacaatgtcctctaccatctattatagtaagtaagagaaccaaagagttttatacaatttcttgcagcaaggttaagttatacctgctaattttgaatgggaaccatctggaacttaccttccttccttacccaccctcacccccctgcattcctctataagaagtgaggcttcttaattgctttaaatgtattatgctttttttccagtaggtgttccgtatttctcagtttcccttccagtgagaactcaaatgggattaaaactgtctaagtaacataactattctgggggttagcaccaaagagagagttaaaagataaatccccatctcacctttatgcttcatttctaggctttctctaacacattttctttattagattgttacttcaaggattggaatcactttgacccta

SEQ ID NO: 487006 - DNA, 470 bp, Homo sapiens
tgaccctttccctgtgagttagaaaaatgctcagtcagggggatttgatagatagtcttaattgcatacaaacccactcttgtaagttaattgttaaaatcatttttttcctagaaatgtagttaaatttctttaattggaatcccagtaaattgatatctgtgatcattagacagacactagatatgcttttgtgtttcagaaaagcaaaggaactgctaagttaattaataatgtaaataaagttagaaagcaagtgcttagtcttcttaaaataacacaccctttttgcrtgctattaactactttcagcagaaccaccgtctattatttttgttatcatctatatataccttataaatttgaagtaataaatgatagttgtaaaaaacaaaccttctagatgagggggttttcttccccctaaatctaatcattttttgcctccaagttgtgcaaatgtgtaaggt

SEQ ID NO: 487007 - DNA, 642 bp, Homo sapiens
attggtatatatttattgatatggaaaataatacccatattattaagcagaaatattaagcagaaatctttacagtatgtatagaatggttttattttttaaagaaaagtgtacacacatattcccatcaaagtgtggaagatatataccaatatagtaatagtttctatatactaatagtgtttatttatgtaatatttattcagccaatgtttttcttcatgtaacaagaatcaatggaaaggaatacaatgacaactcttcattatycccacccagtttaaaaaaaaaaaaggtttagactttggccagtttttcactctgagattaccatccgctttcctgtaccatctgtgcagaggagtgtccacagttaaatgggaacttctacagcgggcttcacccttcatcccaaattgagtcctcccttcattctctgggagcttttcatgagaaagatccatttgcttgtcagtactcaaccaagacctcccatttgtctctcaggtttggagcagcggagggtgcacccagcggtgtcaactggcctttcgctgtcatgaaatattaccatttcacactcacaaataaaagttagcagcatttcattgctgcgtggtgtgaaattagacctcctcacca

SEQ ID NO: 487008 - DNA, 580 bp, Homo sapiens
gcaggctgtaaaatcccccaagtgccagcccaccagcccctgctgtccctccctggctctggaagcacaggttcaccctcccactcaccagcccctggcttcagttcctgccccttcctctctgagaaccagagtgaataatcttacggctttgagtagtacagagatggcgaagcagcatcagagatccggccctcctgaggttatttagagggcctgagaatgccagctccagtccatgtcagcaagaattgcaagtgggcgtcacggtagcaccagactttcagatcttcacagaggagttgaccagcccttggctgtcagagtcataaatccccttggatggctggtgtccccagtctccyatgactccaacatcctaaatgcccagactctcaagacagaaagagcacgagctggaggacgtgggattgtgcaaagagcaggggcagccgtcttcctggagcctggtactttagcataggctccccagctgtttgcttggtgattttgagggagttgtgtgctttcaccaggactcagttcctcttctatgggaaggtacttccccccacaggat

SEQ ID NO: 487009 - DNA, 580 bp, Homo sapiens
gcaggctgtaaaatcccccaagtgccagcccaccagcccctgctgtccctccctggctctggaagcacaggttcaccctcccactcaccagcccctggcttcagttcctgccccttcctctctgagaaccagagtgaataatcttacggctttgagtagtacagagatggcgaagcagcatcagagatccggccctcctgaggttatttagagggcctgagaatgccagctccagtccatgtcagcaagaattgcaagtgggcgtcacggtagcaccagactttcagatcttcacagaggagttgaccagcccttggctgtcagagtcataaatccccttggatggctggtgtccccagtctcccmtgactccaacatcctaaatgcccagactctcaagacagaaagagcacgagctggaggacgtgggattgtgcaaagagcaggggcagccgtcttcctggagcctggtactttagcataggctccccagctgtttgcttggtgattttgagggagttgtgtgctttcaccaggactcagttcctcttctatgggaaggtacttccccccacaggat

SEQ ID NO: 487010 - DNA, 635 bp, Homo sapiens
tgaatgataaatgacatgtaggtgagtccattatttagcaaactcagaggtcttcaggagcaacctccatcttaactcattccagaagacacaagcagcatcgcaaatgcctgtccctattaatagaaaattgaggtccaaagwcatagaacttgtccaaggttgtatgcactagaaaggcgtgaaacagaactccactgtgcgactcccagctgctcaggcaggctcttaagttatttttttaaacaaggagaggcaaaagtgactccccacagaatcttctggttaactcccttgcctgacccaaagcagcaacaatgttttggcaggagtagggaaagcagcccctagctggtcttcctgcctctggtcccttctcctcaaattcagtactgatcccatagtgctttttctaaaactcaagtctgctcatgtcactcctctggtcaaatctttaagctactcctcattgacttcaggatgaaatccaaaggcctagtaataaggccattcatctgcaggcacctgcctccctccccagctttgatccctgcccaccccaacacacactccatgctccacccgtaagaagttgcccacttgtccccagtagccatactctctctttctctttt

SEQ ID NO: 487011 - DNA, 635 bp, Homo sapiens
tgaatgataaatgacatgtaggtgagtccattatttagcaaactcagaggtcttcaggagcaacctccatcttaactcattccagaagacacaagcagcatcgcaaatgcctgtccctattaatagaaaattgaggtccaaagacatagaacttgtccaaggttgtatgcactagaaaggcgtgaaacagaactccactgtgcgactcccagctgctcaggcaggctcttaagttatttttttaaacaaggagaggcaaaagtgactccccacagaatcttctggttaactcccttgcctgacccaaagcagcaacaatgttttggmaggagtagggaaagcagcccctagctggtcttcctgcctctggtcccttctcctcaaattcagtactgatcccatagtgctttttctaaaactcaagtctgctcatgtcactcctctggtcaaatctttaagctactcctcattgacttcaggatgaaatccaaaggcctagtaataaggccattcatctgcaggcacctgcctccctccccagctttgatccctgcccaccccaacacacactccatgctccacccgtaagaagttgcccacttgtccccagtagccatactctctctttctctttt

SEQ ID NO: 487012 - DNA, 473 bp, Homo sapiens
agctgatcaggaaagtatcagatgccttcactagctgtcactaacacctgcctcctgaatcctgatggggaaaatggtgtcatcgggccctccacataaaatatttagtggcacttgcttccaaagaggcaagcgtggcctctccttggcatcaggaacgctccgagttcatgtgctgggagacctcttgttcaggcagaatcctggagcagcatacttggtttgagacttggagtaggagagagggaaactggtagaacagagactaggcaagttttggctcttgagaatgcatgtgacaagtgacttcatgcactaaacagagagggatgtgacagaaagaagaaagcatcattattaagagaaaactcctgaggttgacactagcagaaaattggggataggaggaagtcacactgggtatgcaaagtcaaatgcatgtttgyttaccagtgtctaccaaactgaggatg

SEQ ID NO: 487013 - DNA, 585 bp, Homo sapiens
tgtgtggcgaggaatcagtggccttgagggcaccgagrcattgtcatccagaatcccgaaacctctcaccttaggttattaaaataagttatcttattgccacccctctgattaccctgccagaaagattctctgaattggatatagaaagctcttctcccgtccccaatgcccccatgcaagtcgggacttaccagatgcccaggatccctatcagggctggaagtttgagattcaattcagagcaaggttcatcttctcattgcaataataataataacaacaacttcaagccttatttgacagcttgttggcctttttctttttttaatttacaagaagaggaaatttgctcccacaaattccaagactctagtctcaaccctaccagacaagccccgttcctccccactcacccctcactcaaattacagatgaagagggaggtgtgcaggatgtgtgcggtgacaggtgatgcgaatgggggggattccctgtccctactgccctcacccactcttcctgtgttctgagctcccccctaaccccaacgctagaccttctattcccccgggggccaagcca

SEQ ID NO: 487014 - DNA, 626 bp, Homo sapiens
attgtgcccacccagattaaggccgtgtctgcatttcccagcccactgattcaaatgttaatctcctttggcaacaccctcacagacacacccaggatcaatactttgtatccttgaatccagtcagattgacattcagtattaagcatcacacttaggcaaccccaaccctatctctatcaagtttcagaaaattactatcatcacctcccaaaaagttttctggtgcctctttccagtaaatcccagtsccatggccacagatccagcctttgctcaaatgattccacaataaatttgtgtttctagtagttagtagttagaaatcttttaatttgcccaggttttcatcacaaatcaaagtgttgtttgataaaatactgttaaatttcaataataggagcaatgttgtagtagtttatagtctaaagcatttcaaatgtcgtaaactatctgatttgatactcccctacccccaccaagcaaatttattttacagatgaagacctgattacagatgaacatctgaggctggtagaggtggaaaaacacatttgagtgcagtcagaacctaatcccagatttgaagattctgaagccaatgctcttttctgttatttcatata

SEQ ID NO: 487015 - DNA, 628 bp, Homo sapiens
  misc_feature (1)...(628): n = A,T,C or G
tagaaatcttttaatttgcccaggttttcatcacaaatcaaagtgttgtttgataaaatactgttaaatttcaataataggagcaatgttgtagtagtttatagtctaaagcatttcaaatgtcgtaaactatctgatttgatactcccctacccccaccaagcaaatttattttacagatgaagacctgattacagatgaacatctgaggctggtagaggtggaaaaacacatttgagtgcagtcagaacctaatcccagatttgaagattctgaagccaatgctcttttctgttatttcatatagtgtagtgttctaattttattttattatgaaatgagaatgcacagattggccataaaatatccaacantccataaagtttctttttttataaaaaaaataaaactacttatttttctccataatgtgccaaaaaagaaattttactcagtaaaaatgagacacatgacgtgagccagcacatcgcagacacatgtgcagktttgatggaaataccgtgtggatggacggtcttcacggtggttttgcacagcaccttgacctatgcattgctagtgaggcataacgcacaggacatgtcactaatgttatgaaacatgtcat

SEQ ID NO: 487016 - DNA, 498 bp, Homo sapiens
tgctccacagtgttcttaatccagaaaagaaactacgcagagtggccaccatctgaaacattgcctggcagaaggaaaaacagtgtgaaaaattgctcagttactcttaaaaataatccattcaaatgttacatataycattttaaattcaatttccactaaatcatttgcccacaattaacttcaaagggttgggaatacacagttatgtgaacaggaagaaacataaactatttgataaactaaactaaaaattaccaaagctcacatctatgtattatttcagggaaaaattacttcaggatttttccatatagaaataaatttgtaagggagaatctatgcgattcaaaaggacaatgaagaagaaaccaaaatgattataaattaagctgcgttgaaaattttgcagtaaagtttcattcaagattaagaaagaatccctaaagaaaaagcatatatataaaactaataattttctatgctttaataaagagg

SEQ ID NO: 487017 - DNA, 494 bp, Homo sapiens
gtgcccacccagattaagggkgggtctgcctttcccagccaatggactcaaacgttaatttccattggcaacaccctcacagacccacccaagatcaatactttgtatccttgtatccttcaatccaatccagttgacactcagtattaaccatcacaccaatatactgctaaatgtgtgagtgataaaagttggtccaaggagtgatactgggaatgcttgtcattaatgaagtaaaataattaggacaaatgatggccttaatcctcagatttttcaatggaagtttgaaattctcttctggcgtagtgaacctattatttaatttgcaactctgaaagctttgcaggagctgctctcttcaaccctgtgaatctttgtgttgcatttgtggtctgcactctgaggctttctctatcagcagtctgggtggttactgcaactcactactgtttgattacatggcaagaaacagcaattttatgtggagcctg

SEQ ID NO: 487018 - DNA, 461 bp, Homo sapiens
ttgaatttttttatgataaatgtctctcagtagtgtaccattggcagataattttgaaaatataatctattgctgcaatgcaaaggtcatgattcaaaaatgggtatgaaaataatgtttttgaaagaaatttctgttaattaggawcacttttgagatatgaatatttcccaacattttaggattttattggctaaaatttgtatgacttacaacagtactttaaaatatctattcttaaaaagtttaaaacttctaatctatttaaaatgtttcaaaatgaagatttacaacgggctttgaagcaatttgttacttatataaaatgtacatattttcaaaattgggtttagaagagcaacatcaaagaagatagaattttgagctctcaattttaacaaaagtctttatatacttgcacatacaaattgaaaaagtaatacatttatgctcagccaata

SEQ ID NO: 487019 - DNA, 583 bp, Homo sapiens
acccccacatccacttgcacagatgccactgataccaaaacacagcactatacttggtagctctaactcttccatcctgtcaccactgttrgatcatgaatagagctgcagtggatggtacgtgagtgacccccagcattaactttcttcatcctctttttgaaaagaggactctcctacattctggtgggacacaggaccacccagctagattacatatcccagactcctggacaggtaggtggggctatggggctaatttctgacaaacaggagatggatggaagtggtatgcaactttggagtcatagcttttaaaaagaagcagttatccatgctgcttcccacttttcacaggctggaatcgaactagaagttataaggcaggtcccaccacaatggcaaggctaacatcccgcaagatggtacagctatgaaataggaagaccccagtgaacaacctcatggaggagtcaaccaccagccccggactattaaatgagagcaccatgaactgagcagctgtatttgggggtctccccatcagcagtttagcctctgccatacacaattcctgaaatga

SEQ ID NO: 487020 - DNA, 583 bp, Homo sapiens
acccccacatccacttgcacagatgccactgataccaaaacacagcactatacttggtagctctaactcttccatcctgtcaccactgttagatcatgaatagagctgcagtggatggtacgtgagtgacccccagcattaactttcttcatcctctttttgaaaagaggactctcctacattctggtgggacacaggaccacccagctagattacatatcccagactcctggacaggtaggtggggctatggggctaatttctgacaaacaggagatggatggaagtggtatgcaactttggagtcatagcttttaaaaagaagcagttatccatgctgcttcccacttttcacaggctggaatcgaactagaagttataaggcaggtcccaccacaatggcaaggctaacatcccgcaagatggtacagctatgaaataggaagaccccagtgaacaacctcatggaggagtcaaccaccagcccsggactattaaatgagagcaccatgaactgagcagctgtatttgggggtctccccatcagcagtttagcctctgccatacacaattcctgaaatga

SEQ ID NO: 487021 - DNA, 564 bp, Homo sapiens
tgctagaacttctaagaaatattgctaagctgtcawtaggaattaaggtgaaaatctagcacaggtcctcgatcctttaaacacaattccaaaacccagaagactgaaaaccgaaagctacatttggcaagcaaccaaacaactgcgttcacttggtggcaagcctgatctgaattgacatgaggctctttgcagctttatcatcaaacttagcatgcctgttcacatgttttgctgaggtggtttgatgtgtctgctgttccaatcctctggcggtgctacagtatacgtggtaggtgctcagtacctttccatagctccactcccttttatgggatggactgtgtccttgaaaaagatatgttcaattcctaaccccacatacttgtgaatgtgaccttatttggaaataggttctttgcagatgtaatcaagctaagatgagatcattggagtgggccccaatccaatacgactgctgtccttataagaagggaaaatacagacagaaacatacaaggagaagatgaccacgtgacttcagaggcaggaactgaagtgctg

SEQ ID NO: 487022 - DNA, 656 bp, Homo sapiens
aacagctgtcacacacacacacactytcctttgtgtgtgccatgtgctcatggccccagtctggttcaggccttttattccttttcctttgggctactgccaaaacctcctactggatctccccaggtccactgtagatcatcctagcacaagtcctattacttcaatgtcctgctcaaaactcttcaatggctccctactacctgtggactaagtccaaactcactggcataacattcaagtccttccatgatccaatccctatgcaagcttcccacgccttcctcatactattttcacactactcagttgatgtgacagtccaaggtttgcaagcataaatgccttcagggttcatgcatgcagcaaacaaagaatggatgggtgtaagccagggagtggtagctattgtggttaaaggaaaagctcatgtccttttctgactcttgaaaagaaaatcccatcatgccaaccaaacacttttggtgaccatactggtccggggcttctagatcacaatacttgctagtcatgccagatcactcttacagaaaccatgccactcactctgcccacatgccccactcatgctgtgcctctgcctatagggtctgaatccctcccctcaatttaccaagactaggggatagcataaa

SEQ ID NO: 487023 - DNA, 618 bp, Homo sapiens
accaggtaattaagagatgcaccatatttctttgaaatttccagataaccaactcattttctgaagtttgagaatcaataatgtcctagttattataggaaaatgagatttcacatggactccatcatggaagctgctgtctttctcaagctcatttgctcctatacaactccactgccacggacaccaaggaagagtgtaaagtctctcagaagasagaggcctttaacagaagagattttaatccactgaagaaggtgacagtagtaatagctctgctctcagtcaggaggctcattgagacagatacacaacatccctccatggacacaggcagacagtagatcacagaaataagtgcaaataatacaatgttgaggaactatagaatagtacagtccttggagccagggaaggccaattaagaaagttttctggtggaagtgagctcaggtaggactgggtatctacaaagaaaatggacaaagttggacagggaggatggagaaacagtacctggagtaggagaggaggaaactggcctgtatacatgtttggaggcaagtatgaacaagcacatgcaatgagcatcatgtgtgagagacagaagaatgaact

SEQ ID NO: 487024 - DNA, 511 bp, Homo sapiens
ctatggtcatatgaaaccatgattgttctcttccctaagtttacaacttagaatcaaagcatttctattgcccatcaagtctaaactgtccattctggaagacctttctagcagctgactatggccaacctcatcttcctatgcttttttaaattwtttatttattttttatttttattttttatttgagacagagtctttctctgttgcccaggctggagtgcagcagtgcaatcttggctcactgcaacctccgcctcccgagttcaagtgattctcctgcctcagcctcctgagtaactgggattacaggcatgtgccactgtgcccagcccatcttcctattttttgacttcccactctggaactctctgcaccaacccggtaaacataattttcatcctccccacaagccttgttttcctattcttttgagcttttactcaggccatttgccttgctttaaggcttaagagttgcttgctttaaatgctgacagatttaggaaata

SEQ ID NO: 487025 - DNA, 521 bp, Homo sapiens
aagaatagatccaaaagggacccatctcacttctgtccacataccttggccagaactcagtcatgcaacccaaactagcttcaagggaaatgggtgatacaggcttacagatatcccatgtgcccagaaagagaaaatgtgcagkgtgatatatatatatatagtaatattaatggttgtagtaatgtaaaaaatacatttataaaatttgcattaacagacaaaataataagtcataaatctgatatatttgaatttagttctatctcttcagattttggacaaatatattttatttattggcacacatttccttttagttttaacaccaatttgtctctatttctaattattgtgcagaagaattaagaaagcatatctaaatatgcattataaactgtaataactataatgcagtagaaaaccatacaattggtgacagtcaatatataatatttatcaaatatatgtatgtacaagtatacacacacacacaaacacacattgtcttacagaaactc

SEQ ID NO: 487026 - DNA, 521 bp, Homo sapiens
aagaatagatccaaaagggacccatctcacttctgtccacataccttggccagaactcagtcatgcaacccaaactagcttcaagggaaatgggtgatacaggcttacagatatcccatgtgcccagaaagagaaaatgtgcagggtgatatatatatatatagtaatattaatggttgtagtaatgtaaaaaatacatttataaaatttgcattaacagacaaaataataagtcataaatctgatatatttgaatttagttctatctcttcagattttggacaaatatattttatttattggcacacatttccttttagttttaacaccartttgtctctatttctaattattgtgcagaagaattaagaaagcatatctaaatatgcattataaactgtaataactataatgcagtagaaaaccatacaattggtgacagtcaatatataatatttatcaaatatatgtatgtacaagtatacacacacacacaaacacacattgtcttacagaaactc

SEQ ID NO: 487027 - DNA, 594 bp, Homo sapiens
ttcattttagttttaaaggcagaaatgacagtgctctgtgaataaaaatcaaaagtaaattccacaatcaggaggcctacttgctgcattcccctgtttcatagaacttgagatgatacattgggtaaaytaatagcctgctgattccaacctcagtgagtgacaggggacccagggtgacaaaagatctaaaaatatatctggctttggccattaaaagccttatcagcaagtaacaaaaatcaacagagctttaggattgccaatgcagggatttaaaaaggttcctagcaaggaaatattactaaccatcctgataatctgttgacatacaatgccagccgcctctgtcaccactttctggctgagagctttaggtgatgaagggcagggtgggtggaggtggggcatcagcattaatgctgacagtcccatgggtgtgctgaggcacatggtgaggggacgtaggctttacggttgtctcaaagtttagctgtagctctgaggtcagcaggtgattagattagtgtctttccagaaaagggctgtatatatttccatattctttataacatctcactagctagtctttga

SEQ ID NO: 487028 - DNA, 548 bp, Homo sapiens
tcctcaaaaaattaaaaatagaactagcatatgatccagtagtcctactactgtgtatgtattcaaagtaagtgaaatcagtatgtcaaaaagatatctgcactcccatgttcactacatcatttttcaaaatacccaagatatggaatcgaccttagtgttcatcaatggaaacagaattttatttaagagactttaacatctctggtcttattggaaaatcatccccattggagttactaagttgtcttagtctccagtaaatattttactaatatgactttctcttattaaattactcaatcataataagatcttctaaaaaatgtttcatattatattacagattgcttacttacagggagaaaatatgctaatttcatgcaaacatatgtgtttcagtttctgggaattaatttgttattttaaactaaaatattttggtattggtccagagaaaatgccatatccttaccaaaccatttcatttcatatatctggaaatgtcrtgtagttgtagaggtagcaaaatgaaatgttttagtgac

SEQ ID NO: 487029 - DNA, 419 bp, Homo sapiens
aattcagggcaaagaaaatcaatctggtgggtttcactttgcccactggtgtggcagtattcatttaaaactaattgtggccaagaattggtttctcttcttcaatatagacagktaattgtagcacatctatgcagcactacattcactcttctaaacctcacaaagttgcaaagttctaaaattataaaacatattcatgactattgacttcagattattcataacctaagtaaaaatgtgaaaatacttctattagcatcttttaatttcatataatgttggtagaaacacatgaggcttattcatttttgatcattattaccatgatgttaaatatgattttgtttaattatgctaagcacattcatatgcacaaccatacttttctattattctatgttgtaatggtagctgtt

SEQ ID NO: 487030 - DNA, 419 bp, Homo sapiens
aattcagggcaaagaaaatcaatctggtgggtttcactttgcccactggtgtggcagtattcatttaaaactaattgtggccaagaattggtttctcttcttcaatatagacaggtaattgtagcacatctatgcagcactacattcactcttctaaacctcacaaagttgcaaagttctaaaattataaaacatattcatgactattgacttcagattattcataacctaagtaaaaatgtgaaaatacttctattagcatcttttaatttcatataatgttggtakaaacacatgaggcttattcatttttgatcattattaccatgatgttaaatatgattttgtttaattatgctaagcacattcatatgcacaaccatacttttctattattctatgttgtaatggtagctgtt

SEQ ID NO: 487031 - DNA, 381 bp, Homo sapiens
tgaggagcgtttttctctgggtaggggaaagcaagatgagaggaagacaggagtctcccctctacataacttttttttctttttgagacagagttttgttcttgtygtccaggctggactatagtggcgtgatctcggctcactgcaacttctgcctcctgggttcaagcgattctcctggctcagcctcccaagtaccaggggttacagacgcctgccaccatgcccagataatttttgtatttttagtagagacagggtttcaccatcttggccaggctggtctcgaactcctgacctcaggtgatccacctgcctctgcctcccatcgtgctgggattacaggtgtgagccaccacacctggacaacaatttttatag

SEQ ID NO: 487032 - DNA, 531 bp, Homo sapiens
tgtggcttgaatactgtagtatgtcaaaaaggtactgcattagggtgctgtcagctacctgtacttcttgcagcaagttctttcttgaaggaaaagccaagcagctccactcatggctgccacagcaagcatgatacaacatatgaacttgtaaagagtagaactgtgtttaataaaatgagtgtatacatttaaagcagtttttttttctgtgcttctatcaatgtacatgctatggcccatttatagatgagcatgtctttccatgaataaatattgccttagaccattcctgctgctataacaaaataccacagactgggtattataagcagcagaaatttattcctcactattctggaggctggaaagcccatgatcatggtgtcagcagatttggtgtctggtgagagcctgttctatggatggcgttttctcccagyatcctgacatggtgggaaaggtgggagagcagaacgggacaaaggttatgtctttgcatggcagaagagatggaagggccaggcaggt

SEQ ID NO: 487033 - DNA, 501 bp, Homo sapiens
tctggatcattacaaatattgcaagagcttcatatatttcaaaayggatgttgatctcaattttcatgtaaaaaccttttttttcaaatgttggtaagtactttattaaagcaagcaaacaaaaaaacaaggtgtgagcaaacaaaacaattttgctgcccaaacacagcaaatgcagggcacagattattgctttctgacctgctcaccaaagaggattctctctcccagtagtcatctaggagttactagaatctcttctagaagagaataaggaggcactagcctaaggtggataaggcaaaaagaggtgaggtagattttgaaagccttacaattttactaattgcagccctatttaagcagaacaagtagaagctgtgtagagacgcttgtcaagcctagccacatacaaagctttgcttcccacagttttaacactaccaacttcattataaaggagattaattcccagagttttcactaatcaaggtaacacac

SEQ ID NO: 487034 - DNA, 501 bp, Homo sapiens
tctggatcattacaaatattgcaagagcttcatatatttcaaaacggatgttgatctcaattttcaygtaaaaaccttttttttcaaatgttggtaagtactttattaaagcaagcaaacaaaaaaacaaggtgtgagcaaacaaaacaattttgctgcccaaacacagcaaatgcagggcacagattattgctttctgacctgctcaccaaagaggattctctctcccagtagtcatctaggagttactagaatctcttctagaagagaataaggaggcactagcctaaggtggataaggcaaaaagaggtgaggtagattttgaaagccttacaattttactaattgcagccctatttaagcagaacaagtagaagctgtgtagagacgcttgtcaagcctagccacatacaaagctttgcttcccacagttttaacactaccaacttcattataaaggagattaattcccagagttttcactaatcaaggtaacacac

SEQ ID NO: 487035 - DNA, 626 bp, Homo sapiens
caaagacagccaggcctgtgtccttccctttagggtggtgaggtcccccaggtcctggatgaatccagaagtgccatctgagagtcaaggaccagagtcaaaaaccttagaagtctacccgatattctattatattgttgctgagctggcactcaaaccacaagatgcagtcctactcactcttctcacccctttccaaaggccaaagagcctcactccatagccatcaccacctctgaaaatgaggagtactgcctgactaccaccaatgttccttcccttaaggccagtggtkggggagggatggcataggcaattcaggactgttttttcctatctcttcaatgcctttttcagcaatataaagttaaaaccaggtactgtgagtactcacctattttttattcttatgaagtgttgttttctgtgtagatagttgttaacttggtttccttatgggagggtgcagagtaatcagtgaacatttctatttctccctcttgctctctacgggatattttaaaaagctttgtgtggcaacacattccacctgacagaagatccctcagagaagggttaaatcataatttttttaacaaaatgataaaatgattcatatgcacacc

SEQ ID NO: 487036 - DNA, 509 bp, Homo sapiens
ctgcctacagtatttagtacagtaacatgctgtataggtttacaggctaggtaatrggctacatcacaaagcctaggtgtatagtgggctatactctagttgtgtaaatccaatctgtgatgttcacaaacaaaaaaaatgcccaatgagacatttcttataacatagttccatcattaagcaatgcatgactgtaatttcctaactataaaattccaaaaataattttactaaaggaataaaagaaatataaacttataatataacaaagaactagaaagagaccattcatggaaaatgtatttcaaaaaaattctgaaagatagaatgtacatgtgtgcatttgtgtgtgtatatatatttatatctacctatagattaaaaaactcagttcagaatattgttcttatcttctttaatggtatccaggtagtaagagataaagtaatttactaaatgtgagtgggtaagtagggtcctggtcagatgttttaagaaagtggatatag

SEQ ID NO: 487037 - DNA, 665 bp, Homo sapiens
aagtaattaaaaatattaaacataacttagaaaattactgttacctttccacaaaaagccttctaaatgatttgagattttttttgtaagttaatgttaatagaaccacaaagaaatataaactcatgattcacaagaatagtgcctgcctagaaaaaagaagagagatggcactctgaagtgaactgattttattatatgtggtactttcattaggcatttctgtagcagctctcaagcagcacaattaaagaaaatcgtaccttaatttttttaaaaaaggagtatattttctggcaggcattcaatttaagtcaacagggacaaaaactaaatgcttaaagattttttattattataacaacttatgatcatttctaccttgaaaattgatgtaacatttatgttccgtacatgtttttctatgcaaataaaatgattttgaattctttatttttcataaataggcgaaaaaagttgcataaaatgtgctttacctaatgtcatctgaatttgaaatcaaatacatttaaattaattaattagatccagtgtctttcactcttgtcatccacarttcaaattaatattttgttggtggcactcctgagacacaggctgggagatcagggtttgcttccatgcaggttatagcaaccctctca

SEQ ID NO: 487038 - DNA, 681 bp, Homo sapiens
cctaaaaattcacatctctttagaatgttaactgtaattcacactgcaaatgcattccaatgctaactgccttggatgagaacttaacatgatgaacgcttctctgttaaattttcttttgaaaagttgccatcaccaatgaaagagtttcaaatacagcggcaggaacataactaatcagaggcttactctgtctgtgcatttgcttcctgggtgtttggaatttagtgttccaagtgggaactggattttgtttttgttgcttttaataacaattttatagggaacaagtaagtgtaggcytagggcaagctgatattttaagagaaagggaaaaaaaaccagccattcaatgccaaaactatgaatcaaataacaatgactggcagtcacatttttggcaagaatttcttgagcactcccagtatgtcagacactgtgtttgatattgagaatatagagggataaagacacagcctatgccctcaaggaactcacaactgagtgcaagagatggacaggatctttatttgtccttggtcagctacctttctcattctcattagcaaccatttcaaatctttactggcccaacttcctctagttctttttatccaagtcacatcttcccacctcttagcagataagcttacctaatgcttaaccaaaaaaaatgagtga

SEQ ID NO: 487039 - DNA, 621 bp, Homo sapiens
cagatggttaagggatacaaaaaaactagaatgaaagaataagacctagtatttgatagcacaacagggtgaccatagtcaataataattgaagtatacatttttaaataaagagtataattggatcatttgtaacacaaaagataagtgcttgaggggatggatactccgttctccatgatgtgattgttatgcattgcatgcctgtaacaaaacatctcttgtactgcataaatacatacacctactgtgtacccacaaaacctaaaaataaaaaattatattaaaagacaaatatggcatgttctcactaatgtgtgggagctagaaaaagttgttctcatggaggttgagtgtctaatggtaattaccagaggctgggaaggggcggaagacagagataaacagaggtcggttagtggataaaaaatccattcagacagaataagtcctagtgttccatagtaggttttgatgagagctgttttaaactgacatattttaaattaaacctccctaatttccaaaaccaggcataactgccttccatgtttccctcacaccttycagaggctaatgagaatcacagtgctgcagggttctcctgggctctgggcagca

SEQ ID NO: 487040 - DNA, 615 bp, Homo sapiens
gatatttacagcactctccataggaataattctgtgtatccccatagactaaactccttccactgctaaatccaacacccatgcagcttcatactccaggaatgctaaactttgaatttcccaaatattttatgctgtccactacccccattcacttttcccactatttctcttcacttaggctgcctgatttatgctagactttctagtaagtacctacgaaacttttaatcatcagtttamatgcttggctttctgtgaaaaatttctgaccttcccctgactgatttgagtttattttccttctcagttcttacttcactctataaacagtgggacggatgccttgctgcatttggattatttgctgttatgtgtattttcccaataggcttaaatatagttaaggaaaggcagagtgccagtagttttatctgttcatccttgggcctgagaagtgcatgggatggagttttttactaggaaacttactcaatggtttctttagctaatgtagggtctgagaaaatgataccacataatgaagtcctcagaagcaactctctctgaccttcccctgacctcctgtctctggcccctcattctcccctgagg

SEQ ID NO: 487041 - DNA, 652 bp, Homo sapiens
gtgattgttagaggtcacttagactcttggattattccatgctatttcaacagtattctaaataaacaaataaatgaatgaagcaaacttcctataccagatttcagagatgatgctaacatcctatataaagcctcttcccctcatcgaatctaagatgtcaatagtgccatggatgacaaaccctttcttaaatctataataaaaatcaaaaagaagattttaaaacatcaatatatcgatgcagtaaggagtaactctgacataagaaatgtgtggaggcaaactttataaatgcaaacaaatctacattattctcctgtctattatctatagatttgtgtttataaaaagttgttttcaaatgtagccttgtgactcactttccaaagcaaaaacctaggagtgactaatttggcaaagaatttatttcactaggtgttaatgtttctccctgttttaaaaaaattgggaacctgaaataaagayactaattcggtgtattaaaatgataaaaaataggggaataattttaaattgggacaatgttaatacacaaaggtgaacacttactagaattgggctgaatattttacttaagtttcctcttaggaaatttaaagaggaactcttggtaagatgcaagactttc

SEQ ID NO: 487042 - DNA, 529 bp, Homo sapiens
atgttctccctccctctgctccaatatttattcccgctgttaaggtttttctgccaatctttctaaaaaattttgtgcttaatgcaagcacagacacacatacttaccctttacaaacaatatctccaatattgttcttccacatcaagaacatagagagcttcctcatcattaatggttgcatgttattccactctatgcrtatacttttgtttaccagtcctctattgatgtgttcaaatagagactccaaaagggaagatatctttttttcattttattccaagatgcatcccaagcacctaaagcactgcctggcacatatggacatataataagtgtttgttgaatgaataagtgatgggcatttgggtcatttccagcttttcattttttccaacaatgcttaaaacaatatttttgcaaaggaacagctttgcttgtcctaatgtgtttgtttccaacaaagacggatgcttaaacatatcatagctgtttctataatgtgctaggaaaaaacaagttcaag

SEQ ID NO: 487043 - DNA, 585 bp, Homo sapiens
ctgttatccaaaggcagacaggctctgtgaagctggatattaatgctgctgccrgtagtccagcctgcactgcttttcttctggaaaatggagatatttcctgacatgttctgctgctcacacatctgcgtgagcttcaaacagaagctcctactaccaggcattagtggggcccagaaaactccatataaatccctgcagtgaaaaggggaataatctgagatccaaataatgaccaccttgtccaaacatctggagagggcctggtctggtgatggagattaaagaaaggcaaaacaggatcatgaccaggttttagtcctgggccttgtgtgcgagggaagttcccaatgtggaggcttccttggggctgtggggtcttccaaagtgtctagaatgtttcagaagagacacaaatggtggagataagactttcccagtggaaaggaagattcagtgaaacacacccaggagagctatttcctacgcaaaaatcatcccagaaaattccaggttaaaatttgtgacagatgtggtcataaaattatactgtaaagattgaaggaggcaactttaaaacttttt

SEQ ID NO: 487044 - DNA, 480 bp, Homo sapiens
  misc_feature (1)...(480): n = A,T,C or G
nnnaatgccagcttatggtacttgttccctgacattcccaaccaaatgtgattttgtccccttccaattcccatacaacattgtctatgaccttcccttgaagcacacattctgcctctatttagtaaggctaggtgcctactcacagatgcccccagcacacctccctacctcattccacagaatggtgagtataccctctaattcctcatagtgctaagcacaggtttccgacacaaaacgtggcaatacacaccaactggggtttttccctttattctcattcctgttgatgcttgctttcttcttttctcgtaacttcctcagtatgcttaactacttttcacaaatctgctcattctaaaaagctttatgaatgaaaatagtcaggccagtgcacgtatcattatcttcaagccaggatcttctcacatgattggttaagaacatttttctckaaaatatggtacatgtaccatg

SEQ ID NO: 487045 - DNA, 610 bp, Homo sapiens
tacttttggaccttcatctgaatttgttttgcattacttgctgaataattacagaataccaaagggatctacaataatgaatgcaaataaataatgtgtcatagatctctcacagaagaggcaatcttcccctagtccaaggaatgggaatagggacaatctattaggtgggatgtcatcattaatagcagccacaaggagtcctcctaaggataatatgtgaaaaatgagtaagtagcatacaagaggtcactcaatagtcaaagcttgaaagaatacctacccaaacaatctagagatgtaagagtagccacaataaaatttaggatgaaatcaggaaagccatgtatccacacagagaaaagcaatgagaagtttacaagtcggaatcctagacaaagatctaaaaatgctgagttcgtgctttcaaaaaacagtccagtccaagtgtccacatgtagtgtgtgctgatggagctagctcttccrcaacctggctcactactgggagcccaggaatccctgggacaagcagataagccaggactgaagttttaaagtatcaactactgcaaatcaaagtaggcagcctcatgaatagacttcatgat

SEQ ID NO: 487046 - DNA, 517 bp, Homo sapiens
aaataattcatttcagaaatatttatattccaaatatttgagaagctctgattcyagaatagttctaaagtgagatcctactaaaaggaagggcactgagtaggtaggactgatagtacatggctttaccagaggtttctaaacactgtaccctttggggaaatgccaggaccattcattcataggcctttatccttcagaagtaccataataagactataaaataaacattgtattttgcccttattaattgttgtctaaacacatattcttttctataattcaagacaacacaggatacttaataggtatctatactaacaaacgttcatgaacaaagcttgaaaatactgaaaggtcagtagatatctttataaaaaacaatccaagacaagttgaatggcaagtccactataaatgactttgttataaatataaaaaaaaggagaagatgtatgtaataaaaaataatagctgaaatcatgttttgtgctcatcattattaaaactatttcag

SEQ ID NO: 487047 - DNA, 556 bp, Homo sapiens
aatatttatattccaaatatttgagaagctctgattccagaatagttctaaagtgagatcctactaaaaggaagggcactgagtaggtaggactgatagtacatggctttaccagaggtttctaaacactgtaccctttggggaaatgccaggaccattcattcataggcctttatccttcagaagtaccataataagaytataaaataaacattgtattttgcccttattaattgttgtctaaacacatattcttttctataattcaagacaacacaggatacttaataggtatctatactaacaaacgttcatgaacaaagcttgaaaatactgaaaggtcagtagatatctttataaaaaacaatccaagacaagttgaatggcaagtccactataaatgactttgttataaatataaaaaaaaggagaagatgtatgtaataaaaaataatagctgaaatcatgttttgtgctcatcattattaaaactatttcagaaagtttcagatattttaattaaaaacaattgtacaaggatgaaagtttatgctgt

SEQ ID NO: 487048 - DNA, 305 bp, Homo sapiens
acaaaccgatattgtgtatctccttgtggaatataatgtcaagtataatatgtcacataaatggcattcctgtcaaaagatttaatctgaagttcattattagaagtcaatcaaatccagactgtgggacttttacaagatacctggacaagattttttaaaaatgtcaatgtcatcaatgtattagattatacwtatatatatatatatatatatatatatatatataacatatatgttacacatatatgatgtatttagagaatataaagaaagttttctcaaatatataagctatatttggg

SEQ ID NO: 487049 - DNA, 540 bp, Homo sapiens
ggcttattttgcatatctcatctctaccttgtcatattggtggattaaaatgggccacggtgggggtgttcgcactgctatctacaatggacaaattatatgaggaaattactagcttcatgattttttttttttttgagacagagtctcactctgttgctcaggctggagtgcagtggtgtgatctcagctcactgcaacctccacctcctgggttcaagtgattctcctgccttagcctcccaactagccaggattacaggtgcacgccaccacacccggctaatttttatttatttatttttgtrtttttagtagagatggggtctctccatgttagccaagctagtcttgaattcctgacaggtgattagccagcctcggcctcccaaagtgctgggattacaggtgtgagccataggacccggtctggccctaggattttaaccttttagcttaacgtggttgtagaacaatggagagtttttttttcttcttttaatttcctggaatgtaactcatcacttcttttagagatac

SEQ ID NO: 487050 - DNA, 417 bp, Homo sapiens
tggatgtaactatgactattagtagaattatctgattataaaatctgtagtcttacatttctaatatatcacattgtttcctcaagtctcacagtgttctacagtcaagctgtgtatctccatgttattcttattaagtgtgaaatctgtagccttcaaggttgtgatggcagrgtaagaggcacttcccaataattttcacaagtcaaaatatatctgatactaaagcctgactaaaacattgtgagacaaaaacttaaaccaatttccctcagaaatacagcatcaaaaaaaaaaaaaaaagtccttggcaaagtactggcaagtacaatccagcaaaacaaataaataaaaatatacaatgaccattggagtttagcccaagaaatcaagattgctttaacattaaaaactcag

SEQ ID NO: 487051 - DNA, 308 bp, Homo sapiens
tgcttctgtgtttcttcctcaatactgaggcacttaaataaagtatttgccaactrggaacacacataaaaagacttgtgcatttgatttttagtcagtatacattatgtacacttctcctcccccgcccttagacagtttaaggccatatttcaaagattatttgtgaatttgctaaatggatcagtgtgtttcatctgtaagagtaattctcaacactgaataaatattacaattatctggagagtattgaaaattaattatgtttagatctgaccccataaatgtattcttagttagtctagggt

SEQ ID NO: 487052 - DNA, 637 bp, Homo sapiens
aggcaacagtataatgtaatcatagttttatatgtactgggaaactaaaaaattggtgacttgctttattgtgatattcgctttattgcactggtctggaactaaacctgcaatatctctgarttatgtctgtatacaaaaatcaataatgtttatccataacatagataaacagttagaaaatgtaatagaaggccaggtgcagtggctaatgtctgtaatcccagcactttgggaggccgaggcgggtggatcgcttgagctcaggagtttgagacgatcctgggcaacatggtgaaaccccgcctctaccaaaaatacaaaaattagccaggtgtggtggtgcacacctgtagtcccagctacttgggaggctgaggcaggagaattgtttgagcctggcaggcggaggttgcagtgagccgagatcgtgccactgcactccagcctggtgacagagcgagactttgtctcaaaaaagaaagaaaatggtgacatgcttgtgaaagtaaagagtattttgaataaatggaaagaaatatattcttggataagaagatacaacagcaaagagatgttaattctcctaaagttaatctataaatttaatgccatattgattaaaaaaaatcatcat

SEQ ID NO: 487053 - DNA, 647 bp, Homo sapiens
tgagtgattatagcatatggataaatgcaatgaatgatagcaatgtcataagaaatggaacaaggaaacagagaatactcatttataaggtacctgtgatactgtgaaatatttggtcttgacctctttttttggcaaacaattcctaaaatccttggaatccccaaagtccttttgctaatgatgctaatgttaactgacagcttcaggatggggttgctcactggaaagacagaggcaggattagagggttgggactttcagcccaatcccccaaccccagggagtggagagggyctgaaggctaagttgatcaccaatagccagtggtttaatcaatcatgcctacacaatgaagcctcgataaaaacccaagaggaccgggttcagagagcttcctgatagctgaacacacggaggttcctggagggtggcgtcctgaagtgggcatggaacccaagtacaccttcctcctatcttaccctatacatctcctcatcggtgtcctttctaatatcctttataacaaaccagtaaatgttaagtgtttccctgagttctgtgagctgctccagcaaattaatcaaacccaaagagaaggctgtgggaaccccaaatgaaagctgattggtcagaagtcctagagg

SEQ ID NO: 487054 - DNA, 580 bp, Homo sapiens
agattagatgttttcgaaagtttggaacaaatctacatgtgaaaggctgtgggcctggtgttttttgtgggtagatttttactgatatttttctcaagattatgttcaggttttctcttcttttgaaattggttttggtcacttgtattttctagaagatgttttcatatattttctgatataattagtagaaagcatttcttagtattgtcctttgatttaaaaataattcttttacatcttttttagagaaaaaactctcaaacttcgtttttcctctgctctcacaccacaacaatcatcaacacagaagaagacttctgtgatcaaatgtgtagggggtttcccctacggaggaagcagcagataccagctgggtgtcctccaattcagttccaacactatctacctggagatagtgtcagatcccacaggatgagggcttagtccccaagactgcccacyctcaggacactagtcacaagtccaggcctctggaacttttgaccaatggtcttcaagttggggttctgatgatgtcctctttgggttcaaataatttgcaaaagcagtccacaca

SEQ ID NO: 487055 - DNA, 591 bp, Homo sapiens
tttaataaataagctttcagtatctattggaagacatgaagcatttgagtgggtttctttatttaaaaaattattctactggagctggtgagaaataatgaagctgtacagttctccagaaattaaaacaatgtcagagtcaatgggagaatttaatttacctttaagatttcattttaatggtggcaaaattatacattcttagaagatgtaaatttggaactgttaggagattgctcygtggttttgatcttttcaaaccattttctttttgaaaaaaggcattagttgtagtcatggacattaaatgggccatatatgcttatcaatcaaaaaagtgttccttttttggaactgcccattttctggatcttccctctcaatggataggggatgaaaaccttggttgccttttatttgtttcctcttctaaaatttctcacctgaatgtagtcctgggagagtcccgatcacgtctctcctgacatgttcactgaaatcggagacaagaagttacatggatgatgggatcttatagggtcacacaaagacaatttggcagcttatcttaatttcctgcagtgagacaac

SEQ ID NO: 487056 - DNA, 422 bp, Homo sapiens
tatgctcaacaattcctggcataagtgaacgatcctcagggttgtttctggcaraggtatttgtttttgtttgtttcctgggctgaaagtggcaaagattaaatccattttaatccctgctgtatcttcagcatggtcctgacattgagtacttttaaagaaatacataaataaatgaaggcaattcgggtaatttttccaagatgtatcagtctaaataaaaagataattcaatattctatatcatatcaaattataaataatgcatatatttgagattatggcttttcagttttctgccatcaccaataagttttgaaatatatgcgatcaatgatcagttttaaacagaggcaaaagtacctgtttatgtcatagataatggaaaacagaacatttctccagcatatagcttagacact

SEQ ID NO: 487057 - DNA, 517 bp, Homo sapiens
tctctatattttattattattattattattgttattattattgaggcaaggtcttgctctgttgcccaggctacagtgaagtggcacgatcacagttcactgcagccttgaactccttggctcaagtgatcctcctacctcagtatcccgagcagttgggacttcaggtgcacatcaccatgtctggctaatttttttaatttttgtagaaatgagagtcttactatgttgcccaggttgatctcaaatccccgggctcaagtgatccycctggcttggcttcccaaagtgctagcgttacaggcatgaaccaccatgcccagcctatttaatttttaacaggaagatgaattaactttggctacattataggaaaacctcatctcttcaagtccccatgtaggtgaacatttaggtttccggcagtccatttgatcgggagagattttgcaataagcaagatattgagagaaccaagaaagagaggttgggtaagattccttttttgtggaagcag

SEQ ID NO: 487058 - DNA, 566 bp, Homo sapiens
tcaaattggttacatatatttaactatttaggccaatattttttattcatgtaaatcagaaacccaatacctttcctggggaaaagagtgaatgatcagcctttctgatctttctttaaagaagacatatactctttatattaatatgctttaaacctaaaatttttatattttcatatataacaggaaaattggcagagggggcacatactcatatcatgagacttacagtttccaaattctgacttagaattacttgacattccttcccctgtcttctccctttcattttctctctttctgtcccagcattggcaggacagtcttttctgggatccacaaggttttatcycagggagtggcagacgtagaactggcaagaattgactaactgggacgactttattaaaattccctagtacaaattgagagatcagggacaatataacaacaaaggaagggatgttccgtaatgttggacggcaaaaattgccagaggtccggttgtcctgacattaagaatctcaaagtaaagttaattgtcctttacttctcctcaaagtgtc

SEQ ID NO: 487059 - DNA, 639 bp, Homo sapiens
tccccatgtaggtgaacatttaggtttccggcagtccatttgatcgggagagattttgcaataagcaagatattgagagaaccaagaaagagaggttgggtaagattccttttttgtggaagcagctggattctaactggagccagctgttcatcagctggaataaatgcactaattgaacaccagcgatgccaggtcaaagtcactttgcctggcccagattctagctttaagctgcagcctggaggaatcaccacatcaggctctctgttcagcatggcctcccacacctcctgggcttcacagaagcattaatggaagggctgctctggtccctacctgatccaatcttgtcttttacctttctaattatgagagctccattatcaagttacaggtgatttttggcaagtcatgtgtcatattggtcctttcttctatctggccttatctatgcttctctgccagaaatttctttggatacttggcatgtatgtatacattttctataactttttctaaacttatacattttctaaactttttctagtttccagtgctattcttttacctgcattatggccacttgcttatttgaagattaattrgcttatgggcaacttaagaacatattctccc

SEQ ID NO: 487060 - DNA, 630 bp, Homo sapiens
cgcattctttcatcatggcccaaattcatgacttgtccattaaattcacacacacacacacacacacacacacattggatctgtgcaaataaaaatgcattcttaagagaagtaacatttgaaatgtagaatacataacactttaagactatgttctattacatattatttttggaaatggcaaatagyatgggaattgattatcttaggcatatgaccctcacatgctcttctaaatcttcaaatttatttgaaaaggtgtctggtacctgttacaaacaccaagacccatcagctatctagttgtgttttcttaagacaaaaacaatttagctggcagaaataagaaaattgcctccgaagtaaattcaccaaatttacacttacaaccaaatgatttttgacaaaggtgctaagaatatacactgagaaaatgagaccctcttcaataaatggtccttggaaaaatggacatccacatgcagaagaataaagctagatgcctatctctcctcaaacacaaaattcaactcaaaatggattaaagactgaaacatgaaactataaaattactgaaaggaaacgggaaatgctcaggacactggtttaggcaaagattttatggctaac

SEQ ID NO: 487061 - DNA, 630 bp, Homo sapiens
cgcattctttcatcatggcccaaattcatgacttgtccattaaattcacacacacacacacacacacacacacattggatctgtgcaaataaaaatgcattcttaagagaagtaacatttgaaatgtagaatacataacactttaagactatgttctattacatattatttttggaaatggcaaatagtatgggaattgattatcttaggcatatgaccctcacatgctcttctaaatcttcaaatttatttgaaaaggtgtctggtacctgttacaaacaccaagacccatcagctatctagttgtgttttcttaagacaaaaacaatttagctggcagaaataagaaaattgcctccgaagtaaattcaccaaatttacacttacaaccaaatgatttttgacaaaggtgctaagaatatacactgagaaaatgagaccctcttcaataaatggtccttggaaaaatggacatccacatgcagaagaataaagctagatgcctatctctcctcaaacacaaaattcaactcaaaatggattraagactgaaacatgaaactataaaattactgaaaggaaacgggaaatgctcaggacactggtttaggcaaagattttatggctaac

SEQ ID NO: 487062 - DNA, 612 bp, Homo sapiens
ctggttctgcaactctgtcgtcatgagctagatttaatgtgctcagctatgcgtgggggtgggggtggggacagcaggacaaggaattgagtctgactagatcaggactccagcaattcaaattggggaagtctataagactttycctgtcaggaaagcctcttaactactcctggtgtcggttctctcaggcttttatgtccaagaacgtgatgcctttatgtccaagaacgtgatgaaaagacaggtttcctcatggtttcacatgggaccgaacaagactcagaagttacagggtatgaaatgctatgtggagagttgataaataccacactcaccagaaaatataaatccacagattgccgaatcccaacatattttaacaaatagaaaaatgaaaggaaaatagcacagaccccggttagattgcatatagctggtaaaattctccaattattaaaatagaaacatttcattaagtaacttgaataaatcagaataatctaagtaaaagaatattctccaatgcataacccagctcccccaatctgctactaccacaagcatgaataaaagcattaggtcagtaccagaaccaagcaaaagtctaag

SEQ ID NO: 487063 - DNA, 594 bp, Homo sapiens
ccaccaccttcgagatacaagcatttgtgggaagggctccttgagggacatcatcaggggctttagagatgcctcaagtggtggatgcactcacgagaataattccctgccataatggggcagcagacagtggtgatgcccattatttactttgccaattagcatgtgaggcctgaggttattaaatataaatggctcaagctctgtcattccaaggcccgctggggaatggtggcttctaactgatgtggagcagcaccagggtggaatttctaaggagaaagactgacattctcctccctttctgccctgattctgcaccttgcctctcagggccttcccaacactctgcacagagaaggaatatgcctttcagcagatactgccttgctctcttgatgaccttgacattgcctgccatctttgttgccttccaaccacaaggtcccctgctcgtgactaccatcctcctgcctccactccagcacrggaaatccaatcttgagcttgcctggaatcacccccgaacacgattctaactccagggacagaaggtcaacagcacagccaatggatgacagccccagccctgca

SEQ ID NO: 487064 - DNA, 600 bp, Homo sapiens
gtgtgccacaattttttgtgtgtacatgttgagtaaatgaatattttaaaattagagttgacttccacctctggtgaagatggaataacagggaccagtctgaaacaagtaaaaaactggacaaaagatttcagtgaaccaaaaaaggaaaaacaaaaaaaaaagctggacaaaatataaaacaatggttttcaagacattggatgtcacgcaatggatctcaaggacaacaatccttgagagaagagaaatagactgggtgtggtggctcacgcctataatcccagcactttgggaggtctaggtgggaggatcacttgaggccaagtgttcaatatcagcttggccaacatggggaaaccccgtctctactaaaaatacaaaaattagccaagcgtggtggtgcatgcctataatcctagctacttgggaggctgaggcaggagaatcacttgaactcgggaggcggaggttgcagtgagccaagacygcgccactgcactccaagctgggcaacagagcaagactccatctcaaaaacaaacaaacaaacaaacaaacaaacaaagaatatcctatggctaagggagaagacccaca

SEQ ID NO: 487065 - DNA, 387 bp, Homo sapiens
ctataaataatatactaccctagttcatctaagaccattgactataagamacactgttattttatgtgccaaaaaaggaagccactgctgactacaagtctaagaccccatacattacaagatgctttttttccccaggaatgttaacattacataaattacactgtcttagcattgttgaaatgggaatattttcccactttacaaagaaactgaggtacacagaaagagaagtaatttacccttaaggtcacagagctggtaagcagagcacaaggatacagacccagtcagtccagtcaccttttcatggcagtaaaagatttcccaatagcctcgtgaattactcaaaactgcacttggcagagagacagacatcggcatcta

SEQ ID NO: 487066 - DNA, 387 bp, Homo sapiens
ctataaataatatactaccctagttcatctaagaccattgactataagacacactgttattttatgtgccaaaaaaggaagccactgctgactacaagtctaagaccccatacattacaagatgytttttttccccaggaatgttaacattacataaattacactgtcttagcattgttgaaatgggaatattttcccactttacaaagaaactgaggtacacagaaagagaagtaatttacccttaaggtcacagagctggtaagcagagcacaaggatacagacccagtcagtccagtcaccttttcatggcagtaaaagatttcccaatagcctcgtgaattactcaaaactgcacttggcagagagacagacatcggcatcta

SEQ ID NO: 487067 - DNA, 563 bp, Homo sapiens
ctacctcctgcgtttattgttcatttctgtctccccctgctagaatctaacttccatgagggaagggatctttgtctgtctattgtcttcactgatattttctgagcacttagaacagtgtctgcacatagtaggtgcatatgaaatatttgctgaatgaatgaagcttaaaaggaccttcaagataacagagtccaatcccctcatttcattgatgaagaaaggagccctaggtctctgggcaagacgaagatttgcccagggtcacatagactgtgggaatattcttcttattcttctaaatgaatacaatctaaaagccggactggtttctatcagttaattttctaagctctaattttattttattttttaatttgtgttaggtattttycccaaaggatctgaagcagtggacaagatgagaggtaatatagaatggaacagttaggagtccaaatggaagagatatcatctaaaggaagagggagtcagcctaacaggcactagatcatagttaattactctaatgggggcagaatttggctctgagtcctctggca

SEQ ID NO: 487068 - DNA, 563 bp, Homo sapiens
ctacctcctgcgtttattgttcatttctgtctccccctgctagaatctaacttccatgagggaagggatctttgtctgtctattgtcttcactgatattttctgagcacttagaacagtgtctgcacatagtaggtgcatatgaaatatttgctgaatgaatgaagcttaaaaggaccttcaagataacagagtccaatcccctcatttcattgatgaagaaaggagccctaggtctctgggcaagacgaagatttgcccagggtcacatagactgtgggaatattcttcttattcttctaaatgaatacaatctaaaagccggactggtttctatcagttaattttctaagctctaattttattttattttttaatttgtgttaggtattttccccaaaggatctgaagcagtggacaagatgagaggtaatatagaatggaacagttaggagtccaaatggaagagatatcatctaaaggaagagggagtcagcctaacaggcactagatcrtagttaattactctaatgggggcagaatttggctctgagtcctctggca

SEQ ID NO: 487069 - DNA, 606 bp, Homo sapiens
tagccacataagtatgaccacaggcacaatcagcagaagaaccatacaactgcacctagctcaaattcaagaatggtggttatctaagatttgcagtggttaagcagtaatagataactgaaactgaattcattttattgttttcatcttcaaaaatctgaaagatgaaaaaactgtcaaatatcctgaggaaaataaatctacccagtaaagtctcaaggtttttgttttgttgttgttgctgttgttttgttagcatacaactaccaggcatttgtggttagttaacagaattcataatatttattattaataagttttttggcacatggaaagattaataaagaagaaaaattttgaagactcaagtaatacaagccagagtctaaatcttaatctgccaactataatgaaatgattaaaccatgttaaayctaacagaatactatgcagccataagagaaaatgcaaaataggttaagtgacaaatacagaattcaaaattgtaagcacacaactataggactatgtttttcaaatacaggtaaaaatcataagggttatggatattttccttaacctttgtttttcaaattttctataatg

SEQ ID NO: 487070 - DNA, 391 bp, Homo sapiens
atcctgaatattttggatttaccaggcctgcgcaatcacatgacctaactccctaaaataaatctctgtctctgtctctgtctctgaatgtacacacatcttgttggctgtttctgtggagaattttgactcatgcaccctttgtgcasagtaaaccacgagtgtgctcattaacatgtggcacttgtaccccattgcccccaagactcttcaacaggcttacctcaaacttcacacacagcagcttatgcattgggcacagggtggggaaagggctaaaaggacctttgctacatgaatgtgaacaagtattttattcactgtgggaagatgcggtctgcaggcaatagcatcccatttaatgagataaagcagcaggagccactccctt

SEQ ID NO: 487071 - DNA, 391 bp, Homo sapiens
atcctgaatattttggatttaccaggcctgcgcaatcacatgacctaactccctaaaataaatctctgtctctgtctctgtctctgaatgtacacacatcttgttggctgtttctgtggagaattttgactcatgcaccctttgtgcacagtaaaccacgagtgtsctcattaacatgtggcacttgtaccccattgcccccaagactcttcaacaggcttacctcaaacttcacacacagcagcttatgcattgggcacagggtggggaaagggctaaaaggacctttgctacatgaatgtgaacaagtattttattcactgtgggaagatgcggtctgcaggcaatagcatcccatttaatgagataaagcagcaggagccactccctt

SEQ ID NO: 487072 - DNA, 391 bp, Homo sapiens
atcctgaatattttggatttaccaggcctgcgcaatcacatgacctaactccctaaaataaatctctgtctctgtctctgtctctgaatgtacacacatcttgttggctgtttctgtggagaattttgactcatgcaccctttgtgcacagtaaaccacgagtgtgctcattaacatgtggcacttgtaccccattgcccccaagactcttcaacaggcttacctcaaacttcacacacagcagcttatgcattgggcasagggtggggaaagggctaaaaggacctttgctacatgaatgtgaacaagtattttattcactgtgggaagatgcggtctgcaggcaatagcatcccatttaatgagataaagcagcaggagccactccctt

SEQ ID NO: 487073 - DNA, 435 bp, Homo sapiens
ttggctaggtagttcataagcctgggagaagcaagggttggctaggtggttctgctgatcttgattgaatctgcccaagtgtctggggattggctgattgtaagatgatttaaattggctttaactgggctgacaggggtgtcttggctttgctttatgtgtatcttctcctccaatgggccaacccaggcatgtcttatgataataatagatgcagaagagtgaaattcagttatggaagagttttttaaagcttttgtttcagtcacaactgataacaccccagctagttacataatcaaacccagagtcaaggggtggaagtgtgtccatccattatgggaaagcattgtaatgtatggcaaagggtacggatagactaacggatgaaaaaytgggaccaaaaatgcaaatgatcacactcctatgttcccc

SEQ ID NO: 487074 - DNA, 550 bp, Homo sapiens
ccatttaaaactcaactgaaacatcatttcttttgtgatcactctttctctagtgttaaatctgtgttgtgttcatgcctctaccattgacactactactctacatgtaattatttgtttacttctttctcttcccaatagatggtaagtaacataagagtgaggacaatgttcagcaaaatgcttaacacaaagtaggctctcaatataaatggaataaagtctatgaaactctttgaagactgaaaagttttacaaaaaatttctttacaaaaatatgacattattttttgaattatattctactgtatagatgtattcttttctagaagtgactaacataatacaagtatttataagaaatccatatcaccatgataatacaattattgtcatcatatatctactgatgcacttaaarccagtgatacttaaagccaatgtcaaatagggccctaccagtaccatgtccacctggtccccaccaaacacattaactcatttaatcctcatgaaaagcttatgggcacgtcctattgttatctctgtt

SEQ ID NO: 487075 - DNA, 550 bp, Homo sapiens
ccatttaaaactcaactgaaacatcatttcttttgtgatcactctttctctagtgttaaatctgtgttgtgttcatgcctctaccattgacactactactctacatgtaattatttgtttacttctttctcttcccaatagatggtaagtaacataagagtgaggacaatgttcagcaaaatgcttaacacaaagtaggctctcaatataaatggaataaagtctatgaaactctttgaagactgaaaagttttacaaaaaatttctttacaaaaatatgacattattttttgaattatattctactgtatagatgtattcttttctagaagtgactaacataatacaagtatttataagaaatccatatcaccatgataatacaattattgtcatcatatatctactgatgcacttaaaaccartgatacttaaagccaatgtcaaatagggccctaccagtaccatgtccacctggtccccaccaaacacattaactcatttaatcctcatgaaaagcttatgggcacgtcctattgttatctctgtt

SEQ ID NO: 487076 - DNA, 628 bp, Homo sapiens
actgatagaagggtactaggcaaaaagtcccacaggtgtcaactacatgagagattttgtgaaaattggtgaaaagcaggttgattaattaatgcccaacctaaacaaccaaaaaataagaaaacatttaatccaaggggatatctgaaaattaagagaatccagtgaataatgaacaaagattagtattatatttttctgttaactcttatttgggtaagcaactatttcagaagggattggttcctttgctttatctcattaaatgggatgctattgcctgcagaccgcatcttcccacagtgaataaaatacttgtttacattcatgtagcaaaggtcctcttagccccttccccaccctctgcccaatgcctaagctgctgtgtgtgaagtttgaggtaagcctgttgaagagtcttgggggcaatggggtacaagtgccacatgttaatgaggacactcctggtttactctgcacaaagggtgcatgagtcaaaattctccacagaaacagccaacaagatgtgtgtacattcagagacagagacagagacagagatttattttagggagttaggtcatgtgattgcgcasgcctggtaaatccaaaatattcaggataggcc

SEQ ID NO: 487077 - DNA, 623 bp, Homo sapiens
ttatgtaagccttttgtttagaataggttaaaatcattttaagcttttgagtcttgggcttcattatggacagtctagcatttgattgacataagatgataccaaataaaagataattcacttatgatttataaaagaacatgaaaattagtttttcctggactatttccaaaatctacttgtataattttacaccaaaatgtatgaacatttataaatatcaaagctttttttgaaaatgcttttctggaaaatgtaatgatacttttaggtagctctaatgaaagtaaatgtgcttaacaaaccacaagaaatatgcttttgtgtcctttcattataaatactttgaaccatgctttaaaagagtttgatatgttgaaaaattatgtaaagtgttccatctttaaaagaaaacgctgtaataagcttcatgaaaatatagctaaccaagtgggactgtctgggaagagaaaggaaaattcttattaaaaatggaaatcataacagttctctgaatacagtattataaattagtcataaatgtaataaatatttaagatgaytttgggcaatttaactttgttttattgtttctatatgactatgcatgattatgaaattta

SEQ ID NO: 487078 - DNA, 633 bp, Homo sapiens
acatgagggttttgctgtttcctgtacctttaagtattttcttgtctaagggtctttgcgcttactcttacccttgcctgaaaccctcttcccctgataactacatagtaggtctctactcagatatcacctaaaaagtctttcttgagcatacmacctaaaatagcgatcactacctcaaaactccctatctacctgaatctgctttttcctattcgtaatacttctctccatctgacacaagatgtttatttgtacatcatctgtctttccatatacagcaggaattttgtttgttactatgtctttaacactcagtgtgatgtctatgtgatcaataaattaataacatccaatatagcaatttattgtagatatttctttatatatttgttttatcttaattatacaagaattcttaattatttttatcttcaatatctggtacatagtaggtactcaataaatgttttgattcatgcatgactacatagcgctttttatgaagcaccacgcaatgctgaaatacttaattgctaattttactagcagaatatataactttattcatacagtataaaatcacaaaagcaaacatacatcactaaaaaatgagctgttgtaactaacaac

SEQ ID NO: 487079 - DNA, 550 bp, Homo sapiens
tcatggtcaagagcgaatacatagcaggccagggctctgtaggcttgttttgctgctgtgcctgttgccaaatgcttgaaaatcctgaagtacaaacataacagtctgaattaaatttcaytgattttatctttctcttccttttctcactgtggtgcagttgttaatggaattctagccaaaaggatgtgggaggagaggaaggagccacaaagggagaatcatgcctaagagttaactatggtactctgaagcagaacagaggtatgtgttaaatttttatactgtaagtataattcctttgaaaattttgatgtctcctgagatattatacaatgactcattattgaaataatatgaaatagaataaaaaatgcactttgtgacttctaactgacatgcactcatctctatttcccctaagtcaacaattttatttaatctaccttgaaaagaaaaaacaaatctgaaattcaaaaggctacaaatttgggtccaggtcatactagagcaagtaaaggcaggtataatttaattaatttttaattta

SEQ ID NO: 487080 - DNA, 550 bp, Homo sapiens
tcatggtcaagagcgaatacatagcaggccagggctctgtaggcttgttttgctgctgtgcctgttgccaaatgcttgaaaatcctgaagtacaaacataacagtctgaattaaatttcattgattttatctttctcttccttttctcactgtggtgcagttgttaatggaattctagccaaaaggatgtgggaggagaggaaggagccacaaagggagaatcatgcctaagagttaactatggtactctgaagcagaacagaggtatgtgttaaatttttatactgtaagtataattcctttgaaaattttgatgtctcctgagatattatacaatgactcattattgaaataatatgaaatagaataaaaaatgcactttgtgacttctaactgacatgcactcatctctatttcccctaagtcaacaattttatttaatctaccttgaaragaaaaaacaaatctgaaattcaaaaggctacaaatttgggtccaggtcatactagagcaagtaaaggcaggtataatttaattaatttttaattta

SEQ ID NO: 487081 - DNA, 550 bp, Homo sapiens
tcatggtcaagagcgaatacatagcaggccagggctctgtaggcttgttttgctgctgtgcctgttgccaaatgcttgaaaatcctgaagtacaaacataacagtctgaattaaatttcattgattttatctttctcttccttttctcactgtggtgcagttgttaatggaattctagccaaaaggatgtgggaggagaggaaggagccacaaagggagaatcatgcctaagagttaactatggtactctgaagcagaacagaggtatgtgttaaatttttatactgtaagtataattcctttgaaaattttgatgtctcctgagatattatacaatgactcattattgaaataatatgaaatagaataaaaaatgcactttgtgacttctaactgacatgcactcatctctatttcccctaagtcaacaattttatttaatctaccttgaaaagaaaaaacaaatctgaaattcaaarggctacaaatttgggtccaggtcatactagagcaagtaaaggcaggtataatttaattaatttttaattta

SEQ ID NO: 487082 - DNA, 525 bp, Homo sapiens
aaaacttttggatttgagaagtgtcctcagcatggaatatttcaatcatttgtaggtgaattgaaggctacagatgtattataaacaaaaagcatgtatttcacatgccctgaggtaacattgttgggaaatatttgaagtctagactcaaaggaatatacaccgaaaatgacacatacaccatgaagaacaaaaaacagactgcaggcttgacttacgagctgcgttcccartagagattccttctgtagagtattaccctacataaggaaaatgggactgagacaattcccatacacgataggtgcatttgcattcagaagtcataatcttcatatgtttttccacatagccctccataaatataattcaagggaggatgctaaggcacatatgtctgttccaaaaggcaaagtagaaaagaaaacaaagaattacacctttattgagcaaataaattttactctatatttagtggagaagaaatgaggccaacttacaaaacaagtaaaatattgtgaaagc

SEQ ID NO: 487083 - DNA, 525 bp, Homo sapiens
aaaacttttggatttgagaagtgtcctcagcatggaatatttcaatcatttgtaggtgaattgaaggctacagatgtattataaacaaaaagcatgtatttcacatgccctgaggtaacattgttgggaaatatttgaagtctagactcaaaggaatatacaccgaaaatgacacatacaccatgaagaacaaaaaacagactgcaggcttgacttacgagctgcgttcccagtagagattccttctgtagagtattaccctacataaggaaaatgggactgagacaattcccatacacgataggtgcatttgcattcagaagtcataatcttcatatgtttttccacatagccctccataaatataattcaagggaggatgctaaggcacatatgtctgttccaaaaggcaaagtagaaaagaaaacaaagaattacacctttattgagcaaataaattttactctatattwagtggagaagaaatgaggccaacttacaaaacaagtaaaatattgtgaaagc

SEQ ID NO: 487084 - DNA, 667 bp, Homo sapiens
agtaaatcaaaacataatataatgaaaatccaatttggatgtttaaaattaataatactgatcacactaaatgttcctgagaacatggcatgactcaaactctcacacactgctgtaggaatgtaagatggtacaatcactttggaaaccattttggaaattacataaaactttaaaaatacttctagcatatgacccagttatttcactcttaatgtttatcttagaaatataaattcttatatccaagcaaaggcttacgtaagaatattcatagcagtttattgctaatactcaaaacccgggcacaacataatgtctatcagcaggcatgaaaaagcaaactgtgttatatacacataatggaattctattcagcaataaaaatgaatgaattagaatacaacmgcataaacctccaaatgactatattgagtaggagtcataagaaatatatactgtataattctgttagtgtacatgttagaaaatgtaaatgaatctatagtgatagaaagaaaatcagtggttgtctggaaatgtgggagtatggaaatatggtgtagagggactaacagattataagtgggcacaaaaaactttaggagttacgggtatcctcacaatttttaacagctctactgaagctcatgcttcacacaccaag

SEQ ID NO: 487085 - DNA, 544 bp, Homo sapiens
tttcctcatttataaagtggaataggaatgcttgttctgcctacttcacaaacttgcagggatgatcaaatgtgaaaaagtatgaaaagtataaagttataaactartgtgtcaattgatatttttagacaattctgaacactacagtaggccaattttctataagaacagggtctgtctaaatgatcctaacgtttcttctctgttgttgaggctaaatttttagcactgtctgaaagaactttctatgatgagaatattctgtatttgtgctgtctgtccaaaatgggagccgttagccacatgtggtcattaagctcttgaaatacagctagtgtgacggaattactgaatttaaatgtaaatagctgcatgtggtcagtggttactgtattgaattgcccagtcttatcttttgttcacttctctcctcatctagataattacaaatataaaaatattaacaaacgggaagtttctcaaaaacactcgtcacttaaataattaaagtttactcttttttttcaatttttttttttttagc

SEQ ID NO: 487086 - DNA, 524 bp, Homo sapiens
tttggtcttcctcagtgataacaagaattgttaaaggattaaaaagtcagatttttgtaatgcttcataaaatgggcattttatatttctaaccatattaactgatatgaattataaagaaaatttttaatcctttgatgttactgtggttacaaaaacgagattgaaaaatggtgttaaatattttaagtatttaaatttcattctttaataatttgataatgcttttcctggtgtatatactgattcaaagaytgatttttgtatattgccacagtgacctcttgtgggggaaacatttatctcatacattttattaactaaatcattctgcaaataggtttcagactgaaattcaaacagtgaataaacagttcccatgtgagccattcaaatttttggagccaactctaagactagaatattgtgaagcattggctatgcttagggaagctggagtcgaaatgggagatgaagacgatctgaggtttgtctttgtggctttttttttactttaagttcca

SEQ ID NO: 487087 - DNA, 620 bp, Homo sapiens
atgtgttttcacattcagagttttgaattctaggcttttttgcccctaggaaaaagtcttttgttggtaattaacacatttgactgtagcttatgtatgtatcattcccaaatctcaaattcaacacgttaaaaacgtctctcagtcactcctgttttccttatcccagttaaagggataccatttactctgtccctaagccaggaaccccggtgtcatgcaagatwccctctttcactaaccacatcaaatccactgtgtccctcagatctgctctcaccctcacccctttccaaaaatatctgctaccccagcacattgggaggccaaagcagacaggtcacctgaggtcaggagtttgagaccagcttggccaacacggtgaaaccctgactgtacaaaaaatacaaaaattagccaggtgtggtggcacgcacctgtagtcccagctactcaggaggctgaggcaggagaattgcttgaacctgggaggcagaggttgcagtgagtcaagatcataccactgcacttcagcctggatgacagagcgagactcctcaaaaaaaaaaaatctgctaccatgtcttagcctagtacttactctcttacctaggcttcaa

SEQ ID NO: 487088 - DNA, 620 bp, Homo sapiens
atgtgttttcacattcagagttttgaattctaggcttttttgcccctaggaaaaagtcttttgttggtaattaacacatttgactgtagcttatgtatgtatcattcccaaatctcaaattcaacacgttaaaaacgtctctcagtcactcctgttttccttatcccagttaaagggataccatttactctgtccctaagccaggaaccccggtgtcatgcaagattccctctttcactaaccacatcaaatccactgtgtccctcagatctgctctcaccctcacccctttccaaaaatatctgctaccccagcacattgggaggccaaagcagacaggtcacctgaggtcaggagtttgagaccagcttggccaacacggygaaaccctgactgtacaaaaaatacaaaaattagccaggtgtggtggcacgcacctgtagtcccagctactcaggaggctgaggcaggagaattgcttgaacctgggaggcagaggttgcagtgagtcaagatcataccactgcacttcagcctggatgacagagcgagactcctcaaaaaaaaaaaatctgctaccatgtcttagcctagtacttactctcttacctaggcttcaa

SEQ ID NO: 487089 - DNA, 620 bp, Homo sapiens
atgtgttttcacattcagagttttgaattctaggcttttttgcccctaggaaaaagtcttttgttggtaattaacacatttgactgtagcttatgtatgtatcattcccaaatctcaaattcaacacgttaaaaacgtctctcagtcactcctgttttccttatcccagttaaagggataccatttactctgtccctaagccaggaaccccggtgtcatgcaagattccctctttcactaaccacatcaaatccactgtgtccctcagatctgctctcaccctcacccctttccaaaaatatctgctaccccagcacattgggaggccaaagcagacaggtcacctgaggtcaggagtttgagaccagcttggccaacacggtgaaaccctgactgtayaaaaaatacaaaaattagccaggtgtggtggcacgcacctgtagtcccagctactcaggaggctgaggcaggagaattgcttgaacctgggaggcagaggttgcagtgagtcaagatcataccactgcacttcagcctggatgacagagcgagactcctcaaaaaaaaaaaatctgctaccatgtcttagcctagtacttactctcttacctaggcttcaa

SEQ ID NO: 487090 - DNA, 567 bp, Homo sapiens
atggggatagcattgaatctataaattactttgggcagtatggccattttcacaatatagattcttcctatccatgagcgtgtaatgtttttccatttgtttgtgtcctctcttatttccttgagcagttgtttgtagctctccttgaagaggtccttcacatcccttgtatgttgtattcctaggtattttattctttttgtagcaaatgtgaatgggagtacattcttaaggtggtttgatgatcatttgttgattggagcctgatatcaatgttagcttagatttagcatttttggcatagggctcttacgttggatctttacagacagtaaaggaattctgggccttttagggtacttgaatccttagatattagargccacctcaaatgctaagagtttggtttattctcagatcactggactcatctaagtcctaaaataaaatattgttatatctgttacccagccagatctccctaggatattgtaattttataggtgtggaccaggctgaccattgcatattaagacagttctcatggactccccaccagaaatggtg

SEQ ID NO: 487091 - DNA, 613 bp, Homo sapiens
cagaaattactaaaagtttatttttctgtttatgttgttctgtcttttgtggccttttgctggttttcctaccacaagacattttctttgttattctattacattaagagctctggttgtttttataaagtagttaagagagttaagacagaataatgtcttaaaaagaagactttttcctcttaagaaatagacttcagatagtataatgttcatgctcacaaaaattgctttaccaygcaagataaatatatatgagaccatgtaatagactcaatagacagttcatgaagactgtatttatcaagcacgtagtgtgacaggcagtgtgctgagtgctttgaggacacattctcacttatactcataacaaccccatgagaaagctctcatgatctccattttacacataagaaaatgaaagcccagagattttgctgagttgagcaaatttaagagagaggtaatataatgcacaattcaaatttgagcataaatttaccttcaaaactcatttacttaattgctatgtaatcttgcctttctaaaaagttaggaagctcaaggagggcctattttaagttgcttcacactggctatatgtgcaccattg

SEQ ID NO: 487092 - DNA, 615 bp, Homo sapiens
agagccagttgaattgtttttgttattctccaataaaagaagtataggaattgagataatttagtgaattttatagcaatctgatatttgttgaatgaaaacatttcattcaatataacccttggcttatattttatatgactttgttttgtaaagattgttgtttatgattaytgattttcatggtcttttatgaaaatattagtcctgagggtttgaaaattaaagcaaaacaaattttttaaaaaatggtctttcacctgggggtgggggggaagaattttatggtttaactatgttatttactaattcatttgatacaataggctttataattcttatcatccccattttatagttggagaaaatgaaattcaaggaataagtaacattgtaaagtctcacagatggaaaagtattctgaagttgtaaatgtttatagatttttaaattcaaaaacatgtcttcacagtcatctgctttaaaaagtaaatacagatttaaaattgaacagtatcgttaactttagtttctgttcttcaaataatattaaattgtggcagatgcatatgcccttctgattgtttgaaaacattcatttgattgcattatttt

SEQ ID NO: 487093 - DNA, 615 bp, Homo sapiens
agagccagttgaattgtttttgttattctccaataaaagaagtataggaattgagataatttagtgaattttatagcaatctgatatttgttgaatgaaaacatttcattcaatataacccttggcttatattttatatgactttgttttgtaaagattgttgtttatgattattgattttcatggtcttttatgaaaatattagtcctgagggtttgaaaattaaagcaaaacaaattttttaaaaaatggtctttcacctgggggtgggggggaagaattttatggtttaactatgttatttactaattcatttgatacaataggctttataattcttatcatccccattttatagttggagaaaatgaaattcaaggaataagtaacattgtaaagtctcacagatggaaaagtattctgaagttgtaaatgtttatagatttttaaattcaaaaacatgtcttcacagtcatctgctttaaaaagtaaatacagatttaaaattgaacagtatcgttaactttagtttctgttcttcaaataatattaaattgtggcagatgcatatgcccttctgattrtttgaaaacattcatttgattgcattatttt

SEQ ID NO: 487094 - DNA, 276 bp, Homo sapiens
tgtttgcttcttgtgttgctctgctgtcggaaggaccatagtttggaatcactgttccacaaagtttggtgaccatatgtgatcatccattcttcgtgtcttgagccacaggagacamatttgtgcctccagaaacagttgtgaggtcaggcccaagagggcacagccatggagagcactccctcatgggaggggccaacaggatggctggggagggtgccgtgaggcagatggcagattagcaatgcaggcctgtggggcaatagctgatggaca

SEQ ID NO: 487095 - DNA, 497 bp, Homo sapiens
atctttttttcttcttcttcttccatgaaaataacatgatgattctctcaaaaggatttggctaaaatcctacagtaaagtggttagaaaactacaaatagctgaggggaagaaataaaagtaggaatcaaagctagaaacggcggcatcttggctcacacatccctgaatccaggtgcaagttgtgtgtgataaacttggaatgaggtacttccctacctactcctgtgaagaygattagaaacacaaacacacaacttccaattttcttaggcaaaataacaatccattttagaaacagaaatccaacccagtgagggaaattatacattgttctttcccatacaaaatctctacctgctttgctgttttccagtatggtctccgtccctaagggagagggttcttacattctctcctaatcacttaagtgacaccgcaaagataaaactctaaaacctttgccagcaagtaatcagattccaaacctaagaggg

SEQ ID NO: 487096 - DNA, 482 bp, Homo sapiens
atgttaaaattgtgttatgagggtttttgtttctttgacaaatctagggcttaatctttctatgcttctatgtctacatataaagggaaactttttttaaaaagacaagtaaaagcaagaaaatttaatccagcaatgcaaaattttacccttttgtattttacactttctcataatactgtgtgtggtttattacatttccaytaaaaattttaagtgaataccagtgttttttgtcatgaaagtattatttcccatgttttcttatggaaaaaaaagtatattgtgcaaattatacaagcaaaacattatttaacaaggcagtaaaggaaccttctagatatttgagcgtgaagaatttgtgggagaatgttgactactgttgcttttgtatacttatatttgtaacccagaattacacggtataataaaaacacaataaagatgatttgatggaatgctaagtcatgctcttattcgta

SEQ ID NO: 487097 - DNA, 607 bp, Homo sapiens
tcttggaaaatgaagccaagtcagactcatttactacatagtagagatggagcacacacaaaatgcagctcagtgaatgtttgttgmattctgtcttggatcatataataataatagtaatgataataacaaaacccacaaaatatttcagctataatttgaatgcgcacctatactgagcatttacatgccctgtttcatttaatcatcaagaaagccctgtaaggttggcattgttatctccacattacagatgaggaactaaggtttaaaaggtgaagtaacttgagctcagaaagattaagcagctcgccctaggggaatcataagctagcatggataaagcccatatatattagaaccctgatcagaccagcttcagactctgctcctaaccactgctgcatacatccagaaagtgcggtgctgtggtaattatcttacagggtattgatgagaatgaaagaaaattgtctcacccttttttcgacttactgtcacctgatgaaaatgacctatttaggaagacaattttattctatactaaacctgtaaggtctccaggtatttgattggcttgccatattccttctcctgattctggaag

SEQ ID NO: 487098 - DNA, 607 bp, Homo sapiens
tcttggaaaatgaagccaagtcagactcatttactacatagtagagatggagcacacacaaaatgcagctcagtgaatgtttgttgcattctgtcttggatcatataataataatagtaatgataataacaaaacccacaaaatatttcagctataatttgaatgcgcacctatactgagcatttacatgccctgtttcatttaatcatcaagaaagccctgtaaggttggcattgttatcyccacattacagatgaggaactaaggtttaaaaggtgaagtaacttgagctcagaaagattaagcagctcgccctaggggaatcataagctagcatggataaagcccatatatattagaaccctgatcagaccagcttcagactctgctcctaaccactgctgcatacatccagaaagtgcggtgctgtggtaattatcttacagggtattgatgagaatgaaagaaaattgtctcacccttttttcgacttactgtcacctgatgaaaatgacctatttaggaagacaattttattctatactaaacctgtaaggtctccaggtatttgattggcttgccatattccttctcctgattctggaag

SEQ ID NO: 487099 - DNA, 663 bp, Homo sapiens
gctgaataccagcttcttggaaaatgaagccaagtcagactcatttactacatagtagagatggagcacacacaaaatgcagctcagtgaatgtttgttgcattctgtcttggatcatataataataatagtaatgataataacaaaacccacaaaatatttcagctataatttgaatgcgcacctatactgagcatttacatgccctgtttcatttaatcatcaagaaagccctgtaaggttggcattgttatctccacattacagatgaggaactaaggtttaaaaggtgaagtaacttgagctcagaaagattaagcagctcgccctaggggaatcataagctagcatggataaagcccatatatattagaaccctgatcagaccagcttcagactctgctcctaaccactgctgcatacatccagaaagtgcggtgctgtggtaattatcttacarggtattgatgagaatgaaagaaaattgtctcacccttttttcgacttactgtcacctgatgaaaatgacctatttaggaagacaattttattctatactaaacctgtaaggtctccaggtatttgattggcttgccatattccttctcctgattctggaagagtccagtaactgatattttacatgtaacaggacaaataaca

SEQ ID NO: 487100 - DNA, 549 bp, Homo sapiens
agcagagagaagttcagactattttctaagagtataaggaaggtgaaaatgtataaatggggaagtgacattggaactgagctttgataagtagaattccatctgggagaggttaagaaacaagcgttctgaaaggaggacaagctgtgtttagaaaatgaaaaaaatattttgtttgcataatagggtatgtaggttaaaagtagactataagggctaggcaacaccacgcctgtaatcccagcactttaggaggctgaggcagtgggatcacctgggtcrggagttcgagaccagcctgaccaacacggagaaaccccgtctctactaaaaatacaaaattagcctggcatggtggtgcatgcctgtaatcccagctagtcgggaggctggggcaggagaatcgcttgaacccaggaagcagaggttgtggtgagctgagattgcaccactgcactccagcctaggcaacaagagcgaaagtccatctcaaaaaaacaaagaggaagaaaaattagccgggtatggtggtacacgcctatgtaatcc

SEQ ID NO: 487101 - DNA, 621 bp, Homo sapiens
caagcagcattaaccaccaatatcctgaaataatttattaactaaygaagaagccagagggctaagaatctaaagtacaatgctatgtccatagcggagatttaataaatatttgttgggtgaataaatgaacatcttcatactgtcatgtacatagaaaacctcccaaccagagataacagatccacaccgtttgtgctacagtttcctctacgaagcctaagtccaaattatatcaataaagggttattatcgttttctctctaagcgcaaatctggcttcagaatcctcctcatcactgcacccctgcagtcactaccaattggttggttagtgcagacacaaaataaaatgcacttgccatccctgacatatgatacttacctaaacctacactgaagccaaaatgtccaagaaataaattacccaccccccaagtcaagtggagtcttcttagatttctcagtgttgtcactggtaattgtgtagtcaactcagcactgaaaagctactcaaactcagggcataccttatgctcaggttcacactgttggcattaataccattagaccacgctaccaagaggaagggaatatttttgcaagtacccaacaaaagaa

SEQ ID NO: 487102 - DNA, 641 bp, Homo sapiens
tcagttactgcggaaaatcagcaacttcagagacttcccaagagctaagataacatctttcccttttagaaccaataaaatgtccacacaaggaatcaagaatatgacaatgttttatcttctatttaaatttgttcatgaagctacacttttattgaaagccataaattgttcattgacatcatttctggaaacttattcttagaaacaatttttaaagtagtaaaagtataaatgtaaaaaatgttccccacaatctttgtttcaaaattacaaaaaagggaaaaaaaatgtaggagaatggttaaatatattgtggtttatcttcttaaaaattaaatacaaagagcataaagtataataataaagaacatttttgatatcttaacttttaaaagcaggtatcaaaactgtagtgacattatgattgtccttatattatatatacatgggtagatgaaagctatcaattgatagggaggcaaacagatattatagaatttaaaatggctgctcaggtattaggaaagtatgtgtaygtccccccctcccccttttttcaattttcgttttatgttgttttaatattatttcagtgataaatacatatatcttcttgtctttgtaactctgagccctga

SEQ ID NO: 487103 - DNA, 387 bp, Homo sapiens
tgtgtgtgtgtgtgtgtgtgtgtgtgtgtgacagagtctcaytgtctcacccaggctggagtgcagtggtgccatttcggctcactgcaacctccacctcccgagttcaagcgattctcctgcctcagccttctgagtagctggattacaggcgcacaccaccatgcctggctaatttttttgtatttttagtagagatgaggtttcgccatgttggccaggctggtctcaaactcctgacctcaagtgatccatcccgctgcctcggcctcccaaagtgctgggattacaggcatgagccactgtgtctggcctaaaggcaatttcaagaacgtatctctttataaaaagggcgtctacgaacccctatgctcattgacagaaaag

SEQ ID NO: 487104 - DNA, 387 bp, Homo sapiens
tgtgtgtgtgtgtgtgtgtgtgtgtgtgtgacagagtctcactgtctcacccaggctggagtgcagtggtgccatttcggctcactgcaacctccacctcccgagttcaagcgattctcctgcctcagccttctgagtagctggattacaggcgcacaccaccaygcctggctaatttttttgtatttttagtagagatgaggtttcgccatgttggccaggctggtctcaaactcctgacctcaagtgatccatcccgctgcctcggcctcccaaagtgctgggattacaggcatgagccactgtgtctggcctaaaggcaatttcaagaacgtatctctttataaaaagggcgtctacgaacccctatgctcattgacagaaaag

SEQ ID NO: 487105 - DNA, 630 bp, Homo sapiens
catggcccttcctcagtggctggaaggactttgcttccaacaggatcataatcttcgtgctacctcactaacattggaaacaaatggagccaatctggatttattcatgtgctctgtaaacagtrgaattctgctatggctctgaggaaatggggacatcataaatttgtcattaggacattattccttctttttaataaataactttctttagttttgcaagaattggccaactctctcagaggaaggctatggaacccttagaatttagtggagtccagggaccatccttgaataatgagggaaatcaacattaaggccaacgtagtgcatttgttataagggtaggacccatatggagcaacaaagaagataaatgttatgttcaaatcatagaaagcaccatctgggtagaaaggtaagatgccttgatacttgagaaaatattaccactttcaagttgggtttagattgcgttatctgcctcctacaattaatatctttgggggagctctgtgcctcctttaaaaggccggtagatgaagtagctggcctccctgtggcttatgcagatttaggtactgaaggatagctggatctggaaggatccacatctaccacaaggttcag

SEQ ID NO: 487106 - DNA, 611 bp, Homo sapiens
gttgggcagcatagtgagatgccatctctacaaaaaaatttaaaattagccaagtgtggtagtgcacacttgtagttccagttactaaggaggtcagtgagcaagttatgtgggtgggaggattgcttgaccccgagtgttcaaggctgcagtgagccatgatcacaccactgcactctagcctgggcaacagagtgagaccctgtcccctcccaccaccccttgcaaaaaaaaccccaaacaaacaagcaaacagacaaacaaaactggggaaataacagcatgtttgctatgatgtttgagatggtatgagaagggagaaatcagtgatgcagagagaaagggagaattacttgagcaatgactttggttgggcaaagggtaccaggggatccagtgcacacgtaggggttgtctcaaccaggcacataaacarttcaacagtagccacacagtgtgagccaaaggcagctttagaccacacatttccaagaagaggctaaggtttctgacctgtccatcttatgactttatatttttcctgtacttcacagttagagagttggcttctctaacaaagactcagccaaagggggaaaaacgtgccaaga

SEQ ID NO: 487107 - DNA, 584 bp, Homo sapiens
taggccatgcctgctcctatcctctcatacatggtactgctgaggtcaggaaaacctcagaccattcagctagaaggattcttatttttaaattttgaattgataaacataattgtacatatttatgggatacatgtgatattttgatgcagatatacaatgtgtagtgcacattgtaactgggataaccatcacctcatttatttgtgttggaaacattcaaattcctttcatttagctattttgaaatatacaataaattgttaactatagtcaccctactgtattataccacactagaacatattccttctaactgtaattttgtccccattaaccaacctctctttatcctcccctcccctctacccttctctatctcttatagccactactctacactccacttctatgagatcaacctttttagttcccacatgcatgtagtatttctgtgcctgrctcatttcacttcacataatgttggagggcttctatttctcctgggaccacatggcaagagtgggggccagcagaggcaaactgtaggaccttggatttaggaggcctaggctgaagtttca

SEQ ID NO: 487108 - DNA, 613 bp, Homo sapiens
gcatgccttggaaaaattacagattgtcacctgtcatggtccctggaaacagttaaatcatgaattttaagtccattactgtcaacgatgtactatataaatgggtaaacttttgtcagtttctttctcccaattaaatgttatatagcaagatttgctggtagggcacagggaccctaaaagagcttaaacaagaaaacaaataaaggatatgaaataaacactaatgatcactgtcactaggayctcacatttaatgcatccccatttctattattcctgactactcctgcttatgggtctggaacgttgggaagccactgcaggactggtctacaggcgtctaatgggatgaaagcgtatggatttgagttccaaccaagttagtaaaagtggttcatcagtgatcctcctctggattgtggacctggtgggcttcttctgaaccgtcagaccaaggaaagtcttacacacactgtttcctctatatcctcttctacaaaatgattgtgtatttttcaggttgcactctgcactgggttactagaaatacagtaggttgcactgatgatttaactctgttttctataagggctacgggatctcatgcaga

SEQ ID NO: 487109 - DNA, 464 bp, Homo sapiens
caccttttttatgtatattggttatttttacttttctcaaaattgtttcccattctctgcccttttttctattaaatagtttatatttcttttcctacaaatgtttatgagcttgtcataaataaatattggaaattaagcctttgtaactttaagaaaaataatgtctctgtgacaaattttggttaggttgtgtcctagaatggagggtgccattttaaaatgtaggctttttttataaaatagttatttcttcctcatccagattttgaagaaaaaaattaaaaagttttttttttctaatatattgttacgattctttttgtctatggtttttagagtattttctttttaacttcagggaytttaaaaatccttacaatggtttgtcactgtctccattattattatctttgtttctaatacctgttgtgccttattctttatgtttttcctcccggaat

SEQ ID NO: 487110 - DNA, 464 bp, Homo sapiens
caccttttttatgtatattggttatttttacttttctcaaaattgtttcccattctctgcccttttttctattaaatagtttatatttcttttcctacaaatgtttatgagcttgtcataaataaatattggaaattaagcctttgtaactttaagaaaaataatgtctctgtgacaaattttggttaggttgtgtcctagaatggagggtgccattttaaaatgtaggctttttttataaaatagttatttcttcctcatccagattttgaagaaaaaaattaaaaagttttttttttctaatatattgttacgattctttttgtctatggtttttagagtattttctttttaacttcagggattttaaaaatccttacaatggtttgtcaytgtctccattattattatctttgtttctaatacctgttgtgccttattctttatgtttttcctcccggaat

SEQ ID NO: 487111 - DNA, 549 bp, Homo sapiens
agctctaatagttaaaatattctggaatgagttatcattccaacaagtaaattaatatattgtaagtttcaataattgttaaatataaaaatacatcttttgatgtaatgttaatagggctttccctcattattttatgtttctatggaagaatactatatattgcttgaataagacagggtttattgttttcatttctgtttttctattttttccatataacataacaatttatttatcctacaaatacgtagatgggaatggaagttttataacaagttcagatcattcttttaaattcttcaattcttcaaaattctatgacaaaaatctcattaaaatgtcatcaaaaaatttaataagaarttgattaagttatccttttatttttgatgagacaaagaattggaaccaagatgaattacaaaagggtcttttgcatgaggatgttcaattgtttcagcatcatttactgaaaagactattctttcccccattatgtggctttggtgctcattaaaaatcagttgaccataggtgtgtggcttt

SEQ ID NO: 487112 - DNA, 623 bp, Homo sapiens
aataaaaattatattgatcaatctttaggtatcagttattgttctaagacagcaatcctatttggttagcattattgacctcagwtgaagcctctaattctctcttatcggataagaatttttctctaatgatgtataatgcaatgaccattgttttcgtagcaagactttttcagtgattaaaatatttcattgtaacggattgctaaaactataattataaagtcaaaggccagtgatatgacactcccctgttactttcaatacaggttagaccaattatactaccacagaaatggatcatagtaatgtttattaatagaaacattctgattgaaagccatttagaagcagcatggcgtgttggcttattaaaattttgttgatactaacgttaggaaaaatgtctgtatttcctttgttatttctttatttattgttgcctttatgcacgttcaagattgtaagaaatcacattaattgtggagttttttccagattttagcactgaagtataaataccagtccttcactcaagtttcaattttcagtggaattaccttttctcatgcttactgtgttttatgttacgatttcggatcctgaatattttggtttcttat

SEQ ID NO: 487113 - DNA, 623 bp, Homo sapiens
aataaaaattatattgatcaatctttaggtatcagttattgttctaagacagcaatcctatttggttagcattattgacctcagttgaagcctctaattctctcttatcggataagaatttttctctaatgatgtataatgcaatgaccattgttttygtagcaagactttttcagtgattaaaatatttcattgtaacggattgctaaaactataattataaagtcaaaggccagtgatatgacactcccctgttactttcaatacaggttagaccaattatactaccacagaaatggatcatagtaatgtttattaatagaaacattctgattgaaagccatttagaagcagcatggcgtgttggcttattaaaattttgttgatactaacgttaggaaaaatgtctgtatttcctttgttatttctttatttattgttgcctttatgcacgttcaagattgtaagaaatcacattaattgtggagttttttccagattttagcactgaagtataaataccagtccttcactcaagtttcaattttcagtggaattaccttttctcatgcttactgtgttttatgttacgatttcggatcctgaatattttggtttcttat

SEQ ID NO: 487114 - DNA, 623 bp, Homo sapiens
aataaaaattatattgatcaatctttaggtatcagttattgttctaagacagcaatcctatttggttagcattattgacctcagttgaagcctctaattctctcttatcggataagaatttttctctaatgatgtataatgcaatgaccattgttttcgtagcaagactttttcagtgattaaaatatttcattgtaacggattgctaaaactataattataaagtcaaaggccagtgatatgacastcccctgttactttcaatacaggttagaccaattatactaccacagaaatggatcatagtaatgtttattaatagaaacattctgattgaaagccatttagaagcagcatggcgtgttggcttattaaaattttgttgatactaacgttaggaaaaatgtctgtatttcctttgttatttctttatttattgttgcctttatgcacgttcaagattgtaagaaatcacattaattgtggagttttttccagattttagcactgaagtataaataccagtccttcactcaagtttcaattttcagtggaattaccttttctcatgcttactgtgttttatgttacgatttcggatcctgaatattttggtttcttat

SEQ ID NO: 487115 - DNA, 626 bp, Homo sapiens
tggatgtgagactcttttaactgttgcyattacattgaactggctattgacttaaaaatgtaaatagcctcaggtggttagagggctgggaagctttaagctacttggactagagaaataaaaagcgggtagggaggagtggataaaatgccttgtaagtggtctcatggaaagtgcagagaaaatttcattttaccatgaattatcttctcagattagaaatttaatttctccaagcctcagtttcttcatctgtaacgtgacaactgcaactgttgtgatgataaagggaaataatataatgacaatacccattccattatatctgtaactttggaattcacatttccgacagtcaattttgtgagaactttattaaaagcataaatatcttagagtgcaccttttaaatttgttttatatgctgctaacagaattaatctagtctcttgtctgtgtctacctaataaggcttagaagctaatgtgctgtcaagaagaaataaacggaatctttttcttccccattggattttctctaggtggggctgtagttttcatccttttaaggtgtttctgcacaggcctaggctgcttggaatactagtatttcttactaagatgaat

SEQ ID NO: 487116 - DNA, 602 bp, Homo sapiens
aattaaaaaaaagtatgaaatcaaatgtatgaaaatggaaaggacttgtgatagtgagagtccctgaagcttaatcttcacaagtatgttaaatccacctctggccagttgaagttttgaatgtttagttaatgttcctcttgaaacayagtctatgcatgtttctctttgtttgatggtgatggaaacatttctcttttaagattatagcatattctcattatagtcctaaacttggatcttatgtgataacactttatagtaagctctgcttgttccaccatttgttagatattttatatacttaaccaattgatgtctgaagacagattaagaaaataatatgtattgcttgagggaagaagcagttataaaagagtatgatagccaataaataacttggagttattaacatcagaggaaatggagcttatagagtgtataagcaatagtgatggcttcaaatggagatgctttacattgtgaagaatgattaaataattttatctttgttcacagaaactttaacattagactgaggcttctgaaattggcttataaggcacagaaaatctacgtatttcttgccttcatttgttttg

SEQ ID NO: 487117 - DNA, 602 bp, Homo sapiens
aattaaaaaaaagtatgaaatcaaatgtatgaaaatggaaaggacttgtgatagtgagagtccctgaagcttaatcttcacaagtatgttaaatccacctctggccagttgaagttttgaatgtttagttaatgttcctcttgaaacatagtctatgcatgtttctctttgtttgatggtgatggaaacatttctcttttaagattatagcatattctcattatagtcctaaacttggatcttatgtgataacactttatagtaagctctgcttgttccaccatttrttagatattttatatacttaaccaattgatgtctgaagacagattaagaaaataatatgtattgcttgagggaagaagcagttataaaagagtatgatagccaataaataacttggagttattaacatcagaggaaatggagcttatagagtgtataagcaatagtgatggcttcaaatggagatgctttacattgtgaagaatgattaaataattttatctttgttcacagaaactttaacattagactgaggcttctgaaattggcttataaggcacagaaaatctacgtatttcttgccttcatttgttttg

SEQ ID NO: 487118 - DNA, 250 bp, Homo sapiens
tataaggtgttttccctaagaggcctacgctggcacagggtgtcagagcctgagcagtgagagaagtgttggagagggatggtccaattgggagcagaggtggaggtgcactggaatccaagcccaatcatgagaagcatctccacagatgagtgcccttgtttgttgcatcagagtataatcaagctacagggcaaatcggatgaagtggagaagctcascattgaatgttggagtctaggtagcttgt

SEQ ID NO: 487119 - DNA, 639 bp, Homo sapiens
atctgctcctcgaagcttttcctgggctcctaaactgggttaggtgccagactctttgatatttccttagtatggtaggtgaaataaggaccccaaaatrtgtccatgccctaatcctcaaaattagtgaatatgttaccttacgtggcaaaaggaactttacagatgtggctaaggactttgatgtaaaaatgaaaaagtttgcacccaggattatccaggtgggcacaatctaatcacagttatttaatcaattaaaatcagaaaacctgttccagctccagagaaccagagagatggcagcctgaaaggaacagaaaacactagctttgaagatggagaaaaaaatcatgaaccaaggaaatgtgggtagtctccagaaaccagaaaaggcaaggaaacagattctgctctcacaggtccagaaaggaacacatccctgaagacacgttgattttagcccagtgggacctctgtcagatttctgacctacagaaatgcaagataataaatttgttattttaatttattactgcaggaaaaaaaaaacacctaatacactggggaacagttttatgacattatactatcactatctgtgcctgcttcctgactaaaccttaacaatatcgaaggcag

SEQ ID NO: 487120 - DNA, 639 bp, Homo sapiens
atctgctcctcgaagcttttcctgggctcctaaactgggttaggtgccagactctttgatatttccttagtatggtaggtgaaataaggaccccaaaatgtgtccatgccctaatcctcaaaattagtgaatatgttaccttacgtggcaaaaggaactttacagaygtggctaaggactttgatgtaaaaatgaaaaagtttgcacccaggattatccaggtgggcacaatctaatcacagttatttaatcaattaaaatcagaaaacctgttccagctccagagaaccagagagatggcagcctgaaaggaacagaaaacactagctttgaagatggagaaaaaaatcatgaaccaaggaaatgtgggtagtctccagaaaccagaaaaggcaaggaaacagattctgctctcacaggtccagaaaggaacacatccctgaagacacgttgattttagcccagtgggacctctgtcagatttctgacctacagaaatgcaagataataaatttgttattttaatttattactgcaggaaaaaaaaaacacctaatacactggggaacagttttatgacattatactatcactatctgtgcctgcttcctgactaaaccttaacaatatcgaaggcag

SEQ ID NO: 487121 - DNA, 577 bp, Homo sapiens
aatacaggatacagtggggacagaatggaaatacacaagactagttccaaaataaacacttccaaaaatctgccttctttggaaatatatatatacagaaagaatctacagttggcagcacctctttgaaatagttcctttctctcttctgcagtgtccagcatggcccatacccccaccaatcatgccaggtagatgccactgtatcaatttcttaaattttttttttttagagatagggtatttcactctgtcacccaggctggagtacagtggtacaatcaaagcttacygcagcctaggctcaagtgatcctcctgcctcagcctcccaaagtgctgggattacaaacgtgagccactgagcctggcctcaaattacttttaacataatagctttacaatctttttcattactatttttactgagcattttatttagtcctgcttgtttcagcacaatcgaaactgttttaagagtattagctgcttcatgaatcaaagagaagtcattccttcttgacattcccataattcccatcactgtagtatctgggcacagagaacaagatgatcta

SEQ ID NO: 487122 - DNA, 349 bp, Homo sapiens
ctgctgtttaatattattactcacgcccacctgcttccatttcttcactgtaaaacggggatgttgatacctgctttccktcaccaggtcaaagtggggacctgggacagatgggacagctcctcttggcagaatccactatgggattgctttgcaatgtcagctcccttgatgcgttaaaatactccagtgttggattcaggctgggtgcggtggctcatgcctgtaatcccagcacttggggaggccaaggtgggcagatcacctgaggtcaggagttcgagaccagcctggccaacatggtaaaatgccttctctactaaaaatacaaaaattagctgggcgtggt

SEQ ID NO: 487123 - DNA, 533 bp, Homo sapiens
gcagtgatcttgttaaagcactggtaagattctgtcattttgctttacatcwctcagtggctctccatagcacttaaaatacaatccaaacactttgctttggtcttcaagaccttgcatggtctacccactccctacctcttcagtatcatctcataccattcctttcctgtctgttcactcctacccactctgctccagcctccctggcttatttttgaccctcaagcatgacaaactgtttcccatcttaggactttcagggccttccctctgcctggaatcctctccccaaagctggctccttcttatccttccgacctcaagttaaatgttatcttctcagaaaggcctccctatccactctattacttgctgtcatatccccttgtatgcttcttcattgaacttctttcagtctgacattatcttatttatttatttatttgcagacgtgtttgcactggctgcctctaacacagttgttcttaattcaggctccaggatggcaagttgcctttagttgcactcag

SEQ ID NO: 487124 - DNA, 533 bp, Homo sapiens
gcagtgatcttgttaaagcactggtaagattctgtcattttgctttacatcactcagtggctctccatagcacttaaaatacaatccaaacactttgctttggtcttcaagaccttgcatggtctacccactccctacctcttcagtatcatctcataccattcctttcctgtctgttcactcctacccactctgctccagcctccctggcttatttttgaccctcaagcatgacaaactgtttcccatcttaggactttcagggccttccctctgcctggaatcctctccccaaagctggctccttcttatccttccgacctcaagttaaatgttatcttctcagaaaggcctccctatccactctattacttgctrtcatatccccttgtatgcttcttcattgaacttctttcagtctgacattatcttatttatttatttatttgcagacgtgtttgcactggctgcctctaacacagttgttcttaattcaggctccaggatggcaagttgcctttagttgcactcag

SEQ ID NO: 487125 - DNA, 533 bp, Homo sapiens
gcagtgatcttgttaaagcactggtaagattctgtcattttgctttacatcactcagtggctctccatagcacttaaaatacaatccaaacactttgctttggtcttcaagaccttgcatggtctacccactccctacctcttcagtatcatctcataccattcctttcctgtctgttcactcctacccactctgctccagcctccctggcttatttttgaccctcaagcatgacaaactgtttcccatcttaggactttcagggccttccctctgcctggaatcctctccccaaagctggctccttcttatccttccgacctcaagttaaatgttatcttctcagaaaggcctccctatccactctattacttgctgtcatatccccttgtatgcttcttcattgaacttctttcagkctgacattatcttatttatttatttatttgcagacgtgtttgcactggctgcctctaacacagttgttcttaattcaggctccaggatggcaagttgcctttagttgcactcag

SEQ ID NO: 487126 - DNA, 604 bp, Homo sapiens
attaggtgtcatgtatgtctgtttagctacaaggctctctctcttagcttttaggaagtcaggtgtgaggcactctgcctttacggtgtgtcactggggtaagaggcagcccaaatgagccattgtgtctgaggcagcaaggcaagcttgcctgtcacccagaaacccgcacaggacaggtggctgaaggaagtccagtgtatacaagggttgtggctgagagttcagggcattgcactgggctggaatgcccatcagcatgcccacacaacttccagaacctcaggggctcatgatacccacatcaccttstgggtggttttctcctcctcctggagatgggtcagctatagtttggtagaacctacaggcagggagttcacccccaagtttcctgggaagaacactggccacataaaagtattgaaaaaacgggtttagcacagtgctccccagacctggcacataattagaattagtagaggagctttggaaaaatactcattcctcgacatctccctagacctactgactcagagcctctaaatgagtaagtcctcaaagtctgtgccgttcaaaggcttcctagggcattctgaggtta

SEQ ID NO: 487127 - DNA, 600 bp, Homo sapiens
agttttggtgggaacaatattggtggccagaagaacatttaggaagcgtgttagtacaggagtctccaccatacaatggtggagaggtagggagaaaattcaggaggtaaaatttgcaactggtttgatttgggggataaaaggaaagaaaagattccaggataattcacaacttcttagatataggtgctactcactgatttagggaacagagtaaacagaacaaagggtgcagataatgaatttaacttggaatatgtgatgtttgaggtgtcctgtcagatgtctacatggagatrtccagtggacagttggacatttgggactgaatctcagttgtgagtcatagatgctgaagatagagacttgatggtgtcatcctggagtgagatgatgcctatggagagtatgttgagagagaagaacttctaggatagtatcctgagagaccaactgaaaacaaaaaaacccaggaagactgagaagtcatgggaagaactggagaagaaaaattggcaagaagaatgaaggcatgtccagctaagtcatgagatgctgagaaatgaggaaggtggagcctgaggaacatgctttcaatgc

SEQ ID NO: 487128 - DNA, 614 bp, Homo sapiens
  misc_feature (1)...(614): n = A,T,C or G
ctgtatgaaaatggctttcattttattcatagtaaatgagattttgaaacacatccaaacattttaacattgtgctgacaacaacaacaaagaaaacacccacacaagatattaataacttaaaacatataggcaaggactatcggttaattcataccattttaaatctgaatttgataaacatagaggcagatggtgttataatttttttctagaatgccaatgataatgtctgtgtgatacaagttaatctgttgtgaagactttacacattcaaatgctcagttyggcattaaagacttgtatatcatgaatgcctgcaatttgactctatttttcttcacactaggggagagtggatttagttaggctatgtaaggacagctggngtagtatgtagtaacgttacaatatcaatataatggtcctgggagaaattatagtactgctgggtcccaaccatctcatatggatcatggaacctgcagagaagacgtttctggactgtggaagagaagagtgttttgcctacttttcggttacactgaagaaggctacacagtagccctggggacaaccaccagactgtaatttccccacaaatgtagacactc

SEQ ID NO: 487129 - DNA, 530 bp, Homo sapiens
tgctcccttggcttcggcagctcctttcctctaacagtcattttagcacccttgcccctcccttggcctccctctctcctcttggcctcgtttctgggcccagcaagccgtggaaacatctgagattcctcttttgccttccctcttttaatcttatctgagacaagtccaggggtttaagcagacttctctaattatggttttagtctgtttaataaattaatcaggcacatcaaatctgctcctgctcttaaactctgacttcagtccatttttgcataataatagctcctgtcatttgcatttgcttttcttaattccaagcccctttcgttctctattcattgctctatatacattttcacaagctagattggcaagtattatttctgtttcacagatggagactctgggagatgttacaaattaagagttattgagttcctactgtgtgcactcactgtgctgtctgcttctatgtacacagtcccrcttgaaatccacaacctctttgtgaggtgtctattgta

SEQ ID NO: 487130 - DNA, 599 bp, Homo sapiens
gcaaagcgttgtgatagcattcactctcacctgtcccacctccatcctttaagggagacacggaattcttagcacaagtaacaagatgcagaaagatagacaggttaatcgaagcttttgttgtcaccatttgggagagaggtagttagtagtctcttccaggaaaaaaaaaaaattttgctcacgtggtttttttggctcatgtgtttccatttctggttgtattctggctggcccttttcacagccaggagcaaggctgagcaggaccctgagagtgctcaggtgcttgtggggtggggaagggggacagacggggcgtgggaaagatcttcccgagtggcttgactttcccattgccttatagttccttaaattatttatagtccacctgggagaagttatggagaaattatttatagtcaggttaatttactatgattgtgtggctttttaaaaatatgtctatttgttagtggctttttaacaataattacatgtctcagtctgttcttttagttttaagtaaagatgtctgtcttaacagaatacaataattttasgtaaatgggcaaaaattcccaaaattcagttatttaa

SEQ ID NO: 487131 - DNA, 503 bp, Homo sapiens
taactctggatactaatttcagcaaaaagtgaagcattcgtttggaggatgatagaaaggaagagaatgtataaaggagctcagtcttcattaaattattgaagaatgggatattgatatgaaaaacaaagactaggcaaaaaaaaaaacacaacatagcaktttcatgtgctctctctctctctctctctctcacacacacacacacacaaacacacacccagtgttcaaatgcagtcttccaggggctttatgaagtcatcagtgtttcaagttcctaccatatttctgttcccatattctgaaaattggcttctgtattaggtctctattgctgctgtaacaaattaccacaaactaagtagcttaaccaaaacaattagtatcttatatttctgtaagtcagatgttaaacaggagtcttactgagctaaacttaaggtgtcattggaattgcattcctttttgaggtgttaggagagaatctttttccttgcctttca

SEQ ID NO: 487132 - DNA, 503 bp, Homo sapiens
taactctggatactaatttcagcaaaaagtgaagcattcgtttggaggatgatagaaaggaagagaatgtataaaggagctcagtcttcattaaattattgaagaatgggatattgatatgaaaaacaaagactaggcaaaaaaaaaaacacaacatagcagtttyatgtgctctctctctctctctctctctcacacacacacacacacaaacacacacccagtgttcaaatgcagtcttccaggggctttatgaagtcatcagtgtttcaagttcctaccatatttctgttcccatattctgaaaattggcttctgtattaggtctctattgctgctgtaacaaattaccacaaactaagtagcttaaccaaaacaattagtatcttatatttctgtaagtcagatgttaaacaggagtcttactgagctaaacttaaggtgtcattggaattgcattcctttttgaggtgttaggagagaatctttttccttgcctttca

SEQ ID NO: 487133 - DNA, 665 bp, Homo sapiens
tactctggcttgagaaaattccaacaactccaaacagtatgtgaactctgggaagtgttcagcktacccttccctggtacttattctttccccagcagcttctctttgcctgacctcatgatgattactatttgtccaaagacttgaggggaatcctatacagatttctggaagtctttctttgcatagttacctcttctcttatactctactcggcaaattctagctgtctaggtgtccctgaactctaacgtctgtctcttcaactcagtgagaccaccgaattgtttcagtttccctttcctgtgctgcagtttagaaactgcttcgaggcagaaaaacagggtaattgtagcatttgctttgcttgtttctcttctcttgaggatcacagtcctgtgcttctggttgtcttatgtctgaaatagttgttttatatattttgtcaggttttaaaactgttttcagcagaaggctgatttgagcctatgttactccctgtggtggcaaacagaagtctcattatctttagatttgggaatgctattaattataaagttaatctctagtcgtcttcatgacatctcagtttagtttagttttagtatttattacgttatgtacttcaaagcagtcagtgcattggaaaggaccccaggcttggg

SEQ ID NO: 487134 - DNA, 574 bp, Homo sapiens
acgcagctggaggttattatcctaagcgaattaatgcaggaacagaaaaccaaatactgaatattctcacttataagtgggagctatacattggtactcatggacataaagatggcaatggtagatactagggactgctggagggcagagggaagagggcagagggagcaagggctgaaaagctaactattgtgttttatgctcagtatttgggtgacacgatcaatagtggcccaaaccttagcatcaccaagtatgctcgtgtaataaacctgcacatgtayccccaaacctaaaataaaagtgaaacaattagcatgtaaaatatattcctaagtaaaactgtaggaagaaatataaaatcctttaagcagagataatatattggaaactttttgactatttttgtttttatttacattttccctagtgtttactaatagatttggtttggtaactctcctttgaagataaaggtgtatcctgtctttcaatatgagaaacagtaaaatgagtcagcgatatatgatagaataatgtgaaaaagcaaagccaaaaatcatcagagaaattc

SEQ ID NO: 487135 - DNA, 630 bp, Homo sapiens
gaggccattatgctaagtgaattaacgcaggaacagaacactaaatgctgcatgttttcacttacaagtcggagctaagcattggatattcatgaacataaagaaggcaacaatagacactggagactactagagggaggacaaaggggtggggaaggcttgagaaactattgggtactatgctcactacctgggtggtgggatcagtcctaccctaaacctcagcatcacacaatatacccaggtaaaaaacttggatatgtatccctgaacctaaaataaatgtcgaaattactttctttaaaaaaagaaaatatatttcagatcgagttcccttagccattctttagagacatcttttaaaccacaagattactaatggtatgacttccaaaaactattatacgttaagtcaatttctccattatttaagtgaatatactcgtgggcattttataagtatattatcttccctgccctcttccccacaccttttttctctgtcccaacctctctaatttaccatctctttcaattaagaatttgtttccataggaagtataactgtttcacaaagtaaattactatcatgcactcgctcrcattgcggaaatattttccttcaggaaa

SEQ ID NO: 487136 - DNA, 487 bp, Homo sapiens
agcttcttgcatcatgttctcttgatggcattagaagtacaccactggggtcccatcgatgcagagtttgagatttaataggccacacccaagtgtgagacagtaaacaaggactatggccacayagtccaggtagagcttagattagcacccctaaatgagactaaaacattcaaaaaattaagcaagttctaccccatagaagaggatggaagataaccatgactgtctcagagactgttctgtgtagagaagggaaagagaagactcctggcagaattcttctccatgggctctccttcacaccggggaagggtcccagaagaccttaaagtcccaaatgtggttttaaaatggtctcaggtcaggagcaatcccagatatctgggacatgcaaacccaaatcctatgctgaggaatgtaccctaagcccagtcctcaaatattccctcagataaagttctatggaaatgagttcccaacaaaa

SEQ ID NO: 487137 - DNA, 343 bp, Homo sapiens
aatattgtaaactaaattgcacattggctgaatttatatgtatggcaggtaaaatatttgtgcactatccgatcatcacttgaagacagaatgtaataatctttaattcttctacatggtagaaatgtgaaggtcctcctggttgctgcagtatttccagccagtagcaatatatactttctaagtggagattaatgagtaattatgtcattttacaccatcagtcatggtgatggactgattccagattgctacagtaagaatgaagaggttgagtcccaccccttgcttatttgttgagattaactwgataaagtgatcaccaaagttgagtcctcctact

SEQ ID NO: 487138 - DNA, 582 bp, Homo sapiens
ctggggtgtaggtagttcaactcctgcaggtkgcttctctgcatccacagctttaacacatgtatttgctttcttccaagctggctggagcatgtgttttggacttccttttcttacacttggaaaaaactttctgctttacaggtctcatgtgatagggttaggcccacccaaataatcttatttgaagattaactgtgtcatatgacatagcataagcatagtaataaaatccattgtcctgacagtcctggagattatgcaggatatggacactcaggggagagaaatctaggagtctgttgtagaatacttcctactactctgtaggttacatttcagtcataattgaaaattcaggtttgattttgatttagttcagtattgataagctaaagtgatatggtttggctctatgtccaccctccaccccccgccaatctcatctcgaattgtaatatccacatgttggaggaggggcctagtgggaggtgattagatcatgagggcagatgtccccctcatcgttctgatagtgagtgagttctcataagatctgatggtattaaattgtggcacttc

SEQ ID NO: 487139 - DNA, 582 bp, Homo sapiens
ctggggtgtaggtagttcaactcctgcaggtggcttctctgcatccacagctttaacacatgtatttgctttcttccaagctggctggagyatgtgttttggacttccttttcttacacttggaaaaaactttctgctttacaggtctcatgtgatagggttaggcccacccaaataatcttatttgaagattaactgtgtcatatgacatagcataagcatagtaataaaatccattgtcctgacagtcctggagattatgcaggatatggacactcaggggagagaaatctaggagtctgttgtagaatacttcctactactctgtaggttacatttcagtcataattgaaaattcaggtttgattttgatttagttcagtattgataagctaaagtgatatggtttggctctatgtccaccctccaccccccgccaatctcatctcgaattgtaatatccacatgttggaggaggggcctagtgggaggtgattagatcatgagggcagatgtccccctcatcgttctgatagtgagtgagttctcataagatctgatggtattaaattgtggcacttc

SEQ ID NO: 487140 - DNA, 628 bp, Homo sapiens
tgtgagctggggtgtaggtagttcaactcctgcaggtggcttctctgcatccacagctttaacacatgtatttgctttcttccaagctggctggagcatgtgttttggacttccttttcttacacttggaaaaaactttctgctttacaggtctcatgtgatagggttaggcccacccaaataatcttatttgaagattaactgtgtcatatgacatagcataagcatagtaataaaatccattgtcctgacagtcctggagattatgcaggatatggacactcaggggagagaaatctaggagtckgttgtagaatacttcctactactctgtaggttacatttcagtcataattgaaaattcaggtttgattttgatttagttcagtattgataagctaaagtgatatggtttggctctatgtccaccctccaccccccgccaatctcatctcgaattgtaatatccacatgttggaggaggggcctagtgggaggtgattagatcatgagggcagatgtccccctcatcgttctgatagtgagtgagttctcataagatctgatggtattaaattgtggcacttcacccctggctatctctctctctctctcctgccgccatgta

SEQ ID NO: 487141 - DNA, 614 bp, Homo sapiens
cactgcactctgtgatctattaaaaatgataagcagataatcaaaactgcgatttcttttcatggttttactctagcaggaatggattccattctgatagtaattccagttttactgtcacatagaaggagatactttgcgaacctcaatgactgccaggtttagracagatattaagaaccacagtgtcagaaatgaaagagtacaacttcacagaatgtgttgtctctgacaggttgatagccacttaccttctccatcttttcttcctcaaggatagcagctgcttcccacagatacaccaacaggcaattccagcccctctctaccacacttaccatttgcaggtgcctgtggcttgtctatttacaaccttgtccctacacagcagaagcggaacccttcaggaagttctggattcatcctcagcaggatctgtttcacaaactattctccagtcccaccttccctccaggtattctgtcagtacttacgattcccagatcttcttttaattgtcacgctgttcgtcccctcacaaaatcaagtttaaactaaaaaaaaaaaacaaaaaaaaaaaccctcatacactcagtctgtgtcccctttcctga

SEQ ID NO: 487142 - DNA, 617 bp, Homo sapiens
tctgaataaacattagctcctttcccctttctctgactcaccttctcccactgcccatgcagaggtcttaatgccagtctattaattaatagtgagaaatcttctttaaaggacactgaccaacaccacttctttctacaatgtcccatagttggggatcaaggagttggaccatcaggatgagtgtttaatagaatcaataacagcctagtgcatccagagaaatgaacactatttatcagtgatcagagctcatacccctgagcctgggtcacagctttctcagttaataatggagaaaaacctccagtatttttttttttttttttttttagggacagagtctctctgtcacccaggctgcagtacagtggcatgatcttggctcactgcaacctccacttcccaggttcaagcgattctcctgcctcagcctcccaagtagctgggattacagatgcatrccaccacatccagttaatttttgtatttttttagtagagacagggtttcaccatgttggccaggctggtctcaaactcctgatctcaggtgatccacccaccttggcctcccaaggtgctaggattataggcatgagccaccacacctggccc

SEQ ID NO: 487143 - DNA, 545 bp, Homo sapiens
ctccttgcccctggggaaggccgtgtgactccagatgactccaaagaaatgtaaccagacaattgtccctgatctctattccctcagcagcgctggagaggacccttttcctgaggccgggcactgctgtcccagttgaggagggacaaatgccagggtttcgtgtgcacatccctggagaggggttggggccccacatctctgccagggtttacggcctctccttctcttgaatggataggattgggctagaaatcagaggggacctgggggtgccacaggattgggctccgggcctaggcctgggagaatgagatggggcctgcagatgggggttaaaggcccctcccccagcccaggaacggcaaaggagaagttggagaagragagcaataattgaacgcctgttatgtatggacgctgtgccaggcactggcagccgagatctgggtgagacccctcatgccccatctggggggcacacaggggcttcctcaaggtctgcacagaaggtgatgggcgctgagatagctgtgagcctagtc

SEQ ID NO: 487144 - DNA, 464 bp, Homo sapiens
ccatcgccatgagagcctgagtcagcaaaggagagcgttctgagggctcattagaggagaaatgccaagaggtgctgggctggcaggaagcagggcaggggttcgagggtggggctgaaagccctcctccctgggaggacctggcatctcgggccagcctggaggcccctggagaacgcttggccccgtagctaacctgtctagtctgctgacctcatccatgtcctcasccggcctggcccttcagtaataaacagtctcacagccactttacatctcaaatgccatcgcttttcaacccctttagacttctagtccacagtattcgtcaccatctcaactgtgctccgtggcttgctgggcgctcacaggctggggctgccgtggagaggcggtctgcagcccacgggttcctggagccactgcccagagcttcctgggctctgcactccttgctgtgcggg

SEQ ID NO: 487145 - DNA, 332 bp, Homo sapiens
tggtctagggtttagtgaggctgaggtccaaggtcaagcaaggccagagtctgaggcccagcaaggctgaagtctagggtctagcaaggccaagatccagtgagactatggtccagggttcagtgaggccaaggtccacagcctggtaaggccaaggtccaaggtccagtgaggctgaggcccagggttctgcatggctgaggtccatgatccagcaaagctgacacctggkcctagcgtggccactgctcagtgagatggaggaccagggtccagcctgggcagaggctgagacctgggaccgagcaaggccaaatcccagtttccagtga

SEQ ID NO: 487146 - DNA, 559 bp, Homo sapiens
taatcagataatttcgaattttatgaatactaatcagaacacaagctcctagtcaccactctgtatacttcttctgtatgccctaatgcatagaaagacaaacttctttacaaggcttttgaagtgacaagcaattgagattgcccttgtcttctatctttttgttttacaagctctgagtggttgaataatactcatttgttctcaaactttgatctgctattaaactgcttcaaagctgtgtgagagtgatatacatgtgtgcttgtatgtgtgcgtgtgtgctggtatgttatagaaactatatgagatgcctcaaatgtactatagttttggctgctaaaattaagaatatggccgattcttaattttcatgttttaatatgttgccactaggaaatcctagaattaaatttccaggaaccattatatgaacaaagaaatgtattaataccaagcatagtatattcacagtaaaagagagccattgaaattaccttaaaaaatgagataccyaaactggataactaaggatatttttctgatgtgagatttgtct

SEQ ID NO: 487147 - DNA, 592 bp, Homo sapiens
gctgctgtatttgaattagccatcttatctttgcaaattctcacatgtaattttaatcgatctgttaaccttctccattgctgcttcatttgacgtttcattaactgtaaaatatttttgacagtaggtcttgaaagcacmagatgagccctctgttgctccattgatggttaaatgtatgtgtgcctattttttttttttttggtaacgagaagtttcctgtggctcttttcactctctaaaaggccaggacctgcttcctctgaatctgcctgattcactcagttgttggtaggagaaattaagttccaagtgtaagagacataggcactgaaaactaaataatagttcttgtaactatttgttttttttttttttggtagagatagtgaagttcatttggtttttcaggcttcttttaggggacttgataataccaagtagccttaacacagcatatctaagttattaaactgcataggggcagagaagaatttatccagcaaaaggccagaaaatttggagttgttttcctaaatgtgggggattgtcctttatgtttgtccttgaattttaaattaaatataattac

SEQ ID NO: 487148 - DNA, 309 bp, Homo sapiens
aatctcactacttagacataatcactattactatttaggtgtatatccttctgaaaactcttgtatgcatccatatggacagacctatacacacaaaattagtcaacaacccactgcagatattgttttcttttttctttctttcctttctttctttctttctttyttttttttttttttttttttgagatggagtcttgctctgttgccaggctggagtgcagtggcgcaatctctgctcactgcaacctccgcctcccaggttcaagcgattctcctgcttcagcctctagagtagctgggactaca

SEQ ID NO: 487149 - DNA, 601 bp, Homo sapiens
tcactgacatgtgtttgggggctacatcctatgaatatagtgaataattaagcaccataatcacccttggccaagaagtgctcctggtatgagaggcccagaaaactggggtaacagcagactcccacctcccctctcactgcccggagcacaaatgcaaggagtagaaggatgagcagatcacccatactattaactgtgactttttcttttctctctcctgagtaagtttctttcctgtgagttaactgtgtgtgtgatgtcactttcctgccaagtagagggcacaagctctggagtcctctgatgccaatactgtatttgtgatttccctaagacttggtctccctatctctaatacagagagaatagcataagcttcttcacacagttggcaggaggattcagtgaactaagmcatgcagattgcacagaaacactgtgaggcacagggaaagtggtccatgagtatctactattactgctattattatgactccagtcagaggagacagcacgggtttgggcacaagcacaagaacaccaggtttaaaggatgttgagcagcacaacttgccagaggtgaagcctgtaaagtagg

SEQ ID NO: 487150 - DNA, 430 bp, Homo sapiens
ctgctgagaacaatgtgcccattcctgccgagtcatggaatctttactccaagagatggtaatatatcatcaagatcattctaaaagcttaatgcagtgagcatcacttaatacctgaataccaaaaagtgaaaataatggtttcatgtctaatgggacttgagttcacatgtcccctcagccacagggacttgtgctggcagacaccactgtcctctgctttggtatttctatcacttggactctagatataggtgaataaagccaacatggtttgttgtttttttttttgagatggagtctcgctctgtcgcccaggctggagggcagtggcgtgatctcagctcactacaagctccgcctcccgggttcacgcrattctcctacctcagcctcccgagtagctgggaccacaggcgcccgccaccac

SEQ ID NO: 487151 - DNA, 470 bp, Homo sapiens
cagtgcatccgccgtggtttacaaaggcaccagggaattgtttccctcagcatgtgagcgtaaaattctcagtcccaagttgaacccaaatgtgcaggaacaaacacctggccccaaatataatttcctcccgcagctcattgcagccccgaggaaatcaccgggggagggctcgggagtgcggcgcggcagccccrtaatttccagggcccttctcctacactgacacgtaattgtcagattgttttatgagagcagcttcctgcccgcttcctgcctggcttccaaatgtgctcattcccgaggaagcctcacttctccttctcgcccttaatcgctcctttcctgcccgccccagcccccaggctgggcgatttcctaaatcactcggaattggcttccagcgccggcgccccgggtgggctcccggagcgcgcgggcctgtgacccggaggtcagagatgcctccg

SEQ ID NO: 487152 - DNA, 591 bp, Homo sapiens
cctctcaaagtgctgggattacaggcatgtgctgccatgcctggccccaaatttcctcttctaacaaggatgccagcragattggattcgggcccaccctactggctccattttaacctttttaatggctctatctccaaacggattcacattctgagatactagagattagagttgataaatttatgggggacaccattcagaccataacagggaccaaatctagtctggccattgagacctaaggagaaatctactgggtgctactgggctggatttccttctcagatcagtaggcccttgtgaagagaagacttttgtctccctgcctggctctcctgcttgggacactgacacctggagctgtggcagctatcttgtactcatgaattgaaaagtataaacacaaaaaccctttatgccaggtgtggttaagctgaagaatgaatggaaagacctgcaaccttcacaaaattgttgagttgttgaatgaatcttcagatcatgcatttccagacttcttgttaagtaacaaataaaagcctttataggagttctgttcttgtttattaggttttctgttatagcagc

SEQ ID NO: 487153 - DNA, 556 bp, Homo sapiens
tgaaatattctgccctcaccagttgaaatctgcygatccgtcagacctcaacccaagcctcacctcctcatggaagctttccaggaccccctgttggggtcaagttcccctgccatgtggtttttcaggaccactcggtagaattgctgcttgattgatgtctatacccccatctagcctctaactttcatgaaggtgggggctcttgtcctcaggcactgctgtagcccagtgtctcacatgccctctggcacacaggaggcatccatgctgagctgaatgaacctgacatggccctcagtaggcccatcccaatcccctctccctttcctcttttcctccagcctcccttctcttatttacatttgcttccttcctccctcttcactctttctgttcattccttcttccctcttgggccttgggcctacttgttgctcccaatttgccaaacctttgcagcatgtgtaggccttcaaccagatcaccccagagccatggcctagcgggggaacctaggaatctggctttctacggggttagtctgttatggttg

SEQ ID NO: 487154 - DNA, 636 bp, Homo sapiens
gaggtaattgaatcatgagggtggttacctccatgctgttctcatgacagtgagttctcacaagatctgatgttttttgttttttgttttgagacagagtctcactctgtcacccaggctggagtgcagtggcacgatctcagctcactgcaacctctatcgcccaggttcaagcaattctcctgcctcagcctcccgagtagctgggattacaggcgtttgccactgcacccgactaattttttgtagtttttagtagagacgrggtttcaccatcttggccggttttataagggacttttcccctacttcctctgcacttctccttgctgcagccatgtgaaggacgtgtttgctttcccttctgccatgattttaagttcctgaggcatccccagccctgcagaactgtgagtcaattaaatatctttcctttgtaaattacccagtctcaggtatgtctttattagcgacgtgagaacagactaatataccatgaatcctgactacactaaaaaggttctaagatgacagttgtcgctattttctgttttatctccatgctgacacttgaaagaaggtactagaatccctctagccagattgctcagtttcttgttggtaatcaaacagcag

SEQ ID NO: 487155 - DNA, 580 bp, Homo sapiens
tgattttcaataatgagaagaggcataatatccaagaaaattttctaatacaaatattgtttagagagactaaataaaaggtgagactctccactgaaactggccaaaggaagatgcaaattaagaatttacccaaaatagagtaggaacccattttattagaagtaaagcaaaataaaggcttcaaccacccgaagtcgcataccagtgatttaattggaaaggtcttttcttataaagaggattaattccaattaacggaaaattcaaattatgtttataaacactaacaaaacattatcattccatagcatattacttgcacagcacctatcctataagacattttatgaaagacaaaggttcattcattttgctaattccctattttatagatgaagaaactgaagcataaagcatttagaaggctgcaagtttctagagaagctgaagaaaatctttcccttagtcctttgttcatgataktcctctaagaaaaaaaaaaaaagcaagtcccatgtagcacaaaatataaaaagtgaaagctttgtaaggatctattgcagcaaccctgaagaga

SEQ ID NO: 487156 - DNA, 638 bp, Homo sapiens
tttacctaaaaatcctagatttattttgtttcctaagtaagttgttttattccaatgttagctctccccctgcccccatttaaggtattcaggaatactgcagtcttttatttgtcaccaattggtatatatgaatactgatttgacattgaggaagggggatrtcatttttaatcagacctagtatatagagcacaatttatccaacagaatattaacatattaaagagatttagggcacagatgagagtttcttaaagtggcttttggcagaacagtgcctgaaatactaagattagagaaacccaattgctcctcttaaaacatactgctgtagatgagcctttttattactgcaacagagtttgtggaggacagagaccaaatttgtctttcgtaattaaataagaggaaattaaagccaactcatgttattcctgctactcatatgttcatagtttcttactttagatggatttgaccaggcatgaaactttaatataactagaatctagaagtacagaatgtcatgactctggatttactttgaaatttattcacatggccagcccaatttatttgttagtttctaaggctctctctcttttctccttttcagtttcatttctttttgagcc

SEQ ID NO: 487157 - DNA, 614 bp, Homo sapiens
gtggcctaacctatatttctaaaaaaggttgaattcattgccagcattcaataattggaaaatagtccataaaaatctgtattttcagcttctctaggaaaattggaaaatttgggctcacattcctgtgcggcaacaattagctaaactctagttcagctgcccgctttaagaccagccatttgtactctactgtacccagagggctttcctaatrgcgcctttcttaagtggctcctccaaagcagtggttcctaaaatctggcttcccactggaataatgtgaggagcttgaaaagttactaatgcctgcatttcaccccagagattttgatgtaatccatctggggtgcagaccaggtattgagatttttataagctcctcaggtatttgcaatgtgtagagaaaactgagaacccctgtctaagatagggcttctcaaagtttaacttgcataggaatcacctgataatcttgttaaaatgcagattttgattaagtatgcctgggatagggcctgggattctgcctttctaacaagctcttacatagtgccaaagctgctggtctatgggcctcacttgagaagtaaaggtctaagccatttgtattt

SEQ ID NO: 487158 - DNA, 702 bp, Homo sapiens
tacatgtatacatatatacatgtagatacatgtatatagatacatacatagatatatagatacatagatacatatatatttatatatgtacatatatctacatatatatctatatatacatatatctacatatatatctatatatatatwtctacatatatatctatatatgtagaaatatatatatattctacattttagttctgctatatctatagggccttctgtatatcacagttttgtgtgttgttgtttttttttaagtgcattggtttggcacaaataactatagtactatttattatcctgagcttttttgagaatgtagtgatagggttcaacatctgcccaaattgacccatctaaaattataattctaaaaccataaccagaagaagcccattaatttctttagtagagaggtgagtagcctcttgtttatttcactactgatcatagtctattgtgagatatgaagatgtattagcccaccagaattaatcacctttgtctgaagtagtgaaagtatattgcttcattttgttaaactctgattccttacacaattgttaaggattgtgtttacttttatctcaaaattgttaccttttaatatatatagtcttatatcagtgatcttttcaaacttttaaaatgaagtctgaataaatattattttcttatgcatttcttctgcaccag

SEQ ID NO: 487159 - DNA, 513 bp, Homo sapiens
gctggtgggcctaccctgacagtacttagacagtacttagtacttagactgtgaatcctttaaagtacccttaactaggggtggtttccctgaaaactgtacaggtttcctaaatgatgcagtctgggtaactgcatagcttacatgatcatgtgaggggttaatacctagggtatagctgcattgatgacttttcaaaatttttgcttcttttaatacaaagggcctgaccaaaatttttgcttcttttaatacaaagggcgcatggaatcttagttctgtgtgcattgatattgagccccaartgggtttttgaggggatgtgaccccagaaaggttgctttggtaggactggagaaggtttactgtttatcctgtcattgtaacctttgtcaattttgtaactttggagtcatataagtcatccaggttcattaatttgaaggggattcttcccttatggttcaggtgagataggtcattttttcagaggcccaagattgggttgggatt

SEQ ID NO: 487160 - DNA, 591 bp, Homo sapiens
tgtggcttgtcttacacctaaaatttacaaattaatttgacatgtggaaactaaaagctaaaaaacttgccacccgatttttaaaagtctacttatagaataattttccccaaactatttatattataaaatgaaaaatcaaacaaattaaggggaatatataactctttcctgaatgtgagtagcatattagtgcatagtttaattatgtttaatatacagtttctatcatttccccagcatacartaggtaaaggatattttttactctgctgctttgaaaaactactgttgaaagatttattctgcacataacaaagcaaaaggacaagagtacttgaaggacttcctaattctctctgttgaggtatggctgggcaaggtgatgtcacatgcccataaacaatcataatcaacaatgtttacaaaataaattaagaaaagaaaagctgccacaatttttattataactgatatgccttaccttattctttttgagaaactaatgggcttatttactccatggaacaacataatcgaaattttcagagaagaataaatctcatgacatgaactgtactctttagcata

SEQ ID NO: 487161 - DNA, 616 bp, Homo sapiens
aagatcaaaaagttatcatgacataaacaatttgtgttgattagatttcactgtggagatgttgagatgttgagaataaatagtatttggctatagtgactctgtcatcatgtggattttaaatatctaaatatctgccatatataasatgccttcttttgcctctttgaacaattctttgtgtcactgatgattgctgctttattttcttgttatcaaattcacttcttcctattaaatagaaagttcccaggtgaatgaatagatctttaaatgttttttaaaaccacagtctaacaaatgcaccataaggataaacttgctcagatgaaaatattggtgagttatctcgaacttgccaaaatgggacttgtaaatttctttctactataaaaataaatgatgcacttgatgttgataatccaagaactgttttttatatttttaatattttttaaactttaaattgtgataaaaaagcataacataaaatgtactgtcttaatcatttctaagtgtacagttcagtagtgttaagcacattcatactgttgcacagctcatctccagaactttttcaccttgcaatactgaaactctgtatccattaaatgct

SEQ ID NO: 487162 - DNA, 671 bp, Homo sapiens
tgttacagctaggaatggaaaaatatgaaatggaaatgggccatcttattgtactacaaagtaaggaattgctcaaaaaatatcaggacatgtcaaataaaacaagcaaccagcctgcttgcaaactgtaggaaaatttgcacatccaaaataaattatattaatggagtatatccctttgcataaaaatccataaatcatacagataaaaataagtaaattggcaagaagggaaaactctaccttatagtagattgccaattgtagttctagtgctcattattaattattgtttgttttcattgtgctgatttttggtgatcaagcctcagtccccttcatagtgccctctcctttttaaaaattatgtgtgcacagaaaggccatctttttcaggacattgcattttcaggcttgtggtgataaataagattgaccaatgcaagtgttcataatgactttccattggccctgatgttctarcatgtgattgcttcatgcctggactgtgactttcagtgggagatggaagtttttcagagaaatgaactgtggaaaaatgtcctttccttaacttgaagctacttttaaaatttgagagtctggaccaaaagaagaagaatatcaggttgaagtcaagatgacagataaggtgagagtaatgactactc

SEQ ID NO: 487163 - DNA, 624 bp, Homo sapiens
caataatattttaactgatagttttcagcacttaatagattttaaaaatcaatcttttattccagtgattccacattgccatttcatcctccagcacttacatttttatttcaattaacaccaaagaaattgttagcacactcacctttatgtagcgcatgggttactattaaggttgaacacatccataagatgctctttatatttatgaacatcttggcctagaaatgaagaaaaacacaaagtaaatcacaagcattcaggtttaaagtgggtcataaatcacatgctttttgtgcattgtatgtaataagggtagtattaagcattaagtaataagagtagaagaagtagctcctcttggactataaaaacaggagtaaacttgtaatagcagaagctatctcaatgctttaattattagtttgaatctcatccaatgcagccattaccaaaatcattccagaatacagtttgggaacatataacaatgtggatgtgtgtgacaaccacaagtgagtaggctgtatgaagaacaayagagaccacagttcaagtaactagtggataggagctggcacaaaaagaaatgggtgaccacaaagtctatttagaaacagacag

SEQ ID NO: 487164 - DNA, 646 bp, Homo sapiens
cactttcccgtccgacgcccgccctgaagttgaggaagtttaagttttggattaggagcccttcttttgcaatatcctggggcggggccctagcgttgggttcaagtggtcatgggttttgagagcacggtatgtgtattatctttcttaaagacgcccagggtggcgcgtctagacctccgaaacctggctccacccyggccatgtgcgttcgtccactaagcggcgaactggacccagggcgccgcgtgcgttccagccgactcgcgagaaggcatctctgcactttgcacagaccaagaccttttttcagggtcctccaaactcctagatgtacgccgcagattgtggagtgcaaaatgaatgacttaagggaaaactagggccttccatccttgaacacaaggttgtgaaagatgctcgcttggtctggggggcttgtttttctccgcctgtgcgggacttctccatcagggggcgcccacacccgccgcaaaactcccaattcctagacatctaggttctgcaagtcttgtgagctgaactgggggcagatccgaaggagcgcaccgcctccctcgctcctccctccctgctgccttggagcacgggaaaggcagggatttcacactagccattcatttgt

SEQ ID NO: 487165 - DNA, 625 bp, Homo sapiens
agaaggcttctgtgtgtgtcagaagaacaaaaaattgcagttaggcatacacattacaggggaaagagctttctagtcaaacggatatctaacttggttatctgcttccgtatatgtctacatacatacatacttatactatatgtacatgaatgaatgacttacttgaagactcatagccagaacagagggtggaaaggagggcggagagtggtggggagagcggcacgcagagtgcctggggaggtcggcaacagccagaccatgtggcagacttgaggttttatcttaagtacaacagcaatagcaagccagtggaaggtttaggcaggggagttacactttcagatttgtgtttttaaaaattcacttgtgcttaagtgtagaggatggtytggatggggcataaggaaaagagaagttataaagttatcgcaataacatgagtgaaggttttgttccttgatgatgccaaattttagcagaattctgggtacctgcagagactcactggagtaaaggaacaggaaacaaatttgatagaatgcaagcggcataactcatgaaaaatcaggaaatcgctttatactgaatgtagatgagtgagtgcccttggcttactgcg

SEQ ID NO: 487166 - DNA, 611 bp, Homo sapiens
tcttgacaatgtcatttattcccacagaacctcaatgacaaagactctcaaacaaattacctgttcccaagctacagactcattctttgaatggcctgatagacatcatttggacattttactggtatctcacacttaccatttccaaatctaatggattatctgtgattcaccccacctccagcccctcttcaaataagctctagtgcctattttccttatttcctacagtagcacacaattactcagtcactttatactttaacycatggagcatgtacagctcttaggttcttctccattcctctctctgacatgcctctgtttaccaaattcttagagtacagtcctatagattctgtgtctaaattgtttctggtaagtattttctcctgtccacattcatgaccataactcaggctcttactattttttgtctcataatagctttgttactggttgtcctgcttcaaacattgttcagtttatcatattcttgcagaagaatttttctaaaccacagacaggaacatattccactgcacaactttcaaagactgagtactccccattgcctgctgattgtatcagaaaatcttcagcccagaatc

SEQ ID NO: 487167 - DNA, 551 bp, Homo sapiens
gctggtagaccacactttgagtaacaaggttctggggaaaatgtataggtaaaccagctagtagttacatggaggtattgaagaggcagaaatcgaggccctggccctctgcaaagtactaaccccaatatctgtcattcagccattatagttttatgcctttgtctcaggaattatttgttaaaatgcaagtattcattgatgaaaccatgcattaagtccagctaataccatgatcttcagtggtaccttagcagagatcctgggctatcaggaaggttgcagtatggcayttcagaaagaaatgctattcaacaataaggaatattagataagaatgcttttagttgcaattaacagaaatccaaattacgagtgatttaagcaatgaatacatttactcatctcacctagtaagaagtctagcagttcaggactctgtcatatcatatcatctaggttcattacacccttgattctccatctttggttcttggctttttatccttgtgcttattgcctcgtggccccaaaatggctgctgtggtttc

SEQ ID NO: 487168 - DNA, 608 bp, Homo sapiens
aattatgagtccttttcggggaggagaagggggaaaatctttccccaggggcacattttttaaagttcctctttctatttgaaatgcttcctgacttgaagccttgcaagaatttcacaattagatgggtgcagggaagaacagttctgcagagtagcagaacatttcttgcaaattaaaaaattatttggttctgtcgctaaccttattcaaaactcactcaatggtttacaaaatgccggttcctcttagttatttcttatcagtgttcttatgcagagaagtgtataaaatacactgtataaaattatgaatgctaattgcaagattttcaggttcttaatattaacaaagatacatcataagccatctttgttaatcagcaaattaaacctattacaccaagtcgacttctaagatktgtcaaagtataattatttttaagttaaaaacttaactctcataaaacatatagtgagcacatgtcaaagatttatttaactcaacgagagaagaagcagaatgacaaagctggaataaagaagagtatgacaaccatcacgtggatagtcattggaagtaattctgaaataagagtgcaaagttag

SEQ ID NO: 487169 - DNA, 608 bp, Homo sapiens
aattatgagtccttttcggggaggagaagggggaaaatctttccccaggggcacattttttaaagttcctctttctatttgaaatgcttcctgacttgaagccttgcaagaatttcacaattagatgggtgcagggaagaacagttctgcagagtagcagaacatttcttgcaaattaaaaaattatttggttctgtcgctaaccttattcaaaactcactcaatggtttacaaaatgccggttcctcttagttatttcttatcagtgttcttatgcagagaagtgtataaaatacactgtataaaattatgaatgctaattgcaagattttcaggttcttaatattaacaaagatacatcataagccatctttgttaatcagcaaattaaacctattacaccaagtcgacttctaagatgtgtcaaagtataattatttttaagttaaaaacttaactctcataaaacatatagtgagcasatgtcaaagatttatttaactcaacgagagaagaagcagaatgacaaagctggaataaagaagagtatgacaaccatcacgtggatagtcattggaagtaattctgaaataagagtgcaaagttag

SEQ ID NO: 487170 - DNA, 507 bp, Homo sapiens
cagcaagctgggaggcgagcgggcacccacctgcmagccaggttcagttctgcctctggccaagcaccgactgcccatctccccaagtccctctgtagtcatgagacgggggctaaaaggaggatataattaaagggtcaggaagtaaggagagagtgtggtgtaaactgaggaagcaaacaggtcaggacagtaggtctgaggggaaaagtcacctgggccattatactataacaaaatgaaaatctagatgctttattgttctcagtagtttaaaaaaatatgttttgggaacaactatttttatagagatgagaggggaaacatacactagaaaaatctttctcataggaatgagtttgtttgtcctttttaaacaaacaagccaacatgagttagtaatataatcttgcagttaaaaaccaacaaatctccaccaaaaaaaaaaaaaacagcaatatgatatatttctgtccatcgttttagccctcttgggtgacagaggaa

SEQ ID NO: 487171 - DNA, 507 bp, Homo sapiens
cagcaagctgggaggcgagcgggcacccacctgcaagccaggttcagttctgcctctggccaagcaccgactgcccatctccccaagtccctctgtagtcatgagacgggggctaaaaggaggatrtaattaaagggtcaggaagtaaggagagagtgtggtgtaaactgaggaagcaaacaggtcaggacagtaggtctgaggggaaaagtcacctgggccattatactataacaaaatgaaaatctagatgctttattgttctcagtagtttaaaaaaatatgttttgggaacaactatttttatagagatgagaggggaaacatacactagaaaaatctttctcataggaatgagtttgtttgtcctttttaaacaaacaagccaacatgagttagtaatataatcttgcagttaaaaaccaacaaatctccaccaaaaaaaaaaaaaacagcaatatgatatatttctgtccatcgttttagccctcttgggtgacagaggaa

SEQ ID NO: 487172 - DNA, 611 bp, Homo sapiens
tgtcaatgatatttgggttgtttctacttttttactatgataaacaacaccatgaacatttgggtatgtgtcttttggcaaacatacgtacacatccctattggatatgtacctgggagtaaaatctcagggccatggggtataygggagttcagtattagtagacattgctaaatagctttttttcaaagtagctataacaacagtttaagtgtaccagtaatttaaacgtttttctttctgtgacaatttctctgggaaaatgctttctgcaaggtgcaagtacagaagtgtttatgaacacatctgctccatcatcctcttttccttcctagtcccaccctccattcatctataacattgactgactgaggaggtgggggcttggattgctttgtctgacataacttcagagcagagcaggagtgtgtgcatattagatatgcagtagcagactgacctgtaagggaaggtcccactttatgacaggatggatcccccttgacactcctgtgatgcctcgcccccactagtcaatcctgggctacccaggacactagggaaaccaccctggtcccctggccactgccagcttcctgtcgtctaaagcc

SEQ ID NO: 487173 - DNA, 611 bp, Homo sapiens
tgtcaatgatatttgggttgtttctacttttttactatgataaacaacaccatgaacatttgggtatgtgtcttttggcaaacatacgtacacatccctattggatatgtacctgggagtaaaatctcagggccatggggtatatgggagttcagtattagtagacattgctaaatagctttttttcaaagtagctataacaacagtttaagtgtaccagtaatttaaacgtttttctttctgtgacaatttctctgggaaaatgctttctgcaaggtgcaagtacagaagtgtttatgaacacatctgctccrtcatcctcttttccttcctagtcccaccctccattcatctataacattgactgactgaggaggtgggggcttggattgctttgtctgacataacttcagagcagagcaggagtgtgtgcatattagatatgcagtagcagactgacctgtaagggaaggtcccactttatgacaggatggatcccccttgacactcctgtgatgcctcgcccccactagtcaatcctgggctacccaggacactagggaaaccaccctggtcccctggccactgccagcttcctgtcgtctaaagcc

SEQ ID NO: 487174 - DNA, 611 bp, Homo sapiens
tgtcaatgatatttgggttgtttctacttttttactatgataaacaacaccatgaacatttgggtatgtgtcttttggcaaacatacgtacacatccctattggatatgtacctgggagtaaaatctcagggccatggggtatatgggagttcagtattagtagacattgctaaatagctttttttcaaagtagctataacaacagtttaagtgtaccagtaatttaaacgtttttctttctgtgacaatttctctgggaaaatgctttctgcaaggtgcaagtacagaagtgtttatgaacacatctgctccatcatcctcttttccttcctagtcccaccctccattcatctataacattgactgactgaggaggtgggggcttggattgctttktctgacataacttcagagcagagcaggagtgtgtgcatattagatatgcagtagcagactgacctgtaagggaaggtcccactttatgacaggatggatcccccttgacactcctgtgatgcctcgcccccactagtcaatcctgggctacccaggacactagggaaaccaccctggtcccctggccactgccagcttcctgtcgtctaaagcc

SEQ ID NO: 487175 - DNA, 611 bp, Homo sapiens
tgtcaatgatatttgggttgtttctacttttttactatgataaacaacaccatgaacatttgggtatgtgtcttttggcaaacatacgtacacatccctattggatatgtacctgggagtaaaatctcagggccatggggtatatgggagttcagtattagtagacattgctaaatagctttttttcaaagtagctataacaacagtttaagtgtaccagtaatttaaacgtttttctttctgtgacaatttctctgggaaaatgctttctgcaaggtgcaagtacagaagtgtttatgaacacatctgctccatcatcctcttttccttcctagtcccaccctccattcatctataacattgactgactgaggaggtgggggcttggattgctttgtctgacataacttcagagcagagcaggagtgtgtgcatattrgatatgcagtagcagactgacctgtaagggaaggtcccactttatgacaggatggatcccccttgacactcctgtgatgcctcgcccccactagtcaatcctgggctacccaggacactagggaaaccaccctggtcccctggccactgccagcttcctgtcgtctaaagcc

SEQ ID NO: 487176 - DNA, 638 bp, Homo sapiens
gctggcctggcccttgacacacgggtattattacaattcagagtgagatctgggtggggacataacaaaaccatatcacattgcaatcatgtttctcacttgagaaaacctagatggtaggggcagtgatcaagatcagaatataggaggttcagaatattactttttaatttattgtgtttaacattcccaaatgaaaatcaggtagaagtctctgttaggcagttagcaacaagaccatggagctttggaaatagcaaatatagatttaaaggttgccagcataaagatagtagttgaaatcaaagagaaactttaaagtgagaatatatagagcaggatttcttaaccttggtgctgttgacacttggggatggatgattctttgtgtgtgtgcagggaggaggggggtgctgtcttgtacattctaggatgtttagcagtaccatggcctctacccaacataggtgccaacagcaccttttagttgagacaaccaagaatgtctccagatagtcccaaacttcccctggggggcaaaatcrtctttccttgagaaccgcaggtatagagtgaaaatggtagagagggaaacttgggcaaatcacacacacacactgagcctcagtttctgaatc

SEQ ID NO: 487177 - DNA, 673 bp, Homo sapiens
ctggaaaaaaggaataaagtactgattcatgctacaacatgaaaaaccttgtaagtatgcaaaagaaaagaagcctgatacaaaagaccacatatcatatgattctatttatgtgaaacatccggaatagggaaacctatagagrtagaaagcagattgctcagggctagggagatgggaggggagataacacagggtttctttttgaagtcaagaaaatgttctaaatttgactgtggctatacactctgcggatatactaaaaaccaatgaacttatactttaaatgggtaaatcgtatggtacgtgaattgtaactccgtaaatctgttaaaaagagagtgctagggggagatggaggcagattccaaggaaagagaggtcagtgtgaggccctctacccagagacacctaccacctccatgacgtgggcgctccacttggatagaagctgcagaccccgcagggctaggtcgaagagctcgcgatactcctcgtctgacttctggctgtccagccctgagcccgtcaccacctggggagcatcaggtgtcatactcatggtctatgtgcctgacacttttatatgttatctcattgattcccccaagaacactgcagggaagtgctattattacatccccttgacagataaactgaggctcagacaagt

SEQ ID NO: 487178 - DNA, 540 bp, Homo sapiens
tcaatagatgcaggaaaaaattacatctgtgagcaaagaagctacacagatgacaggcacatgaaaagatactcaacatcatagtaattgagacaattcaaattaaaacaatgagataccattcctacctattggagtggtaataaaattacacagaatgatcatacccagtgttggccacaatgtgcagaaactgaaactcacaccctgctgataggaatgtaaaagagtgtaaaaatgtaaaaactattttggaaaactgtatggcagtttctttaaaagtaaacagtcacctaaygtatggtccagccatcccactcttaagtattcaccaagagaaaaggaactgcatgtcttgacaaagccttgtacctcaatattcatagaagcctcattcagaataggtgaaaggtggagaccgcccagatactcacaacagatgagcagataaacaaaccgtggtgcatccacgcatcaggcgctccatgacagtcaaaaattaactcttcgggcaggcagtgaagggtcgtcacacagcag

SEQ ID NO: 487179 - DNA, 540 bp, Homo sapiens
tcaatagatgcaggaaaaaattacatctgtgagcaaagaagctacacagatgacaggcacatgaaaagatactcaacatcatagtaattgagacaattcaaattaaaacaatgagataccattcctacctattggagtggtaataaaattacacagaatgatcatacccagtgttggccacaatgtgcagaaactgaaactcacaccctgctgataggaatgtaaaagagtgtaaaaatgtaaaaactattttggaaaactgtatggcagtttctttaaaagtaaacagtcacctaatgtatggtccagccatcccactcttaagtattcaccaagagaaaaggaactgcatgtcttgacaaagccttgtacctcaatattcatagaagcctcattcagaataggtgaaaggtggagacmgcccagatactcacaacagatgagcagataaacaaaccgtggtgcatccacgcatcaggcgctccatgacagtcaaaaattaactcttcgggcaggcagtgaagggtcgtcacacagcag

SEQ ID NO: 487180 - DNA, 574 bp, Homo sapiens
aatgataatgaaactatacatacaaactatcacacaactataccttttaagaagtgacatgattaggatggtgaaatggagttttcagttctcaaactcccacagaaacactaattttaacaactaccatgaacaaaagtatttttgtaggagtctaggaagccacttgagaggttccaactggttggtcaggcaaaaaagccaagaacagatgcatggaggaaggtaagaactgtttccttctacccgcctcactgctcttcygaggtaactcagtgccaagagagactccctcagcccacaatttttgccatggggaaagtgagagcaaagtgaatgtccagattccccaggcttgtgggatgctgcccaggaaacccatttctgtctcacttaatgcagaacactgaggggaccatgtggctgaatcatctgggggcagctaggagtagggaaagaggagggggcttatggcagccagtgcatggacctgaacaacaagcagcagaacctactggccagcccctgcactctactagaggcccacctcacaacctgctgactacccaaccag

SEQ ID NO: 487181 - DNA, 507 bp, Homo sapiens
ggacccagtccctgacatcctgcacgtgtcctgaatggaggttttcacttttcctggtctctttggggccacagaagcacccactactgacatcagtatttctccatttccttggtggtgaggtccttgtgtttggacgsaggctggtcccactgtgtgggcctctctgggtctgctggtactggcagatcctgtctcccaaccagtactcaagggagcctctgggtctcctgaccactgcccactaggagcactgtctcagcctggcctcttggcctaaccacgacacgtggctatttctattttgcttggccatatgatgttgtagcagggacattctgcgagatggtttctgtattagtttggtagggctgctgtaacaaaatgctacagagtgggtggcttaagcaatggtaatttatctggaggctggaagtccgagatcaaggggctgtcagggttggcttctcctgaggcctctctccttagcttgcaggctgccacttt

SEQ ID NO: 487182 - DNA, 586 bp, Homo sapiens
tgcggaggaggaggctgagtggagcaaacaggaacaggaacagggcctgtggaacacaggctgagcagtgggcttgagggaggagagagaatgaggcgcaaatgaggagctggaatatggagggtaggggactgagaggtgctggagggttggctctactgccttgcagcaaagacaagggttttggctgagaatgagaagtcagcagaatatctgtttgtctgttgagtcttaaggtgatgactgggtggatgagccccaaagcagtattttggttcttaggctgcagtgagtgacccttctgtatgacaaaggagtttaggagtaaaaggcaaggtaccaatgtaaaagcaatacgggcctggctgtggtgactcatgcctgtaatcccagcactttgggaggccaagtcaggaggatcgcttgaagccagaagttcaaaacaagcctgagcaacaaagtgagacctcgtctctacaaaaattaagtaaagtaagtaaaagcawtatgatgcttattaaagtgcagactcactctctctcagttgtttggatttggtttaattaccagttgggatttcagcagg

SEQ ID NO: 487183 - DNA, 586 bp, Homo sapiens
tgcggaggaggaggctgagtggagcaaacaggaacaggaacagggcctgtggaacacaggctgagcagtgggcttgagggaggagagagaatgaggcgcaaatgaggagctggaatatggagggtaggggactgagaggtgctggagggttggctctactgccttgcagcaaagacaagggttttggctgagaatgagaagtcagcagaatatctgtttgtctgttgagtcttaaggtgatgactgggtggatgagccccaaagcagtattttggttcttaggctgcagtgagtgacccttctgtatgacaaaggagtttaggagtaaaaggcaaggtaccaatgtaaaagcaatacgggcctggctgtggtgactcatgcctgtaatcccagcactttgggaggccaagtcaggaggatcgcttgaagccagaagttcaaaacaagcctgagcaacaaagtgagacctcgtctctacaaaaattaagtaaagtaagtaaaagcattatgatgmttattaaagtgcagactcactctctctcagttgtttggatttggtttaattaccagttgggatttcagcagg

SEQ ID NO: 487184 - DNA, 595 bp, Homo sapiens
ctgggtgttgcagagatcacagagttcatgtgtccaagtctgtatctccaatgctgctcttccacaaggggcgcccattcagtggatgctaccatccctgcctwgctgctcaacccagagatttaggaatgtcctgcctgacttctcccagtccctcagccccatcttccaatccatcaatgagttctgtccattctacctccaaaatagaactcttctattctggaccacttttctccatctcaagggtatcatttcactccaccagctctgactcactgcagcagcctcccggaggcacctcccacttctttatttttccctcccacccaagggttcttgaagagaagtcctctgaccagcagcctgatcacctggaaatttgttagaaatgtaggttcctgggcctcccgagactgactgctcagaagttctggaggtaagaacaagcagtcttggttttaacaagcacccaaggtgcttgggatgcagctcatatttgagaacatcttccattctttttcttttttttctgagacggagtctcatcctgtcacccaggctggagtgcagcggtgcagtcttggctcactgc

SEQ ID NO: 487185 - DNA, 506 bp, Homo sapiens
ctgaaaacagcccagaaaaaaataccaggttttgagttgggcagaaagccttgctttggaaatgcarcatcgcctgcagggctgtgcaccttaaagccggccatcacttatgtccagtaggagttttgacttttggaagaaacaacttccttgtgagagatgaaaagataaacaattctgtgtaaataatagatatgctttgtataacgtcagaggaaagctcccaggagtggcagcttgggtaatcagatacctaagaaatttgcttcaagaaaacccttcttcattctgtaatctggacatatctgtttattcatttgatgcattgttatagtaaaactaggcagaactggggaagatgacaattttgaacaatgcatgatactatataattctaaatgcaactttacatgattggttatacagccacagcatttacttactacatgtgtttttaaggctataatatttctcttcagttacattttttatggttaacaaaatag

SEQ ID NO: 487186 - DNA, 614 bp, Homo sapiens
aacagcccagaaaaaaataccaggttttgagttgggcagaaagccttgctttggaaatgcaacatcgcctgcagggctgtgcaccttaaagccggccatcacttatgtccagtaggagttttgacttttggaagaaacaacttccttgtgagagatgaaaagataaacaattctgtgtaaataatagatatgctttgtataacgtcagaggaaagctcccaggagtggcagcttgggtaatcagatacctaagaaatttgcttcaagaaaacccttcttcattctgtaatctggacatatctgtttattcatttgatgcawtgttatagtaaaactaggcagaactggggaagatgacaattttgaacaatgcatgatactatataattctaaatgcaactttacatgattggttatacagccacagcatttacttactacatgtgtttttaaggctataatatttctcttcagttacattttttatggttaacaaaatagggggtcttgtcatttctatgaaaaattcagcatcgacacaattcccccatacaccaatattttaaagtacagatcactacaggtaatacccctttgctgaattacaaaccccc

SEQ ID NO: 487187 - DNA, 586 bp, Homo sapiens
gggtggccaggttttcatgccctatgcaaatgacatacttagccctaaccagtttttcacacctatgcaagtggaacacctggtccaaccaatcttttgtgccctatgtaaatcagacaccacctcctcaagctcatctataaaatcctctgtatttcactgcagaagcagcaacccatttctccgggacctcttctgccccaaagagctcttctctttcacctattagacttctgctctgaacctcactctttgtgtgtctgcatcctagttttctatggccatgagacaacaaatctcgggtatttagtccagacaagacaycacttcccaggcaccttccaatctgccctccacctttgcaccaatagcttcaactgctggctgctacatccatctagagcagttttcctgctatgcctccttcagaagtagcaaacattcatttgcgtagtatgctgaacacaaccaccttataaacttgtttaattctcacaacaaccttatgacttagtaccatggttattcccatttttcacttgggggaatgaggcgtggagaggttaggtaacttgctcaaggtcac

SEQ ID NO: 487188 - DNA, 553 bp, Homo sapiens
tctttaccttggccatgtggaccacatcctggtttgtcccgattcctgacctgcccctgatcctgcccctgcctgcctgctgtcctacctcagtccaagtggkggctgccttccaaagcaatccctgtctcagtgcaccataggtggtgatagggtcaccacctatcaagccagtagtcatgatggcaatatgaccccatcccctgaatcatctgattgcctcagggtgggcacctgacccaagctagactactgaggctctcttttgctgacatatagacctgggaggaaaggacctaatatccaagctcagacgctatgggatgggcattttctaccccctgtctggaccagactagcaaaggcaccctgcactagatgctggatgttcagaggtaaggtgcccgccccggctcaatcagttgggaaaggccctctgtctggcacccggagatgctggctgtgccttttcccatgggaaggagcagaagaatatgtagctgagagaactggctttggaattagacctaacatcctatttctacaattttca

SEQ ID NO: 487189 - DNA, 482 bp, Homo sapiens
gtttccaaagccaaaattagattctaaggtacattcagagaaatcattcttccatcccaactccaacctgttctcttccttctctcataaacgtttaattaatttttggcttatcctactagtgtgtcttttcacaaatataaccaaattcacacacacacacacacacacacacacacacacacmcccatattcatatttctctccctttttgcccccaaaatagcataataccattttatgatttggcaccttgcttttctcacttaacaaaatattctacagattattccatatcagtatatagaattcttccccattcctttttacagcacacattttgaagcatctgtgtggtccctttaaaaatattattaaggaagtcattaaaagcgataactataactcttggcagaatttagctagctaattctagcttatctacagcaaatgacagtttcaggatcatttacccattcccc

SEQ ID NO: 487190 - DNA, 482 bp, Homo sapiens
gtttccaaagccaaaattagattctaaggtacattcagagaaatcattcttccatcccaactccaacctgttctcttccttctctcataaacgtttaattaatttttggcttatcctactagtgtgtcttttcacaaatataaccaaattcacacacacacacacacacacacacacacacacacccccatattcatatttctctccctttttgcccccaaaatagcataataccattttatgatttggcaccttgcttttctcacttaacaaaatattctacagattattccatatcagtatatagaattcttccccattcctttttacagcacacattttgaagcatctgtgtggtccctttaaaaatattattaaggaagtcattaaaagygataactataactcttggcagaatttagctagctaattctagcttatctacagcaaatgacagtttcaggatcatttacccattcccc

SEQ ID NO: 487191 - DNA, 603 bp, Homo sapiens
gtctatgtaaataaagaaaatccaaattttccagagccaaattattctgattcaaaagatttctttgttaagtagcataacctacaggtgttttaaatgactgtttatggactgatgactcttggacagacttctggctgattgcacaggctgccttaatcacctctttagcctcatggtaacgcaaggccatatttcacaggcccargttttctaggctccacctagcactgtggtagcttttaccatatttgtcataaggtgaaataaagctgcctgggcgcagtggctcctgcctgtaatcccagcactttgggagaccaaggtgggtggatcacctgaggtcaggagtttgagaccagcctggccaacatggtgaaaccccgtctctactaataatacaaaaattagccaggcatggtggtgcatgcctgtaatcccagctactcaagaggctgaggcaggagaatcgctgaacctgggaggtggaggttgcagtgagctgagatcgcgccactgcactccagcctaggcgacaagagcaaaattctgtctcaaaaaaaaaaaaaaaaattcagttgagcttcattattcacagatttc

SEQ ID NO: 487192 - DNA, 489 bp, Homo sapiens
tgggtgtgggccgtgtcagtctggccaggagtttgggcagtgcctcctgcgggagcttgcagcctcagcccttcctgccggagaagccggtcagtcgccagctcaggctgagaccccacaactggggctagcagggccagtagctcgagaaggcccagcccagagacaaggccgccgggcttgatgagacttccgccgccgccatggccaccgtcacggggcttccgccatcgcgcctgctggaaaggcctgaggmgaggggagaagaggagacggcctttttagtttccactcaagttaatatgaagtaacagtcaaatatctcccacagagattctcccgggcaccattctggacacccttctcgcccaagccacccctccttggccttcctccaaaatgggagaggtttatcacatgcttgcacggtacgaagagccagtatttgaagagactggatctatagaaaaggggagataagtgttggag

SEQ ID NO: 487193 - DNA, 489 bp, Homo sapiens
tgggtgtgggccgtgtcagtctggccaggagtttgggcagtgcctcctgcgggagcttgcagcctcagcccttcctgccggagaagccggtcagtcgccagctcaggctgagaccccacaactggggctagcagggccagtagctcgagaaggcccagcccagagacaaggccgccgggcttgatgagacttccgccgccgccatggccaccgtcacggggcttccgccatcgcgcctgctggaaaggcctgaggagaggggagaagaggagasggcctttttagtttccactcaagttaatatgaagtaacagtcaaatatctcccacagagattctcccgggcaccattctggacacccttctcgcccaagccacccctccttggccttcctccaaaatgggagaggtttatcacatgcttgcacggtacgaagagccagtatttgaagagactggatctatagaaaaggggagataagtgttggag

SEQ ID NO: 487194 - DNA, 556 bp, Homo sapiens
tggtccccactgatggttctataaaagctccatattatatgaaaaaccagagactccatgaaataggcacagaagctcagtagggcaaatattattctcgtagccatagcagcactgagggtaattatattaccctggaagcttggtggaatcaagtctaatgcctgatctactccttagattataaatctcccacccttctctatgctctggatcaaaagggaaaaagctagactaacaatgaacagtaagtggggatgaattaatcacttggttgcatcactttaaaagccagcaacataattaaggttgtaaagaaagmggttaaaaattaagatttttaaaaacctttttaatttgaaacaacagcacaacaaaaacaaaaccaaaccctaaacctatttcttattttaggtacaatatgccattcaaagcccagattcaaaaatgggtgcagtacctttccaactcaacagacatcatcgagagctggatgacggtgcaaaacctgtggatttatttagaagctgtctttgtgggaggagacattgccaag

SEQ ID NO: 487195 - DNA, 546 bp, Homo sapiens
aattactagtgaatcattttactgattgtacttttatgctataaaatgcagtacatttgaaaatttttaggttatgtgtaagcttaattttgtaattaaacatttctttaacatgttaaaaaaagtctcccactattattgtgtgggattctaagtctctttgtaggtctctaagaacttgctttatgaacctgggtgctcctgtktcgggtgcatatacatttaggatagttagctcttctcattgcgttgatccctttaccattatgtaatacccttctttgtcttttttgatctttgttggtttaaagtctgtcttatcagagagtaggattgcaacccctgctttttctttgctttccatttgcttggtaaatattcctctatccctttattttgagcctatgtgtgtctttgcacgtgagatgggtctcctgaatacagcacactgatggatcttgactctattaaatttgccagtctgtgtcttttaattggggcatttaccccgtttacatttaaggttaatattgttatgtatgaatt

SEQ ID NO: 487196 - DNA, 546 bp, Homo sapiens
aattactagtgaatcattttactgattgtacttttatgctataaaatgcagtacatttgaaaatttttaggttatgtgtaagcttaattttgtaattaaacatttctttaacatgttaaaaaaagtctcccactattattgtgtgggattctaagtctctttgtaggtctctaagaacttgctttatgaacctgggtgctcctgtttcgggtgcatatacatttaggatagttagctcttctcattgcrttgatccctttaccattatgtaatacccttctttgtcttttttgatctttgttggtttaaagtctgtcttatcagagagtaggattgcaacccctgctttttctttgctttccatttgcttggtaaatattcctctatccctttattttgagcctatgtgtgtctttgcacgtgagatgggtctcctgaatacagcacactgatggatcttgactctattaaatttgccagtctgtgtcttttaattggggcatttaccccgtttacatttaaggttaatattgttatgtatgaatt

SEQ ID NO: 487197 - DNA, 359 bp, Homo sapiens
ctgtctcaaaaacaaacaaacaaatgaaaaaaaaaaaaggaaatcaaaatgtagcagtacttagtttatattttgctttaaaaatttagtatataaatgtctgaattttctgatgaggtaagagtgatartttgtctgcaagtggtttcttcatcttttggctaattttaacactacctaaaagctaagtattgggccaggggtggtgactcatgccaatagtcccagtgctttgataggccaacgttgggggattacttgaggctagcctgagcaacatagcgagaactcgtctctacaaataaattaaaaaattagcctggtgcagtggtgcatgtctatagtcccaactactcatg

SEQ ID NO: 487198 - DNA, 359 bp, Homo sapiens
ctgtctcaaaaacaaacaaacaaatgaaaaaaaaaaaaggaaatcaaaatgtagcagtacttagtttatattttgctttaaaaatttagtatataaatgtctgaattttctgatgaggtaagagtgataatttgtctgcaagtggtttcttcatcttttggctaattttaacactacctaaaagctaagtattgggccaggggtggtgactcatgccaatagtcccagtgctttgataggccaaygttgggggattacttgaggctagcctgagcaacatagcgagaactcgtctctacaaataaattaaaaaattagcctggtgcagtggtgcatgtctatagtcccaactactcatg

SEQ ID NO: 487199 - DNA, 593 bp, Homo sapiens
attaaatttcctttagatccatcaaatgatttaagcaaggtgcttcgaggtaaccaatttgagtaactcctttgagtaaccggggacagctctgcttgaatctctgatcagctttgttttagaaattctayaggcaaagccaaagctacaagagaatttgatctttaaggacttcacagggccagtccttaaaactgaccatttcttttcccgttgtcagccactgtcagaatttaacaaccgtggctgtgatttattaacgtgtctgattccctctgggggcagtcccatttttcaaggatatccaatgctccaagcagctctttgcacagtgaccatccatcagaggcacctgcttcagtaatcagcagctccagatatgctcatgccgcaccagacaatgctacaatctcctgggaactggcatgcagagaaataatggatttatagaaatacaccactgtgacaaagtgggaagacagattaagcagaaaaggcagggcaggctagaggctgaggaacatagggacagaattacaggaaaccaagccacacaacagtagctcttaacaggactgtagaatcttaatgca

SEQ ID NO: 487200 - DNA, 542 bp, Homo sapiens
atgtacagttttgttctgtgcctcagctttctttatgtgggatggacctaagagcacctgaatatggatgaagtggagagcaatgttgttctcatgccttgaccactctgaagtattaggctgaaccactaatgccctaacagaagttgaagggccgatttgatgtgatttattatgggagccaggaaacaggccagttcacccaccttgttaaatgctttcataatgccatatrccgctccttcattgaacaaatattaattatactacaatttgggtcactttttaattaacaactcacaacccaattagaatgcaggttcctggaggtgaagggttggttttatcattgaatctccaaacccagtgggcatgtctggcacaatgaaagtttattgagtaaatgccaatgacattaacttattaatataaatatcatctcatttgtatattatgtaattcatataattctatgtataactttatatataagtgctataaaaatcacatcattaaatataatacacacatacatacagaca

SEQ ID NO: 487201 - DNA, 518 bp, Homo sapiens
catcttccctaaacattatcccttggagcataaactgtactgttaatttctctgcaataaatacattttataacaacagaaacaaccacctcaaatttgtttctgtaaaatagcctcaaaagggtcatcttttgcatgttttcaaagtggagcactctcaagctagagtctgtgcctctgaactacttcacttatgtctgaagttatcacaagaaaatagatattaatagtttattgactcacaaagcatgtctaaggtaattcactgaagtgacccttacaagaacaaaggagaagcattgccctaagaaaaactgtcaagtttacccttagagaactgggaagcacatgtttcaaagctttagaatagctatttgatgatctctaygaatagccatcaaagattcaaaattactgaggtccatgcttctaggaacttatgagataattactgaaaatgaaaagacatttaaaaacccatatgaaaatatttcatcagatagaatctaaaatatcca

SEQ ID NO: 487202 - DNA, 559 bp, Homo sapiens
ctgatcatgggagtaaaatccattgtacttataatccttagggctatcaataggggataaagagtccagggaagcatcttagcattctgccaagcgttaagtacccactcgaaggtcttgttggtaacattagtgaagcagattattttcctgaccctttcatgggacccacgacaggggtgcgccttgcttagtcagcctgccattctctaatcctcacaggagcgagtgcctgagcaaacaagtgcaggaactggagtgaaaaagcactggaactggctggccacttttgggcgccagcaggaatgaactccatgcaagccctccagcagcatccaggcggggtgcctgcgactcctgaaggcatgttrtggtgctcttttagctctgctgtctgcagacatcttaagtgttaacagctcagtgggccctttgcctttctgcaggaggtggctaccctctgcaagggcaaagggaaagcatgacagccgtttcatctgcagtcatgtctcctgagctcttgtccagcatccaggaaaaatggggttgcaagaaggaa

SEQ ID NO: 487203 - DNA, 562 bp, Homo sapiens
tcctgctaatatgtagcagaggtgggcttaaatcctgcctaattctgaacatttttacttctgtgacctccacttacacagcagaatgtataaggtgatatttaaatgccaaatggtattattgataagtgataaataatgtcaatgagtgaaagtgcagataaataaaagcttcacagagcagatagaattttcttcaaagaagaaggaaaaaaatgaagtatttagtttagtaacaagggtgtaaaaatcacaaaacagaaaatgcggtatttctcagattgtattttgcaaaatgacctgggaaatattgccagtttgagagatgccatgtttctctagaattttgacaccgtatcaaaaaggggattttattactcctcttcttgaaactcactgtacctttgtgatcgctttaacaaataaaataaaaagaccagcaaaatcattagaagcttwattttttcatgtatgtgttacatagtgtgttaaggttctccagagaaacagaaccaataggatgtgtagaaatgtagagtgaaaggtttattttaagtttttg

SEQ ID NO: 487204 - DNA, 562 bp, Homo sapiens
tcctgctaatatgtagcagaggtgggcttaaatcctgcctaattctgaacatttttacttctgtgacctccacttacacagcagaatgtataaggtgatatttaaatgccaaatggtattattgataagtgataaataatgtcaatgagtgaaagtgcagataaataaaagcttcacagagcagatagaattttcttcaaagaagaaggaaaaaaatgaagtatttagtttagtaacaagggtgtaaaaatcacaaaacagaaaatgcggtatttctcagattgtattttgcaaaatgacctgggaaatattgccagtttgagagatgccatgtttctctagaattttgacaccgtatcaaaaaggggattttattactcctcttcttgaaactcactgtacctttgtgatcgctttaacaaataaaataaaaagaccagcaaaatcattagaagctttwttttttcatgtatgtgttacatagtgtgttaaggttctccagagaaacagaaccaataggatgtgtagaaatgtagagtgaaaggtttattttaagtttttg

SEQ ID NO: 487205 - DNA, 631 bp, Homo sapiens
tgaaattattatatttccaatacttcaagcttgatattaacatgctcgcagttaacagattgccgtttcaatgacctgtacaatttaggcaaaaccaacaagaagggcttccaaagaagagccttaggggaagcaggctgaattgcaaccaggcacactctttctatggtaaactataatgatgttaaatgggctcgagaatatatgagtaggaactttacacgttaaaaaaaagcatatttaataggaaagtatgactgtgtgggaaactgggagttcttatattcttttttttttttttttttttttgagatggagttttgctctgtcacccaggctggagctcagtggcacgatcccggctcactgcaacctccgcctcccaggttcaagctattctcctgcctcagcctcccaagtagctgggactacaggcatgtgccaccatgcctggactaatttttgtatttttagtagagatggggcttcamcatgttagccaggctggtctcgaactcctgacctcaggcgattcacctgccccggcctccaaacgtgctgggattacaggcatgaggcaccatgcccggcccttatattattaattaataaatgcatatgtgtgatccac

SEQ ID NO: 487206 - DNA, 615 bp, Homo sapiens
tcccctgcgttggccgaggtaggaaagtttcactttgccttagggtgataaattcactggctgctaatcacgatgggtcttgtgtgatatggcatctgtctaacaagagctagatgaagactgctatgtctttgacacctagtagacaactgaacagcctttagatagcaatgatttctgtcacagtcaatctaccacaaacagatggcaagaagtgacttagagttgaaaggtttcatcttctgcccctaatccctaagctatctggccctgtccccttcttcttttgacaaatatgatgtttcattctttatcgacgcgagacagtacatgtggtctctttatttaaatctgaagtgacccaggtaagcaattgttgagaagtttctttagatatatccaagctaaacagattaactwcatagtaccaggctactttttccctacaccatagaaaaacaggcagctcatggaggaaaataggagtatcaagaagagaaaaaacaaacaaaaaaataaacactgctaaaactcagagaatgtttacaagtaattccctaatatagaggtcatttcgttttcttgaatacatgaatattttataaactggtaaca

SEQ ID NO: 487207 - DNA, 626 bp, Homo sapiens
tgtaccgattacatagagctgtgtactctctgagaggcttttggaggaagatgaaatggacagaatagctgatgtgcctgagtgtctggaraggagacttgcataattcatgacaaatctcctgggatttcctaaggattacataaaaaactaagtgttatgggctgaatcaaatgtggaaatcctaatgcccaatacctcagaatgactgtgtttggtgatagggtctttaaagaggtaattaagttaaaatgaactaattagggttggacccaattcagtggtactggtgcccttataagatgaggaaatttgaacacagccatgaacaaagggaaaaccatgtaaagacataaggagaagatggccatctacgagccaaaaggcgaggcttgaaaagaaactaagccttctgacaccttgattttgaacttctagttgccagatatgagaaaataaaattctgttttttaagccactgagtctgtggtactttgttatggcagccctagcaaatgaatacacaaagccaaaaacaacaacaacaaaaacaaatcaacataattattaaacaaaatgttgtacaggaaaggaaaaggatttgagctaaccgtaattatgatggg

SEQ ID NO: 487208 - DNA, 477 bp, Homo sapiens
gtgggtagctatagaaagattttaaatcacgggaaaaacatggtattctggagactgaattggagtaggataagacctgaactaatgacaccagttaggagaaaagatagtgtggttatccaaaggactgtggtgatgtcctgaacaaagaaaggcactgggatccaggaggaacagggaaatagtagagscaaagttggacagattcataggaattggtgactagtagaatatatgggactgagctccatctttatggagcctaaaagattgttaagtgaagaatagaataggatttccacttttagggactacaagaaaaacaattttggtttgttttcctttttttttttttttttgttataagcctttctagcttcagttccaaaagcacagtgaatggaaataatctactttattgagatctttcctcctagggatttttgtggtgatatttaaatccatttgaaggtctac

SEQ ID NO: 487209 - DNA, 477 bp, Homo sapiens
gtgggtagctatagaaagattttaaatcacgggaaaaacatggtattctggagactgaattggagtaggataagacctgaactaatgacaccagttaggagaaaagatagtgtggttatccaaaggactgtggtgatgtcctgaacaaagaaaggcactgggatccaggaggaacagggaaatagtagagccaaagttggacagattcataggaattggtgactagtagaatatatgggactgagctccatctttatggagcctaaaagattgttaagtgaagaatagaataggatttccacttttagggactacaagaaaaacaattttggtttgttttcctttttttttttttttttgttataagcctttctagcttcagttccaaaagcacagtgaatggaaakaatctactttattgagatctttcctcctagggatttttgtggtgatatttaaatccatttgaaggtctac

SEQ ID NO: 487210 - DNA, 678 bp, Homo sapiens
tctgaagcccatttcccatgtggggtcctgcgtttcaccagacaagaactctggctcccctgctacctcttgggccatgtttctttcttagcatagcttcccagagatgtgcagacgccaggggagtggatccagccaaaacatgttcttggcagagatgccaagacagagccctgaaaaacaaaggaagtctagcagataactggctctttctgaaggaatctggagttttgactgcccacattgagctgttggcaccagcaggaatggaaactgggccttgcaaacagagtcccagcttgtctgtgcaccatggtggcctggacacagtcaaatcacagtctcccacacccccagcccagcacacacgcaggctgagtgaaggctgcatgcaggacatygcacggctccttttttgtggtgtggtctttaccagaagcccagccaaaccactgagaagggggcttagacacacaccgggagctgtgggctccaactaccagcgaggtctgctccaggccagggagggatgaggggatttgttgtgatttcttcacacacacactctttatatttatccaagccacagataagaaacaatccttctaaacccagggcagtaatttttattttttttatttttttttgagatggagtcttgctctgtcgccaggctgg

SEQ ID NO: 487211 - DNA, 620 bp, Homo sapiens
tacatatctgttctaattaatgataactgcattgaaaactaagcaaattataaaataagacaactaatcactaacttctaggaaaacaaaaaatgtacaagacagaaaaagcaagagtatatatatatataaaaacatggttccatggtgagcagtgtttacatagtcctaattatgtaaacactgattattgatacattctacattatcatataaatatactgtatcgagacaataaggggatgagaagtgggcttgtaggagggggttgatgccataaaaaaagttaaatcttgattatttagttttagccattatggagaatgaactagcaatataagcatgttactcagaaatatgaaggtaagtatcaaaaataagagttaaaattgctgcgtgtggttgcctctgggagctgtaatggtctgggcatagaggattgctcttggttttggtaattagtctgtggactatataactaataytatgtgcagctacaactttcataaaataaatactaactttagtaacacaaaaataaaaagaagacactgtgtgattttacgttgtgttttgtcccctttctgccacgatgacaggagggcaggtggcttaaaatg

SEQ ID NO: 487212 - DNA, 422 bp, Homo sapiens
gtaaatgcctttaaatacagagtcccagatgcccctcctaaataatctaattcagtaggcctggtagagggcacctggtctgcaagcctcagtggttctcttgattaggcaagcttgggaaactacactaaaatcctgattctcagactgtactgtggaaaggactcattgcgcgaatggtgtggggaggggaagagggagggcagtgaggtagtagatgtatcaaatataaatgtgtttccataaaatgtaaatttctgggcttcatattctgaaatcttgatagtcttaataaaattcccaagtttttctgatataagtggtctgaaacaattgttataatacttttcattaaattatgttmttttgttaatgtacatgcagagtagtgccctgtatctatagatatttattaaacactt

SEQ ID NO: 487213 - DNA, 219 bp, Homo sapiens
gaatatgggctcagttacaccaacatgttcaggtaggaggacttctttttttaatacttgaattctacatactctcacataatggtcattatatttttagtatccagtkattgctttttgccataatgtattttctcagataaaaatttagtcacatcttaaaataaacttgcattttactaatcaaaactgcatctataggacttgaaaaatagtaat

SEQ ID NO: 487214 - DNA, 500 bp, Homo sapiens
tggtctgtcaacttctctagccagtgcctggrtccacagctcactgctgccggttgccctgcgttagccgcattgcgggggagacaggagaggcttgaaggctttttatattctactctcttctgaagaattcacaagttagcaagcactcaaccactactaaccagaaggtattgccaaccataacaaactacacccatcaacaaggcctccctcatattgcaatcccagcagaaaatgatgcaggaaaagcactccccaaatcttggttgcctgccacccaagttcttatgccaagatatgtgtttagccagttctaagatgctgccaccttttcatgtgtccaacactaggctttctaccatagttccctccacccagaatgtgttacttggctcctacaaatgcaagaggaagtgcccttccctgaacagaaatcaaaacacagggtgaaaccacgacttgttttcaacaggcctcctgttgtgagccctcccagc

SEQ ID NO: 487215 - DNA, 573 bp, Homo sapiens
gccatttattctaagtccagttctcttaaacattataaacacatgaaatataaaatattttatataccctaatataaaattcatataaaatgttaatattgttgcttgaagtcctcaaatatttttatatgtaattccaaatctttccagttccaccaaggaaaccactctataaccccacacaatatttacagctaaccttttcagctttcttcttcttgcattagatcaaacaagggtctgggaggcttggcaaggaccagaagaccgtggtggttgtatgcagtggacaacagagctttaaggagatgacctctgccctctaagttcaagttataaatgtcctaattctattgtctgctcaaagagattgagacttgtatcgggattagtgttgattaaagtctcttgaaaaagatattgatgtattttaagaagtaaagaaatgcaaaatcgaaagagraacttgcattctttcagatctgtcagtcctttggccctaagaatagtaacacgctctgtggtggaactgtgcacagccctcatggcttctccaatcagtgagtcattcag

SEQ ID NO: 487216 - DNA, 227 bp, Homo sapiens
gctgacacacactgagatgaattttacctccatgtatgctggcctctactgacgaccaccatggaccaaacagctctgcccaggaccctgctatactgtccaggagcctttgtggaatcactaagagatgcctcttcctccaagttgaaaccaccccacacagggctccaacttgragaggtgagcagaagggaagaactgcagcttttgtttgcttccagatccag

SEQ ID NO: 487217 - DNA, 651 bp, Homo sapiens
ctggcaaaatctatattattagaaaatttctttgataaaattgacactaataaaatatctgaaaatccacttttctcacgccaaaggatatttgatgaaaatgaattatggtaacagttattcaaaatgtacaaaagrttgaaagataatattttatttatgattaattcataagaaaattataggagatttatttcagatatttggaagtagttctgtgtttgtattcctttttcaggtgcaaagtcgcaaaattcttctctccattctgatacatttaagcacttttatgatggctctcccctttacatgttctgcttgtattcttggtcttttcaagactgaacaaataaaattcatttaccaattgtcacacatccactgttccacactgaactagaatttgcatttgtcaatgtgcaaactttgaccaagttgtctatttggctattgcctcattagtctcttaaactttatatttaaggtaaaaaaataacatatttgatgaagtcctcaccatttgacttgaggacacatgtggagatggcatagtggttaagaaagaatacaggcaaactggttttgaatcctggccccatccactttcactgtaaagtaatattaggaaattcatttaacttctttgtgctg

SEQ ID NO: 487218 - DNA, 651 bp, Homo sapiens
ctggcaaaatctatattattagaaaatttctttgataaaattgacactaataaaatatctgaaaatccacttttctcacgccaaaggatatttgatgaaaatgaattatggtaacagttattcaaaatgtacaaaaggttgaaagataatattttatttatgattaattcataagaaaattataggagatttatttcagatatttggaagtagttctgtgtttgtattcctttttcaggtgcaaagtcgcaaaattcttctctccattctgatacatttaagcacttttatgatggctctcccctttacatgttctgcttgtattcttggtcttttcaagaytgaacaaataaaattcatttaccaattgtcacacatccactgttccacactgaactagaatttgcatttgtcaatgtgcaaactttgaccaagttgtctatttggctattgcctcattagtctcttaaactttatatttaaggtaaaaaaataacatatttgatgaagtcctcaccatttgacttgaggacacatgtggagatggcatagtggttaagaaagaatacaggcaaactggttttgaatcctggccccatccactttcactgtaaagtaatattaggaaattcatttaacttctttgtgctg

SEQ ID NO: 487219 - DNA, 533 bp, Homo sapiens
ctcaaagtccagctgaaacaagtttggaactcagatgtctttaggaaaggaaggtttagcaaatccctaaatttttcattgaattaaccccaggggatataataggaaagagttttcttattttggagaatataattcctagtaagttggttgggaagtggaaagggggagtgtggggtgctcactttgactttacaacagggtcaatttatttaattcaagacaaaaagacattcgcctggtagtttctgagccaacatacacacacacacacacacacacacacacacacacacactctcgcatgcacgcatgcgtgcatgatgataaccaaaaagcaatacgtcacattactcttggaaagatctactttagagtaggaccatagcaactcttctgatctgcttttamaatataatttaaccatttgaagctatgtagtgagaccacatagttaataaatttcctcttgtattttgtatgtacttctatgacatagcactaaatattctattgtaaaaattattattgta

SEQ ID NO: 487220 - DNA, 534 bp, Homo sapiens
tattacctccacccaggaggatacaactgttgccatatcaacccctcacttcttggagactagcagaattcagaaagagtcaatttcctccctgagccctaaattgagggagacaggcagttctgtggagacaagctcagccatagagacaagtgctgtcctttctgaagtgtccrttggtgctactactgagatctccaggacagaagtcacctcctctagcagaacatccatctctggttctgctgagtccacaatgttgccagaaatatccaccacaagaaaaatcattaagttccctacttcccccatcctggcagaatcatcagaaatgaccatcaagacccaaacaagtcctcctgggtctacatcagagagtacctttacattagacacatcaaccactccctccttggtaataacccattcgactatgactcagagatgccacactcagagataaccactctggtgagtagaggtgctggggatgtgccacggcccagctctctccctgtggaagaaacaagccct

SEQ ID NO: 487221 - DNA, 601 bp, Homo sapiens
agctctggacatgaatccccttcctctgccttagctgactcagagacatccaaagccacatcaccaatgtttattacctccacccaggaggatacaactgttgccatatcaacccctcacttcttggagactagcagaattcagaaagagtcaatttcctccctgagccctaaattgagggagacaggcagttctgtggagacaagctcagccatagagacaagtgctgtcctttctgaagtgtccgttggtgctactactgagatctccaggacagaagtcacctcctctagcagaacatccatctctggttctgctgagtccacaatgttgccagaaatatccaccacaagaaaaatcattaagttycctacttcccccatcctggcagaatcatcagaaatgaccatcaagacccaaacaagtcctcctgggtctacatcagagagtacctttacattagacacatcaaccactccctccttggtaataacccattcgactatgactcagagatgccacactcagagataaccactctggtgagtagaggtgctggggatgtgccacggcccagctctctccctgtggaagaaacaag

SEQ ID NO: 487222 - DNA, 534 bp, Homo sapiens
tattacctccacccaggaggatacaactgttgccatatcaacccctcacttcttggagactagcagaattcagaaagagtcaatttcctccctgagccctaaattgagggagacaggcagttctgtggagacaagctcagccatagagacaagtgctgtcctttctgaagtgtccgttggtgctactactgagatctccaggacagaagtcacctcctctagcagaacatccatctctggttctgctgagtccacaatgttgccagaaatatccaccacaagaaaaatcattaagttccctacttcccccatcctggcagaatcatcagaaatgaccatcaagacccaaacaagtcctcctgggtctacatcagagagtacctttacattagacacatcaaccactccctccttggtaataacccattcgactatgactcagagatgccacactcagagataaccactctkgtgagtagaggtgctggggatgtgccacggcccagctctctccctgtggaagaaacaagccct

SEQ ID NO: 487223 - DNA, 577 bp, Homo sapiens
agccaaaggaaccatgacatctgaattatctgagaaacttgtagtgctgaaatttataccatatgggattggtcatacatgtgtcttctctcaaggatttatcactttgaaaaatacattccattccttttcagtctttgtactgtctcattggtgtctccaaacaaggtctatcctgagagagatttttttgtgcagagaatagcactgattctctctctctctctctctctctctctcacttactcactttctctgtctctctrtgtgtgctaaaaatgtgtgcggttatatgaaaataatttaaattgtgaaggttagaatgaggtgctgcattttatagcataacctttaaaaataataattatttgaagtctgtttccagagttataatggtttgagccacactgttttctaaatactcaaatttggtatgcagctttatgacaggaagttggctttcagagcaggaatgtatgtaaacaaagaaatgtggctcacaggaaggtttagctaaatcaaatcccgaaggctgcctccattctgagcttctttctgtatcttgattatttgcaga

SEQ ID NO: 487224 - DNA, 569 bp, Homo sapiens
aacaacttaacagtctgatgccaaacaacytaacaggttgatgcttaaagaatgactcttcaaagatgagaacagcccacaaacaaaacaaaacaacacaaaggaaaattcttcagaagctatgtcctgaagtccttctgtttgtaacaggactttctttccctctagctactgcccagcttggaaggctgatccgtacactttctcctttacaatctctgattcatgcaactatcatcgtcaaaaagagattgtggactaggctgggtgtggtggctcaggcctgtaatcccagcactttgggaggccaaggtgggtggatcacctgaggtcaagagttcgagaccagcctggccaacatggcaaaacctgtctctattaaaaatacaaaaaaattagccgggcatggtagcgtgtgcctgtaatcccagctactcgggaggctgagacaggagaatcccttgaacccagcaggcagaggtggcagtgagctgagattgcgccactgcactccagcctgggcgacagagggagactccatcttaaaaaagaaaaaaaagagattgtgg

SEQ ID NO: 487225 - DNA, 569 bp, Homo sapiens
aacaacttaacagtctgatgccaaacaacctaacaggttgatgcttaaagaatgactcttcaaagatgagaacagcccacaaacaaaacaaaacaacacaaaggaaaattcttcagaagctatgtcctgaagyccttctgtttgtaacaggactttctttccctctagctactgcccagcttggaaggctgatccgtacactttctcctttacaatctctgattcatgcaactatcatcgtcaaaaagagattgtggactaggctgggtgtggtggctcaggcctgtaatcccagcactttgggaggccaaggtgggtggatcacctgaggtcaagagttcgagaccagcctggccaacatggcaaaacctgtctctattaaaaatacaaaaaaattagccgggcatggtagcgtgtgcctgtaatcccagctactcgggaggctgagacaggagaatcccttgaacccagcaggcagaggtggcagtgagctgagattgcgccactgcactccagcctgggcgacagagggagactccatcttaaaaaagaaaaaaaagagattgtgg

SEQ ID NO: 487226 - DNA, 595 bp, Homo sapiens
ccaccatcatgaccatctaattttcgtatttttgtagagacagggtttcaccttttggccaggctagtcttgaactcctgacctcaggtgatctgccttcctcggcctcccaaagtgctggaagtacaggcgtgagccactgtgccccacctctttcagttttcttgatcactcctgaataagtctaagtaagtstgtttgacccccacctttctctgcccccttctttgtgatgctgccttcttccaaccaaccaactcctgagaaagtgtgtgacagaccaatccattctggagtgtgctgtggcctccatttcttaccccctaggacaggttgtgcccccaataacctgagcatccctttccttccaccctttatggctcttcttatggactctacagaaggaagcccctggctgagcttatccaaataattacccttcacagccatcagtattcttcaccacaggaccacccaactgtcctgggggagggggcctcttgccagagtatgcatcccaagagggaggacccttgagtggtatccggagagaatagagactcacttgggcaaccacatctgaatcaaccctgat

SEQ ID NO: 487227 - DNA, 595 bp, Homo sapiens
ccaccatcatgaccatctaattttcgtatttttgtagagacagggtttcaccttttggccaggctagtcttgaactcctgacctcaggtgatctgccttcctcggcctcccaaagtgctggaagtacaggcgtgagccactgtgccccacctctttcagttttcttgatcactcctgaataagtctaagtaagtgtgtttgacccccacctttctctgcccccttctttgtgatgctgccttcttccaaccaaccaactcctgagaaagtgtgtgacagaccaatccattctggagtgtgctgtggcctccatttcttaccccctaggacaggttgtgcccccaataacctgagcatccctttccttccaccctttatggctcytcttatggactctacagaaggaagcccctggctgagcttatccaaataattacccttcacagccatcagtattcttcaccacaggaccacccaactgtcctgggggagggggcctcttgccagagtatgcatcccaagagggaggacccttgagtggtatccggagagaatagagactcacttgggcaaccacatctgaatcaaccctgat

SEQ ID NO: 487228 - DNA, 553 bp, Homo sapiens
gcccccccggcctgggagcctggctgggggctgagcggagcggaggagcgggtgcccccccagggaccgggcctctgcgggttctgggaggcgctgcccgggctggctggcgggggcgcacggtgggccgcggcgggaggttgctgtccacccgggcccggacacccagtcggcgcccactaaatgttggcggaatgcagccaggagttggcggcgaggcggggggaggcagcaactcctctccccccagtcaggcggcggaagtcacagaggtgctggtgcccctgccacccgcggcacccacctggctcacccatgggtggcgggctcggtgggcccccccacctccctgccagctgcctccggagagggcgtsgggattccgtgtcagtgccccccgccccaacctcagaactggaccagggcgtaaccctgagcgtgccgctcccacactgggggtgcctccccaccaccggccgatcacttcctattggcaaactggtctgggagaggtcccggggaggccaggctggggcaggggcccaggccaggc

SEQ ID NO: 487229 - DNA, 558 bp, Homo sapiens
ccacagttcaaccgtcctcatctgaggacgaccctgccccaggcgacaccgagctgtgtctggggacatctgtggttgtcagagttaggggtgttcctggcacagagcaggtggaggccagggatgctgctcagcagcctgcagtgcccaggayggccccaccgagggaaccatcccacctcactatccacggtatggagggggaaaccccgtattcattatataactgggaaaaaacctgacttccgccaggcgcagtggctcacgcctgtaatcccagcattctgggaggctgaggtgggtgaatcacctgagtcaggaattcgagaccagcctgatcaacatggcaaaaccctatctctactaaaaatacaagattagccgggcgtggtagtgagcgcctgtaatcccagctacttgggaggctgaggcaggagaattgcttgaatccagcaggtggaggttgcaggaagccaaaatcgcgccactgcactccagcctggaagcctggataacaagagctacactcagtctcaaaaaaaaaaaacaaaaaaacac

SEQ ID NO: 487230 - DNA, 558 bp, Homo sapiens
ccacagttcaaccgtcctcatctgaggacgaccctgccccaggcgacaccgagctgtgtctggggacatctgtggttgtcagagttaggggtgttcctggcacagagcaggtggaggccagggatgctgctcagcagcctgcagtgcccaggacggccccaccgagggaaccatcccacctcactatccacggtatggagggggaaaccccgtattcattatataactgggaaaaaacctgacttccgccaggcgcagtggctcacrcctgtaatcccagcattctgggaggctgaggtgggtgaatcacctgagtcaggaattcgagaccagcctgatcaacatggcaaaaccctatctctactaaaaatacaagattagccgggcgtggtagtgagcgcctgtaatcccagctacttgggaggctgaggcaggagaattgcttgaatccagcaggtggaggttgcaggaagccaaaatcgcgccactgcactccagcctggaagcctggataacaagagctacactcagtctcaaaaaaaaaaaacaaaaaaacac

SEQ ID NO: 487231 - DNA, 558 bp, Homo sapiens
ccacagttcaaccgtcctcatctgaggacgaccctgccccaggcgacaccgagctgtgtctggggacatctgtggttgtcagagttaggggtgttcctggcacagagcaggtggaggccagggatgctgctcagcagcctgcagtgcccaggacggccccaccgagggaaccatcccacctcactatccacggtatggagggggaaaccccgtattcattatataactgggaaaaaacctgacttccgccaggcgcagtggctcacgcctgtaatcccagcattctgggaggctgaggtgggtgaatcacctgagtcaggaattcragaccagcctgatcaacatggcaaaaccctatctctactaaaaatacaagattagccgggcgtggtagtgagcgcctgtaatcccagctacttgggaggctgaggcaggagaattgcttgaatccagcaggtggaggttgcaggaagccaaaatcgcgccactgcactccagcctggaagcctggataacaagagctacactcagtctcaaaaaaaaaaaacaaaaaaacac

SEQ ID NO: 487232 - DNA, 543 bp, Homo sapiens
cgctccccggccccaggaacgccgacctgtccatcacgctgggtacatcgctgcagatccggcccagcgggaacctgccgctggctaccaagcgccggggaggccgcctggtcatcgtcaacctgcagcccaccaagcacgtaggtgtctgagcctacccctgcccagggccaccatgcaccctctgtcccccacgcctgacccgtcccgccccycggcaggaccgccatgctgacctccgcatccatggctacgttgacgaggtcatgacccggctcatgaagcacctggggctggagatccccgcctgggacggcccccgtgtgctggagagggcgctgccacccctgccccgcccgcccacccccaagctggagcccaaggaggaatctcccacccggatcaacggctctatccccgccggccccaagcaggagccctgcgcccagcacaacggctcagagcccgccagccccaaacgggagcggcccaccagccctgccccccacagaccccccaaaagggtgaaggccaaggcggtcc

SEQ ID NO: 487233 - DNA, 532 bp, Homo sapiens
ggaccctgaccccagctctctcccatctaccagtgactcaccaccagcccctcaggagagcagggcctcctgttttgtttacgtttttgtttgaggcagggtctcactctgttgcccaggctggagggcagtggcgcgccatcatagctcacttcagcctccgcctcccaggttccagcgatcctcctgcctcagcctcctgagtaactgggactgcaggcgcgcgccaccatgcccagctcattttttgaaactttctcgtagagatggggtctcaccgtattgcccaggctggcctgaaactcctggaactcctggccccaagcaatccttctgatcccagtgtgctgggattataggcgtgagtcgctgcggccagccagggcctcctgtttgaacatcaggaccacaggcctgacgatatttctgctgtccttgggcctgtgaccttggggaagatagaatcccctctgagagcctcagtttccctrtttgcaaaggaactcatcacaggctcaagaaaagagagaag

SEQ ID NO: 487234 - DNA, 579 bp, Homo sapiens
ttgggaggctgagctggaaggatgacttgggctggggaggttgggaggttgaggctacagtgagctatgatgacatcattacattccagcctgggtgacagagtgagagcctgtctcaaacaaaaaccaaccaacaaacaaaaatacccaactaaaagggttgttttggagattaaataaacaatgtatggaaactgcttagaagaaagtctggcacacaagataccccttacaaatattagtttctttccttccaaaagattttatttgggatattaggagatattgataatatttgatcaggaagacatagcatgccctgttacattttttagagtgtttaacaaaaygaagagaagtctgagactgagtgttaacctcctggttttctgctgctgggtatactttatgccaagcacagaatgagagcctgtgtgaattaagcttctttcccaagatgatgaagtgtagaacactttggtggagaacagaagagcctgcacagcctcacccctgtgtttatagtgttttgaggggtagaaataagcatttcagtagtctttctgtggcatctgctcc

SEQ ID NO: 487235 - DNA, 666 bp, Homo sapiens
gtgaacatttttgcatatttaatttaaatctttttttttttttttaaagaaaaatcagtgttggtttgatgacaatgatattacatttttcatttcattcatttcattttcatttttatttttggaagaaaatcactttattttaattaactcacagagaataaaatcacagctagtttaaggaggctacacaaacatttgcccagccccaaattctacacgaccttaatgaaattctgcacagtaagagcaccttctttcatttcaattctgaagcaaggaagctatgaatgacaaggagaggtttaactgatggttacactttataycttcactatcaattatatttttatactaaattaacttggttatgagagctgatttttcattactccaatttgaccttcttgattaggccaatctgtttgaaggtctgcactgtttcagcacctcactgaaaccctcacagagctttctgtcaccctggttctgtgcatcctccaaaaactggtctcatagaagcaaggccgctgctgctgtgccgactggattccctgaggctactggtaagtgatgtcaggccttacaggctcagcattacttcctccactgaagcccccggtgacggcgtggcccagtgtgtgccccacagcagagcccacagcc

SEQ ID NO: 487236 - DNA, 666 bp, Homo sapiens
gtgaacatttttgcatatttaatttaaatctttttttttttttttaaagaaaaatcagtgttggtttgatgacaatgatattacatttttcatttcattcatttcattttcatttttatttttggaagaaaatcactttattttaattaactcacagagaataaaatcacagctagtttaaggaggctacacaaacatttgcccagccccaaattctacacgaccttaatgaaattctgcacagtaagagcaccttctttcatttcaattctgaagcaaggaagctatgaatgacaaggagaggtttaactgatggttacactttataccttcactatcaattatatttttatactaaattaacttggttatgagagctgatttttcattactccaatttgaccttcttgattaggccaatctgtttgmaggtctgcactgtttcagcacctcactgaaaccctcacagagctttctgtcaccctggttctgtgcatcctccaaaaactggtctcatagaagcaaggccgctgctgctgtgccgactggattccctgaggctactggtaagtgatgtcaggccttacaggctcagcattacttcctccactgaagcccccggtgacggcgtggcccagtgtgtgccccacagcagagcccacagcc

SEQ ID NO: 487237 - DNA, 541 bp, Homo sapiens
atcttgactcacccataacccatttatatgctgagaaatgtcaagtggaaaactctttaccaggtaatcacatctctctcttccagactttacttattatttatttttttgagacagggtctcactctgtcacccaggcgggagtgcagtggcacgatctcgactcactgcaacctgaactccccaggttcaagtgattctcctgccttggcctcctgagtagctgggactacaggcatgcgccaccatgcccagctagcttttgtatttttagtagagatggggtttcaccatgttgcccaggctggtcttgaactcctggcctcaggtgatccgccctcctyggtctcccaaagtgctgggattacaggcgtgagccatagcgcctggcttgtcaatgctttttactttagccattcgaatgggggagtagtggtatttcacagtggttttgtgttgcgtttccttaaatttgagcaacttttaatgtgcttgttggctatccatacagcttcttacagtgtcttttgctcattttttt

SEQ ID NO: 487238 - DNA, 541 bp, Homo sapiens
atcttgactcacccataacccatttatatgctgagaaatgtcaagtggaaaactctttaccaggtaatcacatctctctcttccagactttacttattatttatttttttgagacagggtctcactctgtcacccaggcgggagtgcagtggcacgatctcgactcactgcaacctgaactccccaggttcaagtgattctcctgccttggcctcctgagtagctgggactacaggcatgcgccaccatgcccagctagcttttgtatttttagtagagatggggtttcaccatgttgcccaggctggtcttgaactcctggcctcaggtgatccgccctcctcggtctcccaaagtgctgggattacaggcgtgagccatagcgcctggcttgtcaatgctttttactttagccattcgaatgggggagtagtggtatttcacagtggttttgtgttgcgtttccttaaakttgagcaacttttaatgtgcttgttggctatccatacagcttcttacagtgtcttttgctcattttttt

SEQ ID NO: 487239 - DNA, 529 bp, Homo sapiens
aaccacactaaaaagcagagcgcctccacctcccaccctcactttttcactccaaaccaaatcgaagccttcaagaaatatttgtgatgttgactatgtgagcatagtcacgcaataaattgcattccatatccattggtaattgtgtgtcagcgtaggcaccctgacatccataaattccaggaggtggaggcagggggattgcctagcgtccagmaaggaatgctaaattcctaaataatacgtataccaggccaggtgaggtggctcacacctgtaatcccagcattttgggaggctgagccagggagaatgcttgatgccaaaagttcaagaccagccagggcaacagatcacgaccccatctctacagaaattttaaaaaattagccaggcatggtggcatgcacctatagtcccagctgttcaggaggttgaggtaggaggatggcttgagcccaggagttcaaggctgctgtgagccttgatcatgccactgcactccaacctgggcaacagagcaagatcc

SEQ ID NO: 487240 - DNA, 564 bp, Homo sapiens
cccccagcggcaggcacctcgttagagtgagggaatgacctggagctgaatgggtgcgcccggaccctcagtggccaccgcacccttggaggagccacgtgagggaaaacagggatggcaccgccttctctggggactcgggtggtgactagtttgatacggaaagagacgcagccctacacctggcagaaggagcccagccaggggaagaacagtcatagagacccttgccctacagcgtcagctcctccccgcaggcccaacgcaggtggctggcaggcgggcatgggaccttgatgcccactgrgcaagcagcagcgcagggaggtgcagggaacccggggtgctgcctgtctcgccgccctccaccttctcagccccggctccctcagcaagccaccccttcccaacaccctggcaagatgaggcagccctcagctcggtgcaggcgtgtgcccgggtcctctgctgggggtgctgggctctgaggatggtcttgggtcgcctgggctccctgcccctgctaaagaacaggaagacgggagtcctgaccactctgcccca

SEQ ID NO: 487241 - DNA, 641 bp, Homo sapiens
ctgaacaggacatcaggaaatgcctagcctgaggcacctacttactggccaagtgaaggaggcggttatggtctgacacatgtggcttgggttttggcacggggtcccactcttccaagagggtggctggggccttcggctttgacaactggaggatccgcgagctggggactgccatttgggctgccctggatacctgggacacctggaaagagaaatagagagaagggttacgtgaaacagtccatgatgcctcgtgggccctggagctgaaggaccccaggagcaacactraaagacacaagacagactgggaagaagttggtttgtaatgtattcatgaaaggattagtaactatcacgcataaagagctcctccaaaccaataaccaaaaaaaccccaaaagggctgagcaaagggtacaggagacaaaccctaaatggtcaataaccctgtcttttgaccaatgtaatatcaacaattgttggcaaatgtaaattaaaacaacaaaatatcactccacgctcacaaatttggcaacaatgaaaaagtctgacatgatcaagccctggtgagaggctctcatgcatgactggaaggagagtaaattagtacaggcagctcagggagcaattcgtcc

SEQ ID NO: 487242 - DNA, 612 bp, Homo sapiens
actttgtgtgtaactccactagcctaccagggtgcctctcatraaggtaagaaatgtaaatctggcctaatatacaaagttgccagggcagcactgggtcaattctacatacagtacttctatgttcatcaagggaaatcttaagggaaagtgaaaatgcttctagaaggcgactggacaccagcgcctttgcttgttgcctttgggctcttcttctaaggccaacagtgacctgaaattattgactggcttttccaatcaagtggacaaaatggtaccaaggtcgccaacatcgatgtagaacatcgatgttctacaacattgcttaacgcaaggggagacgctcctgactcagagtgtttaattgctcacctacttctttttctgccctcttgggcttctgaaatgaaaagaaccctggggtgatacagtgagtcaaaggggtgccagccgcatcacagcaaaacagattcctaaaaaatccctggcctaagatgacagccttggctggatcagtttgaatgtgctgatagtggacatggtagaatgaaggtggttgaaatgttcatattaaagaacttccacccagattgcaagaaaagagagaggaat

SEQ ID NO: 487243 - DNA, 612 bp, Homo sapiens
actttgtgtgtaactccactagcctaccagggtgcctctcatgaaggtaagaaatgtaaatytggcctaatatacaaagttgccagggcagcactgggtcaattctacatacagtacttctatgttcatcaagggaaatcttaagggaaagtgaaaatgcttctagaaggcgactggacaccagcgcctttgcttgttgcctttgggctcttcttctaaggccaacagtgacctgaaattattgactggcttttccaatcaagtggacaaaatggtaccaaggtcgccaacatcgatgtagaacatcgatgttctacaacattgcttaacgcaaggggagacgctcctgactcagagtgtttaattgctcacctacttctttttctgccctcttgggcttctgaaatgaaaagaaccctggggtgatacagtgagtcaaaggggtgccagccgcatcacagcaaaacagattcctaaaaaatccctggcctaagatgacagccttggctggatcagtttgaatgtgctgatagtggacatggtagaatgaaggtggttgaaatgttcatattaaagaacttccacccagattgcaagaaaagagagaggaat

SEQ ID NO: 487244 - DNA, 612 bp, Homo sapiens
actttgtgtgtaactccactagcctaccagggtgcctctcatgaaggtaagaaatgtaaatctggcctaatatacaaagttgccagggcagcactgggtcaattctacatacagtacttctatgttcatcaagggaaaycttaagggaaagtgaaaatgcttctagaaggcgactggacaccagcgcctttgcttgttgcctttgggctcttcttctaaggccaacagtgacctgaaattattgactggcttttccaatcaagtggacaaaatggtaccaaggtcgccaacatcgatgtagaacatcgatgttctacaacattgcttaacgcaaggggagacgctcctgactcagagtgtttaattgctcacctacttctttttctgccctcttgggcttctgaaatgaaaagaaccctggggtgatacagtgagtcaaaggggtgccagccgcatcacagcaaaacagattcctaaaaaatccctggcctaagatgacagccttggctggatcagtttgaatgtgctgatagtggacatggtagaatgaaggtggttgaaatgttcatattaaagaacttccacccagattgcaagaaaagagagaggaat

SEQ ID NO: 487245 - DNA, 612 bp, Homo sapiens
actttgtgtgtaactccactagcctaccagggtgcctctcatgaaggtaagaaatgtaaatctggcctaatatacaaagttgccagggcagcactgggtcaattctacatacagtacttctatgttcatcaagggaaatcttaagggaaagtgaaaatgcttctagaaggcgactggacaccagcgcctttgcttgttgcctttgggctcttcttctaaggccaacagtgacctgaaattattgactggcttttccaatcaagtggacaaaatggtaccaaggtcgccaacatcgatgtagaacatcgatgttctacaacattgcttaacgcaaggggagacgctcctgactcagagtgtttaattgctcacctacttctttttctgccctcttgggcttctgaaatgaaaagaaccctggggtgatacagtgagtcaaaggggtgccagccgcatcacagcaaaayagattcctaaaaaatccctggcctaagatgacagccttggctggatcagtttgaatgtgctgatagtggacatggtagaatgaaggtggttgaaatgttcatattaaagaacttccacccagattgcaagaaaagagagaggaat

SEQ ID NO: 487246 - DNA, 463 bp, Homo sapiens
ttctagaaggcaattttaaaattaaaattttttctatttttttgcaattatcaacctaacacattgaagaaacttgggaaatatagaaaaaacacaccaaaaagtatcagagttacactaaaatgttcatagtcagtaatatagtctttcagatttttttttctgtgtctgtctgctgtctatgtccatgcctaccttactttcttccctctctcttccctccccaccctcccttccttccttccctccttcccrccttccctgcttccttcttgcctgcctcccttcctgcctgcctcccttcctgccacttacattctgttaacaatgagaaaaaaattcccccatcattaaatattgttgattggcatgagaatggccaagagcacagactcaggagcctttgaattcatgacatgccttttgttagctgtgtcaccttaggcaaattatataacatgtc

SEQ ID NO: 487247 - DNA, 463 bp, Homo sapiens
ttctagaaggcaattttaaaattaaaattttttctatttttttgcaattatcaacctaacacattgaagaaacttgggaaatatagaaaaaacacaccaaaaagtatcagagttacactaaaatgttcatagtcagtaatatagtctttcagatttttttttctgtgtctgtctgctgtctatgtccatgcctaccttactttcttccctctctcttccctccccaccctcccttccttccttccctccttcccaccttccctgcttccttcttgcctgcctcccttcctgcctgcctcccttcctgccacttacattctgttaacaatgaraaaaaaattcccccatcattaaatattgttgattggcatgagaatggccaagagcacagactcaggagcctttgaattcatgacatgccttttgttagctgtgtcaccttaggcaaattatataacatgtc

SEQ ID NO: 487248 - DNA, 553 bp, Homo sapiens
taaacccaatgccctggaccatggtgatgcttgagtcagtaagtcaaggagcagatttattctgggcattgtagggaaggcatatgcctttcactttccagaagtgataattgaagagtagaaagatgagggaagtaaatgcataatttattacatatattgatttgacctagggcagtgagagaagctataggtcagcaggacccagaagccctagaagaacataggttgcttagctcttttatgcataatttatgttcttcctctttgtgtcttcattcttctcygtggctcaaaacctctattgtcctacctgacctttcttcatggtggagctgaccatactcccagaactcttgtcttttattactatttatttaatttacatgtagattgcacattatcatcattatcacagggtaagagccctattaccagcgtaacacagaatgcactaagcacactctagccagacctataaccttacttagcatcccactattcctggctcaactttcttacttctgcgatcccagaaatgcaaaatgcttct

SEQ ID NO: 487249 - DNA, 623 bp, Homo sapiens
ctgccaaccctttttagatttctaacctatggaactctataataaatttggtcgttttgagccactaaagttggtggtaacttttatagcagcaataggaaactaatgcatctaccgacatccattgctgaaacaatagatatagaaagtgacaatcggtcatagtcaggatgcatggacactggagtttgtgcaatcaagacttgtgcataagagagaacgaaccttcactgatgtcatggctgtaggccagtgcctcgtgatccttatggtcattgtgttacacagtagtatcaaccttttgtggttttgcaagtctcagtctgtctcagaaggcagagcatatgtgtttaccataaaggagaaatcattctcagtgtcagtcatgtgaatagaggcacrtcttcaaagctgtgagtccaagaaagggaattcagtgcctcccctttgatctggacgctgaggtgactaaccagagcagaagggatcaaagcaagctttatcctgtagaatcatgccaggaaccagcaaaacaggaccttggaagtctgtgattttcctctggaatccaggctagcatgcctggtctacaatcctaagggactgactatattttataaatg

SEQ ID NO: 487250 - DNA, 257 bp, Homo sapiens
accctatcagtgcatactgactaattacaactcttgtatgcttagacatgtaacagtttacttgagcatagaatggctagaagcttagtattttaccctggccaaacaaacagaaagacaaaaacataaaacatgggcaaaacccaaaaccagtagatatttcttctttacagtaatgttaggagctgaataggggtacctaragtggataatatgtcttttgtctatttaggagaccctggttctgtgccaaggat

SEQ ID NO: 487251 - DNA, 569 bp, Homo sapiens
tggcccaagtcatggtgcaaggaagtggcagagcccagggttagaacccagaggatctggccacagcgttcaggctcttaactactctgttatgagctctcagaagtgaatcttttyttaacaaatggcgtacacacctgtatttaagtccatattctctatctgtaaaatggggataatatcgtctactcaaattaaatgggctgaggtatataaagctacattcagcatagtatttggcaactaataagcataccacactggctgttgctagttttatcacatcattggcaatagtggtaacaggatatcatcacacacataaaaataacaatagctactatgtttaagacctttaactgttgttgtttttttttttttgcaattttttacctcatttaatctttgcaacaatgttgcaaggaagatatcatttctgttttacatatttaaaatacataagacatcaaagtcaagtaataagtgtgagacctcatatctataaagtagtgtatgggtatgtaagagtttgcatgagctttgtgagaaaaaaatataagccatggggc

SEQ ID NO: 487252 - DNA, 569 bp, Homo sapiens
tggcccaagtcatggtgcaaggaagtggcagagcccagggttagaacccagaggatctggccacagcgttcaggctcttaactactctgttatgagctctcagaagtgaatctttttttaacaaatggcgtacacacytgtatttaagtccatattctctatctgtaaaatggggataatatcgtctactcaaattaaatgggctgaggtatataaagctacattcagcatagtatttggcaactaataagcataccacactggctgttgctagttttatcacatcattggcaatagtggtaacaggatatcatcacacacataaaaataacaatagctactatgtttaagacctttaactgttgttgtttttttttttttgcaattttttacctcatttaatctttgcaacaatgttgcaaggaagatatcatttctgttttacatatttaaaatacataagacatcaaagtcaagtaataagtgtgagacctcatatctataaagtagtgtatgggtatgtaagagtttgcatgagctttgtgagaaaaaaatataagccatggggc

SEQ ID NO: 487253 - DNA, 569 bp, Homo sapiens
tggcccaagtcatggtgcaaggaagtggcagagcccagggttagaacccagaggatctggccacagcgttcaggctcttaactactctgttatgagctctcagaagtgaatctttttttaacaaatggcgtacacacctgtatttaagtccatattctctatctgtaaaatggggataatatcgtctactcaaattaaatgggctgaggtatataaagctacattcagcatagtatttggcaactaataagcataccacactggctgttgctagttttatcacatcattggcaatagtggtaacaggatatcatcacacacataaaaataacaatagctactatgtttaagacctttaactgttgttgtttttttttttttgcaatttwttacctcatttaatctttgcaacaatgttgcaaggaagatatcatttctgttttacatatttaaaatacataagacatcaaagtcaagtaataagtgtgagacctcatatctataaagtagtgtatgggtatgtaagagtttgcatgagctttgtgagaaaaaaatataagccatggggc

SEQ ID NO: 487254 - DNA, 580 bp, Homo sapiens
ggtttcacttttagctatactatcaatccttataattttacatsacaatgtttgttattccttaaaataaccttaaaaggcccagaaatctgaattttagtgaacaggaagtgagtaatctgtccaaaaaagtagggaagatcatggatatagcccctagtaaaaggtctggaagccacaaggaaagctgacgagtaaatgtggacaagaaaaaatgcttccattacaaatcacctcaaatgaagattacaaaaaccagaaatacacttcctggtattggtcacaaatcccttcagtagtgggctaaactgacttatagtagttgttgactagattgttcttccccaaaatattaagtcttcaaattggatcaaggcaattgacagttgaagccaaataacaatgagtacttcaaaaatagcgactaatgatagtgacctcaattgtgttctctgagcttatctacactaaaatacggtatgctatttacacaaatttgcatctttatatacttcttgatataggccaaaagtcacaaaacttccactgaattaaccagtgatttgttttgtattatttt

SEQ ID NO: 487255 - DNA, 653 bp, Homo sapiens
ttacatcttggtttctatagattttccatatcctgtcctatttatcctccartaactagagcaccagagatgtctcttaaaccctttcatctctagcatgaaaaccagcttccttcctgcaacgttcttcagctggctgccttctactataaccctgccgaggttggaagcttgctctctcctgaacctggtcattccactgttaggaacactatatagaccacctgaagaggccctactaataaacaagtttcctggtcagtctctcctagagacagaagctaaacaatcacacaaagggaactagcttttcctctatcaaataagaaaatcagaagctaacttggataaaggtagccaaagctcaactaacccataggtattcattcttcctcacccaatctcagatacttatagaatcacataaaaatggaggaagcccaacccgaatgctggcttcatcgtaagaatgaaattctagggtttaatataacctgattatttttaaatggggaagagctcaaaaactatcactgtttacaggaaacactgtgaaatggcctcaaaagaaacactcaaaattagaggatcttgttacctgcttaagcccctctcttgaaggaacagatgttttcacaatatcatcaatagcc

SEQ ID NO: 487256 - DNA, 624 bp, Homo sapiens
tacataacaggagcgcacctctgtgtggccagggtcatgcccactgccctccggactctacccaccagactgtacccaccatcttagtttttgttggagtgtacagtaacagtcacatactcaaagagttaaaatagaaaccttacacatgcctgctcttaaactgtaacgtcctcgtaacagaaattcttatcggaggtctgcatggtacttcgcaaacaagacgttctaccttttaaacaaataattcattaggtaattaaattcaagtgagattactctaattaaatatacactgctgttgaatcataatttctatgtggcctagttaaagatgagctatctcttgytcctgacaaaaaaagaaagctttaaaagaattccccatggctggaagaacagatacacacgcgctccacagaggtcatttcaagaaggcggagatgcaaacacaacacggagaggggatgtctcctgtctagagattccagggcagtttcagcttaaggctgcgggttaaggttagcgggacccgttgggaagccacagtgatcccagggctctgggtcactgcgggtgcgggtgcgggtgcgggtgcgcacagccagggatcctggcgggagc

SEQ ID NO: 487257 - DNA, 538 bp, Homo sapiens
ccaacgcccgtccccctccactaccgcctctgggcctttcctctcctccccgcccamccccacccccacagcctgcccctgcgctccccgagacacgcgcgctctctgcccatgccgctgcagccggaggcctgcatctgtcccagcctggacgcgctgaaggtcctagcttcccagcaggggtgtcccagtcaccccccattgccgagcttcgcggggtcttgccagccttctgggccacgtgccttgggtccccggagcactggggcccaagggcttccggactggatccccggcgctaagcaggaggagctccgattccgctgcgcagcgacccctagacctggttttgtcaggctcctcgtctttgtctctggcacagtgaccagggggcagccaccgggtgcggccagctccgccaggagcaacttccggagcagcggcagggcctgcctcagccaccccctttggaggcaggaaaagtggctgaggggccaacaaagtggctctctcctgcctcagaggtccagcgcctcac

SEQ ID NO: 487258 - DNA, 599 bp, Homo sapiens
tttcttgttattgaccatcaaaatttgtctcttctcacatcaagtcctgattattttaacttagctttgcttcctgcaggtacatttacttttcagcttgaaaagaaaatgattcttgcttcataggtttttggtctcagtaaatttacacccagggtcctgaagacttaaaaaaaaaaacagtttgctggttgactgatgattgatccattcaccaagtattgattattttgtattgatcatttgattgcgaaccttgccactgtactgtgttgaggtctgtccccaggttagctaaaaacctcgcccgaacttatttctgtcgttttccttgctgatagggcgtgtgcttttttgacgtttcttagcaaactaattgatatggtttgaatctgtgttcccacccaaatctcatgttgacatgtaaccccaatgctagaggtggggcctagtgggatttgattggatcacgggggtygtttctgatggtttagcactatccccttagtgctgctctcatgatagagttcccacaagatctggttgtttaacagtgtgtggcacctccccttgctcactctcgctcctactctggccac

SEQ ID NO: 487259 - DNA, 328 bp, Homo sapiens
ggcatgaggagcttgcagccttcgagagggaggggaagaggaaagtggttatattgataagagagggaatccgggaggcactaagcacagtggaccatccttcagatctcagcaatgccaccactagctggccatggttttgaaggttccaggaggagctgagtcctaagtgtgtcctttcttactctgcatatgtctgtagggaggacggctagattcccaggtgtaggtgggtscctagtaggtttgagccttgttgagcattccgaagatgtttacccagcctcatcaaatctcagagatggaaggggacggtcagcagacaccg

SEQ ID NO: 487260 - DNA, 483 bp, Homo sapiens
aaaacacaagggggctcgaatgttgtgtttttatggcagttttttcttggcctaatgtacatacggtaagccacgaccttgggacccaagcatattcacwtgacgggctactaaaggtttcctcttttgcaaaatctagagatggggcttaactgacagctttgaaatatgcgtggcagaaatgacatcgagatagcacaattggcacatctattgtatggagtaaaagcagcacgctggcctccttggtttatgaagacatcctaccagctagctgactaccctggagtcaagaaggaagaagtagaagtagctcggagcccaggatcaaattcattttctaaaatcgaagccccttcttgtctagagagtctataagccagacaaaattcagaagtctttttacacaggaatacgctgtatcagggtggcaaatttaacctttgataataaccaatattggaaatttttaatatatggaat

SEQ ID NO: 487261 - DNA, 412 bp, Homo sapiens
acacacaaacacatggcaacattaaaaagcaaccagtaatttttaaaawttttttttcttttagcaaactctcaaccaaagcaggccatttccattctcagatatgcacgtgggatatgtggccctgggtcagggagggcaggcagggctgatacgagaggaggggctggagtccgcttttcccttcctgacccccatcctgggcccgctgttctggcaaagctgatcagattggagggtgggtcttctgcattattaaaatttccactcttccagataataaagtgtgatttctcctctctctgtctccccttctgcctcctttctaatctcttgccactgtggttttgggattattccagcaggctgtacaaagggaagcgaaggcatctgaagtgtcactctacagctg

SEQ ID NO: 487262 - DNA, 541 bp, Homo sapiens
ccggcgcttggccggccaggccttccttgcaaggtctgtgcagacgggaatgttgggtgcccaggccttgaagggttcgctttctsgggatcctattaaaataaggagatggcagtgccttctgatctcctcgtccaggttcattcttagcccacaggtgttcctgagaagccgctaggaaggcagtggtcgagtgactcagcgattcatggagattttgagtcaggtcacatgtctacattgtgtggaccttgcctcaggacgcgcttgatgggcagtaaatgtcaggtccaaaccaggagccaagacttgttatgacaccatcaagcaggagataaggattcagtaaggaaggctcaatttcccttaatctctgtggtgttgggaaacctgggttttgaaaagcttagccgctgttttttttgagcaactccctttattgaattatttatttattttattatacttcaagttctagggtacatgtgcacaacatgcaggtttgttacataggtatacatgtgcaatgttggtttgctgc

SEQ ID NO: 487263 - DNA, 549 bp, Homo sapiens
ctgtgaggccggcgcttggccggccaggccttccttgcaaggtctgtgcagacgggaatgttgggtgcccaggccttgaagggttcgctttctggggatcctattaaaataaggagatggcagtgccttctgatctcctcgtccaggttcattcttagcccacaggtgttcctgagaagccgctaggaaggcagtggtcgagtgactcagcgattcatggagattttgagtcaggtcacatgtctacattgtgtggaccttgcctcaggacgcgcttgatgggcagtaaatgtcaggtccaaaccaggagccaagacttgttatgacaccatcaagcaggagataaggattcagtaaggaaggctcaatttcccttratctctgtggtgttgggaaacctgggttttgaaaagcttagccgctgttttttttgagcaactccctttattgaattatttatttattttattatacttcaagttctagggtacatgtgcacaacatgcaggtttgttacataggtatacatgtgcaatgttggtttgctgc

SEQ ID NO: 487264 - DNA, 571 bp, Homo sapiens
gcagggcactctgcttgccaaagctcatctcaggaaattcagaagccccaaagtcagtgaacaggctgtttcaacttcataattgagccttctgaatgctgcatccaaagcccagccccatgccatctttgtggtcatcmctcaataaatatctgtccagcgacagccttttgatctgttatgtaaccctgcttaaggaaaactgtgcatgcccttgacaacttgggtgcaaaaatccacagtgggaagtcattgaggttttcagttttcaacacacgtaaaggtaatttaaaaaaaatgattcttcacattattttgagtgttttgtaaagcccctgctacgtttcttgtggtgttaactgaccggctgagtttctatttggggtcccgttgtagttaggtcttctcccctgggtctttcctcctaacttactgaatatactctgggtaccgctgcccttagacatgcctggaagaccccgtgactccagaatcatcttattccaaagaccaaacacaggaaatggcagcgctttaagcataacccatttcgtctttttgcttttctatt

SEQ ID NO: 487265 - DNA, 571 bp, Homo sapiens
gcagggcactctgcttgccaaagctcatctcaggaaattcagaagccccaaagtcagtgaacaggctgtttcaacttcataattgagccttctgaatgctgcatccaaagcccagccccatgccatctttgtggtcatccctcaataaatatctgtccagcgacagccttttgatctgttatgtaaccctgcttaaggaaaactgtgcatgcccttgacaacttgggtgcaaaaatccacagtgggaagtcattgaggttttcagttttcaacacacrtaaaggtaatttaaaaaaaatgattcttcacattattttgagtgttttgtaaagcccctgctacgtttcttgtggtgttaactgaccggctgagtttctatttggggtcccgttgtagttaggtcttctcccctgggtctttcctcctaacttactgaatatactctgggtaccgctgcccttagacatgcctggaagaccccgtgactccagaatcatcttattccaaagaccaaacacaggaaatggcagcgctttaagcataacccatttcgtctttttgcttttctatt

SEQ ID NO: 487266 - DNA, 571 bp, Homo sapiens
gcagggcactctgcttgccaaagctcatctcaggaaattcagaagccccaaagtcagtgaacaggctgtttcaacttcataattgagccttctgaatgctgcatccaaagcccagccccatgccatctttgtggtcatccctcaataaatatctgtccagcgacagccttttgatctgttatgtaaccctgcttaaggaaaactgtgcatgcccttgacaacttgggtgcaaaaatccacagtgggaagtcattgaggttttcagttttcaacacacgtaaaggtaatttaaaaaaaatgattcttcacattattttgagtgttttgtaaagcccctgctacgtttcttgtggtgttaactgaccggctgagtttctatttggggtcccgttgtagttaggtcttctcccctgggtcttkcctcctaacttactgaatatactctgggtaccgctgcccttagacatgcctggaagaccccgtgactccagaatcatcttattccaaagaccaaacacaggaaatggcagcgctttaagcataacccatttcgtctttttgcttttctatt

SEQ ID NO: 487267 - DNA, 589 bp, Homo sapiens
taaaaaatgaagtgaagtatgaccaaggggcccttgcagagagactgtaaaatgagactttaatacaagccaaaaaaagaaaaaaaaaagaaaaaggaaaagtraaggaaataatacaaatacgtggggagggacaaaagagttaaaggaaaagccatgttagtaataaagtaaactattgtattcctttacctctgtacttttgttagggatagaaacatatcactgaaaaaaatatatacatttaaaaataaaaattttcagctaatttgtgctatccagccatcaccacaataaagaatgagctagacttccccatattgtgaagggcactaaattcacaaatgtgaagttgcagataggaaaggttttataaactgcaaggtagcaatgatttgtgtgtgtttatttcacctttgtaggatactgaacatgtgcattcttccaagtatgaaggatttgagttcactaaatagtaagccctctcattcctagtggagagaggagaaaggagagcagaggctcaaaactgggatgaatgcctgatgaagggagagttgctctcccagccagatcctttgatttgcca

SEQ ID NO: 487268 - DNA, 649 bp, Homo sapiens
ctggactctgatactcatgtgattaggcacatgctgtcattaatcatctttataaaatagctcaaagaaaattacacccagcaagtagccatccaaccttgttacggtcctcgcatgttggtttgctccctaaaataagcagaccttgtctcagtctttcagcaacccgaaaagctgcaggagtagtttatatgaagtctacttagactccacacaggaacggagagaagcttttggctgagataaaactactcatctaaatgtagtcaacaagaaagtactcaaatctccagaaattgtttaaatagaaagaaaaatctcctgtggataagaagttgcagctagagaaagactagcagaatggagagaatttctgacttctaaatttttaaacaaataaatcaccaagacatatagcagtgtgcttaaaataaaggctgcacagtttgccctgtatttaagwgcatgcatacagggataatacctttctggtgacatttgtccttaatatagttatttatcttcaggaagacttctcactggcacacttggcaaaggtaaaattcagtccattatgaccattgatttgtgaaatgcataaaatactgggatccacaacaaactgcatgataagcagtagtgaaaacta

SEQ ID NO: 487269 - DNA, 506 bp, Homo sapiens
aaacctgtttacaacaaaatatcaaattattatctgactttcacaatgaaccacattattctatgactgccagtcatacatctggactactataccatttgtgtgcagttacagcagctccagttctatatggctagttttgaacttagtctgactttaaaacccatcccatttactatcctctgctttttttttttttttggtgtatattgtgggaaattccataaatgatttttataaactttarccagtaatcgggaaaaactgtaagattttgtttgtaagctttataaacgttacttataagattttaattgaattctaaattaatttctaatttgaacctctcccttctcttagctttatatgcttggtcatccctccttaagtaattagcttttttgaagctttgttttttttggtttttcactgtttctgttatattgacgatttgactttcttataaattgttagtaatttcctgaataaagtacagaagtttatct

SEQ ID NO: 487270 - DNA, 506 bp, Homo sapiens
aaacctgtttacaacaaaatatcaaattattatctgactttcacaatgaaccacattattctatgactgccagtcatacatctggactactataccatttgtgtgcagttacagcagctccagttctatatggctagttttgaacttagtctgactttaaaacccatcccatttactatcctctgctttttttttttttttggtgtatattgtgggaaattccataaatgatttttataaactttagccagtaatcgggaaaaactgtaagattttgtttgtaagctttataaacgttacttrtaagattttaattgaattctaaattaatttctaatttgaacctctcccttctcttagctttatatgcttggtcatccctccttaagtaattagcttttttgaagctttgttttttttggtttttcactgtttctgttatattgacgatttgactttcttataaattgttagtaatttcctgaataaagtacagaagtttatct

SEQ ID NO: 487271 - DNA, 532 bp, Homo sapiens
tctatgaaccaggaatcaggctttyaccagacaccgactctgacgtgatcttggacttcccagcctccagaagtgtcagaaataaatgtctattgtttaagccacccagtctgcagtattctgttacagcagcctgaactgaggtaaaacaggtggaaggccctgtcaaagcatccttgtatgctgctgaaagttacaccgcctcttttccttattctattttttttccttttattctattttttttattctatctgagatgaggaattgatggttagcatgcttgctgccgtcttgaaccttggggtgatcttgttaagtcagtggaacctatagattgagggagccccaatttcaaatttccttagggctatcatgccagctctgggctgactcctctaagcctctctttatttgtgtagacttatctctagttaaaaccactttatatggggtttccttttatatacagtagaacctaatctttattgatatatccccaaatttggaactttatgagtttcgtttaagt

SEQ ID NO: 487272 - DNA, 609 bp, Homo sapiens
catgtgttacctgtttgttcatgatgtatttgtttgtgaactgtcttctccctagagcagtaccctatcaggacttaggctctggggatttcactgctcattctccagcctggcacataagaggtggtcagtaaaactgtcgaatgaatgagtgaatgagtgaatcacagttaacctcagttataaagatgtaatcatcagtcttcccaaaattcttacaatactggacactttaaaggaaatgaggcttttttaaaaaaagaaaaagcatttcctggcaggaatttatgtatttgtatgcaatatgtgggtagttacartacagtgcaagaaaaacaaccatatttcctgtcctctaggaatttgaaatctgtaaagaactctaacattggaaatgcctgataacatacatctgcagttatttgtggcaaaagacaaggcaaataggcaaatattcggtattataaaaaatgcacagatttcaaaggacaagtataggtggatttacatgcctacatcttttgaggtgagtggaaatttgtacatgataatctaggtgaggctgaggctccctggctgtgacagttccctttgggctattcccctgta

SEQ ID NO: 487273 - DNA, 609 bp, Homo sapiens
catgtgttacctgtttgttcatgatgtatttgtttgtgaactgtcttctccctagagcagtaccctatcaggacttaggctctggggatttcactgctcattctccagcctggcacataagaggtggtcagtaaaactgtcgaatgaatgagtgaatgagtgaatcacagttaacctcagttataaagatgtaatcatcagtcttcccaaaattcttacaatactggacactttaaaggaaatgaggcttttttaaaaaaagaaaaagcatttcctggcaggaatttatgtatttgtatgcaatatgtgggtagttacagtacrgtgcaagaaaaacaaccatatttcctgtcctctaggaatttgaaatctgtaaagaactctaacattggaaatgcctgataacatacatctgcagttatttgtggcaaaagacaaggcaaataggcaaatattcggtattataaaaaatgcacagatttcaaaggacaagtataggtggatttacatgcctacatcttttgaggtgagtggaaatttgtacatgataatctaggtgaggctgaggctccctggctgtgacagttccctttgggctattcccctgta

SEQ ID NO: 487274 - DNA, 609 bp, Homo sapiens
catgtgttacctgtttgttcatgatgtatttgtttgtgaactgtcttctccctagagcagtaccctatcaggacttaggctctggggatttcactgctcattctccagcctggcacataagaggtggtcagtaaaactgtcgaatgaatgagtgaatgagtgaatcacagttaacctcagttataaagatgtaatcatcagtcttcccaaaattcttacaatactggacactttaaaggaaatgaggcttttttaaaaaaagaaaaagcatttcctggcaggaatttatgtatttgtatgcaatatgtgggtagttacagtacagtgcaagaaaaacaaccatatttcctgtcctctaggaatttgaaatctgtaaagaactctaacattggaaatgcctgataacatacatctgcagttatttgtggcaaaagacaaggcaaataggcaaatattcggtattataaaamatgcacagatttcaaaggacaagtataggtggatttacatgcctacatcttttgaggtgagtggaaatttgtacatgataatctaggtgaggctgaggctccctggctgtgacagttccctttgggctattcccctgta

SEQ ID NO: 487275 - DNA, 488 bp, Homo sapiens
gtgtctgtttaaacagtctcttggaaaagtgagccatattcaataaaatcattaatttcatgtctgtgaatgtttctctagagccctttaaaatatgattttgaaggagcatagtagaaaatttgcattaagctgttatcagcctctaaaagggtattggactatcagtcctaaattgtaaatattaaaatattcayagaacattagtcaagaaggaacagtgcagctcatcaaattccagaagaatcaccattttaggtacctagtatgtgcctggctgtttatgtatgctgcatctgattctcaggataatttacaagtaggggggatttcctgccatttatagataaggacagggaggcccagggacacggatgaccacctagaagtgatggaactggaatttcaactcaatagcaccgaactctgaagtctgtctcttcttttctacaccaggaattttaaacttgggcttaggagtgggctgg

SEQ ID NO: 487276 - DNA, 553 bp, Homo sapiens
ctttttaagagctgttttaccagcacaccactgccagagggggaatttgtggattatacaggcatagctcacggaagctttactagggtttggaaccaggtaatgtaaagttatcaagaacaatgacaaatcttttctatgtttattttcctcttggtgtctctggagccacatggcgtctcttgtcttcttagatctctttggtcttctctctcgggagaaaatggccacctctggaacaatcaggtttgcgtaaaatcatacagtcaggcrtcacataataacactgcagtcactgatggaccatgtatatgacagtgctcccaaaagatataatggagctgggaaattcctgtcaactgatgatgtcatagctgccctaacatctagcacaacacattactcatgggtttgtggcgatgctggtataaacaaacctactttgctgccagtcatataaaagtagagcacatacatttctatacagtgcataataccataatacttgataatataataaacgactatgttactggtttatgtattcactata

SEQ ID NO: 487277 - DNA, 553 bp, Homo sapiens
ctttttaagagctgttttaccagcacaccactgccagagggggaatttgtggattatacaggcatagctcacggaagctttactagggtttggaaccaggtaatgtaaagttatcaagaacaatgacaaatcttttctatgtttattttcctcttggtgtctctggagccacatggcgtctcttgtcttcttagatctctttggtcttctctctcgggagaaaatggccacctctggaacaatcaggtttgcgtaaaatcatacagtcaggcatcacataataacactgcagtcactgatggaccatgtatatgacagtgctcccaaaagatataatggagctgggaaattcctgtcractgatgatgtcatagctgccctaacatctagcacaacacattactcatgggtttgtggcgatgctggtataaacaaacctactttgctgccagtcatataaaagtagagcacatacatttctatacagtgcataataccataatacttgataatataataaacgactatgttactggtttatgtattcactata

SEQ ID NO: 487278 - DNA, 553 bp, Homo sapiens
ctttttaagagctgttttaccagcacaccactgccagagggggaatttgtggattatacaggcatagctcacggaagctttactagggtttggaaccaggtaatgtaaagttatcaagaacaatgacaaatcttttctatgtttattttcctcttggtgtctctggagccacatggcgtctcttgtcttcttagatctctttggtcttctctctcgggagaaaatggccacctctggaacaatcaggtttgcgtaaaatcatacagtcaggcatcacataataacactgcagtcactgatggaccatgtatatgacagtgctcccaaaagatataatggagctgggaaattcctgtcaactgatgatgtcatagctgccctaacatctagcacaacacattactcatgggtttgtggcgatgctggtrtaaacaaacctactttgctgccagtcatataaaagtagagcacatacatttctatacagtgcataataccataatacttgataatataataaacgactatgttactggtttatgtattcactata

SEQ ID NO: 487279 - DNA, 553 bp, Homo sapiens
ctttttaagagctgttttaccagcacaccactgccagagggggaatttgtggattatacaggcatagctcacggaagctttactagggtttggaaccaggtaatgtaaagttatcaagaacaatgacaaatcttttctatgtttattttcctcttggtgtctctggagccacatggcgtctcttgtcttcttagatctctttggtcttctctctcgggagaaaatggccacctctggaacaatcaggtttgcgtaaaatcatacagtcaggcatcacataataacactgcagtcactgatggaccatgtatatgacagtgctcccaaaagatataatggagctgggaaattcctgtcaactgatgatgtcatagctgccctaacatctagcacaacacattactcatgggtttgtggcgatgctggtataaacaaacctactttgctgccagtcatataaaagtagagcacatacatttctatacagtrcataataccataatacttgataatataataaacgactatgttactggtttatgtattcactata

SEQ ID NO: 487280 - DNA, 631 bp, Homo sapiens
tgcaagtgcaggttaccgttacttctaatcctttcaggtagttctttccctagccttaggcactttactcacacaatgtgctgcagtacttgggtgaatttacaaaggcaactctatgcagttctttgsggttctctgtgtgcagccctgttctctccattattctgccttgtcaactgtaccttcgttggtttctctgaactcttagttccacttcctcaacataaggagtgtgccaggctctgcagggttctcccttcctgctccatggcctggaaattctatcaaggtagtaatctggggataatcatagtgctcacctcttttttttctccatccttcagggaccacggtccttcatttcttgatgtccagtattttgaaaatcattgtttcaaatattttgtctgtttttattcatttcaggagttagggtaaatccatcatggccagaaaataaatgccaaaaaacttactctgaaatgtatatggaaaaaccaggagctaagaagactcatcctataagatggtgattctctgttatcctcaaaccataagcatcagcattacctgagaacttgctagaaatgtaaattcttgggttccaactcatacttagttaattaaaagc

SEQ ID NO: 487281 - DNA, 574 bp, Homo sapiens
ttaacaaagtgccacatgctgcttataaatagtagaagtttattcctcacagtcctagaggttggaagtctaagatgtgtaagatgagggtgccagcaaggttgagttcttccatgttcttgcatcttctcattgtaytctcacagggcagaaagagagcaaactggctttctggcctcttcttatataggcactaatcccgttcatgaaggttccaccctcatgacccaattatctctcaaaggccccacctccaaataccaccacatcaggattagggttgccacacatgaatttttggagagacacaaacatttagtccattaaacctttctttttacttttacagattaattaacttagatgaagggaatcaatgttgtttctgtcaaactacatgtcctaatttccctttccattgagaggcaactatatattcttttattttgaaattcactttaatttccccttttatttttcagtagttaacttgctcttacagacaagttgagtgatatttttccctctgcatttgagcagtagttttaccagataaggaagagtgctgctgttg

SEQ ID NO: 487282 - DNA, 574 bp, Homo sapiens
ttaacaaagtgccacatgctgcttataaatagtagaagtttattcctcacagtcctagaggttggaagtctaagatgtgtaagatgagggtgccagcaaggttgagttcttccatgttcttgcatcttctcattgtattctcacagggcagaaagagagcaaactggctttctggcctcttcttatatrggcactaatcccgttcatgaaggttccaccctcatgacccaattatctctcaaaggccccacctccaaataccaccacatcaggattagggttgccacacatgaatttttggagagacacaaacatttagtccattaaacctttctttttacttttacagattaattaacttagatgaagggaatcaatgttgtttctgtcaaactacatgtcctaatttccctttccattgagaggcaactatatattcttttattttgaaattcactttaatttccccttttatttttcagtagttaacttgctcttacagacaagttgagtgatatttttccctctgcatttgagcagtagttttaccagataaggaagagtgctgctgttg

SEQ ID NO: 487283 - DNA, 464 bp, Homo sapiens
acatagtattcgctactctttttccaacttttattttatgttctggggtatatgtgcaggtttgttacacaggtaaatgtgtgccatggtggtttgctgcacagatcctcccatcacctaggtattgagcccagcatccattagctattcttcctgatcctctccctcctctccccacaccctgtgacaggccccagtgtgtgttgttcccctccgagtgttcatgtgttcttattattcagctcctatttataagtgagaacatgtartatttggttttctgttcctgcattagtttgctgaggatggcttccagctccatccgtgtccctgcaaatcacatgattttgttccttttaaggcttactctttacatcaatgtgtagtagcaactcaatttcccttagtaatcaggtcttgcatgataaatccagtccaacatttcagtctccctaagcctttag

SEQ ID NO: 487284 - DNA, 626 bp, Homo sapiens
gtctttcctcttccctctcaagtgcctcaggctgctactgagttcccactcctggaagtttccagccccaggaatgagcgattacataagtgcccccaaaccagaggattacgagctgcagtcacatttccacatccctttctgctgcctatgttcatgcagccagcttgttcacatctttgtgggtgacttttgttccacttctcactgttccatccccagaaaacatccagatgcatgttcagaccctgcaacccagactggcctttccaccatgtgttagaaactggggggtatcacccctcctgtttcactaataagccatgcttctgtcagaccgaaccgtgcttgctgtgccaattttgttaaacargttcactgtgcactggttagtaacttatctgagtccagtgagacagaacccagccttcacctcgagcaagtgacatgcagtgggtttattacttacagataggcagcaaggaggcctagattcattgggagctgattccccagagctcaggaaagctgcccagtgttgatggaatctccatttagtgtgccacacttgcacagcagatgagtgaccccagagagcagcccagcctgggttttatacctgaagg

SEQ ID NO: 487285 - DNA, 461 bp, Homo sapiens
atcattgctgaaaatgggtgaggagtacatggaggttcattataccattctatttttgtaatgtttggtattttccataataacaatataaagaactcctattaggatgtttaatggaaaaggcaggaacttgagacccttgagtattcagggtttagagagggaagaatgaagagggtgaggagaattccattctgtggaatcataaatatttcttgactgactaaatgataaattgcaggtatgaatgaattgataaccaaacctgattcttctaattctagtgcaaggcagtttccactaaagttcaagttaatgtctcttgtaaaacayagactacttactacctgtaggtttcaagattggagtttcttacttgtttatccaacattgtaccacatgctttgaccttgctgtgtgacttatctttccaaaatggcagaattgaaccttccttttgt

SEQ ID NO: 487286 - DNA, 617 bp, Homo sapiens
ccttgaatcctttctcctctagccattctggtcctctggttccttgaacacagtaagcatgctctccccagagggcctttgcccttcttgttccatttcctcttcctgaccacttttctcccagatattggcatgacgatcaccccttttaagtcttttcagacatcaccttctcagtgagacttgctgtgaccatcctaattgaagtcatccttcccctgcactcccttgccatgctttggatttcacctttgcactgactaccttctaaaaaactatatatattttcstagtttaatatgtttattatctgtttttcccctttatacagactccctgggggattttgaagcaatttaaagtttgggaagctctagtgttgatcatcctggtgacaaagtgctcttacatttcattattgaatttgatattactctatgagttggcacagtacgtactattagcccccatgtttttgttgttgttgcttaacagatgcagaaactagtgcgtagagtccaagatcacgagcagggccaagacttatattttggtcttcaaggagttggctccaaggccagtacttttcctgccatgacacgtcatcccccacatca

SEQ ID NO: 487287 - DNA, 631 bp, Homo sapiens
ctcattaacacggacatttttctcatcttgctcagtcctgggctctgttaccctgcaccatgtatcatgcctatgcagatgtcttcactctgctcaggctatggccttctgctagtccacctcagctctcctctcrttccaaccctacacagatgcatacttttatctgtcctacttaagggctttagaactgaactgttcaggaagggaaaggtagggagagaagggcaccatgtttgtctgggtgatcaccaagggcccttccaattcatgctatggggatttagactgtgagtgccagccactcagcattgcttactttttcatttcctgtaaccttcataacaaatctatgaagttgaccctatgctggcttagctacagattcccagctctaccttagtgtttcttggagctcaccaagtctggctctgtcttttgtagtttttctagccttagctttctgaatgtgtgttcgcaccccactgttatcctggctcttggtatgatgcctactgtcctggtgtccaggggtcttctgtccttttatgggtcacctacagggtctctgcactgttagagggcttagatggagagactgtcccagtgcctggcaccatgcctgcctccc

SEQ ID NO: 487288 - DNA, 605 bp, Homo sapiens
agtgtgggacataggtcccaactccataatagaacaactgggaagcactgggtcttcatttgggatccatagatatccagcaatgggttttagaggaatctgtgaacctaaagaattgtaggctrcatttcggacacatgtgtatgtgtgcacttttttcaataaggtcacaaatggatctgtgactcctaaatatttaataacgatgactataaagatatttcactaaattatttgtatgtaactcttctatgagatcgaacagcagactctgaaagcactggtcttaggagtttcagagatactcataagctatataatttttcactttgtttttagtaggtatgtagaattggttaaaataaactttcttactgaatgtatttacagactggatttttccaactaccacatggagactttttcattgaacccgtgaagaagcatccactggttgagggagggtaccacccgcacatcgtttacaggaggcagaaagttccagaaaccaaggagccaacctgtggattaaagggtattgtgactcacatgtcctcctgggttgaagaatctgttttgttcttttggttgttttattaaaacat

SEQ ID NO: 487289 - DNA, 623 bp, Homo sapiens
cctaattaggcaagctaagatggtaataggataaaataatcttaaaagttatttctgtctgatttagtgaacattgttcaatctttgttttgatgtagcctcagccaatttattttactaactctccttttcttgaactgatgttaaaatgtgtttgcaatccacagcacatactaaatggggtggaaattggaggtaaagtgatagaagcatatatggaatttaacatatcctgagctcattcacaaagcaaaggtgccagtgtttgtgtagcctgtgagacacttaagctasccagcagagtgaagaacagctttccacaactgaattctatgcattattcatatacctttacagcatctacaggaattatcaaccagttcatttataacttgtaccaattgttccacaacaagaaatgcaagaaatgttatatttctttattttctaaatcaaattcagttcaattcatgttccaactagccaaggttgacaagaagaacaaggtcaattcagatgtcagagataacttacaagaagtgatcataatcaaagatgaaatgctagggcttacacagtccagaaaagtccccaggtttatgtgatccttgcaaagacttcca

SEQ ID NO: 487290 - DNA, 671 bp, Homo sapiens
gctggctctgccttttccacagcccaatgttggggaaaaggagacttttttcttctgtgcctccaccatcacttatttcccacaaaatatgattcacatagtggagaggaagtgctgagcaattccatgcaaatttggtcagggtctccaaacatttatccatctctccatcttgagattcacacaccatggtaataaattctttactaagcccaaagcccttagatggattcctcccccccatcactatttcctctctcttttccttgtcttgcatcagcaccaccaaccagaacccaaggccccagcagacaccagcactgttctgagtccttcagaaggagtcaggagttaacattccctgttctgcattctcagccacttttccgattgactgctagcattaactattaaacaggcatttcctagggactcttttctagctggctgtttcygtaggacactccagatgacacatgtcagccctgagggcaatctgacaaagcagatcctcagaggtgcagaagtccaagctcagcagcctcatccagaattatccagcctcatccagactcctggggctcctctttctgaacgtcttcaattttctggtcactttgcctgacttccacctttgtgtggatcccttccaagaataaactgctgttaca

SEQ ID NO: 487291 - DNA, 655 bp, Homo sapiens
ctgcttcttagccattaaattacaaggtgactgagttcattaagattttcacacacaactaactcctcaaattgtatctcatacttttctaagactttcatgggcaaagctagtcagatgagctatggttatagcagaaagaggcaatctgtcgccatttgttttccaatagacaaagaggcattattttcaggttgattaaaactggtcactcaagccaaattccaggatgaggtcatgaagatcagtcactgtgaggtttattgccaaaggcaactgggggaaaaagagtccagttttctttgctgaaagacatattgccaaaattcaaattaaactttaaaattatactacctttctccatgttatcccatatatattaaaaataacaaagccaagcacaggtccttaaacgttagccttatgcgtggacattgtttagtatttacattgggttaaatactaaacgttgggttagtaccattgggttaaaccagtcattktttattatttctgctgttctctttctcttctctgaaaatggaaacctatttattttataaaactacacttacaagcaaaatattttggaacatgtttcattctgctcatataatgtacttaacattattattaaatattagagaattttaat

SEQ ID NO: 487292 - DNA, 564 bp, Homo sapiens
ccattacccaaaaaagaaagggaagctgggtatttggaaacaaccaacagaatctgccacaacaattctctttttgataccttatttcatcagtttacataattttatgcaattacaatggaaacaacgggcacaaagagatttgagaataaacacaactgactcagcaagcacacaactcaaatggtagaagccattagacactaaagggccagatagtagatatttttggctttgttggctatacaactctgccactgtagcaaaaaggcagccatagacaatatgaaaatgaaataacatggctgtgatccaataaaacttcatatacaaaatcaggctgcagggtggatttgggcccaggcacaggagtctgctakttcagggtgtcataggttcagacacatggctatacaaaggtgatgaaaatcaccaattctgcaagctactaggaactattaagagagcttctactctaatagaacctcccatttattgagcacacaccaagtgctaggcatgacattaggagctttattattatctctaatcctcacaacactc

SEQ ID NO: 487293 - DNA, 535 bp, Homo sapiens
ggggaagagatgatttggccatggtagctttctttctgtggttaatggaagaaagctttcaagataacaaattgatatgcttttgaaatgttcattagtgtaatattatcttgcaatctaggtaagagatgactacaaacttttcatgtagatccagtgagaattagaacctttgtaatgcaacgtgtctttttatttatattcttcctagtgagaccagggaagattaataatctggaataaaagatacaaattgacataaagggaattcttcttcctttttcaaactcaggactggaagcaatactactcttatacttagcaggcaaaagtagtagagaggagtggctgtgactgaaaacacacattagaggcccaagaagtggtgagggmcttgttaattgctaaagaaaggacagtagtttgacatgggaggtagggagagtattatctactagctgagaaaatgccccaatggggcaccccgaaggcctgatcagtgaggtctgagatatctgtatagtgcctggggata

SEQ ID NO: 487294 - DNA, 242 bp, Homo sapiens
tacaaattgacataaagggaattcttcttcctttttcaaactcaggactggaagcaatactactcttatacttagcaggcaaaagtagtagagaggagtggctgtgactgaaaacacacattagaggcccaagaagtggtgagggmcttgttaattgctaaagaaaggacagtagtttgacatgggaggtagggagagtattatctactagctgagaaaatgccccaatggggcaccccgaa

SEQ ID NO: 487295 - DNA, 521 bp, Homo sapiens
gtaaatatgtttttccaacttaaaattttcttagaattgtgtctctttatagatatatttatttggttcaggaaggacaatgagagattgtcaagtcgaacagactcactttacagacgaggataccaggtcctagaaaagttaattgaccagtcactgagctaactgcattgaatcatcgattgttctctaaagtccttccagctctactgcatgattatataaaccacaaatatatgtggcacccaaacaggggacatctgtttcaccagaataggataggcacatatgtatgtgaaaccttgtcaattcccaggaaggctggaaggggaggatggtctctaatcattcartagacatacattagggatctttggcaaactctccttggatatgcttaaataggcatttattaagcacttaatatgagtgcattaagatacaaaaataaaggatgaatgactaactcaggctgggatatctgagaagttttcatgaagagtagtatttaagaaggtttt

SEQ ID NO: 487296 - DNA, 437 bp, Homo sapiens
agggcggggtcctcttaaccgggagggctatcgtgtggacgggggcggtggctgcagactcggggattccggctccccagtgagaccggaagcgcggggaacgaatccgggcmgtccttgcgggagcgcccagggctagagcgagaggcttgtcaatcactactcgttgccacgacgacaggctttgggagccccgcccccggttgcctaggcgtcgtctggacctaccttggcaccctggagcggaagttgccgcctggacttctgggaagtgtatttcgggaccctccgtaggtacctgccatcttggctatgacccaagtctctcccagggtttcaggttgacttggcaccttgaagagtggaggcttggcccccaggatgaggcggccctcgaaatcgatgccacccacgggggaatgattctgcggtgccat

SEQ ID NO: 487297 - DNA, 437 bp, Homo sapiens
agggcggggtcctcttaaccgggagggctatcgtgtggacgggggcggtggctgcagactcggggattccggctccccagtgagaccggaagcgcggggaacgaatccgggcagtccttgcgggagcgcccagggctagagcgagaggcttgtcaatcactactcgttgccacgacgacaggctttgggagccccgcccccggttgcctaggcgtcgtctggacctaccttggcaccstggagcggaagttgccgcctggacttctgggaagtgtatttcgggaccctccgtaggtacctgccatcttggctatgacccaagtctctcccagggtttcaggttgacttggcaccttgaagagtggaggcttggcccccaggatgaggcggccctcgaaatcgatgccacccacgggggaatgattctgcggtgccat

SEQ ID NO: 487298 - DNA, 568 bp, Homo sapiens
tcgcatcagtaaagaagcaggtaatgacagatttgaatgaaaaataatattaaagagtctatgggatctttcctgccttatctccttgtatataatatatgtaatcatgtatatgtgtataaatatataatctcttaattattaacatttcaaaagattatttggcacttgctctcaatgagtccttgcaggaacctggcacaacaatgtatatagagataacaggtgattgacaaagaatttttgaggaaaaaaatatgtgcagttcatgcatataaacctcaatcatgtgtcctcttactcctttactagctatagattgtaagatgaagaaaaatggggaaaaaaagaaasatagaaatcttctgtatctaccattctaattttcaatcccaaagattaaaaggcttcaatgttaagattggaagggaaataactgactttaaattatgtatacataaataacatcacaggggctagagagcttttataggcaggcatggtctacaatactatgaaactgaagtggcaatgcttactgaccaaagaatatatgaaggtgaattca

SEQ ID NO: 487299 - DNA, 568 bp, Homo sapiens
tcgcatcagtaaagaagcaggtaatgacagatttgaatgaaaaataatattaaagagtctatgggatctttcctgccttatctccttgtatataatatatgtaatcatgtatatgtgtataaatatataatctcttaattattaacatttcaaaagattatttggcacttgctctcaatgagtccttgcaggaacctggcacaacaatgtatatagagataacaggtgattgacaaagaatttttgaggaaaaaaatatgtgcagttcatgcatataaacctcaatcatgtgtcctcttactcctttactagctatagattgtaagatgaagaaaaatggggaaaaaaagaaacatagaaatcttctgtatctaccattctaattttcaatcccaaagattaaaaggcttcaatgttaagattggwagggaaataactgactttaaattatgtatacataaataacatcacaggggctagagagcttttataggcaggcatggtctacaatactatgaaactgaagtggcaatgcttactgaccaaagaatatatgaaggtgaattca

SEQ ID NO: 487300 - DNA, 568 bp, Homo sapiens
tcgcatcagtaaagaagcaggtaatgacagatttgaatgaaaaataatattaaagagtctatgggatctttcctgccttatctccttgtatataatatatgtaatcatgtatatgtgtataaatatataatctcttaattattaacatttcaaaagattatttggcacttgctctcaatgagtccttgcaggaacctggcacaacaatgtatatagagataacaggtgattgacaaagaatttttgaggaaaaaaatatgtgcagttcatgcatataaacctcaatcatgtgtcctcttactcctttactagctatagattgtaagatgaagaaaaatggggaaaaaaagaaacatagaaatcttctgtatctaccattctaattttcaatcccaaagattaaaaggcttcaatgttaagattggaagggaaataactgactttaaattatgtatacataaataacatcayaggggctagagagcttttataggcaggcatggtctacaatactatgaaactgaagtggcaatgcttactgaccaaagaatatatgaaggtgaattca

SEQ ID NO: 487301 - DNA, 665 bp, Homo sapiens
tagctaatactgacacagtattcccatgggtccagcctgcttctagttgctttacacacatgtgaaccactttcatctgtacagcaacctgaggattttgggtactgttagcaccatgttgcagatgaggaaactgaagcagggtgaagttcagtaacttgcacagggtcgcacagctggtaaaagtgaagccaggattcaagcccgattactctggctttaagcccctgttcttaaccactaagccttgctgactcctgatggacgtacctaaagtggagacgagaggtagaaatgccttccacagatggtaccaccggcacgggcctggcattcgcaactgcttcctctttgtggaggctgaccattttctttcagtgtgtgcacatgtatataaaacttcttattgaaatataatatggactcsttagtgtacagcttgatgaatttccacaaaccgaacaagatcaagcaacacagaacaagatggacagccctgaaaaactaaggaaaacaaaaacctctgtcatttgtactaggtactaaattatgatgctggaaaacaacgtcatgaaaaacataagcctttaaaagcaaaaacaatagaaatgtaaaactttctgaaattgctagaggtatcaggcgttcctaaggcatagaaaaag

SEQ ID NO: 487302 - DNA, 495 bp, Homo sapiens
ctgctccgcatttgtgtactcagacactgcctttagtttgaaggggtttgtgctgggttttatactgaatgccttatattttctgttgctttcaatggctatcctcttacattctcccccagggcatcttctattgctctcttggcatgattatttacgttccacactggctctaccctgaaaataggaaatgcttcaggctttctttgtttaaaagagcttctttttaactttcaacatttctcaacattcatttatttttccatgggtaaccacagattcagaggaaaagaagttgtatttggatgtgctagttggtaacattcaattagcagactaaatcatttttaaaacacttattctgttactatactctctactttgatttattwattaatatgtaggtaatttattggctttgctagctcccaacacactcataactcaaatgggcaccattcttcttactgtgaaaaagctataaaagtcagagat

SEQ ID NO: 487303 - DNA, 501 bp, Homo sapiens
ccttaacaaagtgccacatgctgcttataaatagtagaagtttattcctcacagtcctagaggttggaagtctaagatgtgtaagatgagggtgccagcaaggttgagttcttccatgttcttgcatcttctcattgtaytctcacagggcagaaagagagcaaactggctttctggcctcttcttatatgggcactaatcccgttcatgaaggttccaccctcatgacccaattatctctcaaaggccccacctccaaataccaccacatcaggattagggttgccacacatgaatttttggagagacacaaacatttagtccattaaacctttctttttacttttacagattaattaacttagatgaagggaatcaatgttgtttctgtcaaactacatgtcctaatttccctttccattgagaggcaactatatattcttttattttgaaattcactttaatttccccttttatttttcagtagttaacttgctctta

SEQ ID NO: 487304 - DNA, 501 bp, Homo sapiens
ccttaacaaagtgccacatgctgcttataaatagtagaagtttattcctcacagtcctagaggttggaagtctaagatgtgtaagatgagggtgccagcaaggttgagttcttccatgttcttgcatcttctcattgtactctcacagggcagaaagagagcaaactggctttctggcctcttcttatatrggcactaatcccgttcatgaaggttccaccctcatgacccaattatctctcaaaggccccacctccaaataccaccacatcaggattagggttgccacacatgaatttttggagagacacaaacatttagtccattaaacctttctttttacttttacagattaattaacttagatgaagggaatcaatgttgtttctgtcaaactacatgtcctaatttccctttccattgagaggcaactatatattcttttattttgaaattcactttaatttccccttttatttttcagtagttaacttgctctta

SEQ ID NO: 487305 - DNA, 582 bp, Homo sapiens
atgctgcttataaatagtagaagtttattcctcacagtcctagaggttggaagtctaagatgtgtaagatgagggtgccagcaaggttgagttcttccatgttcttgcatcttctcattgtactctcacagggcagaaagagagcaaactggctttctggcctcttcttatatgggcactaatcccgttcatgaaggttccaccctcatgacccaattatctctcaaaggccccacctccaaataccaccacatcaggattagggttgccacacatgaatttttggagagacacaaacatttagtccattaaacctttctttttacttttacagattaattaacttagatgaagggaatcaatgttgtttctgtcaaactacatgtcctaatttccctttccattgagaggcaactatatattcttttattttgaaattcactttaatttccccttttatttttcagtagttaacttgctcttacrgacaagttgagtgatatttttccctctgcatttgagcagtagttttaccagataaggaagagtgctgctgttgcctatttttccttctatgtggaa

SEQ ID NO: 487306 - DNA, 556 bp, Homo sapiens
tggggtttaactattagcaaggaaaaggattgggggttattgagtagaaaataacagtatctgcaattgcagatagaaacattctctggactttctcttttcctcctagttttccaagttgcagtgggagggtttacactgttgcactatacagttgtaaagtgctagacttcacagcattccatcaggagaacttgccgggagttggttagacaggcttgargctggctgttggcccacacaaactgaactctctgcttttggtaatgactggctgagtgctgggtaccagggtgtggtagacagtgattgctgcttgcccattatccattcccctctttcttgctcactatttagcaaaaggaattaatatgctcagagacagaagtatatttccagcctcccgtgcagcaagaagtggtcatgtggcatcattctggccaatgagatacacatggaagcctctggttgggaaagttctttatagtggtagcctcacttggcaaaagcttttgaccttctgtctccttttgcctttcctgcttggacagagtta

SEQ ID NO: 487307 - DNA, 556 bp, Homo sapiens
tggggtttaactattagcaaggaaaaggattgggggttattgagtagaaaataacagtatctgcaattgcagatagaaacattctctggactttctcttttcctcctagttttccaagttgcagtgggagggtttacactgttgcactatacagttgtaaagtgctagacttcacagcattccatcaggagaacttgccgggagttggttagacaggcttgaggctggctgttggcccacacaaactgaactctctgcttttggtaatgactggctgagtgctgggtaccakggtgtggtagacagtgattgctgcttgcccattatccattcccctctttcttgctcactatttagcaaaaggaattaatatgctcagagacagaagtatatttccagcctcccgtgcagcaagaagtggtcatgtggcatcattctggccaatgagatacacatggaagcctctggttgggaaagttctttatagtggtagcctcacttggcaaaagcttttgaccttctgtctccttttgcctttcctgcttggacagagtta

SEQ ID NO: 487308 - DNA, 656 bp, Homo sapiens
gctgccctttatgtgtatatgtataattttctgtatttaaggtaaaacttctctactttagcatgctcacctaaaggtaaggggaacccccagcccccgcccgccaaacaaaacaaaacgaataggcctcagagcattaaatagctgccacaaagctagtcaaattagagatggcattaactgaggaaaagaagtttctataaagaaagttagcagtataggagaggagtcatcctggtagctgatggtgaagaaaggtaacaaaaagagccaactttaaaaatactgccatctgcagttatctgttagagttcttcctcattcagtaacaccctaaatggtctcctgattaggcgggcagagtagaatttgtgacatttagaaatatttctgtcaaaaatggttgaaattttttgggcatttgaaagataatctagaattacttggaaaatgaacattcataaaacaccgtaatctttgatgatctcagaataatgagtgttatgctgtaagayatgtatatgtttatttgtgccttcacatttctcttggaatttaaattgttttggaggtcacaatattttatagtttgctttttaaaaaactttacaagaatagtaaattttaagtaacaaaactgtataatatgtgggatc

SEQ ID NO: 487309 - DNA, 642 bp, Homo sapiens
ccatgactcagcattagcctttagttaagtattggtgcgtgtgtacatattattattgctatattgtcttaacaaagtagattaaaatggaacagcatctaagacacgctctagagatcggagaagttttttttgtttgtttgtttgtttgtttgtttttttgaggtggaatcttgctctgtcacccaggctggagtgcaatggcacgatctcagcttactgcaacctccgcctcccgggttaaagtgattctcctgcctcagcctcccgagtagctgggattacaggcgcacaccaccatgcccagctaattttttatatttttagtagagacggggtttcmccatgatggccaagctggtttcgaactcctgacctcaagtgatccgcccgcctcagcctcccagagggctaggattacaggagtgagccaccacacccagccgaagtttttttttgttttttgttttgttttgttttgttttttaatcatcatctgaacatggcctggaatcagagaagctctgacttgctataggacgaaaatatgaatatattgtatatagttgtccctcagttatacatggaggattggttccaggactgcctgaatatacccaaattgcgcatacacaagtccca

SEQ ID NO: 487310 - DNA, 642 bp, Homo sapiens
ccatgactcagcattagcctttagttaagtattggtgcgtgtgtacatattattattgctatattgtcttaacaaagtagattaaaatggaacagcatctaagacacgctctagagatcggagaagttttttttgtttgtttgtttgtttgtttgtttttttgaggtggaatcttgctctgtcacccaggctggagtgcaatggcacgatctcagcttactgcaacctccgcctcccgggttaaagtgattctcctgcctcagcctcccgagtagctgggattacaggcgcacaccaccatgcccagctaattttttatatttttagtagagacggggtttcaccatgatggccaagctggtttcgaactcctgacctcaagtgatccgcccgcctcagcctcccagagggctaggattacaggagtgagccaccacacccagccgaagtttttttttgttttttgttttgttttgttttgttttttaatcatcatctgaacatggcctggratcagagaagctctgacttgctataggacgaaaatatgaatatattgtatatagttgtccctcagttatacatggaggattggttccaggactgcctgaatatacccaaattgcgcatacacaagtccca

SEQ ID NO: 487311 - DNA, 576 bp, Homo sapiens
aaggtcagtagagttcctggtattcaggagatccagggattgcatggatccagtcatccagctagtcttgcattgatttcgcatcggtttagtcttgactgatttttgcattgattagatcttgcactgaataagctttttactgtggtttttcaggcctgaggcaggtgacagtgaaacaacctgttgaggttgtttcagtgagattgttaagcatcatatgtccaagggaaatattaatttcaccaagtcagacatatgtaagacagccatcctttcctctatatatcacacaaagctaaatggatctattatttgaaagaaacttgaaagaaaattttgcatatctacaaggagtgtggtatgaaggaaaaaagattaacatatccaaataatggtcctggctctgtcactaactaaccttgtgatcctgggcaggtttaacactctgggccccagtttacagacacctactgcctccagaacagttcttcccagtctgacttcttaacccatcgtattcrggctttcatccccagcacaacctacctgcccattgagaactgttagtgactc

SEQ ID NO: 487312 - DNA, 603 bp, Homo sapiens
tctcgaaatgtgatcatcctggattagggtggcccttaatctaataatcagtgcccttgtaagaaacagaagagacagacacagagggacacaaggaaaaaccacgtgactaagtagagattggcatgatgtgtctacaaatcaagragcaccaaggattgctggagccacaacaagctaggagaaggagaggcatgaaataagaccaggggcagtggctcatgcctgtaatcccagcattttaggaggctgatgtgggaggattgcttgaggccaggagttcaacaccagcttgggcaacatagcaagaccatctcttaaaaaaattttttttttttttttaaagaaaaacatggaacagattctccctcagagactccagaaggaacactgctgacatcttgattttggacttttggtctccagaactgtgagagaatacatttctgtggttttttagccaccaagtttgtggtaatttgctacaacatccctaggaaatgaagaacacaccctttcatcgagataggatcccaggttacatgtggttcatagacctggctaactcaccggatcctctcacatgggaatgtgaaacaaagt

SEQ ID NO: 487313 - DNA, 603 bp, Homo sapiens
tctcgaaatgtgatcatcctggattagggtggcccttaatctaataatcagtgcccttgtaagaaacagaagagacagacacagagggacacaaggaaaaaccacgtgactaagtagagattggcatgatgtgtctacaaatcaagaagcaccaaggattgctggagccacaacaagctaggagaaggagaggcatgaaataagaccaggggcagtggctcatgcctgtaatcccagcattttaggaggctgatgtgggaggattgcttgaggccaggagttcaacaccagcttgggcaacatagcaagaccatctcttaaaaaawttttttttttttttttaaagaaaaacatggaacagattctccctcagagactccagaaggaacactgctgacatcttgattttggacttttggtctccagaactgtgagagaatacatttctgtggttttttagccaccaagtttgtggtaatttgctacaacatccctaggaaatgaagaacacaccctttcatcgagataggatcccaggttacatgtggttcatagacctggctaactcaccggatcctctcacatgggaatgtgaaacaaagt

SEQ ID NO: 487314 - DNA, 618 bp, Homo sapiens
agagctgcccatttgaagagttatctctcaccactgtcactttctatgtgactgtagtagagcggcagtgcrttattagcttatacccacataccaacatgactgattcatgaacccagctcaggctcttgcctcttccattggccactgaaaagaaagccccagagaccatagctgtgagctgagaaagaggcaatggtgaaacactagcatgtgacatggaaataagtgccatgcagcctactttcactctctgaactatctcaagccccatcctggatctactactggcattttatctgagcccaaacttattacttggtaggctgacagtatccaacttataatggaaagacatggctgaatgagcacttgttaacacatcaatagatgctcatcttctaccagggtctaatagcatgccaggatgtttttcaaatggtgtgtaatactctgtggcagatggcataaacttgctccagaatcctatgctacaattctcttattgtggctctccagaggctccacgcagtgttttatctttctatatttttatttttattttcagtcagctttctcaggttgaacaggcattacttttctactagatatacctgt

SEQ ID NO: 487315 - DNA, 618 bp, Homo sapiens
agagctgcccatttgaagagttatctctcaccactgtcactttctatgtgactgtagtagagcggcagtgcgttattagcttatacccacataccaacatgactgattcatgaacccagctcaggctcttgcctcttccattggccactgaaaagaaagccccagagaccatagctgtgagctgagaaagaggcaatggtgaaacactagcatgtgacatggaaataagtgccatgcagcctactttcactctctgaactatctcaagccccatcctggatctactactggcattttatctgagcccaaacttattacttggtaggctgacagtatccaacttataatggaaagacatggctgaatgagcacttgttaacacatcaatagatgctcatcttctaccasggtctaatagcatgccaggatgtttttcaaatggtgtgtaatactctgtggcagatggcataaacttgctccagaatcctatgctacaattctcttattgtggctctccagaggctccacgcagtgttttatctttctatatttttatttttattttcagtcagctttctcaggttgaacaggcattacttttctactagatatacctgt

SEQ ID NO: 487316 - DNA, 648 bp, Homo sapiens
acatgcacacatatgtttattgtggcagtattcacaatagcaaagacttggaaccaacccaaatgtccaacaatgatagactggattaagaaaatgtggcacatatacaccatggaatactatgcagccataaaaaatgatgagttcatgtcctttgtagggacatggatgaaattggaaatcatcattctcagtaaactatcgcaaggacaaaaaaccaaacaccccatgttctcactcataggtgggaattgaacaatgagaacacatggacacaggaaggggaacatcacacmccggggactgctgtggggtgggggtaggggggagggatagcattaggagatatacctaatgctaaatgacgagttaatggttgcagcacaccagcatggcacatgtatacatatgcaactgacctgcacattgtgcacatgtaccctaaaacttaaagtataataataattaaaaaataaataaataaataaataaatttatctactccatagaaatgcaactaacttgattctcatagtggaaaaacagaggtagtgaactaatctataccatccagttgatcacagaatgcaaaagtttcaatggtccttatatatcatttactttaatctcttcatttttcagatgcta

SEQ ID NO: 487317 - DNA, 648 bp, Homo sapiens
acatgcacacatatgtttattgtggcagtattcacaatagcaaagacttggaaccaacccaaatgtccaacaatgatagactggattaagaaaatgtggcacatatacaccatggaatactatgcagccataaaaaatgatgagttcatgtcctttgtagggacatggatgaaattggaaatcatcattctcagtaaactatcgcaaggacaaaaaaccaaacaccccatgttctcactcataggtgggaattgaacaatgagaacacatggacacaggaaggggaacatcacacaccggggamtgctgtggggtgggggtaggggggagggatagcattaggagatatacctaatgctaaatgacgagttaatggttgcagcacaccagcatggcacatgtatacatatgcaactgacctgcacattgtgcacatgtaccctaaaacttaaagtataataataattaaaaaataaataaataaataaataaatttatctactccatagaaatgcaactaacttgattctcatagtggaaaaacagaggtagtgaactaatctataccatccagttgatcacagaatgcaaaagtttcaatggtccttatatatcatttactttaatctcttcatttttcagatgcta

SEQ ID NO: 487318 - DNA, 424 bp, Homo sapiens
ctgggcatggtggctcatgcctgtaatcctgacactttgggaggtggaggcgagaggattgcttgagtacccagaagttcaataccagcttgggcaacatagtgagacctcacttctggaaaaaaaaaaaaaaaaaaaaaaaaaggtgaaatttatttaattatttatttaatttttaaaaacacttgaaaagaatattacttgttataattaaattcttctcactcttttggtaatctggcagrtggtagatttttttaaattttttttgttggagatggcaatcctccgtcaattacccatttgtatttatttattaacattattttggttttggaagccccaaatatctgggattcagtgatgtggagggtagtatagacgcccctgggctatgtatagctggacagtataaaggaagcag

SEQ ID NO: 487319 - DNA, 619 bp, Homo sapiens
ttcacatgatttttctaaaatcaatctcatgtgtatctttctgaaataggaaacagtttcacaaagttgttttgcaaatcaaatgtggtgacatattctgaaaatgtttaaagctgaaacaccttgcaaatgtaaagatatttattattttaataactactgttgatattttattgattcatatttctagataagaaaattgtttgattggttccttgagcttgatagctaagttgtccatcaggagacacatcccaaagctagctagaaggctgtggaaactaggactgaagcaacagacttttaacattcttaattattttgccagaaacttttaagttctctcattcctctcaggaattaaaacataccctgaatacagacagcttttactgatccagaaccaacaacaaaatcttctggttttttttctaacattatttctgaccaaatctctttttaatacagtttttaaacaacaataaayatagattatgataatatttgaaggatctttaatagatcttttagtaaggttgctagatatagcaaataaaactataaactgtccagttaaatgttaatttcagatgaatgatgaataaatttttggtataag

SEQ ID NO: 487320 - DNA, 655 bp, Homo sapiens
gtatgtggcacattagggatcactgaatgccagattgggggttttttttgtttgtttttttttcagttgagtggatcctcttcattttacagatcagataactgcttcccagaaaggtgaagtcatttgtcccaaggttacacagagaggtctcaaatccagtctcctgccccgatgcctcttctttatcccactgtcttcacacatctttgcctgcatgttccactgtacattgctctttggtactagttgtcaatgtttcccatctcccacatgtgtctgtcagtccctatagaatcacaggtaaattttcgacaaaagtagaggtggatttccatgaagctgattaaagattaggctttgggtaccttccaagtgggctttacaatgtgtttgtatggtcacctgctttctgtcacttattcataagaaagacattgtgtatctttttccttaaagaggactggcaaactgtaaaagcttcaagccccaacagtatcaatccacctctgctcaaacaggggcaaaatgggaggaaaatcaggctttgttagctcagttagcatcttgtatcaatccgcactgatcacctaaaataggcytccccttcccattgttgttacacccaggaaaccttcccgagtccccaggatgg

SEQ ID NO: 487321 - DNA, 479 bp, Homo sapiens
ttttaccaccctaattcaaaggttacaaacctaaataaccatggaaaggcatgcacaggaaataataaatgtatattcaatgtccattacccttgttcatgagggaagctttgaaatagagaatccaaaacaaatgttaacctccaaatcactcatacttccacttgaagtgtatttgttaattgtaaattgtttccctattttatctttacttaggtgagggcttcaaaacttcagcactattgacattttagactggacaagtctttgctgtaggggctgttttgtgcattgtaggatgttactagygtccctggtttctaccaatagatgccaaaagcacctcatatttgtggcaaccaaacatgtttacagacattgccaaatgtcccctttggagccaaaatctctcccagttggaaaccactgatttacactgctataaagattagttcaccttttctgctgggcacacacca

SEQ ID NO: 487322 - DNA, 604 bp, Homo sapiens
aaagattctcatttgtcttcttgcatgaagtacattttttaaaaactctattcaagattattttatgattaaaaggcatctttcttgaccacaaatagtcataagaatattcaaatatgaatttgagaaaactgccttgcaggaaaagtgttactttttttgttgagrtccagtgttactctgtcacccaggctggagtacagtggcaggatctcagctcactgcagcctccacctcccaggttcaagcaattctgcagcctcgcctccctagtagctgggattacagacgcccaacacaacgcccagctaatttttgtatttttagtagagatggggtttcaccatgttggccaggctggtctcaaactcctgacctcaagtgatccacccacttcggcctcccgaagtactgggattacaggcatgagccaccacgcccgaccaagtcttttttacttttaaactaacatacaaacattatggatgtacttcaacagtctccaaagtcactgacatatttaagataaaacactaaggctaaactttcaggtggccatgtttaaatatggataaacatcatcaaacgaaaggggctatattcc

SEQ ID NO: 487323 - DNA, 607 bp, Homo sapiens
ctgttctcaacaactctgccatcataatatgacagtcacatacacaagacaaaacttcaataaactgtttagggagtgccacacaactagcctcatgtaaacagtaacaagtcactcccgacccgaagcagagacaagataaaccgcacaaatgcccaaagcgttaatcacatctctaccactttccccatccaagaaagcctatcagtatgcaagagaataagtaatatctatatgggtatttctaaataggtccgaaattaactctctaaaaactaatcactttaacactctgacattattaccaaaaaaaaggtaattcctgaattaccttcccacgtgcactgccacacccatgtcaccagcaccaaaatttgactggctgctagtcaggtacacatgctgaccaagttgaaatatggagasagagtatttctatgaggtatttaaaagcgacaattaggaagagggtagacaaacacaagagccactcagagggcttggacggaaaacaattctctgaacaacctgggatagggatggtcctttacaggaactgctcacatcaacctcagtcgagtccacaaaccaagcagaaatcatgaaa

SEQ ID NO: 487324 - DNA, 611 bp, Homo sapiens
gtttctgagagatgggtattattaattttgctgctatgacatcgaacagcttgcattaaaaatacacgctagattgtggctctttggcttgattggtacaatgcaccagagatttcaaaaaaacgctgaccactccacagttcagttggccttattaatgataaatcctatcacctccctttactttaatgctttgcttccctagaattcaatttgaatcaatcctatgattatttctaagcatgcaccttgctagtgctcaaaaaatgagaggacacaatcttattactatttgttagtagctggrgtttatagcatcacaggtgttataatgtaagcctgggaaacagtcaacaagaatgaggaccacagtctcaaagagaaggccagggatggagccagctccacctggggatctaaactagggtatcttggctgccagtaatggacatttatgtaatttttctcaagtaatggggattagaagatgttattataagaacctatgacctggtagagaaaagtcatcatgaacttggacagatctgcgaacccatttttctctccatctcctctgtctttctctcatggcatgtctaccatgtccacat

SEQ ID NO: 487325 - DNA, 589 bp, Homo sapiens
tatgcgtccctttttattccttgtgccgattgcacattctccagataatggcaaggtattggctctccttcaaaacactcaattgtgcagcagaggaaagaaaaggattccttgtaagctttttcatgtctaaacacaaaaatagctctcttcctgggcctgcccagtgggcttcctttccctctggacatctacagagtactgctgactggactagtgytcatcaaaggtggtctgtggaccacgtgtattcgaatagtttaaaagcttatttaaaatgcagatttctgggactcactggagacctagtgaatctgatctcctaggtagagccaaggactgtgcatttttaacggctccacaccccaaggattctaaggcatcctagggtttaggggccactgggtttgtccagccatacagccctcaccttatcctgctgcctgcgttgtcacttggcttcctacatttgagtgtctcttcttcccagtgcaattctaagcacaagggatgcgtttgaaattctttctttgtccctgttagtgcctagttcgctgtaggtgtttaaaaaatttttttgttgaatgaa

SEQ ID NO: 487326 - DNA, 589 bp, Homo sapiens
tatgcgtccctttttattccttgtgccgattgcacattctccagataatggcaaggtattggctctccttcaaaacactcaattgtgcagcagaggaaagaaaaggattccttgtaagctttttcatgtctaaacacaaaaatagctctcttcctgggcctgcccagtgggcttcctttccctctggacatctacagagtactgctgactggactagtgctcatcaaaggtggtctgtggaccacgtgtattcgaatagtktaaaagcttatttaaaatgcagatttctgggactcactggagacctagtgaatctgatctcctaggtagagccaaggactgtgcatttttaacggctccacaccccaaggattctaaggcatcctagggtttaggggccactgggtttgtccagccatacagccctcaccttatcctgctgcctgcgttgtcacttggcttcctacatttgagtgtctcttcttcccagtgcaattctaagcacaagggatgcgtttgaaattctttctttgtccctgttagtgcctagttcgctgtaggtgtttaaaaaatttttttgttgaatgaa

SEQ ID NO: 487327 - DNA, 485 bp, Homo sapiens
accttgagtgtctctggggctacttctttttattcactcggcctcacctgtcccaccagcccttggcatggctgttctacctgaaatttttgctatgtgttcattcatactcactarcattgacctttcttgaatgtatttttccatttgaggctcatcacctttctttttcaaaggcatggtggcatcactctttggtcacaatgacttctactttttcgaggctgaacatcttcaagatttagagtgagcccctcctcttcaaacacctgcaaaaacatttaaaaataagctagtttcagggtatggtttttctttagtctaccaaatttattcataatacattatgcaggtgttttgaatggaatccagaaacctctttagataccatatttctctgaaatgtgagaatggaagatcattgctattccaggacaagtcttgtgcatagagctttttattgctttaatttgcattatttcatt

SEQ ID NO: 487328 - DNA, 667 bp, Homo sapiens
tccagttgggaaatgatgggcattcaggtgaaatgggtggcagcagggatggtgagaaatgaatacattccagggatgttaaggagacagggttgasatgtctgaggctgctgtgaggatccaagagatgatgatgatgacagtgctgatattaacaatactattgactgagggtttgtgtgtaccagttatttatataagttatttgaaccaaagaaaaaaaaattgaccacatctcatgcctgcatagttgctgtaaggatcagagatcacataaagtgcccagcccatagcagatccttcatcattggtaaaaactggcctttgaaactcctgtgttagttaagaagccctagtttgtggacatgggtggatgttgtcggcagtggaacataatcaagacagaggctccatcaccttctgagcatcaggttagattcctcctgtaacttttcaaagctgcagatattcaaccccacctccattcagttagtccaagataggggtcttggtatcagtgttttaaaagctccccagatagccagtgttgagaagcactgaagttaaaagaagtctttggaatcagacaaatcagggtgacatcccagccctgcccttcacagtagttttccttgactaagcctcagatttcctatttgaagaagga

SEQ ID NO: 487329 - DNA, 484 bp, Homo sapiens
ccagttgggaaatgatgggcattcaggtgaaatgggtggcagcagggatggtgagaaatgaatacattccagggatgttaaggagacagggttgagatgtctgaggctgctgtgaggatccaagagatgatgatgwtgacagtgctgatattaacaatactattgactgagggtttgtgtgtaccagttatttatataagttatttgaaccaaagaaaaaaaaattgaccacatctcatgcctgcatagttgctgtaaggatcagagatcacataaagtgcccagcccatagcagatccttcatcattggtaaaaactggcctttgaaactcctgtgttagttaagaagccctagtttgtggacatgggtggatgttgtcggcagtggaacataatcaagacagaggctccatcaccttctgagcatcaggttagattcctcctgtaacttttcaaagctgcagatattcaaccccacctccat

SEQ ID NO: 487330 - DNA, 484 bp, Homo sapiens
ccagttgggaaatgatgggcattcaggtgaaatgggtggcagcagggatggtgagaaatgaatacattccagggatgttaaggagacagggttgagatgtctgaggctgctgtgaggatccaagagatgatgatgatgacagtgctgatattaacaatactattgactgagggtttgtgtgtaccagttatttatataagttatttgaaccaaagaaaaaaaaattgaccacatctcatgcctgcatagttgctgtaaggatcagagatcacataaagtgcccagcccrtagcagatccttcatcattggtaaaaactggcctttgaaactcctgtgttagttaagaagccctagtttgtggacatgggtggatgttgtcggcagtggaacataatcaagacagaggctccatcaccttctgagcatcaggttagattcctcctgtaacttttcaaagctgcagatattcaaccccacctccat

SEQ ID NO: 487331 - DNA, 589 bp, Homo sapiens
taaatttctgtgactgacatgacctatgcctggggcttcgctagggcttgccaggttcactctgcccactcagccaagcagtctgtgcttggctcatgctactggcctgaatcccacatttgttgtggctctgtgtccagcctgtggctggactgggcatgccaaaagtggcttctgcattgggtgccagcatctagacaaagagaacgtggtagaatccaaaaactcagagatgcaagcagcccgggtcccaagggatgttgcagctcttacttggggagtcttgaggyctgaactcccaagaaatgttgcagctcttcactcctgtaacttggcaagttggagcatgttgcaagcccttttattcccactgcttgcagctcggtgaacagaagggtgtggcactcagtggctttttctcccccacaattcagtgagtgggagtgtgctacagctcttttattcccatcacctgcaccttggtgggcagaaaggagagttgcagctcattcattcccaccaccctcatctcaacgaatgggagggttacagcttgtttgttcctgctgcccgcagctcagcaagctcc

SEQ ID NO: 487332 - DNA, 607 bp, Homo sapiens
ctgcctacaagctagagagaggggcctcaacagaactgaccatgctgacactcaggtctcaaacttcaagcctccagaactgtgggaaaataaatgtctgtwgtttcaaccacccagttttaatatcagtcttgacattttattatggcagcctgaacaggctaacacagtgagcaatatagtttttgtttttattctatcttaagaaaaatataatggaatatggttaagtcaatacaaaatacatatattcttaatatatagtcactagatatgtgttgaataaatgaaaaatattgtgaggtcatctgggcaaagtccaaacatttcaatattagtggacattttatttctgtgacatattattacttacaatttattcagcttaaaaaatgttcaccgtgtataaacctgtaatgagagctttcaaaatatttctatagtcttctcctccagaatgtagaaataaagtctttttatatatgatttttgttataaaatctttgaggtcattaaacccaagcatgctttgaaaacctcttttgcctagggtcttctctgttctgtaacaaagctttctgtacatagggcagatgttccaaactct

SEQ ID NO: 487333 - DNA, 607 bp, Homo sapiens
ctgcctacaagctagagagaggggcctcaacagaactgaccatgctgacactcaggtctcaaacttcaagcctccagaactgtgggaaaataaatgtctgttgtttcaaccacccagwtttaatatcagtcttgacattttattatggcagcctgaacaggctaacacagtgagcaatatagtttttgtttttattctatcttaagaaaaatataatggaatatggttaagtcaatacaaaatacatatattcttaatatatagtcactagatatgtgttgaataaatgaaaaatattgtgaggtcatctgggcaaagtccaaacatttcaatattagtggacattttatttctgtgacatattattacttacaatttattcagcttaaaaaatgttcaccgtgtataaacctgtaatgagagctttcaaaatatttctatagtcttctcctccagaatgtagaaataaagtctttttatatatgatttttgttataaaatctttgaggtcattaaacccaagcatgctttgaaaacctcttttgcctagggtcttctctgttctgtaacaaagctttctgtacatagggcagatgttccaaactct

SEQ ID NO: 487334 - DNA, 607 bp, Homo sapiens
ctgcctacaagctagagagaggggcctcaacagaactgaccatgctgacactcaggtctcaaacttcaagcctccagaactgtgggaaaataaatgtctgttgtttcaaccacccagttttaatatcagtcttgacattttattatggcagcctgaacaggctaacacagtgagcaatatagtttttgtttttattctatcttaagaaaaatataatggaatatggttaagtcaatacaaaatacatatattcttaatatatagtcactagatatgtgttgaataaatgaaaaatattgtgaggtcatctgggcaaagtccaaacatttcaatattagtggacattttatttctgtgacatattattacttacaatttattcagcttaaaaaatgttcaccgtgkataaacctgtaatgagagctttcaaaatatttctatagtcttctcctccagaatgtagaaataaagtctttttatatatgatttttgttataaaatctttgaggtcattaaacccaagcatgctttgaaaacctcttttgcctagggtcttctctgttctgtaacaaagctttctgtacatagggcagatgttccaaactct

SEQ ID NO: 487335 - DNA, 635 bp, Homo sapiens
tttctatgggaatatatattacaaatcataaacttataaataaatattaaaaaaaaattatcataagtttgaaactgccttcattatctgcgatgtatttgataaagttcccagtgatatgcaaaaatctcaggagttttcttggacttgaatacagaggaaatctaaatttacacatcattattccaaacaagctactaaaacttcactgcaagagggatgagtcatttttgatcaatatccatttatagacaaaccacagagtgagtgtattaatttagaattttaaaagtgaattacacactttcatcaaaccaacaaaagtgtacattaaatgaggctgtggtaacacagagctcaaagaccaagtatttattaataaaatgtaggctttctcttcttaaatatgttaaacacatttccttaatgtttgtaaagagagctgagaacctcaattcatactctatgggaatcactggaactttttcttaagaagaaagataatactgtacttgttcttagcctaaaagctaagaattgataaaaaataaaaaatatataatatacttgcttttaaattaagartcaataagtaagtactccgcagaggtggaaatgaaaggctttgttattag

SEQ ID NO: 487336 - DNA, 558 bp, Homo sapiens
tatgtagaaaaattttggttgagaaaaacagtaattaaactgagcttgtttgcgtcttataaatgataccaacttcagcaacaaatagatgaaaaataatattttcaaccttcaatttgaagtcaagtcattggggaatttgaatagaaattactaaccaaacttaatatgctgttaatctatttcctatggccttaatgaatgactaacaacaatttctgcaaaaactaacaaacaaacaaacaaacaaaaaacctaaattactcttccagagttaggatattagaaaagtttcctagtgtagcatttccagagacatgagtattttaagtgccttatgttttggttacattttattatattamtctatttaaactacctatctatatagtctttggtaaatgcctgattcaagtaatttcagtttccatttctatattaatattaatatgtgatgagatgattgtcagcaaacttagaataacatatataagaatatgatatatacgtaagtgtgtgtacgaaaagtatgatatgaataatagcaacatgcaagcc

SEQ ID NO: 487337 - DNA, 371 bp, Homo sapiens
gtgatggaaaattctctcttggttctgttttatgggtctcctttytcagaccacgcctgagtcccagaacagaacatttagagatgggtctgctggccttgagttcactttgccgtgctcaacttccaagcttacggggctccttgaagacaagtaactctgatgttctgtgtcaagcaccagcataagaatcattgtcaaggaaaaagtactttgtggcttttcccatttaaggttctgaaggtttccttgtggaaaccaggcactactcccactattcatggacctaaaatgtcccatcactatctgatatggtttggctctgtgtccccacccaaatctcatctcaaattgtaatccccatgtgtcaa

SEQ ID NO: 487338 - DNA, 584 bp, Homo sapiens
cacggactctgtttgtgttccctggtggcactagtgcctgttttcctgactctgacttcctgggtctcggcaccacagatagcttctgcgtttctctacaggagggaagaarcaatttgcaattctgagcttcatgagggaggagaataactactatgaaagcataaaaacgattgactttttttttttttttgagacagagtttcactcttgtcacccaggctggagtgcagtggcataatcttggctcactgcaacctcctcctcttgggctcaagagattctcctgcctcagcctaccaaatagctgggattacaggcgcccgccaccaggccagctaatttttctgtatttttagtagaggcgcggtttcaccatgttgggcaggatggtctcaaactcctaacctcaggtgatccgcctgcctcagcctcccaaagtgctgggattacaggagtgagccaccgcacctggccaaaaattgattgacttttaaagtagaataacagtgagcatgtttgtacatgcctgcactgatcacaattaactttcagtcagttcacaattaactttcattgatttg

SEQ ID NO: 487339 - DNA, 584 bp, Homo sapiens
cacggactctgtttgtgttccctggtggcactagtgcctgttttcctgactctgacttcctgggtctcggcaccacagatagcttctgcgtttctctacaggagggaagaaacaatttscaattctgagcttcatgagggaggagaataactactatgaaagcataaaaacgattgactttttttttttttttgagacagagtttcactcttgtcacccaggctggagtgcagtggcataatcttggctcactgcaacctcctcctcttgggctcaagagattctcctgcctcagcctaccaaatagctgggattacaggcgcccgccaccaggccagctaatttttctgtatttttagtagaggcgcggtttcaccatgttgggcaggatggtctcaaactcctaacctcaggtgatccgcctgcctcagcctcccaaagtgctgggattacaggagtgagccaccgcacctggccaaaaattgattgacttttaaagtagaataacagtgagcatgtttgtacatgcctgcactgatcacaattaactttcagtcagttcacaattaactttcattgatttg

SEQ ID NO: 487340 - DNA, 634 bp, Homo sapiens
ctacccagaactgactactcatccttgaagttacgtgaaataaaaataaaacagggctgggcacggtggstcacgcctgtaatcctagcactttgggaaggccaagacaggtggatcacctgagttcaggagttcgagaccagcctggccaacatggtaaaaccctgcctctactaaaaatacaaaaaaattagccagacgtggtggcagacacctgtaatcccagctactcgggaggctgaggcaggagaatcgcttgaacctgggagttgcaggttgcagtgagccgagattatgccaccacactccagcctgggcaacaagagagaaactccatcatatatatatataaaaatatatatatatataaaaatatatatatatataaatatatatatataaatatatatatatatataaaaatatatatataaatatatataaaatatataaaaatatatatataaatatttatttatttatatattatatatataaataaaacaacacttagttacaacaaagcctaaaataaaagagaggtggacactcttaccaaagtttaaggagggagggatgcgtcagcagagccaggctgccttggacttggtctgctttgaccctgacatctaag

SEQ ID NO: 487341 - DNA, 634 bp, Homo sapiens
ctacccagaactgactactcatccttgaagttacgtgaaataaaaataaaacagggctgggcacggtgggtcacgcctgtaatcctagcactttgggaaggccaagacaggtggatcacctgagttcaggagttcgagaccagcctggccaacatggtaaaaccctgcctctactaaaaatacaaaaaaattagccagaygtggtggcagacacctgtaatcccagctactcgggaggctgaggcaggagaatcgcttgaacctgggagttgcaggttgcagtgagccgagattatgccaccacactccagcctgggcaacaagagagaaactccatcatatatatatataaaaatatatatatatataaaaatatatatatatataaatatatatatataaatatatatatatatataaaaatatatatataaatatatataaaatatataaaaatatatatataaatatttatttatttatatattatatatataaataaaacaacacttagttacaacaaagcctaaaataaaagagaggtggacactcttaccaaagtttaaggagggagggatgcgtcagcagagccaggctgccttggacttggtctgctttgaccctgacatctaag

SEQ ID NO: 487342 - DNA, 459 bp, Homo sapiens
tgcacactggctataacaagatggttttgttcatccgatgtgtgtgtccccaggacaagtcgatgaaggctgaaatctttcccttctggtctggttacatctggaagccactgggcagttaggctgggccactccagagcatgggtcatcaccaaattataaagaaaaggggtgttctttttccatattttgtattccttgttgatcactcattcttccactgtgttgtcaaaggctgcttccttgtcggccatggcgggcaggcgagccgggggaatcctggggtcgagcgttgtgggaggggcagggaggctgcaggcgttcgctctgcrcacgcggcctctattttttttttttaattaacaaattgaaggtttgtggcaaccctgtgtcaagcaagtctattggcaccattttttccaaaagcacatgctcactctctgtctctttgtgtcacat

SEQ ID NO: 487343 - DNA, 459 bp, Homo sapiens
tgcacactggctataacaagatggttttgttcatccgatgtgtgtgtccccaggacaagtcgatgaaggctgaaatctttcccttctggtctggttacatctggaagccactgggcagttaggctgggccactccagagcatgggtcatcaccaaattataaagaaaaggggtgttctttttccatattttgtattccttgttgatcactcattcttccactgtgttgtcaaaggctgcttccttgtcggccatggcgggcaggcgagccgggggaatcctggggtcgagcgttgtgggaggggcagggaggctgcaggcgttcgctctgcacacgcggyctctattttttttttttaattaacaaattgaaggtttgtggcaaccctgtgtcaagcaagtctattggcaccattttttccaaaagcacatgctcactctctgtctctttgtgtcacat

SEQ ID NO: 487344 - DNA, 625 bp, Homo sapiens
gggtcctttgttagagcaagtaaactccaacagtaagaatgtagacatggaggggacgtggtagctcacgcctgtaatcccagcactttgggaggctgaggcgggtggatcacttgaggacaggcgttcaagaccagcctggccaacatggtgaaaccctgtctctactaaaaaaaaaacaaaaattagctggcgtcatggcgcacgcctgtagtcccagctcctcaggaggctgaggcaggagaatcgcttgaacccaggagctggaggttgcagtgagctgagatcataccactgcactccagcctgggcgacagagcgagactctgtctcacacaaaaaaaaaaaatgtggacatggactgcccagtggccacargctaagaagagaatcattaggaactgtccaacctaaaattcaagggagcaatcagccaagcagagaacctccagagaactcaaaaaagtaggaaggagtcagcttagatgagtcacactagggtacccccagctctaagcacacatcaggcctagaaggacaaactcataaaacaagtgagagctgctgtctatcctcacctcttctctcttctctcccactttgagtcagggcactgtctgggtca

SEQ ID NO: 487345 - DNA, 618 bp, Homo sapiens
ctgatcacttccatgtctgatcaggttcctcatcttccaccccctcccaaggccaagcagtagtaaactgccgagaagttataactgcattaacaaatagaaacagtcaaatttaaaaacaagctgcaattactcttttgaaacaccaaaatgaataaataaataaaaaagagtcctccttttcagacggttccctttttaatkccattatagcatttatagtgtcattactgttgttcctcaggactcggactgtctttgctcatcacccctttgtttatgacataacaaattctatgcccttaacttccacatttgtttcattacacctcaccacttcatctcctcttgcactattggaatctgtgctttttaatgtgctacaattggcttcaccctgacctttgaatttctcagcatctggtagctgtacttgctgagatgtatctttgctcttggcttcccccaaaatgtagaggtatctgaagctgggctcttgtagacatctggccttgggatgacaaagagggtatttttaggtttcctaatggtgattgtagtaacctctataacggctcaatgacctaatttggacatggtctaccactccatcttgtt

SEQ ID NO: 487346 - DNA, 565 bp, Homo sapiens
gaaattaactctagagccagctttctctaagggtgaggttggagagaaaacagttcttcctcagccatttcctcttcagtacctggcaggccccatagtccatgctttctcccagtgccactggttccagaatttctccagaagaaatcattgtttttggagctgaggttacaatgtggtgaggtagtaggttctcaactctgttagcatttgctatcaatccaactgctttctatgttccagaatctgctgttttattacaccactggcaccccactgacttccaatgtcttatagatttacttagatagttcttattttatttaaataggacttgaaaaaagaaagtgatgaycatgcctttcattatttaagctactagaatttaaaaactcttaatatagtgagattgcctaggtccaaaatgaggctccatcactttctaaatgtatgatctggacaaattaatgtgcctcagtttcttaatttgtaaaatgtagatagtagtacatagtccctagaattgtcatacagagggctacattaggatactccataaatgcca

SEQ ID NO: 487347 - DNA, 506 bp, Homo sapiens
aagctgtgctaacctttcattcactgtcacaacttctcatcaacagcacataaatacatggatatggctgcatcccggtacaactttatccaaaggcaccaaagtttaaatttgctacaatttccacatgtcatgaaataatatttttaaaaatgtattcaaccatttaaaaacgtaaaagccattcttagatcccgggctgtacaaacacaggcggtggactggatttggccctcgggctgcaatttgccaagcctygttctatttataccactatcccgcactccaggctcagcaccacggtaaatacgcaatgaatattggctcgacagattactaatgctgctttgtctagactgcccccagtgaaagagacaactgacagtgtcacactatctcctatggaggagacgaaactcaacaataacatatttggtctgctgttctgctaattatattaatgtttatccataagaacttgaattttacagagtcaaataagagca

SEQ ID NO: 487348 - DNA, 605 bp, Homo sapiens
ttagcttcaagtttaagtgagttactttttgtgtcagacacatatatcaatgcactaattagaggaaattctgccaaaaataaaaaaggcctagcatagtttccctgtataggggattatatgtggggtgatttacagggagtcttcaaagcatcataagtctagtgcattccaccccttgattgccatgcacaggggcccctgttcctatttattcagttgtaaggatgcctcattcaaacacattctatcatacatctagccgtataacaccaccctttccccagtttattctgccctcaggtagaggtgctgttacrggattattttaaaggctttttgttttccttaagagtctagatctccaggttatctccacgtatatctgtcttctaaatcaattccattcttatgtgtattagtttactattgctgctgtaataaattacaaaaaaatttagaggtttaaagcaacacaaatgtattgttttacagctctggaggtctgaagtctgaaatgagtcttacaggctgaagtcaaggtgtcagcagagctgtgttctttctggaagctccaggcaagagtccatttcctggccttttcc

SEQ ID NO: 487349 - DNA, 549 bp, Homo sapiens
aggcgctgctgccaagagccagggctccctccagagagggcctggtcctaggagaccacgcgacaggcacagacaatgggccattagctgtctgtggcttctctctgcctggtgttggcatttactgcacgtcccacactcatgggtctgaaactccctggaaactgtagtaaattgtagtgaaaactttccaacagccacctgcacacactcccagactggatgaataagcagagagtctgacttctttatcttccctcttgtaaggcctagaaaaagaggaacacattttaaaagtctgtgaactgttcaaaattgagcacacgctttctagctggacaccttatcattttctttgtcagatatttgacatcaacatgcagagcagtttggatgaagagagcaagcatttggtggagagaaatgggtatcacaggtatgttagaagagaaaaagaatctccaagctgccgtctacagctttccctgagcagtttctgcaacacatcaaaarccttcacatgacaagaggaatggtccctggagtggg

SEQ ID NO: 487350 - DNA, 507 bp, Homo sapiens
gatttaggaaagggggcagaataatagttttggggcaaaaatcttttactcctggatgcaaactgataaagaaaaaatggcttttcctttgtgattgctttttccatttattcactcatacataacatgctcattgtgagtaaagttctgtaatcaactaggggagtaggaagaggagaaatctggcccccaaagatgaaaaaaagatttccattaagatgacttctctgggcagtggaatgcatttggaattattagatcayaattcaaactggaaatctgaaacttgatctttttcatagagacgaaatgttggagggcccatggcctctcaagaatgggcaaagccagagtgcagcgaacttaggacaccaggttctagaattagctcttccataaacgatgtctggccttgggcaactgagtttgtctctacgggcttcagcttcctccctgcaccaaaggtttcttccaacgtgcacagacagcagtatgtacagtggctat

SEQ ID NO: 487351 - DNA, 507 bp, Homo sapiens
gatttaggaaagggggcagaataatagttttggggcaaaaatcttttactcctggatgcaaactgataaagaaaaaatggcttttcctttgtgattgctttttccatttattcactcatacataacatgctcattgtgagtaaagttctgtaatcaactaggggagtaggaagaggagaaatctggcccccaaagatgaaaaaaagatttccattaagatgacttctctgggcagtggaatgcatttggaattattagatcacaattcaaactggaaatctgaaacttgatctttttcatagagacgaaatgttggagggcccatggcctctcaagaatgggcaaagccagagtgcagcgaacttaggacaccaggttctagaattagctcttccataaacratgtctggccttgggcaactgagtttgtctctacgggcttcagcttcctccctgcaccaaaggtttcttccaacgtgcacagacagcagtatgtacagtggctat

SEQ ID NO: 487352 - DNA, 505 bp, Homo sapiens
tccctccatttgaatggcctttgttcttggtcaacacctctcacctctcactttaaagtaagtctctccaggacagggcaattgaaaatttttacaaataagtcaaactccaaaaaatcttaaagataaataacatgatttattaggaaaatggagagaaagcaaaattttatggaatccttttaaacatgtctattttttctccaaatgatctgcctcagcagcagcatctctgttctttctttctaacmatggtttttctccccaggagcaacccaacatttctcctcatttttgcaagttgcttatttttttgtgctttactgacggtactatacacatacagtcaatgctctcaattccttctgcagctacaatatttgctcttgtggcatttctatacaagggattcttacgtcaggtcagaaaggttgttcccttgttaagtccattgataaaaagaaaatggttaagagatcattactactcaaaccttatagtgttt

SEQ ID NO: 487353 - DNA, 671 bp, Homo sapiens
ccaataaagattctatttctaatgcccagaccctatgatggccagatttaaattattttttgcttaattatttggcagatctgtttttagagttcagaattggatgggttgcttaagctggatgtgcactgaaaagatcaagaagactctagacccagagcatcccataacttttaagatacccttcctcccacaaaaacaatgatctcaccatgaaggacagaatagagaaacttgcttgtcataaaaagcttgctttcatctgtgaaaataacctaaagcagcgaaccatatagttacttggctgctatttcacttaaaaatatgtgaaactctattcttgtttcctcttttcatggtccagcacactgaaagaagtctatgccatgcctttgaggtgcaatgatgaaaaacattatccgaacgattgtcagaaacataccaagtccttatttctctcctaaaattgccaacctttgtaccgtagagagctagatttcgaactgaygaagaaaggaaaacactgtagatctcttcataatcagacaagagaagaaggaaggtgtgacttcataagaggtggagtcattctcataaaagtaatatgacttgtgaggcataataataaaagttatatagtactttatatacatagagtgccttatgtacat

SEQ ID NO: 487354 - DNA, 607 bp, Homo sapiens
gctggagcctgccagttcttccgtgtcagttcttctggcctctgacctaggtgcaatgggtatcctatagaagccagggctctttgtcataaagctaaacacacacacacatggtctcaaagttggagaagccaaagtagaatccagggaaagaagaagcagtggcagccttggttgtttttcataccagtgatgtgaaacaacagatcggcaacattctgtgtgagcyaaaaagtctggtgcttcgtgtccaccctccaaatcttgcatagaaatatcttttgtggctcactttaacagaaacatatggtatccatcagaggacaatcaaatatagtcaatgtcaaaacttttgcctcagatcatcccgaggctttgagtctggttaatggaaaatggtagacattactcaaaaatagggatgacaagagaaagactgtggttttaagagtggtagaagctggctagatcaagtgccattagccttgggtagctctcctgtgaaaatagagcttgctgagcattcatgatactttcagaaagtacctaaaatataccttttaaataacttctggacagatctactcagaaacccatgagacctact

SEQ ID NO: 487355 - DNA, 607 bp, Homo sapiens
gctggagcctgccagttcttccgtgtcagttcttctggcctctgacctaggtgcaatgggtatcctatagaagccagggctctttgtcataaagctaaacacacacacacatggtctcaaagttggagaagccaaagtagaatccagggaaagaagaagcagtggcagccttggttgtttttcataccagtgatgtgaaacaacagatcggcaacattctgtgtgagccaaaaagtctggtgcttcgtgtccaccctccaaatcttgcatagaaatatcttttgtggctcactttaacagaaacatatggtatccatcagaggacaatcaaatatagtcaatgtcaaaacttttgcctcagatcatcccgaggctttgagtctggttaatggaaaatggtagacattactcaaaaatagggatgacaagagaaagactgtggttttaagagtggtagaagctggctagatcaagtgcyattagccttgggtagctctcctgtgaaaatagagcttgctgagcattcatgatactttcagaaagtacctaaaatataccttttaaataacttctggacagatctactcagaaacccatgagacctact

SEQ ID NO: 487356 - DNA, 614 bp, Homo sapiens
ataaaatgatattttaaaataataagagactggtatggccaattaatcaagtactaaaaagtatttacaaaaaatatagaataaaaagtctcaatgagaaggcattattgtgtcatagtttaattgaaaggtcttttttttattcttagtgggaatgaactctctcttataattgatggcagtccagattcaataaaatacagtaatttcaattttttaaaaagctactgaaacattttaagactaatactcttggagactgaagagtgttgtggagcagtattcggcagtggattcaccacaatgcctcaaattcaacatgtkgaattctccacaaatgcttcctcttcctgctctccagttaggctctctcacatttcccgctggcccgtgatggaatgtctacagtgactcccagttacatgcattcagtatctattcaccctcatgttatcacctgctttccaggacacttgctatacctatttgtgcttaagcatgccagacactgacctgcaaatgtaaaactgtcatctctgttcaaccactatgattctccaggtgcctcaaataaaaatggaatattttcaagtggccaaaaaagaaaaggttaa

SEQ ID NO: 487357 - DNA, 614 bp, Homo sapiens
ataaaatgatattttaaaataataagagactggtatggccaattaatcaagtactaaaaagtatttacaaaaaatatagaataaaaagtctcaatgagaaggcattattgtgtcatagtttaattgaaaggtcttttttttattcttagtgggaatgaactctctcttataattgatggcagtccagattcaataaaatacagtaatttcaattttttaaaaagctactgaaacattttaagactaatactcttggagactgaagagtgttgtggagcagtattcggcagtggattcaccacaatgcctcaaattcaacatgtggaattctccacaaatgcttcctcttcctgctctccagttaggctctctcacatttcccgctggccygtgatggaatgtctacagtgactcccagttacatgcattcagtatctattcaccctcatgttatcacctgctttccaggacacttgctatacctatttgtgcttaagcatgccagacactgacctgcaaatgtaaaactgtcatctctgttcaaccactatgattctccaggtgcctcaaataaaaatggaatattttcaagtggccaaaaaagaaaaggttaa

SEQ ID NO: 487358 - DNA, 582 bp, Homo sapiens
ttcctgctcctcgggatgctacaggtctgtgcagctctcctctgaagtcactcttcttgttttgtttatctcaggtacaatgcacaatgaaaggcacatcttcattagggaatcccacattagggaatctctctgttgagcatccctgttcatgggcctaccttttcattactgaaagctactttttccttgttattttttaatgaatattgcttaggaacaaaatacttggggattcagaaaagagttaattttgccctcaaatacttgtacttttgtcatgatgggggtggatgctatgtatacatgttgtcaaagacaagtacacttttatattcagatccagtaaaactgtttacatctgtctgrataaaacttttgacttgtaaatgcagagaaaaggatgttttatttacccagattcagagcaacagaactcctttttatatcaacagatatatatgatatgtttttgtacaagctgcagagagctgtctacagtgactttgacaggactaagtttatcttgtgcttttactaagagtgtgaaaaaagaagagagcagaccctaactccaccttc

SEQ ID NO: 487359 - DNA, 465 bp, Homo sapiens
tgcttgccaaaaattgccccactgacacaagttgcagatgaaagacattcagatgtcctgcatcaaacaacttatttcatgtctaacttgaaactaaaaggtaattcaggggaagcagttctttgcatctcaaaaatagcttctttcatttttgtgggaagttgagggaaagagtgagatctgagagccctgtgaatatggagcagtgtctactttcattagtagacattgagcaggacctttgcaagtaattccattcacaaatgcctctggaattgcaatggcttccaagagcccttctacaagttgaagggtggctgcatgtcctaggtctgggaatattcagacatgccctcatccaactctttaccaccagtggtctcagtgaactatccaccaaagcccaagaacctgcaatgggctytctcggaaagctccaacccacacaaacctggacagggaact

SEQ ID NO: 487360 - DNA, 706 bp, Homo sapiens
cataccgggccaattaatttcagtcacrtcccaattaatttaccaggccagtaaattctccatgaggatttcccacaactgttttagaagactccaataattcctgttcttcgtacatctttcttcataatcccacatatctaactctaagtacaccctggaaaattacagcatgatatttatgtatctgtcaaatgtgtctctctaaacatcccatactgatacaagtttctagagttctaagttcttcttagaacttgagtttctaaatattttcttgttatcttctttctcttgcaaactagtacccagctagagtacatgtggcagttgttcaattattgagatagacaaattcacagcacttttcttaagtagaaagttggagcaagagtgagtgggaacagctacttccaggtctgtgtgaaaatggataaatccttaataattaactcattggaagttgttagagcctccagacatgtcctagaccacattcaaaagcaaggaacattctcttcaacattggagagtgttttgtagttcaatagaaggcaaacattgggaatatttaaagcaatgtaaaaagtgcccacaataacagagtttttaacattaacaacattttctaaagtcctctataaatattgctacaagcaaagtctcaacaaccgagatcaaatcagcccaatatactaaggcaagc

SEQ ID NO: 487361 - DNA, 469 bp, Homo sapiens
ggccaataggtgaaaccccgtctctgctaaaaatacaaaaattagctgggcatggtcgtgcacacttgyaatcccagctacttgggagactgagacaggagaatcgcttgaacctgggaggcagaggttgcagtgagccgagatcgtcccactgcacagcagtctgggcaacagagcgagacttcatctcaaaaaaaaaaaaaaaaaagaaaatgaaaataacttaaatatccaccaattaatggaatggttggataaattctgtagtacattaataacagggatctatggaagactaagttacatctatagctatagatgtggaaatatatttgtgatgtatcattaagtaaaaaaatttgtagagtaatgtgaataatctcatcttctatgaaaagaaataaccaaaacaactctatacatgtgcttatgcagtttgtctataaactggaaaaaaaagttggggaaa

SEQ ID NO: 487362 - DNA, 469 bp, Homo sapiens
ggccaataggtgaaaccccgtctctgctaaaaatacaaaaattagctgggcatggtcgtgcacacttgcaatcccagctacttgggagactgagacaggagaatcgcttgaacctgggaggcagaggttgcagtgagccgagatcgtcccactgcacagcagtctgggcaacagagcgagacttcatctcaaaaaaaaaaaaaaaaaagaaaatgaaaataacttraatatccaccaattaatggaatggttggataaattctgtagtacattaataacagggatctatggaagactaagttacatctatagctatagatgtggaaatatatttgtgatgtatcattaagtaaaaaaatttgtagagtaatgtgaataatctcatcttctatgaaaagaaataaccaaaacaactctatacatgtgcttatgcagtttgtctataaactggaaaaaaaagttggggaaa

SEQ ID NO: 487363 - DNA, 469 bp, Homo sapiens
ggccaataggtgaaaccccgtctctgctaaaaatacaaaaattagctgggcatggtcgtgcacacttgcaatcccagctacttgggagactgagacaggagaatcgcttgaacctgggaggcagaggttgcagtgagccgagatcgtcccactgcacagcagtctgggcaacagagcgagacttcatctcaaaaaaaaaaaaaaaaaagaaaatgaaaataacttaaatatccaccaattaatggaatggttggataaattctgtagtacattaataacagggatctatggaagactaagttacatctatagctatagwtgtggaaatatatttgtgatgtatcattaagtaaaaaaatttgtagagtaatgtgaataatctcatcttctatgaaaagaaataaccaaaacaactctatacatgtgcttatgcagtttgtctataaactggaaaaaaaagttggggaaa

SEQ ID NO: 487364 - DNA, 469 bp, Homo sapiens
ggccaataggtgaaaccccgtctctgctaaaaatacaaaaattagctgggcatggtcgtgcacacttgcaatcccagctacttgggagactgagacaggagaatcgcttgaacctgggaggcagaggttgcagtgagccgagatcgtcccactgcacagcagtctgggcaacagagcgagacttcatctcaaaaaaaaaaaaaaaaaagaaaatgaaaataacttaaatatccaccaattaatggaatggttggataaattctgtagtacattaataacagggatctatggaagactaagttacatctatagctatagatgtggaaatatatttgtgatgtatcattaagtaaaaaaatktgtagagtaatgtgaataatctcatcttctatgaaaagaaataaccaaaacaactctatacatgtgcttatgcagtttgtctataaactggaaaaaaaagttggggaaa

SEQ ID NO: 487365 - DNA, 498 bp, Homo sapiens
agctgaggaaacaaaacatatacaggtatattcctcctagagtagccactttgaaactcctataccaaggacattctttaaagtattatttataagaacaaattctaaaaaacctaattatccaacaatgaaatcccatgcagtcatttaaatcttttcttctaagagttaatggtagaaacaatttttccaattattattactgttatatttagcaaacattcctcaatatttaaatggttttaataggaaggttggataattgttcaaagtttagattttgggataaatttcggattcaaatcccacttattacytttgagaccctagacaggttattaacccctttgatcctcagtctcctcacctgtaaaatgggtaaaatgatacacttaagatatgagaattaaaataagatctacaaaaagcaatttgcatagttcctggaatacagcactcaacaaatagtaaacttttgaaataataaatcctaaactg

SEQ ID NO: 487366 - DNA, 458 bp, Homo sapiens
atatttattgcagatgctggtgaattctggcttctccttagttgaaggggctgccgtcaaggacacctgggagaccccttttcttcagctcgcccctccgctttctgtctgacycacaaagggccagagcacactttctctgcatagaaggaaaacctactggggcatttcttctttacaaccagatgcaaatctgcctgctgtgtaaatagatggaactaagtgactaagtgacaccattctcaatgcaaaagatgttaaccctaagttttcacagcaatgcactggaattctccaaagctaaaagaagcccacaaagccctctgcaaaagtagagcaaccttttctaccagtgaactccgattctgtacattttagttcaaccactgactcaagaggatgcttagagtcagcgggaaagcatggctgcaggtggaagggataatggtgttgggtca

SEQ ID NO: 487367 - DNA, 593 bp, Homo sapiens
cttttgcagtctttctagaaaaaaaaattctgccaaatcttaacgggtaagtaaaataaygggtttcgtcctcttggcaaagagaggagcatgctagcaaaacacacggaagagagggtgaaggggattcacatcttctctgttttgccctccggtaaagctgcccaaggtgtgtatacacaggttctctctgtcaacctgctcgccccatagtctgggaagaattgggctcagtgtaaataaatgataatgagtccatcgaagcattatatgggatggtcccctagtggcaggaaagagttaatatacctcccaaagtgcctaactcacaatcagggagagacctcactctgggagaaccaggcttccacaaacccaaactttgataaaagatgtcagcaagaaggaaaagtagaaaaaggagggtaattatttttttaatcatgcaggagtacttcactctggtaggtattaactcagtcatttctagtaggccaggagattaaaaaaaaaaaaaaaggcagaggatgaaagaagagagacccacagaaaagaaaaaaagacacagcagaagagtcacaaaaagaagaaag

SEQ ID NO: 487368 - DNA, 593 bp, Homo sapiens
cttttgcagtctttctagaaaaaaaaattctgccaaatcttaacgggtaagtaaaataacgggtttcgtcctcttggcaaagagaggagcatgctagcaaaacacacggaagagagggtgaaggggattcacatcttctctgttttgccctccggtaaagctgcccaaggtgtgtatacacaggttctctctgtcaacctgctcgccccatagtctgggaagaattgggctcagtgtaaataaatgataatgagtccatcgaagcattatatgggatggtcccctagtggcaggaaagagttaatatacctcccaaagtgcctaactcacaatcagggagagacctcactctgggagaaccaggcttccacaaacccaaactttgataaaagatgtcagcaagaaggaaaagtagaaaaaggagggtaattatttttttaatcatgcakgagtacttcactctggtaggtattaactcagtcatttctagtaggccaggagattaaaaaaaaaaaaaaaggcagaggatgaaagaagagagacccacagaaaagaaaaaaagacacagcagaagagtcacaaaaagaagaaag

SEQ ID NO: 487369 - DNA, 653 bp, Homo sapiens
ttagttagaactaactacatggcaagcaccattatgcgattttacaaaaggtaaaactgagtatcagaaagggtaatttgtgcaacgtgatattaatataatccctaagatttgagattggaaacagggctgcctgaatccaaggactgcattcatttcttaactacgacaccacacagggaagagggggtcaattgtgaattgtcacttgtcaattgtgaattttgaatcgtcaattgtgaatctcatagatttctatgagaaaatctaaatgtggcattgtatgtgcattttgtattgtgatttaaaacatattacatgaaatctacccacttaataaatgtttgaatgtatagtacagtattgttaactataaacacaatgttgaactgcagatctctagaacttycatcttgtgtgactgaaactctataaccactgaaccactcctcatttctcctgacagcccctggcaagtgtcattctactttctgtttcaatgagtctgactatcttagatatccatataagtggaatcatgcagtatttgtccttttgtgactggcttgtttcacttagcataatgtccttaaagtccatccatgttgtagcacgtgacaggagttccttcttttttaatggctggagaattt

SEQ ID NO: 487370 - DNA, 621 bp, Homo sapiens
attacttagctcccatatgcccatgcaacaatggggctatgatgactcttcagatgcctttaaggaagcactagggcaatcagtaccatatatactgcgacagtgctgcaggtttctgccttctggaaaactagccccttctccagttcagtggatttcaggttaggaaactggcttaggttcacaaactggacaaaaagattttttttttttttttttttggtgaggggaggcaactgtgtttagtctcctaatcaaccatccttagtttctttagcctgcatcgattgagcagcacccttgttggcttttcatctagcttgttcttaaggatggtgtgtttattaatcatttccatggttctctatagaacrtggttctctggctgccactcagatctgccactcattgcgataatcatatctgacttgcttctgatggttaaatgcaaccacctcagtgtctctgactcaggcatctcatgtcttttttattttgagatcctaacatctttgttagtagtagtaagtccagttctatagtcttgctccggctgtctgtctgtgcatagtgtcataaaacaacaatcattttattatgtctcatgatattgtggtttaa

SEQ ID NO: 487371 - DNA, 621 bp, Homo sapiens
attacttagctcccatatgcccatgcaacaatggggctatgatgactcttcagatgcctttaaggaagcactagggcaatcagtaccatatatactgcgacagtgctgcaggtttctgccttctggaaaactagccccttctccagttcagtggatttcaggttaggaaactggcttaggttcacaaactggacaaaaagattttttttttttttttttttggtgaggggaggcaactgtgtttagtctcctaatcaaccatccttagtttctttagcctgcatcgattgagcagcacccttgttggcttttcatctagcttgttcttaaggatggtgtgtttattaatcatttccatggttctctatagaacatggttctctggctgccactcagatctgccactcattgcgataatcatatctgacttgcttctgatggttaaatgcaaccacctcagtgtctctgactcaggcatctcatgtcttttttattttgagatcctaacatctttgttagtagtagtaagtccagttctatagtcttgctccggytgtctgtctgtgcatagtgtcataaaacaacaatcattttattatgtctcatgatattgtggtttaa

SEQ ID NO: 487372 - DNA, 641 bp, Homo sapiens
tcagattaactagggaggtttaggctgcaagtaaccaaatactcaaattcaactggcttaaatgataaagaaaatgtattagctcccataatggaaattcagtctggtattacttacttcaaaggctctctagtggcctcagggatccaggcccttaccatcttcccctcagcaacctaaacatatcggcttatccccaggcctgctgccttcttagttacagcatggctgcaagcatttcagaagtctcgtcaaggcatgacaaagaagaagaaacatttaccagacacccctcagtatatttcccctctcttctacttggctagatttgggataaattctcctccttaaatcagtcattgtcaagaagaactggactcctaagtttggcttaaattaatccagatttaccacctgggccaagagaagtggacgctcaagaggaagaatgagaatggctgctgggtagggcattcyaccaccttgcacctctggctgagtcttggggtccaaggccatggctcttgatgagctgttctcactgtcacacaactcctgctgaagacagctttcttctagctgctggcccttccacctgctgtctagaacgtgggtttccaagtccttccaggtgagacagc

SEQ ID NO: 487373 - DNA, 574 bp, Homo sapiens
gattaggcgttggattatcaggagtgtaagtgatgagggagagtaaaagggttaaagaactcaggtrtaacaggaacagaaaaccaaacaccgcatgttctcactcataagtgggagttaaacaatgagaacacatggacacagggaggggaataacacataccggggcctgtcagtgtctggcggggccacactggggttgtgacgggagggagagcatcaggacaaatagctaatgcatgtggggcttaaaacctaggtgagggatgatagaggcagcaaaccaccatggcacacgtatacctatgtaacaaacctgcacatgtatccggaacttaaaaaaatttttaaaaaatcatttcacattccaaaaaaaaggactcaggtatagaataatgaatatgggatgaaaatatgccatgtctttcatcccttttgttgtttctttgatttggccatgaaatttattgtttggagtctccccagttcctaatctaagtttggaaagaatcacatgcctaatgaaagcatcaaactggagaatcccctcctattctgggaactggcgagctgg

SEQ ID NO: 487374 - DNA, 574 bp, Homo sapiens
gattaggcgttggattatcaggagtgtaagtgatgagggagagtaaaagggttaaagaactcaggtataacaggaacagaaaaccaaacaccgcatgttctcactcataagtgggagttaaacaatgagaacacatggacacagggaggggaataacacataccggggcctgtcagtgtctggcggggccacactgggsttgtgacgggagggagagcatcaggacaaatagctaatgcatgtggggcttaaaacctaggtgagggatgatagaggcagcaaaccaccatggcacacgtatacctatgtaacaaacctgcacatgtatccggaacttaaaaaaatttttaaaaaatcatttcacattccaaaaaaaaggactcaggtatagaataatgaatatgggatgaaaatatgccatgtctttcatcccttttgttgtttctttgatttggccatgaaatttattgtttggagtctccccagttcctaatctaagtttggaaagaatcacatgcctaatgaaagcatcaaactggagaatcccctcctattctgggaactggcgagctgg

SEQ ID NO: 487375 - DNA, 392 bp, Homo sapiens
atataataaaagattgagacacagaaattgttctattagacttgaaatttcaattgcttttacttcccagtttgtagtagtgtttgaacctaaaatcctatgtgtgtttytagttaccttttcaagttaaactttcagaaactatctgcttaacttaaaaatttactcttgttaattgcccaaccacatcttacttcatgtgtcaaaatctgcctgatatttttaatttggatgtccacagtagtgggaagtcataggaactcccagtcagggtattcacagtaactactcacagtaataggaactcacagtcaagtctaatttttcattttaatttttccaatcccttctttacttctagtatactaattgaaaaaaaaaaacttgggttg

SEQ ID NO: 487376 - DNA, 392 bp, Homo sapiens
atataataaaagattgagacacagaaattgttctattagacttgaaatttcaattgcttttacttcccagtttgtagtagtgtttgaacctaaaatcctatgtgtgtttttagttaccttttcaagttaaactttcagaaactatctgcttaacttaaaaatttactcttgttaattgcccaaccacatcttacttcatgtgtcaaaatctgcctgatatttttaatttggawgtccacagtagtgggaagtcataggaactcccagtcagggtattcacagtaactactcacagtaataggaactcacagtcaagtctaatttttcattttaatttttccaatcccttctttacttctagtatactaattgaaaaaaaaaaacttgggttg

SEQ ID NO: 487377 - DNA, 142 bp, Homo sapiens
tgtaatgctaactgtgccattccaatgatctatttaaataatgaaagtaaagcatacttcttgaatgttgggtaaaggatttcaggtctctgtatttcaatggttttctrtaatgattaaggttaggctgggacttaggggc

SEQ ID NO: 487378 - DNA, 644 bp, Homo sapiens
tattaattcaagccactaagatattatttagtaccttgctgctccagggcactaaataatgtcacattttcaaagcataatgccattagagtttataaagcactttcacctgggttatctcattcgatcttggcaaaagctcagtgcaaaaagtagaagtggtgcataatcattgttttgtaatgatatagatgctcctgttatgagctcatgcggtaaatatgtgagaggcagaggtaggtctagaacatctgtctcttaactatttgttcagaattgttctcacagtggcataaaggagtaaagagcctcaattaagggatatgtgatctttgtgttatakacattttttaaatttaaatgtatccaattcaactggacacatggtagctctatatattataggttatagtagaaaggagagaatagttaacaagattctaacctgtatggtatgtccgatatttgacaacagaagacaatttcatcatacttatgccaagctaccacataactcctttaagtcagaaaatggtagtagttcttgggctgttgtatccagtcttatattgtcatggcagaattttgtcccttattgcttgaaaattacccccttccctacccccagtacctactttgctatt

SEQ ID NO: 487379 - DNA, 558 bp, Homo sapiens
gaaatcccatttcttacaataccccaccctgcccaagttaggggcttacaattctgctgacccatgctggggcaccatgtcccaggaatggctaagtgaaaggtgatttaccaattcagcgactatactagaaaatgcagactgagtctaaatctcctttcatgagccacttattcctgatatactcatttcctggcattcagcttcctttcttccattggtacctcttccccttaattattgaaaatttcatggaagaagggtggaaatggatccgatgctgcactaccttggtttgattttccatgtgctacatgtcttataaactgcctgagcaatcaaaaagatgaaggaaaggatgaggtggtattggacagccaaagagctttcagattaatgatcaaaatgtgtgcaagacagatccttttgstaggatgctttttataggtttttaatttctgaaatttaatcatgcaggtttaattgcctccagttgtatggctttaaattgaaggagtttggctttttatctaaattgcttcataataaaaccactgc

SEQ ID NO: 487380 - DNA, 209 bp, Homo sapiens
gcagaactctccagactgggcttctgtggatgtgactgtgcaacccacaggggggatctgcgagggttccctggaccmgtccctgctccacctggaagccagaggtggcaacatgaactgcaggaggggttttgctgctataatgtgggttgcatgaggaggccctggtcttcctccaatccccctggggatgtggggtctcctccaac

SEQ ID NO: 487381 - DNA, 611 bp, Homo sapiens
tgaaaccccatctccactaaacatacaaaaattaaccaggygtggtggctaatgcctgtaatcccagctacttgggaggctgaagcgggagactcacttgaacctgggaggcaggggttgcagtgagccgagatcacgccactgcactccagcctgggtggcagagcaagactccatctcaaaaaaagcatccacaagaatgaccaagtgactgctcaatggccatggatgtttctggaccctgagggcccctgttttgctgagatggaaatcattgctgactcctttaatgttgtttaattttttaaaaacctcttcaagcattcctctagatttctggtattcagaactatgctgtgaacacagaaagattaaggactgttcttctaatgccttagacagcctgtgccaattggtctcagagtagagaaaaatatatttatgctgtgaaacctaaatacccaaactaaattcattttagcaaagattaatacgcagagccccaattcttgtacagattcctcagagcagcacgtgctgttcggcgcttcttcctttataataaatggtcaggtgtgcaaacaactgtttgaagagccattaggagtcag

SEQ ID NO: 487382 - DNA, 485 bp, Homo sapiens
acttctctggagagaagcctttttttttcttttttaaaagaagatataattcagctcctaaatgccactagcagggatagscttgacttctaaagcgacattaggggcagaatttggggacattgtagacccttcatagacagtgacttgcccctcatcagtaggcatcaaaaggatcaagcccctgcaggatgcacgtcctttgactgtccgccttgctgcctttgcacgatggtggccagggagctggggcggcctcgggcttttccatcccaaaggacgggcttccccgccaccagggggactcactcccttgagctccccctggcaggaggggcctgggggtgacaggcagacagtaaaggagtctgaagcctgcccggggggttcccagcttgggatcatggggctgccgagtccgggcaccgtgtctctctccttctgcatcctccagggggcaacagtgcagcctgctgatccccagt

SEQ ID NO: 487383 - DNA, 485 bp, Homo sapiens
acttctctggagagaagcctttttttttcttttttaaaagaagatataattcagctcctaaatgccactagcagggataggcttgacttctaaagcgacattaggggcagaatttggggacattgtagacccttcatagacagtgacttgcccctcatcagtaggcatcaaaaggatcaagcccctgcaggatgcacgtcctttgactgtccgccttgctgcctttgcacgatggtggccagggagctggggcggcctcgggcttttccatcccaaaggacgggcttccccgccaccagggggactcactcccttgagctccccctggcaggaggggcctgggggtgacaggcagacagtaaaggagtctgaagcctgcccggggggttcccagcttgggatcatggggctgccgagtcygggcaccgtgtctctctccttctgcatcctccagggggcaacagtgcagcctgctgatccccagt

SEQ ID NO: 487384 - DNA, 485 bp, Homo sapiens
acttctctggagagaagcctttttttttcttttttaaaagaagatataattcagctcctaaatgccactagcagggataggcttgacttctaaagcgacattaggggcagaatttggggacattgtagacccttcatagacagtgacttgcccctcatcagtaggcatcaaaaggatcaagcccctgcaggatgcacgtcctttgactgtccgccttgctgcctttgcacgatggtggccagggagctggggcggcctcgggcttttccatcccaaaggacgggcttccccgccaccagggggactcactcccttgagctccccctggcaggaggggcctgggggtgacaggcagacagtaaaggagtctgaagcctgcccggggggttcccagcttgggatcatggggctgccgagtccgggcaccgtgtctctctcyttctgcatcctccagggggcaacagtgcagcctgctgatccccagt

SEQ ID NO: 487385 - DNA, 441 bp, Homo sapiens
tccctagccacagtgcccctctgcctcttctcctcctgcctgagcaatcccacttcacttggaccatcccctgcctattccaggagacaggacttgagtgtcacttcccctcctgctgtcttgtggccctgccatgcactgtggcaagtcttctgttatcttctgcctgagaggccgtgactaagaaggttccagacttcccgtctatcaaaggtgaggactgaattagactttcttcttgacagtggtgatcacctgtgacctgtgactggtacatgctcaggagggagtatactgttccactttgctgatttctaatgaaagattacttttacaggatggagggagaaagggctccgaaggagaaggaagaagaataagggcattggccycagtccagatgaaaagacccagatgcaaaattatttgggccacatatgt

SEQ ID NO: 487386 - DNA, 623 bp, Homo sapiens
aaacctttgagaccatgtttacagacagtattattaccaacaataaccgatatttgtacagggcatttggatttgcttgtgtatttccctggaaatacacatttcaacatcaaactcaaagatcaagatcaaagaaatgtttaacctgcacactgttctcctgttaccttcaccccgttctcctattaccttcaccccaagctacatctgcacatggctggcacaggatggtctgaaactctcatctgaccatgtcactgctgaaaagatycagtgaccccagtgtccttgggataatggtagaaccctcactatgcagctagactccctccgcagcctcatctccccttctcctgtgacgtgtcaacacttgggtcccatactgtcctctaaatgggcagagctcattcctctcggcttggaacgcccaccccaggacaccttgacagcttgcaaactcctattcctccttcaaaaccctacctctgttaagctcccccagactatccccttacttccccatacctgcctctgtaatctgttgcattttgtaaatacttttttattatttttcttacacactacttcatacccgactcagaggtccatgactgggtcttcta

SEQ ID NO: 487387 - DNA, 596 bp, Homo sapiens
aaaacctttgagaccatgtttacagacagtattattaccaacaataaccgatatttgtacagggcatttggatttgcttgtgtatttccctggaaatacacatttcaacatcaaactcaaagatcaagatcaaagaaatgtttaacctgcacactgttctcctgttaccttcaccccgttctcctattaccttcaccccaagctacatctgcacatggctggcacaggatggtctgaaactctcatctgaccatgtcactgctgaaaagatccagtgaccccagtgtccttgggataatggtagaaccctcactatgcagctagactccctccgcagcctcatctccccttctcctgtgacgtgtcaacacttgggtcscatactgtcctctaaatgggcagagctcattcctctcggcttggaacgcccaccccaggacaccttgacagcttgcaaactcctattcctccttcaaaaccctacctctgttaagctcccccagactatccccttacttccccatacctgcctctgtaatctgttgcattttgtaaatacttttttattatttttcttacacactacttcatacccg

SEQ ID NO: 487388 - DNA, 596 bp, Homo sapiens
aaaacctttgagaccatgtttacagacagtattattaccaacaataaccgatatttgtacagggcatttggatttgcttgtgtatttccctggaaatacacatttcaacatcaaactcaaagatcaagatcaaagaaatgtttaacctgcacactgttctcctgttaccttcaccccgttctcctattaccttcaccccaagctacatctgcacatggctggcacaggatggtctgaaactctcatctgaccatgtcactgctgaaaagatccagtgaccccagtgtccttgggataatggtagaaccctcactatgcagctagactccctccgcagcctcatctccccttctcctgtgacgtgtcaacacttgggtcccatactgtcctctaaatgggcagagctcaytcctctcggcttggaacgcccaccccaggacaccttgacagcttgcaaactcctattcctccttcaaaaccctacctctgttaagctcccccagactatccccttacttccccatacctgcctctgtaatctgttgcattttgtaaatacttttttattatttttcttacacactacttcatacccg

SEQ ID NO: 487389 - DNA, 476 bp, Homo sapiens
tctgtgcagggaggacgtggtacaggactcagggacagtgacagcgtaatgctcttacgtaatccaaattaattgctcctgaccagggatgcttcacatccattggaacaacacagagttgtagccgtgtgttttttaaagtgtgtctgcctctgaatctccctggctctgctcatctcagaaggtccctggaggagggctcatggctgacacatgttagcatasgagaaggggaagaattttatttatctgccactaatccccatgtgtctcatacccaaatctaggattttcctcttcccacctggagtatccggcgtgcatggtttatccacaattaaagcagactgcaggctgctcccctcaccagaaagccgctcccttaagcagccatagattacatgccctggctctgcctgccagagaaagccggtggatttgattttgttagcaagagctgactgagaccctagcag

SEQ ID NO: 487390 - DNA, 460 bp, Homo sapiens
tgcagcatgggtgtttattgacatgctgtctctaaatcagacctgtgtcccaattagagtrtaagctctttagagacatcatgtggaatacattggccaatcttctgcctgcatccccaaagggaaggacagcaggagatgtgtcagggagatagacaggagggagatcacccaaggccttggagcccatgttgaaagaggtgaattgtctcctgtgtgtaattgagaactgctgaaggagtttaagcagggaagtgatgtgatccatctatgttttgcaaagaccacgctggctgctgtgtggtgaatggatgtggtggtggagtgggggtgggttttggaaatgaaaccagtttgaaggctattgcatgatctaagcaaaagataacgatggcttggtctgagatagtagaagagaagtaggtgaattccaggtatattttgaacttggggcccatgg

SEQ ID NO: 487391 - DNA, 460 bp, Homo sapiens
tgcagcatgggtgtttattgacatgctgtctctaaatcagacctgtgtcccaattagagtgtaagctctttagagacatcatgtggaatacattggccaatcttctgcctgcatccccaaagggaaggacagcaggagatgtgtcagggagatagacaggagggagatcacccaaggccttggagcccatgttgaaagaggtgaattgtctcctgtgtgtaattgagaactgctgaaggagtttaagcagggaagtgatgtgatccatctatgttttgcaaagaccacgctggctgctgtgtggtgaatggatgtggtggtggagtgggggtgggttttggaaatgaaaccagtttgaaggctattgcatgatctaagcaaaagataaygatggcttggtctgagatagtagaagagaagtaggtgaattccaggtatattttgaacttggggcccatgg

SEQ ID NO: 487392 - DNA, 480 bp, Homo sapiens
ggggtcactagaggggtgtggctatttgtttcttcttggcagtcatgttaataaagctatggattgctgggggaagcaagcttgtgattcagagaagttcattgagaccatatggacttcccctagaggagactcagcccttagtccatgcagatgtagaacttagccacggagtagagctcaccttcccaatgcaccaacattaactgggaagttgccatgtgctgggcactgaagacacaggtacggcaggggattcaagcagtccagtgccacagtgttgctgagcctcaattgtctcttctgcacacccctggagggcatggatataccattgtcctcaccttgtcaccaccctctgtgaccttgtattcattaggtgggatacgggagaagtaaaagacagtgartccagctaagccccagtgcagtgcaaaaatatcccattgatctatcaaaactcagtcccaccaatgcctg

SEQ ID NO: 487393 - DNA, 417 bp, Homo sapiens
ctgttggttaaaaattatttttacattgtatgtaaacttgaaaatttaagccaaaatgagagagagagtgagagagagcaagagagagagaagataatgtcttccagatgacggctttctggatgaaacttgaagcctgaagcaagagaaaattttcattaccattcagattacatgtcattttgattcacactccctaagcaagctaatttggtcggcagccaaccttctcgcagtgtgatgacaacacaacaagcttcaccgccttcctttcagtgctaatgattccttgagtgacagccatggtctcagagctccgcgtgacacctcaccctgcygcgcctgcaatgtcagagctgctgctgtcctgggctcctgctcatggtcctggcaaggacagcctgtgacttcaggaac

SEQ ID NO: 487394 - DNA, 484 bp, Homo sapiens
ttgttaaacaaataagatgtgtcatagaacgtagtcatcagattaactttgatgaatcatagtgaaggtgtatgagtgagcatgaaaataatgaatctttgctgtcaccttctctgactcatagattatcttttgactatgactgttaaatacatacacaaacacaaaaagttttgtcacactgatatattctttgcctcattcctctacctggagtaattattgaaatttcattcttttmattcttcctggcaaaacctgaaatggaactgtgactcttggaaacagataaaaagtgctgttcacataagagatttcatgacaaagaagaataaggttaaaccccgtgggtgacggaatctatgtttagtcaatgtttaaattcttaaatctactagctttgtggccttggattactcaattttcctcaatctcaattttcgtatttttaaaatgaggaacaagttttttcatcaatatttgt

SEQ ID NO: 487395 - DNA, 484 bp, Homo sapiens
ttgttaaacaaataagatgtgtcatagaacgtagtcatcagattaactttgatgaatcatagtgaaggtgtatgagtgagcatgaaaataatgaatctttgctgtcaccttctctgactcatagattatcttttgactatgactgttaaatacatacacaaacacaaaaagttttgtcacactgatatattctttgcctcattcctctacctggagtaattattgaaatttcattcttttaattcttcctggcaaaacctgaaatggaactgtgactcttggaaacagataaaaagtgctgttcacataagagatttcatgacaaagaagaataaggttaaaccccgtgggtgacggaatctatgtttagtcaatgtttamattcttaaatctactagctttgtggccttggattactcaattttcctcaatctcaattttcgtatttttaaaatgaggaacaagttttttcatcaatatttgt

SEQ ID NO: 487396 - DNA, 619 bp, Homo sapiens
  misc_feature (1)...(619): n = A,T,C or G
aaacattgcaaaacacgtttacattgaatattaactcttaattcctaaatgaaaattaaaatacaatgttcaatgtctttaattcttgatatgctattaaacaatatgaggcacatttgcaagctgcaggaaaatgggatggagtagacacatcctttgctttctcaatgtgactccaatattatcatttaaacaacgcagcttttagagtaacttgtacataccccaaactgatagtcgaatatgctgctaagaatttagtgatccatttcaagtttcttaagtcttctttaaaaaggaacaaggaatctgagggccrttttctaagtgaccctgcctggtttacatagggcataccataggcaggaagtggaacaaagcaacaaagatatctaaaaataagcatgttttataattccaagtttgattcttaggccacagaatattttgagactttgagtattaaaacttcagagctgcttcttaaaaggagctaataaggatatctatgatatggttgaatgtgacatatttaatatctatatatttatataataatcataatagacctgcaataaatgaacaacaaaatttctcaaagtgcagtggccgantctca

SEQ ID NO: 487397 - DNA, 593 bp, Homo sapiens
taaataggtttccactatttcttcagtaaatattgcaaaattatatttttcttgaaatttctcaattgcttatgtgttttccaatggatttaaagtttatgtggtgttgcctttatgtcttttaaacttcagctrcaaacattttatgccaaatttctcattccaaatagcttatttgtgcctatcaatattgcttgaaagatgtgtattatattgttttcaaattgttaatttttctgtttatacttttcattctaattttgttttctattcccacaatttgtgtccctctctttactatcagcattttctaatttatttgagttgttttcccagcttttaaatttttttttgccttttgtttttctttgatatgggcatttagaaattatacatcttcctacaaagggttaccttagctacattcctaacatttaacatataccattgttattagaaataaagtttacaaattttttaaatcccttattatttcttcttggatgtataagttatttataagtacattttaaaatttacaaatatatggtggattttgttagattacgtgacaaagaacaactaaaattacc

SEQ ID NO: 487398 - DNA, 649 bp, Homo sapiens
atcccagaatttcccaccttatcatctatatcaccatatttccataaagtaaagaattatcttcacttaaaaaaaatcaggaaaaggctgatctgaagatgatgagttatctcaattgattgttcagccagttacagatccaactccttgctctattctttcctctcttctcactactgcacttggctaggaaaaaaaaaatcagaaaaaacctttattttagaattaagttcagttccttcaattaaacatatttcactttatgcaaaatatctctacatttttctttttttataatcaactgaaaccaaagccctggtcttatagcacttgtaattcttcatttttagcaactattattaattcattgttggtattgagaggtgacagcatgctggcagccctcgctcactctcagtgcctcctcggccttggcgcccactctggccgcacttgaggagcccttcagcccgctgctgcactgtgggagcccctctctgggctggccaaggccagagccggttccctctgcytacagggaggtgtggaggagaggcatgggtgggaaccggggttgcgcgtggcactcatgggccagcgtgacttctgggtgggtgcgggctcagcaggccccacactcagagcagcc

SEQ ID NO: 487399 - DNA, 629 bp, Homo sapiens
tgcaaagtttgaaaggattgattccaattctgaaagaagttctatgggtaaaacrccattaaacagcatcatgtgctacagagaaatctttcatgaaagtaacagtcaatcaatgcagcaaacttcattgttatcttacttcaagaaattgccacagccaccccaatctttaggtaccaccactttcatcagtcatagccaccaacattaaggcaagaccctccatcagcaaaaagtttacaatttgctgaagtctcagaggattgctggcatttttaaaaaatgtattagcaataaagtatttttaaattgaattatttttaaactgaaacatgtacaataaggtatttttaaactgaagtatttttaaattgaagcatgtacattttttcaaacataatgtcactgtgcagtggacttagtacagtgtaaatattaaattttatatgtactgggaaacaaaaaaattcatgtgacttgctttattgcaatattcactttattgtatttattgtggttgtctggaaccaaacctgcagtatctccaaggtatgcttgtattaggaatacgattttagggaaagcccatcaactaagttgggaaataaaccagagggtagattccactt

SEQ ID NO: 487400 - DNA, 629 bp, Homo sapiens
tgcaaagtttgaaaggattgattccaattctgaaagaagttctatgggtaaaacaccattaaacagcatcatgtgctacagagaaatctttcatgaaagkaacagtcaatcaatgcagcaaacttcattgttatcttacttcaagaaattgccacagccaccccaatctttaggtaccaccactttcatcagtcatagccaccaacattaaggcaagaccctccatcagcaaaaagtttacaatttgctgaagtctcagaggattgctggcatttttaaaaaatgtattagcaataaagtatttttaaattgaattatttttaaactgaaacatgtacaataaggtatttttaaactgaagtatttttaaattgaagcatgtacattttttcaaacataatgtcactgtgcagtggacttagtacagtgtaaatattaaattttatatgtactgggaaacaaaaaaattcatgtgacttgctttattgcaatattcactttattgtatttattgtggttgtctggaaccaaacctgcagtatctccaaggtatgcttgtattaggaatacgattttagggaaagcccatcaactaagttgggaaataaaccagagggtagattccactt

SEQ ID NO: 487401 - DNA, 624 bp, Homo sapiens
ttggaggtataaagaaaaatgaaactgagctgttataactcttttccacgtttccaaacttgagcacacccattyccgaccagatcccctttcccataatttccacttctgatgttggaccatgactggaaaaaaaggaaagctggaagaaataactgaaaaatccaagaggaaagagtgaaactaaatctcctaatagaaaaagtggaacatgattgtcctaatttcctaatcgtctgcccctgagttactggtaaaagcactaagagacgtcccagatattatgatccttttacacagcatgcagatggaaaatcagggtgggataaaggaagagaagaacagagaagaggcagattaacagaatcaaattccagatgggaaaggatggagaaaggcaaatggcattcgggctctccctctcaactattcatgctttttcctatgggagaaaagggaggtggtttcttctggatgctctaagtctgggcagacaataaaacatcaccacagtgacagccgggttattactttccagcttgtgaccaaaatgagaccctagtgtggcagaattaaaattcgcaatctcatccatgaaaggattttctgtaccagacgttttgt

SEQ ID NO: 487402 - DNA, 547 bp, Homo sapiens
acagtttgaatttagctaaaaggatccaacactcttgcccaaacaattttctggttttttctttttctttctttctttttttttttttttttttttttgagttggagtctcgctcttgtcgcccaggctggagtgcagcagcatgatgtcggctcactgcaacctccacctcccaggttcaagcaattctcctgcctcaccctcccgagtagctgagattacaggggcccaccaccacccccggctaattttttttttttctgtatttttagtagacaaagggtttctccatattggccaggctggtcttgaactcctgaccccatgtgattcacctgcctcggcctctcaaagtgctgggattacaggcgtgagctaccgtacccagacmcaaacaattttcttaatgaacattctacttagaaaagtctgtcattttgaattttccacatttgtgacagattgacccacattcttaatgctgatcatggccagtcctaggtcacattttgaagggaattaggtttccctatggcatcttctctac

SEQ ID NO: 487403 - DNA, 498 bp, Homo sapiens
taaaaccatcagatctcatgagacttattcgctatcacgagaacagcaatggaaaaacccacccccatgattcaattaccttccaccaggcccctcccacaacacgtggggattatgggagctacaattcaagatgagatttgagtggggacacagccaaaccatgccagtgagcaagagttgaacatgtagaaagtgaagggaggaaacatttgagaaaagcacagagggtggggaatatgggcatactaagaaagagagtggttcagtttgcctggaatatagctgcattctagtacttaagaatcctraactatttaaaatgaaaggttctcatgtccacctccagaaattatatttcagtgggtctgaatgagcccccagaacctatcatgaaccatcatcacaagtgattctgttgtgaagggaatacagtccatacttggagaaaaatttgcatcaggtgtatagtggtggatgcgggagaggtggcagggt

SEQ ID NO: 487404 - DNA, 498 bp, Homo sapiens
taaaaccatcagatctcatgagacttattcgctatcacgagaacagcaatggaaaaacccacccccatgattcaattaccttccaccaggcccctcccacaacacgtggggattatgggagctacaattcaagatgagatttgagtggggacacagccaaaccatgccagtgagcaagagttgaacatgtagaaagtgaagggaggaaacatttgagaaaagcacagagggtggggaatatgggcatactaagaaagagagtggttcagtttgcctggaatatagctgcattctagtacttaagaatcctaaactatttaaaatgraaggttctcatgtccacctccagaaattatatttcagtgggtctgaatgagcccccagaacctatcatgaaccatcatcacaagtgattctgttgtgaagggaatacagtccatacttggagaaaaatttgcatcaggtgtatagtggtggatgcgggagaggtggcagggt

SEQ ID NO: 487405 - DNA, 602 bp, Homo sapiens
aaaagcacagagggtggggaatatgggcatactaagaaagagagtggttcagtttgcctggaatatagctgcattctagtacttaagaatcctaaactatttaaaatgaaaggttctcatgtccacctccagaaattatatttcagtgggtctgaatgagcccccagaacctatcatgaaccatcatcacaagtgattctgttgtgaaggkaatacagtccatacttggagaaaaatttgcatcaggtgtatagtggtggatgcgggagaggtggcagggtctggaccacagacagctttaatttcaggccacagagtttagaattttcctgtgagccacagagacttacctttcctgctgttcaatattagcataaagaaaggggatttcttaaagatgacactcaactttagatcctaggaggcaccattaatcgaagcaaggaacatgaagagagagattgtgcatgtgctcagatcagtttgtaaccttccggtttggtcatcatcggctttcctctgcttctaccaccactagcaatggtgaagtagatacccatgggccctggcccagatccctctcatcttggtctccaggtaca

SEQ ID NO: 487406 - DNA, 620 bp, Homo sapiens
atctatgcctgtgaggaccctgcaccaggtccctgctgctctggcctattagagaaagaaggaaccttgggggtcattcaggccagaagtccacagacagagctcaggccttctctgcccaagctctaccagagagtttctgcttttattcttttgtatttktttttctcaatgaggtagtgttttaaaatctggttccatgaggagaaggagaaaggtgaaaatcacctgtgccgtcattttacaaaaggaaaagagactctcagaagagaaggggttttccccaaggtcaaacggctcagtattggtatgggaagaccccacatcctcaattccttacacacttttcagagggagggaagaaaataggggattgtgatttggagtgaagggctgagtctgcctgaagagtccccaagcccaaggtgctcctgtgacaccatcccatcgtgggggatgagcatcacataccatttgtgccagcatcttgggagtgagaactggggaaggggtgcagaggggcccacagggcctggccgtgggatttcatggtcacagtcaaacacacacacacacaccagcacctgtactcatagctaatccccacccaaactcctacc

SEQ ID NO: 487407 - DNA, 582 bp, Homo sapiens
tgacctttgcagcattttctcctttggagaaagagctgaaagtcttccttataatgctcattagccctgattggccaccaatcactgaatacgaattcaagcgggtatgatttgcagaaaagcaaagctctgtcattaaacagagaacaggtatgctctcacaaagtgaaggaggaagacaaactcagagcaggacatttcctgggccttgtaaagggtcacgtrttcccctggggaggctcatgcttaaccctgcccatagcaacaaagccgtgagcttcgcagtgccctctgcagcagcaggagctgacccacactctatccattgtcatcttcagaagacaaaagggacggctggtttggcagctcctagcaggaagagcgctggggcctcggagctcataccccaggaggagagcccgcacacctaagcttcctggggccatttccctcctctctgactcaatacatctatgcatcttccaaggccgcactgagagctccagaaaggcagagtccactcgttgggccttattgtatatacccacctcccatccctcccctgcccaggctccacagcag

SEQ ID NO: 487408 - DNA, 582 bp, Homo sapiens
tgacctttgcagcattttctcctttggagaaagagctgaaagtcttccttataatgctcattagccctgattggccaccaatcactgaatacgaattcaagcgggtatgatttgcagaaaagcaaagctctgtcattaaacagagaacaggtatgctctcacaaagtgaaggaggaagacaaactcagagcaggacatttcctgggccttgtaaagggtcacgtgttcccctggggaggctcatgcttaaccctgcccatagcaacaaagccgtgagcttcgcagtgccctctgcagcagcaggagctgacccacrctctatccattgtcatcttcagaagacaaaagggacggctggtttggcagctcctagcaggaagagcgctggggcctcggagctcataccccaggaggagagcccgcacacctaagcttcctggggccatttccctcctctctgactcaatacatctatgcatcttccaaggccgcactgagagctccagaaaggcagagtccactcgttgggccttattgtatatacccacctcccatccctcccctgcccaggctccacagcag

SEQ ID NO: 487409 - DNA, 582 bp, Homo sapiens
tgacctttgcagcattttctcctttggagaaagagctgaaagtcttccttataatgctcattagccctgattggccaccaatcactgaatacgaattcaagcgggtatgatttgcagaaaagcaaagctctgtcattaaacagagaacaggtatgctctcacaaagtgaaggaggaagacaaactcagagcaggacatttcctgggccttgtaaagggtcacgtgttcccctggggaggctcatgcttaaccctgcccatagcaacaaagccgtgagcttcgcagtgccctctgcagcagcaggagctgacccacactctatccattgtcatcttcagaagacaaaagggacggctggtttggcagctcctagcmggaagagcgctggggcctcggagctcataccccaggaggagagcccgcacacctaagcttcctggggccatttccctcctctctgactcaatacatctatgcatcttccaaggccgcactgagagctccagaaaggcagagtccactcgttgggccttattgtatatacccacctcccatccctcccctgcccaggctccacagcag

SEQ ID NO: 487410 - DNA, 615 bp, Homo sapiens
tcaacacaagcacactccagtgctttctgctttgctgttggcctccctcgggaagctttgaacactactgagatcatcattgtcaaactctctgggctctggtgcaagggcagtcagataaggaggaatatgacgtgccaaccctcctctttggtccccagcccccagcctcaccctgctgacctctggctcctgcttagctcagaaactgtgggctcagaacaaagtttgaggttctgcttctctgattcacccctttctccttcctgattactggcatggagccaggcactgcaggacagaaatcaggtaactttacagatgggaggaatgaagtggtgcttttaggggcmtatgttgtgctgggcaccaaagtaaactgcatgaggacagggaccttgtctgcatggcccacagaactatcctggcacagtgctggcacatgttgagctcatgaaatgaataagtcatttgatattgtgaatatgcattcacttattcacaacttatgactaaaaaaaagctgttattccattttatggaaagggcaactgagacacaaaatcacaggcaggaagtgatcaaaccaggggttgaatccagagcaatctgtct

SEQ ID NO: 487411 - DNA, 414 bp, Homo sapiens
cttcagcgcactcccaatccttgatcctcccgggaagcctgttagctaggctaggctgaggttggccctacttcgcctaaaaatcctcctactcctggcagacgatgcaggtgtaaaggatgaggcctggggagggggcctgaggatgcaggcatcgaatctcatcgcatctcatgcccttctcctgggtttgtgcagggcagcggcaggcgcggcccggacctacgggaggaagccccgagccctcggcgggctgcgagcgactccccggcgatgcctcacaactccatcagatctggtaagaacgcggtgtggtcaggayccccgagcccccgcgccgctgagcgtccgtgcgtgcgctcgggtggttggatctcgagagcgtcagcacgggattcgcgggacccacccgcg

SEQ ID NO: 487412 - DNA, 653 bp, Homo sapiens
ccacctccatctctcctgttcctttttgcctctgtttttgatcacggtgtgaaattctcttctcccatcactttctaatccaagcattattttcttagaaagctacttagagatcacctccacaacacttcctgttatatctgtcatctttctctgtgtttcatttgtaccacattatcatctctactcatgtgtagttttgaaataaatgtgcgtgtgtgtgtgtgtgtgtgtgtgtgtgtgtgtgtgtgtgtagtcttcttcttctttaagacagagtcttgctgtcacacccaggctggagtgcagtggcatgatcttggctcattgcaacctccacctcctgggctcaatcaatcttccaacctcagtctcccaagcagttgggactgcaggctcatgccaccacagccggctgatttttgwattttttgtagagacgaggtttcaccatgttgcctaggctggtctcaaactcctgggctgaagtgatccccatgcctcggcctcccaaagtgctgggattacagtgatgagccaccacacccggcctatcatctctttaattagtctgcaaagtccttttagccaaggaccatgtcttatttttcttataagttacctagagttcttagtaccattctatgaaggtt

SEQ ID NO: 487413 - DNA, 639 bp, Homo sapiens
ataaatgagttggaaagtcagtcttctttaattcacacagaatattcttgaagttaaacctgcccatgggatagagttatggtaaacaccagtcactgagccacgagatgaaatatttctgctcctagagacaagctgggaccaagataagactctagacttttctggrcaaggtgcagtggctcacgcctgtaatcctaacactttgggaggccgaggcaggtggatcacttcaggtcaggagtttgagaccagcctggccaacatggcaaaaccccatctctaataaaaatataacaacaacaaaaaaattagccgaacatggtgacgggcacctgtaatcccagctacttgcgaggctgaggtagaagaatcacttgaacctgggaggcagcagttgcagtgagccaagatcgcgccactgcactccagcctggatgacagagcgagactgtctcaaaaaaaaaagaaagaaagaaagaaagaaaaaacagaaaaaaagactctaggcttttcttcttcagttggtgcccaccagctggcaccatgatcagctgggataggttgaggaacccttgcaagtaacattttagtagttagaagtattgaggagtagacgtgtgaggagaaggggtggga

SEQ ID NO: 487414 - DNA, 651 bp, Homo sapiens
aagggcctgatatttaagtgactggctcccatttagccattggtgtccttttgcctctaggactccctggtggggggccatgacatcaaattgctgtcctggggtaaacttactaacttctatcaatagagtgctggcgaccacagctcacaagcatcctggctacccatgtgccacttggtctagctgtttagaaaactaagccactagtcctactagtgggatggccaaagccttaccttgtttttcagcagcataacagagtgaaaggtttttctmtgtttggaagtcccaaagcaggagctattcctagcctttcttttatggttaagagtgtcttttggcagattccatcccaattcaaaggcttgtgatcactcccttttagagcttcatagagtgactctgctatagactcaaacccatgaatccagatcctgcagaggccagccatttcctaaaaggcttttaactgtttctcactttgaggggcctgcagtgccaagatggtctctttttgctcctgggccaaagtccttgtcccaggggtgagcacataccccaaatatttaaccttttgcacagagatctgggcactgtggtgagataaatgataccgttactttcccagaaaattaaggatctgaatta

SEQ ID NO: 487415 - DNA, 508 bp, Homo sapiens
gcccctcaaggtcgagcactggctgtgctgaggggcaaactactcccacactgctaagaagacacacatggggcagtgaaggctgtgctgtgggcaccatcctgtaggagtcaaaaggcaggttgtcttgggagggaccagcaggcaagggggcatgtggatcagatatgcttgagtcccatagcaatggcagccccgttccctccaagcccagcagacaaaaggagcttcaaccactcagtccaaaatgcagaagcttggggaatgggcatctatgcttgtgttttgccacagctgtactgcacagcaaaaccttctgggctccatgagggttcaagctgcacatctacctgctttccaggcagcgcccccctccaagttcaaaggtctatrggggttgtgggagcttatcctatagctaggataccagaggtccgtgggggtactattaccccaggttttctcactcactccttcattgggttcaggaactggggggcaatcctag

SEQ ID NO: 487416 - DNA, 459 bp, Homo sapiens
gtaattgccttcaaggagggaagtggagtgtgtcttttagcattaacttttaaattaggcagataaaaaacaaaagagctactattcaccaaaccaagtatcatcttcaagagggagttcaacaggaccacagaagatacaggaaaatgggccaracaaatcacacatacatttctattagcaccccaaaagtggtgctaatagaaatgaagaagtagaatgagcaccatgcacactccatcttccccaaatgttactactcaaagatttcagaggccttattgttcaccaaatagataacattttcaagccaataatcctaatttgaaaagcaattgcaaagtccttagtgtcatgaaaatgcttttgtttgctccaaagatatttacgaaactatacagtggtatcttcattgcaatcactggaatgtttttgtctcaaaattcatgttgaaactta

SEQ ID NO: 487417 - DNA, 459 bp, Homo sapiens
gtaattgccttcaaggagggaagtggagtgtgtcttttagcattaacttttaaattaggcagataaaaaacaaaagagctactattcaccaaaccaagtatcatcttcaagagggagttcaacaggaccacagaagatacaggaaaatgggccagacaaatcacacatacatttctattagcaccmcaaaagtggtgctaatagaaatgaagaagtagaatgagcaccatgcacactccatcttccccaaatgttactactcaaagatttcagaggccttattgttcaccaaatagataacattttcaagccaataatcctaatttgaaaagcaattgcaaagtccttagtgtcatgaaaatgcttttgtttgctccaaagatatttacgaaactatacagtggtatcttcattgcaatcactggaatgtttttgtctcaaaattcatgttgaaactta

SEQ ID NO: 487418 - DNA, 558 bp, Homo sapiens
gtgagggtgcctcacggatggcaggccccccagggcaggggctgctcacatgggctcagggcttgggtaggatttatgcctgtcaagatgaaygagaacttaggctggatgtgtagaaaggtggaaaaggagcaggcgtaaggatggaaactaaagccacatgctctctgtgcaggattccagaagcttccctatttcctggggagttactgcattgcccttagccctggtgagcagcttcttcattccaagtcctccttcatcaaattagtcctctcaccggataaacctctaagaaactaaaaccccttagcagagcagagtgcagtggctctggacccagtcaccacgttgaacctggtcgctaccattgacaggccaggtcccttcgacaggttacgtaatttctctgtgcctcaaattccacctctgcgaatgacgagagggaggaataatggcccctgcctcaagggttattttaaagactaaatgagtgaatatacagagcacagtgcctggctggtattaagcattacatagtctttcaaaaaagctggg

SEQ ID NO: 487419 - DNA, 558 bp, Homo sapiens
gtgagggtgcctcacggatggcaggccccccagggcaggggctgctcacatgggctcagggcttgggtaggatttatgcctgtcaagatgaatgagaacttaggctggatgtgtagaaaggtggaaaaggagcaggcgtaaggatggaaactaaagccacatgctctctgtgcaggattccagaagcttccctatttcctggggagttactgcattgcccttagccctggtgagcagcttcttcattccaagtcctccttcatcaaattagtcctctcrccggataaacctctaagaaactaaaaccccttagcagagcagagtgcagtggctctggacccagtcaccacgttgaacctggtcgctaccattgacaggccaggtcccttcgacaggttacgtaatttctctgtgcctcaaattccacctctgcgaatgacgagagggaggaataatggcccctgcctcaagggttattttaaagactaaatgagtgaatatacagagcacagtgcctggctggtattaagcattacatagtctttcaaaaaagctggg

SEQ ID NO: 487420 - DNA, 558 bp, Homo sapiens
gtgagggtgcctcacggatggcaggccccccagggcaggggctgctcacatgggctcagggcttgggtaggatttatgcctgtcaagatgaatgagaacttaggctggatgtgtagaaaggtggaaaaggagcaggcgtaaggatggaaactaaagccacatgctctctgtgcaggattccagaagcttccctatttcctggggagttactgcattgcccttagccctggtgagcagcttcttcattccaagtcctccttcatcaaattagtcctctcaccggataaacctctaagaaactaaaaccccttagcagagcagagtgcagtggctctggacccagtcaccacgttgaacctggtcgctaccattgacaggccaggtcccttcgacaggttacgtaatttctctgtgcctcaaattccacctctgcraatgacgagagggaggaataatggcccctgcctcaagggttattttaaagactaaatgagtgaatatacagagcacagtgcctggctggtattaagcattacatagtctttcaaaaaagctggg

SEQ ID NO: 487421 - DNA, 509 bp, Homo sapiens
agcaggagatcacctcgttaaaatttccctgacactcrcaagattatcagcctccccagccccaccttcagtgttctgcccagacgcccagccaggattgctcacccttagtggtctccttttctaggaggcccagggctctggcttggccagatctggccaacagcgactcttctgttccaagaactctccataagctcaagaaaaagtagttcttagagtcttcaggcctcgggtgaagcagtcttctgtttcattcttgctgttctgacagcctcatgctccagcagcaatgctgtgtccacagggccaggtgcaggctgcataacagcatggactcaacagtgagagtgatcaggaagttccaaggcctctgtcctggggttcggtgcggcacagacttgggggagggccggtgtccttccagggtctgaggcatctgtcatggtttttttctgcagcaagctctcgtcatccgagattccgagaagaagaccatcccttcagag

SEQ ID NO: 487422 - DNA, 572 bp, Homo sapiens
gttttgagaataaataagtcgatgtggacagcacttagaacagtgcctggcacgtggtacayaccataaaagtgtttcatattatccctatgttttaaatgtaaaaagccttatcttggccaggtacagtggctcacacctgtaatcacagcactttgggagatcgaagaaggcagattgcttgagcccaggagttcaagaccagcctgggcaatataccaagaccttatctctacaaaaaaaacaaaaaacgaaattagctgggcatggtggcacatacctgtagtcccagctacttgggaggctgaggtgggaggattgcttgagcctgggaggtcgaggctgcagtgagctgtgatcgtgccactgcactccagcctggggcacagagtgggaccccgtctcaaaaaaaaaaaaaaaaaaatttaagagagaaagagagaaagaaaaagaaaaggcctatattttagaaagtgatagagctgggaggttttctgtttggtttggtttttgttggttggttggttttctcaatgtctttacttgatcattaaaaaaagcagcagcagcag

SEQ ID NO: 487423 - DNA, 572 bp, Homo sapiens
gttttgagaataaataagtcgatgtggacagcacttagaacagtgcctggcacgtggtacataccataaaagtgtttcatattatccctatgttttaaatgtaaaaagccttatcttggccaggtacagtggctcacacctgtaatcacagcactttgggagatcgaagaaggcagattgcttgagcccaggagttcaagaccagcctgggcaatataccaagaccttatctctacaaaaaaaacaaaaaacgaaattagctgggcatggtggcacatacctgtagtcccagctacttgggaggctgaggtgggaggattgcttgagcctgggaggtcgaggctgcagtgagctgtgatcgtgccactgcactccagcctggggcacagagtgggaccccgtctcaaaaaaaaaaaaaaaaaaatttaagagagaaagagagaaagaaaaagaaaaggcctatattttagaaagtgatagagctgggaggttttytgtttggtttggtttttgttggttggttggttttctcaatgtctttacttgatcattaaaaaaagcagcagcagcag

SEQ ID NO: 487424 - DNA, 495 bp, Homo sapiens
ctaatagttatcaagagtccaaaagatgttaggtatttatacatactttatattttgagctaccttaatttctctaatttttctaattttcgtttttctttacagacagggtgtctcactctgtcacccaacctggagtacagtggcaagagcayagctcgaactcctgggctcaagcaaacctcccacctcagctcctgacctgagaagctggaactacagatgcatgccaccacgcctggttaatttctttttgtatttcgttgtagagacgaggtctagctatgttgcccagcctggtctcaaactcatgaccccaaggaatcctccctcctcggcctcccacagtgctagaattacagttgtgagacgccctgcccagcctattttcttaaatccaattatctgaatccagttttcacagacaacaactgtactcagaaaagtctaagagcaatatttttcacttcttcaggtatgttaaggtttacttta

SEQ ID NO: 487425 - DNA, 647 bp, Homo sapiens
aatctaataattcccgctgctccatacatatccttgwaacacctcatactgagattttacaatttttataaaaagaataggaataaaatggcatctacttggggttttcattatcatttctataattttgttttttaaatttttagtttaattgcattatgatcagaaaaactgcatgacatcagttctttgaaatgtattaagactagtttcacagcctcatatatggtccattttagcacacattctgcatatgcttgaaaagatgtctattctccaatggttagccacatggcttcatatttattagatcaagcttattaaatgtgaggctccaatgttttacaaactaatacatttttgttttcttgttccattaattactaaaaggggtgggtgaaaataccagtatatggttgatctgtacatttatccttataatttggtcaatttttattttatagttctgaggctgttattacaagcacactagtttataaacactttccttgtgaattaaacttactatatagttacactctttatctctagatatacttttgccttaaaatttatgagtgtgtgtgtgtagtagtagtagtagtagtagtagtagtagtagtagtagtagtcatcccctcttcttc

SEQ ID NO: 487426 - DNA, 637 bp, Homo sapiens
ctgatactgacttgatcttcaggttcaggacatagactatgtcacacttgctcctttccaatacatttgtttctattccttgatgagtaaaaattatctgaaaggtagaaactcagggacagtgacaaccaytgaccttggcaaagctgtaactaaatagcaaagacaggcgctatctttgccaggtactgttgcaggggtgacataaaaaagcagaaatgattcccctccccactactaggaatgtcagtctaaaaggaatatctgaaggaaaaaccagaacatactaagaatctcagagttgctgttattcatcaaaccagtacggcatgacaatcatttgggaggagtgggtacagacccttcacgatttgccccaacctacttttccagcttttctccgctacttccaccagacatcattctacacttcagcactagctaagctactgatcgtctctccacaagctgtatcctttttatcctgttccttgtgcctggaatatcctgttgcttgccacccgtccaaaaccaattcaaccacttcaacctctttcccttgagaagctacacactctctccttccccataagaagtattcatccatgccccatcaaaacttatggaaggaccagga

SEQ ID NO: 487427 - DNA, 657 bp, Homo sapiens
catgacttaatcactctccaaaggccccacttcttaataccatcatatcgggcattaagttccagcatgtgaattttaggaggatgccaacatgcagaccatagcaaaaactaactatacagctataaagttataaagacagcgtggtattgataaaagaatagacacagaaatcaatggaagaggtaagaaagtttagaaatagacacacaaatatagtcaactgatctttgacaaatagtaaaaggcaattcaataaagactagtcttttaacaagtagtactggaaaaattggatgtccatatgcaaaataataataataataataataataataataataataatgaatctagacacaggccttatactgttcaaaaacattgactcaaaatgcatcatggacctaaatgtaaaattcaaaactatacaacttctagaagaaaacaggagaaaaccaaagaggaggagatgctaaaaagtagtaggaaggggcaggtagggcacacagtgtgcatttgtcagacactgtcctgggtamctttgtgcttattgtttcatttaatccttatggcatggtccgattcttgacatcctgggtcagatggcgacactggaaaagttaggttcatgggagggcagggccagcctggcac

SEQ ID NO: 487428 - DNA, 634 bp, Homo sapiens
ctgcagaagagctcatttctgaggttcttcttagccttatgagttaatcgcaccaagagaagtcactttaactcacatgcctttaggagtaatgatacatttaaacgattaaacaatwaggaaaaaaatgcatatctccctaatgaaagcagttaacacacagatccatggtttatatgagtatcacaagtcatttgtaaataacatgttcattttagatatgtaaagagttctgtcatgccctatgaaataaattatattttattgttgcccgggtgtttcataacttttatttatttactgcaagagtggagaattaagatagagtagtttatttcaccaaaagactgacaaatggctcattagacacttatggagctgaagctaatcgtacaacttttgttgttgttgtattaattgtcattgcttgcttagcatgctcacactggtggtcatcagcacccattttttaccactatcccacaaactactccccaaaagaaagaaataatgaaaagaaaaaaatagataagaaaaaaaaggaaaacagaacttaaaatatgatgtgggttagagaaacgcatgggaggaatgacaaagaataaaagtgatagcctttccccactgggccacc

SEQ ID NO: 487429 - DNA, 621 bp, Homo sapiens
tttgtgactgttaacttcatgttgcctatgcttgtttccctcacatatgctcatatacaccaatgcaaaatagcattccacgttttctatcagacagtacatactgatgatttttcatctaaaataacaaaattgaacattaacaaaatatgtacataaaaaaagacacggtatgtagtggttaagacagactacatacacatgggcacattactctttcacagactcaaatatttttcacagccttatgtagtaaaggatactacaaatctaatacaaaaggatataatgaaagctacacagccaactacatgcttactgctagggatatcaaagattagtgtaaatgtaactggaaaaaaggtctggtgttcacccaatgccaatgcattcttacccatttgaggagtcccttcatttacaaacctctccttctgatagactctatcacttttgycttatcattaatccctttcctcttctcatctaggtctaaacccctgtatactttacaccttcttcttaaatgcttaatataagtaaccacaggcgaatctcttctcccccttgaaaaactgcaaataaagatgtcagctattgagtatatttgtggcgtctcca

SEQ ID NO: 487430 - DNA, 659 bp, Homo sapiens
cactacatattgactgaatgaatgcaatatctaccacttagtatatccacatagtgaaaaaagctaagctacaatatgaaaaaagaatagcattaaatcatatttcaaattaataaataaaggtgttcttggcagaatggaaattaagtcttttgaataccattaaaactattttacaagctcagttttgactttcatctaaactagggattttttttcaaatacctaaaattttgagatttttggttttgctatcaattctagactagtaaaacctgtttaataattacaaatggcaattacatagacrtctttaaaagaaaagagaaataccagaaataataatcatgaattcaatatgctacaaatttgacaaaacgtaatagaaaataatgtattgatagtacgcttctggttcccaaaatgtatattttgcttccacctatattgtcagcatttctgcctgcttaaaagcctttatccctgctagattgttagtagtcactgcactccaaactcatgccagttgaaaataaaggtaacaaaagttttcttcaacagcctgtaggttcacaaaattgaacctgttcttttatctgcctgtgttcatttagcccaccaagcagtctttattaaagctaaggcatcaggcagtcaaa

SEQ ID NO: 487431 - DNA, 659 bp, Homo sapiens
cactacatattgactgaatgaatgcaatatctaccacttagtatatccacatagtgaaaaaagctaagctacaatatgaaaaaagaatagcattaaatcatatttcaaattaataaataaaggtgttcttggcagaatggaaattaagtcttttgaataccattaaaactattttacaagctcagttttgactttcatctaaactagggattttttttcaaatacctaaaattttgagatttttggttttgctatcaattctagactagtaaaacctgtttaataattacaaatggcaattacatagacgtctttaaaagaaaagagaaataccagaaataataatcatgaattcaatatgctacaaatttgacaaarcgtaatagaaaataatgtattgatagtacgcttctggttcccaaaatgtatattttgcttccacctatattgtcagcatttctgcctgcttaaaagcctttatccctgctagattgttagtagtcactgcactccaaactcatgccagttgaaaataaaggtaacaaaagttttcttcaacagcctgtaggttcacaaaattgaacctgttcttttatctgcctgtgttcatttagcccaccaagcagtctttattaaagctaaggcatcaggcagtcaaa

SEQ ID NO: 487432 - DNA, 559 bp, Homo sapiens
tgctttaaaaggtggtatttattattcatcactcatgaaacttgactcagtgaggacttcattatttttatttctctttccacgtctccaactttttaaaaatcactaatttaactstttgttaagtactcaagtacaaagtgatctcttctttcatgaactttgctataactgttgaaaggattggtgtcaggctctctcaaccctgggagtttccaaaatttagcaaatattacttgtgataagcttaaatgccacatcgctaagtacaattattaccaggaatccgtcaagggggagatagccccgctcacacccttagacccaaacaggtgctggttcatgctttctccacaaattggcagttgggtacttccccactgtcatcacagttgagctcattttaacatatattcaaagaagctttttagtttctactcctgaattgtagtgttcaagttatttgccttcctgggtaagaaaattttaacccaagtctgggattctctggcacctgtcttttcccatcttttaatgagttggcaagattaggtcaaat

SEQ ID NO: 487433 - DNA, 559 bp, Homo sapiens
tgctttaaaaggtggtatttattattcatcactcatgaaacttgactcagtgaggacttcattatttttatttctctttccacgtctccaactttttaaaaatcactaatttaactctttgttaagtactcaagtacaaagtgatctcttctttcatgaactttgctataactgttgaaaggattggtgtcaggctctctcaaccctgggagtttccaaaatttagcaaatattacttgtgataagcttaaatgccacatygctaagtacaattattaccaggaatccgtcaagggggagatagccccgctcacacccttagacccaaacaggtgctggttcatgctttctccacaaattggcagttgggtacttccccactgtcatcacagttgagctcattttaacatatattcaaagaagctttttagtttctactcctgaattgtagtgttcaagttatttgccttcctgggtaagaaaattttaacccaagtctgggattctctggcacctgtcttttcccatcttttaatgagttggcaagattaggtcaaat

SEQ ID NO: 487434 - DNA, 642 bp, Homo sapiens
cacttaaaatattaaagaagactgtagtttccatcttggacactttctctgaaggacactagttgccatgtagtgacacagacctcgtggagaagctygcatggcaaagaactgagacttaccaccagaaacatgagtgagtctggaagtggatcaaaccccagttgagctttgagagactgcagcatgggctgacaccttgagtgcagccttacaagaaccctgggccagaaccacccagctaggctaagctgcttctagattcccaacccacagaaactgagataataaatgtttgctgttttgaaccaccaagcaagggttttattatctatgaccttgctcttacctgcaggacgtgtctggaatgtcagaactatattctggctttccttggtttattagtccattttgcatggctataaaggaatacctgaggctgggtaatttattaaaaaaaaaaaaagaagaagaagttgtttatttggctcgtggttctgcagactatacaagcatggcaccagcatctgtctggcttccagtgagacctcaggaagctgttactcattgtggaaggtgaagtgagagcaagtatgtcacatggtgagagagggagcaagaaagatgacagagatcccagac

SEQ ID NO: 487435 - DNA, 630 bp, Homo sapiens
gccacttaaaatattaaagaagactgtagtttccatcttggacactttctctgaaggacactagttgccatgtagtgacacagacctcgtggagaagctcgcatggcaaagaactgagacttaccaccagaaacatgagtgagtctggaagtggatcaaaccccagttgagctttgagagactgcagcatgggctgacaccttgagtgcagccttacaagaaccctgggccagaaccacccagctaggctaagctgcttctagattcccaacccacagaaactgagataataaatgtttgctgttttgaaccaccaagcaagggttttattatctatgaccttgctcttacctgcaggacgtgtctggaatgtcagaactatattctggctttccttggtttattagtccattttgcatggctataaaggaatacctgaggctgggtaatttattaaaaaaaaaaaaagaagaagaagttgtttatttggctcrtggttctgcagactatacaagcatggcaccagcatctgtctggcttccagtgagacctcaggaagctgttactcattgtggaaggtgaagtgagagcaagtatgtcacatggtgagagagggagcaagaaagatga

SEQ ID NO: 487436 - DNA, 547 bp, Homo sapiens
gccaggtcacagtatgctcaactttgttgactactactaaatattttcccaaagaaatagtactactggccaggcatggtggctcacgcctgtaatcctagcactttgggaggctgaggagagaggatcacttgagtttaggagtttgaaaccagactgggcaacatggtgagacctcatctctgtatttatctataatttttaaaatgtaaaaaaaaawtttttaaaaagaaatagtactaatttaccatttgtttgcttgtttgttttactcaaacatctagcaaccattaaatgactcactcctttactgacaaacacaattagagacacaggattaaaaacaaagataaggctgagacatagcacctgatccccaggtccatggacacacatgtaaataaataacctaattcagttggcaaaatgtgttaatgtatcttatctgatcttcataataaccacaagagattaagtcaaccatcattaactctcttgcttctgcaaggatagggataccagtaaggtggtttcccaaggccacaca

SEQ ID NO: 487437 - DNA, 489 bp, Homo sapiens
tatgtctataaagtgtatatgaaagattaataaattttatgttggatcttatcccagagatagctcattatgtatatgcaaatatttcaaaatctgaaaaaatccaaaatttgaaatgcttctggtcccaagcattttggataatggatccacaacctgtattctgtagtgttttggaaacttttaagtactgtattaaacaatttatctctttgggtttatatgcagtcaagttcctttaaaaatagtccattggttttatacagacaatatttgatggtgtataaatagactatgataggaatgtagaaattagagaatgctgaaaagtggtgytagaaaacttcgctggcaataggaaaatgaactcagaaaccattatctgtttgtttacttccaaatgtgatcttgcagtgcccttcaggttagcaggaccaggtctcacttgtaagacctgcctggcctttccagaggtctccacagctccag

SEQ ID NO: 487438 - DNA, 602 bp, Homo sapiens
tgcctctgcccacccttccccaggcctctgccagcctctggctgcacggtcaggccctgccccatggcaggcctgccagagcttggctggggacccctcccgcctctggctccctgatgggctggatgtaacttgtgtcttctagccccttaaggagcccaggtgttttaaggaatgaattggtcactgcatcttgtatcgattatggttctgagaaaagcaaatatcacttttggctgcattaaaagaagcatcatatataaaataaagaagatgaaggtctactctttattgcccttgtacacaaaggaagggggtgtttggttccaggtagtgagagaggagcaccccttcaaggctggtcgaggaggcatgtcccaaaggaagagttcaaggcggtttccagagaggaaggaacagccagggccttgcctcaacatgggaacggatttgggcctccacttgtaggactccagaaacagaaagggctgtttgacggagctggggacgcccctctgctgcagtggaaatgaggacacagctttggaagaccgtagaggccccgaagtgyccatggtggggggggccctacaggggatctc

SEQ ID NO: 487439 - DNA, 554 bp, Homo sapiens
cttttatagtttcatttatagactcattttacacacaaatttaatttgatcagcttaaattagttttattgatcttgtttgtacagaaataaaggtgaatgctctacttataatttaatgaattatagctgtctctctcaggctgccttatttgtatatcccctatccactttactatgaaccaaatgagactctaatgttaatttgagtggagatacgtgtccaccgctcttttaaaaaaggtacccaaatgtcctttccgcaattacccttttaaaaagactgtcaaccaggtgtggtggctcacttgaggtcaggagttcgagaccagcctggccaacatggcgaaaccccgtctctactaaaaatacaaaaattagctgtgcayagtggtgcgcgcttgtaatcccagctacttgggaagctgaggtgggagaattgctcgaacctggaaggcagaggttgcactgagcagagattgcaccactgcactccagcctgggtgacagagtgagactctatcttaactaaactaaactaaactaaactaaact

SEQ ID NO: 487440 - DNA, 386 bp, Homo sapiens
gcacctcaaaccctaccatgtcactcactgcgatctacgcctagagaacctgctacttgtccactaccagcctggggggactgcccaaggctttgggcctgcagagcccasccccacctcatcttatcccactaggcttatagtgagcaacttctctcaggccaagcagaagagccatctggtggaccccgagatcctccgggaccagtctcgccttgccccagagatcataacagctacccagtataaaaagtgtgatgagttccagacaggcatcctcatctatgagatgctgcacctacccaacccctttgatgagaacccagagctgaaggagagggaatacacacgagcagacctgcctcgcatcccattccgctccccct

SEQ ID NO: 487441 - DNA, 620 bp, Homo sapiens
ctgcacaaacttgcagttgccttcccttgaaacaccttctatcctaatagtcccataaatgcaggtaaaaatgaaaatccatattcttgaagggacagcttctttggtatgaactcagccagtgagctgtgtccatttcctccataattctggatatcacctatctttttagcaccaagtatttattctcactagcagtagacagacttaaccagtctctaccacgacccagtagactctgacaacagactcttcctttaaggtgtcarcaactgacttactaggcaggactgccatccttagcatcagcccagttttggttaccagggactatatcttttgttccaggagagagtagaaagaaaaggagagatcccatccttgggtcatagacccattttcattgccattatctgtaagtatgtgcactgcatggaggacagccctaatagtctcccctctgctgccactgcctgattctccactctgtccccacttgccagtgaagtttggatttatcagccacttgtcgccattacagagctgacccaaggtggtgtcaccaatgcctcagcagggtggagtgcagttcagagcttataaatagctggcagggcatg

SEQ ID NO: 487442 - DNA, 619 bp, Homo sapiens
atggtatagcctactgcacacctaggcatatagcctattgttcctagactacaaacctgtacagcaggttactataccgaacaccatatgcaattgtaacccaatggtgtttgtgtatctcaacctagaaaaggccaataaaaatacagtattataatcttatgggtccacaattacatatgcagtccattgttgactgaagcatcgttgtgcagcacatgactatagtctgctgtcctgaaaaggtcagaatgaaaagttatactgagatctgacyatgttcttacaaactcccctgcctgacccacttcagtttatcaacagggctagatagtagtgctcagtaatccagtctccattatctgcaataaaattttttaactttatttttgttttataaagtaatgcttactcattgtagaaaatttggaacaaatataaaaatgtgatgaagggagaaaagaaaaatcacccacaatcttaacaaccagagacagtcactgttaactttttggcctatttctgtccaatctttttttctttgtcacaagatttaaaattccaaacttgcttccctctgcctagcagcaagcttctgtcctcctcttcctcagtcagc

SEQ ID NO: 487443 - DNA, 617 bp, Homo sapiens
actgctgtagcttttctgagtgcctcacaagggcgatgtgacagtgagggggctctctgctgatgattctgcccactagttcttacattttgtgtttctttggtttagcagagcagtttcttcccccaaatgcaatatgggcagaacatttggaatattcgttctaacaatggcccstcaagaagtgggcagatgattttgtcccagaatgttcacacgtcgataaatatgttaatgtttaataataaagagtttgctttctaaatgttagttggctgggtgtccttgatagtaccagttttggtggtagtgggcatttgcggtgacatcacagatgtcagaaactgaagcctggtgggtgggggtactgcactttcactcacctttttgtgcacgcatctatcaggaatgcctgagtcctttcactgggaaaaaaatgtggaaattctgggattcacggggtttgaggagtggttcaggcaaatgtaaatgagatccttggataatcagggatcaaagtccagtcccaaagccagacctaggtccagacaccttcccagagtgcttatacagtagtgctcagtacagggctagcgtggaaggggaattggagacac

SEQ ID NO: 487444 - DNA, 330 bp, Homo sapiens
gcagctgctagattgatttttgtactgggttagttggcattttcactaggagtgaaaactgtgagactaaacagtttaatttacttagaatgtccctctttctctctstgtgtgtgtgtgtgtgtgtgtgtgtgtgtgcccgtgcgtcgggggggggggcagtggtgattctcaactttctaggaatttattaagtaaagtgtttagaaatggaaggaaacaattagataattctcagtgctccaggattttaggctcctacatttgaaaatacttgctgtcattaattgtcttgagatttaggcttttccacttttcaggaaatctagt

SEQ ID NO: 487445 - DNA, 330 bp, Homo sapiens
gcagctgctagattgatttttgtactgggttagttggcattttcactaggagtgaaaactgtgagactaaacagtttaatttacttagaatgtccctctttctctctgtgtgtgtgtgtgtgtgtgtgtgtgtgtgtgcccgtgcgtcggsggggggggcagtggtgattctcaactttctaggaatttattaagtaaagtgtttagaaatggaaggaaacaattagataattctcagtgctccaggattttaggctcctacatttgaaaatacttgctgtcattaattgtcttgagatttaggcttttccacttttcaggaaatctagt

SEQ ID NO: 487446 - DNA, 626 bp, Homo sapiens
gcaatatttttctaaatgaaaacaatcacacttaatagaattaatcaggatgggagctagaagcatataattcactttccacagattggagtaaatcctcataatgcccctttcctgtgtatttagttaaaaaagcactccagtgagaytgctttcgcagtaagtttctgtaaaccactgtacccttgtatttctctcctgtgtttccaagagttctcagatgctattttcgaatggcagcgttcactccagagctggctgaggtcaacgaagctaattttggtgccttggtgcccagggtgaagggagagagaagtcctctgcagagccaaaaggactctctggggcctgggtttggagcagtgtggtgttgctggacacaccacatttcacctttagaacctttatttgtgtgcttgcacaacaaatgtttacccagatattaagataaggaaagtatgaaggtcacatttcactggtgacaagagagcttctataaatgtaaccatatcgttgtgcagcgggagtctgtcttttattctgtacccgggacttagggggaattattggtgggtggggcatgggagttgaggctcttcttggttttctggctttcttgctatcac

SEQ ID NO: 487447 - DNA, 626 bp, Homo sapiens
gcaatatttttctaaatgaaaacaatcacacttaatagaattaatcaggatgggagctagaagcatataattcactttccacagattggagtaaatcctcataatgcccctttcctgtgtatttagttaaaaaagcactccagtgagattgctttcgcagtaagtttctgtaaaccactgtacccttgtatttctctcctgtgtttccaagagttctcagatgctattttcgaatggcagcgttcactccagagctggctgaggtcracgaagctaattttggtgccttggtgcccagggtgaagggagagagaagtcctctgcagagccaaaaggactctctggggcctgggtttggagcagtgtggtgttgctggacacaccacatttcacctttagaacctttatttgtgtgcttgcacaacaaatgtttacccagatattaagataaggaaagtatgaaggtcacatttcactggtgacaagagagcttctataaatgtaaccatatcgttgtgcagcgggagtctgtcttttattctgtacccgggacttagggggaattattggtgggtggggcatgggagttgaggctcttcttggttttctggctttcttgctatcac

SEQ ID NO: 487448 - DNA, 450 bp, Homo sapiens
tggctgaagaggcctattgtagaggacatttccatttggaagtcactccctcttgcctatatcatggcaagggagtgtgtggcagattgagtttcctggaagatgactctgagggggaagattagcatgaggaaggtttattagagtgctcttgggatagcacccagaggaggaaaggagaagaagcaggatcagagagaagtggacccccactgcccggatctgaagctgggatggcccttcagagttgtcccaaggcagagtcaaggggcctttctacccctgccatagattggtcattgttcctggctgaccttggggaaaggctgtgaccttgagcaacagcatctgggggaatgtgtccttcattcctaaggggagatctgggcagggatcacagggtccagtatggcayatggcatgcaggtaccagatgtggaaactgcaaga

SEQ ID NO: 487449 - DNA, 497 bp, Homo sapiens
cccgcccccctttgcccacttggccgcggcgcgggcacaggagcgcatttggaaggactccgcgaatccagagaaaaatagagacgtggatgctgccccaaaatgagagaccagagaaagtcgaggacatgcacccacaaacatttccaagcgccggtggccacggtaatctgstgcggggcggctgggagattttcaaaggcaccgcggaagcacctccgacctccaggccatctccctcggcctcctggcctcgccgtggcgcaaatccccgactcctccgagccgcagaagtctccactgcaaagctgctgatccgcgcccccaaaccgggcacatgctctccccctcacagccctccaaaccgagcctcgagctccgaagacctctcagcactcttctcccaaccactctcggtcgcgcctgccccgcgcagccaggccctggcctcggaccggccccctgatcggcccggacgcccgcttaccttttcttct

SEQ ID NO: 487450 - DNA, 512 bp, Homo sapiens
ggggacacatatggggaaggagaaggaacaaggtgctgtggacttgggagccagaaaaggacctggcttggtgccagctatgcatctttctacccattgcctccaagctgaggtacatgctcttggcacccctcatcccttcacaacccttcagaggattgcctccagctayttacccacgtcttctccaaatctgccaggtgtacagcagtgcaacctttgacttgccctcaactgtatattcccaaggctttgagggggtcccttttatctcttgctccattatttagggatgagagcagccttggaggcaacatttcctgcagagtttagaatctaaggacttctttgatcaacttttcttacccaatcacgcttattccaacccacagttctatgatccttgctaattggcagggaaagaaatgggaagaggagggagaagaaacaaaaaaggagaagactggattgctgatttccttaggaggggtacccatggtctcccatctagt

SEQ ID NO: 487451 - DNA, 582 bp, Homo sapiens
gcgccagccgcaatttactttctaatgctacagactgtcagcgtaaatgttaaggtcattaattttgcatagaacttagtctgtacactgctttcccataactctagtttacatgggataattccccttataaatcctacacactgtgacataggcctaaggtttgtcatgctcttacaatctcagggctctgcaggaattcattcttcttttttcttttttttttttttttttgagacagggtctcactttgtcacccaggctggagtgtagtggtgcgatctcagctcactgcaacctcygcctcccaggcttaagtgattctcctgtctcagcctcccaagtagctggcattacaggtgtgaacggccatcacctggctaatttttgtatttttaatagagatggtttcatcatgttggccaagctgtcttctttttttccctttgtattgctttcctagtctactcaatccccattaatttaataattttaataattttaatttaataattttccataaggtttatgcacaaaagattaagaaaacagtgtttaaggaattgatgatttcataagatt

SEQ ID NO: 487452 - DNA, 554 bp, Homo sapiens
aaaaaaaaaaaaaaaagaacaatagcaacaacaaagaaaatcagttcagaagatgggaatgtgataaacctcatttctttaaaaatcttcagatgctttttagagtatgattctccagagttgctggtgataatttttcagtttgccttcatcttcagccttcttctaatatttgagctggatgtttactctttcctacatgaattggctttccctctgacttcgtttgacactgatstcctctggttgtctttcgggttgttctttctgtatccttcactgattctttttatttaagtgtagccaatcattgaccatctgttgttcttgttttgctattcctgtcagagagtgtctattttcaagatttcaatagctgtctatatacctggtcctggcttcactccttcatcttcaaatactgcttgaaatcctccaatttgggggttctgcctatttcacactcattgggttcataactgagctcattgctttggaagcagcaatcttcttggaacttctgtacttttgacaggggtcccttgattcattca

SEQ ID NO: 487453 - DNA, 554 bp, Homo sapiens
aaaaaaaaaaaaaaaagaacaatagcaacaacaaagaaaatcagttcagaagatgggaatgtgataaacctcatttctttaaaaatcttcagatgctttttagagtatgattctccagagttgctggtgataatttttcagtttgccttcatcttcagccttcttctaatatttgagctggatgtttactctttcctacatgaattggctttccctctgacttcgtttgacactgatctcctctggttgtctttcgggttgttctttctgtatccttcactgattctttttatttaagtgtagccaatcattgaccatctgttgttcttgttttgctattcctgtcagagagtgtctattttcaagatttcaatagctgtctatatayctggtcctggcttcactccttcatcttcaaatactgcttgaaatcctccaatttgggggttctgcctatttcacactcattgggttcataactgagctcattgctttggaagcagcaatcttcttggaacttctgtacttttgacaggggtcccttgattcattca

SEQ ID NO: 487454 - DNA, 618 bp, Homo sapiens
gctgccctccagcacattgagggagtgaatttcagtgaggtggaagcggtcctgaacagagakacagtcgtctgtgagctctgacatttgtcccctcaattcatctctgtcgtagatcttcattctgtaagcgccagagtgctggagtggcagacagaaaacgcaagagtaaacaaacaaaaacagatggaaattaaagctccagtccctacacctccctggccacacctgcccagaagttctcccaggccaagtttgcttctagaacaaccctgttgcaaagttaaggagctgtcacactccccagtcacccaccgctgagtctaatgattcatgggcagagctagggctttgggaattaagatttgcttacaataaaatatcacatcactttagtgcctgttatttgagaaagcctttctcaaaggagaaaactgagagtcattggaaagttaaatgtcatattatgtatatacagtgaaaggaaaataaatcttgggacctcaaaatcactaagctaaagggaaaagtcaagccaggaactgcttagggcaaacctgtctcccattctattcaaagtcatccctctgaggctcacctgagacaaatgcatctctg

SEQ ID NO: 487455 - DNA, 618 bp, Homo sapiens
gctgccctccagcacattgagggagtgaatttcagtgaggtggaagcggtcctgaacagagatacagtcgtctgtgagctctgacatttgtcccctcaattcatctctgtcgtagatcttcattctgtaagcgccagagtgctggagtggcagacagaaaacgcaagagtaaacaaacaaaaacagatggaaattaaagctccagtccctacacctccctggccacacctgcccagaagttctcccaggccaagtttgcttctagaacaaccctgttgcaaagttaaggagctgtcrcactccccagtcacccaccgctgagtctaatgattcatgggcagagctagggctttgggaattaagatttgcttacaataaaatatcacatcactttagtgcctgttatttgagaaagcctttctcaaaggagaaaactgagagtcattggaaagttaaatgtcatattatgtatatacagtgaaaggaaaataaatcttgggacctcaaaatcactaagctaaagggaaaagtcaagccaggaactgcttagggcaaacctgtctcccattctattcaaagtcatccctctgaggctcacctgagacaaatgcatctctg

SEQ ID NO: 487456 - DNA, 600 bp, Homo sapiens
ctggcttcacctctcaatggaactcactggggactttgtggcatctagcccaggcactccagcagcccagagggagctcatcctctgatcaagcccagcaggtgctggccagcttcgctgagtgtggggcccacccagcctgcacccacatggaaccaatgtcagcccaggagtgycatgcacagtcctggctcccactggcacctgtccctccacacctccccgtgagcagagggagctggttccaccctcagccagccacagagaggggcccccacagtgcagtggcaggctgaagggctcctggagcacagccagagcagactccgaggccgaggaggcaccaagagcaagcgagggctgctagcacattatcacctctcatcatcagctaagctattttttttttctacttctggtttgacattgaattctttcctgaacaaagccaagaaaccaggaggcttagctctgtttgcggcttgcctctcctgcattgtgtctactattccattccaagatttagtaaactacaaattaagcagatgaagtgaatacaattactttaaatgcaaaagttaaaggtcaccaaaaaattca

SEQ ID NO: 487457 - DNA, 600 bp, Homo sapiens
ctggcttcacctctcaatggaactcactggggactttgtggcatctagcccaggcactccagcagcccagagggagctcatcctctgatcaagcccagcaggtgctggccagcttcgctgagtgtggggcccacccagcctgcacccacatggaaccaatgtcagcccaggagtgccatgcacagycctggctcccactggcacctgtccctccacacctccccgtgagcagagggagctggttccaccctcagccagccacagagaggggcccccacagtgcagtggcaggctgaagggctcctggagcacagccagagcagactccgaggccgaggaggcaccaagagcaagcgagggctgctagcacattatcacctctcatcatcagctaagctattttttttttctacttctggtttgacattgaattctttcctgaacaaagccaagaaaccaggaggcttagctctgtttgcggcttgcctctcctgcattgtgtctactattccattccaagatttagtaaactacaaattaagcagatgaagtgaatacaattactttaaatgcaaaagttaaaggtcaccaaaaaattca

SEQ ID NO: 487458 - DNA, 600 bp, Homo sapiens
ctggcttcacctctcaatggaactcactggggactttgtggcatctagcccaggcactccagcagcccagagggagctcatcctctgatcaagcccagcaggtgctggccagcttcgctgagtgtggggcccacccagcctgcacccacatggaaccaatgtcagcccaggagtgccatgcacagtcctggctcccactggcacctgtccctccacacctccccgtgagcagagggagctggttccaccctcagccagccacagagagggkcccccacagtgcagtggcaggctgaagggctcctggagcacagccagagcagactccgaggccgaggaggcaccaagagcaagcgagggctgctagcacattatcacctctcatcatcagctaagctattttttttttctacttctggtttgacattgaattctttcctgaacaaagccaagaaaccaggaggcttagctctgtttgcggcttgcctctcctgcattgtgtctactattccattccaagatttagtaaactacaaattaagcagatgaagtgaatacaattactttaaatgcaaaagttaaaggtcaccaaaaaattca

SEQ ID NO: 487459 - DNA, 565 bp, Homo sapiens
attatattcctgcccaagactctgaagccagacttmtacagaaataaccacaaaagtcacacgcaatgagatctatggaacatgctgaaatgggagagttctcttaccaccctcagaggacgtttgacaggggtgtggctcactccttcagccaccctgctgctcaaacccttagagggagtgtgcagatgggcaggtacagagcccatggggggcaccttcgggctccagcgccacagcagcgtctaggagtgggtgcctgcaacttccaaagcccaagtgggtgtgtgtcacagtgtgctctttcagctttgctgtctgcagacagcctgtgttaatcagctcaattagacactctgccttatcaagagggcagacggccagtgtgacagctttctgtatcccaagttcttgcccagtatactggaaaaattggatcacacatgggcttgaaggatgagtgctaggttttattcagtggtggatgtggctgtcagtgagatgggtggggagtgggaagtggggatggagtgggaaggtggtcttcccctggagtcaggccacc

SEQ ID NO: 487460 - DNA, 642 bp, Homo sapiens
aaaaattagctgggcatgtggtgcacgcctgtagtcccagctatgtgggaggctgaggcaggaggatcacttgaggctgcagtgagccatgattgcaccattgcactccagcctgggtgacaragtggaagcaccaactcaaaacaaaacaaaacaaaacaaaacaaaagcagcaaatactaagaatgccagcatattagcttccagttgagaaagaatgtttctagagtgctctagcagaaagaataagcacacgctggagccaataagggctggaattgaatcctggctccatactgagtaggttgggcaggttccttaaccacatcactttttctgcttggaaaactgctctgccctctgcccccaagatgaggaattaagagaccaggggcctattgttcaggttagtatcgctgtgtaacaaatcactccaaaacttagtgatttaaaacagccattttattttgatcactattttgtgtgtcaggaattcaagagctcagctgggctatcctcgcctggggcctttcatgctgttgtgtgaaatctgcaaccattgccggctggatctgcaaccacactgcaagctcagtggggctggatgtccagatggcacactcacatggctggtagttgatg

SEQ ID NO: 487461 - DNA, 493 bp, Homo sapiens
ccgttcaatctaccacagatgtcaaacggtcacattttacagaagtcaaaggaaaacaaaaccacagttctgcactcttccacagggcaaggaattgatcatattctattttcctttcaggaattcataaaatccctaggatagcacctttgtatgggctgaaccattaactgaactaaaattaatacaggaagcttaacattcaacattgtgcttgaacaaaacttaccactactcaatttttcttccaaactatgttagtaatatacattttgcaaagagtctagaaagtttttaaaagaaatctctttaggtgatgtaacacraaaactctaaggaacaacaaaacccttcagtcttatttctgaagacaagtctatgtttaatgcagatcattccagtacatgatgtgcgtgaccccctttcctttccttacgtgtgtcacacagccattaagacattttagtttgatcgcctccttaaacctttcagt

SEQ ID NO: 487462 - DNA, 453 bp, Homo sapiens
ggtggagacttgggtggatgatctcaggaaaaccctgatttcccattaccccaacacaatttaagagaaacccttggggcactgttggaaggacaaaggcttggagcctggagtccctgggtcaggttcaccccatgattttttcccttgcattcctcaccaggtaacttggtgcctcagtttccccttcctagtaagagaagaaggaggatgtcccaggtgggctctgagtgtcttcccctcctgactttgatgctgagtggccccgcctgtgcctcccctgctcagcatttttccaagttgcaatagggaccagtagagcagcaaggaggaggtgtccctttagggaggaaagccctccggccccagggccagtgccraatccaaagccgatgtgcctgtcagaccttcctcttgggctccaggcaccttagccatgtctgcctggccaag

SEQ ID NO: 487463 - DNA, 574 bp, Homo sapiens
gacccactgaaggctctgctcagactcatggcccctcccaggagtagagctgtggccctggattcttgggcccccacaggctttcctggtccagcctcaggctttgatcttagtacagccaagacctgggtgaataaacctccactcatgtccttcagggcaggctcttgaaagaggggtcctctttctggccaggactgaccgtctgtctctctcagtgtctatctttccctctctatctctacctctatatctttgtgtctttttaaaaaatatacacttcagcaactctcttagcttctcttccctgccttataatcctaaaaagcctcaagccttgcagacttgaattctagacccaaggtcaccaccttccaagccgggtgaccctgagccagctcatccttcctccagccccagtgttcccaccygaaatggagctgggccctccttgaagtgtttagcatgcagttgctgaatccccaaatctccaacagcaataaggaggcacagattttcctggaggttgtgcgggagaccaacgagagagacacaggctgggtgcagtggctca

SEQ ID NO: 487464 - DNA, 667 bp, Homo sapiens
actttctgtgtggattgaaatgctgtctacgtgcgctgtccaatacgagagccacttgcacatcaaactgactagtgcaaccgagggactagcttttcaattttaatgagtttaaacgtcaagaggcacacgtgactagtggctactatattggtcagtgcaggttggaggatgggttttctttttttctctttttttttttttttttttgagccagagtcttgctatgtctcccaggcttgagtgcaatggcgtgatcttggctcactgcaacctctgactccctggttcaagcaattctcctgttccagcctycggagtagctgggattacaggcatgtgccaccacgcccaactaatttttgtagagatggggtttcaccatgttggccaggatggtctctgtctcctgaccttgtgatctccccgcctcggcctcccaaagtgctgggattacagacttgagccaccgcacccggcctggaggaggggttttctgcaaagggaagtatttgtgagagctggcagcaccttgctggtggctttgtttctcctgtacctgaagattaagaggaggtcatatgtcagagctgattttacactgattccctccctgccacttcatggagagaagagagggccaagtgactggaagaatccacgcatg

SEQ ID NO: 487465 - DNA, 555 bp, Homo sapiens
agagaaagaaccatggtcaagttttgtctgagaaactgcagccctctagcctttaccaggttcacccctaccaagtgtttcctggtatccagagagtacctggccaaaagaacctggagcttcacacatgtgtggttgtgtgtgtgtgtgtgcacgtgtggatgcatgtgtgtgtagagcccagggtctttggtattaagaactcaggctctggccgggcrtggtagctcatgcctgtaatcccagcactttgggagcccgaggcaggtggatcacctgaggtcaggagttcaagaccagcctgggcaacatggagaaatctcgtctctactacaaagacaaaaattaggtggttgtggtggcacacgcctgtaatcccagcttcttgggaggctgaggcatgggaatcatttgaacccagaaggcggaggctgcagtgagctgagatctcaccactgcactccagcctgggcaacagagcaagactctgtctcaggaaaaaaaaaaaagggagaactcagtctctgttccgagacgtaagttcaaattctggtc

SEQ ID NO: 487466 - DNA, 588 bp, Homo sapiens
acaaccaaaatacagacctgctgagcccgggccagcctgagcctacccaccctctgtctgtcctctaggcttctgctctggctggagcagggtgtgtaggtatctattcwcatgcatattcccagcccccagacctgagtctgcaaggactttctcaagcaaatgatcacccacgttgagacactggtttagagggtatgttcagaactgtggcttcttgaaggccatggctggtgggtttcctatggtattggctttgagggttctgagaacattgtcctgactctgagtagcatcctcacccaacttcaggtattacaggacctgaaatcctacctgtggagattttttcctttggagataagcatcaccttccatattctggatgttcctaggaggagtgactcattgatgccacaagaaatccgtagtaacaacccctcatgtctgttgagtaggttggacccttggcttatctgatttctcacaacccaggaggcagacaaagcaaagactctttctgcccattttacagatgagaaccgagaggttccaagaagttgacgcccctaaaagtcacgtggccag

SEQ ID NO: 487467 - DNA, 610 bp, Homo sapiens
cactatctgctgttgaggattattctgaagatggtaccatcattagcatcataatagcagcttcacttactcaatccttaaactcccgagcaatgtggtragcagctttcctgcgtctttcatgtaaggctcacagcagccctgtgatgtgggtactgtcatcaccatcctcatttcacagacagggaaagacggggaaagcaagacttggaggattaagtcgcttgtccaaggtcacacagctggaaagtagcagagccagatgtagtcacagaaaagctccagtgcattccttcccccaagcttaaccactgccctgtcctgtgagggacttggtagcctcccccatctggcccagaccatggctaagccactctgggggccccaaatttggtgtttgcattgctagcttcagtctggaccccctgggcagccctcaccccctgccctccccttggccttcctggaactgatgctgagtatattagaaacccatggaattggagagttttaaacaggaaactggtataattttggtcaggagctcaggctagagtgaggaagctctgccaggcacagccacatccaaaagaaatagagagggagggtt

SEQ ID NO: 487468 - DNA, 610 bp, Homo sapiens
cactatctgctgttgaggattattctgaagatggtaccatcattagcatcataatagcagcttcacttactcaatccttaaactcccgagcaatgtggtgagcagctttcctgcgtctttcatgtaaggctcacagcagccctgtgatgtgggtactgtcatcaccatcctcatttcacagacagggaaagacggggaaagcaagacttggaggattaagtcgcttgtccaaggtcacacagctggaaagtagcagagccagatgtrgtcacagaaaagctccagtgcattccttcccccaagcttaaccactgccctgtcctgtgagggacttggtagcctcccccatctggcccagaccatggctaagccactctgggggccccaaatttggtgtttgcattgctagcttcagtctggaccccctgggcagccctcaccccctgccctccccttggccttcctggaactgatgctgagtatattagaaacccatggaattggagagttttaaacaggaaactggtataattttggtcaggagctcaggctagagtgaggaagctctgccaggcacagccacatccaaaagaaatagagagggagggtt

SEQ ID NO: 487469 - DNA, 534 bp, Homo sapiens
gcaccgcacctgcattacctcgtggaagccatgcgcagtcatcctggatggcacacacacatcccagagtgacgggcacacagagtacacgaggcctgtgatctgcttcgtccattatttatcactgtccaggccgaggctggtgggcacgccagctccagctcattgcygtggatggaaaccatttctgaggctgctccttgccagcctggggacctgccagtggctccagtgagagggcagagggtggggaggggctcctcatagaggacccatgtaatggaagcggatggccatccatcaccagccaaatggaaatgccaggacccctgccagcggcctccgtcactgtcacaggggaggcgaggctgcagaggcagaaaacacatcactcagcagccactgagcccagagccccccaccctcctggaaatgagaattgtaggagtggcagaatggaccatgggcattgtgacctggggcacaggaggcttcccccaccccaccctcatcatactctgcactggttgggga

SEQ ID NO: 487470 - DNA, 511 bp, Homo sapiens
ctctttttctttttttgcagcttttcgccatgatctttgccatgtgcctcttccggggcatccagtagagggtatggcctgaagcctgaagactcgccccacccaccactgcccagcacccartgtcctcccgtgcccctccccgctgtcctcttggccccaggggagaagatgaggacatcagagatggccaggagaagggccaggggaatagagctatttttttaacaaaacaaaatgaagacaaaaatatggactgatgtatcctcgcctggactcagggcaggtgccgtgggttctccagagaccccagcaactggcccaggatgcaggctgctctagagaccaaaggaacaccaggcccagcgccctctttggtccagccagaccctgggccctctctcctcactgcaccaggacctgatgccaagaaagtgaggatttaggcaacaaggaggcaaaagcaaatctcagagaagtcatcaaagcccaggggctgcacggagattca

SEQ ID NO: 487471 - DNA, 521 bp, Homo sapiens
gcctggagaggcagagctggaacaaacctagctatgccagcctgggagggcccagatcatataagccccctgaggggccaatcctcatgtctgtaggtccaggaatgccagctcccttcacagataacagctccctctgggctctgccccatgctctgctcagagggctctgaggaccagtgcctctgtatccaggyaacaggcacatcctaagtcctcttcaagtcacatgcctacaagtcaggacagcactccccacagacctcctcgaggtggctcattttcagcttcccagaaggaaataaaccctaaggagtgcagacccctcagcttccccaggccttggagggactgggctttcagccacatctccttagaatttcctccttagacttaagccctgtaaaatgcatcactgggtacagtcccttccatgctgctttctttgtccccagtcaaggggtttgtctgctatgagtttgcatattgttctttctgcagccacaagaatagggccacag

SEQ ID NO: 487472 - DNA, 439 bp, Homo sapiens
ctcctggccacacaccaggcaacctccaaatgcagcccaagccaagcccagccccagggaaaggtgactctggactcgctgctgttgaaccttctctaccagattataaaccctttggtgatcgggactgtttctcccacttcctctgagtcccttcagagaatacaggggstactagatggtgccccccaataaggattcagtcattataataatgttgtcagtgtcataactgctcctgcttcacgtgtgccaggaaccatactaagcactttccaacatcacctgaaaagtgggtgaattattcctgagttacccaggggtaaactgaggctcagagaaggtgagtaagcttcccacgtggcccagtcggtgagagaagaacagggtctcagatgccagaaggcacatggctgctaaagtcccgggcacctgccgg

SEQ ID NO: 487473 - DNA, 513 bp, Homo sapiens
aaatgaactttgatatgggggtctttcttaacactttcaagaatggttgtgggtaagatgattggtaataactgagaaccaaaactgctagtaatgggttaaggcagtgccagatgctgcaagaggtaaacccagaatctcagtggcttaatacaatacacattaatttctcactcagcracaatccagtgaaagtggtgggtggctgtccacacagtattttgggtcccaggtttcttccattttcaacatgtggcttccaaggtcattatggaagaaggaaggagtaaagagggctcacttattttctcatcacattctcaccaatgatagtggaagtgacttgggcgtcacttccactatcattggtgagaatgagtcacatgaccacataggtgcaaaggaggctgcaaaatgtagttcctggctggctagcccttcccagccacagccctaaagggagcatcccagtgtttggaggacagccacccttctggaattacaacccccttc

SEQ ID NO: 487474 - DNA, 586 bp, Homo sapiens
agattccaagaagaagctgacaagacttagaaatttccctgggtattacggactttatttcaagtgaaatgcaaagcaattaagtttcttttaactgaattccttaattatacataattgttactcttatttactttttatttaaaagtcaagaaccatgatttcttgcaactatacaaaaatactagtgaaaatggaaaaaacaytggaagatgataggccaaaaaatatatatatatatatatatatttggtccaagaatagtaggaaaaacaggatgagttttttccatttattaaaaatttcatatcattttagtttttctttacttttctttcttttttttaagacagggtctcattctgtcacccaggctagcgtgcttccacttcctcaggctcaagcgatcctcgcacctcagcctcccaagtagctgggattacaggcatgcaccatcatgcctggctaacttttgtatttttcatagagacaaggtttcatcatgttgcttaggctggtctcaaactcctgggctcaagcgatccacctgcctgggcctcccaaagtgctgggattacaggctaag

SEQ ID NO: 487475 - DNA, 519 bp, Homo sapiens
atagaacacacttattccttatacaaatattaataccaaaacagaatctcctttaccctgaaacatacttctactggggaatcctaaaccttaatgtaaaccgtttctcayttgagttttaagaagtctaagagatctcacaagataaatttctacatattttgttatttttgcttagtttttaatggttattatatatatgacatgcatatggaaatttatctgtatatacattggcttacttgaaagaatggggtactccagatctggatggtttcagtcacatttaaatgataaagatagtagttactaatgatattcactaatataggtaaagaataaaccatagtactgttgaaaacagctgcaaaaacatagtcctacaattaaaaaaaagacacttattacatactgtatataagcggatatattattgatatgtaccaagcttttctcaccaacaaagctaattctcatacagaaaaactgcttcaacaactcacagaaataatactcaat

SEQ ID NO: 487476 - DNA, 462 bp, Homo sapiens
ctgtaccactctccacgctcactgaagcccagtttccagggagctccccaatcccttagtgtctgcagatacagccaacagccagcactgccatcgggccacctggccacacacctcctgccctctgcctgccctcgtccttttctcagccaggacaccccattgcctcctccataggtgccagctctgcccgagrttctctttccctcttggagtgatggaggctggcagtacagagtacccttccctttaagttttggttctcacttttgaagaaccctgagcctccaggattgcgggcatagtaacttcctcctgagaagagccgttattgggtcagtccctgcttcagaagcagcaaggtccgttgctgctgagcggaggctgcatgggcctttgaactggcttcctttcatcctgggccctggtcctccctttcccaccccttcccatagaaccatt

SEQ ID NO: 487477 - DNA, 587 bp, Homo sapiens
agaaaaaaggggaggattgtgtgtgcatgtaagagtgggtcctttgcctcttaaaaaagtatctactgcagcttgtgctgaatatgagtgttyggaatcctcagtatgatcagggagggcactcagagagaagagctggaatgatctatgtgagggttccccattcagtgtcatctggagcaaatagtcttccccagagtttacaagtatatgcaagcccaggggacacaagaagccaaggtagccaaagttcacctacctgctatgacagccccctgggatgagtcttctcctcatttaataaaataaattaggagggctggatatgccctaaaataatggttccataactgcaaagaagctgactgtaactctgccacctgttaggaacaggatgtcactgtcactgaaacagaagactgaaaattagcccatgctatatataaattaggagggtggcgggggggcggggaactgggaacatcttgttttgacattcagcaatattttcaaggctctctaaagaaacttggaagaaaagaatgtaaaagagtccaggacctaaagggaaataaggacctgatttt

SEQ ID NO: 487478 - DNA, 587 bp, Homo sapiens
agaaaaaaggggaggattgtgtgtgcatgtaagagtgggtcctttgcctcttaaaaaagtatctactgcagcttgtgctgaatatgagtgtttggaatcctcagtatgatcagggagggcactcagagagaagagctggaatgatctatgtgagkgttccccattcagtgtcatctggagcaaatagtcttccccagagtttacaagtatatgcaagcccaggggacacaagaagccaaggtagccaaagttcacctacctgctatgacagccccctgggatgagtcttctcctcatttaataaaataaattaggagggctggatatgccctaaaataatggttccataactgcaaagaagctgactgtaactctgccacctgttaggaacaggatgtcactgtcactgaaacagaagactgaaaattagcccatgctatatataaattaggagggtggcgggggggcggggaactgggaacatcttgttttgacattcagcaatattttcaaggctctctaaagaaacttggaagaaaagaatgtaaaagagtccaggacctaaagggaaataaggacctgatttt

SEQ ID NO: 487479 - DNA, 522 bp, Homo sapiens
agtaagtcttaggcaagcagagattggaaatgagtttgttggccgggcgaggtggctcacgcctataatcccggcactttgggaggccgaggcgggcggatcacgaggtcaggagatggagaccatcctggctaacacagtgaaaccccgtctctactaaaaatacaaaaaaaaattagccaggcgtggttgtgggtgcttgcagtcccagctactctggaggctgaggcaggagaatggcgtgaacccaggaggcggagcttgcagtgagccgagatcacgccactgcactccagcctgggtgacaaagcgagactccmccaccaaaaaaaaaaaaaaaaaaagagagagagaaattagtttgtccatttggattgcctctgctgctcttcaaacttggagaatcaagcccagggcagccctgttgttgataaggaaacatgtaggaacaagatccagtggttggagctgagttattttttgaacagccaattcctagctgaccccatccccacctgccct

SEQ ID NO: 487480 - DNA, 522 bp, Homo sapiens
agtaagtcttaggcaagcagagattggaaatgagtttgttggccgggcgaggtggctcacgcctataatcccggcactttgggaggccgaggcgggcggatcacgaggtcaggagatggagaccatcctggctaacacagtgaaaccccgtctctactaaaaatacaaaaaaaaattagccaggcgtggttgtgggtgcttgcagtcccagctactctggaggctgaggcaggagaatggcgtgaacccaggaggcggagcttgcagtgagccgagatcacgccactgcactccagcctgggtgacaaagcgagactccaccmccaaaaaaaaaaaaaaaaaaagagagagagaaattagtttgtccatttggattgcctctgctgctcttcaaacttggagaatcaagcccagggcagccctgttgttgataaggaaacatgtaggaacaagatccagtggttggagctgagttattttttgaacagccaattcctagctgaccccatccccacctgccct

SEQ ID NO: 487481 - DNA, 522 bp, Homo sapiens
agtaagtcttaggcaagcagagattggaaatgagtttgttggccgggcgaggtggctcacgcctataatcccggcactttgggaggccgaggcgggcggatcacgaggtcaggagatggagaccatcctggctaacacagtgaaaccccgtctctactaaaaatacaaaaaaaaattagccaggcgtggttgtgggtgcttgcagtcccagctactctggaggctgaggcaggagaatggcgtgaacccaggaggcggagcttgcagtgagccgagatcacgccactgcactccagcctgggtgacaaagcgagactccaccaccaaaaaaaaaaaaaaaaaaaragagagagaaattagtttgtccatttggattgcctctgctgctcttcaaacttggagaatcaagcccagggcagccctgttgttgataaggaaacatgtaggaacaagatccagtggttggagctgagttattttttgaacagccaattcctagctgaccccatccccacctgccct

SEQ ID NO: 487482 - DNA, 599 bp, Homo sapiens
atttaaagtctagaggtctacaaacaaacaaaaagccaaacatgaacaactactttaggacaaaactatcttcctctaaaaayagaagcgcatacactgacgtaattctctctctctggcagacaggtttctaagacagccaccgatgggtcctacctcctcgtattcacatcctatgtaatctcctccccagtgtgggctggacctggtgacttgcttccagtgaatagaatatagcaaaagtgattgatgtcacctccaagattcagctatagaagactatgactatgactttcctcttggctagcattctcgctaacccttcctgcttgcttgtactgagctgccctatgaagaggcccatgtagggtggcctgggtgggggtgatctgtggccaacagccagcaaggaactaaatcctgtttacaaccacatgagcttggaaggagatccttccccagtaaagccaggagatgaatacagccccagcctccagcttcattgcagcatcgtgagacacccacaagcaggactcagctaagccacagccagaattctgtcccacagaacttcaagacaactagtgctgttgcttttc

SEQ ID NO: 487483 - DNA, 495 bp, Homo sapiens
ctgcttgctgggtctgtggtgtcccacagattctgcaaagcccaccgctcccacatatttcctcctcctgctatgtcccctgtggcagcragtggcaccactatccattcattggcccaagccagacattaattattttaattgcttatccacctaattaaacaaatattaattgaatgccaaccgtgtgctcacagtagtgtgcaaacccaggcgtggtttccgctttcacagagctttcctgtgtggcaggagagtcggccatttattaaataataagtattgtgaaagaaaggagtctttgtttccaaatgcaacaggaggccattgaagtgtggtgagtgggggcgtgatgtgatcagaggtgggttctgaaaagctctctggctgcggaatgaaggacattcttattggcagcaggctggtgaggagggaggcctgcccggaggccatttcggaagtccacgtgagggacgtggaggcccggtccacgta

SEQ ID NO: 487484 - DNA, 624 bp, Homo sapiens
ttggagactcagaagggtggagggagtgacggctaaaaaactatatattgagtacaatgcacactacttgggcaacaagtacactaaaatttcggccttcactatacaattcatccatgtatccaaaaaccagttgtacccctaaagctaytgaaatagaaagaaaagaaaggaaggaaaggagggagggagggagggagggaaagaaagaaggaaggaaggaaagctgtcatcacaatattaaaatcaataaaaataaatgttaaaaagtacttaatggtacaaagaaagtcatttttaacctatagttcactagttttgaaacaatgcaccgaatgacattgtataggttatatgaattgtctgatggtagctgagtgcaaactccatcttattgctgtattttctccatcaaattaaacccaacttatttcttccagcttggctgtttaaacattcagtctcatcatttgttttgaggaaggtgcacctttttcctagggtatttacgacaccttgggccttatgcagctcaggaaaattagaagctaatctctgatcttcttttaattgtggttcctagtgagatactcattaccaggtttcagggtccagttgaaggca

SEQ ID NO: 487485 - DNA, 652 bp, Homo sapiens
gggaacaaatttcctccatttttccttatctgagagtcttctttttgctcctttttttgaacaataattcactggatagacatttctatgttggtgattcttttctttcaatactttaagtttcactctgctgtcttcttgttttcatggctttttaagaaaagtttgatgtaatgtttatctgtgttcctaaacataatgtattatcctatatggaatcttcgaagagaacatgaacattagggaaatatgaagaaaacctgaataattatggtttaagttaataaaatgcaccaatattagttaattctgacaaatgtaccatccccatgaaaggtgttaataataaactgggtgtaaggtatatgatttctatttctctcggtaatatctttgaaaaaattctgtaaatctaaaactgtacaaaatgttttacaagttttaaattaattgaccataaatgtgtgggtatattyttgaactctgttttgttctatctaacttcttgtctgattttatcccaatgtcatgctctcttgatcactgcagtttcatagtgtcttaaaggcagttagtatatagcctgatagtcttcaagattgttttggttaatttgccttttggcattttaaatagatgtttaaatcaactt

SEQ ID NO: 487486 - DNA, 514 bp, Homo sapiens
gctgaattttggactgactgactcaaaagattcagagaaacaaataycgtgtttcctgggaagcaattggaagcaaaggtcaaaatcagaagcaattaggattaattttcattgaggtgatactggaagttaattgatttccatttcagtggtgaatgagagcagaaaaacttgaagtctgagagggaagtgggcaggtagaaactctttattgggataaaggagactagaacacatttttatgtagagaaagttttgtgtgctaagaaaaggattactgaagtgattggcaacaagttaaggctgcccgggaaagcacactgatcgtaacagtggcaaaggcaagaggaacaggtttgaatagcatgttcttccaatataaagaaatagtagcataggcctgtcttgttattttgagaaaagccttaatgaaaagcttactactccctgggggagctggcactccttttcacagaattctataagaacttatcctcctactattattttaaac

SEQ ID NO: 487487 - DNA, 527 bp, Homo sapiens
gccacagctttagtccagagaggtaagataccaaaagaaaaaaataaagaaaaaaagtaaaagaggaaaacagaaagaaggaaaaagatagaataaggatgaaagaaaaacaagaaaacaaaagcaaaaacaaaactcctcaaagggaaaatgtcaggatccagtgttgccacaatatagtatttaaatcatcttgttttcaagaaaacttatcagataagtaagaaaaatgggagktatggcccaaagacagaaaaaaagaatttgtcaactgtctctgagggggaccagaggtaggatttagccaacaaaaatgacaaagctaccattataaatatggtcaaagaactgaagataactatgtttaaataattttttaaagtgcaatgatgattattcaaaaatttataataatcccacaattagacatgaagcaaatggcaacttgaaaagccaaatgtcatagaaaaaagaaagcagtaaccaaaacttgttctctctaggtatgggacaagagataggcagct

SEQ ID NO: 487488 - DNA, 527 bp, Homo sapiens
gccacagctttagtccagagaggtaagataccaaaagaaaaaaataaagaaaaaaagtaaaagaggaaaacagaaagaaggaaaaagatagaataaggatgaaagaaaaacaagaaaacaaaagcaaaaacaaaactcctcaaagggaaaatgtcaggatccagtgttgccacaatatagtatttaaatcatcttgttttcaagaaaacttatcagataagtaagaaaaatgggaggtatggcccaaagacagaaaaaaagmatttgtcaactgtctctgagggggaccagaggtaggatttagccaacaaaaatgacaaagctaccattataaatatggtcaaagaactgaagataactatgtttaaataattttttaaagtgcaatgatgattattcaaaaatttataataatcccacaattagacatgaagcaaatggcaacttgaaaagccaaatgtcatagaaaaaagaaagcagtaaccaaaacttgttctctctaggtatgggacaagagataggcagct

SEQ ID NO: 487489 - DNA, 540 bp, Homo sapiens
ttttcaaatggcaaccacacaggtctgaataccaaaaaaaaaaaaaaatcttcagataagcctttcaagatcactcaatcaaggacaatcataaattatgtagacaattatatttgcctaaataaaaatgttaaagttaaaacattctcccacccggaagagtagacatccatatccaagtacaaaaaaaaaaaaaaaaaaaaaaaaaacaggccrcattttctcttttctttttttcttttttttctaatattaagtttcgagtagctgggactacagacacgtgccaccaggcatggctaatttttgtatttttcgtagaggtgggatcttgctatattgcccaggctggtctagtgctcctgggttcaagcaatctgcctgccttggcctcccaaagtgttgaaaattacaggcatgagtcaccacacttagactggactttctttcttcacccatctccatctctttcttctcaaagtcaaaagcgttagaggaaagagatagagataataaaaacgaaatgccaatatttgtttt

SEQ ID NO: 487490 - DNA, 540 bp, Homo sapiens
ttttcaaatggcaaccacacaggtctgaataccaaaaaaaaaaaaaaatcttcagataagcctttcaagatcactcaatcaaggacaatcataaattatgtagacaattatatttgcctaaataaaaatgttaaagttaaaacattctcccacccggaagagtagacatccatatccaagtacaaaaaaaaaaaaaaaaaaaaaaaaaacaggccacattttctcttttctttttttcttttttttctaatattaagtttcgagtagctgggactacagacacgtgccaccaggcatggctaatttttrtatttttcgtagaggtgggatcttgctatattgcccaggctggtctagtgctcctgggttcaagcaatctgcctgccttggcctcccaaagtgttgaaaattacaggcatgagtcaccacacttagactggactttctttcttcacccatctccatctctttcttctcaaagtcaaaagcgttagaggaaagagatagagataataaaaacgaaatgccaatatttgtttt

SEQ ID NO: 487491 - DNA, 617 bp, Homo sapiens
tgagtacaaaacaggcactgggccaaacactgctaaaacgcaaaacatgttggacaagcctgaccctaataaaaaggtaggcagaacgtgacatagggctccagcacaggcctcttttaccttaagtaagcaattatgcatctggctctgaagttgcccatgataattatagaagcagaaacttgataaaggcatttgggaataggaataagaaactgaatttttaagctcccaagaggtgattataaacatatctccttgtcatgtactttagcagaagataaagtaataatagcttgaaaaatgaaggctgattgtgaagctaggatccatccactcagtagatgtattcttcccaatgaagtgtaatagttccaataaattcatytgggttgacttggggaatttttaaaaaatcacttaaaatatgtggttacctctatagagtttatttaccttctatttcctttccctttattatatacacccaggggaatgaataagattaacattctcatgtttagatgagaatactgattaactggcttaacgtattcattaagtatctcattcatcattgtatctcactatacaatccttaggattaccattataaa

SEQ ID NO: 487492 - DNA, 641 bp, Homo sapiens
atgtttgttacagtctccatagcttcctaccacctcacaccaggttcttcacacatttatgtaatctacctggcttttgtaggcatttgagtcgcaatccttgaagtagttgtcactcccagctttgaaaaaattctagagattttctatgctataacagcaactttaacaaaacactttgccacccttcaaatgtagttgtagacctggaaacatcctttcttttcaggaaaagaaaaagagctactttcattcttccttagttagtcttaggtgacacaggattctgcaaattgttgcttgkagtaaaagcatattagagaaatgtatttgtttaactcaatcattgtaactagagcattggatttgctttactttacagaaacttactacataactcccatgaaacagaatatttaatgaattaagacttacactggctccttctcatggaagtaccatgctgctctgttggtatctgccatctcatttttttgatgccatacttactggactgtagtatctattaaggttaaattctgttgattgactaatgccagcatgttttcaggaggaatagatgccattttaatgtgtttcttgtaaataatcagtcaaataaacccataaaatggagaagc

SEQ ID NO: 487493 - DNA, 694 bp, Homo sapiens
gcacatttatgataatttaaaattataagattcrgaaattcagcttagcaaccttgggtgaatatgactttcatattaaaaaaatgggggagagagatctgagagccaaataaaacacagataaaactaacaaattaagattgacatgatgggtaatcatagacgtcctgagtgtgagtgttgaatttgaatttgcattaatgacccaattcaggaaagactcagcgtcttgacaaacctctgcttttggagagatggagtattcagttgttagtcttctgacctttttataataaacaacatcttagaacactcaatttaagcagcttttaagcatttgacatattcacatcatgctaagataatacccaaggtttatcttgtgtaccactaagttatatttcagtgtgaaatacacagcctttagaaaactaagcagatttaggttcaaattcccattctgccacttaatggctgcattcagctttaagcaagttgacttcttagcatttcagttccctcccctgaattggaagtaataaacagtaaatcctcattgtttgtggattctgtgtttgtgagttttcttacttgctaaaatttttcttgtaatccccaaatcaatactcacagtgcttttgtagacatgtacagagtagtgaagaactttagttgacaaacaagtgtgtcccca

SEQ ID NO: 487494 - DNA, 517 bp, Homo sapiens
tcaggcatttcagaattttcctaatctttcatatgtaggttatattctctacttcttgctgttagaagtaacactgcaaatactttttctttcatctgtatttcttgcgtagggtaaattctcagaactgggactattagatcaaaggatgttatttttttttattcttagacaatctttggtggaagccttctgtcagcataaagttgcctaatcaatcttaatttatacgaatgtttttttttaaataattagcaaagtctgtatagaataaaagttgcatttaattttaaaattccatagtactctcagtatccatttaaagmagccaacttgttagaatttgtttgaaaagaattaatgtgttagcctgattatgaggttatttattaaatgatgatgtaatgattgtcttctagggtccatctctcctcagctaaaacaaaaatgaaaaaacactcaatttagcccttccccatctcacagacataaatccagtgtaaaatgtctggcacat

SEQ ID NO: 487495 - DNA, 535 bp, Homo sapiens
taatcattataggtcagcaaggtgtggtggttcacgcctgtaatcccagcactttgggaggctgaggtgtgcagatcacgaggtcaggagatcgagaccatcctggctaacgcgatgaaagcctgtctctactaaaagtacaaaaaattagccagacatggtggcgggcgcctgtagtcccagctacttgggaggctgaggcaggagaaaggtgtgaacccaggaggcggagcttgcagtgagccgagattgcgccactgcgscccaacctgggtgacagtgcaagactctgtctcagaaaaaaaaaaaaaagaaaaaaaaatcatcataggtcaaaagacattttactcatacacaactgaatcttaatttatattagatgcaatcgcaggacagttctgggtagcagattaactgttggttcttagccaccctttagtcaagaaaggagcccttttgcaggcatatgcagtttacatgccgagtagtggttctgctcctgtgttggaatcaatttactgttgaagtaagtagg

SEQ ID NO: 487496 - DNA, 602 bp, Homo sapiens
ttgggtgcatattccttcagcttcttctgctcctgggtcaggtatgtaataatgggaaccagtaaagcagtttccagcttgttctcgcagatttcagtttgtttatgctcctcttcactttcttcttcgcattcaaattatcttcccttcccactcctcgctgcctgccctgctactacacagccaagcatagaagagctttcataattgaataaagctaaatccttacaacaagtcctttagtttatattattcttaatatacttacttatttgatgaagcctgactaatgtagttctagaaattaaaatgatttagtgatcgtgctatacaattaaggtgtgtgtgtgtgtgtgtgcacgtgtgtgtgtgttggccagtcttattcttttgttgttttgcagracactctcagtggtttctgttttccgtgttagtggaatgactcaaatgctgacatattgggaactgtttgaaagatattgataattcataacccctcaaagtgtgatatgcagatcatctgcacctaattcatgtctgatcactggtttttgatctcaatctgttcctagcgattcggatttattaaatcattaaaa

SEQ ID NO: 487497 - DNA, 621 bp, Homo sapiens
atcatttttgtccagagtctcattactctgctgtttcatattgtttaatctgacccagtttcccaacttcctttgccctacactacattctagaattaatggtttattttctaacaataaaatgtttttatttttaaattcttatatccttcatgattcctctgtgtgtttctagtggagactcaagatctgatgatttatttatcctgtaacactctcaactggagaatattttttttctctctttgaatcatatactccagagcttgcaggtgaggtatgtatcttccttgctttcattgccatttccaaattactyatcctaaacattcttttgggagcacatctcctttgtggtttatatcatgagatttcctacctctaacccttgaattgggtctttgatgatctcccaacatttcctcctcagttttgatgtctttattaactggcacttttctaccactactatttctgaaggaacacataccctccatttcacattttggtctcacacacatgtaaccttttgactttagaggtcagcctattccatttcaactcgatttcacagtcatattcttctgagcaacctgttttatgaccatagacgcctatcct

SEQ ID NO: 487498 - DNA, 588 bp, Homo sapiens
agtctcaaggcttggacctagtttcctgattgctccaggggagggagactggtgctctctcaaccaatgagtgcttagatgttggactacatttgagcctaggttctgcgatatcataccagtattgaatctcagttcctaataatgccatgaaagatgggtacctccccagtcaaggagcttagaagcccccaggccargggtcaggttcctctctagaagtctaatatatctttatatgctgccacagactgcaaagagccagggtcacgcatacctactattactgctttcatttctgtgacttttccccaataatggtattccagaaggctggtgtgtgtgctttctgataattctgcttaacttgattcacagccttctttttctcaaggtgtttacccacttccatgactctctatttacactgagttcagtggcagagagtccagtttattacatcttgtgttaccaatccctagcatgaaggctgctaaaggtaatcattttgctctaccaaactctacaagccaccagcaggaagtcatgggcattttttgagtaggataataacatcatcaaagcagt

SEQ ID NO: 487499 - DNA, 588 bp, Homo sapiens
agtctcaaggcttggacctagtttcctgattgctccaggggagggagactggtgctctctcaaccaatgagtgcttagatgttggactacatttgagcctaggttctgcgatatcataccagtattgaatctcagttcctaataatgccatgaaagatgggtacctccccagtcaaggagcttagaagcccccaggccaagggtcaggttcctctctagaagtctaatatatctttatatgctgccacagactgcaaagagccagrgtcacgcatacctactattactgctttcatttctgtgacttttccccaataatggtattccagaaggctggtgtgtgtgctttctgataattctgcttaacttgattcacagccttctttttctcaaggtgtttacccacttccatgactctctatttacactgagttcagtggcagagagtccagtttattacatcttgtgttaccaatccctagcatgaaggctgctaaaggtaatcattttgctctaccaaactctacaagccaccagcaggaagtcatgggcattttttgagtaggataataacatcatcaaagcagt

SEQ ID NO: 487500 - DNA, 566 bp, Homo sapiens
tgtctctgattattttcatttagttttctactacacttttctgttgatattgtacagatgaaagtagagtagcttgttctgaagacacaaaaccatcttctattagtccgttcttatgctgctataaagaactgcctgagactgagtaatttataaagaaaagaggcttaatttactcacagttccgcatggctggggaggcctcaggaaacaatcatggcagaaggggaagcaaatatggccttcttcacatggtggcaggaaggagaagtgctaagcaaaagggtgaaaagccccttataaaacaatcagatctcatgagaactatcaggagaatagcatggaggtaactgctcccatgattcaattacctcccactgggtccctcccatgactcgtggggaatacgggaactacaattcaagatgagatttgggtggggacacagccaaaccatgtcacatcttatcccaaagttgagcttgagctttccatgttgttggatttttttctgttctggatatttttactaytttgaggcttgatggccttctttaagatatgtc

SEQ ID NO: 487501 - DNA, 629 bp, Homo sapiens
actatatcctagaggacaaataaaaaaatgtgtcatgtattcatacccaattcctctcagtaaatattttctgaataatttaaaattgtagagaatatatatcttagaattatatagaatatatatcttagattgcagggaagtttcctaagaattgagtaattaatattcttttatcacttttctgccattaccttccttcactctgctcattggagtagagacagatggcttgagatgaagcagttactgaggaccatgagacaaaactcrtttgtaagaatggtgaagtaacgaaatctacaaagtcaagataccatgtctcattacgagataaaataaaacttctatcttatttaaaccactattatttttgggtttctcttacaactgaatttatctttatggatggaaatataatgtaatatataaattatttggaatgacatgtcctatccaaattcctggcattttttaatcctctgtccactgtcatatttaattttatagctgtggttgcaaacaagaggctcaaagagatttaaatggcacaaggacatagatttttggccagtaagaattcaaacacttatttttccaacattaaaagtcatgaattacacataaaa

SEQ ID NO: 487502 - DNA, 556 bp, Homo sapiens
tattctgtcttttgaaggcggctgctattttgcttgcggaggacaaacacttctgagattggtatctcaaccctttgactctatcagaaattttcaaagatggacagaatgagccacacaatctgtaggtcacatgcaaaattaaaatgcaggtctcttcaaaaattattaggaatttgaagacagcagaayattaaaccaaatcaggggctcttctgagtgtagggccctctgtgactgcacaggttgcaggctcatgaagccagccctaaagatgggacaggaagaggcctgggtggacacatatgcataggattctattgctgtggctttgccaagattccataggaggggagtgtgctgccaaatgctcatcagaatcagcgggttcctcctccccacttctgccaccagtgtgctgaggcttctagccgttaattagcatgctggcattgtttgcctgagtcatacctccacagccctcttctgatggaaaacagtgaaaagataagtcagatttaatatcaaactaaaagaaatgaaacatattcgaaca

SEQ ID NO: 487503 - DNA, 485 bp, Homo sapiens
tagttagggaggtacagcattgcaatgtctgacacactgtccagactccctgtttatcgttctggatgttataragctctgtccagctttcttcttcaagactgagccactggttacccagctactggggaggacgtcagttcgtggctcgcccactggcttcctccctggcaattgccttggcctaggagagctaccttcccagtataacctgacttcaataactggcagacacaagatttaaaggcccaatactctcactccaactgggaacacctgcaagggcaatctatagtagcttcagagtttcctgtggagttggtccagccctttgtgtgactgtatcagacttctcccttggtccaatcctgctctctttttctcctataggtgttaatcccaacagcaggaccgactacataatttgcgggacacagtatgaaatgaaaacgcagactgattcttcaaaaagtaggaaatgaaac

SEQ ID NO: 487504 - DNA, 485 bp, Homo sapiens
tagttagggaggtacagcattgcaatgtctgacacactgtccagactccctgtttatcgttctggatgttataaagctctgtccagctttcttcttcaagactgagccactggttacccagctrctggggaggacgtcagttcgtggctcgcccactggcttcctccctggcaattgccttggcctaggagagctaccttcccagtataacctgacttcaataactggcagacacaagatttaaaggcccaatactctcactccaactgggaacacctgcaagggcaatctatagtagcttcagagtttcctgtggagttggtccagccctttgtgtgactgtatcagacttctcccttggtccaatcctgctctctttttctcctataggtgttaatcccaacagcaggaccgactacataatttgcgggacacagtatgaaatgaaaacgcagactgattcttcaaaaagtaggaaatgaaac

SEQ ID NO: 487505 - DNA, 485 bp, Homo sapiens
tagttagggaggtacagcattgcaatgtctgacacactgtccagactccctgtttatcgttctggatgttataaagctctgtccagctttcttcttcaagactgagccactggttacccagctactggggaggacgtcagttcgtggctcgcccactggcttcctccctggcaattgccttggcctaggagagctaccttcccagtataacctgacttcaataactggcagacacaagatttaaaggcccaatactctcactccaactgggaacacctgcaagggcaatctatagtagcttcagagtttcctgtggagttggtccagccctttgtgtgactgtatcagacttctcccttggtccaatcctgctctctttttctcctataggtgttaatcccaacagcaggaccgactacataatttgcgggacacagtatgaaatgaaaacgcasactgattcttcaaaaagtaggaaatgaaac

SEQ ID NO: 487506 - DNA, 648 bp, Homo sapiens
tttagggaataaaatatcattgctatccttatacaagaccaatcattaaattagtaatactgtcatctctcaatctttgttgttaaagatgactgcactaacatagatgtatagtttttgcctttgattatggctgtgagaaaggcacagaagttttcatttcaagggagcaataagagaaatgcrtggaatcttaatttctcaatgtgctcaatagcagaggaggacatctggctgtacgcaggccaacatgcaatcaaattaacattatgagagtgccactggtgagtcccattttcttcccaacatagactatgttttaattctttgtagtttaaaatatgatcattttgtttagattatctgctaggaatttcacctccaaagggcattaatgtcataatagctttgaaaagtgactctatcttctatttctttcaaaaaaaactaggtaggtttggtctaggaaagcagagaagttgtcatgctgtggcttacagtgttctctggctctgtttgtccagaggggccacagctcacccatctttaaggaggtaggggacaagatgatcccttcaacagaggagtgaggcttttagtctccattagtctttgtggtatcttacaatgtttctggcacgtactatc

SEQ ID NO: 487507 - DNA, 648 bp, Homo sapiens
ggcaacaatattatcaaacattaagacataaaactgagagaaaaaagtcagaaaacctattaatagtattgtcattttaaaccttaaaattgtgtgcaatgtgcatatgatatatatatttatatatacacacacacgaatatatgtatgtatgtgtactttctatatgtgaatatgtgtgtatgcatatattatatatatatatatataaaactaaattcatgcagaaatacagagatacataagagtagacaagaataagacagcataagagggctggctataatacaaaatacttttgagttktttatagtttacaaaattttaaaactttttaatcaaaggtaatttagacatcatctagatcaaatcttttcttatgtgaatcagaaagtgaaagagcacaagtaacttcctaagatcacaaagagttatggatgaaatatccttattatagaaacacaaaacatctagaatgacaccgactttgatcaattaacttgttttaaatattatcaacccaaattatagttttatgatgtgagaatgcttcttgcctttatttttgtatcttcttagccctttcatcccaggaaaatatacttatcagttacacattgtacaatttagcaattgtgtactcgatat

SEQ ID NO: 487508 - DNA, 488 bp, Homo sapiens
tgatcacttagaatagaggtgtgctcattacagagggtgagaaaggcggggtgtacgaagcaaggcatttgccttgtcaacagccaggccatatggagaatgtatgtcactatgaagctcttgaatttttcaaaattttattggcagaagggattctttggaagaagggtcagagagtgccacattataactcttgaaagtagctaggagatcatcatcttgcctgagaagaagtcgaggcccagagagatcaaataatgccctcaagttcacatgacccatgagaaaaggtgctttttttctttcaatcccaagagctctttctatgacatcatgtgtcttgtgtgtctcgtgtgatcctgttagcaaataggaagcttctttccgtattctccactccttaaatttctttaacttcaagtaatttattttgtgattccaggaaatagtgcttaartattctttacatctatcaagatctgcaagtt

SEQ ID NO: 487509 - DNA, 635 bp, Homo sapiens
aatcttttgagtagaaaaattagaaaataaaaatgtatcattttttcatatacataaagaaacatggggatgaggttatccatgaaactaattaaagtgctcactttggtgaagaagagtgtagacagccaaagcatccatgtatttgttattatacttcttggctatccatattaatttgacatgattggtttagtcaacgtacatattttagcactatgtttcaatcatgggacaacattttaaattatccagacacataatacatcatttttcccagccagatagctttattaaagtgcccagagagttcctatttgttctaatagaagtcytatttgcacttggactcatcaaaatggtagtaaaagtcactgccagaaaaatgaaaagatgcatgctggatgaatgatgaactggcttcaccaagcaggtgtccctgagctgtaaagggtgtcactcagcttctgttctgattcctcagcttgtgtgcaaggaactgtcacactgcagcaaggatccctggcatccacaaactgtcacccacttgccggccgatgtgaccaggaagggaaatgatggcaaataacacgtggacagattcactttcagacagtgctttgaagatgaagcag

SEQ ID NO: 487510 - DNA, 635 bp, Homo sapiens
aatcttttgagtagaaaaattagaaaataaaaatgtatcattttttcatatacataaagaaacatggggatgaggttatccatgaaactaattaaagtgctcactttggtgaagaagagtgtagacagccaaagcatccatgtatttgttattatacttcttggctatccatattaatttgacatgattggtttagtcaacgtacatattttagcactatgtttcaatcatgggacaacattttaaattatccagacacataatacatcatttttcccagccagatagctttattaaagtgcccagagagttcctatttgttctaatagaagtcctatttrcacttggactcatcaaaatggtagtaaaagtcactgccagaaaaatgaaaagatgcatgctggatgaatgatgaactggcttcaccaagcaggtgtccctgagctgtaaagggtgtcactcagcttctgttctgattcctcagcttgtgtgcaaggaactgtcacactgcagcaaggatccctggcatccacaaactgtcacccacttgccggccgatgtgaccaggaagggaaatgatggcaaataacacgtggacagattcactttcagacagtgctttgaagatgaagcag

SEQ ID NO: 487511 - DNA, 626 bp, Homo sapiens
gtactctctgaaggtcactcctatataggagtctgtggctttctttgggtgagtgtgaccaccatcctgatgggattcagaaatgtggggttgccctacactccgaatttcccccactgacttcactcttcaaacaggaaaccttaaatggtcctcctttccccacacagagaacctgttgctttgagttgggagggtgggagacggtacttccctacccccaacatcagccctgtccttgggaacagagctcagtttagcttcatcatctgatcattttctttctttagcgcctttgtttctttccttctctatctggtactttgtggaggagaaatgaggcagaccagctttgtaaccggataccaggatgctctcagtggctsgggctgacagatttttcaagctccacttgtaaagaccttgtgccatcatgatcacgtagggtggaggaactgagcgtcagggctgcattgttgctttcaatcctaggctccttgcttgaaaaagttaggggcacgtagctgcttggccgtagacactgggatgccttttcctcccagtgttttcttggacaccatacgaccagggccacctcttgatggcgcagtgtcatgtttggccac

SEQ ID NO: 487512 - DNA, 624 bp, Homo sapiens
tgtagctgcaaattaagcctagagcaggaaataaaatcaagctaggaagaagtgttcatgtctcctgagggccctccccacactgggtactgggataaacatttcccctacattacctctaatcttcagagactatataggtgatagaggattccccattttacagatgagaaaattgaggcacagataatggaagctgcttgcacaagggcacatagaggtggcattccatccagacctggctggcaacaagtctgtgttcctttgcctctgcggggtgtcactcctgtgctatcaggctggtagaggcttaagggaaggggaggttacaaatatggatcaaaaagaggaaagggaacagaaagacaatccagttaacatatggcgaacggcacgaagagacggttctccgaaggagatacataaatggtggccaacaagtrtatgaaaagatgctcaacattattagtcatgaaggaaatgaaaattaaaaccagaaggagataccacttcacaaccgctagggtagctataattttacaaatagaaaataataagcattggcaaagatgtggagaaatatgagctctcacatatcacaggtgaggatataaaatggtgcag

SEQ ID NO: 487513 - DNA, 624 bp, Homo sapiens
tgtagctgcaaattaagcctagagcaggaaataaaatcaagctaggaagaagtgttcatgtctcctgagggccctccccacactgggtactgggataaacatttcccctacattacctctaatcttcagagactatataggtgatagaggattccccattttacagatgagaaaattgaggcacagataatggaagctgcttgcacaagggcacatagaggtggcattccatccagacctggctggcaacaagtctgtgttcctttgcctctgcggggtgtcactcctgtgctatcaggctggtagaggcttaagggaaggggaggttacaaatatggatcaaaaagaggaaagggaacagaaagacaatccagttaacatatggcgaacggcacgaagagacggttctccgaaggagatacataaatggtggccaacaagtatatgaaaagatgctcaacattattagtcatgaaggaaatgaaaattaaaaccasaaggagataccacttcacaaccgctagggtagctataattttacaaatagaaaataataagcattggcaaagatgtggagaaatatgagctctcacatatcacaggtgaggatataaaatggtgcag

SEQ ID NO: 487514 - DNA, 534 bp, Homo sapiens
gttaaggagaaagccattcattcccaccacttttttatgtgggaagcctccgcttaacaggagtcagacagaaatgagttcaaaccccgcctctgacacttagttgctgtgtgaccaccacccccctcccaggcaagggctctacctttctgagcctcagttttcttaccagaaaataggaataataatcctacggacctcatgaggttgttgaagaattaaatgagcaggtgctgcgtgacttggcccagtaagaactcaatcaatatttgtcgctgctgttatcatcaaccactagcattcactcagtcactccgtgactacttcttgcattccaactctgagccagatgcagggagaattccaacacaggggttctcaaagcgtgttccccaaaccagcagcaccagcgtcgcctgggaacttgttaatgcagatttctgggcactgccccggactggctgaagcaggaactctgggrgtggaaccctctgggggattctgatacatgttgaggttttgagcaccactgtt

SEQ ID NO: 487515 - DNA, 612 bp, Homo sapiens
aagggaacaccgagggatgaaggagggagagaggaagggaaattgactsatggatttagtttagcctagaacgagttaagtgaaatccaacaagtcccttcccttctttaatcccctccagtggtttcccattctactaagaagctgccagcaatggctacaaggggcctcaggaactgagccccgaccatgtctctgacctcatctcctatcttctgcctcctctcccagtcatggattagcccactgacaactcagttacactggcacccatgcttccatggcacccgtgtttccagaatccccttctctgtgtggttccagattagagctggccaaaagtgaagttgtacaaggcttgggtggcaaaagagaaggagccatcatgccctgaagagtaacatgggttgaaggcaatggggaacagaggctggggtgctggtcctgtttatcctccatcttccctacctcacagccaactcttcttcctgacagtagtccctcaatgaccaacagccgaccttaagttcaccaccagatgcttcatgacaaactcacaaaggcaatagccacaaagggccaacaactttccctgggcatctatccaagcct

SEQ ID NO: 487516 - DNA, 653 bp, Homo sapiens
ttacttttctagaactcattatcmatgtacagacatgctcctttcattcccatcataaaacttttcattcacaagccagtgaggagtcacacattccaccttcatgctccctccggcacaccagggtctcagtgtttccctattgctttgcgtgcccgtcctggagctcaggtgcaacaggcagaataacaacgcatgatagatgtttctacaggagtcatccgtctttaccatttgccacaattctccagggtgagccgggtcaactgcttccttcttcccagcagtcaggaaggtcatgctgcttacaatgactctctctctgtttaaatgcccagggaagggaaaaatggaagagccataacaagaaagaacagcagggcaggcaaaggtagactaaatttgcaaacttagaaagcatctcagaatatagtagttatttaatataaaagtgcttccattcctggtactcttactttctttgactctgtaagtgcaatacaataaatattataactgtgtgtaatcacagatttaatggcatgactacttctaaagaaccgaatataggtgtcgtctttgaactcaataacaaaagacaccagtatcaaaagttccccaagaccctggagtagaaacacctgccttaggat

SEQ ID NO: 487517 - DNA, 653 bp, Homo sapiens
ttacttttctagaactcattatcaatgtacagacatgctcctttcattcccatcataaaacttttcattcacaagccagtgaggagtcacacattccaccttcatgctccctccggcacaccagggtctcagtgtttccctattgctttgcgtgcccgtcctggagctcrggtgcaacaggcagaataacaacgcatgatagatgtttctacaggagtcatccgtctttaccatttgccacaattctccagggtgagccgggtcaactgcttccttcttcccagcagtcaggaaggtcatgctgcttacaatgactctctctctgtttaaatgcccagggaagggaaaaatggaagagccataacaagaaagaacagcagggcaggcaaaggtagactaaatttgcaaacttagaaagcatctcagaatatagtagttatttaatataaaagtgcttccattcctggtactcttactttctttgactctgtaagtgcaatacaataaatattataactgtgtgtaatcacagatttaatggcatgactacttctaaagaaccgaatataggtgtcgtctttgaactcaataacaaaagacaccagtatcaaaagttccccaagaccctggagtagaaacacctgccttaggat

SEQ ID NO: 487518 - DNA, 588 bp, Homo sapiens
tcccagcactttgggaggccgaggcaggcggatcacctgaggtcaagcatttgagatcagactggccaacgtgggaaaaccctgtctctactaaaaaatacaaaaattagccaggtgtggtggcgcatgcctgtaatcccagctattcgggaggctgagacagaattgcttgaacctgggaggcagaggtttcaatgagcctagatcatgccattgcactccaacctgggcaacagagtaagactccatctcaaaagaaaaaaaaaaaaaaagtcaaaagcaattgcaacaaaagcaaaaattgacaaatgacatctaattaaactaaagagtttctgcacagaaaaagaaactatcagagcaaacagacaacctacacactgggagaaaatttttgcaatctatccatctctgacaaaggtctaataaccagagtctacaaggaacttaaaygaatttacaagaaacaaacaaacaaccccattaaaaattgggcaaaggatatgaatagacacttctcaaaagaagacatttatgcaggcctgcacacaattgttaactctgacactgtgtgttagagtttaaaat

SEQ ID NO: 487519 - DNA, 588 bp, Homo sapiens
tcccagcactttgggaggccgaggcaggcggatcacctgaggtcaagcatttgagatcagactggccaacgtgggaaaaccctgtctctactaaaaaatacaaaaattagccaggtgtggtggcgcatgcctgtaatcccagctattcgggaggctgagacagaattgcttgaacctgggaggcagaggtttcaatgagcctagatcatgccattgcactccaacctgggcaacagagtaagactccatctcaaaagaaaaaaaaaaaaaaagtcaaaagcaattgcaacaaaagcaaaaattgacaaatgacatctaattaaactaaagagtttctgcacagaaaaagaaactatcagagcaaacagacaacctacacactgggagaaaatttttgcaatctatccatctctgacaaaggtctaataaccagagtctacaaggaacttaaacgaatttacaagaaacaaacaaacaaccccattaaaaattgggcaaaggatatgaatagacacttctcaaaagaagacatttatgcaggcctgcacacaattkttaactctgacactgtgtgttagagtttaaaat

SEQ ID NO: 487520 - DNA, 536 bp, Homo sapiens
tatctgtttgtatttaaatgttggttagtagatattggaaagggggaaaaaggattacattcatgaatgatttctctgtgttgtcttataactcccaaagtgaattgagaaagcagaggtttttggccctgaatataccccttggtacatgaaatcatattcactcaatttactttataaaaaggcaagtatgaaagactctcactgaccatatctgggaaaactagagtgtcaaaataaatgagagtaacagattgtaagtcattacatgaaataggattcaatgagtctgtgttgataaaaataaataagcggaggtgagagagaggaagctcttcttttattggttgrgaatgctgaccaatgaatgtaggaggaatgtaggaactagaataatcaccatttggcaaacatagtgatggttgattaaggcaggaattgtcaatggatgctaagtttggtggatgctaagaatggaggcttgaggaacaggatattggcatagtctcatagtgtttctctacaacgtacctatc

SEQ ID NO: 487521 - DNA, 600 bp, Homo sapiens
gagtgaggacaaataaagagtaagagacagctcaggcctctgacagggaaaaaccctcaacaccgtcctctaagtgttccagtgatgacttaggaagaagtgactggtgagcagcttcagaaatatactgctgtgaaactgccttattgataagttgttgtattcttacatttgtacttgtttgtctttaggaatttaaataaaactcatttcatattacgggttcagatcttaactaatctttttaaatttttataaactcacaagttctatagctttcttctggtattgttaaggaggaggctgtcttttaaccaggtgcatctatggggaatctgtggtgcctcttacagttgcatgctgccaacttcttgcttaggacgtaaaattttcattttctatgtggataggactgtaacccgctgcactaayatcactactgtcacattttgtctacgtacctcaagcttcctactatttttataagtaagaaacacttgtgttagagctaaaagattgcacggggcaaaagtgacaaaaacctaacaaggcagcatcatcaaatataaagaacatagagggtcagaagccttttggact

SEQ ID NO: 487522 - DNA, 340 bp, Homo sapiens
tgattgctagagacacaaaagtaaataagatacatttcctgagcacaagaaagctttttggctaataaaaagagaaaacaaaggtaacaaacatggggtatgtctaagagcatcaaaattaaaacaaaaatttaacttaaaacaacagtttggatggccagaggatcctgtttcacagaggttttgcataaattgattaggawatgctcctgtcttgtccagtccttcttcttgaaatcaactgattgatttggcttcataggtccaatattgtcttgaagctcaaacctgaaactatttcgtgctccattttttctaatgttcctggtatcccatcacc

SEQ ID NO: 487523 - DNA, 525 bp, Homo sapiens
ttacaacggctgaactgccttgttctaggaggccactgtctaattgtctccagaggagaaacccaagagagaaaggcttagaggaactccactaaaagggaatcccagcaaacgtggaggcagttcaaatgcaaggtgagccataatttacacacacatctattaataatgatcatttgtcgtgattgctagagacacaaaagtaaataagatacatttcctgagcacaagaaagctttttggctaataaaaagagaaaacaaaggtaacaaacatggggtatgtctaagagcatcaaaattaaaacaaaaatttaacttaaaacaacagtttggatggccagaggatcctgtttcacagaggttttgcataaattgattaggaaatgctcctgtcttgtccagtccttcttcytgaaatcaactgattgatttggcttcataggtccaatattgtcttgaagctcaaacctgaaactatttcgtgctccattttttctaatgttcctggtatcccatcacctca

SEQ ID NO: 487524 - DNA, 535 bp, Homo sapiens
actttgaatgtcattctgccaatgacttcacagccccagtctattcatgataatggagtccagagaatcaaggcaaaccatgtcttgaatgtccaggttccaggggtatttcccacatgagaacagaaggagggaggtaactgaaaaccttatattttttcagtgatggaaaaatcaaaacacctcctgaaacaagaagctatacccctgcttttttataagatagggacaacctaatwataattgtaatacaattcaatatggagcatgggaggttaccttttgagtgcaagaaatcacagggcacagtctattacagccctgtaatgcaaatgtgctgtaaatgatctaattaagatactggttacaacacccaattgtctcccaggtgacacagtggaaactccattgcttaaaagtgatttaaagctatagcatataaagaagtaaagaaaacaacttgaccctcacagagacatcatattctggtcatctaataaagataactttaatgctcaattttttcttcctgttt

SEQ ID NO: 487525 - DNA, 434 bp, Homo sapiens
tgcatgctcaatttatttgatcatactatgcatttagaaataactcaaacaactcaagtttatcactatgtttatttgttttttttttttaaacaagcacagctaaagaatgaggacattttcatatcagtggttttcaagctaattcaggtggtggaacatctggagtgtaatayaatattgagatatttaattactttttatatttaacgccataaactagagctacacataatagcaaagctatgtttgctttgtatggagcaatataaaattatactcatgaacatttatatccactaaagaataagtttccataatccattgctatttagaagttgctctgttgtgtttctgtgacttaacagaaacctattttgtgaataaagtaggtttagacttgatatagtagcttcctaatatttaaggaaaaa

SEQ ID NO: 487526 - DNA, 434 bp, Homo sapiens
tgcatgctcaatttatttgatcatactatgcatttagaaataactcaaacaactcaagtttatcactatgtttatttgttttttttttttaaacaagcacagctaaagaatgaggacattttcatatcagtggttttcaagctaattcaggtggtggaacatctggagtgtaatacaatattgagatatttaattactttttatatttaacgccataaactagagctacacataatagcaaagctatgtttgctttgtatggagcaatataaaattatactcatgaacatttatatccactaaagaayaagtttccataatccattgctatttagaagttgctctgttgtgtttctgtgacttaacagaaacctattttgtgaataaagtaggtttagacttgatatagtagcttcctaatatttaaggaaaaa

SEQ ID NO: 487527 - DNA, 423 bp, Homo sapiens
tagatgagggaaaaagaggagagggagagggagaagaaaacaaaacaaaacaaaattatagttgtcttagtactcaaatcyttgttgcccagtcttccatgcagccttcctcattctaagctgacatgctcactgaagccttcagtagaatgtgagggctgggttatccaatattcatgtgcagaatagtcatgtggtaacttgttcaaaatgatggattcctagccatgatgctgatttctgacttaatttctctgaggagtatctcgggaatttacctctttgacaaggccccagatgattctgttagaggtggtctgatcagtgaaccacactttgagaaacactacaggaccatcttttagcctgactgcattaattagtactttatgctcaaacaacaggcatatattagctcatgtt

SEQ ID NO: 487528 - DNA, 580 bp, Homo sapiens
actcatgggtggtgtttgcaggcagaaagggtcaatcaatctacagaaatagtaagcacggtatttraggcacttggtcagttatcaaaaactccacctttctgtcctctggtcatggatcttaagacttcgccatatcaaaaatatgctcttccctcacacatgatatacttttttatatgatattgccatgcacattctctcctttaccaatttcatcaccaattctctatgtgttgactctccgtgtaaagcccagcacaactctcatcttttctgggaaattgtctccagttccaacattcagaaggacccaccttttcttttagatcccatagcactttagactttgtgtatatatccatttcctggtatggattatgagccctttgggggttacgagcccacaattttttattattgcccaatatagttgcttgactatagggctgctcaatatgtatttcatggatttgcctcagaggcattgacccatataaccaaattccaagacactagttaataatccaggattctaagttagcatttcaacataggagtcacatctggcttgaaaact

SEQ ID NO: 487529 - DNA, 647 bp, Homo sapiens
gttttattttttctttcctaagcttctgtttacatttttttgagtccaggttctccagataaatagaatcaataatgtatacatacatatacacatgcacacatatactctgttgattcaataagtgttttcctatccttagacttgaattgaaatatctgctcttcttcaggtggaaactacaccattggctctcctgggtctcctagaccaccagcttgtcaactcacattgtggatgatttatatacatatatatgctcatatatgtatgtatgtatgtgtgtgtgtatatatatgtatatgtatgtgtgtgtatataaatgtatataaaataaggaattggctgtcatgttgtcttagtctgtttgtgctgctataaaaatayatacaaaatactatagcttagatagcttataaatgtcagaaatttatttctgaaagttctacaggctgagaaatccaagatcaaggtgccagcagattcagtgtctgctgagggcccttgtgagtgtcaacttgattggattggattgaaggatgcaatgtatagttcctgggtgtgtctgtgagagtgttgccaaaggagattaacatttgagtcagtggactgggacgagcagacccaccctcaagctgggtgggcac

SEQ ID NO: 487530 - DNA, 535 bp, Homo sapiens
ttgattcaataagtgttttcctatccttagacttgaattgaaatatctgctcttcttcaggtggaaactacaccattggctctcctgggtctcctagaccaccagcttgtcaactcacattgtggatgatttatatacatatatatgctcatatatgtatgtatgtatgtgtgtgtgtatatatatgtatatgtatgtgtgtgtatataaatgtatataaaataaggaattggctgtcatgttgtcttagtctgtttgtgctgctataaaaatatatacaaaatactatagcttagatagcttataaatgtcagaaatttatttctgaaagttctacaggctgagaaatccaagatcaaggtgccagcagattcagtgtctgctgagggcccttgtgagtgtcaacttgattggattggattgaaggatgcaatgtatagttcctgggtgtgtctgtgagagtgttgccaaargagattaacatttgagtcagtggactgggacgagcagacccaccctcaagctgggtgggcac

SEQ ID NO: 487531 - DNA, 630 bp, Homo sapiens
ctgcaaacatctagagcaagctcccgtagggttgtattttaagctagctgtgagctaattatatggcaatttgtatcttagaatccatgtagaacaatatttggagcattaggttgagagattatgactgctaaaataatttcctgatgctgtcatgcatcgggttttgacagttgcacaacagtaataaagcctccatttattaggagcttaaaacatatcaggactttacatacatgataccttatccctaaaacaaatctgccattcagatatatacacaccatctatacatgttgcatatgtgggggctgagacaacataggttactagggaggaatttgagtgttggtctgacagtaaagcttgggttctttctactttagcatgagtacaaacatttcgttttaagtttgtgtacatgaaaaatagatgtaaaattgtctcagaagacttttgagattttaatgttgaataactgtttagaaacttggggtctttagactctcaaawggtagaacattcatgttctatttcttaaaattgatatagctttattggcaatagtactgaatttggagtaggggcatttgtgtgtatatatgtataaaataaagaacttaatatttc

SEQ ID NO: 487532 - DNA, 517 bp, Homo sapiens
gggcccccttgctcgctcttagacctattctctgatttcatgaaggggaaggcgggattatttcctttttcttacaatattttttcttctattttttatctttttcttttctaggcagggccactacttctcagcacatccggccttctggctcatctcctccctgcatctcactacgcccctccccactccagggtaaattccaataatgytgctctgttccagatggagttcatgttgactgaggtgaattttagggctgtaactggtttggtctgatctggatccccattataatattgaaatctctacagtggaggtgaggaacactgccacttctgttcctttaaatgtctgctacatctcagatgatcgttgggagtgattcatcttcatataattttagggctagaaggaacctcaatacgtcctagtctgtgcttaaattcccccattgcttcccttcttccacctgatgctccagcctctactcaaacacttgtagtccctgagatag

SEQ ID NO: 487533 - DNA, 517 bp, Homo sapiens
gggcccccttgctcgctcttagacctattctctgatttcatgaaggggaaggcgggattatttcctttttcttacaatattttttcttctattttttatctttttcttttctaggcagggccactacttctcagcacatccggccttctggctcatctcctccctgcatctcactacgcccctccccactccagggtaaattccaataatgctgctctgttccagatggagttcatgttgactgaggtgaattttagggctgtaactggtttggtctgatctggatccccattataatattgaaatctctacagtggaggtgaggaacactgccacttcygttcctttaaatgtctgctacatctcagatgatcgttgggagtgattcatcttcatataattttagggctagaaggaacctcaatacgtcctagtctgtgcttaaattcccccattgcttcccttcttccacctgatgctccagcctctactcaaacacttgtagtccctgagatag

SEQ ID NO: 487534 - DNA, 645 bp, Homo sapiens
aaaaaaattaaattgtttgccagacattatatttgaaacattgtttgcagagataatctgaggtccaggatggtgtcatcaacattcagagaaggattatgtttgttcctgctagcgcctgtgggtataaccagtccaggatcacgtcaactcaattttagagaatgagatgatttgatgcctattgctgtaggttggaagtccttcagagttctacctcaatgtaataaggctcctgaggtactcaaccttggtggactttagactgtatttcttatccgcatgatccctggaggctatcagtaacatcccactcagtctatctgttgtttcctcaggaattggcaagcatctccaaatagaatctataaattagttttagtttaattttttacagctcagatttttttcccccatagagtggttttattcaygatggctaagtttccaggctaacccacaaaggtttaatctgttattgtgttaaaatgaaatagaaaatttgtagaaaatgtgttaataataattatagtcatttatcaaaaaatagaagttaccataaatttggaagcaacctaagtgtctgtcaacacatgaatggataaagaaaatgtgacacatatatacaatggagtactattcagc

SEQ ID NO: 487535 - DNA, 573 bp, Homo sapiens
ctgcagtcatctcatcagttctttccctaccttaaacccaaggtagacttagagattgactaattgggggactctgatttatacgtttgttgaaaccttgtcctgaaaaacagtaaatcagggaaaaatttgaactccaccctctgaaattttctataaactctaatctccaactgatgtaattcaaattgtttagctgatttatcaatgccataaattttctcagcgctgtgattctcaatcctagctgcacattacaatcacctggggggcactttaaaaaaatacggatgctgggtgagagcaactgaatcatattctattggakccaagcatctttgttttttaaaagctgcttaggcaattcttatatgcagctaaagctgagattcactcttttactgtttttagtaaatacctgcattacagagtttcctatgcatctagtaatgtagctgaacgaataataggtaaaagaaggcttatctaaatgtttaaactataattattgctttgcatatgatatgtcttcagtaagttatcgattgaataaacattataattttaagccac

SEQ ID NO: 487536 - DNA, 433 bp, Homo sapiens
gcattgccacgggtaaagtgatgcccatgaggacgatgaattggtatgtttccgagatgggctgtaaggcagtggcgatgacatggtctatgagcaaatgctgttatgccagctctaagatttgaatattctcatttggaacggacttgtttgaggcttgtcgattagtaacacagcacgatgataaaggtaagcttttgggagctaggcagacatgagcttcattctgtcaccaycaattattgctcatgtaaccttttacaagtaattaaaacaatttgaacctgtttattcgctaaattgggaaaaaagtacttagctcacagtacctttgtgagtattaggtataataatgtgtataaagtaatcgctatgtaataggttttcaataactattcatgcatttattccacccactcccactccactgcac

SEQ ID NO: 487537 - DNA, 575 bp, Homo sapiens
ggaaaagtaataaaagcttgtatggcacattgttgctgagttttcacttcttagtagttgtccaacatgaggcatattgctcatcagttctgtccctcaagggttctcacctgcaaaaacggggattagaatatctgccctgttgtaatcataatgcggtgagagtacaagttcttatgaaagcacaggaagtgccgggcgcggyggctcacacctgtaatcccagcactttgggaggccaatgcaggcggaccacctgaggtcaggagtttgagaccagtcaggccaacgtggcaaaagcccatctccactaaaagtacaaaaattagccaggtgtggtgacgggcacctgtaatcctagctactcgggaggctgaagcaggagaatagcttgaacccaggaggcagaggttgcagtgagccaagattgcaccactgcactccagcctgggcgacaggagtgagactgcgtctcaaaaaaaaaaaaaaaatgggagccaagatggccgaataggaacagctccagtctacagctccctgcctgagccacgcagaagacgggtgatttctgcatt

SEQ ID NO: 487538 - DNA, 599 bp, Homo sapiens
tattaaaactaattaaactagttttggccaggtgcagtgacttatgcctgtaatcccagcactttgggaggccaaggcgtgtggatcacgacgtcagcagatggagaccatcctggctaacatggtaaaaccctgtctctattaaaaatacaaaaaattagccgggtgttgtggcacatgcctataatcccagctactcgggaggctgaagctggagaatcacttgaacctgggaggcagaggttgcagtgagccgagatcgtgccactgccctacagcctgggcgacagagcaagactctgtctcaaaaaaaaaaaaacaacaamaaaaaaacacagttaattaacccagttttatatgacttagaaaaatatcaactacagaaaaataacctcttgatacaaattgcctgtctttagaggtatctgggttagatatacaactacatgaatgttacatatctaacattaccgagtagctactgtttcctctagaaaacctgttagcctatcaaagtgaagatgtcagtagaagggcaagcataacttgacatacaaggaaggctgtaatatttttttcaacaatttcttcaagacatc

SEQ ID NO: 487539 - DNA, 585 bp, Homo sapiens
ctgcctatcccatctctagggttgtgataaatttccaaaggactctagtatttgaaagaatcacttttgaagtctgaaaccatgatggatttcaaaatacacatgattatttaattagttgttcactactgaagattttgctaatattacaattatgcttctgacccaataaaatgtgtttactttctccctgatcaagtttcttaaatataagtatttcatacatakgatattttgaaaaaaaaattcttaaatgtctggagaagaaagctagagaatctttggcaaaactatggggagaaagttggaaaaactcacaaattccagagagattatacacttttaatgaacaccttcaaaaaaaatgtggagcaactattttcttgaagaaaattcagtggaaaatgatcttttgttcccatctctgtcacatctccagcaaaagacctaattctcagtatcagcctcttcagtcattgtatggtgctgataatcaccttggagctaaatgcttcctaggaacagccagagaccgagaatgacttcattcctcactaatgtaggcaacttcagctttattttcaa

SEQ ID NO: 487540 - DNA, 573 bp, Homo sapiens
tagtaaatctgaccacattaggtatttgctatactcattttcatctagtttaatttaaagcacaatttagtataaactctatgtgttgtttcagtttccaaagtggcactttttgaaagtttatcacataagagtgaattgaaacaatacatttgttacagcaaaaactaacaaaacattttttgaaaccagagtagataataaaaaatctgaaaattgaygtaacatacccaaaatgatactgaaatttgttttaagaacaaggaccaaaacagattattttcttagagtcctattgtcttaagtacctgggtaggtgagcaggtcttcctactaaaaatcacctgaggactggaaattctttcttttggctttgcctattagaggcatatgttttttacttctaataaatattaatggtagttatcatatatagttatacatattatttgcatatatataaaatgacaggtttgaggctaagaatggcacccacatgtagctaagtcattaggagtaaatggagcaaacagagctccatatgtatatgttaacttgacaaggagatgtttg

SEQ ID NO: 487541 - DNA, 503 bp, Homo sapiens
tgttatggctggtgccatgtgattcaaaaaccacctccaccacctgctccaagggattagaccggagataggaaggcaagcagacagcgggcaggagggggctggcctcctcttcaatggcttgctcagaaactctgccccatgcagggactctgtctagggtggtggctaactggcccaacagctagcttcttgggaggaggctcactgagggaagcggttgtcctaagggccgctgagtttcatctggttgctctgggaaggatgcgcttctgcaaaagccctggaggcagagccccttcagcctctccaggcctcagagctgagccccgccccccgaygcccccacccatctgactcttcttgacaaactaaaaaggctgccttgcaggggagggcagccacccacggtgtcaccctctggctgctcaccggccacccttgggcctctcctctgggccgcccttccttctcgagtgttctccgtgtgagggccctggccc

SEQ ID NO: 487542 - DNA, 582 bp, Homo sapiens
ctgtttctttaaaaagcttccctaaagcctcccacaccatgtatctggttgcatctcattggccagaacttagtccatggccacaaggaaggttatattattatggaagaaaagagaacaggtatggggacaattggcagtctgccacattactccaactagaggtagttgctttgcactttgtgttcccagagcactctaattatttcacatttaggctatattgtcatttgccttctctgcttgattctggacttawcagagactgtgtttttcatctttttatctctagcactttacataaagcttagcacatagtccatgttcatacttgttgaatgaatggataaagacatttgggaagagtacagcaaaaatatcagacataagcagatggcagtatttaaatacccatgtgtacaaagataattgcttatgtagacattgatgtcttttcttatacttaatttttttcctattttctccattatgtgaaaagaatagacacagtcaatagtagagggcatgcctcaaaattgaccacacagaacatagagttatttaaaaagtaatatgattctc

SEQ ID NO: 487543 - DNA, 658 bp, Homo sapiens
gtcataagatgtaatatcttacaggaatgatagttcgaaaggtaatataattagagaaataatagtcttgtgtaggggtgaactattattggagtttcactgaaggatacctgaggtggttgttagtagcactttgcgagtgcctccaagtacaagtacagtactgctttctgctttctttgttgtctgtcttgcgtatgctgctttttggttattctccttttctgtagtaaaatgtaacccatatataaaagaataaatacattataaagatacagtttaatgagtaattataaagcatatttgctacccagattaagaaatagaatattgccagtgaaccagaagcctgctgtgtgccctttcccagtcatactccatctgtccccaccccatcgcatcccccagaagtaaccatattcttacttttgtgaacrtcattttttctttctctttaaacttttaccatctatatatgcatccctaaatggtatagtttagttttgcctcttttgtacacatgtctacacacatatgtatacatgtcagtattcgtgtgtatatttttatttctctaatccattgtgcatatactattccattgtatcaatatactataagatatttattctgctctactttataatattgaaaaacg

SEQ ID NO: 487544 - DNA, 612 bp, Homo sapiens
ttgctttaagccaacaagtttgtggtaatctgtgacaccagccctagaaaacaaatgcgttgcccaaaatccagcctcctgggcagcaggaccccacggtcaggcaatttcttccagaaggctgattagtcatacaggtggcatcagcaccgactttattcacctgccagtggatgaattcttcagctcttcccttccaaggcctgagacctgcaagccaagagggcttgaacaccagtctcctcttcagtgtgcgcatgcacaactctttcgagaggtttggaagtaaaaagaaggagtgggatggagcagcagttgaagagagggttataagatcccctctgtcttataaggaggtgttgctttgtttgattgtttgtcttgaaaggatgcgaagacctgagtactwgtagaggctgagagaagaagccaggggagagggagaggggacatgaaacatcacatctggatgccaagcacgtcttctttctgtctcactaatcggagtcataggagcttagccctgaaagggaccttagagtttagctccttcattttgcagatagagagagagcaggcacagaagaggacctgcccggggtacttccgcag

SEQ ID NO: 487545 - DNA, 610 bp, Homo sapiens
ttaactaatcgctccatctcattcttccaccttctccatttctcctcccaaccctgacatgccattgaatctgtttaattcaagcaaatgctcagagccccagatccctgaatgcgacagattgagagggtgggggtgggggtggagaatggaggagcttgtgtaataggacataaataaacttgcacatgctcttctttttaattgcagattctatcccatcgcggggcaatttttattttgccttctcttgaataagtgggaagatgttttattcatgtgtatcttcccagcacgcagcccagtaggtgctcaatgtgcgctgaatgaktcggtgcattcggttcggctccagccaacacgtatgccaggcgctgttgtaagtgcctcacatatacaagctcattgaacactctggtgccgttttaaagtcctggagctgagcactctaaagtccggccaataaaggaaatgtgtttggtagccaccctcttgatggacataccactgaatctccagcatgagctgtgtggctcccggttcctccccgcttgcttgtggcactgctcccctctaatatttaggaagagagtttcagcacaaacttcca

SEQ ID NO: 487546 - DNA, 668 bp, Homo sapiens
caaactccaactcttgtgccccttccacacttgtgcaagaacatttgttgtcactgaatgtaacatgcgagtcagctctgcagctgaaaagaggccacaatgagataaatcttagtttcataaaaaggatgtgcagtggggaaacatttactcacactacaatgcaattgtggggaaaaagtgtaacttttacaattttctttctttttttttttttttagcgatgggttcttgatgtgttgcccaggttggactaaaactcctgggctcaagtgatctgcctgcctctgcctcccgagtagcttacatgccactacacctggctaaaattttctttataatgaatgtcttcttatcagtttcactgggaagcaggcgggtaaaatcytaaattgtatccaatttggtaaatttcaagcttgatttagtaatcaaaattgtctttcatagataacttggctcactcacgtaaatgtcagccttttggagactgctctctctggctgctgaatccccgtgtggcaggtgattcctatcagagtcttgcacagcccaggagggaggcccctgggttcccgtggcattgcctggatcttcacagcctgctccttgagctcatgactgctatgatgggatggccccatcttgctttctggggcgctgtgcca

SEQ ID NO: 487547 - DNA, 570 bp, Homo sapiens
attttcatcagaacactttttaaaattaatatttgcatctactgcttcccttgcccttcaacagttatgtatgctcattgtgcagtgattttttgaattcacgaaggctttcattcrgtcattcatctgacaaatatgtatcaagtgccttctggttcttagggatgtggatacatcaagaaatacagtagtcaaacaccctgtactcagagagcttacagttccccccgagtgtcgagtgtcggagagaaactaataattataatgacatgcaatgcagaaagtgaaaacaacacaagtcactggtgatctcaaagcccagagatgaccatggttcacattttagtacatgacttcccagtaccagcagtgtgtagagcattatattgtgagcattttcccacagcagcaagcatttttgaacaaaatgatttttttgtatttcaaaatgtggatgaatcataaatatcttaatcatggaatctctaaggctgaaagagtttttaatggggtgtctattctacaggtgagtggagtggcagtaataattgggaaatggtgggaactctg

SEQ ID NO: 487548 - DNA, 570 bp, Homo sapiens
attttcatcagaacactttttaaaattaatatttgcatctactgcttcccttgcccttcaacagttatgtatgctcattgtgcagtgattttttgaattcacgaaggctttcattcggtcattcatctgacaaatatgtatcaagtgccttctggttcttagggatgtggatacatcaagaaatacagtagtcaaacaccctgtactcagagagcttacagttccccccgagtgtcgagtgtcrgagagaaactaataattataatgacatgcaatgcagaaagtgaaaacaacacaagtcactggtgatctcaaagcccagagatgaccatggttcacattttagtacatgacttcccagtaccagcagtgtgtagagcattatattgtgagcattttcccacagcagcaagcatttttgaacaaaatgatttttttgtatttcaaaatgtggatgaatcataaatatcttaatcatggaatctctaaggctgaaagagtttttaatggggtgtctattctacaggtgagtggagtggcagtaataattgggaaatggtgggaactctg

SEQ ID NO: 487549 - DNA, 603 bp, Homo sapiens
tgtagtcccagctacttgagaggctgaggtggaaggatcacctgagcccaggaggtcgaggctgcagtgatctgagaccactgcactccagcttgggtgtcagagtgagaccctgtctcaaaaaaaaaaaaagttcacaacatagaatggtacagcactactatcttagtctgtttctcaaggcttgacaataaataaacctgtttgatttctctttggtgcttgtgttgcaagaggatggataacattttacaaagcaaagttaccttattttctcacctcctttggacttttagctttctcagactttttgaagaggaatggtagcaggagagttttctcagctttggtaacttctggaggacttgctgaaattaaaacttaaggattcatgttcccatggaagccccagggagcaaagcagtcagcgccctccctctctctccctcggggtctggccctttcaatctacccggttgtccaaattcagattgtgtgccattgaatcccacgtcgctcatctgctcatccccacactcactgccgcccctggggtggccgtctccsctggttagccatcctcatgaaagggtggggaaaatg

SEQ ID NO: 487550 - DNA, 365 bp, Homo sapiens
tgactcaactgacctgggtggatcctgatgttccacattcataaacccctgggtgacactgctggtgtgtggcccacacattgagtagcaagggcacggagctctaccactcctgtgccttcccatgcctcctgcctgccgctgtgcttctcaggccctgtcaaatcccaggggagagtatgtgttggcccagcttgggtaggcatccaggcctagctctgaagctgtggtcagtgaggctgggcaggtctgmtttcttggaggggatgaactgtgagaagagcagagagggaggcacacaggtgcccgagctgtagcctggaggccccaccttgaggcaggggaggtggtcagctgtggcctta

SEQ ID NO: 487551 - DNA, 679 bp, Homo sapiens
tgagtgaatttataggacaggggttcaaatgtgctgaccttctatttccagagaaagcctttgtttttttttgttttttttttctccccactacctctcctctttgttttgtactgccctctcctggctaataaatttcttagtaatgaatatttagagaagccaagtggcggaaacactgggggctgctatcatttctactttcckttagaaatttcagattttattatatgaaatgcagagttgacatacagtgattaattcagatgtgcatagatacaagattgctgaaatgatatcaattgttgtagaaatatctgtatgagagtaatttggtcatttatatggactttgcaatgtttatgaaaaatgattttgcagtttattgcatcattagtcaaattttctgagtcattgatgtgaaaatccactgttattggaaataatctggaaactttctctctacgtttatattttacagtggctgctaatttacagaagattgtagatgatcccaaagctttaaaaacattgacatttaagttggtaagtggaaagttatggaaagaaggaggtaatattttgccatgctgtgccagcagggaataataatctagtttaataacctactctgtaattttgctgttgttgttttcttttagaatcaatttttgcattt

SEQ ID NO: 487552 - DNA, 628 bp, Homo sapiens
tcaggagaaaagggctatacgacaaagccacaaagacatggtgatatctttctgcttaggctgcagaaaaaaactagaagtgatgtagtgacctgtcttccgatgcctcaaattaagtaagaattaaataagttatgtgacatgcgagttaatggctcgcaccaatttaaaaaatgtcagggaagtctttagcttgaaagaaatcgagggagctgttacaggactagaatgatatgtgtcagaagagtcctgatgccatttcaagtcatctctggaagtgccaagggaccactgaccctctgcctgggagaaaatatacacaggaatatggaatggactaggctgggtagaagacagtcacgraatatgattaattcttctgacactattttgctttgaaactgttctattggttctcccttcctctcccttggtcattatcttaggttcatcccataaattttctggtcactttgggacattagaagggtctcattttcaagttatgggaaagccaagtatcatctaaattaggggtccccaacccctgggccacagactggtaccggtctgtggcctggccacacagcaggaggtgagtggtgggcaaggagtgaagcttcaacag

SEQ ID NO: 487553 - DNA, 628 bp, Homo sapiens
tcaggagaaaagggctatacgacaaagccacaaagacatggtgatatctttctgcttaggctgcagaaaaaaactagaagtgatgtagtgacctgtcttccgatgcctcaaattaagtaagaattaaataagttatgtgacatgcgagttaatggctcgcaccaatttaaaaaatgtcagggaagtctttagcttgaaagaaatcgagggagctgttacaggactagaatgatatgtgtcagaagagtcctgatgccatttcaagtcatctctggaagtgccaagggaccactgaccctctgcctgggagaaaatatacacaggaatatggaatggactaggctgggtagaagacagtcacggaatatgattaattcttctgacactattttgctttgaaactgttctattggttctcccttcctctcccttggtcattatcttaggttcatcccataaattttctggtcactttgggacattagaagggtctcattttcaagttatgggaaagccaagtatcatctaaattaggggtccccaacccctgggccacagactggtacyggtctgtggcctggccacacagcaggaggtgagtggtgggcaaggagtgaagcttcaacag

SEQ ID NO: 487554 - DNA, 549 bp, Homo sapiens
acgatggctcatgcctgtaatcccaccactatgggagaccgaggtggtgggtcacctgagggctaggcgttcaaaaccagcctggccaacttggtgaaacccgtctctactaaatgtacaaaacttagccgggcagggtggtacactcctgtaatcccagctacttgggaggctgaggcaggaaaatcrcttgaaccgggagaggggggttgcagtgagccaagattgcaccaccgcactccagcctgggtgacagaccacaactctgtctcaaaaataaataaataaataaacaaataaataaataaaagtatagtctccagaccaagagcactagactcatcagggaacttgctagaaaggcaaattctcaagtccctccagaaacttcaccgtgtggctcagcagtccattttaatgagccctctaggtaactccaatgcccgctggagctgagaacactgacccagagcagagattggcaaactacagtctgtgaactccatctggccctgctgtccataagctaggagtggttccatgaacagc

SEQ ID NO: 487555 - DNA, 651 bp, Homo sapiens
tgttggaccaactgggatattggatctcctaaactcagggctggggagaaatctggccatctttgacgttgcctggatgttttctggaagaagcaattcaacttctttagaaatttatgtctacttgtttttattctcctttattttcttataaatgcataaaacattgcattttctcttagtattccttgagatacatcctataattacttgtattatggcttaaaatgagatatacttgcctaataaatttttaaatgtacaatattgttaataaagtatactgtaggtatactcttgtacagatctctagaacttwcttctcttgcttaaatgaatattatatgcattgaagagcatcccttcatttctccttcccccagtccctggaaaccaccattctactctctgtttctatgaatttgactatttcagatatcgtatctgtaagtggaatcatgcagtatttgtcgttttgtgactggctcatttcacatagcatgatatactccaggttcttccatgttgtcccaaatggctggattttcttctttttaaaggctgaataataatccattgtgtgcatatgccacattttctttgtccatttatccataaatgggcatttatgttgtttttataacttggcta

SEQ ID NO: 487556 - DNA, 651 bp, Homo sapiens
tgttggaccaactgggatattggatctcctaaactcagggctggggagaaatctggccatctttgacgttgcctggatgttttctggaagaagcaattcaacttctttagaaatttatgtctacttgtttttattctcctttattttcttataaatgcataaaacattgcattttctcttagtattccttgagatacatcctataattacttgtattatggcttaaaatgagatatacttgcctaataaatttttaaatgtacaatattgttaataaagtatactgtaggtatactcttgtacagatctctagaacttacttctcttgcttaaatgaatattatatgcattgaagagcatcccttcatttctccttcccccagtccctggaaaccaccattctactctctgtttctatgaatttgactatttcagatatcgtatctgtaagtggaatcatgcagtatttgtcgttttgtgactggctcatttcacatagcatgatatactccaggttcttccatgttgtcccaaatrgctggattttcttctttttaaaggctgaataataatccattgtgtgcatatgccacattttctttgtccatttatccataaatgggcatttatgttgtttttataacttggcta

SEQ ID NO: 487557 - DNA, 537 bp, Homo sapiens
gcacccttagattacctatggtactatcacattctaatacactctataatttattttttatttactgtactttttttcctttatcctccactagaatgcaagatccacgggcagaggattttctttttgccttgtttatgtattaccagcatgtacaagcatttatgacgtgtcaagcactcagcaacatttgctgaatgaagaaaagaactcaaataggattcccaaaagggtcctacttagaggtcatgctctgcagagactagcaccagggcccctgtccagatttattaggaaagactgtggcatcaggtgggagtagtgggaagagggtctagtctccagaaggagggctggtgaggggtggacaggatatcagrgtttccagtcaatatctgaatcactttgcatggtgtctcagttatctattgctgagtaacgaaccaacccacaatgcagtgatttaaaacatcagtgattcattattccttctgattctgtgagttgactaggtggttcctctgctgatcttgccag

SEQ ID NO: 487558 - DNA, 537 bp, Homo sapiens
gcacccttagattacctatggtactatcacattctaatacactctataatttattttttatttactgtactttttttcctttatcctccactagaatgcaagatccacgggcagaggattttctttttgccttgtttatgtattaccagcatgtacaagcatttatgacgtgtcaagcactcagcaacatttgctgaatgaagaaaagaactcaaataggattcccaaaagggtcctacttagaggtcatgctctgcagagactagcaccagggcccctgtccagatttattaggaaagactgtggcatcaggtgggagtagtgggaagagggtctagtctccagaaggagggctggtgaggggtggacaggatatcagggttyccagtcaatatctgaatcactttgcatggtgtctcagttatctattgctgagtaacgaaccaacccacaatgcagtgatttaaaacatcagtgattcattattccttctgattctgtgagttgactaggtggttcctctgctgatcttgccag

SEQ ID NO: 487559 - DNA, 503 bp, Homo sapiens
gccctaggctctgaggtacagaggcttgttaggcggagccaactttgttcagctctaggaggtgtactcttgacctcagggattgtccatgtacagatggaacagcatccagtaacctgacttgggagagtccctgaaaatgttgatgtaatcccatttctttatttttactgtctggggatttccctcaccttctttccttgagtatctctgagcagtctaacctgtgctaccattgatatttccccacccaaagcctcaacaggaagcagctttctagagagagaagtcttcacatgctcctttggctaaaggagcayaggggctactagagaaactacatatccactggaacatggagaccccgatccacactggtgtctggactccttggcccagctcatgctggaagctactggcctctgatcccaagctcactgctgggcctttggcctggcactggccatcgatgagggtctttgcttgtgctggaatcaaaggga

SEQ ID NO: 487560 - DNA, 649 bp, Homo sapiens
ctgtacctgacagagtgaatgtgtaacaaacgttaacctttcttgtcagcaaatttaaaacctcacagcatattctgcactcattacgccagtctgttggagctgagtccatgcctttttctctctgcrttgggaaagccatgctagctacatgcatttttggtcatgaaccagtcttagatttaagtcaatgtaaatttggcctttgccgtgttcttaatgtcttctttacatacctaggaaaagtgaaggagaggtgagaaagacagagtggggaggaacccgtgtctgtgggtttgtgctagatgccaacctggctcttcacatcctctgtctcatccagtcaagcagccacactgagtcccccagcatgagaacagcttccacagagcaggagattctgggtctgaaatgaggagagagctccagtcccaccagtgccctagagcatacctcagaatgctcctttctcctggtgggatccgtggagtctgcctgctcttccaaggatgcctcagccttttaagtaaggcctagggaggggccctgaaactaccaggacctgaggagaagcaggattctcagcgtgatttcacaccaccctaagccgccgggaatacttgctgctcattatctctctattggagtc

SEQ ID NO: 487561 - DNA, 649 bp, Homo sapiens
ctgtacctgacagagtgaatgtgtaacaaacgttaacctttcttgtcagcaaatttaaaacctcacagcatattctgcactcattacgccagtctgttggagctgagtccatgcctttttctctctgcgttgggaaagccatgctagctacatgcatttttggtcatgaaccagtcttagatttaagtcaatgtaaatttggcctttgccgtgttcttaatgtcttctttacatacctaggaaaagtgaaggagargtgagaaagacagagtggggaggaacccgtgtctgtgggtttgtgctagatgccaacctggctcttcacatcctctgtctcatccagtcaagcagccacactgagtcccccagcatgagaacagcttccacagagcaggagattctgggtctgaaatgaggagagagctccagtcccaccagtgccctagagcatacctcagaatgctcctttctcctggtgggatccgtggagtctgcctgctcttccaaggatgcctcagccttttaagtaaggcctagggaggggccctgaaactaccaggacctgaggagaagcaggattctcagcgtgatttcacaccaccctaagccgccgggaatacttgctgctcattatctctctattggagtc

SEQ ID NO: 487562 - DNA, 649 bp, Homo sapiens
ctgtacctgacagagtgaatgtgtaacaaacgttaacctttcttgtcagcaaatttaaaacctcacagcatattctgcactcattacgccagtctgttggagctgagtccatgcctttttctctctgcgttgggaaagccatgctagctacatgcatttttggtcatgaaccagtcttagatttaagtcaatgtaaatttggcctttgccgtgttcttaatgtcttctttacatacctaggaaaagtgaaggagaggtgagaaagacagagtggggaggaacccgtgtctgtgggtttgtgctagatgccaacctggctcttcacatcctctgtctcatccagtcaagcagccacactgagtcccccagcatgagaacagcttccacagagcaggagattctgggtctgaaatgaggagagagctccagtcccaccagtgccctagagcatacctcagaatgctcctttctcctggtgggatccgtggagtctgcctgctcttccaaggatgcctcagccttttaagtaaggcctagggaggggccctgaaactaccaggacctgaggagaagcaggawtctcagcgtgatttcacaccaccctaagccgccgggaatacttgctgctcattatctctctattggagtc

SEQ ID NO: 487563 - DNA, 598 bp, Homo sapiens
tttggcccatagaaaaataaatgggaaaccaccactcatattctcattctctctctctctctcacacacacacacaaacacagacacacacacactcacacacggactcatacatcaccataaataaatgagacacctgatcataactttgtaagtggtcacacattgaaacttccaagtcacatcaaatgtggtcaagatatatagactcttcttaacctgtaatccatttttctgggagctacctccatcgccaccaccacaactcayagacccagctgattacacatgtacctgaccttgtccccaggccatggctcactggacttacggtgggcagctgcctcaaactaagccagtaccaggaataagaaactgggactagagttcacaggggcgaggcatttggtaactgctctcaaactgaggactcctgaatccataagccttagggtggtcaccttctgcaggtgcacagagaagcagagaagaccattctgctgagagagaagaacaagcaaacagatagaggcaggaatgataacattatggccttcgatagagaaacaattactactgccttaacttctcataactt

SEQ ID NO: 487564 - DNA, 492 bp, Homo sapiens
catggagaagtgagatgctatcacacaagaaaatcagtgccagayggtgacaaaacagtcagtcactgtagattctagagctgggcagggatgtggtgaaaaaaatctttagaacgtgggtccacattcctcacataggttggaatgaatgaaaggcagaaaaaccgggaatacaagtacagtagtaatggcaattaaaaacacaaagttatatttaaagaaataacctgtagggacttgataagttagacactgagtcaggagaagtaggagatattgtcaatgagtctcaggttttgaatatcactggtgagaggaatattatgacagtgagagaaatgaaattgggaggaatgtgtgggctgggaggagaagataattaacttaaccttaaatatatttggttggatatcagcaggatgtccaaagtgggctgtcctgtaggctgcaggaggtaaagtgggatgtgcagtctacatttgggagccatta

SEQ ID NO: 487565 - DNA, 492 bp, Homo sapiens
catggagaagtgagatgctatcacacaagaaaatcagtgccagacggtgrcaaaacagtcagtcactgtagattctagagctgggcagggatgtggtgaaaaaaatctttagaacgtgggtccacattcctcacataggttggaatgaatgaaaggcagaaaaaccgggaatacaagtacagtagtaatggcaattaaaaacacaaagttatatttaaagaaataacctgtagggacttgataagttagacactgagtcaggagaagtaggagatattgtcaatgagtctcaggttttgaatatcactggtgagaggaatattatgacagtgagagaaatgaaattgggaggaatgtgtgggctgggaggagaagataattaacttaaccttaaatatatttggttggatatcagcaggatgtccaaagtgggctgtcctgtaggctgcaggaggtaaagtgggatgtgcagtctacatttgggagccatta

SEQ ID NO: 487566 - DNA, 474 bp, Homo sapiens
ggaccagcattgaatttcttccagctctttgagctgacactgacccagagtgggagtcatcagcttgctatccaccttcacccagggccctccactttgttgccccayctagatctgggcacagctaccacactgcccactgtcctgctgctacaaccaaagaagccccagtggtttggccaaggggagcccatcatcaagtgggcttgcattgaggccatgatgctgttgagttatctgtactgggggattgtctagtcctttaggactcaaagtgctggccaggaggaaccagcagcattgacatcacctggttgcatatttgaaatgtacagtctcaggccccaccccaggcctgaaaaaccagaatctgttattttaacaagaactgcaggtggtttatatatttattaataagtgtgaagaatggaatgaaagtacaccagttcccaagcagcatggctgattgctgga

SEQ ID NO: 487567 - DNA, 318 bp, Homo sapiens
aaatgagcttaggtctttgaacttgatcctgaagacagtggggaaccactaaagagttttttggggatayagatagatagatagatagatagatagatagatagatagatagatagatagatatagatagagatagagatagatatatatactttaagttctgggatccatgtgcagaatgtgcagatttgttacataggtatacaagtgccatggtggttcactgcacccatcaactcgtcatctacattaggtatttctcctaatgctatccgtcccctagacccccatcccccgacaggccatggtgtgtgatgt

SEQ ID NO: 487568 - DNA, 647 bp, Homo sapiens
gcagagctgcatcacaggagggagctctggaatgatgagactcaggtggtatattgggtggtggcactttagcccatctttccctccagagaaggagagagcactttactatgaattgtaagcaaatgcctccaggagaaagrtgactctatgttttattaccctagaatataagcaaacagcttttgggaaaatcagcctctaaatttctctggagcaatacactaacttcggaggcgtttctgacattcagtcatcttttaacttagtttcctagtgttttttgcttagaaagcctgaactgtgcagaaatgtgaaaatattcttgtataagtgtctcccaacagttgtttaaactagatcgaccataaactctgaaaggtgagtgtgaggaagactcacctagggaacgagatgggacttactaggtagtataaaacttacaagttgttctcttcttaccaaaaagtcagaatgatccccaaaaccccatgaaccaccaccaccaccacttctgcatagtttggactttctaaagctgaagccaaaagctccagtgtctccagggtcaaaacagttcacagaaatggatgatgtgggacaggaagacacagcagtaaatcgagatcatatgcccaactaaaggg

SEQ ID NO: 487569 - DNA, 647 bp, Homo sapiens
gcagagctgcatcacaggagggagctctggaatgatgagactcaggtggtatattgggtggtggcactttagcccatctttccctccagagaaggagagagcactttactatgaattgtaagcaaatgcctccaggagaaagatgactctatgttttattaccctagaatataagcaaacagcttttgggaaaatcagcctctaaatttctctggagcaatacactaacttcggaggcgtttctgacattcagtcatcttttaacttagtttcctagtgttttttgcttagaaagcctgaactgtgcagaaatgtgaaaatattcttgtataagtgtctcccaacagttgtttaaactagatcgaccataaactctgaaaggtgagtgtgaggaagactcacctagggaacgagatgggacttactaggtagtataaaacttacaagttgttctcttcttaccaaaaagtcagaatgatccccaaaaccccatgaaccaccaccaccaccacttcygcatagtttggactttctaaagctgaagccaaaagctccagtgtctccagggtcaaaacagttcacagaaatggatgatgtgggacaggaagacacagcagtaaatcgagatcatatgcccaactaaaggg

SEQ ID NO: 487570 - DNA, 596 bp, Homo sapiens
aaaatgtagctagctttggttttcttaatgtttctcaaaggagacaacttgattgcatgttttctaatactatacaattgcatggaacacttgtctaaaaatgaagtttccctggaatagtccattgttttttaagttttcaaagaggctatcaccagactatgtagcaaaaaatgagagacttggaattattgagctggaaggaacttagaggtcacctaacccaagcctttcgttttagagacgaagaaactgatagcaatgagtttgcatgacatgctcaaggtcgttctcctatttgaaaggaagatggatgtctttcataatatttttgtagytatccttgagtgcaaacacctagctgacatgttagagtgagaaaaacatacagcatacattcctaaaaactaaactgtcagtgaaaaggatgttctggtacaaaagctaaatgtatttagttctttgctgtggaagttagaaaactgagtgtattcacatgaaccatatttaagaacaactgtacttttgcagttgtcaagaattaataaacccagaatgttttcaaacaaatgtaatgtgcttcaaagtctgttcat

SEQ ID NO: 487571 - DNA, 459 bp, Homo sapiens
ataaagtctgcccttttcccgcctgtaccttgtacaaagatgagcatcagttcaacgttgatttagaaattcagagttggccgggcaactctgaatacagctcacgcctgtattcccaacactttgggaggccgaggtgggcggatcacaaggtcaggagctcgagaccagcctggccaatatggtgaaaccccatctctactaaaaattcaccaattagccgggtgtggtggtgtaggcatctgtagtcccagctacttgggaggctgaggcaggagaattgcttgaaccctggtaggcggaggttgcmgtgagccgagatcatgccactgcactccagcctcggccacagaacaagactccatctcaaaaaaaaaaaaaaaaaaaacaaagttacagtcctcccaaaatgtgctcagaattcatctttaaatacgacaccctgtaacagtttagcca

SEQ ID NO: 487572 - DNA, 459 bp, Homo sapiens
ataaagtctgcccttttcccgcctgtaccttgtacaaagatgagcatcagttcaacgttgatttagaaattcagagttggccgggcaactctgaatacagctcacgcctgtattcccaacactttgggaggccgaggtgggcggatcacaaggtcaggagctcgagaccagcctggccaatatggtgaaaccccatctctactaaaaattcaccaattagccgggtgtggtggtgtaggcatctgtagtcccagctacttgggaggctgaggcaggagaattgcttgaaccctggtaggcggaggttgcagtgagccgagatcatgccactgcactccagcctmggccacagaacaagactccatctcaaaaaaaaaaaaaaaaaaaacaaagttacagtcctcccaaaatgtgctcagaattcatctttaaatacgacaccctgtaacagtttagcca

SEQ ID NO: 487573 - DNA, 556 bp, Homo sapiens
acagttgtagaaaatacaggttagtaaatagtaattttaggtaacagtatcaaataggaagaagtaaataaaaaagaaaggacagtgtctttccattaaaaatgtaaaaaagtttggttaaataagatgaagttatctttaagatttttatttgtaactatatttatggtgggttttgtttcttagtgttttaaaggctttttaattgatttttggcaagaggatayattgtaagcagtgcattgctttgacttactgagtcttgacaatctgattttgtgcctataaaattaaagaaaatgcttagggtagtatgtttttaaaagctaattaagaacttcaggcatttggacaactctcttttttttacatatttctcagacctagacataataaatagatatgtttttaaaagtgaacaggttagaaagcatcactatttactgctgattatgaaacattttaatagcatcaaatttgtaattttagaattttgctttggccttgtttttattttgaaagtttttaaggaatgttctgcaaatgtagtacttta

SEQ ID NO: 487574 - DNA, 470 bp, Homo sapiens
caagtcccttacctgattagctctacacagagcactgagtggtgcatttacawtcatttagctagatagaaaagttctccaagtccccaccccacccaaagcccagccagttttacctctcaggattacaacagtttgcattatgtcccctaattgagcctgcaaaactgatgctccactagccttaagcaactgtttcaacacttttatatactgtttctgttgagctgataaatgttgtcccatgagaatacctcagcttgacccaacttctcccagaacttggtaacctcgagtgggcaccaatgacttactgattagtcactgacttcaccacgtgaattctttttccacctttgctttcagggagtctgtcgcattcctcactcttcctctacagctttcctcatgagggtggttctcacacttccttcacagactgcctcacacaatgggctccaactgcagac

SEQ ID NO: 487575 - DNA, 551 bp, Homo sapiens
gtgtttgatttcattcagaccactctccaaatccatttttcatttctgctttgctttgctctggttttaccctcaggtacatgtttcccatctggtagcctcccagaggctgtagtttcaagatgcagaaaagagttcatttctcatttctctctttcttctctcagtatatcccaagaatgtacacattctgcaccaattatggaggacaacagtatgtgattgatgctctgattggctagctctggaccacatgaccaactctgctctggtggtagagctaattccacttaaaccacatcaacagagaatgggtaagatgtgtttcctcaagggagactgtaacactattagaaggaggagtgaaagttggcgtgtaagaagcaaatgatcactactgatatgtgggcatttgaggtgaattaaatttttacttgrattattttatgttttcatactcatcagagtttgtataaactatggtaaaacttactgtcagctctcagcatgcttaactggtcttttactgtcatcatcatatgaagacaata

SEQ ID NO: 487576 - DNA, 525 bp, Homo sapiens
gattagtggtataataaaactccttccagccgtaaaatcactggattgtataatatgtaacatcagtctaaattcttttttttttgacaccaggcaagataaactatagatgggtaaataaatacatttatttacatatagttttcaaagagtcattctgcctgagagctttgggaaaagcttgacagggaggtgacatttgatctagggctcaaggtaattttataaaaatgtgcaccagagacaaagaggtattcaataaatatttcttaaatgaaccaacgacataaggaagcaccagtttttcttgagatctgtatatatagtgttgtgcctgtctaaaagctgaccgtcctatttaaawtatgtccattctggtagaaaaagcccttttgaagtcgtcttatatagttggcagagttggctaactgaatgaataaaaaatgtaacataaccaaatataggccaaataaatttatgttgctcaacactaaagctttgacaggtacaatcaatgtgcagcag

SEQ ID NO: 487577 - DNA, 620 bp, Homo sapiens
ttaactggctgtattagcttagaaaaaaatacaatgtttttccatttaggccacattttttttttcactatccttaagtgaaaggtgtcccacaccttaagatttctttgcaattattaaatacacagattccattctgtttacacagaaaaacacctggaaggtgcttcttactaccaagggatgtgcacagcaatcctgggagaaagggaggtcagttcttagcatctccatcctcccaaggtaaacactgtggtcctgagggctttaaggctattttttaggtcaaaaattaaatggcagacattgtgcttaaataatttgacctttaaggatttcagttccctaaggaacttagaagtctccgtttcaaaattaacacaacagatgtgttaattttataagtgggcatagattaaggcattcaggaacacattgcaattgtagctggaaaaaagacacagatgcgatcagggaaactagtctctaacgactattattattctgaggctaattggtgaacttctggaccttstatagctatgccttgtttcagggaagcttgactgtaaatagggacaagttacaggaaatgaagatcatttttgttcaaaagtatt

SEQ ID NO: 487578 - DNA, 582 bp, Homo sapiens
aaagtgtttgaagatacttaaccatgttcatttattggaagtctcaacatagtgaagatggcaagtagttatggatagctaatagggatcggcggagggggtagcatgcgaatgtggctatacatgggtgacaagagagagccttgaagtgatggcacagttctgtatgtcaattgtggttgttgtcattacatgaagctgcatatgtgatagaactttatagaattatacacacacataaagaggtgcttgtgaaaatggtaagatctgaataaactttgtgaattgtactatgtcaatttcctggcattaatattttacgatcattatacaagatgttaccattgtgagtgctgttgaagggtgattgtggaatctccttgcaacttcctacaatgttcttattatctgaaaataagcttaaaattgtaattaattctatcacacttttacaataacaaataaataatttcatattacacataaaamtaattcttagcagttttctcaaaagttactccagttatctatctcatttacttttaaatattttatggtgtcataagtctagctattatcacc

SEQ ID NO: 487579 - DNA, 582 bp, Homo sapiens
aaagtgtttgaagatacttaaccatgttcatttattggaagtctcaacatagtgaagatggcaagtagttatggatagctaatagggatcggcggagggggtagcatgcgaatgtggctatacatgggtgacaagagagagccttgaagtgatggcacagttctgtatgtcaattgtggttgttgtcattacatgaagctgcatatgtgatagaactttatagaattatacacacacataaagaggtgcttgtgaaaatggtaagatctgaataaactttgtgaattgtactatgtcaatttcctggcattaatattttacgatcattatacaagatgttaccattgtgagtgctgttgaagggtgattgtggaatctccttgcaacttcctacaatgttcttattatctgaaaataagcttaaaattgtaattaattctatcacacttttacaataacaaataaataatttcatattacacataaaactaattcttagcagttttctcaaaagttactccagttatctatctcatttacttttaaatattttatggtgtcrtaagtctagctattatcacc

SEQ ID NO: 487580 - DNA, 627 bp, Homo sapiens
aatatttgttagtattaaaaagattgtaaaatcataaaacttgcactcaacgtttagaagtaggtagtttgatgctatgtgttggtgtgtttgtggacaaagggaaagaataccacccgtttgtggagaaagtgaaaatgaactctccagtgtattagtccaatgccaggagataagggacattggaaaggagatgggtgcaggatgacaaattacctaagaaggcttccagatatttygagaagttgaaatcaccccacagagggagaggtctatcccaaattactctgagttcttaaagttactcattcatgcttacagtcattcaaagaggaccctgaatttgtatgaaattttatagatggaggaaaatttggaaattgcttatttctgaaccacttaatcttgaataggcactctctggtgaacgtatttcatagttctgcacaaaaaccctatggtctgttaaaccgtggggaaaaatgttttgttaaagctgtttttttgttttgttttgtttttgcagccaagatattttgtgcttaattgaataaaaaggacagtcgctgagatttttaagaagcaaattattcattacgtgtttaccagttaaataaccaaaaggca

SEQ ID NO: 487581 - DNA, 627 bp, Homo sapiens
aatatttgttagtattaaaaagattgtaaaatcataaaacttgcactcaacgtttagaagtaggtagtttgatgctatgtgttggtgtgtttgtggacaaagggaaagaataccacccgtttgtggagaaagtgaaaatgaactctccagtgtattagtccaatgccaggagataagggacattggaaaggagatgggtgcaggatgacaaattacctaagaaggcttccagatatttcgagaagttgaaatcaccccacagagggagaggtctatcccaaattactctgagttcttaaagttactcattcatgcttacagtcattcaaagaggaccctgaatttgtatgaaattttatagatggaggaaaatttggaaattgcttatttctgaaccacttaatcttgaataggcactctctggtgaacgtatttcatagttctgcacaaaaaccctatggtctgttaaaccgtggggaaaaatgttttgttaaagctgtttttttgttttgttttgtttttgyagccaagatattttgtgcttaattgaataaaaaggacagtcgctgagatttttaagaagcaaattattcattacgtgtttaccagttaaataaccaaaaggca

SEQ ID NO: 487582 - DNA, 464 bp, Homo sapiens
gggcagcagtgtgtgccagctacaaaatagctgcttcacttccgccccaccaagctcacagaacaatgtttactttggctcacgtttctttttcaggaatcattcaggaaagaaaattcagggaaatttagtttagcctagtcagactgacatacaacagtcacaatcctaccaataacccatagaattttctataaggaatagagcaatgacccagggaatgtgcaaccctaaacaagcctgaagagacaggatcatcccaattggttcacttcagggattaaaattccaaattgaagggccgtcccagctaaagtgaactgttacagaaatacagactatcataacacaacaaaatcaatcaacagccatatattttatttcacaaaacaataatygcctgccacctggtataaatcagattaaattgattatcgtgtgccatgttcatgctttccttttac

SEQ ID NO: 487583 - DNA, 619 bp, Homo sapiens
agcaaatgttgccaacttaaacctcattcacaaatgggattatctcaacaaaccaagtccattccccatgaatgcaggaaaataaacaaatatgtgcaagagccctatcagatcacagtatagaaggtcttgttgaaaggattttttaagtaagtccctgctttctccttctctcatgtagaaaaaagcaaaatatacctttgcaaggagtatttccatcggaaatcattttgctctcatggaggtggagaaaaataatttaaaacagataaaagagtggatctggataacttttcttttcttttagatcttaaaaaccattcacttcaataccacgagcccatgtaagaatgccatttaaaataatgattttacattctctaaatctttggtatttgtcattttgagggaatatcatgtatcataagactgcttttattttcttcccatcagacaagattatccaaagcaattactaattagctgattcagggcccatgataagaacatacaagaactttagatgttgtgtggytccatggcccctttaaacctggggggtccgcaggtacacaaccagtaatttttcttagtgccaatggtcgtgtctcaggcagtt

SEQ ID NO: 487584 - DNA, 565 bp, Homo sapiens
gctgagatcgagccactgcaactccatcctggacgacagagtgagactccatctcaaaaaaacaaaaacaacaacaacaaaactattctcataaacaggaattaggaagacggacataagaacacacccacatcagtggctacttccactcaaggttctgatcttgttgctccaaatagtaagaaagggagatgtgaaatttagttgtttatgcagtaataatgtgctcactccctctctttcctaggccatctcccactgcttccctccactccagacctttctgcagtactctctgaacttccttccrctctgtcttaaacatcttcaaatgcatcaaccaatgctttctctctctctccttgtcttctataaaacttagttctgccattatactggcttctcctatgttctcatgcgtagattctttatctcacacattcccaacagcattaactatatttgtctcccatcttaagaaacacacacacacacacacacacacacacacacacacacacacacacacccttcctctaattccaatgaccaccattctccttgg

SEQ ID NO: 487585 - DNA, 565 bp, Homo sapiens
gctgagatcgagccactgcaactccatcctggacgacagagtgagactccatctcaaaaaaacaaaaacaacaacaacaaaactattctcataaacaggaattaggaagacggacataagaacacacccacatcagtggctacttccactcaaggttctgatcttgttgctccaaatagtaagaaagggagatgtgaaatttagttgtttatgcagtaataatgtgctcactccctctctttcctaggccatctcccactgcttccctccactccagacctttctgcagtactctctgaacttccttccgctctgtcttaaacatcttcaaatgcatcaaccaatgctttctctctctctccttgtcttctataaaacttagttctgccattatactggcttctcctatgttctcatgcgtagattctttatctcacacattcccaacagcattaactatatttgtctcccatcttaagaaacacacacacacacacacacacacacacacacacacacacacacacmcccttcctctaattccaatgaccaccattctccttgg

SEQ ID NO: 487586 - DNA, 588 bp, Homo sapiens
acctttatctcccactgagtctaaaattcaacttattaacaaaacttgctcttcttctagactaacctgtttctatgtgtgtttcaatccaagtcctgcccttgaaactaggatcaactaggtgggaacaagtctgggtaaggggttcctgggaacttgatgtggccaagaagaacagtattcatgggtcctttgacaggatgaagaagttgaatcacagtttaagaagaagagccagagttacaaactgaggggcaaggcagaagtaaaacaggagaccacgtagccaggttagtagctaggaacattgatgtgtgtgggttcagtagttgaggcagtcattgtgaacagatggaatgcactggtacccatttactgggcacatgatgatgcaggcatgcctgttcagtgacrgcatggtcaaggcaagggtcactatatgagcagtaaccagatccccatccattgatggtcactccagattcttctctcttactcccttacactgtctcttacaaatcatcagtgcccatatgctgtcgattctttctttacaagatcacttacatccctttcttttgttatatt

SEQ ID NO: 487587 - DNA, 380 bp, Homo sapiens
ttctcaattttctcctttgcaattcttgaatccaagtctcctagacctttaacataccattaaagaatattgtttaaatgtttgttgctaaaatatttaaacatattttatcaaaaatagtatttgatgaaaagtgaaactttccccaatatgcaattagattagtttttaaaaatttatattttctactaagacagttaacccataatttacatttatgtgaaaaactgcattatctcatcataatctggcttttgatagctaaagcccctttttyacttgaagtaaaaattgtacagatattacaaggtgaaagcagacagaaattattttgcattgccaatgcttctgtaacatgtagttaaactaaactgacttca

SEQ ID NO: 487588 - DNA, 539 bp, Homo sapiens
ctgaggctgggcgggctatgcattcagttgggttcagtgatggtgggtgtattagttagggtaagaaagctgctgtaacaaacaacccccacctcccaatagctcaacataccaaactcagtcacaccacagtccaaagcatggtgatggggtattcatctccatgcagtcatagagggcccccttattttagcaacatcctcattccctagagttctggagtcttgtgcttgtagttgcactgatggggaaggagtggaggtggtacgtggaagatgatacaggaactgttggaggccaggcctggaatagatgtaccttactcctgcccaatagccrttggccagaacttggtagctgcacatggtaatagcaaggcaggctagaaaatgtgtccagaaagaaaagcaaacagagtttggtgagttcctagtcctgctgcattgcgggaggactgaggtgggtttaggaggtggcaggggcagcggggtaggatgtggtggacctgaaactctaggctgcctgcctccagatttttc

SEQ ID NO: 487589 - DNA, 532 bp, Homo sapiens
gctgctgttggacccactcagggaattgtgtctgacccgacctacgcatttggtggttagcttgctctgtgcaaacagtccccaggggactggaatcctcgctgcaaaaataaattctccctctggacttgcttttctcattttgctttctctgcattctggctttttcttttttctttctagtgtcccaactgcttttatcttcttcctttcctcccactgagacccaaacaaacctcctggtaaacaaactctcaggccagtctcttaaagagacagtatgtgtttgttgccatctggatgtccagtcctgctcaggggctgcatgaggtctgggggcagatgggctgtgaggtgttaaagatcattcaagagactcacaggaaaaagctggcctagaacagtgcaccgagaaaattgccctaagagccccctctcctttcccactctcacctgaaaatacagaacaggagggaccagcggggtttcccyttagccagtctctctgagtggtgttgttgagactattgtc

SEQ ID NO: 487590 - DNA, 584 bp, Homo sapiens
aggttacctctgtggccccagccctgaggggtggtgggtctctcagccaggctggtctggggagcggggagggcatcctgcctcattgtcactggcccagcgcatttccagaaattcttcccatcggtaagaagaggaaagagaggccagggcagcctcacaggccaagtgggaaccaggtttcccggagctctcacggcccagcccgagcttggggcctcctgtctgggccaaagggycagctcagccctgggacggggatatgtcaggaataactggccggtggacccaggactcaccttatccatgctgggccaggccgtgtttgtgtttgcaggacagagacaggaggaaagaggcctggaaatgcctgggcttcccacaggacttatttaactctagcgtcagggaagactaaagcttatattcattccacagtatatactgcctcccctctaccctcattttagtaggtaggtatagtgtgaatgtgtgcaggacatgtgtgcatcgtgtgtgtgcacgtaacccgtgacatgtgtattttgggctagtatagataggtcttgagggaaagacagagg

SEQ ID NO: 487591 - DNA, 495 bp, Homo sapiens
ccactgtgttgatgaggggtctatgagtttttaactcagccccccatcccatggctctctctggtgcaggaactacatgtggtcgccttgcattgtaccacaggcctgcactccactgcgacagactggacccagtgtggggccaaggacaaaggcggccttccgtgaggtagttggacttgggagctctgagtgggtgggagtgcctgtcccacctagtcccatccatgcaccttcatgtgawacagaggagggaactgaggcacagaaggctgggtaacgcactcaagcatccacacaggaagaggaactggaagaggaacccaggcagctaggctctttggccagtgcctttggccaccacactccatagtttcccaccaaaggacatgctcggctccagggcaggagttaacagaccatcaggggttggtgaggccggctctggagtcccactctcaggttttggctggcttcttgattgcatcccgtttg

SEQ ID NO: 487592 - DNA, 553 bp, Homo sapiens
gaaattctgagttgccgacatggygcttgaaagcaagacttaaggttacattttgccttccctggtttcctttaaaaaagtccggagatggatgggggcttggcctctccacatcattgggaaaaggtcatcagactccactgccgaggcaggagggtcaggggcagttggaagaccaggggtatccagggaggaggggcaggggttctaaatagaggcaaaagagcagagtgaggaggggctgggggatgtggccataactctgaggaccccattataggaaaacacagtactcacaggcagacacacacctggacatgcgttcttgcacccatgggcccacagaccatcgtcaagaggctcagagagtagtgagccagcctgcaggtttccagaatattctcttacgagagtctctatccaggagtctagttggggataaagcaaggccctctcctttacactttttatttaagcacatttgggcagattgagtttgcctgttaactagagttaaaagggacttggggctcagcctcttcttggtcctaca

SEQ ID NO: 487593 - DNA, 616 bp, Homo sapiens
agtccactctggattttataccctacaggtacttaaatcactgagcttaagcattgcagagcaccttgttctgagaggaacaaagacaaagcccaggctgttctagatggttcttccttatcccaggatgttacattctcagtacattctgcccaagaattgtaagaaggagcagggagagctgaatcagccaaggtcattcaaggacttgtcctcctgcaataatcacaataaatacaaatggattaaacacttcagttgaaagatagagatggtcagattggattttagttatatttataagtggcatacctaaagactcaaggtaaagacatggaaaaaagtaagttaggcaaaawcaaactaaattaacattggagtggctagattattatcatataaagcatattttatgagaaaagacattattaggaatacagagaattactacataataataaaataaagatttaaatattttagaataatgtgcttttaataatatagcctcaaaatatgtaaagcaaaaaaaaaaaaagaaagaaatgtgaacaaatccctcattatactaagagattataacaaacagacaattatatgcatgtgtgcacatgta

SEQ ID NO: 487594 - DNA, 650 bp, Homo sapiens
gcctcaaaatctgcaccaagatttctgggcagggaaaaagttatcatcaggaaggcacagacttgttagcgaaatgctctgacctagcccaagaaaccaggtgcttctctgctcctgacatcaggcttggccaggctgtcaagtgctccaaaaagtgctccaactttgatcctgcccatctagggcagaagctgaacggctcaacaatgatactactgagctgagagccttcagcaagtcttttccaagctgcagcctttgcttcttccctagtagagagtagctgctggtgataaccagtaaagaccttctaaaaccaggatttgaattctgttactactggagacactgagaatccggaacatggtcttttccacctcaggaaccatcaccataccccacytgaagagtagggcctcaggcagtttgagagtgaagttcccagggacttccagtctgagctgctgagcctgctttgatgagcagatgcccttccaacccccgctctgcatacctgtatttatgtcgcccacagttgcttgtttgtagtggccatagatgaacagcatctcctcatccgatggcttggtcttaaggtgcctaacctcctctgcagctttctcaaactcagcctaaatggaagggagagg

SEQ ID NO: 487595 - DNA, 586 bp, Homo sapiens
gtttacagacagtattattaccaacaataaccgatatttgtacagggcatttggatttgcttgtgtatttccctggaaatacacatttcaacatcaaactcaaagatcaagatcaaagaaatgtttaacctgcacactgttctctgtttaccttcaccccgttctcctattaccttcaccccaagctacatctgcacatggctggcacaggatggtctgaaactctcatctgaccatgtcactgctgaaaagatccagtgaccccagtgtccttgggataatggtagaaccctcactatgcagctagactccctccgcagcctcatctccccttctcctgtgacgtgtcaacacttgggtcccatactgtcctctaaatgggcagagctcaytcctctcggcttggaacgcccaccccaggacaccttgacagcttgcaaactcctattcctccttcaaaaccctacctctgttaagctcccccagactatccccttacttccccatacctgcctctgtaatctgttgcattttgtaaatacttttttattatttttcttacacactacttcatacccgactcaga

SEQ ID NO: 487596 - DNA, 586 bp, Homo sapiens
gtttacagacagtattattaccaacaataaccgatatttgtacagggcatttggatttgcttgtgtatttccctggaaatacacatttcaacatcaaactcaaagatcaagatcaaagaaatgtttaacctgcacactgttctctgtttaccttcaccccgttctcctattaccttcaccccaagctacatctgcacatggctggcacaggatggtctgaaactctcatctgaccatgtcactgctgaaaagatccagtgaccccagtgtccttgggataatggtagaaccctcactatgcagctagactccctccgcagcctcatctccccttctcctgtgacgtgtcaacacttgggtcccatactgtcctctaaatgggcagagctcactcctctcggcttggaacgcccaccccaggacaccttgacagcttgcaaactcctattcctccttcaaaaccctacctctgttaagctcccccagactatccccttacttccccatacctgcctctgtaatctgttgcattttgtaaatacttttttattatttttcttayacactacttcatacccgactcaga

SEQ ID NO: 487597 - DNA, 559 bp, Homo sapiens
tttggttggaatggagtgatgacatggtgcagcactcagccattttagggggaactcgaaaaattctgttccttaaagcaggtaaaagctgccttcaatattttctacagttctatccaaccttctcctaaccacatcattttttttttcccctttctcttaccttctctaactaggctttgggtatcattgactcttttgagattagttgttgtttatgtctggtttatatgaccaaagraaataaacaaattctattatctaattgaatcataaagtatgaatacactccatgctgaaggttgttgctcctcatttaaggacatcacactttaatggcttgaggttatttattactatttttgagaaaggaagagatgaaatatgagggggttaagtgtatttaatgtaaactaaaatgtttctgaagtgtgatagtgattatgtagtagaacaacttaagatccttgaaatccagtgtgaacaggttaaagagctctaggatggttaaaagtaaggtcacaataatagaaacaaaggttatgttcttgagacatta

SEQ ID NO: 487598 - DNA, 653 bp, Homo sapiens
atttaacttctttcttggcaactatacttgaaggtaacagggagagatgtctcttagttggcaaaacacacacttaaaacctgagcattttcccccaggatgacagcaagataccaaggatgccaaagaaggaaggagtgttaacctaatccagtaagagaaacaagattttaaaatacaacaaaaatgttccaatgggggaaaaaaggtagttcaccggttcacgactttaaaaaacgttggcagtggttgatgggcktatttcaggagatatctgacttggtaccaagaggataaagaggccgggaataatacgtttgtgcagcaaaatggttatgtgaccgattttttaaaacacagaattctgccccactgaatacatacacataccacaagtaaaatgaaatatacttttaagtgcccgttttggtgccactggccaaaattaaaactctccttccgtatgtgaggtgacttgagatttcttttttgctttaaatgcctgccttcagggtacgtgaaagtgggagaccggttggaaaactggggctaagggggctgggagcgagatggctgtgactgaatcaggaagctggatgtgagagagaaaaatcctcctccagcctcggagggggtgtctcccctaataccag

SEQ ID NO: 487599 - DNA, 489 bp, Homo sapiens
catgcccagtaagaggacacttcactgtctcatctctcctattggatccccagttcctcagggataccagcttctggctgttctttctataccctctcccaggccagatgaactcattctgtgaactgaaagccattaagatagaaaaggagatgcctctatctaatctgaggctaataggagaggaaaacttttacaaactggagggggcatgaatttctagatagcgttaagtggycatatcaaagtataacccacggcttcaatttggtctgtcaaagatggaattaaaagtaaatttgaagtttcacaacatagttctctctattatgggtgcttctgtgcattaaaatcatctgtatgaggctcactgggatgggcagagattcaatcactgctaatggcttaaggaaatggggtggtgagaattagggtcatctatcccaattggggcaagaaggagagctagaaaatgtttttcaatcttga

SEQ ID NO: 487600 - DNA, 515 bp, Homo sapiens
ctgacactacatgacccaaattctcaccctaaatcacactgctgggtctttctggcatggccagtatgtaccccaggatccagtgtggttatctcatcccctaaaccaagatactcttataagttatgactgargttaatcccagaagctgagggcaaaggccagatcaccctctgggcaagaccaaatgcttcactacacattgttagaatgaagacatggaatagccatgtggctaattgtttttccacgtgctgcctggtgcatgggccagtttctaagctgtgtgtttatgtaagatgattcatcttcactgagacgctctgatcatgtggacttttgttttgtgttttcttagattctgtatttgtctgtttggtattcattagtcacaaggccaaattaatggccatgattatttctatttcctctgcaatccaggtttcccagatgcacaaaaatcatattacaaaccctctaaccaatcatttgagtccatactcccaaacacttcc

SEQ ID NO: 487601 - DNA, 629 bp, Homo sapiens
atagaatatactatattctcgattagattatagaatgagaatatgaattgcttaatttcaaatggtttaggataattgtgtcagattacaaaaatataaaaataatttggacagggcatccttcagatattatacaccatatagataggataaaaaagggaggtgttttaaagaaagatagaggggcttaaaatatgctctctaaatttactttcataatttacccctttatttaggtatgcttattgtagtacaatattatctcttttcaaaatttctacctatcatcctttgaaaggaaattttaagagaaaatagtgactgcaacaaataaaatactgccttgcctcaaagaactatgttaaaataacaaaagtatgtgaataaaagcgtataatattttaaaatgaaacatcagtgatttggtttttttggaaatagttttaaaatggtattcatttagactgtttgaaggctttccaatgttgctagggaagaaaaataaaaatacttattttcaaaatcgtttgctagcactaaacayaagcaagcaatattttccaacagattaaagataatgtaagcatttaaaaactcctgttcttcctttcaattacatgaattgtcta

SEQ ID NO: 487602 - DNA, 456 bp, Homo sapiens
cacacatggtgctccgtgcctctggcaccgtgctcgtgcccgtctctcccatacaagcatccggctctctgccttccccagcctcctctccactagcaccggtaggaccagaagcagctttactcagctacttaattactagggacaacggttactggagacacggggaatagtttaaaagctgctggaaaacagtttctagcccttgggaatgaggcagaaatagagctatcacacagacatctccttcatgttaacactggttgactttgtgtccagaactaaccaggacagtgctagccgatcaggcctgggatgccctcatgtagaagcctcgcaggcacccscaggcccctctccctagaagtccttcttctgtgccctccttcagccaggacagagagtaacggcagatggttactgcctttctgagggtcagggtctgtatgttcatta

SEQ ID NO: 487603 - DNA, 591 bp, Homo sapiens
tgagggtcctcttgagtcccccagtatgctgtgtacatccccttcaatgcaccgaccacatcccacaaagtcacccatttctggctttcccagaagacctgccctgcrggacagcaagtaggtactgatcatccccatatgccagcctactcagtatctggcctatggttagtgaccaatacttatctgctgatgaaagaacagttatgagaattcggtattttatctctgaaatgtattgcataacttaaaaaaaaaaatccctgcatcaccttaatttcttaattaggtttaaacagggcgcctatctggatgacagtgggaaggtgctagggtttggggccaagtgaattccagtgacatgggggtagacgcggataaggggcctccaccatgcccccagatcatctcagagaaaaccaagttcctcaccttaaaaagaaaccaggtaacgagcagaggcttctggagtcccagagccctgctgctgggccccagtggagtgaacgcaaggcccccatgcctgggctgggcagtggtactcacggtgctggtgacacctggccaggagctccaggtcatcaatgtggt

SEQ ID NO: 487604 - DNA, 575 bp, Homo sapiens
tttttctctcttcacaatgtgcttgacccaatgtgttctgaatagccaggtggctgggttcctaggagagcaccgtgataatcctgcccacttcttggcaggggcactgcctaccttacccagggcatatttgatcctttcctttctgtttcctttgtttcagctgtgttttgcatagagaagagcaatgttggagaaaaggcaggagccacaagagagagctggggctttgcaaaaaaattttttttttttgagacagggtctccttctttgcccaggctggaacacagtggtgcgatcttggctcactgcagcctggacctcctgggctcaactgatcctcccacctcagcctcctaagcagctgggatcacaggagtaagccaccatgcctggctaattttagttttgttttttttttttttttttttgaagagatggggtttcaccatgttgcccaggctggtctcaaactcctgagctcaaattatctaacttctcaaagtgckgggattacaggtgtcagccaccgtgcctggcctggctttgcaatttgctggattaaaaaatgactc

SEQ ID NO: 487605 - DNA, 621 bp, Homo sapiens
ccaaggtaataaaacagaacgaggcggctgaccagcgccggctgcttctagtctccatgtcgcactttggtctctggctattccgaagaaacgtgaagtttttgcatcgaccatatattcccctagaatcgaatctgtgactatacggataccacacaaattcggttctacagggtatatatagacaacgttacaacctctgggtcccacccagagtgaggtacctaggtcgctgccggccccaatctcttcctctgagccacmaccgttcgacgcagccacccgcactttctgagacagttcaggtagcctaatgggcttggcgacaatttgaagcaatgagttccctcattcttctgccagggtcagggttaccaagcaggcgaacaaccagaatattcttcttaagaaagaaaaaaagaaagaaagaaagaaaaataatccatcccaaggatggcggctttattaaccaccctcccccaccaggatccaaataaccctcctccttaccaagtggtattttccagaaaggaacaaatgccctcagcggcagaagaaaaagaagcgagaggggaatatcctgtgtctactccttttcctactgcccgaccaagccaggtt

SEQ ID NO: 487606 - DNA, 656 bp, Homo sapiens
tgaaaagtgctgcctgggatggcaaagcattctctgaaggtttatgcaaatttctgcagcaaaaaagtgttcgcttgttgcctcaatgcttggatgttgacacatttgagcccattagaagggcatcttgtgcgcaagtcactgccagtctgtctgcatgaaacaccatgatggggggtggggatgtctagtcagtgtaagaaagaaggtggcgagtgtgtgtgatgtgtaattcccccaggyctttatttgaacacaaatctatgctctttcccagctacaaaaggaaacatttacctacatgaataatcaacactctgggcgtgtgtgtaagctatgtatacatacaaattcataatctaatatataccagctattgcaacagtctgtctgtacatgaggtatgaatttaccatggtttaggcggccagtggggccagaagttacactttgagaccagcacagaatgctgaagaaatgacaattttatctcctcttccttccttgatttccgtacccacccatacacagggctcccacctgacagtcttgccaacattatttcagggttctaaaagtatctggtgagcatccttgagcaggagacagccagttttgctaatatataaagaagtcctgagtcccttaaatccagg

SEQ ID NO: 487607 - DNA, 648 bp, Homo sapiens
tgtcagtaggacagcctcatgtcttgtcacttctttccttgccccttgcctgagatgtgcactttgcttgaataactcctsttcatcctttaagactctgggcaccgttttaaccatttaatgtaagtctacctgacatttttttcctgtcaaatgagaaaggtttgttgtctagtttttttttcctgataatgataatgatatgttgccattatggaaaatgaaaacaatccagagataaagtaaaaattacctgaaatcataccacacagattaagactttaaaattccatccatcattaaaactttgatgagcaaagctatttcattctctttccctgaattaaaaaaatcgacatataatatgcataattttttgtaacctgttttgtcatatattgggatctcttttcatgtctgtgaatggaattacacatcatcattttaaaatggttatgtagtatttcattgtaatgaagaagccaaaatttacttaagtagtattactcggatgggtatttagagagttgttatcagtcagttcaaccagagaagcagaagtaccaggatatctatttctctctcgagccacacacacacatgcatgtatgtgcatacacaaacacatggcaaagaattggctcttaa

SEQ ID NO: 487608 - DNA, 648 bp, Homo sapiens
tgtcagtaggacagcctcatgtcttgtcacttctttccttgccccttgcctgagatgtgcactttgcttgaataactcctgttcatcctttaagactctgggcaccgttttaaccatttaatgtaagtctacctgacatttttttcctgtcaaatgagaaaggtttgttgtctagtttttttttcctgataatgataatgatatgttgccattatggaaaatgaaaacaatccagagataaagtaaaaattacctgaaatcataccacacagattaagactttaaaattccatccatcattaaaactttgatgagcaaagctatttcattctctttccctgaattaaaaaaatcgacatataatatgcataattttttgtaacctgttttgtcatatattgggatctcttttcatgtctgtgaatggaattacacatcatcattttaaaatggttatgtagtatttcattgtaatgaagaagccaaaatttacttaagtagtattactcggatgggtatttagagarttgttatcagtcagttcaaccagagaagcagaagtaccaggatatctatttctctctcgagccacacacacacatgcatgtatgtgcatacacaaacacatggcaaagaattggctcttaa

SEQ ID NO: 487609 - DNA, 440 bp, Homo sapiens
gcaattttaattggcctcacctctggtaggagctgcccagcagatgtgagggtagaagggcccccgaccagggagaccacaccattgcagtccacagcgctatgcatcttcccattcatgggcaggatggggagcaccctggaggcacggctggcctggctgacattgctgtggcgccgttctccatgtctgtgcggcacgaacagagagtctcttcggctgtcattgtcctcaaaggtgctgtgctcatcatcagcaaagtcattctcagagccaatgtcctttgctcgacctctgaagctgaaaaggctcgccctactgttgcgtcttggagagaaaagggagccacggatgctcagtaaggactatgaataacaagaraagaaacaaaaatgagatgaagagagttaagagctggcattctgaaaaacagaatttga

SEQ ID NO: 487610 - DNA, 260 bp, Homo sapiens
ctcaggggaggctgtgatgggaggcacagcctaagagtaaatgacaaatgtgcctaacgtgaggggacagcgtgacacgcagggycagattctggtctgggccctcctgcgaacttggtgtgactctggcttgcccactcactcctggggcctctgtgtgaccttctgaaaagggaggaggctggagtccctgctccccaagggccttgctacctctgaaatgctgcctccaaccctggggggtttgcctgtgaacatcc

SEQ ID NO: 487611 - DNA, 260 bp, Homo sapiens
ctcaggggaggctgtgatgggaggcacagcctaagagtaaatgacaaatgtgcctaacgtgaggggacagcgtgacacgcagggtcagattctggtcygggccctcctgcgaacttggtgtgactctggcttgcccactcactcctggggcctctgtgtgaccttctgaaaagggaggaggctggagtccctgctccccaagggccttgctacctctgaaatgctgcctccaaccctggggggtttgcctgtgaacatcc

SEQ ID NO: 487612 - DNA, 409 bp, Homo sapiens
ggcagtgcctacctgggccctccttcctgggcagtgtggtttataaaaggagggctattttggaattggaggacttgagtttgagttccagctccactactagcctcagcgtccctctctgtgaaatggggacaatacctcccagggtgacggtgaagatgaaactgggcaatgggcagkaccaagaaattctagtttttaacaagctccttcatgactatgtaaaggtcaatcattgatagaattcagtcattcattcagtgaacatgattgcaggcctgtcacgtgccagacccggcgctaggtgcaaaacagaacacattccgtgtgccaccctccgtgggaggattctgaggagttgtactgtgtctgcggcaggttgcggacaaacggttccgcgtggtctatg

SEQ ID NO: 487613 - DNA, 598 bp, Homo sapiens
tggatcaactactaaatcaatgtacagaatatacatttctgaaatgaaagctcctctattatggaaacccctgtgcacatttcacaatgtagaatattttaattgttcaatgatataaagaatttaagtgaatcatttaaaataatgaataataaaatgtgtttgattattttctaaaaaaaaaatcctttataatatgtctgcctccatccacttattagaataaacgaaattaatctaagcccaattggaaaagaaaaaaaaattactcattatatgagcattcatcacccagctcccagggagtttatggtctcacgcagcatatagcaaaacacagcttttggccattagagagcttccccartggaggaaaagataaacctcccatatatcatttcaacagactctttgtaggtcacagcctgcttggttaaaaaaataaggaaaatatgttaggaaagagaaaaatgtgtgggaaatcgcagaatattatttaaagcagaagagcagcagattaattttgaacagttttgactgaattatttctccatttatctgtagttagaaatgttaatcagcttttaaaaattaaaca

SEQ ID NO: 487614 - DNA, 553 bp, Homo sapiens
acactaatctgtgatatttgacttttcaaataatttaatgcattatatacaaatgatttgaatttcaaatgtgagtacatgataaaatccaggtgtttaatcttttcagagaaaaagaacaaatcaatagttctctcagaaacttaaatgagagaaatgagtgtaacaaaaaggatttaagtcacatgatttttgaaaattgctratttctttatcattgtgtttgagaatgacatgaatcctttagcagctaaaatttcaaagaaatagtggtgctgattttataattttgggatttattttcttgttctatcaaataattttatcatatgaaaaggagtgacagttacagattctaaaggcacaaatcaaaaatttaacatcagagaaaaatacaaagttattttaaacctgagcactcattaaaaaaaccttaaatttaatcttaggagatttagtagcattacatcataacaatttattaaataaccttagctacccaggtatctgggaactttttaaaaaatggctctaacttttgataaccacttta

SEQ ID NO: 487615 - DNA, 553 bp, Homo sapiens
acactaatctgtgatatttgacttttcaaataatttaatgcattatatacaaatgatttgaatttcaaatgtgagtacatgataaaatccaggtgtttaatcttttcagagaaaaagaacaaatcaatagttctctcagaaacttaaatgagagaaatgagtgtaacaaaaaggatttaagtcacatgatttttgaaaattgctgatttctttatcattgtgtttgagaatgacatgaatcctttagcagctaaaatttcaaagaaatagtggtgctgattttataattttgggatttattttcttgttctatcaaataattttatcatatgaaaaggagtgasagttacagattctaaaggcacaaatcaaaaatttaacatcagagaaaaatacaaagttattttaaacctgagcactcattaaaaaaaccttaaatttaatcttaggagatttagtagcattacatcataacaatttattaaataaccttagctacccaggtatctgggaactttttaaaaaatggctctaacttttgataaccacttta

SEQ ID NO: 487616 - DNA, 553 bp, Homo sapiens
acactaatctgtgatatttgacttttcaaataatttaatgcattatatacaaatgatttgaatttcaaatgtgagtacatgataaaatccaggtgtttaatcttttcagagaaaaagaacaaatcaatagttctctcagaaacttaaatgagagaaatgagtgtaacaaaaaggatttaagtcacatgatttttgaaaattgctgatttctttatcattgtgtttgagaatgacatgaatcctttagcagctaaaatttcaaagaaatagtggtgctgattttataattttgggatttattttcttgttctatcaaataattttatcatatgaaaaggagtgacagttacagattctaaaggcacaaatcaaaaatttaacatcagagaaaaatacaaagttattttaaacctgagcactcattaaaaaaaccttaaatttaatcttaggagatttagtagcattacrtcataacaatttattaaataaccttagctacccaggtatctgggaactttttaaaaaatggctctaacttttgataaccacttta

SEQ ID NO: 487617 - DNA, 586 bp, Homo sapiens
aacccgagctctttttgaccttagggttttcccacatactatttccttttcctggaactttctcctaggaggtaacatgaccagtttctcatccttcaggtctagaaagagctcccaaaactgcattatgggaatttttgagctttatggaaaggattcttkctttcattcctggaattatgcaaaataagatcaatgatcttcagtggcaaaatcatggacacaatggatcctatctggcagtgagatacttaacaatgatatcaaatttctctagaaactgacactagaactttcagccagattagtcaatgctcttgcttaagctaatttgtatttactgttacttgtaaccgaaagagtcctgagtgatatacctgtttaaataacaaacagctaataggagcaaacaactaaccttttgcagaaaccattttaattttcttatttgcaaaaaacatttaagcatggtgttccagaaagattatggacacagatacttctgtaatgttgaatgcttgtacaaaatatgtggccttaagaaaattgctagaacctactggcttttagatttctcacttgaaaa

SEQ ID NO: 487618 - DNA, 596 bp, Homo sapiens
tctgttaaaaacggaccaatcagcactccgtaaaatggaccaaacagcacgacatgggcggggccaaataagggaataaaagctggccaccggagccagcaggggcaacaggctggagtccccttccgggctgtgggagctttgttcttttgctcttcacaataaatcttactgctgctcactctttgggtctgcactaggtttatgagctgtaacactcactgtgagggtctgcagcttcattcctgaagtcagtgagacsgtaaacccccgggaggaacaaacaactctggacgcagcacctttaagagctataagactcactgcaaaggtctgcagcttcactcctgaagtcagcgagaccatgaacccaccagaaggaagaaactccggacacatctgaacatctgaaggaacaaactctggacacacgatctttaagaactgtaacactcactgcgagggtccgcagcttcattcttgaagtcagcgagaccaagaacccaccggaaggaataaattccagacacaagaccagagttgacaacccatctccaccataaaaaatatattgattttgagaaaatcacttaacc

SEQ ID NO: 487619 - DNA, 596 bp, Homo sapiens
tctgttaaaaacggaccaatcagcactccgtaaaatggaccaaacagcacgacatgggcggggccaaataagggaataaaagctggccaccggagccagcaggggcaacaggctggagtccccttccgggctgtgggagctttgttcttttgctcttcacaataaatcttactgctgctcactctttgggtctgcactaggtttatgagctgtaacactcactgtgagggtctgcagcttcattcctgaagtcagtgagaccgtaaacccccgggaggaacaaacaactctggacgcagcacctttaagagctataagactcactgcaraggtctgcagcttcactcctgaagtcagcgagaccatgaacccaccagaaggaagaaactccggacacatctgaacatctgaaggaacaaactctggacacacgatctttaagaactgtaacactcactgcgagggtccgcagcttcattcttgaagtcagcgagaccaagaacccaccggaaggaataaattccagacacaagaccagagttgacaacccatctccaccataaaaaatatattgattttgagaaaatcacttaacc

SEQ ID NO: 487620 - DNA, 550 bp, Homo sapiens
tctcactatattgtaatatccatggggcttaactgtgtctgtattcctacacgatgtctagcacaaggaataataaatctttattacaatgacttgaatgggaagaaatgtaaagtgggcatgtcctgtattgcttgtgggataagtggagtcatcatctgtttgttcatacaaagacttgtacatgaatgttcatgtgagccttattcataatcgccaaaaactggaaataactcaaatgtctacatcaatgcaattgaatactactcagcrataaaaaggaaagaactactggcgtatgcaacaacatagattaatctcaaaggcatcatgctaagtaaaaagtccagacataaaaaactgtatactgttagattctatttataagaaattctagaaaatgaaaaactgtagtgacagaaagcagactagtggctgtatgggacaacagatggcaggaagtgggttgaaacagtgggaacattatttgttcccggggacacagggaagtaatagaaatgaactaatcctgattgtggtgaaatttgca

SEQ ID NO: 487621 - DNA, 576 bp, Homo sapiens
ttctgtatgttaaatacatccattctatcaagtgttccataagaggagatcattctagtgcccttaccatcttggtgctccttattgaatatccctgagttggtmataattctcactgaaggtgaaagctagaagtaaacacagtactcccagtatgattcaatctgaatggagtaaaataagagaatgtagtgcattatggttccctgtgtgggggtagagcagatggcaagaagactaggcctggagaaaagcccactgtaaaaggatggggtgatactgaatcagaaaagaagacgaaacaatgagtttaaggaggataagaactgagaacttaaacagatctgctggcttagggagagtcattgggaagaaatgcaggagctatggaaatagtaggtaatgagccagcaggagggactacgtgttgtcctctctggttacaaaaggaaagggaaaaggacagtggctggtgggaggtggaacagacagaaggatcaagtaagaggttgtttacatgctaggaaagtgaggatggtgcataaggcagggaaaggattgtcaatagagaggaaa

SEQ ID NO: 487622 - DNA, 552 bp, Homo sapiens
tgtgctctaagttcaggctcggtgtgtggggcaggcattccccaaagatgagaggtcccacctgggaatcttggctttaccccctgagagtccaggaagcctggggtgctcccaaggatgagatagtgaaggggaggcagagttcaaagcccaccctcagggtgtcagaacaaggacctcctctcttagagcctctgtgtggcatcaaaagaaaggaatttcaasagaccctaagaagtcggacaccttgccatcagtcagtccaccaagagctctggttggcagcagctctttaggtctgagcacctgttcctgggatttaggcacaaccagaatttccttgtcttgttttcttttctgcatcctttgattttccccaactaaatataaattcttttagactatggcttctagattttaccctttaacataattccttaaatataatatcctgatctctctcccttctcatgtcctccacaagccaacccacctccattagcaggcccaccacccaagataattggactggccccagaagaaaatgaagac

SEQ ID NO: 487623 - DNA, 165 bp, Homo sapiens
gaatttaaacttctaagaaattactgctttgggccctatccatatgctcagattgggaacgggtcagtgggtgggatgatttcattctcttctgcctttagtggtatttcacytgggaagctgagaaacatcattttactgtatgtaacaacatacttttaaaga

SEQ ID NO: 487624 - DNA, 564 bp, Homo sapiens
agtgattactcatgcaagatatagcaagggccacaagatctaatggtttcctgatacctattgatttttttcccaaaagcttaatagttttccaatttgactcaaataggatttgtgagtaacaggggctgaatcaatgtcygttcttttcagggaaattactttaccatgacaattatttaacttagaactggagagtgtcagtctccaaaacgggaaacaactgaattgccaataagaattttgttcactttcttggctaaaacatgattttaattaatgagggggaaaattaaatctactgtatcactactccaaacaataagtcatttaaaaaagcatgaattttttcactcagtaaaatatctaacatacataaatcattttgtaatttttaaaaattcattgatttttattccaataaatagtttacaaatcctactgttaatatttgcctcttaagttgaaatgtaagagtatattaatgctttattctaaaactggtatttatctttgatataatacttgccagactacatgagaaagatctatttaaaatttgga

SEQ ID NO: 487625 - DNA, 564 bp, Homo sapiens
agtgattactcatgcaagatatagcaagggccacaagatctaatggtttcctgatacctattgatttttttcccaaaagcttaatagttttccaatttgactcaaataggatttgtgagtaacaggggctgaatcaatgtccgttcttttcagggaaattactttaccatgacaattatttaacttagaactggagagtgtcagtctccaaaacgggaaacaactgaattgccaataagaattttgttcactttcttggctaaaacatgattttaattaatgagggggraaattaaatctactgtatcactactccaaacaataagtcatttaaaaaagcatgaattttttcactcagtaaaatatctaacatacataaatcattttgtaatttttaaaaattcattgatttttattccaataaatagtttacaaatcctactgttaatatttgcctcttaagttgaaatgtaagagtatattaatgctttattctaaaactggtatttatctttgatataatacttgccagactacatgagaaagatctatttaaaatttgga

SEQ ID NO: 487626 - DNA, 626 bp, Homo sapiens
atatcattctatatttttacttgggagaaatagaaatgttgctaattccatcttactgacaatacctaaattattgtttgttatagaacataatgatttaaatatacaaaacactaaactgtttgagattttttacattttatgcgtgcagaatttacattttatgtgtgcagagacaaaaattgttataagattacaagttaatgtgcaagatgatttccgattcatgagtttcaggttttgatagcatatccttatccactagattagtcttttaaaaatgtgtatgatagggaaaaaatcgaggscatgaaattctgagacttatgggaactaaacttaaatgttcgttgttagattttttttttttttttttttgctgcgtatgaagttctaggcagtcattgtccaacaacattaaatactgaacatatgggaaaagcatatgatttttcgaaatgtttttctaaagtaatctcattctacatacacttaagagcagttataatgctttagtgacacttgaagtagctatttaatgtgatctcaccactatagggaaggccgttgcatgacttttttgtgtgtgcttaactgctaaacaggagaatcttttcctgagcaac

SEQ ID NO: 487627 - DNA, 579 bp, Homo sapiens
agttcctacaagttctttctctttcctaaacttgctgttactaatttacccctcactcttcttcaaggcaaagcatctgcaaggttttcagtcctttccccctcccgtcctgtccccatcagtgttgaaatgtatgctacagttattatggttgtaatttgttatgccatgttgatcttcttgtgcttttcatatcagaacaatgcatttttaacattctgactttctttttctctcaattggtaactgactatatagaaaatttatatttatggatactatttcttttttaataagttcaagggaaaacattgataaaggaaaatttatcctttcaactttctttaggtgccagcattattttcatattaggaagcaggagaaagttaaggaactctragcaatactagaatggttatatatatttaagtttgtattaaacctgttggaatggtaaagaaatttactgacatatttaaccatacaaaatagtgttgctaaaagactagtttttctctttattctgtgcatatgtatatatatgaatgtgtgggttttttttaagaaattttaaaaaaa

SEQ ID NO: 487628 - DNA, 639 bp, Homo sapiens
ctgctgtgattggctgagactcactacttgttacaagagtaggttacatatcaagttttacatatcaagttgaaatatagttttttatgtactgggaaacctttagggtaaacttaaaatatgtaaggaggcagctttaggccacaatgaatttaacaattcctccttttggtcaacctgtcaattttgagaggatgattaattttgaggttgcccaaaactttaggcattgacatcactttttatcatcataaatagagttatttggtctctaatsccattggaaaatagcagaacactggattttgtaaggtgggaacaaggaaacagtatagaaaaaaaaaactgattggttaacatcagattacttttttatttttttgtcacccaggatggagtgcagtggcacaatcttggctcactgcaacctcacctttcgggttcaagcaattcttctgcctcaacctcccgagtagctgggactacaggcatgtgccaccacacccagctaatttttgtatttttagtatagatggggttttgccacgttggccaagctgatctcaagctcctgacctcaggtgatccacccgccctggctttccaaagtgctgggattacaggcatgagccactgtgt

SEQ ID NO: 487629 - DNA, 639 bp, Homo sapiens
ctgctgtgattggctgagactcactacttgttacaagagtaggttacatatcaagttttacatatcaagttgaaatatagttttttatgtactgggaaacctttagggtaaacttaaaatatgtaaggaggcagctttaggccacaatgaatttaacaattcctccttttggtcaacctgtcaattttgagaggatgattaattttgaggttgcccaaaactttaggcattgacatcactttttatcatcataaatagagttatttggtctctaatgccattggaaaatagcagaacactggattttgtaaggtgggaacaaggaaacagtatagaaaaaaaaaactgattggttaacatcagattacttttttatttttttgtcacccaggatggagtgcagtggcacaatcttggctcactkcaacctcacctttcgggttcaagcaattcttctgcctcaacctcccgagtagctgggactacaggcatgtgccaccacacccagctaatttttgtatttttagtatagatggggttttgccacgttggccaagctgatctcaagctcctgacctcaggtgatccacccgccctggctttccaaagtgctgggattacaggcatgagccactgtgt

SEQ ID NO: 487630 - DNA, 639 bp, Homo sapiens
ctgctgtgattggctgagactcactacttgttacaagagtaggttacatatcaagttttacatatcaagttgaaatatagttttttatgtactgggaaacctttagggtaaacttaaaatatgtaaggaggcagctttaggccacaatgaatttaacaattcctccttttggtcaacctgtcaattttgagaggatgattaattttgaggttgcccaaaactttaggcattgacatcactttttatcatcataaatagagttatttggtctctaatgccattggaaaatagcagaacactggattttgtaaggtgggaacaaggaaacagtatagaaaaaaaaaactgattggttaacatcagattacttttttatttttttgtcacccaggatggagtgcagtggcacaatcttggctcactgcaacctcacctttcgggttcaagcaattcttctgcctcaacctcccgagtagctgggactacaggcrtgtgccaccacacccagctaatttttgtatttttagtatagatggggttttgccacgttggccaagctgatctcaagctcctgacctcaggtgatccacccgccctggctttccaaagtgctgggattacaggcatgagccactgtgt

SEQ ID NO: 487631 - DNA, 679 bp, Homo sapiens
ccctcactaggagagagggttcactgtcctgatctttcccaagttctctcctttaygtgttctccagaaatccagactccagagcacccagggacaggctggtgggcagtgcaactcagaacattactcagtggatatggtattggtcttcttactttagagacaattgatccttaggtaatttcaagtttatcttaatccatgctcctataattggaggaagaaacaagtaacttttttttgaagtaatcagatccggcatcactagtcagcgcttcctgctgataaaccctggggaacatacccaatgacagaaaaggaggtataatatagagatccccaaagcaaaaataagatgcagctcatataatctctgggcattattgaggtctataggtttgcataaatgtgcaactgtaagtggtacacacattaaggacttatagcaccatctttgtgcacctgcagtgaattgcttgaccttacactgataataagaatggtttaaggttattatagaatacttacaaatatatttagcattatcttgatatttttcctttttttttaagaaggaacaattacacactcacagaaatgtaactataccacaaagtacccccctccctttcagagtatttttaagacctgctgattccacactctaaaaactttactt

SEQ ID NO: 487632 - DNA, 679 bp, Homo sapiens
ccctcactaggagagagggttcactgtcctgatctttcccaagttctctcctttatgtgttctccagaaatccagactccagagcacccagggacaggctggtgggcagtgcarctcagaacattactcagtggatatggtattggtcttcttactttagagacaattgatccttaggtaatttcaagtttatcttaatccatgctcctataattggaggaagaaacaagtaacttttttttgaagtaatcagatccggcatcactagtcagcgcttcctgctgataaaccctggggaacatacccaatgacagaaaaggaggtataatatagagatccccaaagcaaaaataagatgcagctcatataatctctgggcattattgaggtctataggtttgcataaatgtgcaactgtaagtggtacacacattaaggacttatagcaccatctttgtgcacctgcagtgaattgcttgaccttacactgataataagaatggtttaaggttattatagaatacttacaaatatatttagcattatcttgatatttttcctttttttttaagaaggaacaattacacactcacagaaatgtaactataccacaaagtacccccctccctttcagagtatttttaagacctgctgattccacactctaaaaactttactt

SEQ ID NO: 487633 - DNA, 490 bp, Homo sapiens
cacacattaaggacttatagcaccatctttgtgcacctgcagtgaattgcttgaccttacactgataataagaatggtttaaggttattatagaatacttacaaatatatttagcattatcttgatatttttcctttttttttaagaaggaacaattacacactcacagaaatgtaactataccacaaagtacccccctccctttcagagtatttttaagacctgctgattccacactctaaaaactttactttgagtttcctacagagaacaatttctcccaaataatccccwtacgccaatggaatacattactccctcaagtactcagcagtatttcaaatttcgacaattatcaaaaaatattctttgtttcaaattgacccccagcaagaaacagattaaagacaaatctgtgttgccctggtccgacctgagatcctgaggacactgtccttgtgctgagttactgagatgagccagccctgca

SEQ ID NO: 487634 - DNA, 630 bp, Homo sapiens
tgtaaaatgagtcaatcattccctgttagagaatggtgaaacaagcttataaaacttaccaaaagtgagttttctttagtaaaaacagagaagcctgaattttctataatgagtctggcaactaatttttaagaactttgcacattggtcagggatgaaaggaaaagataggctgggagtgatggctcacgcctgtaatcccagcactttgggaagctgaggtgggtgactgcctgagctcaggaattctagactagcctgggcaacatggtgaaaccccatctctactaaaatacaaaaaattggccaggcatggcagtgcatgcctgtagtcccagctactcgggaggctgaggtgggagaatcgcttgaacctaggaggcagaggttgcagtgagcagagatggcaccactgaattctgggcctgggtgacagagcaagactctgtcttaaaaaaaaaaaaaaaraaagaaagaaagaacaagacagaccagtatgtcatcatgtttgcttcttctgattctcttgcatgagttttgtgaaaggagaaaagaaaggtcttcttttacatacaagtctctacttcaggtggatttagaagtgagaggagagttgcatatgtttgacag

SEQ ID NO: 487635 - DNA, 579 bp, Homo sapiens
ctgctagtgaagtgcctcaacctcctggttgaagtagttgctacttctgctcttagtagcctttgtaaataaccctgtcacagcacttatctcagcctgttgtcattgttacctgtcagtttccatcactagatggactgtccacaataacagaggccatctcttattgatctttgtgtccacagcattcagcataatatatattttgtatgtagctgttactataatgcaggaatttaaccttttagcaggataattctttgtggtggggggctgtcctgtgccttgcagcatccccgtccattacccactagatgccactarcatgccactataccccttcccccagttgtgacaaccaaaatgtctccagatgttgccaaaggtcccatgacaggaggagtaccactctcagttaaccaattctctgatgtgcttaatgaattaagtttaaaaatgtttcataaagtatagttttattagtatgtaaagttttattattattacagtgttcttggcagttccaaaacattttgaactagaaacagtgaatagagtaatttggtgattgatgcccag

SEQ ID NO: 487636 - DNA, 561 bp, Homo sapiens
tgaatatactttgagtttgccttctgccttctcttgggagggattcctctcaagtgcctgcgtgtgtttccagttgtttgccactttattcaccatgcatgaacctgcctgcttttactctaatccaaacaatggcaaaaaaaaaggtgttgactgatcagaagtagtaccaatattgggaaaaatactcttagaaatggtcatttaaaaactgatgaaatatatattgcacatttaagagttgtctactgatgttttggttcccaaatctcaccctttccttccttaccactaggttcctggtcaaaggtgatataacaatgccattaaactattggtttttagaaatacctgggaaaatttktgtcaccaccaacccaggctctggtgaaggttgggctggagaaggtggtttcaaccaacctgcatgtcctccacgcacgggtaagggtgaagcatcaggtgacagcactaagtgatgatactgaacaccctgaagggtgtttatggtctttctcctagattctggaatcccaggtgtccatggaatacagccatgcc

SEQ ID NO: 487637 - DNA, 481 bp, Homo sapiens
tatactttactgtattatttcttgtagttttattgttagtctggttatttagaagctttagtcctccaatttgttctttttsaagattgtcttagctattcttggccttttaagttccatatacatttcagaatcaacttgcaattctccaacaatcctgcaagtagattgatgagattttattggatctatatttgaggaaaattgctatttgtacctctcaatctatgaatggttctttgtttatttggtcctttgtgtaggctttattaatgtgtcaccttggctaggttgtaatgcccagttattcaatcaaatgctaatctagttattgctatgaaagaattttgcagatgtagttaaagccctgatcggttgacagtaagtaagagaggctgtcctgaataatctgggcaggtttgatggaatctgttagaagtctttaaaagcaaggccgaggtttccccaggagagggtagac

SEQ ID NO: 487638 - DNA, 410 bp, Homo sapiens
tggtgtcttctgacagataacgcaaagggaaacagaatcgctgccatgtttctgacgtggaaacatgatcacatattttttactttttggaggaaatatcatgaggccaagctcactcaccaatgtgcaaatttttagttatctcaagaaagtaagccaaaataagaatattgaggctttgctatatttgctaacattattctagtatcccaaatcgcaggggctggtagcccttagtgactaacaaatgatataatggcaaaagcaatacagcaratccaatttctcttttacagttttaatatttaactcttaagtttttccaaaataagcgcgatggactgagtatctgcatctcccaagattcctttgttgaaatcctaatccccaatttgatggtattaggaagt

SEQ ID NO: 487639 - DNA, 410 bp, Homo sapiens
tggtgtcttctgacagataacgcaaagggaaacagaatcgctgccatgtttctgacgtggaaacatgatcacatattttttactttttggaggaaatatcatgaggccaagctcactcaccaatgtgcaaatttttagttatctcaagaaagtaagccaaaataagaatattgaggctttgctatatttgctaacattattctagtatcccaaatcgcaggggctggtagcccttagtgactaacaaatgatataatggcaaaagcaatacagcaaatccaatttctcttttacagttttaatatttaactcttaagtttttccaaaataagygcgatggactgagtatctgcatctcccaagattcctttgttgaaatcctaatccccaatttgatggtattaggaagt

SEQ ID NO: 487640 - DNA, 326 bp, Homo sapiens
cccagagagctctcccatcctctttccgcttgtgagatataaggaggagttagttgtctgcaacgtggaaaaggccctcaccagaacccaaccctgccagcaccctgtcctaaacttccaacytccagaactgtgagaaataaattcctgttgtttataagccactcaatctatgatacttcgtgatggcagcacaaagcacctaagacaatatgtgacagtaacctgaccttcattatgtaaaaattgccatcattattaggacccttttgcaagacatacaaaaagcctattttcgccttttctaaaactcagtcttagccttc

SEQ ID NO: 487641 - DNA, 326 bp, Homo sapiens
cccagagagctctcccatcctctttccgcttgtgagatataaggaggagttagttgtctgcaacgtggaaaaggccctcaccagaacccaaccctgccagcaccctgtcctaaacttccaacctccagaactgtgagaaataaattcctgttgtttataagccactcaatctatgatacttcgtgatggcagcacaaagcacctaagacaatatgtgacagtaacytgaccttcattatgtaaaaattgccatcattattaggacccttttgcaagacatacaaaaagcctattttcgccttttctaaaactcagtcttagccttc

SEQ ID NO: 487642 - DNA, 326 bp, Homo sapiens
cccagagagctctcccatcctctttccgcttgtgagatataaggaggagttagttgtctgcaacgtggaaaaggccctcaccagaacccaaccctgccagcaccctgtcctaaacttccaacctccagaactgtgagaaataaattcctgttgtttataagccactcaatctatgatacttcgtgatggcagcacaaagcacctaagacaatatgtgacagtaacctgacyttcattatgtaaaaattgccatcattattaggacccttttgcaagacatacaaaaagcctattttcgccttttctaaaactcagtcttagccttc

SEQ ID NO: 487643 - DNA, 462 bp, Homo sapiens
taatgtgcaatttatcccaatgacagatgcattttaaaacatggtagcatgaagaaaatgaacatgtactggcaatgctaggttactctgctggattccccacacacatttatagaccaatggttttgttggtggaattcctgaaatccttaaaatgtgctcatcgcctatgtggtaacttggaccagaatacagcaattccttgggtgagtttcctgagtttctttcacattctgcatgtgctgagcatcttctatttccaagaggctcacctaaatggactaaacagacagactccccttgttggacttctggttgggttgggccaaygtggagcccccacaggtcagacggaggcagagggtgcagttaggactactacaggtgcctctcatttaatgaaggattgtgttcgctgctttcaaatcttgtgggcaccacagtggggaccacttcagacca

SEQ ID NO: 487644 - DNA, 548 bp, Homo sapiens
accaaagatatttattttatatatatgctaaagctttatccttgcaggtgaggcatcatacatggtatggatagttwtataaaataccctgaaatacatactttagtaagcacgttagcacttgcaatttcccaggtttgttttcatcaggagttaatgatgtatggcacttctagtaagtaagtgaatgtttaaattgctctgagttattttaatcattgctcagcttaaccatttaagttatcaaagatctttatatcataaatcataaatgtgcaatatcataaatgctacacattaaaaattaacatgatttatgtaactaaaagctgcaatctaatgtgataattttcagtaagatgacagcagtaattatgctgaaaaatagtcgttcctgtagtttgagccatttccacctggggatttctcagtcatagaccagatctgggcaacagtgattaacgtaattgttattaattagagattttgatacatctagttgtgtttagatgtcagtgccttgaagagaagggtttggcatattaacc

SEQ ID NO: 487645 - DNA, 578 bp, Homo sapiens
taggactatgctgggctaggcctgtactggtgctggatgggggaaggagtggartccccaacattagcagtgccacctggtgtcttgcaaatgtgaacacctacacatagaagaagagagattgtgagtttgaatgtaccaaagtgtttgggtgactgtgagcaaatgaagtgagcaagaaaggaagagtgaaagagaagaggagggtgaccacatgaaaaagggtgtgtgcatgagggagaagaaaaatacatgtgtgcacatgtgcacaggggtggggaaggcagtggggtagacactcactgcccccacagtaccggggagctgggcatgactgagagcctgagaagaggacagagaatggagagggagaaaaggagtctgcctagtcattttcaagagtgtgcgtgaagaaggggtacagtagtgggagaaagagaaagacacctaaggagggaatgagagagcaagcacatcaccaggaagcatgcagagtggaagccgcgggatggagggatggagctgagagaggtgagtgtgcaagaggaaggcatgcaggtgtgtgagcctggaggtgt

SEQ ID NO: 487646 - DNA, 505 bp, Homo sapiens
ttataaatattttagatactacagaygaaacacctagcatagtgttcagcatttagtaagtacccaataaatggcagattataatgctaacacataattcttgtcttcaaaaggctccagtctcgtggctaaaacagaccagtaaagacatgtttacaatacagtgcattaagcaataaatctaagtgccaatggagtctaagagggtcacgagagggtatctacctttgtccatggaggttatagttcctgaccacctgagcagtcagttcagatcctgggagcaaggtgaaaaaggaaaagctactgctaaaagaaggatcacgtgggaaggcaagagttgctactattgataagcagggggttgatttctcaaggggcaaggtctctgcccacacacagttgacaggtgatgccaaatatggaacggtgggaagggacagacccaggggttacctggcttctgtgccttggttctgcagagcacatacttggaccttgggca

SEQ ID NO: 487647 - DNA, 427 bp, Homo sapiens
cagagttgtagcgctggaatgtgcctagggtcctcggggttccgtgtaagctgaactgtaagacgtgggtgttgggtgggggccttgggtcgcctcacgtcctgccccgccccgcccgcgcagtccaggacctgagcgccaagctcaagccctacgagaagaagcgactcgccacggccgcgcttcgtgacgcccctcaagccacacacggtgtccgcggccaggactgcaccatgacctgcgccttccttgggaacccgcggcccacagtgaccctctacaagggcgacgtcaacatcacggccaactccaagttctggtacaactccaccagcggcgtgtgcaccctcgtcatccccacctgcrcgctcaaggacagcggcgattacagcgtgctggtggagaacgagctgggcaaggaccgcag

SEQ ID NO: 487648 - DNA, 596 bp, Homo sapiens
acagtgtgagcgtttgctcggctggctctgctgcagcaggtggaggtcacttaaaacatttcccagtacaacggaagtttaggtgcttgttgcaggggctgtgtgtgtgtgtgtgtgtgtgtgtgtgtgtgtgtgtgtgtctagtaataagcagaaaggtcgatttttcacttctagacggatggggaacctctctgcatcctcaccttgaggttgggagccatcagggcttgggatagggaaaggaatatggtcacaattccagcttttttgtttactgtttaaaccctattgtaatacatgagtgttatacactcccaaagccccgtcttctctgaatgggaggcaggaagccaaggaaagggttgggagagggccgaggtaacacaaatcaaataactctcctgaccactgcacagggtgcctcaacctcattgccttttgctccgcttctggtctgttgggaggaatcyccctgaaggcctggcaagctctcgctgtccctgcccatttttctggtcttgcgagattgtaggagagcgaggcagggtggaggagggaagctgaggccgtggtcattgtgtcagcctctcctg

SEQ ID NO: 487649 - DNA, 612 bp, Homo sapiens
gctcttaaaaactgcataagtcaatcttagtaacaagtacacaaaagaaaccctaaaggttctatttactagtttcttatcctactatgtagagtggagagaatgttcagggtttttcactatattcactgtttagtgaacgcaccactgacagctggtctgtgaacactcttatgaaaatgacatttgcgaccccatgtcattttttttttttttgagacggagtctggctctgttgcccaggctggagtgcaatggcacaatcttggctcactgtatcttctgcctcccacattcaagygattctcctgcctcagcctcccgagtagctgggatcacaggtgtgcaccacaatgccaggctactttttttgtatttttagtagagattgtgttttgccatgttggccaggctggtcttgaactcctgacctcaagtgatccacattcctcagcctcccaaagtgctgggattacaggagtgagccactgtgcccagctccatgtcatcttaataggctggaatcaatcactgggtttacttctctgaaaattatataagcctacagatatttggataatgacagataactgatgagtgtaccagcatatt

SEQ ID NO: 487650 - DNA, 443 bp, Homo sapiens
tgtcatcctcttgaactttacctagaggtacaggcattgatgaccaccggcctttttccacttaatctttggttagaggcactggccctacataaaagtccgcttcccctaccttttcccttccttcttcacacatccttcggtggtcatcctgtgmtcaactggcaccttcatccccagtactttgcatgttctgttgaatttggggtcagtatcaacatttctgttaattcttttttggctcttccatgtgtttttcatgattcctatttattatatttaattcctgccttgtgatggttctattcacaaggaacatcttttctacaaactctatgaaggcattttgctgtccagtattattgccaggtgtttgataaggtagatgagaaagtggtttaggtctttgattctcaggcccaccaggaaggtcaagaagagag

SEQ ID NO: 487651 - DNA, 611 bp, Homo sapiens
aacactctgccaaatatttatgtgtaagaattgagttattcattttactacgacttgatatcttgcagttcctgttccttctttgcttggrtatcttcacaagcctgcattgtgttggcatccaagtaagctctgttagaagacagtatcatgagaatgtggatctagaaaagaagggtgagtaggatgtctagagagcatgtgagaaggcaaagcatcatgctagttaggttagatggagttgacgttgaaggggaaaagtgttattctgtattaatatttgctctattgcagagctgtgaaattctgaaaacatgctctactacttggcttcacattttgaaactgaagaaaagtaagtacacaaacattgcaaagtgtttctattgatgactaaatgtctgtatactcattagtctagatgagtcacatatataacacatctcactacaattggggcttgtctatataaatagatattcataaaatttgcctcagatgtatattgtgataatgctactgaggaatttatgtttgtgactgttatattatctttaaaattttttaatattttgatgtttcatattttgtctgttgccttgcatctatag

SEQ ID NO: 487652 - DNA, 546 bp, Homo sapiens
gctggggttgggggtggccttggagtggggtctgtgctgctttattgggacctgggctgcactgtccatgggctaagcagaaactactcaagttcctggggagtcaaagtagaaatacttaagtacataatggatgaagagtagaaaatctacagtggttttgaaagccctcatgccacgacgtcaaatggatatcttcagagtcataaattaatgataaaaagagaacatgcatgaacatcarcaacagtgaaagccagggagagtggcccaggtcattttgctgagaagaaatgcattgagtttaatttgagagacgtcccttcacaagtgctgctaaaggcatacacatattttacctaaatgtttcactgcgcctacagttccacagaaattcctaaattcccatttcacctgaaactgcagtagaactgttgatggctgtgaactttctatattgtatataaatacaattgatttataggataaaataaattagaataaactcttaaattttttttagtgtttaaggcctgtggttcagtt

SEQ ID NO: 487653 - DNA, 433 bp, Homo sapiens
tcagaaagctcattggacctggttttgaaaataaaacaaagttaaaaccctgggaggagttattgtgcagtgtggagtactcaggctttcttataaagaaaaaaaaaagttatctggtaccaaagtgtgcaacctacagaccctcaggtactgccctgtgacttctctgtatgacatcacaaggctgccaagtgcctgtttttctagaactaggagttggtgaggtttggctagtgctgaaaccatgcataggattggtttactaaattaaaaccttattacgtacgtcctccaaaagacagctgraagtggagagattttgatttggtgctgttagaggtggcaattaagagcataagcaccagggagatggtttaatggtaactgccttttttgatgtcaggctggagctccaactgggaacttgcgttac

SEQ ID NO: 487654 - DNA, 401 bp, Homo sapiens
gacttggtgcagtgataactgcatgcttcccactcctccgtttgccgaatgagagctgtaatcatgttaacctattcttctcagtccctattttggatggattgtcttttagtttataagtcaccagctcagaagacctttgtgccacccaaagatactgaactttgacctatatgtagtaactagatgggaattttgaggcttcttggttttttgttgttggtggtggtgtgtgtttgtttgagctggggtcttgctctgtcatccaggctggaatgcacttgctctgttgcctaggctcccaggctggaatacagtagcatgatcatagctcactaactcctgggctcaagtgatcytctcatctcagtctcctgagtagccaggactacaggtgcatg

SEQ ID NO: 487655 - DNA, 569 bp, Homo sapiens
ggtaaaaaaatatagttaggtaaaatgaacaagatcttgtacgtgatagcacaatagggtgactacagtcaactatattttaaaataactaagartataattggaatgtttgtaacacaaagaaaggagaaatgcttgaagtgatggataccccatttaccctgatgtgattattatgcattgcatgcctgtaccaaaatatctcatgtaccccataaatatacacactaagtacccacaaaaattaaaaattaaaagaaatattctatgcccaatgtctccaagttagagaaactagaattttggtccatatttctttcggaaggaccaatgccatttacattaagaaaaatccccttcaaaagcaacttaaaagttttggtgctgaaagggttaacttcagttatctggaaagcccaggccctgggtccgggaaattcggtggcagttacagggttactgggaggtatcacaggccttgctaacactcagcttatatgagtttcatcaaaaacttccaagatgtgtttctaggagaaaaagaatgtgtcatctcactttctcctcac

SEQ ID NO: 487656 - DNA, 654 bp, Homo sapiens
gactgacaatgcaaaagtgagagcataagtgggttagacatggtctgtccaagcttttgaatcagcaagttctacctcatctcattaaatttctccaaaggaacgctaagaagcccattattgtggtttattaataacttactttattttctatctgttttgaactatgacttcacaaatcttatacttctggcaggwaggtgagacaagaaatatataacacatttggcaattagtaacttacttcactgtgatcccattttacagacgaagaaattgagagactagtaggactgtttgaatgttgctttgatgtctttactttttaagacattgacttttatgcttttagaataattttcttgccacattagtttgtaaattgtgaacatttcctaaaatgagaaaaataaattgcttgagaaaatgaaaggatactctcaagaattttatttattgacaatgtaaactaaaccaagtgagattaattctactccatatgcgattaagttttaaaccttctttatttagaattatgaagaacgaaatctggagcttgttttaatgctttgtaattttattttgtttcagtgagaagtgtaaggctagaggatttaccgtgattgtggatggcagaaaatcacagtggaatgt

SEQ ID NO: 487657 - DNA, 629 bp, Homo sapiens
cctcaaatatgaacattcttggagcaggatgaggaataatattagaggataaattacagaagaatcagaggtagattgaacacaaaaaaattacactggaaattacactggaaaattacactggaaactcttattttaactgaattgtgtttctaagaatgttcccccactrccctctcctcagccctcttaccttactgccatctccatacaaaatacaccccaagcaattcagagtataaagtccaccttaatggaatggaagtgcctgtgtgtgatttatagtgactgtccaaactgtctcaggggactgaatatattctaaaatagaaacacatttttctaatttctctttagtaattcaggtatctacatgcgtatgcgtgttagtggttcattttgcttaatgagttgttgcttcttagaaaagcaattcctcaggaaatgcaatgacaaattatatcttagagcagtgtaaatcttgtgtggaaagcaagttgactgtgctcaaatggcagttgtcacaggcatctaattttgttaatattttcctacacgctttaatgaatattcaacaactaaggttggaaaacagcatattttacctttgaaataagataaaaatcaat

SEQ ID NO: 487658 - DNA, 535 bp, Homo sapiens
cctgactagctatttggcagttgcattgtggcttaatataatcaacatttcagtttgtttgagttcaataggctttggctataaaaatatcctgcttgggtttcataacaaagagagccaggctattttaatttccatactttatggaattgtatgtgggcatcagataaataatttgtttaaaagtattttctaagattttttctaagtattttctaactatttttctaagatattttctaagtattttctaatatttttgtttaaaagtattttctagaattacttttttcctttttccttcctttccctctctccctgcctccctccctyccttccttccttccttccttccttccttccttccttccttcctgttttcctcactgcatcaatctgacactaaagttacttctttgtgataagaataatggatgttattgccaaaattttatgaatatgtgaatctagatttcaaatgacttgcctcaggccatctcactggtccctggctgagagaagagtggaaaagtta

SEQ ID NO: 487659 - DNA, 495 bp, Homo sapiens
gccaaccatgccctacttgaattctcttctctagtgttcctttttttccacctttatctgtccatcaccttcctcctctcttaaagcctcctcccatctccaatgcccctgcaagggagatttgagaaggctgaagatcactctggaacccttacttcctttctccaggcccccctgtatagctcctrgagggaagttttgttacccttatgtgaagatgaatgtctttattgatttttggaaaatttaaacattcaaatcattgattccaatccatgcttggtgaatgcttgatgctgctccttggaactgaattgtgctggcacccaagcaaagcaaagtcaatggaatgaatgaataaagcttatgccagcccttcaagaggtgttgacagtgcgctgtgcatgggtcatctgaaagtcaagcagaaaataatgctgttccatccgagcctgagccagcacatgctgggagtgagagagcagccaccttgct

SEQ ID NO: 487660 - DNA, 495 bp, Homo sapiens
gccaaccatgccctacttgaattctcttctctagtgttcctttttttccacctttatctgtccatcaccttcctcctctcttaaagcctcctcccatctccaatgcccctgcaagggagatttgagaaggctgaagatcactctggaacccttacttcctttctccaggcccccctgtatagctcctagagggaagttttgttacccttatgtgaagatgaatgtctttattgatttttggaaaatttaaacattcaaatcattgattccaatccatgcttggtgaatgcttgawgctgctccttggaactgaattgtgctggcacccaagcaaagcaaagtcaatggaatgaatgaataaagcttatgccagcccttcaagaggtgttgacagtgcgctgtgcatgggtcatctgaaagtcaagcagaaaataatgctgttccatccgagcctgagccagcacatgctgggagtgagagagcagccaccttgct

SEQ ID NO: 487661 - DNA, 495 bp, Homo sapiens
gccaaccatgccctacttgaattctcttctctagtgttcctttttttccacctttatctgtccatcaccttcctcctctcttaaagcctcctcccatctccaatgcccctgcaagggagatttgagaaggctgaagatcactctggaacccttacttcctttctccaggcccccctgtatagctcctagagggaagttttgttacccttatgtgaagatgaatgtctttattgatttttggaaaatttaaacattcaaatcattgattccaatccatgcttggtgaatgcttgatkctgctccttggaactgaattgtgctggcacccaagcaaagcaaagtcaatggaatgaatgaataaagcttatgccagcccttcaagaggtgttgacagtgcgctgtgcatgggtcatctgaaagtcaagcagaaaataatgctgttccatccgagcctgagccagcacatgctgggagtgagagagcagccaccttgct

SEQ ID NO: 487662 - DNA, 495 bp, Homo sapiens
gccaaccatgccctacttgaattctcttctctagtgttcctttttttccacctttatctgtccatcaccttcctcctctcttaaagcctcctcccatctccaatgcccctgcaagggagatttgagaaggctgaagatcactctggaacccttacttcctttctccaggcccccctgtatagctcctagagggaagttttgttacccttatgtgaagatgaatgtctttattgatttttggaaaatttaaacattcaaatcattgattccaatccatgcttggtgaatgcttgatgctgctccttggaactgaattgtgctggcacccaagcaaagcaaagtcaatggaatgaatgaataaagcttatgccagcccttcaagaggtgttgacagtgcgctgtgcatgggtcatctgaaaktcaagcagaaaataatgctgttccatccgagcctgagccagcacatgctgggagtgagagagcagccaccttgct

SEQ ID NO: 487663 - DNA, 640 bp, Homo sapiens
tgggaagtcaccctggggaccctcatggagcctgggatctcttcccaaccctcagaaaaagtggacctagtctcacatgggaattcagaatatctaatccatayatgcatgtctcttccactcacaccaatgtggtttgtaaaaactatagaacatcaatgggaatttatcaatgggaaattgcagtttgtgggattttcttctgtagaatttgttgaattgaacattatcagttattgacttgaaacaagtaaaaacatgtttgcactatgtcattttaaaaatgtgaactcttatttcacctgaagagtggctgtcctgactcacatgctctggagtcactagtggcttagattttccttcaacaaattaaaacacaaatcaattcaatcgatttgaatccaagcaaagctggattgctagagctgtttgtttatgtccctgattagatttgttaactaaattgtaatggtggttaatatttataaccacaacatatgatgtttataaaagcaatatttatcaagtgagctaaaacctgtaaatcacttagaacattgcctggcacaaagtatgggctcagtaaatgttagctattattatgatgtcattaaatacaagagcagactgtgaatgagtc

SEQ ID NO: 487664 - DNA, 651 bp, Homo sapiens
tgggctgtcacttcccacatcctccatgctggcctgcctgaacagaggcattcatgccttgcctggctttatctaaattaggctcctttgtaggaaatgatatctgaaagtagcaataataaccagaagcagttacattttgtgttgatgggaaatattagtrtaaataacaaaatacgaaatgcatatccagtggctaatctcttgtgggaacatttccatggatggacttcccacattcttactttctttgaaatggagatgtcagcatctttcccaggactccgttcctgggggattatggttgctggatttattttgacatcatcatttcacaataagaagtgtctaaagaaagaagtggctatagaattgtctaaagaaagactttgaagacttcacaagataattacaaacccatcaggggtgtcaggtggcctgtaacagtggcttaaaacttgggacataggtaaagctgttaaggaacaagtcctctcattctttcctttttattttttgattagttggttgtgttgaccagagatcactaacgtattgtatgattgccctcatgcatactgcgattgggtcacacacaaggaaattgtaaatggttttctatttcacccacctgcctatcttttacccttc

SEQ ID NO: 487665 - DNA, 526 bp, Homo sapiens
cgtgtcatctgagaacttggtgcttttctgtttgccccctggacatcagctgaattacggaaagcctggaagtgtgggttgcatgaaagtgccctgctggggtctcccttctgtgtatccatcttctcattcagagctgctctggtgaccatgtgggctgtcccctctcatccaggatggtgtttggggrcagagaaggagcaagtataaaggagaagggcattgacactggaatccatccaatctctgccaggagttctctgcgtgacctcagaatctttggtccccaagtaggaggctattggcattttggaagggacagttgtttatcgtgtgggactgatgtatacaatgcaagacatttagactcgccagcctctgcccactaaatgcctgtagcatcctcagtttcatgaccattgaaaagtcccatgtagttcccgggagtgagactgcactgagtcgagaaccatgggcttgtgattgcctgttctctccatctctgacattcaaatgttctgggtga

SEQ ID NO: 487666 - DNA, 655 bp, Homo sapiens
ttatacattaatttaaaaagaactcttatcttttaaatactagatgctccaatgcagaagcataatctatttctctctctctctccctttctccttctctctctatctctctcctcttctcctttttcctcctcctcctccttcttctcctcctcttctatcttaatactggtacagtatatttcttgttcaatttactcttgtctagtttatacatagtattgccattgtgaataacagtttttctttgtattttttatctsgtaagtattatactgggaaaactttttgcacatttattttgtaattgccaactatcaaatttttgtttaagtttttataccttttcagtagatttctttggaagttctaggttaacaatattgttatttgtggttcataataactgccttttccaaagagttttttctcttacatacttgtctcctcattgcaatgagcagaatttccagaacaatggtagctagtggaggtcgtgatgctcttgttgcttaatggtttgtttagttggggatatttgcagcggcgtattttaggctgccttgagttgtcttcttctgccaccaccattgtctcccacccctccatcatcacccccgcaccatcatctcctgcccctccatgtgtcctgcag

SEQ ID NO: 487667 - DNA, 537 bp, Homo sapiens
cctgccctccctcagaggcctgaagaggggacagctccagtggtgagagacgagcaccccctgccrtcaccagaccctcccagagggagaagacggagacaggctccagtccctaccccgagctcccaaaccggctcctgaagctgcagactgaggagccgggaaggccccggggttgggttttcatgcgccgggcagggggcgcccaggcgcgggcaggaggggactctggatgggaaggacgtggcgagcctaacacgacccgtcctccactaccacggggtctggggacagaaggcagaggcgctgcttggacagaaagcccaggcatgggaccccagaatggctggggcgggaacagtgtcagggactcccaggaggtcgggcggggctgttcccttgtgccaggggcttgtggaggctgggacacctgcagagctgctgctgtccccacctgctaatctcggctgccatccagggaggaagtgcagggaggggcccaaaaaaggccaaggctgacctagcggccttgaagga

SEQ ID NO: 487668 - DNA, 573 bp, Homo sapiens
tgctttccattttacccgaactatgttagtaaaatatccctttcttttcatttgatagtttttttttttagcctttctcctaggattcctagctccttttcaagaattattgaatgggcctaacaccttattatattagtgaattcaaatggaaagctattccattgtatatgccctgaagaaaatcaattaggctgagtcttacatcaaacacatttttcactgttttttaaaaaaattctgtgtcagcgtcctttgtattgtaagaacataattaaaatgaaaatcaatagaaactttcacgaggatacttgcacacacacacacacccctacgcacacaaacacrttcttgtaataatagagaagaaaagcaatgcttataaaatgttataataaaacctgttatatagattctaacctattataaaatatggtatggtatgacttcttccttcagatcagtaaaaaaaaaataccagttgaaagatgggaggagactttaacttattagatgagtaacatggcccttaatggtcacttttatatatttgattatctcttttatgaaaag

SEQ ID NO: 487669 - DNA, 588 bp, Homo sapiens
tgggaggagactttaacttattagatgagtaacatggcccttaatggtcacttttatatatttgattatctcttttatgaaaagggagatgtcggctgggcatggtggctcacacctgtaatcccagcactttgggaggccaaggcgggtggatctcctgaggtcaggagatcgagaccagcctggtaaacatgatgaaacccatctctactaaaaatacaaaaaactagccaggcgtggtggcagatgcctgtaatcccagctacccgggaggttgaggcaggagaattgcttgaatctgggagccggaggttgyggtgagctgagatcatgccactgcactgtactccagcctgggcaacaagagcaaagagcaaaactctgtctcaaaaaaaaaaaaaaaaaaaaaaggaaatgtaacggtatttttttttgcattccttttcccaggaatccttttgtattcctttgttttttccttcacttatccctctcatggtcaaaggtcaaaatgtcttcagacacaatctatgtctcatttataaataaaataaatttttaaaagtacacataaattactgctggatc

SEQ ID NO: 487670 - DNA, 530 bp, Homo sapiens
tatgcacatattaatatgagaaacaaattgatacggtaacttgccatttytcaagcaaggaagaaggaagagatcacttgcaaccatgaagaaagaactgtgtaaaatatcctgtatcatgcagtagctgcaaacatgccatacagtcaatatattgtggggctccagaatatcaaaataagttctatatcctaactggaaaagaggaaagaaaagtgaaaagaaagaaaagaaaagaaaaaagaaaaggaagggaaaggaagggaagagagagagagaaaagaaaggaaggagagaaagagaaagaaaggaagaaagagaaagagagagacagagaaggaaagaaggagagagagaaagaaagaaagaaagaaagggaaatgaaaagaaactttccatcctgaacagacatgaaatcagctgaagggcactaaacagacatgaaatcagctgaaatgcactaaagcactttaatcctgtaacattcttttatattcaggcctaatagacactgccacactctgttagtg

SEQ ID NO: 487671 - DNA, 617 bp, Homo sapiens
atgcattgatttgtagatcagcttggggaatattccaagatcagttttaatctttttgtttccaagatgttttgagcatggatcatctgggtaacttgcatcaatgattcccagcatttctgagggttaagtttcttttataatgtaaaccattattactgtcttctcaaaggataaaacttttacttttctattaaaagcatcattttattgcccaagtacataagaccaaacactattatgaactagagaatgcttttaagtgaatttgtattttattaattcataatagtgtctatatatacttcagaaattatagagcaaaacatggagaaatggtaaatattctgtcttcagccactgcttggtatatttatggagtcrttgtccggtttgcaaaaaaaaaaaaatcagctcccacttagggaacctctagttagcaagaaaatccttcttctaaagcaggtctatctttctgtccagagtgcctcagccatagaacagggcagtgtgagcaggactggccttcgtaaactgaataaagatgccaaatagctcacgatcaacctggtgcttttaaagagttgactttcttgtgagggaaggaaattgtatcc

SEQ ID NO: 487672 - DNA, 628 bp, Homo sapiens
cccctggacttcagcaatacctgtgcacttgggtttggagtgagatgtctttcttagctctctggcccctcccccaataggtagatggtctttaccttattaggtaaggaccatagtgtctgtggggtttcctgtagttcttcttagactccagcaggcttggcacacttgtacctggagaagaggggatgtttctctcagctctccagcatctccccagtagcagatggctgttgtctagtgtgcaatgtaatgtccagaaagccaatggagtttctcagttctcccctcagcctttggacttcagcagacyccatgcaccgtgcctcactgtgcactcagctcacctgttcctcccccagtggtagagagttgctgccttataatcaccatgaccaaagtgcctgtgggatttccttcagttcacctgctcagacttgagaagctctgaacatctgtgtcttggggtttctgtcttgctctcctgatctttctgtgagcactcagtgaaagcctgtagaaaagagttggtgggtaaagtggagactcccctggtgtctgagattcctggggattctaaatgatcatgcaagctatactctccctttacaattgcactaaaatttca

SEQ ID NO: 487673 - DNA, 501 bp, Homo sapiens
ttcactttatgtgagaaaaattaaacccctaagtttagcaaccagtggccaggtttctgtaaccctcagcaggaagccatcataactgataccctggctaggakggtgtcccagcagccaagcattctgatcaggcaggaagtcgtttggactgcagcactctcctcacacagtctttctattcaggcttcttggagctctgcttttttcactggaatttgtggctgtgctgctgttgccagaccttcctcagactctgtaatttctgttcccttcaatctggcataatggataataagttttcattagtggtgcccaaaatgtcaatgacttacacattctcataaaatctccaaatgaatggagaaagaacggtaaaccatgcctcgtctagactgtaatgaaggggaagctgctgaaaataagatgccgtccaattactttgtatttaccaagactcactttttaacctcagtgtgacatacttttgaaaatggctgt

SEQ ID NO: 487674 - DNA, 501 bp, Homo sapiens
ttcactttatgtgagaaaaattaaacccctaagtttagcaaccagtggccaggtttctgtaaccctcagcaggaagccatcataactgataccctggctaggagggtgtcccagcagccaagcattctgatcaggcaggaagtcgtttggactgcagcactctcctcacacagtctttctattcaggcttcttggagctctgcttttttcactggaatttgtggctgtgctgctgttgccagaccttcctcagactctgtaatttctgttcccttcaatctggcataatggataataagttttcattagtggtgcccaaaatgtcaatgacttacacattctcataaaatctccaaatgaatggagaaagaayggtaaaccatgcctcgtctagactgtaatgaaggggaagctgctgaaaataagatgccgtccaattactttgtatttaccaagactcactttttaacctcagtgtgacatacttttgaaaatggctgt

SEQ ID NO: 487675 - DNA, 555 bp, Homo sapiens
gaattatggaaccgaaagaaaaaaggctaagaggaaagaggaatggggatggaatttagaaccagaaaatgagaatggggatcccagcgcccccaactgccattaggtatgtgttcttatacatctaacttctcagggctttcatttccatgtagatgtatataaaattagaataagaatctcctctctaatatttttgaggatcaaatcagataatacttataaaagtaaatgaagcagtaaatgaagccgcygtcaactatgaatatcattattattattataataaaggcagcatcagtgaagatgggtctaggcttggtttttatgcagcacacatcagcttttgcagggcctggaaagttattatgatttttactattttcatttaagaataattcagctcaagtggctgcaaaccttggaatctggtaatgtgcatctaggtgttaaggaattcagacagccgtgtacaaaacatgacaagataacatgtgccttattctccgtggttcctgaagcaataaagcgaagcaagaggccaaaagacacaat

SEQ ID NO: 487676 - DNA, 527 bp, Homo sapiens
ctcatctctgctgaccctcaacgctcattgccacttcaaaaaacaggcgtgggcaccgtgctctgcrtgcatgatgacatatctgcaattcacctgcatcctcaccttgaccttggcaacaggattaggtggttgaggtgaagattaatgagacaattatttttacaaggaatataaacagcctggctctgctgggttaacagcatccacaacattcgttgctcctaagcattaagattttgctccttgaattctgagcagtggaaagtcaatgtgaagtattatttgatgtaataacttatgacagaaaaaagtaaatgaagataaggattgatatcgttagaacaaatgctattaacattacagtctcttgaaaaatagaagggtagagtgggaaaacctcagaacaaggccttagctctgatgttcatacaaaccgtttaaacactcaaagcctcagtttcttcatctgtaaaatggaaatattcattaaaaagaaagaaaattggtatttaacataagaacca

SEQ ID NO: 487677 - DNA, 527 bp, Homo sapiens
ctcatctctgctgaccctcaacgctcattgccacttcaaaaaacaggcgtgggcaccgtgctctgcgtgcatgatgacatatctgcaattcacctgcatcctcaccttgaccttggcaacaggattaggtggttgaggtgaagattaatgagacaattatttttacaaggaatataaacagcctggctctgctgggttaacagcatccacaacattcgttgctcctaakcattaagattttgctccttgaattctgagcagtggaaagtcaatgtgaagtattatttgatgtaataacttatgacagaaaaaagtaaatgaagataaggattgatatcgttagaacaaatgctattaacattacagtctcttgaaaaatagaagggtagagtgggaaaacctcagaacaaggccttagctctgatgttcatacaaaccgtttaaacactcaaagcctcagtttcttcatctgtaaaatggaaatattcattaaaaagaaagaaaattggtatttaacataagaacca

SEQ ID NO: 487678 - DNA, 527 bp, Homo sapiens
ctcatctctgctgaccctcaacgctcattgccacttcaaaaaacaggcgtgggcaccgtgctctgcgtgcatgatgacatatctgcaattcacctgcatcctcaccttgaccttggcaacaggattaggtggttgaggtgaagattaatgagacaattatttttacaaggaatataaacagcctggctctgctgggttaacagcatccacaacattcgttgctcctaagcattaagattttgctccttgaattctgagcagtggaaagtcaatgtgaagtattatttgatgtaataacttatgacagaaaaaagtaaatgaagataaggattgatatcgttagaacaaatgctattaacattacagtctcttgaaaaatagaagggtagagtgggaaaacctcagaacaaggccttagctctgatgttcatacaamccgtttaaacactcaaagcctcagtttcttcatctgtaaaatggaaatattcattaaaaagaaagaaaattggtatttaacataagaacca

SEQ ID NO: 487679 - DNA, 517 bp, Homo sapiens
gtgccatcatttcgttcctgctcactgtttcccattttcatcttctttcctctgagatgcgaacccagcctgacaacaccctgtggctcctaaaatttgaatcagatctccttgcccttacaaccttrgttctaagcttcactttcttaccatacacgacagggttgtggctaaagggccttctcactttccaatccaatcctagagagcaaggccagccaggccagccccacccagtcttttttacagaattggagcattgggaaaatcagttaccagaagttcaaatataagagctcagggatgaggggaaatgtacaaccctaagtggacccaactctagaaggttgcatcaagtccaaagctaagagcttgagcagtgtcaaagggcatcagtaaaatagctagaagtctgcttcagggaagtaatctagtgtaaagaaaaccctaagagataggatttcaaggctggaaaaccatcctcaggtatacagtggcagtaaggtcagaaaagaat

SEQ ID NO: 487680 - DNA, 517 bp, Homo sapiens
gtgccatcatttcgttcctgctcactgtttcccattttcatcttctttcctctgagatgcgaacccagcctgacaacaccctgtggctcctaaaatttgaatcagatctccttgcccttacaaccttggttctaagcttcactttcttaccrtacacgacagggttgtggctaaagggccttctcactttccaatccaatcctagagagcaaggccagccaggccagccccacccagtcttttttacagaattggagcattgggaaaatcagttaccagaagttcaaatataagagctcagggatgaggggaaatgtacaaccctaagtggacccaactctagaaggttgcatcaagtccaaagctaagagcttgagcagtgtcaaagggcatcagtaaaatagctagaagtctgcttcagggaagtaatctagtgtaaagaaaaccctaagagataggatttcaaggctggaaaaccatcctcaggtatacagtggcagtaaggtcagaaaagaat

SEQ ID NO: 487681 - DNA, 512 bp, Homo sapiens
accacagcctccacctgccactttactggtgtgcatttgcccttggcccttctccaccacattaccagcaagcacacatgggtggatctcacctaccctccccaactggtgtgcatttgtgcacacaacccactgtaccaccactgcaagtgttagaatgtgtgcacgaatactggtgccttacccccattggtgccccactctcaccaacatgtagacaccttgctgtgtygccaccaccattgcaagcatgcacacagatgtcaccaccccatcctctttggtggtctgcccagatgacacatgcataccttgctgagtcaccattgctgctggtacatgcaagtgagtatggatcctgctgacactaacctgacaaaccccccatcagagtgttgttgctagaggattgggaacacctgggcccctctggcatagcaggttcctaaccttcaggggacatagaacacaattgggggcctggtacctgctccccagcgttagagtgtgca

SEQ ID NO: 487682 - DNA, 505 bp, Homo sapiens
ccacagcctccacctgccactttactggtgtgcatttgcccttggcccttctccaccacattaccagcaagcacacatgggtggatctcacctaccctccccaactggtgtgcatttgtgcacacaacccactgtaccaccactgcaagtgttagaatgtgtgcacgaatactggtgccttacccccattggtgccccactctcaccaacatgtagacaccttgctgtgttgccaccaccattgcaagcatgcacacagatgtcaccaccccatcctctttggtggtctgcccagatgacacatgcataccttgctgagtcaccattgctgctggtacatgcaagtgagtatggatcctgctgmcactaacctgacaaaccccccatcagagtgttgttgctagaggattgggaacacctgggcccctctggcatagcaggttcctaaccttcaggggacatagaacacaattgggggcctggtacctgctccccagcgttagag

SEQ ID NO: 487683 - DNA, 632 bp, Homo sapiens
tgtttgcttggaggccattttaaacaatgacatcactaacaaaaagcacaaaaatgcaaaagcaaggtactaaatacactaaaaaaggacaggtttcagtatgagagctggaacaagaagacggagaatcgccttatgtgatattagctgggaacatgcatgtccggtgattaaaaatttttgccactttgtgcatgtcctaaagtgaccacaaaagcaccatgagtgtgatctgggkaccccacagaaatgttagtaagcatgggaatttgtaattacagaatctgtgaaaaatgtggatccactctactggttttacttattttccctggggaaaaaaaaatgatgtttccttggaaattgaaatatttggttcattcaattgctctcttttctgttccaacttgatttttatgtgtctgtgtgctttgtggtgatttagcctagggagaaaatgtttaaatgagattgtaatgagaagtctgtttcttacttttatcgagggtaagaagggtacctcatgagaaagcacaacataatttctctaaatcaccaccaaacatctatctcccatagagccttggagcccgagaagttttcctatgtagtcatcgcaatgtcagtgttacata

SEQ ID NO: 487684 - DNA, 512 bp, Homo sapiens
caggcaattaagaaagtaatcacacaaagtaatgtaatggaagttaattattactgcataagcaaatagttcattaatgctagtagttgctatggctgcattcttaatacatgcagaactgaagcatgaatcctctgtgtattcaaggagctggtaggaagtgtgatgctacacagagagagtgccactaatgaaaaacagaagcaaataaggccatattgacccctgacttgtctaaataaggtgggatcatcattacttcagagagttttatcgaaaccacgattgcactagctgcttataatttttttggttggtaayacaaaccacgacttaagccaggagaagccaggaggaattcagcttgttaaaacaaaaatcatcaattgtacctcctctgttttgttttgttgtttaaaaccaacctttttgttaaatagcttaagtcatcatttgtaacttaaaaggactccatagatctttttatatatataaaagcattcgagctggta

SEQ ID NO: 487685 - DNA, 565 bp, Homo sapiens
tgagataggaggattgcttgagtccaggagttcaagaccagcctgggcaacatagcaagacctcatctctacaatataaacataaaaaataaattagccaggcatggtggcacacatctgtagtcatgactacatggctactcgggaggctgaggtggaagaatggcttgatcccaggagttggaggcttcagtgagctatgatcatgctgccactgcactccagcctaggcaacagaggtagaacctatctctgaaaagaaaagagtggatttgatgggaacacagtgagttctgttaggcatgctttgttggaggtgcctacaggacagtcaggaagcggctggatctrtgagccaagagctcaggagaaaggctggggcaggagctctatattgagagttacctgcttcaaggcaagcaaggcagagcgtgacgtgcctgagctaggatcctggacaatccaaagaaaccctgcgtatatagctgtcttcataagtaaatggcgagttcctgaagggtcaaatcattcatttttcatcttacagcattttgtataaagaaaa

SEQ ID NO: 487686 - DNA, 565 bp, Homo sapiens
tgagataggaggattgcttgagtccaggagttcaagaccagcctgggcaacatagcaagacctcatctctacaatataaacataaaaaataaattagccaggcatggtggcacacatctgtagtcatgactacatggctactcgggaggctgaggtggaagaatggcttgatcccaggagttggaggcttcagtgagctatgatcatgctgccactgcactccagcctaggcaacagaggtagaacctatctctgaaaagaaaagagtggatttgatgggaacacagtgagttctgttaggcatgctttgttggaggtgcctacaggacagtcaggaagcggctggatctatgagccaagagctcaggagaaaggctggggcaggagctctatattgagagttacctgcttcaaggcaagcaaggcagagcgtgasgtgcctgagctaggatcctggacaatccaaagaaaccctgcgtatatagctgtcttcataagtaaatggcgagttcctgaagggtcaaatcattcatttttcatcttacagcattttgtataaagaaaa

SEQ ID NO: 487687 - DNA, 598 bp, Homo sapiens
tcctttggaagtttacagtccagtggacaaaaccatagataatttcagtaaaatgtgagatgtgttagagctcagtagamtggcgtgggaggatagagaagacaaattaactgcttggacttaaaggacaggagaggcctcccttggtactcttcttcctgtcccaggactggccaggcagccacacacacgaaacaatggaaagaagcatttctggcagccctggtattccagcctgcagcacctccagagctgtgaccgaatgttcctttactgaaaagacctcagaccactggagttctggttcgggtgacactaggcagattcagaagttgcagacacaacttactagtgagggaatcagtggctaactatatataggccagcagggacaaccctgaggtcagagctggctctaggctaggatgtaggtgccaaccttggctttttggtccaccccttctttgcagggtccagggaacacgatctgtctcctctattctcaggaaaggacctgatgaagttaagtgcattgtggcacacatgtcagacactgggaatgatgcattgcttttcccaggcaacttatagttttaga

SEQ ID NO: 487688 - DNA, 598 bp, Homo sapiens
tcctttggaagtttacagtccagtggacaaaaccatagataatttcagtaaaatgtgagatgtgttagagctcagtagaatggcrtgggaggatagagaagacaaattaactgcttggacttaaaggacaggagaggcctcccttggtactcttcttcctgtcccaggactggccaggcagccacacacacgaaacaatggaaagaagcatttctggcagccctggtattccagcctgcagcacctccagagctgtgaccgaatgttcctttactgaaaagacctcagaccactggagttctggttcgggtgacactaggcagattcagaagttgcagacacaacttactagtgagggaatcagtggctaactatatataggccagcagggacaaccctgaggtcagagctggctctaggctaggatgtaggtgccaaccttggctttttggtccaccccttctttgcagggtccagggaacacgatctgtctcctctattctcaggaaaggacctgatgaagttaagtgcattgtggcacacatgtcagacactgggaatgatgcattgcttttcccaggcaacttatagttttaga

SEQ ID NO: 487689 - DNA, 596 bp, Homo sapiens
gcttctggaccattattacattagaagtagttaaacttctaatttaagtgactccaatttgtgggattctgatagagcaccttagcctgcacamtaactgataaaattcatgagaaaacagagtagaaaaaaactatcatatggattgtgcagtgtttaattgaaggcatatgggtgtctgtggcaggggagtggggttcaggatatccacttcaggattatataccgaactagtgaggatctgtcctttaatacattgctaagcttgtttctcattgtctcctggtttagaaagggtgagctgttgggaggccttcaaaatctgcagctgagcagtcaaagattgacactggtgccaacttgtacattgtgtggtgacatcatacaacttcatgtcttggtcctatcttcccagctaaattggggttccccaagtggaggttctgcatctgtcacttcagtatcacgtatagtgtcaagcatgtgttttccattttgcagtggctcagtaagtcacggcttgttgaattactgaagtggatgacacacacattagagcaagagttaaagaattataaatactcaagcacaactaa

SEQ ID NO: 487690 - DNA, 578 bp, Homo sapiens
aaatcccaaagtaaatttcacaatataactacaacccattatcatatctttttcccaagaccaccacccattcttctatgttatttaatctacccaatcaaatcagtctaggtgttgtcttcaactcctccttttatttagccttccacatccagttagcaaactgattttctgaaaatctatcatccgttctctatctccattgctgctgccatgctcaaagccctcaaactttgcttcttgagctgtttcatctcctagtgtctctcctccatgcatgtacccttctaatctatcctgcacaatgctgccagaatgagctaagatgtaaagttgattgattttattcttcagagaaatcccactgctgacaagacaaaatccaaatctatcctgcaaagccctagcccacccaaccaactttatctcatgtacaactctaaccccaccctctatttgagcacatagaacratttgaagtcccctaacacacatcattgagtttcacaccttcacatttttgctgccaagtgaagaagtctggttgagaagaagaagagacatctaggcaaacttat

SEQ ID NO: 487691 - DNA, 618 bp, Homo sapiens
taagcttataagtatgaaaagtaaataaaaggagtcttattaaaagactacacacaaaaagtagagagtaacagaggaactagaggaagtacagccaaaattactcccagaaaacraaagtgcaataataatgccaaaatattatacaggacttggtagtccatagccctggctatgggaagaagtttgaaaatggaaggaaccagaaatggctgccttggagaagcaagatgtgtacacgtgtacacacgtaaaagtatgtggactccttgcagacaagccagtaaagagaaagaataaaataataaagagaaattaaagaccctatagaaatgaaagagaaacaagacatgccaattcttccttcactaaaaacaccaccatttataaacaaatagcatagcagagggtagaagtgtcaggaaagaacactctcaaaataggagccctttccaagtaacaaataggactagaaaaaggcatatcagatctgtaaacaaaacaactacaaaagtcagaaaacgccaataaaaacattactattggtgaaaagtctccaccctaaaaccagccacgatcctgaagaaagctgtaacacaacatgaattaaatatcatc

SEQ ID NO: 487692 - DNA, 554 bp, Homo sapiens
gaatcatatatataacaaggaaatagaggcttaattgtctttaggtaattggttattagatgagctgtttccttaattgtgggatgatgttctcagtttattcartctttatacagtgtcagaaattctctagaagttggaaatgaccaaatgactgcatgcattacagaggaaaaccaaaccaacagttttttcctcggccagtgactctgcttctttagggtctatgaggaaattcaagtccctctaatagtgtctatttgtaagatgcagaaagtgtaatatggcagaactgctgattttacttattcagatgtaccccagacactgagagcttcttggtaggctctaacagagtctgtgtaaacatacttgaaataatatattcataaagctgtcattacagaaaaaaggaaatatgcacaaatataaaataatagaattaaccaactctagtgcaaatctgtttgaaacctggatttcatttgtgagagctatggtaatagtccattatagtaatcaattcacagaaataaaagttaattaacaaatag

SEQ ID NO: 487693 - DNA, 577 bp, Homo sapiens
caggagacggcagaatcaagaagctgggagcttcccatggactgagcccaggtctcaccctttctgtaacgtggcctctgcccagaaggcaccctagcggccagacgtaaatccagaggccctccacaagttcttagcatgagctggcagtgaacaaccctcatgtgtccagatgagtacccagtggccatcctggcccctgcacccacctacctggttggtgtcactcagacagttgctgctgctgctgagctgggtgggcgtggcattgatggaggtgagggccatgggctgctgggccaggaaggtgggtgagggctggatcaggggtggtgtgtgtccaaaggctgaccccagacccctctgctggctcagaatctgctggtaggccacggggttgatggggtgggggaaggtgaaggctgggctgcaacagagagcagacaaggaagtgggggtgggggatcgggagctctcttaggctgacacttcctggacagagagaaccttgcccaggggatagggatgagcatgttgctagccccaccatcacygtggcttcctcactcaagaacca

SEQ ID NO: 487694 - DNA, 588 bp, Homo sapiens
gagagagacagatgggcacaggctctgttcttggcaagtctttgctatgagaagattgccaaggagatamaaatgagcttcttgggatataatatcaaataattgctactccttgggaagaagccacagtttgctgtgctggaattattgaatcacgagtggagagtaaggtgcacgtgaatgaagagaagcaatgctatgcgcatattaacccgagcgcttgactttgaggacaggacagcaggatgtggctgagtggaggtggcaggagacgcttgggaccatgacactcacagtcttattgctgtggcgttcttagtgctgttatttttgtcattttcctagcttgatgaaaaaatttccttttttcacttccacagaacaaaacagcttgtgttttgtaatttcatgtggctgattttgtgtacctttgacagttcagccacactttggacataacatttcaccttgtaactcaattttttttttaagccagccttaataaaaagctattgttttagttagctgtggcatttgaaattacctgggctccttaaaccctttattctggggttcaagaattctgaa

SEQ ID NO: 487695 - DNA, 588 bp, Homo sapiens
gagagagacagatgggcacaggctctgttcttggcaagtctttgctatgagaagattgccaaggagataaaaatgagcttcttgggatataatatcaaataattgctactccttgggaagaagccacagtttgctgtgctggaattattgaatcacgagtggagagtaaggtgcacgtgaatgaagagaagcaatgctatgcgcatattaacccgagcgcttgactttgaggacaggacagcaggatgtggctgagtggaggtggcaggagacrcttgggaccatgacactcacagtcttattgctgtggcgttcttagtgctgttatttttgtcattttcctagcttgatgaaaaaatttccttttttcacttccacagaacaaaacagcttgtgttttgtaatttcatgtggctgattttgtgtacctttgacagttcagccacactttggacataacatttcaccttgtaactcaattttttttttaagccagccttaataaaaagctattgttttagttagctgtggcatttgaaattacctgggctccttaaaccctttattctggggttcaagaattctgaa

SEQ ID NO: 487696 - DNA, 588 bp, Homo sapiens
gagagagacagatgggcacaggctctgttcttggcaagtctttgctatgagaagattgccaaggagataaaaatgagcttcttgggatataatatcaaataattgctactccttgggaagaagccacagtttgctgtgctggaattattgaatcacgagtggagagtaaggtgcacgtgaatgaagagaagcaatgctatgcgcatattaacccgagcgcttgactttgaggacaggacagcaggatgtggctgagtggaggtggcaggagacgcttgggaccatgacactcacagtcttattgctgtggcgttcttagtgctgttatttttgtcattttcctascttgatgaaaaaatttccttttttcacttccacagaacaaaacagcttgtgttttgtaatttcatgtggctgattttgtgtacctttgacagttcagccacactttggacataacatttcaccttgtaactcaattttttttttaagccagccttaataaaaagctattgttttagttagctgtggcatttgaaattacctgggctccttaaaccctttattctggggttcaagaattctgaa

SEQ ID NO: 487697 - DNA, 562 bp, Homo sapiens
tacccctggcatttctcttcctcccctgccccagtcagccttcagaagttgtctcagagaaggacagcaggacagtagaagaagtggagtcatttattgcctttcaagtgttggaagcccaggcttgagygaatggacaacaggctaggaatggaaaactgatggcaagaggcaggcctgcatcaaagaaaactccccctggttgggagggcaggtgtcccgagaagagggtctcccactctgctgcttcttggctgagcaatggggcatattggacctcaggttgatctggaaggtcaagagtagaagaaactcgtgtctctgtagcagtcagggtggtagactcggctgcagtaaccaacaaccccaccttgcagcagcttaacaaagtaaggtgaatttctcactgtcactccacatccattgtgaatcagcagggccccacgctgtctcctcactccaggagcccagctgacagagcaggcgccacctaaagcttcacactgatcgccatggcaaaagaaaccacactctggcttccaaagcctctgccaagagatgc

SEQ ID NO: 487698 - DNA, 562 bp, Homo sapiens
tacccctggcatttctcttcctcccctgccccagtcagccttcagaagttgtctcagagaaggacagcaggacagtagaagaagtggagtcatttattgcctttcaagtgttggaagcccaggcttgagcgaatggacaacaggctaggaatggaaaactgatggcaagaggcaggcctgcatcaaagaaaactccccctggttgggagggcaggtgtcccgagaagagggtctcccactctgctgcttcttggctgagcaatggggcatattggacctcaggttgatctggaaggtcaagagtagaagaaactcgtgtctctgtagcagtcagggtggtagactcggctgcagtaacmaacaaccccaccttgcagcagcttaacaaagtaaggtgaatttctcactgtcactccacatccattgtgaatcagcagggccccacgctgtctcctcactccaggagcccagctgacagagcaggcgccacctaaagcttcacactgatcgccatggcaaaagaaaccacactctggcttccaaagcctctgccaagagatgc

SEQ ID NO: 487699 - DNA, 578 bp, Homo sapiens
gaccatcaaggcaggtgagaaccaacctgcccaagatcactcagggacagagagggacaggaaaactatgacagttctaactgttggcttgatgaaycacaaccctagaaccttcacacagctccaggacaccctggcccttgtctgccttctccaatctcagtttcctcacccataaaatgggaggggagagtcacatctgtctcaccaggaggtgatgagcaagaaatagctctaatgacttcagagccctttgcaaatatcaaggtgttggttagaaaaccatagcaaccacagtgggctcaaacctttccttttaaaaagaggcaaggaagggattacaagacgaggggagaccagtgaccagacgaagtgtctctgggttccgggcccatcctcccagggaaacttactgagaagcatgtttttgttttgtttttgttattgtttctgtttttgttttttgtgacggagtctcgctctgtcacccaggctggagtgcagtggtgcaatctcagttcattgtagccttcacctcccaggttcaagcaattctcctgcctcagcctcccgagcag

SEQ ID NO: 487700 - DNA, 578 bp, Homo sapiens
gaccatcaaggcaggtgagaaccaacctgcccaagatcactcagggacagagagggacaggaaaactatgacagttctaactgttggcttgatgaaccacaaccctagaaccttcacacagctccaggacaccctggcccttgtctgccttctccaatctcagtttcctcacccataaaatgggaggggagagtcacatctgtctcaccaggaggtgatgagcaagaaatagctctaatgacttcagagccctttgcaaatatcaaggtgttggttagaaaaccatagcaaccacagtgggctcaaacctttccttttaaaaagaggcaaggaagggattacaagacgaggggagaccagtgaccagacgaagtgtctctgggttccgggcccatcctcccagggaaacttactgagaagcatgtttttgttttgtttttgttattgtttctgttyttgttttttgtgacggagtctcgctctgtcacccaggctggagtgcagtggtgcaatctcagttcattgtagccttcacctcccaggttcaagcaattctcctgcctcagcctcccgagcag

SEQ ID NO: 487701 - DNA, 590 bp, Homo sapiens
aggtgacagagtctctcttcccatcagagaatgacaagaagaaagtatttccagtctccccttggaaactagctcccatgccacacagcttccccmaacaatccactaagaacaacgaatttttccaggcactattgttttccagacgctatgagatccttacctgcgtgggggttgatgctcccatgtcccagtgcctccttcaccggggcctgtgtggcgtgggcatttgtgcatggcagggggcgccctttctttcttgtctcatgagtagtatctccagccacctgcaagggaggtgaagtcaggcaatgatggggccatctgtggggagggctcctagctgaggctggtcagctactgccctgctgtgcctgggcagggggtacacccctcctcctcctgttcggggtgttttctgagccttttccagaagccagtgcttggtggacccaaaggaaggaatgtgtgagtggcagaaccaaggctattccaagctacaaacttttctctttggggctatgcaagtgtggaagcctctctcactgccctggaactcctggggcctgggggtgctgtcccttagaaag

SEQ ID NO: 487702 - DNA, 590 bp, Homo sapiens
aggtgacagagtctctcttcccatcagagaatgacaagaagaaagtatttccagtctccccttggaaactagctcccatgccacacagcttccccaaacaatccactaagaacaacgaatttttccaggcactattgttttccagacgctatgagatccttacctgcgtgggggttgatgctcccatgtcccagtgcctccttcaccggggcctgtgtggcgtgggcatttgtgcatggcagggggcgccctttctttcttgtctcatgagtagtatctccagccacctgcaagggaggtgaagtcaggcaatgatggggccatctgtggggagggctcctagctgaggctggtcagctactgccctgctgtgcctgggcagggggtacacccctcctcctcctgttcggggtgytttctgagccttttccagaagccagtgcttggtggacccaaaggaaggaatgtgtgagtggcagaaccaaggctattccaagctacaaacttttctctttggggctatgcaagtgtggaagcctctctcactgccctggaactcctggggcctgggggtgctgtcccttagaaag

SEQ ID NO: 487703 - DNA, 590 bp, Homo sapiens
aggtgacagagtctctcttcccatcagagaatgacaagaagaaagtatttccagtctccccttggaaactagctcccatgccacacagcttccccaaacaatccactaagaacaacgaatttttccaggcactattgttttccagacgctatgagatccttacctgcgtgggggttgatgctcccatgtcccagtgcctccttcaccggggcctgtgtggcgtgggcatttgtgcatggcagggggcgccctttctttcttgtctcatgagtagtatctccagccacctgcaagggaggtgaagtcaggcaatgatggggccatctgtggggagggctcctagctgaggctggtcagctactgccctgctgtgcctgggcagggggtacacccctcctcctcctgttcggggtgttttctgagccttttccagaagccagtgcttggtggacccaaaggaaggaatgtgtgagtggcagaaccaaggctattccaagctacaaacttttctctttggggctatgcaagtgtrgaagcctctctcactgccctggaactcctggggcctgggggtgctgtcccttagaaag

SEQ ID NO: 487704 - DNA, 600 bp, Homo sapiens
atttaatttctgatgctcagcccctcttctgtttgacaccaaaraagaatcctaatacttataagtaaaccgagtcaaatgcagggatttcttagccactgtgggcttaaaacaccatcgattccgaagaccccccccctccaatcctctacctcctgggacagagataattgtggaggaggaggagcgggtgctaggcaaatgccctgagtgggagtttccacttctcagtggtcacgtggcctgtacagagccaacacgtgcaatgtcccatccagcctcggcttaggacatggggagcactgccttgccactgtctgtgggtcccaactagaccattcactaaagtcttggatagagctgaacccccatcccggctcccaggcaagtgtctctgggacatttccagatccaagacccccggttctctcacaggcctgttcctgcagtcaacctcagctccccactccaggcccatgaaaatgtatagggtctgccacaccactgcacaggcaggacctcctctggggctgtctgtggccctctcagacctacttggcacctgccgctcttctgcattctgctgtcctgccaggccct

SEQ ID NO: 487705 - DNA, 518 bp, Homo sapiens
cagtgactcctgagatcagagctgggtcctgaacctccacgttggcttggggctgaggacttgctgcaggaaagcagggccctcctggggcacagacgaggtggagagggctgaagcaaagctgagacctgccctctgcatcctgggtgcgtgtgcccctcaggaagaactaacagcacctgctgtaagccagaagtacacagggtcacctcatccagatctggctctaagttaatgagaccttgagccttcctagtaagtcgctgacagcccatgaggaagaccccatccctgacttcagaatgctggtgctcgaagacacgcagtggccctggaggatgtgatgaccacatgaaaccccgctgtttctcctcaaccaacagaccaactgtaaacaggtgtgctcgtttcccggaaccrccagaacaaaaagctaccacacgccggggggcttgaaacaacaggaattggttcccccacagttctgggggctggaagcctgaaatcaaggtctcagc

SEQ ID NO: 487706 - DNA, 518 bp, Homo sapiens
cagtgactcctgagatcagagctgggtcctgaacctccacgttggcttggggctgaggacttgctgcaggaaagcagggccctcctggggcacagacgaggtggagagggctgaagcaaagctgagacctgccctctgcatcctgggtgcgtgtgcccctcaggaagaactaacagcacctgctgtaagccagaagtacacagggtcacctcatccagatctggctctaagttaatgagaccttgagccttcctagtaagtcgctgacagcccatgaggaagaccccatccctgacttcagaatgctggtgctcgaagacacgcagtggccctggaggatgtgatgaccacatgaaaccccgctgtttctcctcaaccaacagaccaactgtaaacaggtgtgctcgtttcccggaaccgccagaacaaaaagctaccacacgccggrgggcttgaaacaacaggaattggttcccccacagttctgggggctggaagcctgaaatcaaggtctcagc

SEQ ID NO: 487707 - DNA, 460 bp, Homo sapiens
tcttaatttctccttaccattagagcactcagtgatcacgtaagttgtgcgattgtttgtttcgcttaactgtttttttgttgttgattgtttctgtttttgttgttttggtctttttcccattgacctctatctggcttgatcaaatctgaaggaagttccaaattatggggaacaaggcctctgaagtggctgaattcccctccccacccccacacacaatggtggcgtgatggggggagaaaarcggccagcaaaaggaaaaaaaaaagaggaaagattttgattttgactactaaggggctttattcatataacaaggccacattttcactagctaggccaaactgaaagagtaatgactgtacttctgtgtcctcgttgaaatttgtcctagttgaaatatggaatgagatttaaaaagattttttcaaagaagctcaatggttaaaagtcagtt

SEQ ID NO: 487708 - DNA, 513 bp, Homo sapiens
ccttagcaagtttctggaatgcaaacgtatggtgttgacwtgatggctgctgtcctttaactgatggctgctgtccttccttgggacccactgacctctccatcccatgtgcgaagagccaagcatttgggcttatgttcctttatccttgtgattttagagcatttcccctccacagtcttgaacgagaatctatctggtttaggcagaagcatctgtgccggatgttactgctgaaggctggctgcggagttcctgcttttctggcccctgccaattgatggagcaccccagtggccagagcctcctctctgcccccatgcagcgcggcccagccctgtcactctgggctgtgggtgaggaagccacataggcgtggagggggctgggtctgggctcacactcacctctgcaggcgccttccccagggcctcctgtgggcctgggacatcatctccctgactcagagcaagtcctgatttacaaacagggcctgagagatgaaggtggcca

SEQ ID NO: 487709 - DNA, 410 bp, Homo sapiens
agctggactcagtttaggtgatcccaattttgttacaacatcgaaagcatcataatcaggagcaagtcgaacatatgccttcttctctttatcaggacaaatcagggtggtgaccttggccacatcactgtcatagagcttcttcacagcctgtctgatctggtgcttgttggctttaacatccacagtgaacacaagcrtgttgttttcttctatcttcttcacggccgactcagtggtcagcggaaacttgatgatagcatagtggccaagcttgtttctcctgggggtgctcttctgaggatatctgggctgcctccggagtcgcagtgtcttgggccgcctgaaggtgagtgacatgcggatcctcttttttgcgtgtggctgcggacacctttcaacacgccttc

SEQ ID NO: 487710 - DNA, 410 bp, Homo sapiens
agctggactcagtttaggtgatcccaattttgttacaacatcgaaagcatcataatcaggagcaagtcgaacatatgccttcttctctttatcaggacaaatcagggtggtgaccttggccacatcactgtcatagagcttcttcacagcctgtctgatctggtgcttgttggctttaacatccacagtgaacacaagcatgttgttttcttctatcttcttcacggccgactcagtggtcagcggaaacttgatgatagcatagtggccaagcttgtttctcctgggggtgctcttctgaggatatctgggctgcctccggagtcgcagtgtcttgggccgcctgaaggtgagtgacatgcggatcytcttttttgcgtgtggctgcggacacctttcaacacgccttc

SEQ ID NO: 487711 - DNA, 484 bp, Homo sapiens
ttgtgacccttatcttctgcactgggaattacagatttttttcagggtttttctaacgtgaaaagagtttattggtgtaggaaaacatctggttccaaaatatagatcatccttmttgagccccatgatgcgttatcttaatttttaaagccttttttgtctcatactggagtttattgtaccccttaaaaatattaagtcacatatttaacctgaaaaaagcaaaaatcattataaaaatctttaggctgggtgtggtggcttatgcttgtaatcctcgcgctttgacaggccaaggtgggtggattgcttaaaacccaggagttgtagaccagcctgggcaacatggtgaaaccccatttctgcaaaaaatacaaaaaattagccaggcatggtggcatgtacctgtaatcccagctactcgagaggctgaagtgggaggattgctttagcttgggagttcaaagctgcagtaagccatgat

SEQ ID NO: 487712 - DNA, 484 bp, Homo sapiens
ttgtgacccttatcttctgcactgggaattacagatttttttcagggtttttctaacgtgaaaagagtttattggtgtaggaaaacatctggttccaaaatatagatcatccttattgagccccatgatgcgttatcttaatttttaaagccttttktgtctcatactggagtttattgtaccccttaaaaatattaagtcacatatttaacctgaaaaaagcaaaaatcattataaaaatctttaggctgggtgtggtggcttatgcttgtaatcctcgcgctttgacaggccaaggtgggtggattgcttaaaacccaggagttgtagaccagcctgggcaacatggtgaaaccccatttctgcaaaaaatacaaaaaattagccaggcatggtggcatgtacctgtaatcccagctactcgagaggctgaagtgggaggattgctttagcttgggagttcaaagctgcagtaagccatgat

SEQ ID NO: 487713 - DNA, 484 bp, Homo sapiens
ttgtgacccttatcttctgcactgggaattacagatttttttcagggtttttctaacgtgaaaagagtttattggtgtaggaaaacatctggttccaaaatatagatcatccttattgagccccatgatgcgttatcttaatttttaaagccttttttgtctcatactggagtttattgtaccccttaaaaatattaagtcacatatttaacctgawaaaagcaaaaatcattataaaaatctttaggctgggtgtggtggcttatgcttgtaatcctcgcgctttgacaggccaaggtgggtggattgcttaaaacccaggagttgtagaccagcctgggcaacatggtgaaaccccatttctgcaaaaaatacaaaaaattagccaggcatggtggcatgtacctgtaatcccagctactcgagaggctgaagtgggaggattgctttagcttgggagttcaaagctgcagtaagccatgat

SEQ ID NO: 487714 - DNA, 484 bp, Homo sapiens
ttgtgacccttatcttctgcactgggaattacagatttttttcagggtttttctaacgtgaaaagagtttattggtgtaggaaaacatctggttccaaaatatagatcatccttattgagccccatgatgcgttatcttaatttttaaagccttttttgtctcatactggagtttattgtaccccttaaaaatattaagtcacatatttaacctgaaaaaagcaaaaatcattataaaaatctttaggctgggtgtggtggcttatgcttgtaatcctmgcgctttgacaggccaaggtgggtggattgcttaaaacccaggagttgtagaccagcctgggcaacatggtgaaaccccatttctgcaaaaaatacaaaaaattagccaggcatggtggcatgtacctgtaatcccagctactcgagaggctgaagtgggaggattgctttagcttgggagttcaaagctgcagtaagccatgat

SEQ ID NO: 487715 - DNA, 646 bp, Homo sapiens
ctgacctcacttctaaatcacccagctatttgtgcaascaacatggttcaagctcagggctaggggctcgccctgtgtggtggcgggagggtcagcaactgtcacatctcaagaggtggcaggaagtctatgtagattctctttcacaggcaaatttcaatgaatcaccaggttgtcttgaattcccgatgaagtctccttataaaggatgtctgtaactaaacttctggaatctgcctcacaccaggctcagatgacttttgtccagatctggtttcctgagcatctgttccttgttttgagagctgaggaggaactggctagaatgaggagcatccccatctcaaggtttcaaggtggagggtcgagccctggttccgtctctgaccctcagctccccgtgtggtcagaaggcaagtgctttctacttgccagggcccgtgcagcagactggggctggtggcaggcacctgcagacacaggcatggtggcaggagagacaccccaggccttcagaagagggtctgaggggagcccacggagatgcagcagatgcaggaagcagtcactccaagagaaaaagagaggtgagctcaaaataccaaatgccactgtaggcctgaaaccaaactggctaggaccaagc

SEQ ID NO: 487716 - DNA, 646 bp, Homo sapiens
ctgacctcacttctaaatcacccagctatttgtgcaaccaacatggttcaagctcagggctaggggctcgccctgtgtggtggcgggagggtcagcaactgtcacatctcaagaggtggcaggaagtctatgtagattctctttcacaggcaaatttcaatgaatcaccaggttgtcttgaattcccgatgaagtctccttataaaggatgtctgtaactaaacttctggaatctgcctcacaccaggctcagatgacttttgtccagatctggtttcctgagcatctgttccttgttttgagagctgaggaggaactggctagaatgaggagcatccccatctcaaggtttcaaggtggagggtcgagccctggttccgtctctgaccctcakctccccgtgtggtcagaaggcaagtgctttctacttgccagggcccgtgcagcagactggggctggtggcaggcacctgcagacacaggcatggtggcaggagagacaccccaggccttcagaagagggtctgaggggagcccacggagatgcagcagatgcaggaagcagtcactccaagagaaaaagagaggtgagctcaaaataccaaatgccactgtaggcctgaaaccaaactggctaggaccaagc

SEQ ID NO: 487717 - DNA, 578 bp, Homo sapiens
ctgtcaatcaatttggagtctgtctatgtgtgaaaccctgagaaaaagggttaaactctggggattaacascttccgaggctgcaagaagctggacagtgtaaaaagcagagccaaatgacgcaggtgggctgggtgtgcaggagcacttggtacaaggtggagtaacacatactcagatcttaaggcaactgagccttggggtgccgagcctaggacaggcagcagcaggctccaggggctcctctcacctgtggttctcagtggatccacttgggaagctgtttaaaaatctcccagttgcggggaggaactcactccaaacctatgtaatataacaattcatgggagaaaggtggggctggcagctcctattttacaaagttcattcatatcagagatttttttcaatagtagggggcccaagctttgaggttagagaggttaaatgacttggccagtatcagaagctactgaggaggaggaggtggggtttgaatccaggcattagatccaaaccatttgctgtttgccattctactgccctcttaatataaaacaatccaaatatgagtaagg

SEQ ID NO: 487718 - DNA, 349 bp, Homo sapiens
ttgacaagctgtcaatcaatttggagtctgtctatgtgtgaaaccctgagaaaaagggttaaactctggggattaacaccttccgaggctgcaagaagcyggacagtgtaaaaagcagagccaaatgacgcaggtgggctgggtgtgcaggagcacttggtacaaggtggagtaacacatactcagatcttaaggcaactgagccttggggtgccgagcctaggacaggcagcagcaggctccaggggctcctctcacctgtggttctcagtggatccacttgggaagctgtttaaaaatctcccagttgcggggaggaactcactccaaacctatgtaatataacaat

SEQ ID NO: 487719 - DNA, 493 bp, Homo sapiens
cctcagcccacaaaccacatacaatgtcctcagttgctccacacgttctctcagggctcagaggaaacattcaaattcctcagtccttatgacctgccccctccacccgacrcacacaacgggtcatgtgattcccctcgttcccccatgaacatctgggctccagccaagactgctccttcaccagccccaagaagccatgctcctctgcctctggaggactttttaaatgacctggaccctctctggggctggtatttattccctaatctcccaacatacttggatttgcccactgcgctgtctcccaggcagatgatcttcacgttgtcatcagcatcatacttcccttggtccaactcactcggtttggttttgtcttctgccattggctcctagccgtagagaggggtccagcccaagggaggggagggtattgtcactgtctgggaagatcaacaagaggctgttgtcagagataagtcccctcaac

SEQ ID NO: 487720 - DNA, 299 bp, Homo sapiens
gccatgctcctctgcctctggaggactttttaaatgacctggaccctctctggggctggtatttattccctaatctcccaacatacttggatttgcccactgcgctgtctcccaggcagatgatcttcacgttgtcatcagcatcatacttcccttggtccaactcactcggtttggttttgtcttctgccattggctcctagcygtagagaggggtccagcccaagggaggggagggtattgtcactgtctgggaagatcaacaagaggctgttgtcagagataagtcccctcaacca

SEQ ID NO: 487721 - DNA, 647 bp, Homo sapiens
tgcttagtacagtgcctggcacatactcaatgctctatgcatrtcagctagtacttaatgatgctaataaacatgttatgtccctaagcacgggtgggatcttgcctgacgtccttctctctgcgtcctggtcagtcttcacatggtgggcatcctttatttccggtcacacacgggtggtacacagagcgtgctgtttctttcctgccagaaggttcctgctgcagctctcctgctagtttagcttagccttctggtttgagggatgagtcacatgtaccatcacttcccaggaccaacaggacctttcaggaaagctatccctgcttacacagagaattgcccttgcctaacactgaagcctggcagagtaacatgaaataaccacagcaattctaaaattagaattagcacgcctagaataacaggtataaccttctcttgtactttatcacttgcttcatttctgctcagcctaattttcacttgatgtgtagatttattttttgttcacccatccagaaaatgttgactgaggaattactctgtgttaggcgctgttgtaggagcaagggatacaatgatgatcaaggcagatgcagcccttaccttcaggtcgtggagtccggatacagactggaggcagg

SEQ ID NO: 487722 - DNA, 326 bp, Homo sapiens
aacagcttgtgaaatcaaccctactttgtggggagaggattrgttaaggattctagccatgagaaccaagaagaggagggtaatctgttcatgcctattatggggctttgggggagcagtttcagcctcaacctggagaatgttttagaaggccagagaaaggaaccctgcaaatcatgtgagctggcccctcactttgagatgaagtgtccatacagcagtaacgccaccctctgtagtggttctagagtgtggcaatctggaggggtcattatggaaaagggctgaagcataagaatgtaggcccaatactgagatagaaagag

SEQ ID NO: 487723 - DNA, 326 bp, Homo sapiens
aacagcttgtgaaatcaaccctactttgtggggagaggattggttaaggattctagccatgagaaccaagaagaggaggrtaatctgttcatgcctattatggggctttgggggagcagtttcagcctcaacctggagaatgttttagaaggccagagaaaggaaccctgcaaatcatgtgagctggcccctcactttgagatgaagtgtccatacagcagtaacgccaccctctgtagtggttctagagtgtggcaatctggaggggtcattatggaaaagggctgaagcataagaatgtaggcccaatactgagatagaaagag

SEQ ID NO: 487724 - DNA, 506 bp, Homo sapiens
aggctaatgaacagccaccttcggagcaacagggtcacttcagtcctccctgtttacttccaagctgctgagagtcttatgcacatttcctcttctcacttgcctcttcacatccctagctgccgcaggaatttatggcttaattaaagtgggaagcagggtttatacatgtttatataaagttatattttcctccacctctttgttggaagaaaactcaaatgttaaaattcttaggagcccaggagttcgagactagcctgggaaacattgcaaccccatctctacaaagaataaaaaaattagctgggagtggtggtcccagctacttgggaggctgaggcaggagaatcatttgagcscaggaggttgaggctgcagtgagccatgttagtgccattgcactccagcctgggtgacagagtgagatcttgtttaaaaataaagaaagaaagaaacacctagaaaggacactagagataaatctagttcatgctccttgtttt

SEQ ID NO: 487725 - DNA, 260 bp, Homo sapiens
gaagcattttgcactagacttaggaataatacttccagttccaaggaagtgaagaagggggaacatgtttggcatcggaggctgtgtttttgtttgcttgcttgtttttcttttaatgccagaacaaaataccccactcacgttcatagtaccccaggamatgtgcaaatcgggaaagccacagaagccacaaccgaaggcaagaaaagatgacttgacgccctggaaggttacgttcaggtggtttttagaggaacgta

SEQ ID NO: 487726 - DNA, 615 bp, Homo sapiens
cagctggggaattaatttggtatgcattctcaggagccactcatctgctggcagaggtagcagaagaatgcccttagtgtaagtcctctacaaccatacaccaaatgtgctccctgcatttcaaattccattgtagaaagtctctgataatctcacttataccatgagccattcctcagtatctgtcctcttcctgttagtgttctacaattcctttctccttaatttttctccgctttacaaaatgtcacacagacaagtgcatratacttaaacaagcttttaaaaataatgctcataaatagctttggttctgtcataatattcgtatttataaacattttaagtcaattctcttcttttgttttcatttcagaaatatccatgtcctgaataaaagttgtgtcttgattagtttattatgtaacaatttagtgtgtttgacatttctaacttttatttctaacatttgctttattatagaacaataaacatgcagtgattgatttttcttacttcaagtggatgagtgagcaagtgactaaaatctgtgaattcttcagtgtatggtgcttgccagtgcatctgagaatctagggactttctgaaatagta

SEQ ID NO: 487727 - DNA, 615 bp, Homo sapiens
cagctggggaattaatttggtatgcattctcaggagccactcatctgctggcagaggtagcagaagaatgcccttagtgtaagtcctctacaaccatacaccaaatgtgctccctgcatttcaaattccattgtagaaagtctctgataatctcacttataccatgagccattcctcagtatctgtcctcttcctgttagtgttctacaattcctttctccttaatttttctccgctttacaaaatgtcacacagacaagtgcataatacttaaacaagcttttaaaaataatgctcataaatagctttggttctgtcataatattcgtatttataaacattttaagtcaattctcttcttttrttttcatttcagaaatatccatgtcctgaataaaagttgtgtcttgattagtttattatgtaacaatttagtgtgtttgacatttctaacttttatttctaacatttgctttattatagaacaataaacatgcagtgattgatttttcttacttcaagtggatgagtgagcaagtgactaaaatctgtgaattcttcagtgtatggtgcttgccagtgcatctgagaatctagggactttctgaaatagta

SEQ ID NO: 487728 - DNA, 713 bp, Homo sapiens
cagctggggaattaatttggtatgcattctcaggagccactcatctgctggcagaggtagcagaagaatgcccttagtgtaagtcctctacaaccatacaccaaatgtgctccctgcatttcaaattccattgtagaaagtctctgataatctcacttataccatgagccattcctcagtatctgtcctcttcctgttagtgttctacaattcctttctccttaatttttctccgctttacaaaatgtcacacagacaagtgcataatacttaaacaagcttttaaaaataatgctcataaatagctttggttctgtcataatattcgtatttataaacattttaagtcaattctcttcttttgttttcatttcagaaatatccatgtcctgaataaaagttgtgtcttgattagtttattatgtaacaatttagtgtgtttgacatttctaacttttatttctaacatttgctttattatagaacaataaacatgcagtgattgatttttcttacttcaagtggatgagtgagcaagtgactaaaatctgtgaattcttcagtgtatggtgcttgccagtgcatctgagaatctagggactttctgaaatagtacttccttgctatgaggactgaagttgsattagaatccttttcaatgaagatcagatgtcctgagtagaattcttactattgggtcctgaatcttacat

SEQ ID NO: 487729 - DNA, 511 bp, Homo sapiens
cgcctgtagtcccagctactcaggaggctgaggcaggagaatggcgtgaacccgggaggcggagcttgcagtgagctgagatcgcaccactgcactccagcctgggtgacagagcgagactctgtctcaaaaaaaaaaaaaaacaaacaaaaaaaccggagatwtggttaacaaaatagtcaaagtcactcttacagaagttttgttttattttttgttttttaaaatttttttaccattttgtagctgacaagtactgacaataaactgctataagcatgtgtagaaaaaggctcaccttgagtagttaagagtaaggaaaaggaatagtgtgtagcatcgtcttagtggtaagacttaagttgatttagtagcaaatggaagtactagtgaaccacatagatttcagaagtaggagtaaaaggttagaagatgtgtcattttaatcttctctagactttttcttaatttttagaaatgtaagtggactgaacagaggaaaaccaaaaca

SEQ ID NO: 487730 - DNA, 511 bp, Homo sapiens
cgcctgtagtcccagctactcaggaggctgaggcaggagaatggcgtgaacccgggaggcggagcttgcagtgagctgagatcgcaccactgcactccagcctgggtgacagagcgagactctgtctcaaaaaaaaaaaaaaacaaacaaaaaaaccggagatttggttaacaaaatagtcaaagtcactcttayagaagttttgttttattttttgttttttaaaatttttttaccattttgtagctgacaagtactgacaataaactgctataagcatgtgtagaaaaaggctcaccttgagtagttaagagtaaggaaaaggaatagtgtgtagcatcgtcttagtggtaagacttaagttgatttagtagcaaatggaagtactagtgaaccacatagatttcagaagtaggagtaaaaggttagaagatgtgtcattttaatcttctctagactttttcttaatttttagaaatgtaagtggactgaacagaggaaaaccaaaaca

SEQ ID NO: 487731 - DNA, 165 bp, Homo sapiens
tttgatgggaggaaaaataagtgggaggtgaggagtaactcctgggctctgatgagtattcwaggcaagtacagatctggaaagcctgtatgcaaaggaggaactcactgaaaagtgctggcctgaggagggcagaagggagggctggggaagccagcaggggga

SEQ ID NO: 487732 - DNA, 403 bp, Homo sapiens
gggacttgcaagcagggagggcagggtgagacattcagaggaaacgacgacaggaaatggtgacagatagggaaygaggatgaagggaagggagagccagtgacgactggcagtggagtggggagcaccgccacctctcctcctccacttgcccctcctgtggcactggacaagttagtgggcttttcgttgtccatgggcttttttggtggggatgtgaccagctttgaacccttccccttaaacatgctcctcctgcacggaagagacaggggcaggggagagactctctccccaccacccagctcaggccccagcacagcccggcttctggcctcactgacgtctgtgcccagtgacgcaggcaggtgagctcctggcaaattagcattgcaggctgtgc

SEQ ID NO: 487733 - DNA, 403 bp, Homo sapiens
gggacttgcaagcagggagggcagggtgagacattcagaggaaacgacgacaggaaatggtgacagatagggaatgaggatgaagggaagggagagccagtgacgactggcagtggagtggggagcaccgccacctctcctcctccacttgcccctcctgtggcactggacaagytagtgggcttttcgttgtccatgggcttttttggtggggatgtgaccagctttgaacccttccccttaaacatgctcctcctgcacggaagagacaggggcaggggagagactctctccccaccacccagctcaggccccagcacagcccggcttctggcctcactgacgtctgtgcccagtgacgcaggcaggtgagctcctggcaaattagcattgcaggctgtgc

SEQ ID NO: 487734 - DNA, 403 bp, Homo sapiens
gggacttgcaagcagggagggcagggtgagacattcagaggaaacgacgacaggaaatggtgacagatagggaatgaggatgaagggaagggagagccagtgacgactggcagtggagtggggagcaccgccacctctcctcctccacttgcccctcctgtggcactggacaagttagtgggcttttcgttgtccatgggcttttttggtggggatgtgaccagctttgaacccttccccttaaacatgctcctcctgcacggaagagacaggggcaggggagagactctctccccaccacccagctcaggccccagcacagcccggcytctggcctcactgacgtctgtgcccagtgacgcaggcaggtgagctcctggcaaattagcattgcaggctgtgc

SEQ ID NO: 487735 - DNA, 403 bp, Homo sapiens
gggacttgcaagcagggagggcagggtgagacattcagaggaaacgacgacaggaaatggtgacagatagggaatgaggatgaagggaagggagagccagtgacgactggcagtggagtggggagcaccgccacctctcctcctccacttgcccctcctgtggcactggacaagttagtgggcttttcgttgtccatgggcttttttggtggggatgtgaccagctttgaacccttccccttaaacatgctcctcctgcacggaagagacaggggcaggggagagactctctccccaccacccagctcaggccccagcacagcccggcttctggcctcactgrcgtctgtgcccagtgacgcaggcaggtgagctcctggcaaattagcattgcaggctgtgc

SEQ ID NO: 487736 - DNA, 516 bp, Homo sapiens
tgcagctggctcattcccatatagggggaggccagagccgggggcctgccacaagttggaaggctggggaaggggaggccagcagaggtgtcctggctgtgggtggctctgagggggctctcagggrtggggctaaatctcaggggcaggattaggtaaatcaaaccaattctagccacagatttaaagtttggaaaaaaaaaaaaaacccagcctggcggaaagaatttaaattataaaaacttagaagtatggaatgtgaaatcatcctgtaggtgcttatttaacaacgaaatcatcccgacacaatgagccatatgtgaaaagtcctccttccccaacacatcccccaacaggcactcctcaaacctctaccacccaagtgctggcatcctccctgtcctgcttcacctgagacaccccttgtctcattagacatgcaactacgggaggggtgacaggaagacaagacactatttcctcaggcccagtttggtgtggggagaaagcctcctg

SEQ ID NO: 487737 - DNA, 516 bp, Homo sapiens
tgcagctggctcattcccatatagggggaggccagagccgggggcctgccacaagttggaaggctggggaaggggaggccagcagaggtgtcctggctgtgggtggctctgagggggctctcagggatggggctaaatctcaggggcaggattakgtaaatcaaaccaattctagccacagatttaaagtttggaaaaaaaaaaaaaacccagcctggcggaaagaatttaaattataaaaacttagaagtatggaatgtgaaatcatcctgtaggtgcttatttaacaacgaaatcatcccgacacaatgagccatatgtgaaaagtcctccttccccaacacatcccccaacaggcactcctcaaacctctaccacccaagtgctggcatcctccctgtcctgcttcacctgagacaccccttgtctcattagacatgcaactacgggaggggtgacaggaagacaagacactatttcctcaggcccagtttggtgtggggagaaagcctcctg

SEQ ID NO: 487738 - DNA, 401 bp, Homo sapiens
aggctggggaaggggaggccagcagaggtgtcctggctgtgggtggctctgagggggctctcagggatggggctaaatctcaggggcaggattaggtaaatcaaaccaattctagccacagatttaaagtttggaaaaaaaaaaaaaacccagcctggcggaaagaatttaaattataaaaacttagaagtatggaatgtgaaatcatcctgtaggtgcttatttaacaacgaaatcatcccgacacaatgagccatatgtgaaaagtcmtccttccccaacacatcccccaacaggcactcctcaaacctctaccacccaagtgctggcatcctccctgtcctgcttcacctgagacaccccttgtctcattagacatgcaactacgggaggggtgacag

SEQ ID NO: 487739 - DNA, 516 bp, Homo sapiens
tgcagctggctcattcccatatagggggaggccagagccgggggcctgccacaagttggaaggctggggaaggggaggccagcagaggtgtcctggctgtgggtggctctgagggggctctcagggatggggctaaatctcaggggcaggattaggtaaatcaaaccaattctagccacagatttaaagtttggaaaaaaaaaaaaaacccagcctggcggaaagaatttaaattataaaaacttagaagtatggaatgtgaaatcatcctgtaggtgcttatttaacaacgaaatcatcccgacacaatgagccatatgtgaaaagtcctccttccccaacacatcccccaacaggcactcctcaarcctctaccacccaagtgctggcatcctccctgtcctgcttcacctgagacaccccttgtctcattagacatgcaactacgggaggggtgacaggaagacaagacactatttcctcaggcccagtttggtgtggggagaaagcctcctg

SEQ ID NO: 487740 - DNA, 401 bp, Homo sapiens
aggctggggaaggggaggccagcagaggtgtcctggctgtgggtggctctgagggggctctcagggatggggctaaatctcaggggcaggattaggtaaatcaaaccaattctagccacagatttaaagtttggaaaaaaaaaaaaaacccagcctggcggaaagaatttaaattataaaaacttagaagtatggaatgtgaaatcatcctgtaggtgcttatttaacaacgaaatcatcccgacacaatgagccatatgtgaaaagtcctccttccccaacacatcccccaacaggcactcctcaaacctctmccacccaagtgctggcatcctccctgtcctgcttcacctgagacaccccttgtctcattagacatgcaactacgggaggggtgacag

SEQ ID NO: 487741 - DNA, 449 bp, Homo sapiens
agggccgcaccacgggggtgggcagcgacggcaggtwcttcggcaggacggccgtcgaggtcggggagccgatgccgcggccaacggggcgagtgtccggatgcccctcgcttcccgccgcgcgccgccgcgccctctcctggcccttgtccgcctgctgcctccgggcccagctgggaggcccctgcccggctttgctccctcactcccgcgtcctcaccctccagcgccccactctcgccgcgctcgcagcctccccggcgcaccccggacactgggttctattagtacccaccgcccccaaaagcctgaggggtttccgtcgttcctggagccactccgggcgccctggactcttctccgactctgcgcacatcccgcacctgctcatttttctttcggacattctcttacccggccctgtagattccaaggcggctcccagtttt

SEQ ID NO: 487742 - DNA, 449 bp, Homo sapiens
agggccgcaccacgggggtgggcagcgacggcaggtacttcggcaggacggccgtcgaggtcggggagccgatgccgcggccaacggggcgagtgtccggatgcccctcgcttcccgccgcgcgccgccgcgccctctcctggcccttgtccgcctgctgcctccgggcccagctgggaggcccctgcccggctttgctccctcactcccgcgtcctcaccctccagcgccccactctcgccgcgctcgcagcctccccggcgcaccccggacactgggttctattagtacccaccgcccccaaaagcctgaggggtttccgtcsttcctggagccactccgggcgccctggactcttctccgactctgcgcacatcccgcacctgctcatttttctttcggacattctcttacccggccctgtagattccaaggcggctcccagtttt

SEQ ID NO: 487743 - DNA, 424 bp, Homo sapiens
tctggttgctttttatggtgtcatttaacytttcactctgttttttcctggttaactggaagttagttctaaaggcttttaggcctggtataacaaaataccaaaaactggatgacttataaagaacagaaatttatttctcacagttctagagactagcaagtttaagatcaaggagcatgcggttttcatatctggttaggaccaactttctggttcatagattggccttcttgctgggccctcacatagtgggagagactagctagctctctggggcctcttttataagggcactaattccaatcatgagtgctctgtccttatgatctaatgaacccctaaaggccccaccttttaataccagcacctttggggttaggatgtcaacatattaattttgggaagacatacacgttcagcc

SEQ ID NO: 487744 - DNA, 424 bp, Homo sapiens
tctggttgctttttatggtgtcatttaacttttcactctgttttttcctggttaactggaagttagttctaaaggcttttaggcctgstataacaaaataccaaaaactggatgacttataaagaacagaaatttatttctcacagttctagagactagcaagtttaagatcaaggagcatgcggttttcatatctggttaggaccaactttctggttcatagattggccttcttgctgggccctcacatagtgggagagactagctagctctctggggcctcttttataagggcactaattccaatcatgagtgctctgtccttatgatctaatgaacccctaaaggccccaccttttaataccagcacctttggggttaggatgtcaacatattaattttgggaagacatacacgttcagcc

SEQ ID NO: 487745 - DNA, 424 bp, Homo sapiens
tctggttgctttttatggtgtcatttaacttttcactctgttttttcctggttaactggaagttagttctaaaggcttttaggcctggtataacaaaataccaaaaactggatgacttataaagaacagaaatttatttctcacagttctagagactagcaagtttaagatcaaggagcatgcggttttsatatctggttaggaccaactttctggttcatagattggccttcttgctgggccctcacatagtgggagagactagctagctctctggggcctcttttataagggcactaattccaatcatgagtgctctgtccttatgatctaatgaacccctaaaggccccaccttttaataccagcacctttggggttaggatgtcaacatattaattttgggaagacatacacgttcagcc

SEQ ID NO: 487746 - DNA, 424 bp, Homo sapiens
tctggttgctttttatggtgtcatttaacttttcactctgttttttcctggttaactggaagttagttctaaaggcttttaggcctggtataacaaaataccaaaaactggatgacttataaagaacagaaatttatttctcacagttctagagactagcaagtttaagatcaaggagcatgcggttttcatatctggttaggaccaactttctggttcatagattggccttcttgctgggccctcacatagtgggagagactagctagctctctggggcctcttttataagggcactaattccaatcatgagtgctctgtccttatgatctaatgamcccctaaaggccccaccttttaataccagcacctttggggttaggatgtcaacatattaattttgggaagacatacacgttcagcc

SEQ ID NO: 487747 - DNA, 476 bp, Homo sapiens
tgactttttctaaagtcttctttctctggagatgacattatataatagcwctgttcaatggaagtttctttgatgatggaactgttctataatctgcattgtcccagctactagccatatgtgactactgtaacacttgaaatgtggctagagcaactgaagaactgaattttgcattttacttaattttaattaattaaaatagaaatgcaaataaccataagtggttagtagctaccatactggacagcaaagatctataattcagcatttaaaatcgattttgttttgttttcaaaaatggagtcagactgttacaacccaaaagaactgtaggttaaattaaggtaaatcaccaaatactacatacacatttgggaaatccaaaccagattttttcatgtgataaccacaccctcttttgactttagccttggaggtaatggagtatggcagaaaaaaccctgtatcagcag

SEQ ID NO: 487748 - DNA, 474 bp, Homo sapiens
ctgttttatctgatataagtataggcatccctgctctcttttggtaactgtctgttttcatggaatatctccttctatccctttactttcagtatatgcctattcttaaagtttaaaaatgggtctcttgtaggcagcatctagttggatcttgttgttgatccactcagcyattctacatcttttgattggacagtttaacccatgtaccagcaaggttattattgatagtaaaagacttactcctgccattttgctaattgttttctggttactttgtagataatttgttctcttcttcctctattgttgtctacctttgtggtttggtggtttagttttctgctttgtggttacaatattgttttttaaatattcaacatgaatacactttcttgtttggataacgtgtaaaacgtctacaaggagggatagataataagttttcccttcagaatgcactgctttgcctgg

SEQ ID NO: 487749 - DNA, 474 bp, Homo sapiens
ctgttttatctgatataagtataggcatccctgctctcttttggtaactgtctgttttcatggaatatctccttctatccctttactttcagtatatgcctattcttaaagtttaaaaatgggtctcttgtaggcagcatctagttggatcttgttgttgatccactcagccattctayatcttttgattggacagtttaacccatgtaccagcaaggttattattgatagtaaaagacttactcctgccattttgctaattgttttctggttactttgtagataatttgttctcttcttcctctattgttgtctacctttgtggtttggtggtttagttttctgctttgtggttacaatattgttttttaaatattcaacatgaatacactttcttgtttggataacgtgtaaaacgtctacaaggagggatagataataagttttcccttcagaatgcactgctttgcctgg

SEQ ID NO: 487750 - DNA, 474 bp, Homo sapiens
ctgttttatctgatataagtataggcatccctgctctcttttggtaactgtctgttttcatggaatatctccttctatccctttactttcagtatatgcctattcttaaagtttaaaaatgggtctcttgtaggcagcatctagttggatcttgttgttgatccactcagccattctacatcttttgattggacagtttaacccatgtaccagcaaggttattrttgatagtaaaagacttactcctgccattttgctaattgttttctggttactttgtagataatttgttctcttcttcctctattgttgtctacctttgtggtttggtggtttagttttctgctttgtggttacaatattgttttttaaatattcaacatgaatacactttcttgtttggataacgtgtaaaacgtctacaaggagggatagataataagttttcccttcagaatgcactgctttgcctgg

SEQ ID NO: 487751 - DNA, 307 bp, Homo sapiens
gctgccttgatcttcctgataatgcaggagaccgcagtgtcaacaagatgccattctgtccaataatcagtcgtccaatctaaaccatccaaaaaaaaaaaaatcaatccagttgcttgggattaaaggcatttcaacaggaaagtgccccaggctctgttaacatacagccaatcacttgataaaagaaacagagtaggctttagattaggggaggcagggtagggggagcactgacattgtctctcctatctaatgtctctaagaccatttggkgcacctgcatctagtagccaattattaacct

SEQ ID NO: 487752 - DNA, 307 bp, Homo sapiens
gctgccttgatcttcctgataatgcaggagaccgcagtgtcaacaagatgccattctgtccaataatcagtcgtccaatctaaaccatccaaaaaaaaaaaaatcaatccagttgcttgggattaaaggcatttcaacaggaaagtgccccaggctctgttaacatacagccaatcacttgataaaagaaacagagtaggctttagattaggggaggcagggtagggggagcactgacattgtctctcctatctaatgtctctaagaccatttggtgcacctkcatctagtagccaattattaacct

SEQ ID NO: 487753 - DNA, 447 bp, Homo sapiens
tgccgtcaagtctggaatataagagatactcaataaattagctctccttcctcttgcttctgcctctccataggggcagcagggcataatcagctaggggtatattgaggtctttcaatgctcttttcttgctcttcctaatgcaaatgcaacccacaggcacatgctgtaaactcgctgtgtatccaagagcaagccaccttgcccctctgggcctcagtttacccattgtcataatgagaaaatgaagggtttgctgggctstctaacatccctttcagatctgacttcttaaggccccatgacaggctctgacacacacgcttctgcagttggctatcagcggccatctggcaattagcagtctctgaggcagctaatcccactctgagctggattaaagcagaagtttaaaacatggagataggcaggtgatttctgttagag

SEQ ID NO: 487754 - DNA, 522 bp, Homo sapiens
ctcatatgccccctcgttagtgcccttgatcgctaataatctcagagcagaaaaatggttttatctttcttagttgctattcagagggctgggkgtgggtgattgaacttctctgcttgagaaagaaaagttgctctaggtaagatttaattttactaaagaaaattctcaaaatgactttttccccttaatatttttttgtccttgaaaacagaacccacacaatacaggcagacagttccctaaagtctttgttctctaacaaagacttagagctgagtgcaggcagaggcatggaatcctcactttctcccttttaacacgaagctcaggcttttccaagacatcaggccacaccttaatgaccaagtgcccatcagaagctttgtggtgagagattagatacaattccaggtaaactggagcccacagcccctgtttttcctaatgaagtgtgtctgtgtgtgtgtgtgcatgtgtgtaagagctgaccttgtacttttaaaccatagccaaagatgc

SEQ ID NO: 487755 - DNA, 622 bp, Homo sapiens
taaatatgctgtttctattgcccctgccatcttgaagctttgtacttttaataccataacccataacccatctgattcatgcatcctccattgttattcccaacttgagctttacttcattttaggtagaatcttccctatgagagtgcagggtaaattaaaaagttatatagagaccaaaaggaatacataatctagtactttaatggcktgatttagaaaaccttgttgacaaagctacataagtctgtagtattctgaatgggtaggatgacaaagtgatcagaattgataaaatgaaagaggctgatagatgacataaaatgttctgactcataattctcctgaaagccctctccctgtatgacgccattgccctggaagctcccagggcaaatttattttccattttgcagatgagaatattgaaacacaagtcaagggacttctggtttcagctcttacatgtaaacagtttggaagtcatcactctcattcctacatgaaaaaaagctgaacaaactgaaaatcaatgactttttcttgggcccatcagagaattaggtcatggaacaaaccagcactttgaaatctagagaaacaagtgaatatcaaacaaaat

SEQ ID NO: 487756 - DNA, 622 bp, Homo sapiens
taaatatgctgtttctattgcccctgccatcttgaagctttgtacttttaataccataacccataacccatctgattcatgcatcctccattgttattcccaacttgagctttacttcattttaggtagaatcttccctatgagagtgcagggtaaattaaaaagttatatagagaccaaaaggaatacataatctagtactttaatggcgtgatttagaaarccttgttgacaaagctacataagtctgtagtattctgaatgggtaggatgacaaagtgatcagaattgataaaatgaaagaggctgatagatgacataaaatgttctgactcataattctcctgaaagccctctccctgtatgacgccattgccctggaagctcccagggcaaatttattttccattttgcagatgagaatattgaaacacaagtcaagggacttctggtttcagctcttacatgtaaacagtttggaagtcatcactctcattcctacatgaaaaaaagctgaacaaactgaaaatcaatgactttttcttgggcccatcagagaattaggtcatggaacaaaccagcactttgaaatctagagaaacaagtgaatatcaaacaaaat

SEQ ID NO: 487757 - DNA, 597 bp, Homo sapiens
atatgttctaatacctctgtaggccgggcccatgcagatttgcatcatgaaagtgttagacccagccatatgtcacaatactcaatgtatgcagggcccaggcaggagaaggaagtcacattacctaggtgctgggcccagtcatatatcacaatctgtccttgggcagagagatcaagcaatagaggaaagtcacttcacctgggtgttagggccagcaatatttcacaattctctctgtgaaaagtgcttagacaaaattatagrctcacatcatccaggtgctaggtttagtcatttgccacaatcccatctgtagggcccaggcagaagggtcaaatcacttaggtgctgggaaaaggtgtatgtcacaatcacacctgcaaggtctagggattatattaaacatcccacacacgtcctggttctaggtatgagagtcaataccttctctattttgggtctaatttcgtgagtcatagtcttaaaggtggctagatctgtgtctgaaagcctcaatccctcctgtgaactattttcccctagtggagtcagaggctcacaagagtgctgaatctttatctgagagtcaccaac

SEQ ID NO: 487758 - DNA, 597 bp, Homo sapiens
atatgttctaatacctctgtaggccgggcccatgcagatttgcatcatgaaagtgttagacccagccatatgtcacaatactcaatgtatgcagggcccaggcaggagaaggaagtcacattacctaggtgctgggcccagtcatatatcacaatctgtccttgggcagagagatcaagcaatagaggaaagtcacttcacctgggtgttagggccagcaatatttcacaattctctctgtgaaaagtgcttagacaaaattataggctcacatcatccaggtgctaggtttagtcatttgccacaatcccatctgtagggcccaggcagaagggtcaaatcacttaggtgctgggaaaaggtgtatgtcacaatcacacctgcaaggtctagggattatattaaacatcccacacacgtcctggttctaggtatgagagtcaataccttctctatyttgggtctaatttcgtgagtcatagtcttaaaggtggctagatctgtgtctgaaagcctcaatccctcctgtgaactattttcccctagtggagtcagaggctcacaagagtgctgaatctttatctgagagtcaccaac

SEQ ID NO: 487759 - DNA, 584 bp, Homo sapiens
taataagcatggtgacgccggacgcagtggctcaygcctgtaatcccagcactttgggaggcagaggtgggcagatcacttgaggtcaggagttcaagaccaacctgaccaacatggtgaaacctcatctctactaaaaatacacaaaaattagccaggcgtggtggcaaatgcttgtaatcccagcaacttgggaggctgaggcaggagaatcacttgaactcaggaggcagagattgcagtgagccgagatggtgccactacactccagcctgggcaacagagcaagattctgtctcaaatatatatatatagatatatagatatatatatctatatatatatatgacaattaataagcatggagaagaaaatgaacaaaaaggaaagatatgtaaagataggctaataatataattttaaaaataaaaataattgtattaaaataaaaaattttgaaaaaataattttgtgtagtaaaagagaaaacaaaaacttttctataatatcaagaagttaagaaaatgtgagtactacagaaaaagttctcaaagaagagacacaacatgcttttataaagtaat

SEQ ID NO: 487760 - DNA, 584 bp, Homo sapiens
taataagcatggtgacgccggacgcagtggctcatgcctgtaatcccagcactttgggaggcagaggtgggcagatcacttgaggtcaggagttcaagaccaacctgaccaacatggtgaaacctcatctctactaaaaatacacaaaaattagccaggcgtggtggcaaatgcttgtaatcccagcaacttgggaggctgaggcaggagaatcacttgaactcaggaggcagagattgcagtgagccgagatggtgccactacactccagcctgggcaacagagcaagattctgtctcaaatatatatatatagatatatagatatatakatctatatatatatatgacaattaataagcatggagaagaaaatgaacaaaaaggaaagatatgtaaagataggctaataatataattttaaaaataaaaataattgtattaaaataaaaaattttgaaaaaataattttgtgtagtaaaagagaaaacaaaaacttttctataatatcaagaagttaagaaaatgtgagtactacagaaaaagttctcaaagaagagacacaacatgcttttataaagtaat

SEQ ID NO: 487761 - DNA, 584 bp, Homo sapiens
taataagcatggtgacgccggacgcagtggctcatgcctgtaatcccagcactttgggaggcagaggtgggcagatcacttgaggtcaggagttcaagaccaacctgaccaacatggtgaaacctcatctctactaaaaatacacaaaaattagccaggcgtggtggcaaatgcttgtaatcccagcaacttgggaggctgaggcaggagaatcacttgaactcaggaggcagagattgcagtgagccgagatggtgccactacactccagcctgggcaacagagcaagattctgtctcaaatatatatatatagatatatagatatatatatmtatatatatatatgacaattaataagcatggagaagaaaatgaacaaaaaggaaagatatgtaaagataggctaataatataattttaaaaataaaaataattgtattaaaataaaaaattttgaaaaaataattttgtgtagtaaaagagaaaacaaaaacttttctataatatcaagaagttaagaaaatgtgagtactacagaaaaagttctcaaagaagagacacaacatgcttttataaagtaat

SEQ ID NO: 487762 - DNA, 584 bp, Homo sapiens
taataagcatggtgacgccggacgcagtggctcatgcctgtaatcccagcactttgggaggcagaggtgggcagatcacttgaggtcaggagttcaagaccaacctgaccaacatggtgaaacctcatctctactaaaaatacacaaaaattagccaggcgtggtggcaaatgcttgtaatcccagcaacttgggaggctgaggcaggagaatcacttgaactcaggaggcagagattgcagtgagccgagatggtgccactacactccagcctgggcaacagagcaagattctgtctcaaatatatatatatagatatatagatatatatatctatatatatatatgacaattaataagcatggagaagaaaatgaacaaaaaggaaagatatgtaaagataggctaataatataattttaaaaataaaaataattgtattaaaataaaaaattttgaaaaaataattttgtgtagtaaaagaraaaacaaaaacttttctataatatcaagaagttaagaaaatgtgagtactacagaaaaagttctcaaagaagagacacaacatgcttttataaagtaat

SEQ ID NO: 487763 - DNA, 591 bp, Homo sapiens
ggtatggtggtgtgtgcctgtagtcccagctactctggaggatgaggcgggagattcgcttgagcccaggaggcggaggtggcagtgagccaagatcactccactgcactccagcctgggcgacaagagtgagatcctgtctcaattaaaaaaatagaggccaagtgtggtggcccatgcctgtaatcccagcagtttgggaggcygaggtgggtggatcacttgaggtcaggaattttgagaccagcctggccaacatggtgaaattcagtctctactaaaaaaaaaaattagccgggtgtggtgacaggtgcctgtaatcccagccactcaggaggctgaggcaggagaatcacttgaacccaggaggcggaggttgcagtgagccaagatcgtgccaccgcactgtagcctgggtgacagagctagactctgtctcaaaaaaaaacctaaaaccaaacattagttgtaaaggtatattatttgagagtgatttctacattctccagaaataacgtgggtgattttttaaatgaatttttaaaaaaaaattcctgaaaggaatgaaaatatgattttaagtctgcaggg

SEQ ID NO: 487764 - DNA, 591 bp, Homo sapiens
ggtatggtggtgtgtgcctgtagtcccagctactctggaggatgaggcgggagattcgcttgagcccaggaggcggaggtggcagtgagccaagatcactccactgcactccagcctgggcgacaagagtgagatcctgtctcaattaaaaaaatagaggccaagtgtggtggcccatgcctgtaatcccagcagtttgggaggccgaggtgggtggatcacttgaggtcaggaattttgagaccagcctggccaacatggtgaaattcagtctctactaaaaaaaaaaattagccgggtgtggtgacaggtgcctgtaatcccagccactcaggaggctgaggcaggagaatcacttgaacccaggaggcgsaggttgcagtgagccaagatcgtgccaccgcactgtagcctgggtgacagagctagactctgtctcaaaaaaaaacctaaaaccaaacattagttgtaaaggtatattatttgagagtgatttctacattctccagaaataacgtgggtgattttttaaatgaatttttaaaaaaaaattcctgaaaggaatgaaaatatgattttaagtctgcaggg

SEQ ID NO: 487765 - DNA, 342 bp, Homo sapiens
ctgcaggggaagggtgtcggggaggaagcccagggccagagggtcccactccctccctccaccacccccttgccctctggcatgtgtcccagcagcagcccyacctgggggtctccactcagcagggcagcccctccagaggtcatgcagggggcctggagcttgagccatgagcctcccacccaccatgaagtgactctgggagagacaggctctgcttgtgagctgatgcccgcaggcaagtcccatctaccttcagggtcctcctgtcaacggcagcatccagtgatgaggctgagaggattccataggccctggggtcaacccacatgcacctgggtg

SEQ ID NO: 487766 - DNA, 672 bp, Homo sapiens
ctggggagctttctgggcatccctctatggagccaaaagcaagcaaagccctcatggggcgccctgggggctacacaggcggtcactctcctccagatcagctctctgccctcccaggccgggcaaccagtgcccccactgccttgggctccatcagggtcccctacagtgataaagcacctttgggcagatgaggtgctgagaacccagagatggaaccaggcccttgcccaagttcatagccctagcagggtgggaggacaacatggtgagagcaagtctgggaaggcttcctggaggaggtgtgccgtctctcctgactccccaccaccctctttgctgtcctcccttctgctatcctccctctcttgtcctcccgtttttcccatctctgctgtccccacctctgtcgtcctcctyctgctctcctccccccatcccctctgctctccctacctctgctgtcccctctgccgtcctccctctgctctcctcccctctgctggctcaagagcagggtttcccaaccatgagctgcatgaactctagcttctaaaatgctctggctacaaactcacctttcaggtcagggggtactgctggcccgtttcctgggcaggcaagggtttaactcaaccccattcagggaagcacgtgtgggcgcaggcctgg

SEQ ID NO: 487767 - DNA, 672 bp, Homo sapiens
ctggggagctttctgggcatccctctatggagccaaaagcaagcaaagccctcatggggcgccctgggggctacacaggcggtcactctcctccagatcagctctctgccctcccaggccgggcaaccagtgcccccactgccttgggctccatcagggtcccctacagtgataaagcacctttgggcagatgaggtgctgagaacccagagatggaaccaggcccttgcccaagttcatagccctagcagggtgggaggacaacatggtgagagcaagtctgggaaggcttcctggaggaggtgtgccgtctctcctgactccccaccaccctctttgctgtcctcccttctgctatcctccctctcttgtcctcccgtttttcccatctctgctgtccccacctctgtcgtcctcctcctgctctcctccccccatcccctctgctctccctacctctgctgtcccctctgccgtcctccctctgctctcctcccctctgctggctcaagagcagggtttcccaaccatgagctgcatgaactctagcttctaaaatgctctggctacaaactcacctttcaggtcagggggyactgctggcccgtttcctgggcaggcaagggtttaactcaaccccattcagggaagcacgtgtgggcgcaggcctgg

SEQ ID NO: 487768 - DNA, 305 bp, Homo sapiens
ctggtgagctctggaggctcgagggcccttcttctcccccatatcctcaaccccaagcaggagagggggcccacaccctgtgcttggcccgtctcccccggccaatggccactggtctgtgggcctcggtttctcgtctgtgaagtgggccacggaaggctctcagaggcccctcagccagggattacaccctattgttacccaggctcggggctgagatgggggttgctgcccacgggagggaggggcgygatggtcctgggaagccagtcaggaggtgccgcagagcacaggtgggctgtgga

SEQ ID NO: 487769 - DNA, 391 bp, Homo sapiens
tgcatgttggtttctgtcgagagcggttgtgtgtgtacattttaagcgtggaacgcaggtatcgaaccgtgttgaaacctttccagcattggcagaagtgtgcgtgtgagtctcctttgcccttttactttactggcaggtgtagtgaacttggatgccgcctgccttcctagcatggcccacgtggccgggcggtccttctgatggggcggctcacgtggctcccacgtgccaggcttttggggcagatgytcctgagcggtgctgcctacgggttgccttcattggtggtttttaggcctgggctctggcgtcctgtccgcccttaatccttgcctaggagcagtctgtgggccccagaagactggccggaaactgaagccgggcggca

SEQ ID NO: 487770 - DNA, 651 bp, Homo sapiens
agctgctcacacccaacagtgggaccctgagaagggtcaaagccggggcagtttggggacacgctgggtgcagggccaccttgctgggcacctcggctggttggtgtctgttgggagcagccctggggccgccccgcagcctctgcctgcagtacagacggatctgcccactcctgaggctggagagctcagagcctgaaagaccccctgagccctcgcccttcctccgccggccccttgctgtcagcacgccaggtgcagaccctggcaggcttcctgtgccccagcttcagtgtggagcgcttgcctagctggctggcatgggagcgggaggggtgtttggccacttggagcagaagggggtgggtagtcagagtttctgtgttcctggcttgatattggctttccagcagcttcccagcttccagaatgtccttgccatcatctcccatcctgtttcctcttttttggagcagaggcctggggtggcctatcttcttctttcagttgaggcttcyggggcgggtgggtctaatgtgtgtctttgcctttagccagaagaccaccgtgattagattttccagaagagaactcgcgtggtagttttgaaaatgggagggtgtttgtgaggtgggatatcagaaatacttt

SEQ ID NO: 487771 - DNA, 542 bp, Homo sapiens
gggcttcagtcctgaggtgcccrtgacagtgtcctgcagttcctgcaccgccaggaggatgagcctcgagggctaatgagccccacacggccgggccagcctcaaggccaaggcacagctcttgcggaaccctggcagcttctctgaggcagccatgcggaagatgggggtgtgtcctggtgcagcaagctgggggttgcttgggaggcaggacgagcttgacccaagggagggtgcttgatgggcagtcctgaggtgctcagccaggaagcgactatgattgatttgctgtgcacccagggcaggggctgtcctcccgaagctgagcttcttcacctgtcttctgactcacttatctccccgagccccggagatacaaggatcacaggcaggggccttctcctgagctggccagagctgggcaggacacttggggcacgcagcttttgtgggctagcctggaaactcggctatcctggacaccacactggcaacaggttgtctggagccaggtcggggcatgtggggcctgagccaaggct

SEQ ID NO: 487772 - DNA, 628 bp, Homo sapiens
aggggctcaagagagtgtcacctgctccccagagccacccctggcctcgtgtgaagggaagggagggccctggcattggactttgacacagttgccagactgcacaggaaggttgtgttttggattaaatttgtggagatcagctccgggtggtttagcaaaagccacagtcacctgcgtagtcatccagggtgctgggatttggggtggggcgggcggtgctctgagatgacttagtacagggcagggtccctcaggtcagaggctggctgtggggctggagtggcctccagggcaccggccactggtctgcaggacatggcaatctggacagcaatgggagacagggctgtggggctggcatggtggtggtgtcaggcctgccagggtcccacagggccctctgctgcaggtcggggagggcgtcagagatgaggcagggtgtgtygctgtggctgcagaggggcccgaggtccccaccaaggcctggatgcccaggggcagggtgctcgccccctccctgcagtcactctctacgctgagtccacccggcgtcccctcccgctggatggtgacccaggtttgggagatctgtccactgtgttacctggagtctagaacagttccc

SEQ ID NO: 487773 - DNA, 457 bp, Homo sapiens
cctggttttcattcagtttcacttaaattgtctaaatattggccgggcgcagtggcttacacctataatcccagcactttgggargctgaggtgggcggatcacctgaggttgggagttcaagaccaggctgacctgttaacatggagaaacgctgtctctactaaaaatacaaaattagctgggcatggtggcgcatgcccataatcccagctacttgggaggctgaggcaggagaattacttgaacccaggaggcggaggttgtggtgagctgagattgtgccattgcactccagcctgggcaacaagagcaaaactccatctcaaagaaaaaaaaattgtctaaatattgtcgtaggcagctccagacccacgcccctccttccgactcgccgttctccagggctgcacctgagggctggcctgtgtttgcagtcccccagagccgaatgcctg

SEQ ID NO: 487774 - DNA, 497 bp, Homo sapiens
gaacagacggcggccgtcacgagccgtccacgtgggctttccttccacagcatctcacagcagaagctgacccagacagcagagcccagggagcccgacgcagaccagaggctgccagtcacacagaacaggaagaaccccgatcaccagacccagcggggaagccggggaggacccagtgtagactctcagccacggccatgccctgagcccggggggaccaggggaggacccgggacagtgtagactctcagccacagccatgccctgagcmcggggggacccggggaggacctgggacagtgtagactctcagccacagtgatgttttgcatctgggggacccgggacagtgtaaactctcagccacggccatgccctgagcccggggggacccggggaggacccgggacagtgcagactctcagccacagtgatgttttgagtctgggggacccaggacagtgtagactctcagctacagccatgccctgagc

SEQ ID NO: 487775 - DNA, 524 bp, Homo sapiens
ggcatcagccgggcagttgctggtgtcatgaagatatcagcccacctccatccacctgcccaggcctgtccgggttgggcgtccccagagccctaggctgaggctgaggcacctggggctgtgcgctcccctccccgccccgttccagccggggctgccttaccctccctgccccagggatggtttctggcagggaacgcagtgtcctctgagacccgtcagtcccaacagatgggagcgctgttccctcccacagcccatgcccagtggccccaagtgggcctcagcttcctcttctggctctcagaccagcacagcacgcggcaggtgcccacgaggtccaactgggctccctcaagccttctgccctctygccttgctgcccgctgtccccactggctctttcctgtcaccctcctgccccccacatcacccccgctttcatcagaaggcccatcaccactagctggctgcctggcctgtatttccttctccccggggcagactgggagcttggtgagaat

SEQ ID NO: 487776 - DNA, 637 bp, Homo sapiens
  misc_feature (1)...(637): n = A,T,C or G
tgggtttggtcctgaagtataggaaatgaaaatagaaaggggggaaaaaaccttctgcctaytatatacagggtggctgtatacagggaagttaccttttaaaaggcagaacaactatctgtagtctaagagatttgtgtctaccttttggatcattgtttccaaataattatattgagtgtttgtaccctggagagagattcagattatcttggatagaaagtcactataagcacccagtggagggagggatgctcactcgatgaggtctgtggttttgttacagttcgctactctagttcctgtgcttttggctattttttttttttcagtcactttgggctactaaagtgttgtggaaaaaaagaaccaattcttgcctccaaaggaagctctcaggacctgctttggtctaagaattctcagcttctaagtatctttagtgcagtaaggcagagaagggttgccctggcttaatgttccgcagatttattttcttccatgcagaagtacagaagtatgtacgctgtgccaagccaggggctacaaaaatgcaaaaaccatacctgcnccttgaggccttcatggagtatgtatcaggatcactactttcattttagacctttgcctgtgtgca

SEQ ID NO: 487777 - DNA, 634 bp, Homo sapiens
atatgctaagtgggaaaagttgaatatctgcaatatgattacaatcatgtttttaaaaattaastagaaataaggggaagtaaatatatcaaaatgtgagcaagtttaccagaatatagacggacaattggatcattagtgtgcttttccttctctggaaaatgtaaaaaaatataaaaataaaaaaaatttaaaaaagtagttgtagcaaacttgcattacttttataataaaatttaaaaatcacttgtattttggcaatagaaaaactaaaagaaagtagaaatagtttcattttttaaaataacataatattgtcacccgaataaagtactctctagatataaaataagaaccattactattttgttcatttctgaggtggaagaaatatacacagcaagaaactttccagaggtccctatgggatatgaaataaagtgcagaccttaagctatttacataccttacgagaacctgtatcttaacatctctaccagtgctttttacataaatacccatttttggaaattctttttttaaattaaataacacttggtcattgtagaaaatcagaaaatatataaacatttttgaaattaaaaattacttcattacccacaaattactactg

SEQ ID NO: 487778 - DNA, 424 bp, Homo sapiens
tttccagagcccatgctcagcatctatactctgtgcttttgatggtctttgacctaataatgctacccttagagatttatttcaagaaataaatccaaacctaaaacaaaaaaagccaatggttcacaccagcatatctgaaacaaacaagcaaaaaactagttataaactagatataaaaggaactatgaagtattaataataaccacccctattcactgagcacatatcctttcatactgggcactgttccttaygtatacctgtttatctcatcctcacagcagatgatcttccacacattatcaatgaagaaatgaaggctcaggaaggttaagtcacctgccgaggttcatagagcaagtaagtgacagagcaagaattgaattcaggctaattctaaacactctgttttcaaccttca

SEQ ID NO: 487779 - DNA, 530 bp, Homo sapiens
aggatatctgttaatagttgaaagtctattactttcctacggatattataatttaggaggttggggagggggctctcaggaaggaatgccgaccgtgacaagagaatctaactgttgttgattttaaaaagtcaaactccagatgggcacagtggctcacacctgtaatcccagcactttgggaggccgargcaggccgatcacgaggtcaggaaatcaagaccatcctggctaacacagtgaaaccctgtctctactaaaaatacaaaaaattagccgggcatggtggcaggcgcctatagtcctagctactcggtcgggaggctaaggcaggacaatggcatgaacccatgaggcagagcttgcagtgagatcgcgccactgcactccagcctgggtgacagagcgagactccatctcaaaaaaaaaaaaaaaaatacaaagattagctgggcatggtggtgcacacctgtaatcccagctactcaggatgctgaggcaggataattgcttgaacctgggaggcagca

SEQ ID NO: 487780 - DNA, 591 bp, Homo sapiens
cgggctgtctgtacgctgtggcgcagtgccarctgtcctgggtggagcatccccatcagccccactgatggcccttctcaccggcctgggccaggtctgctgggaagcccacacccctgctcaccttctgtctgcgtctcctgggtacatccctctctcgctgtcttccttcaggctttgtttcactttgccttggaggtggccactgtgaccagagtaagggggatttttgctcttaccctccctgccccggtggtgtctgcagtctggttgttgagaccaacagtgggtgaataatcacatgagttcatggacagccacaaagtaacacccatctatgaaggaaaaccccactttgctggggaagccaaatatgattgaagcatccagaaaaggcctctttgaggacgtgacatttaagcgaagggcgagcatagggtggccttgtgaagatgaggctaagagctttccagttaaaaggaacagcatgtgcaaaggtcctgaggcagaacactggccactgtggctagaatgtggccagcaggagggaggggacccagttgagtgacccacacagaagcttctgaatct

SEQ ID NO: 487781 - DNA, 608 bp, Homo sapiens
ctgcgggctgtctgtacgctgtggcgcagtgccagctgtcctgggtggagcatccccatcagccccactgatggcccttctcaccggcctgggccaggtctgctgggaagcccacacccctgctcaccttctgtctgcgtctcctgggtacatccctctctcgctgtcttccttcaggctttgtttcactttgccttggaggtggccactgtgaccagagtaagkgggatttttgctcttaccctccctgccccggtggtgtctgcagtctggttgttgagaccaacagtgggtgaataatcacatgagttcatggacagccacaaagtaacacccatctatgaaggaaaaccccactttgctggggaagccaaatatgattgaagcatccagaaaaggcctctttgaggacgtgacatttaagcgaagggcgagcatagggtggccttgtgaagatgaggctaagagctttccagttaaaaggaacagcatgtgcaaaggtcctgaggcagaacactggccactgtggctagaatgtggccagcaggagggaggggacccagttgagtgacccacacagaagcttctgaatctgggacaggtgtaat

SEQ ID NO: 487782 - DNA, 373 bp, Homo sapiens
ttttctttggggctattttgtcttttccttggagatatatagtctttgtmtacaatagatactaatatgttaattatatgcgttaaaagtgccttgaccgagaacatggcttatcatgttacatgcatacacggtttttcctttttgtttctgtgaaatcgtccacttcatctgagcttgcacatttactggcagacggcatcgcatattccttctttttgcatttccaatgtgctcctttctggattttctctttcttttcttcgttcaacttgtcagaggtccgtctaccttattatccatcacacaaaaaagccaaaacaaaacaaaacaaaaattgaagccttggtttgaccgctctgttttctatttt

SEQ ID NO: 487783 - DNA, 373 bp, Homo sapiens
ttttctttggggctattttgtcttttccttggagatatatagtctttgtatacaatagatactaatatgttaattatatgcgttaaaagtgccttgaccgagaacatggcttatcatgttacatgcatacacggtttttcctttttgtttctgtgaaatcgtccacttcatctgagcttgcacatttactggcagayggcatcgcatattccttctttttgcatttccaatgtgctcctttctggattttctctttcttttcttcgttcaacttgtcagaggtccgtctaccttattatccatcacacaaaaaagccaaaacaaaacaaaacaaaaattgaagccttggtttgaccgctctgttttctatttt

SEQ ID NO: 487784 - DNA, 220 bp, Homo sapiens
tgcaccagaccaaccctcccacaattaatagatattaaagctggagagcaggcaagaaaagctgctgtttcaaggcattggaaagtaatcaagatggtaaagaycttaggtgccagggtcgcctccccgagaggagggaacacaggagacaagctaagtgctgtagccacctttcctcaggagcatgtatcatctgccatgtggggaagagtccaaaaga

SEQ ID NO: 487785 - DNA, 478 bp, Homo sapiens
ctaatctcaggggtagggaccaatttggtagcaaaaatttccyttgcaatcatatttgcagggcatgccaaggaaactcaacacctattgggtgggtcagtgggcactggacgaggcaggagatgggcttgcctagagcctcatttcaggctctttcctgccatctgggctcttcctgagcatctgtccgcaccttggcctgagctggccatcagtggccagggtcctttgcttcctgggttcacaggccatctccaagcactgttaatgaaatatgttatcacaaggagcctattgccaggaaagaccagatggacaatttcaatgttgatgtacagttttgtagggggagtcacaagagaagagagagggagagatgatcccagcctcagcggttcatgtgtgcacgtccattgacaccagatgcctggtgcttccaatctgtttcccgctgtcacagggagctggtgaagagcta

SEQ ID NO: 487786 - DNA, 515 bp, Homo sapiens
aaactaggccaaactgggtctggcctttcctgcaatcagcgacttcaaaagcagttgttgcttaaaaacaggcaatgtagctattggccccctcctcgctccccaattctctcaattcatttctttgttcagtaatctatttcacgttcaggtgggagtggctgactgcctggctgcagcagctcctctctattaatcgggggggagctggaggcaagcgggaagatgaagtacaacaagctaattgctgagtcagacatgtgatgtcccagaccctagagcagcccacgcaggagcagagacagatactggagctggtgatgaggagcatgtcaatcacaaggggaytggcaatccacaagaacagctcacaggctggcctccctcatcctctcctaggactccaggctgagatcaggcacagtctttcaggggcccaggcttccactgttttctgcacaaaatcgtgtaatggctaaagggcctggactcctgagtcacaaagtgtggggttg

SEQ ID NO: 487787 - DNA, 497 bp, Homo sapiens
tgttttcagcacccacttaatatcaaagtcagaattccccagcttcgaaatgtccatgtcctgactactcaggcttcacgagccagtgagtagggaggtggctgcattaarcgggcccttgaaggctatgagttccaaccaactgatctgtaagcatttcagtcttgggaagaatttccctccctgagctgcattatctggaaaggctcgaggggcgcatgcatgcatctgagaatcagttctggtcattgctggctaccatggctggtaaatagatggccctgtaggtatctcagagatgcccctctgagctgaaccctaccctgctgcccacaccattgcccaagggtggaagagctgggccactggggctttctgaggctcagggtcaaggaaacctgaccaccctcaggggagttgcagctggcaggccatcccaagtttcagtgctagaaagctgcaactcttctcaggctctgcacatggaatccaagttg

SEQ ID NO: 487788 - DNA, 637 bp, Homo sapiens
gtctgcctccaaaatccatgctctttctaagaccctatcttgcccttttgctgattaatcttcatcagcgttcatgccccagtttaagatgtaaaggatcgctggtattttatttattgtacttatgctttaaaagactgttgatcacagcactgcaggtggccatggcaaatgaggtgacacaggaactctagacaggtgccttgcactgagcatgtgactgacagtgacatgccaactagcatctctccttatttgacctccctgtcttttatatatcagttattcttttctggttttgaatattaaaaagacaaaaatattcctaaaaggcataagcagaaagggagaaagattagaaaatgtgcatgggaattaaaaaccttgtatttcactgtgaactgcagggcagagaaaaccatcagacagagggagaggagatcaacatttttttttcctctgggtcatgccaggactctttaaggctgtgagttccattgttttaccttatatttaccttgttggattttagtaaatgcattctattatgagctacttcagtggggtcragggaatccatagaccagctctcccaccaatttcactgaccacgtctaatagcaactatcttgaatga

SEQ ID NO: 487789 - DNA, 292 bp, Homo sapiens
tgccaactcaagactttttttttgcatataactctatagatagctaagattttaagcttaaaaactatccttgtgtctttacatttctcttcattctayctacaaataaccattatcctgacttaagataaccattcccttactttatagctttaatacccatatattagccttgctttttgttgtaacttcataaatcagaattttgttttctgtggcttgcgttgttttctcaacattatgcttgaaagatggagccatgtgaacaaatacagtatttcatataaataca

SEQ ID NO: 487790 - DNA, 632 bp, Homo sapiens
agtttggtcatggcttagctgagtctcctacttcaggatcacaatgtgctgcaatcaaggtgttgaccagagctgcatttgtgtctaatgctagcctggggaaagatctgcttcgaagcacatgtggttgttggtaacactcacttccttgtcagactgagaacctcactttctttcttctccagagatcacccttagttacttgccctgtggccatttgtataagccagctcacaacaacatggcagtttgctttgtcaaagccacaaagggagtctttcagcaagagaggcattacagtgctatgttgcgttaccactaaagtgacaaccatcattgctatggactgaatgtttttgtcctcctcaaattcgtgtgttgaaattccaacccctagtgtggctatttttggagacagagcatttcagaatatagttaatgttaaataagggcaaaagagtggaamctaatgcaataggattaatgtttttgtaagaacagataccagaaagtgctctctcccacccttgcatgttctttttctcttttctctccctttctcccacccctgccatcctaccccaagtgcatgagctggtataagaccatgtgaggatatagtaaaaagtcag

SEQ ID NO: 487791 - DNA, 474 bp, Homo sapiens
tctgggaagaatttctctctgttacagagttcttttctctcaactgggccatcatctgtagtcagcttaatctattcctatttcattacagcttcttggacaatgagcacaggtttgcctccctagttatgcttccttcctgccttacctagtggcattctacaatccagccctgtgtgcctgcttcacttcaccaatgcacttgagtcccattcctaaytagtccgtcctaaatgaaagactcctgccagacagcagcctctatactctctgggcagtagttgtggacttgaatatttacactctcattccatcagaatagaaaagttccctcttttgttaactgctatatctctatctctgtgccttagtaggcaatcaattcatatttgtttttgaattaacaccctgtggttgggacagcagatgtctcatagggtcttaggcataatgtcattgcactgtttcacttca

SEQ ID NO: 487792 - DNA, 627 bp, Homo sapiens
gtaagtcccacagggatagaacaagaggaaagatggaaattaacctagtaccctgcttcataaggccagaagtggcatcgcaaattaatattgaacagtgtgagagcaagccacttgtgcctacaatagataggtcaaagtgagctatgcttcaggagagaattaagtatacaggtgcagagctgaggagttcctagggcttagcacagagtaaatattgatcacgtgaatgaatagattaattaattaattaaaatagggccttcatgggaactaaggaaattaaaagccaagggtgcaatttagagtaggtaattgtagatcactattatgtgatacagactattataccacgtagcacaatgttaccattatagtacaacactagcataaaggtaatattgtgctatgaagtctggtcacaaaaatctgtctcctttatatcctgaaatcaggattcctctccaaatattctcctgaaattgcagtcataaaatctggctmaacacaaacccagtggccatagagtgtagcagtttgctctcctacagcaataaatgagtgtctctttcccccatgcttgccaacccactgtgttttcaaactttttgatgtttctcagtctga

SEQ ID NO: 487793 - DNA, 416 bp, Homo sapiens
tatactgttgtcctgcaatacagggacctacttataggctcagcagcttccctggagagaccgtaattgcaaatgctagactttgtgaacacattcattcatcagaaaggaactacagaaaaagtaaggaaaaaatttacccattattctgccattctgactccmtaatgggtagcattttcatgtattttcatctagtctctttttctttgtatgttttatcttgtagtcacgtagcacccatcattctgcaggctgctttttccatttatttgatataaggatttttctgtcagtacagtccttataataaaaatttatttacatctcctgaagtaatcaaaaaaatatctaatgaccattgagtagccatgtcacagatatatttatgtgttcccttattgttgagtgttcac

SEQ ID NO: 487794 - DNA, 544 bp, Homo sapiens
gctccgagccagcagcctccgagaggctgggctggtttctgttactgctgccacgaacactgagcccccactagggtgggagggggctccattttgatgcactttggtgggcacaggttgaccagactgacttttgctccacctggcctcctccctgggactcacctcaactttcaatcctaatgacatgttgaggcccctgagggacagtgtcctagctcacagcaaatctctcatgagtgcttttgttgctttgctagctgtgtatatactcattttttaaagtaagtctcttcacacctggcagtcctgacttctctcacatcattaaaacattggctgtaaacaggaccaaaaagttctttgctgcctgggtggattgccaaatgatagttgcttgctgtgtgattgttgtgaccacctcagaccacagggttggggttttgttcttgytgtgcttctctttttttctttgcagcttgaatgttgtttaggattcagaaactaaactgtttttaggctttgttccctttagtcccgaaca

SEQ ID NO: 487795 - DNA, 544 bp, Homo sapiens
gctccgagccagcagcctccgagaggctgggctggtttctgttactgctgccacgaacactgagcccccactagggtgggagggggctccattttgatgcactttggtgggcacaggttgaccagactgacttttgctccacctggcctcctccctgggactcacctcaactttcaatcctaatgacatgttgaggcccctgagggacagtgtcctagctcacagcaaatctctcatgagtgcttttgttgctttgctagctgtgtatatactcattttttaaagtaagtctcttcacacctggcagtcctgacttctctcacatcattaaaacattggctgtaaacaggaccaaaaagttctttgctgcctgggtggattgccaaatgatagttgcttgctgtgtgattgttgtgaccacctcagaccacagggttggggttttgttcttgcygtgcttctctttttttctttgcagcttgaatgttgtttaggattcagaaactaaactgtttttaggctttgttccctttagtcccgaaca

SEQ ID NO: 487796 - DNA, 544 bp, Homo sapiens
gctccgagccagcagcctccgagaggctgggctggtttctgttactgctgccacgaacactgagcccccactagggtgggagggggctccattttgatgcactttggtgggcacaggttgaccagactgacttttgctccacctggcctcctccctgggactcacctcaactttcaatcctaatgacatgttgaggcccctgagggacagtgtcctagctcacagcaaatctctcatgagtgcttttgttgctttgctagctgtgtatatactcattttttaaagtaagtctcttcacacctggcagtcctgacttctctcacatcattaaaacattggctgtaaacaggaccaaaaagttctttgctgcctgggtggattgccaaatgatagttgcttgctgtgtgattgttgtgaccacctcagaccacagggttggggttttgttcttgctgtgcttctctttttttctttgcagcttgaatgttgyttaggattcagaaactaaactgtttttaggctttgttccctttagtcccgaaca

SEQ ID NO: 487797 - DNA, 553 bp, Homo sapiens
ctgttagcactgggctcccgctccatcagctcccctccctcccctgtgtcttcagccttttccttctgactctttctcctcctcctgtgaacacgctctagaatctcctaccctgaaaaatacagagaacaaacaarcaaacaaaaaatacagagaacaaacaagcaaacaacacagcttcatccacccttcattcccctccagctactctccaacctctctcctgcctttctcatccaaattctccagcgttgtttggactcaccatctctataccttccactcacgcctcagacctcagcaattttctgtgacccgcatgcctccacaggcacagaccttgctctcactaagctcccgatgattccataatggtcacatccaattggctgagctgacacctctaaccactctctgctcatctggctctcctggcgccaactcccctggcctccctggctgtccttgatcagacccccttagggcctccccttctctacccatctctgctcaatgctgctgctccctgggatgttccttagctctgggcact

SEQ ID NO: 487798 - DNA, 617 bp, Homo sapiens
cctctcatttgctatcttgggtgttagttcaaaccacgcrgcgcagttcacctaaggcttcctgctctctccccacgtccggcttcctcgtgagccctgtgcaacctccccgtcctccttccttcctccctcctaccccttcagcaaccctctgcagtcttccctgcacctagttccccaccccgcttctgacccccatcctttctcttcctttcttcagccttcaccccaaccccgtctgcaggttctggcctttagtacttgggtggctgcctcgggctctccttgctctgctctgtggctggtcccactcttgaatacttcagacacttgcttgccttcctgcagcctgcggtccactccagccccacttcctcctcctcccgctccccaggtaccttggtgccgatctccttctggtcctcttctttcagcggagggcaggcttctctggcacagtcaaaggagaaggctgtcagcgtgggagcagactgagaaaaaggcagggcaggcttcttggcagcggcaggcctgtctctgatgggtgaggccaaaggttttggctctgaggggttgagaacaggggtggagctgaagacacccaggtcactgctgag

SEQ ID NO: 487799 - DNA, 541 bp, Homo sapiens
ttctgctccaaaaacgacacagtacccttcaaggcagcttcttcccctaaactagctttggaataaaaagtcagtttctttataccaggcctcccttttgttcactggagtctgcaagcagtgagtgactgcacctgcatttttgttacatggagagagagattgagagaragagaatcttccatcattagaggctgtattcccacccccaagagcatctcatgtaagtggagttcctggccacacacagaaccaagcaaagtatgtgtgggcttagctccagccccagctcttaggaaaatcttcatgtcccatgacaggccgtcccattagattcccacaggtattcccaacaggcccagggccaggttaccaacatgctgtcttcccttcattttaaaagtaatgaggtaaggaagtctttggagatggaaatttctcaaggtacaccagagccacccagtgcctcccagcagcgtcacaccacaggtgtggttaataaaacctgaaataatgagggaaaagagaacagtgcaaagat

SEQ ID NO: 487800 - DNA, 541 bp, Homo sapiens
ttctgctccaaaaacgacacagtacccttcaaggcagcttcttcccctaaactagctttggaataaaaagtcagtttctttataccaggcctcccttttgttcactggagtctgcaagcagtgagtgactgcacctgcatttttgttacatggagagagagattgagagaaagagaatcttccatcattagaggctgtattcccacccccaagagcatctcatgtaagtggagttcctggccacacacagaaccaagcaaagtatgtgtgggcttagctccagccccagctcttaggaaaatcttcatgtcccatgacaggccrtcccattagattcccacaggtattcccaacaggcccagggccaggttaccaacatgctgtcttcccttcattttaaaagtaatgaggtaaggaagtctttggagatggaaatttctcaaggtacaccagagccacccagtgcctcccagcagcgtcacaccacaggtgtggttaataaaacctgaaataatgagggaaaagagaacagtgcaaagat

SEQ ID NO: 487801 - DNA, 535 bp, Homo sapiens
gggaaacagaatcactgagccatgattacacaaaggtcagtraagggttaggattaaaattcagaaagtatagctcttctcaaagcctgaatttgtgctctacccaccaagatgtacccacagctggtggtggttcatttctacactgaacacatactgatatcatctatgtaacaggcatagagctaggagccaagtaaaacccagtactcccatccccctcaagaggctcctctgacaagcagacagacgcttagacatgaaccctgacaccaggtgagaagcactgtgctcttgtaaccaaaagcctgcaggtctgaggccagggtgactgactggtcctggtgggcccgggctctccccatttcagcactgtcagtcccgagtcccgggaacccaggatgcttggtcatcctatccagagcagaagcacccggctggctctggcagggtcagaggagggagtttgtgggctgaggagcacatattatcatcaatggtttatatatgacctcactgccctggcctgattttc

SEQ ID NO: 487802 - DNA, 535 bp, Homo sapiens
gggaaacagaatcactgagccatgattacacaaaggtcagtgaagggttaggattaaaattcagaaagtatagctcttctcaaagcctgaatttgtgctctacccaccaagatgtacccacagctggtggtggttcatttctacactgaacacatactgatatcatctatgtaacaggcatagagctaggagccaagtaaaacccagtactcccatccccctcaagaggctcctctgacaagcagacagacgcttagacatgaaccctgacaccaggtgagaagcactgtgctcttgtaaccaaaagcctgcaggtctgaggccagggtgactgactggtcctggtgggcccgggctctccccatttcagcactgtcrgtcccgagtcccgggaacccaggatgcttggtcatcctatccagagcagaagcacccggctggctctggcagggtcagaggagggagtttgtgggctgaggagcacatattatcatcaatggtttatatatgacctcactgccctggcctgattttc

SEQ ID NO: 487803 - DNA, 292 bp, Homo sapiens
tggctcttctccactttagttccctagctattgccccagttccagttctcactactgatttggcctcctaatttttattccctacctctagtcttctctttcttcttctttgagacagagtcttgctctatcacccaggctggagtgcagtggcgcaatctcagcttactgcaacctccgcctcctgggttcaagtaattctcctgcctcagtgtcccaagyagctgggattacaggcacccaccaccatgcccagttaatttttgtatttttagtagagacagagtttcac

SEQ ID NO: 487804 - DNA, 519 bp, Homo sapiens
gcctatcatctagagatgcaggattgcacgattgggtgccacattggaagaagagcaagcttcctgatacagcatgaaacagacaggcacaccatatgagacctagctgaccttgctctcctgccctccagcatctgatctgcatggaaggagttgatggaggagagtgtctgttgaacttggtctctatttgtttttgaagatttaccacgaaaaygtagccacgtcagttccacaggcattgatctaacctaatcagactcctgcttctggtttctggggagtttggcccctgaccctgcctccttcttataaaagctagagaaggagctacacactctctaggggccaacatctatgtgttttccatcatgctgctctcttctgaggaacaggatttctgctatgatttccattttcttggctatgtccttgctacctgctgagagatatcccagatgctgactggccactaataatagtctggctgcctgtttgccatctgttcctgaattagca

SEQ ID NO: 487805 - DNA, 642 bp, Homo sapiens
acctcaccattgcattgcaaagcaaagtcaaaaatgtatactcagctacactgaagagaagacacaaagctctttagagagtgaaaatgtatcttgcatggaaagtccccaggcattagctcctggcctatcatctagagatgcaggattgcacgattgggtgccacattggaagaagagcaagcttcctgatacagcatgaaacagacaggcacaccatatgagacctagctgaccttgctctcctgccctccagcatctgatctgcatggaaggagttgatggaggagagtgtctgttgaacttggtctctatttgtttttgaagatttaccacgaaaatgtagccacgtcagttccayaggcattgatctaacctaatcagactcctgcttctggtttctggggagtttggcccctgaccctgcctccttcttataaaagctagagaaggagctacacactctctaggggccaacatctatgtgttttccatcatgctgctctcttctgaggaacaggatttctgctatgatttccattttcttggctatgtccttgctacctgctgagagatatcccagatgctgactggccactaataatagtctggctgcctgtttgccatctgttcctgaattag

SEQ ID NO: 487806 - DNA, 614 bp, Homo sapiens
gtttatttttaaatatagctatgagctttctagcagatcacaaatgtctaatactggaaagaggtggaaaatgctgaagatatgttaagtatttctcaaattttatcaatgtgaaaatgtaagtcttatagtggattattaaggtaactcataaaggaaatgaacatttttgatgttgccagatgatgtatatacattctcccccttaatggtaatgtccatgtgactagggtttatagtttttgcattgatgtgagctgctatgaatttcacagaattcccactttgcttcaacatgtgaaggtgctatttctttaggctcagaaagaccaggcaatttgcccaatatctcacagctaaaacatggcagagccacaattcaaaacttgatttgtctrtatcaaatccttcactctttttcctactccaatgccataccccaattctcaataaagatatagagatgttgctagcccatgtctaatctttggtcaacctaagctgtgacatcaatgcaggtaattataacatagtcagcatagacctgcatgagccactctgtggacttcatgaggcagccctatgtccttagacgaagggataagtagatgata

SEQ ID NO: 487807 - DNA, 505 bp, Homo sapiens
tccctcctctccatccattctagctttctctcatcctcagccaacacttttgccaaactaggctacttgccaaatggggtarccctaaccttaatttttcttaacaatgcacatgtattactctgatgacaaaatattttataaaatattgacattattaatacatcttttagcacattataggtgctcaaaattgttaattccctaccctcaaattatattcacatgttgaatgaaatgtgtttatttcacaacaaaatagaactcatttaaaaaaaaatttttttttgaaaccctttttctgcctgattgcacatgctgacatgttcttgccaaatccaactgatggctcatcaaaaaagagttcattcgtgctgattcttctggcacttccctagtagataccatagtgtgcctctggaataaagcagtagcattgctggctgatggtgtccaaagccagggagatgatcctcagtccagaagcaatttcctccctgtcaca

SEQ ID NO: 487808 - DNA, 536 bp, Homo sapiens
tcatatttaccatctccctcctctccatccattctagctttctctcatcctcagccaacacttttgccaaactaggctacttgccaaatggggtagccctaaccttaatttttcttaacaatgcacatgtattactctgatgacaaaatattttataaaatattgacattattaatacatcttttagcacattataggtgctcaaaattgttaattccctaccctcaaattatattcacatgttgaatgaaatgtgtttatttcacaacaaaatagaactcatttaaaaaaaaatttttttttgaaaccctttttctgcctgattgcacatgctgacatgttcttgccaaatccaactgatggctcatcaaaaaagagttcattcgtgctgattcttctggcacttccctagtagataccatagtgtgcctctggaataaagcagtagcattgctggctgatggtgyccaaagccagggagatgatcctcagtccagaagcaatttcctccctgtcacattatctgtttttcttat

SEQ ID NO: 487809 - DNA, 487 bp, Homo sapiens
gttctcaaaacataactcattccatccagctttaaacaaatcatattatgctcttgcatatgtttttatattcaaactttgatataatttatatcagtcatataagcaattgttttgaaaagtttcagttccattgataagatagacttcttaattcccttctctgctgaagcaagagaggttaatgtaaaagagtattaatcccagttcttttctttcgaggaaaaccacttaactacattaagaagctttctcttgtggcttaatgaggagagaaaggcttagctaacatgctgcagtggagccccactctgtaggaagtcactctgccttggctctgtcctggccaatgtataatcgtacttccacctaagataagcttccaaataatgtatgaatgaagagcctgaatataggaaggtattagctgatgaagagccagagagacatgacgtcttgatakgaggaccttgagtcagttgcaact

SEQ ID NO: 487810 - DNA, 431 bp, Homo sapiens
cagctgaactcacatctctatcttcttcctctgtctcacctgcttccctaactcctttacatacttctcctgaaatccgttcacacgagaataccaatttcataggctctgttcctagggaaccatctctgagatgatacccaaataggaaattcttttcctaatcacgatccttggagaatgtgggaactgactgatcactctttgcaactgcctcataatttgaagactttttaagtgcctactccatgaaccactatttatggtttgatttttaacattggcactgcycaggatatgggggtctagatctgaactcattcagcaggaacgggaccatgaaaagattctctctcagtgcatcactgctaccattaaccagaacaaagatgtgtgatttcaccatctcaaagtcctttcttatttgtata

SEQ ID NO: 487811 - DNA, 431 bp, Homo sapiens
cagctgaactcacatctctatcttcttcctctgtctcacctgcttccctaactcctttacatacttctcctgaaatccgttcacacgagaataccaatttcataggctctgttcctagggaaccatctctgagatgatacccaaataggaaattcttttcctaatcacgatccttggagaatgtgggaactgactgatcactctttgcaactgcctcataatttgaagactttttaagtgcctactccatgaaccactatttatggtttgatttttaacattggcactgcccagsatatgggggtctagatctgaactcattcagcaggaacgggaccatgaaaagattctctctcagtgcatcactgctaccattaaccagaacaaagatgtgtgatttcaccatctcaaagtcctttcttatttgtata

SEQ ID NO: 487812 - DNA, 658 bp, Homo sapiens
cacatctctatcttcttcctctgtctcacctgcttccctaactcctttacatacttctcctgaaatccgttcacacgagaataccaatttcataggctctgttcctagggaaccatctctgagatgatacccaaataggaaattcttttcctaatcacgatccttggagaatgtgggaactgactgatcactctttgcaactgcctcataatttgaagactttttaagtgcctactccatgaaccactatttatggtttgatttttaacattggcactgcccaggatatgggggtctagatctgaactcattcagcaggaacgggaccatgaaaagattctctctcagtgcatcactgctaccattaaccagaacaaagatgtgtgatttcaccatctcaaagtyctttcttatttgtatatgatttactagcataactccatgggagaaagttgtattttttttttttaaatgaggaaacttaaagtaaatacagcttaagtgggtttcttaagttcctggagcaagctaaagacaggactggagtagcaaagactagaaagagagtttctgaccttcagtcttaggctcattccatgacctccatccttgccgcaacgtatgcccttcttgtatggaccaagatactttatgatgc

SEQ ID NO: 487813 - DNA, 627 bp, Homo sapiens
ctggattataattaataataataagggcctgtgatgattaaggattaagtcattatgtttcctccctcctcagggcccttgcccaggctgttccccctgcctgtccctcctctgcccagcttctctccacctggtgaatgagttattcttcagctcacagcctaaatgtcacctcttccgggaagcattcctggcaccactggtttaaatcaggtccctcccgcttagatgtgctcagagctctgactctgccccttttctttttctttttctttctttctttctttttttttttttttttttttggggggggagacagagtctcgctctgtcacccaggctggagtgcagtggcgaaatcttggctcactgcaacctccgcctcccgggttcaagcaattctcctgcctcagcctctcaaatagctgggattacagtcgcctgccaccaagcccggctaatttttgtagttttagtagagacggagtttcaccatgttggtcaggctggtctcaaactcctgacctcaagtgatctgcccgccttggcctcccaaagtgctgggattacaggcgtgaaccaccrcacctggcctctgccccttttctctcggagcatttcatcatc

SEQ ID NO: 487814 - DNA, 460 bp, Homo sapiens
ctgggaacatccttgtggattgccaagttctcacctggtcaaagagatgccggcaaaagaaaacaaaagtggagtcctctaaagtgtcggayaaaaggctggcagccttcttgcccaaatctgagggaggactgggccaaatgaactctgtgaacattgagtggggataggaggcaagtagaccctagggtgtacccttgggagtagggcccaagtcttggggataatacttgcatcaaattgtatatcctgaagagccagcattcaggcacctgccacacagcactgcaagtcaagtaagactttgcttttttcttctaactccctcttccccatcctgggggagccaaaagccacaaaggacatcagggtgtgaaaagtttgaaagaacagatcacatcaccactactcctccttccccatcagctcaggactaaggtgggtcagaggtggtggcagg

SEQ ID NO: 487815 - DNA, 619 bp, Homo sapiens
tgatagcagctacaagtccyaatctgccctcaacggaaggcaggaggcaaggctagcatttcccacaggttctctttgctacttgcagctactgagaaatgtcacagaggctggcatccaccaaagggaggatgggtagagggtcagagaggtaggcggccccatgccagttctcatggatatgaactttaatgccatggaatccccacccactgagataaaggagtggatcatttttggcaatgcccacccagttcaagtagaaactcttaactccctcctcatcacagcagtgagcctttggcagttattttgtaaaatattgcctcaatcttctgccatgattgattggcccagatgttgccaattcactcaagttagattgaacaaagttctcccaggaactggaaatggaatcaagaaaaagagaatatgacttcggataaccagacctgtacaatggacatgttccagccaccatgcaaattgagaagcagagaaatcaaggctccaggaaaaaagaagaatggaagaagagatcagaggcaagagacccagattgagtatggcttgtgtgtgccctgatccctgatcttggtgcttctccaagccccatttt

SEQ ID NO: 487816 - DNA, 586 bp, Homo sapiens
gaggatgacagctcctccccaatgaggggggaatggggcacaatcttccctcatttatcatggaaatggcacttttccccatttgcttacaccccaaatcaactgcagcttctagagctggtctcaggggaggcaggtagagaagttttcttttgcatcaggattggccaccccagtggggcagatggaaataattttcagayctaagacctgtcattaggtcccaggcaccattatgttggccatttctgtctagccagtataacccagatgtggataagattaagtcaaatccattgtccatgccaatggcattctaaagccctccccaagacttctgcatattcctgagggacttacgcgctctaggccacctctgcttctgggctcccatgtctaaggtgctttgttcacaggttattgacccagatataacatccagccctgtcttcagtttccactgaaagcttatgctcaagggcattcatgaaagtaaaacattttactaaagagttggaggtcacagagagaggtaagattatgctccatgaaatatacagattaaaatatgttagacactgataaa

SEQ ID NO: 487817 - DNA, 586 bp, Homo sapiens
gaggatgacagctcctccccaatgaggggggaatggggcacaatcttccctcatttatcatggaaatggcacttttccccatttgcttacaccccaaatcaactgcagcttctagagctggtctcaggggaggcaggtagagaagttttcttttgcatcaggattggccaccccagtggggcagatggaaataattttcagacctaagacctgtcattaggtcccaggcaccattatgttggccatttctgtctagccagtataacccagatgtggataagattaagtcaaatccattgtccatgccaatggcattctaaagccctccccaagacttctgcatattcctgagggacttacgcgctctaggycacctctgcttctgggctcccatgtctaaggtgctttgttcacaggttattgacccagatataacatccagccctgtcttcagtttccactgaaagcttatgctcaagggcattcatgaaagtaaaacattttactaaagagttggaggtcacagagagaggtaagattatgctccatgaaatatacagattaaaatatgttagacactgataaa

SEQ ID NO: 487818 - DNA, 586 bp, Homo sapiens
gaggatgacagctcctccccaatgaggggggaatggggcacaatcttccctcatttatcatggaaatggcacttttccccatttgcttacaccccaaatcaactgcagcttctagagctggtctcaggggaggcaggtagagaagttttcttttgcatcaggattggccaccccagtggggcagatggaaataattttcagacctaagacctgtcattaggtcccaggcaccattatgttggccatttctgtctagccagtataacccagatgtggataagattaagtcaaatccattgtccatgccaatggcattctaaagccctccccaagacttctgcatattcctgagggacttacgcgctctaggccacctctgcttctgggctcccatgtctaaggtgctttgttcacaggttattgacccagatataacayccagccctgtcttcagtttccactgaaagcttatgctcaagggcattcatgaaagtaaaacattttactaaagagttggaggtcacagagagaggtaagattatgctccatgaaatatacagattaaaatatgttagacactgataaa

SEQ ID NO: 487819 - DNA, 600 bp, Homo sapiens
tctccctctctctctctccccctccctttttctgctctcgctctgtgacaggctccctttcatcttccaccataaggggaagcagcttgaggctctcaccagatgcagatgctggcaccatgcttcttgtacagcctgtgaaccatgagccaaataaatattttctctttataaatgatccagtctcagttatttctttataacaacacagacgaattaagacaccaacccagatcgcttacctgtggacttcttgttatgtgagataatacagccgtataaataagcaagtctgttatctgctgtcaaaagtatccctcttctactcctctgaatctgtatggttctagagacactgactccatgagtrattctaggaaggaacttacaacccagaactaagcaattagcatctgtattcacctgaccacagtggttatttcaaagatgggccaggactctggcagagccagagaggcaatgtgatttttcttgggacttctgagaaagaggatattttttccttttttttttttttcctgctggacctagaaggaaagaggaatagtggctggagctgctggatttccctacatcttg

SEQ ID NO: 487820 - DNA, 586 bp, Homo sapiens
ggggtgagtgtccaagatggccactttcttatgtggttggcagtggaccctggcccagcaggaatgtagattggagtgcccatatggcctctacacatggctttggcttctcccaggatagcagctcatttccaaaagacatgttctgggggaacattccacaagaacaaagcaagaactgcaaggcttctgataacttgccttagaagtccccggcatcactgctactctgttgtattggtcaatgctgtcatgagaacttcccggattccaggggktggagaaacagactccactttttgatgaaggggtaggagaagagcatgagggatgggtccatctttgaaaagataatctgccatggaggacctggtattaggtcctgcctctaccacctactacatcagagacgtctatgaaatcctgaatctgtctatgtcttggtgtttgcttttgaaaatagggaatagcatggtgtctaacttgccagggtgccttgaaaacctgtggtagccattgctagttgttattgttggcattttcccaggaggaatggcagtcccagttccagaaattctcctattgg

SEQ ID NO: 487821 - DNA, 604 bp, Homo sapiens
aatggaaaaccaaacatagtatgttctcactgatatgtgggagctgagctatgaggatacaaaggcagaagaatgatacaatatactttggggacytgaggggaagagtgggaggtgggccaaggataaaagacaacatatatggtgcagtgtatactgctcaggtgatgggtgcaccaaaatctcacaaatcacctctaaagaacttagtcatgtaaataaataccatctgtaccccaataacttatggaaaaataaaataaaatagaagaaaaatttaccatctcttgctctatgtagttattatttaacaaaagaattgtttcaaaaatgcaaatgttttcaaatgtaaatacttctaatttcttaaaaagtgaaatgcatattttctatcctcacatccactgggggattatattttgattgaggaagatctggcaaccctagcttaggagatatgaatgcaagtcagcatgggctaggttatgctgcagtaacaaacaaacccagctctcagtgccttaacatgatagatttatttctcactcctgctgagtgtccatcataggtgagcaaggtcactccaagacccaggtggttggag

SEQ ID NO: 487822 - DNA, 465 bp, Homo sapiens
ctgatgaaactggaccaatgcatctgttcctgtgtgtctcctgactttgcaccagtgacaacgtttggccagtgtctctcttcagtgctgaaacggtcagagagaaagcccagaagctgatggcagtcaccttctatggaaamagcctgccacagcaagaaggatgcacacacagagggagagcttacctggctttgtggggccagatcctagtcctcctaagacccaggcacattttcttgtcttacttttttttttcttttgttttattatactttaagttctgggatacatgtgcagaacgtgcaggtttgttacataggtacacacgtgccatggtggttcgctgcagccgtcaacccattatctacattaggtatttttcctaatgctatccctccattaacccccaaccccctgacaggccacggtgtatgatgttcccctccctgtgtccgtgtgttc

SEQ ID NO: 487823 - DNA, 246 bp, Homo sapiens
caggccatctgaaagctatagttgcttaataaatgccacttccatttgtctctttcctctggtaaaaccccatcttgttcactatccaaacaacagcatggttactaccttggttacctatgttattatttayagctgttatcttacaaatgcacttccacatggcttttaaacaaagatgataaccagggtaagtcagagaccaagaacccaattgcaatcaccttatcggacattaaattcatg

SEQ ID NO: 487824 - DNA, 610 bp, Homo sapiens
tccttctctacattattcctaaatcatccctagtgtatcgtgtaattcaggtacttctaggacacttaaaaaaatcctctttcctttcactctggctggttaacagagagccaatgggtcttctcagggagggggatagatttctggtgttcaatgatttgggctaaatctaatgccactcaaaatgtcaggtgattctgagagaatctcagatcagcaggaagttgtcttaagggactgactttcccttacctgttggataaactgagctacagcagaaatgcattggacaactggatttcactggcagatggtgagctccttaagggcaaggattctagttgacattagtactcttaatatctcacaggtgtatgacaaacagggaagcccarttagtgcttgttgaatgaatagtgtagaatcttttggctctagggagatcagcaggctatatctccattctcctgcctctcgtaggcttgcaacaaagtaaaaacattccttagtgtgagtgaggatgaccttccaaagtttattcatccatacatttaaaatctttcactaactaaatgttatataattgtaggttaagctaattttattggat

SEQ ID NO: 487825 - DNA, 629 bp, Homo sapiens
aacaaaaaatgggaaaataaaacacatgactgcagtcagaacaagagagacaatactgggttaagcaggccaggaagtttgcctatttcgtagggcccagttcattaagcgtcctattgaaaaccrtggtggttccaagttctaaatgaagtgaactctcctggcaacgaatgatttgggtaacttcagactaaactgccattgttttttccacaaggcatcagaaacaagactaagccctggaaacatcggcgacagggcgcagggagtagatcagcgtgccaggccctggtcacgggaaattcataacaatcctggactcaggagatggcttcatcgggaggctgtgggacttatacaccatcaccacactctctccagcccccaacacccaaattgcatctcctgaaatgctgttagctcactactcactttccttgtgctggacaaattgtggcaacgacaacgtgctggaaatcaccaatcccgtcttctttctgccctgctactgcttgtgtaccaggggccccttagtagcctttcgctggataagtttgccaacttgcagaaaaatttcccattaaaaaaattctaccccctccctgactcccacctctctgctttctgta

SEQ ID NO: 487826 - DNA, 445 bp, Homo sapiens
cctccacttatgtctcatgggctggtacccagtcacatgcccactcctaatgattatcagcaaatgggaatggggtggttatgcttgacttgcatgtactcgattcatcccagggcctgcaggaggggcttagctaccttgaatatgttgcagccaaaccaaatgggtttccattgattatagaagaaggaacaattgctctgagattgatgagcaacagtgccagccccatgagcctatctatgagtcctcccaagactggtcctagaagagatgactgtcttcytctctttattttgtctggacatgggtccccagtggtgcttctcctaatcacatctagaggatgattttccctgtcctaatttgggtgtcttcagaagctgaccctgacgcaaagattcatgtgcaaggagtttctttgggaggtttggggaacattggc

SEQ ID NO: 487827 - DNA, 445 bp, Homo sapiens
cctccacttatgtctcatgggctggtacccagtcacatgcccactcctaatgattatcagcaaatgggaatggggtggttatgcttgacttgcatgtactcgattcatcccagggcctgcaggaggggcttagctaccttgaatatgttgcagccaaaccaaatgggtttccattgattatagaagaaggaacaattgctctgagattgatgagcaacagtgccagccccatgagcctatctatgagtcctcccaagactggtcctagaagagatgactgtcttcttctctttattttgtctggacatgggtccccagtggtgctkctcctaatcacatctagaggatgattttccctgtcctaatttgggtgtcttcagaagctgaccctgacgcaaagattcatgtgcaaggagtttctttgggaggtttggggaacattggc

SEQ ID NO: 487828 - DNA, 445 bp, Homo sapiens
cctccacttatgtctcatgggctggtacccagtcacatgcccactcctaatgattatcagcaaatgggaatggggtggttatgcttgacttgcatgtactcgattcatcccagggcctgcaggaggggcttagctaccttgaatatgttgcagccaaaccaaatgggtttccattgattatagaagaaggaacaattgctctgagattgatgagcaacagtgccagccccatgagcctatctatgagtcctcccaagactggtcctagaagagatgactgtcttcttctctttattttgtctggacatgggtccccagtggtgcttctcctaatcacatctagaggatgattttccctgtcctaatttgggtgtcttcagaagctgaccctgaygcaaagattcatgtgcaaggagtttctttgggaggtttggggaacattggc

SEQ ID NO: 487829 - DNA, 606 bp, Homo sapiens
tgatagtaggcaatttctgagtcctgagttagcagtattgcctaagaaactgtattaatcttggatgctggcaggtacaacatactgcagcagagtggaggtgtccctggtcccatctctgtcaccgtagctcatccatttcaagcttctactctgcatccatttgggtcgtttaggacaggaaatggctgacctttactatactggacagtcaatatgcatgcttgtttgttttcaggagcctatatgactgtggttatcattttttggagaacatcaatgcaaaattcaaatattcaaaatatgccgtctcccattttttcattctttaagtcttgctttctccaggtccttgcctacccagcctagatgttaactactgctcaggaatccatatgaacttatttcagcagaattctcactctgcccacagtagatggtcaagcatactatgctaaactttgttctctggaggaatttcttttaaacactgcttttcamgtctagatctgaggcaggcaatggagtaggagtccactgtctgtcttgtatcaacatatcaagcccaccgtccatatattacatcaatgattttttcctccactg

SEQ ID NO: 487830 - DNA, 595 bp, Homo sapiens
gtctgaggctatggtttgattatattatggtactcaactcttatgtgtcaaaattcatcttaatttttttttggagtgtaactaataaattaaactgagatgtgatcaggaccaacacttctgcattcattaagtctttgaaagtggcactaatccctgccattctattcagaatggagtattgcttctaacttgttattagctgtggtgaaaggactgggagacagtttcaggggcttccattttgtctctcctaaactaatgtggctaactcttgtgagtaggaaatcaatataagagttcttcaagctgctaagtatatccttcttgattatggactcaacsactgaggaatgaccgttctactgtgagacagagtcagtacaggactccaccttcccctggcctgagaaattcccctcttttactgtgaggggaatttttttttactcttttactgtgtttgggtgctcttgtattagtgtcagtgcagatcctttaacagagtgtgaaaaattggagtagttttttgtgtgacagcatacaattcctctggaatagttttatgtccctttgtggcaggattaggaaaact

SEQ ID NO: 487831 - DNA, 595 bp, Homo sapiens
gtctgaggctatggtttgattatattatggtactcaactcttatgtgtcaaaattcatcttaatttttttttggagtgtaactaataaattaaactgagatgtgatcaggaccaacacttctgcattcattaagtctttgaaagtggcactaatccctgccattctattcagaatggagtattgcttctaacttgttattagctgtggtgaaaggactgggagacagtttcaggggcttccattttgtctctcctaaactaatgtggctaactcttgtgagtaggaaatcaatataagagttcttcaagctgctaagtatatccttcttgattatggactcaaccactgaggaatgaccgttctactgtgagacagagtcagtayaggactccaccttcccctggcctgagaaattcccctcttttactgtgaggggaatttttttttactcttttactgtgtttgggtgctcttgtattagtgtcagtgcagatcctttaacagagtgtgaaaaattggagtagttttttgtgtgacagcatacaattcctctggaatagttttatgtccctttgtggcaggattaggaaaact

SEQ ID NO: 487832 - DNA, 552 bp, Homo sapiens
tacaaactgcaattgttgggttactctgaattccctctagacggaaagctccttaaaaattaggwccatggttttcatcctttatcataggctgatagatgataggcactcaataagtctttgtagtgttattgttgaatgaattagaactttaagttcatttattcttaatcttaataaatgccatagtcttcatttggcctattgttccaacctttaaaatcttctaatatcgttattttttaatatcactatagtatgattcagatttaatgagcacaacattgaggacttcatccaagtcaataataaaattgatgaggcaggcagggccaagtatgtacctctagatcattgatggttaccattactactgctagtagtactgttacttgctaccaacaatattcagtaaactcttatgaggtgccagaaaccaagctaagctcctttcatgtatatttttacataatcaccataaaacctcttgaattagattctattattccattttacacatgaagaaagtgagacttaaagagattgacttgc

SEQ ID NO: 487833 - DNA, 535 bp, Homo sapiens
atttgtgagattttggtgcacccatcacccgagcagtctacactgcaccatatttgtagtcttctatcccttgcaaccccckcttgccgccgagtccccaaagcccattgtatcattcttatgcctttgcatcctcatagcttaactcccacatatcagtgagaacatacaatgttttgttttccattcctgagttacttcactctgaataatagtctccaatctcatccaggtcactgcaaatgctgttaattcattcctttttatggctgactagtattccttcatatacatatatcatatatatgaaggacatatatcatatacattcatatatataatgtatgaaggatatatatatcatatatattgatatatatataccatatatatgaaggatatataccatatatatgaaggatatatatatccttggtgcctagtgtcattcagaggcacaaatgatgtaactttacacttcaaagctttgcaacttgaactgcaggggctgtggaacagcagcattgatgctact

SEQ ID NO: 487834 - DNA, 535 bp, Homo sapiens
atttgtgagattttggtgcacccatcacccgagcagtctacactgcaccatatttgtagtcttctatcccttgcaaccccctcttgccsccgagtccccaaagcccattgtatcattcttatgcctttgcatcctcatagcttaactcccacatatcagtgagaacatacaatgttttgttttccattcctgagttacttcactctgaataatagtctccaatctcatccaggtcactgcaaatgctgttaattcattcctttttatggctgactagtattccttcatatacatatatcatatatatgaaggacatatatcatatacattcatatatataatgtatgaaggatatatatatcatatatattgatatatatataccatatatatgaaggatatataccatatatatgaaggatatatatatccttggtgcctagtgtcattcagaggcacaaatgatgtaactttacacttcaaagctttgcaacttgaactgcaggggctgtggaacagcagcattgatgctact

SEQ ID NO: 487835 - DNA, 578 bp, Homo sapiens
gggtccttcacctgaaagggtttcagggacagtggtctcatcagggaaaaaccaagtttgttatgacaaggaagcagataggacacattccagaaaaggctaaggatgcagagaagtttcttggctacgaaacgggatattggagagggtacagtgaaagccatcagaaaggcagacactctgaragccagcaaaatggccaaagggtggcatggaaatactcactataaacccatagaaatgatttatagataaaagaaaactcttaaaatgcatggacaacaacaacaaaacacaaacaacctaatttaaaaatgggcaaaggacttgaatagacattttctccaaagaatatatacaaatggccaataagcacatgaaaagatactagactagtcattagagaaatgcaaactaaaaccacagtgagataccacttcatatccattagaatgattgctatccaaaaaaacccaaaaaaacaaaaaacccacagaaaataagtgttggtgaggatgtggagaaattgaaaattggaacccttgtacacatttggtaggaatgtaaaatagtgcagc

SEQ ID NO: 487836 - DNA, 586 bp, Homo sapiens
ggttttgagggcctcaactgagacagcttgtctgctccatgaggcctcatcctctgtaggctagtccatgctgcttcacatgatagcaggagagttcctggtagcaagagaaggcaaaacaccaatacacaagsgctttcaagcctatacttgcatcacatttgctaatatcacactgaccaaagcaagccacacggtcaggcccagaatcattgtcaaaagggctacataaaggcatagacacagggagaatgattcactggggactgttactgcaacaatctaccatacctgtttgcttcacagagctatagtgaggaaccaatgagacagtgcttgcataccacagtgtacaatgccaatgcaagttaatattttattgatgtatgtagtcccatcattttacttttattcatgatatatctggagtctttctctgtcccctattagattcaagtccctttcagatggtgttatgggttgagttttatccccctaaaaagatatgttacgtgaacttatttggaaatagagtcattgcaggtgtaattaggtaagttaagataaagtcatacaggagtagggt

SEQ ID NO: 487837 - DNA, 359 bp, Homo sapiens
tccaaaagaagggtttataataaatgtttacattaagcaatcacacatttaaccccccaaataaatatactgggaatgtacagttgacccttgaacaacaaatggggttggggcaccgaccccttcagattgaaactcctggtcaggcatggtggctcacgcctgtaatcccagcacttcgggaggctaaggcaggagggttgcttgggccaggagttcaagaccagcctgggcaacatagtgagacctcrtctctattttttaattataaattaaaaaatgaaaagactcctgtgaattcagtgtgtcccgccatgtgatggcatggcagtctgtcatctgagggttgtgggaggaaa

SEQ ID NO: 487838 - DNA, 532 bp, Homo sapiens
tgccaaaaatactcccctcgccctcggtgggtgagcaaggcaggcatgatgaataaggagcattgaaggaggggaaagtgtagcaggaagcggaacacaggtcccagcatgtctagtgtgcggcagaatgaagtcagcacyctgaggacaggctagagatgatctccctcagttcatcaaccattcagtggtccagccatgcagttgggtggctcctatgtccagcacaaccctgggcttggggacacatcagtaaacgagcccatacagccccgcgtgcaagtctacaatccagccagtgaggcagagaggagataaatacttgcacaaaaaaatggtttgccttttatggtgatagcggctataagacttgagcaaattccatgtaactgtatcctggaagcatctaacactgcctttgaaagggacagttaagctgaaactcgaccaagccaagggcagggggatgtgggagacacagtccttccaagcagcaggccgagcacatggagagtcccctgaatgagaagga

SEQ ID NO: 487839 - DNA, 585 bp, Homo sapiens
tttttcccaagttgaattcttctttcctgcaaatttgagagaacattacaaaatttccagctctttttatggctatctttggcaaatttgaatccagaacttctcawataataaaatgtagaacacgttgttgttgctagttgcagacattatttaggggaaagaaggcagacagcacacagcacacgagaaaaaaggaaagaaaatgattgggttttggcttatctaaatgacactcagtttgtgcttgttatctaggtgccacaacctatgaacttcaactaagctgagaaaaatcacccatcaggagtttgagctttcatgtgttttttctctcattgacatccatgaccttttgaggcctgtgctgttttggggatgtctgacctctgccatggccttcttctctccaaaagctgccttttctcagtgctcaattccccagggcttcagttaaccttcattgcattcagtgacactgaggcctgagcctgccacatggtgcaaaccattgcatgcctactcctttctccacgccagccccagcatgaatctgacccagcatcactcagcaaggtctaaaaa

SEQ ID NO: 487840 - DNA, 585 bp, Homo sapiens
tttttcccaagttgaattcttctttcctgcaaatttgagagaacattacaaaatttccagctctttttatggctatctttggcaaatttgaatccagaacttctcatataataaaatgtagaacacgttgttgttgctagttgcagacattatttaggggaaagaaggcagacagcacacagcacaygagaaaaaaggaaagaaaatgattgggttttggcttatctaaatgacactcagtttgtgcttgttatctaggtgccacaacctatgaacttcaactaagctgagaaaaatcacccatcaggagtttgagctttcatgtgttttttctctcattgacatccatgaccttttgaggcctgtgctgttttggggatgtctgacctctgccatggccttcttctctccaaaagctgccttttctcagtgctcaattccccagggcttcagttaaccttcattgcattcagtgacactgaggcctgagcctgccacatggtgcaaaccattgcatgcctactcctttctccacgccagccccagcatgaatctgacccagcatcactcagcaaggtctaaaaa

SEQ ID NO: 487841 - DNA, 587 bp, Homo sapiens
ttgacctcacaggccaatgaaagtgctggcaaagcttcagrtagagctcactgcaagcacccacaggcctcctgcaggaagcagcccaggtggcagtggcttcctgcaaaccccccaagggctctcccttgtagtaattaccaccttgggacaagtatgggcaaactagaaattgccaattactttttcccctttataatgagtctccatttagattagttgtgcaaaagaaactgcaaataattgaattgctgaggacattgctttacacatcctaaaagctcaacaaataccttttaattgaattgaacttggctaaatgaacctcatctatgtttcaagctagagcaaaaggtggcaccactgacccaagcacaccaggcagctgggggtgatgtggagacacaggcacaggtgtgccccacctgcctgctgaattcgccctgggaccacaccctgggcttacttgggccctctccatctggatcctgctacaaccttccatgacacacacatcctgggtatcatctacctgtgtttaccggggacaccagagcccaagtcagatggctgcaatgggcagccgg

SEQ ID NO: 487842 - DNA, 587 bp, Homo sapiens
ttgacctcacaggccaatgaaagtgctggcaaagcttcaggtagagctcactgcaagcacccacaggcctcctgcaggaagcagcccaggtggcagtggcttcctgcaaaccccccaagggctctcccttgtagtamttaccaccttgggacaagtatgggcaaactagaaattgccaattactttttcccctttataatgagtctccatttagattagttgtgcaaaagaaactgcaaataattgaattgctgaggacattgctttacacatcctaaaagctcaacaaataccttttaattgaattgaacttggctaaatgaacctcatctatgtttcaagctagagcaaaaggtggcaccactgacccaagcacaccaggcagctgggggtgatgtggagacacaggcacaggtgtgccccacctgcctgctgaattcgccctgggaccacaccctgggcttacttgggccctctccatctggatcctgctacaaccttccatgacacacacatcctgggtatcatctacctgtgtttaccggggacaccagagcccaagtcagatggctgcaatgggcagccgg

SEQ ID NO: 487843 - DNA, 610 bp, Homo sapiens
gctggagcccagtgagcaggacagtgcgaagtcaggaaaccttcctgtgctgtgaaattgactcactaagatggttcagttgatgcgtcagcttgagtgggccacagtgcccagatttttggtcaaacwttattctggacatttctgtgagggtgtttttggatgagaatttaatccaaattggtggactttgagtaatgcacattgtccatcataatgtggctaggcctcggccagtgagtggaagctttaagagaaaaaagcccgagctccctggaacaaagaggagatgtctaagcagacagccttcagatgccaattgcgatgttgctgttccctgggtctcgggactgccctctcggcctgcaggatttggaacggccacacgtacaccctaccggttctgtttctctggagaatcctgactaatacactcactaaggccatgcgtgtggggacaggagtgagtgtgtccccagaacaaagctgcctctggctgaagagctgttctttgatagtgtttgaatgaacccacatctctcagttgatgaactgggaaatatgtgtgctccaggacggaatttgtgttaaggggtaaaatcaggaactg

SEQ ID NO: 487844 - DNA, 610 bp, Homo sapiens
gctggagcccagtgagcaggacagtgcgaagtcaggaaaccttcctgtgctgtgaaattgactcactaagatggttcagttgatgcgtcagcttgagtgggccacagtgcccagatttttggtcaaacattattctggacatttctgtgagggtgtttttggatgagaatttaatccaaattggtggactttgagtaatgcacattgtccatcataatgtggctaggcctcggccagtgagtggaagctttaagagaaaaaagcccgagctccctggaacraagaggagatgtctaagcagacagccttcagatgccaattgcgatgttgctgttccctgggtctcgggactgccctctcggcctgcaggatttggaacggccacacgtacaccctaccggttctgtttctctggagaatcctgactaatacactcactaaggccatgcgtgtggggacaggagtgagtgtgtccccagaacaaagctgcctctggctgaagagctgttctttgatagtgtttgaatgaacccacatctctcagttgatgaactgggaaatatgtgtgctccaggacggaatttgtgttaaggggtaaaatcaggaactg

SEQ ID NO: 487845 - DNA, 610 bp, Homo sapiens
gctggagcccagtgagcaggacagtgcgaagtcaggaaaccttcctgtgctgtgaaattgactcactaagatggttcagttgatgcgtcagcttgagtgggccacagtgcccagatttttggtcaaacattattctggacatttctgtgagggtgtttttggatgagaatttaatccaaattggtggactttgagtaatgcacattgtccatcataatgtggctaggcctcggccagtgagtggaagctttaagagaaaaaagcccgagctccctggaacaaagaggagatgtctaagcagacagccttcagatgccaattgcgatgttsctgttccctgggtctcgggactgccctctcggcctgcaggatttggaacggccacacgtacaccctaccggttctgtttctctggagaatcctgactaatacactcactaaggccatgcgtgtggggacaggagtgagtgtgtccccagaacaaagctgcctctggctgaagagctgttctttgatagtgtttgaatgaacccacatctctcagttgatgaactgggaaatatgtgtgctccaggacggaatttgtgttaaggggtaaaatcaggaactg

SEQ ID NO: 487846 - DNA, 610 bp, Homo sapiens
gctggagcccagtgagcaggacagtgcgaagtcaggaaaccttcctgtgctgtgaaattgactcactaagatggttcagttgatgcgtcagcttgagtgggccacagtgcccagatttttggtcaaacattattctggacatttctgtgagggtgtttttggatgagaatttaatccaaattggtggactttgagtaatgcacattgtccatcataatgtggctaggcctcggccagtgagtggaagctttaagagaaaaaagcccgagctccctggaacaaagaggagatgtctaagcagacagccttcagatgccaattgcgatgttgctgttccctgggtctcgggactgccctctcggcctgcaggatttggaacggccacacgtacaccctaccggttctgtttctctggagaatcctgactaatacactcactaaggccatgcgtgtggggacaggagtgagtgtgtccccagaacaaagctgcctctggctgaagagctgttctttgatagtgtttgaatgaacccacatctctcagttgatgaactgggaaatatgtgtgctccaggacggaawttgtgttaaggggtaaaatcaggaactg

SEQ ID NO: 487847 - DNA, 533 bp, Homo sapiens
aaacagctaaggaagtgcttagactaaaatccaaagctttaaaggttagtgtcagtaaagaataaaaattttaaatttmataatgtaaatttctacttcaagtaggtaaaaaaaagaacaattaaactcaaagataggtagaaggaaataaataatgaaaagaatcaatggaatcaaaacagaaaaagtcaagggaagttggtttctttgaaaaagacctataaaattgagaaacctgcacaacaaaaagagaggacacaggttacgaataccaggaataaaagaggagacactactacgggctctatggatattaacgtgataataagggaatgataaaaacaatgttatgtctataaatttgatgcctaaggttgaaaaacacaaattgtcaaaagtggcacaagaacacacaaaaatgagcaagagtgatggagggaaaaacagaaaatttctaacctcattgcaggagctgtctcactggggtgggtgagattgtgtaacacatttgtcacagaaaactcgcatcctac

SEQ ID NO: 487848 - DNA, 526 bp, Homo sapiens
accatccagatttaaaggctgtctacttccattccaaccaaatagaattaggataaaaatatccagctataatgtgagctgcaagggtagttyggggttatttcatcagcaatctaagtgatttttctgattccagccctgcttccccctagttctttctctacagttaaaatgatctgtttatttctttaaaagagaaatattttggggaaaatgaatggaaaagtaaaaagaagataatagtctttcatagtcccaccatccagaattaaatagcatgaacatcttgttatatagttgctcctattcttgtttttattttctggaactaaaattactctgttctttttgcaaatataaatatgatacatcaaagaatcaaaagaagtgtagtaagtactgcatcagtgagctttcaatgttggaagcaaaatattttaggcgttttaagcagaaagggatttaattcagggaattgccttcttaaaaaattcctgagaggtcgggatgtgtgaaaatcagaggc

SEQ ID NO: 487849 - DNA, 526 bp, Homo sapiens
accatccagatttaaaggctgtctacttccattccaaccaaatagaattaggataaaaatatccagctataatgtgagctgcaagggtagttcggggttatttcatcagcaatctaagtgatttttctgattccagccctgcttccccctagttctttctctacagttaaaatgatctgtttatttctttaaaagagaaatattttggggaaaatgaatggaaaagtaaaaagaagataatagtctttcatagtcccaccatccagaattaaatagyatgaacatcttgttatatagttgctcctattcttgtttttattttctggaactaaaattactctgttctttttgcaaatataaatatgatacatcaaagaatcaaaagaagtgtagtaagtactgcatcagtgagctttcaatgttggaagcaaaatattttaggcgttttaagcagaaagggatttaattcagggaattgccttcttaaaaaattcctgagaggtcgggatgtgtgaaaatcagaggc

SEQ ID NO: 487850 - DNA, 642 bp, Homo sapiens
ggtcttgtgttactctcgttcctgtcctttattagacagtaaatgtccccaagtcagattcatgtttacttcatctttgtctccttagcacccagcactatgcctatcacctcagtggtacttacaatttgtttgttaaactaaattgaactagtccctctgtctttcatctctaatcgttctctctccatccattccttcccgttggcatatcttatttttaaaaataacaactttttccacctcttgattatgtcccagcttccaagctatgccttcctctccattatgacaaaaccgctttaaaaaattagaatcctctcgctgcctctgtcctttcctttccttcagccttactgcatgcattatagmttccactccctccttttcaggaaatctaccccttggctatttccaattacagcctatgtgccaaatctctctgaatgaacttcttcccatagttccaattatctcctctaaatatatacataactcctaaaataaatttctgtatttattctcattttcactccagctccatttacaactgcctgcctgacatctccacttagagatgccgtcaccacctgaaactcaagtacattttatttcacgtaacacatgtcttagtttaataga

SEQ ID NO: 487851 - DNA, 370 bp, Homo sapiens
gcatggggatgtcttctccactgccgatccatccattccacagcagacatgagttgagcttcccctacatgccagaagcagctcctggcatgtgctggggaaacagctatggatgagacagatgacatcyttgccctcctggagctgacacatgggggagattgatgatcaaaagaacagcagcaatgccccgaagctaaagggcacaggagaaagctggagcagagagggtgtcgcacgggctccggtttgataagaacagcagggcaggcgtcttgaggagctctgtgaggggaagcatcatgtctttgtctcccccatggggtctggccccttgtgcctcctccaggcctatcttgtggattctttc

SEQ ID NO: 487852 - DNA, 370 bp, Homo sapiens
gcatggggatgtcttctccactgccgatccatccattccacagcagacatgagttgagcttcccctacatgccagaagcagctcctggcatgtgctggggaaacagctatggatgagacagatgacatctttgccctcctggagctgacacatgggggagatygatgatcaaaagaacagcagcaatgccccgaagctaaagggcacaggagaaagctggagcagagagggtgtcgcacgggctccggtttgataagaacagcagggcaggcgtcttgaggagctctgtgaggggaagcatcatgtctttgtctcccccatggggtctggccccttgtgcctcctccaggcctatcttgtggattctttc

SEQ ID NO: 487853 - DNA, 359 bp, Homo sapiens
gagcttcccctacatgccagaagcagctcctggcatgtgctggggaaacagctatggatgagacagatgacatctttgccctcctggagctgacacatgggggagattgatgatcaaaagaacagcagcaatgccccgaagctaaagggcacaggagaaagctggagcagagagggtgtcgcacgggctccggtttgataagaacagcagggcaggcgtctygaggagctctgtgaggggaagcatcatgtctttgtctcccccatggggtctggccccttgtgcctcctccaggcctatcttgtggattctttcattcatcttacatagtcagaacatcccttatgaggcttcttccc

SEQ ID NO: 487854 - DNA, 614 bp, Homo sapiens
ccaaatcatcctggactggtggattctgttccaagcccatgtaagtgacccaagttccagatgacaatagcctggcctctaggagtattgagtacrcagccaagtgagctgcctctgagtcagggcttggatcctgactattatcctgtctctcatttctcctctcttgggcacatgctgtctcttaccctttataatataaagcttatattagctttaaccagtagtttgttatgtaaaatgttccacatgacagctcagctttgccctaattcccccatttcctgcaacctcttaaagatctttcttaatgtccttgctctgtaatccattaatttctattttatgagtcgagacttcccttgatatttctttgccactaatcttccttcccccttctttcttggtcttttttttccccttgtcttgacatcctctttatcaagctctgctccatatttgatccaaacctctcttgctttcattgaggtccgttgctcaacatttcatcctccttggaaatgaacaaagcaaatgatcaggatggccttcccagaaacaaaccaaaagccaaggaaaattttcttcctaaagcctgagctcagggtgagacc

SEQ ID NO: 487855 - DNA, 478 bp, Homo sapiens
ctgcccacgccacacatcagaccaattaagtcaggatgtctgggggtgggaaccaggtatcggtactttttttttttttttttttttgagtcagagttttgctcttgttgcccaggctggagtgcaatggtgtgatctcggctcactgcaacctctgcctcccggrttcaagtgattctcctgcctcagcctcccgagtagctgggattccaggtgcacaccaccaccccggctaattttgtatttttagtagagatggggtttctccatgttggtcagggggatctcgaactcctgaccttaggtgatccgcctgccttggcctctcaaagtgctgggattacaggcatgagccaccatgcccggccatgcatcagtactttttaaagctccccaggttgttccagtttgcagccatgtttaggcatcactgtgctctctctctgagaccctcttccacgtccttttagctgggcaa

SEQ ID NO: 487856 - DNA, 478 bp, Homo sapiens
ctgcccacgccacacatcagaccaattaagtcaggatgtctgggggtgggaaccaggtatcggtactttttttttttttttttttttgagtcagagttttgctcttgttgcccaggctggagtgcaatggtgtgatctcggctcactgcaacctctgcctcccgggttcaagtgattctcctgcctcagcctcccgagtagctgggattccaggtgcacaccaccaccccggctaattttgtatttttagtagagatggggtttctccatgttggtcagggggrtctcgaactcctgaccttaggtgatccgcctgccttggcctctcaaagtgctgggattacaggcatgagccaccatgcccggccatgcatcagtactttttaaagctccccaggttgttccagtttgcagccatgtttaggcatcactgtgctctctctctgagaccctcttccacgtccttttagctgggcaa

SEQ ID NO: 487857 - DNA, 478 bp, Homo sapiens
ctgcccacgccacacatcagaccaattaagtcaggatgtctgggggtgggaaccaggtatcggtactttttttttttttttttttttgagtcagagttttgctcttgttgcccaggctggagtgcaatggtgtgatctcggctcactgcaacctctgcctcccgggttcaagtgattctcctgcctcagcctcccgagtagctgggattccaggtgcacaccaccaccccggctaattttgtatttttagtagagatggggtttctccatgttggtcagggggatctcgaactcctgaccttaggtgatccgcctgccttggcctcycaaagtgctgggattacaggcatgagccaccatgcccggccatgcatcagtactttttaaagctccccaggttgttccagtttgcagccatgtttaggcatcactgtgctctctctctgagaccctcttccacgtccttttagctgggcaa

SEQ ID NO: 487858 - DNA, 489 bp, Homo sapiens
caccaggaatggcatggagtcgcagcagcagggacaggcaggtgatccccacagagcctcacatggcraagaggatgaggaaggtaaccatcaaacggaacagccccgtggcctcagacaaggcaaagcccagaatggcataggagaagagctgctgcttgagaggtgggttcctggcatagccaatgatctagctgccaaacacagttccaatgtcagcccctgaaccagccacaccaactgtggctgccccagcaccaatcaacttggctgctgtgtcaatgtccccagagacaacactggtctggaacttctgtctggcccctggagtagggagttgctgtaggaagctgtttagatgaattctctgggctattcaagaaggaggcagacacaggcccgattagacccctggtacaacagcagatcagagctggagaaatgagtagtgccctggtggtctatattttttcagtctcccagctttag

SEQ ID NO: 487859 - DNA, 509 bp, Homo sapiens
ataatactgattaccacgttcctgttggtggggattttgacttgactgcagtggggcttgaatatcaggatacatttaaagcttaccaggtgcttttagtctgcagctagggttgcattcacacctgtrtgtcacactatgccacacattctaacagtcctacaaaaaagtaatggcaaaaccaggatttgcaccaggcctgctggcccctaggccagagttcctggctaaaggaggaaaagtgggaaacagatggccatttcttctgaggtctcagtgtttgcaaatgtggttcaggaggagccctagtgcttggggtcagggtcaggattgcaggtggggaggcacagtgaagaagcccagcagccagggaaaggctgtgccagccccaaagagctccaaggctctttgtagggatggctcacctcgagggcttagggagagctgagagggcttgctaagaagcttgtgtgtcaccagggaatatttgaaagatgagagaaaatgca

SEQ ID NO: 487860 - DNA, 667 bp, Homo sapiens
agtctgaagttttcctccccaagagccagcggcgcaggaacagccccaccccgacctctgagacggtgtgagcaaagcggtgctctggggcggtcatagcccgggagcgtgggcagcacacctttctctggggtcctgatctgctgctagtggaggggtggttctcccaggtaaaagtcatggaacctgcattcctacagttttttcacggggcatttcttggaggaggaggtggttatgatggagactcaagccagactgcctgggtcggaatctcagctccatccctgctggacggtgcaactctgtgcttcggttttcatctgtaaaatgggtaggataatagtgcctttttgagttagaaccattataaatattagctattatacatttccatttcagacagaagttgtcaacaccatgtgtggctacaaaactatcgacaaggaggtaatgtctttgaaatgcctttccctggaaatgttgctcttcctggtccaccctggggtgatcggaggggtttattgaggtcgrggtcctggccactgagattttcccacattcctggctgtgacccagagccaggactgctgtggttttccaccccagcacagaagggctcagggaaccaagaattcccccaggctgggagatgccgcctgtcagg

SEQ ID NO: 487861 - DNA, 601 bp, Homo sapiens
attctcatgagcatataaataakctcttagtattcccatcttaaacaaggatacagacaagcaaggccctcctgatgatttctcctctccggcccctgccctgtctctctttcccttcatagcaactgctttgaaagtgtctgtcctctctgtttctggttcctcttctcccatcattcttggacctccctaattagactcttgtcccacttgccccaaattgctctcatcaacatcaccagtgacccctgcattgctaggtcctatgtccctgtggcatttctcagcttcttggcttgtctgccacatgtggccagttgatcattctctcctccttgaaatgccttcttgtttttcctccaagagaccaaccttgcctagtttttctcttacttctgaggccccctcttatgagtctcagttgttgattttgctttcccaacctcttagcatttgagggcctcatctgtcttttctatccacaatcccttgttgacctcatccagcctggaatttgaggtcctatccaccactctagcctcagtcctgggtccctgctctagtcagcaggtcgccagggctgactcagttcattcgtagc

SEQ ID NO: 487862 - DNA, 637 bp, Homo sapiens
cccgggtctcccagctcccaggccagtgctctgtcacaccacaggccaccctccctcatcaggaacaagacttctcacgccctggcatatcctatccaaaaaaataaaaattaaaggatgcatttctgaaggacagtgatgctggccccacttctgccttcctgcagctccagagagccagtgggatctgggccctggcctctggtgccacttcaggtcagcttgctccctctatccccacacaaggtggcaaccggcccacctccctaggggagcctgtggcccctgccctgggaagctggtgctactccagcagagataccagtccctgtgttagcaatgtcttgtaacttctacgtaaagttacaaacctgaccgggatggccttctggaagcgcagagcttcggggaggatcagagatgccctcatgcctagaacatgtttgatgagtgactaaatgaccaaaccacccatccccaaaaagtccatcactctaagaaaagttcttccaagaaagaagaacaaacatctaggccaggaaggaagckggtaagtctgccgagagagagaggcttcacaccccacctctagctctcacgagtgagttacctaactctctgagcatctctttcccaa

SEQ ID NO: 487863 - DNA, 350 bp, Homo sapiens
tacagaagagtctactgacactataactgaaggatcctaagagtttagtaatactgtgtctacctaaagtacattttagctttcactggattgaagttaaaacacttcctggggaagaaagtacactgggtgtgtgttgactatgatgaatccaaggtgaaggtataagtgaaatgctttaaaaacaaacaaacagatctaactcctgagctmtaaaagggtttcagaagaaaaaagtcccaagtcagcgatgtaactggattaactggtttacagaggtaggtgaccctacctaactctcctagggctgctcattaagccttaaaccctggcctaagacccacctccag

SEQ ID NO: 487864 - DNA, 463 bp, Homo sapiens
tacagaagagtctactgacactataactgaaggatcctaagagtttagtaatactgtgtctacctaaagtacattttagctttcactggattgaagttaaaacacttcctggggaagaaagtacactgggtgtgtgttgactatgatgaatccaaggtgaaggtataagtgaaatgctttaaaaacaaacaaacagatctaactcctgagctctaaaagggtttcagaagaaaaaagtcccaagtcagcgaygtaactggattaactggtttacagaggtaggtgaccctacctaactctcctagggctgctcattaagccttaaaccctggcctaagacccacctccagaactcctgcctggtcacgtctccacctgtgacacccagagctacctacagctcttccagcgtgacaggctgggtcttgcctccgtgactctgcaccattggttccttctgccc

SEQ ID NO: 487865 - DNA, 620 bp, Homo sapiens
ctactgacactataactgaaggatcctaagagtttagtaatactgtgtctacctaaagtacattttagctttcactggattgaagttaaaacacttcctggggaagaaagtacactgggtgtgtgttgactatgatgaatccaaggtgaaggtataagtgaaatgctttaaaaacaaacaaacagatctaactcctgagctctaaaagggtttcagaagaaaaaagtcccaagtcagcgatgtaactggattaactggtttacagaggtaggtgaccctacctaactctcctagggctgctcattaagccttaaaccctggcctaagacccacctccagaactcctgcctggtcacgtctccacctgtgacacccagagctacctacagctcttccagcgtgacaggctgggtcttgcctccgtgactctgcaccattggttycttctgcccagaatccactccccagccctgacagcatggagctggagctgctggtgttagggactcggctcccccactagactgtggccttccaaaggacaggagctgtaaccttcagctctgagcccagccaatcagtagtcagcaggtgctcaagctctgatcctggaccctgat

SEQ ID NO: 487866 - DNA, 620 bp, Homo sapiens
ctactgacactataactgaaggatcctaagagtttagtaatactgtgtctacctaaagtacattttagctttcactggattgaagttaaaacacttcctggggaagaaagtacactgggtgtgtgttgactatgatgaatccaaggtgaaggtataagtgaaatgctttaaaaacaaacaaacagatctaactcctgagctctaaaagggtttcagaagaaaaaagtcccaagtcagcgatgtaactggattaactggtttacagaggtaggtgaccctacctaactctcctagggctgctcattaagccttaaaccctggcctaagacccacctccagaactcctgcctggtcacgtctccacctgtgacacccagagctacctacagctcttccagcgtgacaggctgggtcttgcctccgtgactctgcaccattggttccttctgcccagaatccactccccarccctgacagcatggagctggagctgctggtgttagggactcggctcccccactagactgtggccttccaaaggacaggagctgtaaccttcagctctgagcccagccaatcagtagtcagcaggtgctcaagctctgatcctggaccctgat

SEQ ID NO: 487867 - DNA, 620 bp, Homo sapiens
ctactgacactataactgaaggatcctaagagtttagtaatactgtgtctacctaaagtacattttagctttcactggattgaagttaaaacacttcctggggaagaaagtacactgggtgtgtgttgactatgatgaatccaaggtgaaggtataagtgaaatgctttaaaaacaaacaaacagatctaactcctgagctctaaaagggtttcagaagaaaaaagtcccaagtcagcgatgtaactggattaactggtttacagaggtaggtgaccctacctaactctcctagggctgctcattaagccttaaaccctggcctaagacccacctccagaactcctgcctggtcacgtctccacctgtgacacccagagctacctacagctcttccagcgtgacaggctgggtcttgcctccgtgactctgcaccattggttccttctgcccagaatccactccccagccctgacagcatggagctggagcygctggtgttagggactcggctcccccactagactgtggccttccaaaggacaggagctgtaaccttcagctctgagcccagccaatcagtagtcagcaggtgctcaagctctgatcctggaccctgat

SEQ ID NO: 487868 - DNA, 596 bp, Homo sapiens
cagtagtcagcaggtgctcaagctctgatcctggaccctgattcatctcatatattgaacaaacatttattatctcctctgattggacactgtgctagggcrtgcagggatacaggtccttgctcacggagtctaccactagcagaaacaaaagacactaagaactaactgtgtaagaagtgttataagcaaggcaacaatcaaatgaacagggggcacagaagaggatgaggttctttttttgcttggaggaccagaaggtttcccagaaaaggtgacgctttcaaagagaaaagaagagagaagagtctcagtatgccctgcaggctgtgaaataaagcctggctcaacccactgtgactgtgactgtcatctaggaatgacactgaggctggagaaggcctcaagggccagcccacccaggccacaggggactcagtgctgcccgatcactgagccctaagaacagagactcaccgcgtccagactcgtctgctggcagggaaatgagaacgtgaagcccagaggcatcctggggcctttgatccccatgtagtccaagaagtcagagatgcaggagacaatgtgatcaaaca

SEQ ID NO: 487869 - DNA, 592 bp, Homo sapiens
tagggccaggacctgagagcctgcatctctaacaagctcccaggatgatgctaatgatgcgcccrggagcaccatccacccatccagggtgggatgtaggtgaactttcatcgggagggcacaagacacaccccctggccagaccaaaagggctttggtagttttcatcccctttgaagaaacttaagtagagttcaaagactgtacagttggatgatttttgttctttgttttctcagcccccttttcacccaaggttaaaactgagagaagaggagctccagaaacggaagatgatgggagtgggagatgcaaagaaagccaaaacatggaaaccatacatcttgcctatgggagtcctgagcaaagagatcaattgatggaggaaagaaaaagtagctatgaagtagctatgaaatgtagctggagcctggtgccaggaaacgggcgggcctgacctcccaggagggaaggtggggcctgcaggaggaggagagctgctgtgtcactctagctttgcatttcatacccaagcccattcatggaaagaaagggaggggctgggtggagaaagccaggccccaaacaacct

SEQ ID NO: 487870 - DNA, 476 bp, Homo sapiens
  misc_feature (1)...(476): n = A,T,C or G
caatatttggttttccattccatctcagaggccttcaagcccccaggcctggttcctactctatcaactgctctctgtctccaaaagactgtccttgctaatgtcaccaaggacctctatgagccaaatttaggacttttcagccttcatttgactcccagtcccttcaatattgaaggctgttgactaccccttcatttggaatctctctgtcccttctttcatgtcctcacactctctctgactagkcctccctcaagcttctcacaaggaatggcttccctttcttcatactgcacactactgcagggtaagttaatctagctctttgcanggagctgtggacagagcttggacacacaggctggggcgtctacacgtgcatgctagctctcaacacacaggaaggaactggaggtgggaaaataactctcaggctggtcatgatctctcaaaccagaattcccttcatgcca

SEQ ID NO: 487871 - DNA, 526 bp, Homo sapiens
agatgtcattatgagaaaagcctctaaagatcattgttatttagtctagaaaggcatgggctaatagctgaaggttgaagtatccaagagaaggtatgaagaggatgtacccagagttaactagttaaccactaaattttgatgggttatgtyaagggagaaagagagaaagggtgagagagacacacagacacacacacacacacacacacacacacacacacagagagagtgtgtgttacggaaagagcatactgatgactcccaaatagaaaataacagaattgagagtaactcatgggttagtaaaggcttcaatgcaaatgaagaaattttgaagtacattcttctttgtgtcaaaaatggtggcctcctccttcaacaaaccttgctctgccactgggagggacaaaaagcctgccttcctgagcctggcattttgtatgtactagaaaaatagtgagtctttgttttcctctgcgatgagaaaattaaaatttagatttataatctgatggtgtttgca

SEQ ID NO: 487872 - DNA, 526 bp, Homo sapiens
agatgtcattatgagaaaagcctctaaagatcattgttatttagtctagaaaggcatgggctaatagctgaaggttgaagtatccaagagaaggtatgaagaggatgtacccagagttaactagttaaccactaaattttgatgggttatgttaagggagaaagagagaaagggtgagagagacacacagacacacacacacacacacacacacacacacacacasagagagtgtgtgttacggaaagagcatactgatgactcccaaatagaaaataacagaattgagagtaactcatgggttagtaaaggcttcaatgcaaatgaagaaattttgaagtacattcttctttgtgtcaaaaatggtggcctcctccttcaacaaaccttgctctgccactgggagggacaaaaagcctgccttcctgagcctggcattttgtatgtactagaaaaatagtgagtctttgttttcctctgcgatgagaaaattaaaatttagatttataatctgatggtgtttgca

SEQ ID NO: 487873 - DNA, 663 bp, Homo sapiens
ccccaaaattgtattctttaaaatgctatttggagatactagaagatcctagttgagagttaaatcaataaaactgtgaaatggatatttaaatatgatatttaataatttactttttattaatttagaatagacagccagtacagattatacatgaatttggamagaataagattatagaggtataaatctaaagtattaaaatggcaaactaaacatttagcaatggattttttaaatcaagtatatgaacccatttgtaaacacattttccaccactccaagatgcattcgatcatgtgcaaactagtacacaaaaatatttcccttttcttaacctgagttgaactttgtaggtattttatatgctgctcttcgttagtgtcattttgtctgcattcagtgttcaagtttcttcaactaggctattagcccttgaatggagggaatcctcatgcctgaaattcttttgtgtttttcagagtccaatactatatcttaatgtaatagatatatcatgcaaactaagtactcaatacatttagtattttagcacttgacacccttataacattgtgttctttgtatccaacatgttcacattagtatggtagtgttgcaggtaccttaggttactttggttgagagtcttataaactattt

SEQ ID NO: 487874 - DNA, 663 bp, Homo sapiens
ccccaaaattgtattctttaaaatgctatttggagatactagaagatcctagttgagagttaaatcaataaaactgtgaaatggatatttaaatatgatatttaataatttactttttattaatttagaatagacagccagtacagattatacatgaatttggacagaataagattatagaggtataaatctaaagtattaaaatggcaaactaaacatttagcaatggrttttttaaatcaagtatatgaacccatttgtaaacacattttccaccactccaagatgcattcgatcatgtgcaaactagtacacaaaaatatttcccttttcttaacctgagttgaactttgtaggtattttatatgctgctcttcgttagtgtcattttgtctgcattcagtgttcaagtttcttcaactaggctattagcccttgaatggagggaatcctcatgcctgaaattcttttgtgtttttcagagtccaatactatatcttaatgtaatagatatatcatgcaaactaagtactcaatacatttagtattttagcacttgacacccttataacattgtgttctttgtatccaacatgttcacattagtatggtagtgttgcaggtaccttaggttactttggttgagagtcttataaactattt

SEQ ID NO: 487875 - DNA, 663 bp, Homo sapiens
ccccaaaattgtattctttaaaatgctatttggagatactagaagatcctagttgagagttaaatcaataaaactgtgaaatggatatttaaatatgatatttaataatttactttttattaatttagaatagacagccagtacagattatacatgaatttggacagaataagattatagaggtataaatctaaagtattaaaatggcaaactaaacatttagcaatggattttttaaatcaagtatatgaacccatttgtaaacacattttccaccactccaagatgcattcgatcatgtgcaaactagtacacaaaaatatttcccttttcttaamctgagttgaactttgtaggtattttatatgctgctcttcgttagtgtcattttgtctgcattcagtgttcaagtttcttcaactaggctattagcccttgaatggagggaatcctcatgcctgaaattcttttgtgtttttcagagtccaatactatatcttaatgtaatagatatatcatgcaaactaagtactcaatacatttagtattttagcacttgacacccttataacattgtgttctttgtatccaacatgttcacattagtatggtagtgttgcaggtaccttaggttactttggttgagagtcttataaactattt

SEQ ID NO: 487876 - DNA, 676 bp, Homo sapiens
aagtaactctaagatttcagactgtgtactttaacagacatagacacatttsagtgactctaagagatagttgttctacagatagagcaatcaaacttaaatgcaggcatattttaagatcacctagagtgtcagagtttcttaggcttccagaataactttaagtgatttataagaaaattcagctcaggggtctttatatgtggttatttttaatttacaaaataaacccagttgagaggctgtgtgtatatttgtagtgtatgcatttatgctcacatgcctatgttagggcaatgctaagaaaaataattatttataaacaatataaaatgatgttatgtgtacactgaaaattggttccttgccattgttgattacatgaaatcattgacaaaaactatgtctattcataaaaataaaatggagagtgagagagaatgagaataaatatcattctgtctttattgctttaagatttaatccctaaggtatttttgcactatacttaataacattattattggaccatcctattataagtcataattgataaatacagcaaaaactaaaggattaagtagttttaatatttatctgtcaaaagaaaagcgtgtgtgtaatgggaggccagagattttttacacttaaattactcttgagaaatcctgtattt

SEQ ID NO: 487877 - DNA, 676 bp, Homo sapiens
aagtaactctaagatttcagactgtgtactttaacagacatagacacatttcagtgactctaagagatakttgttctacagatagagcaatcaaacttaaatgcaggcatattttaagatcacctagagtgtcagagtttcttaggcttccagaataactttaagtgatttataagaaaattcagctcaggggtctttatatgtggttatttttaatttacaaaataaacccagttgagaggctgtgtgtatatttgtagtgtatgcatttatgctcacatgcctatgttagggcaatgctaagaaaaataattatttataaacaatataaaatgatgttatgtgtacactgaaaattggttccttgccattgttgattacatgaaatcattgacaaaaactatgtctattcataaaaataaaatggagagtgagagagaatgagaataaatatcattctgtctttattgctttaagatttaatccctaaggtatttttgcactatacttaataacattattattggaccatcctattataagtcataattgataaatacagcaaaaactaaaggattaagtagttttaatatttatctgtcaaaagaaaagcgtgtgtgtaatgggaggccagagattttttacacttaaattactcttgagaaatcctgtattt

SEQ ID NO: 487878 - DNA, 676 bp, Homo sapiens
aagtaactctaagatttcagactgtgtactttaacagacatagacacatttcagtgactctaagagatagttgttctacagatagagcaatcaaacttaaatgcaggcatattttaagatcacctagagtgtcagagtttcttaggcttccagaataactttaagtgatttataagaaaattcagctcaggggtctttatatgtggttatttttaatttacaaaataaacccagttgagaggctgtgtgtrtatttgtagtgtatgcatttatgctcacatgcctatgttagggcaatgctaagaaaaataattatttataaacaatataaaatgatgttatgtgtacactgaaaattggttccttgccattgttgattacatgaaatcattgacaaaaactatgtctattcataaaaataaaatggagagtgagagagaatgagaataaatatcattctgtctttattgctttaagatttaatccctaaggtatttttgcactatacttaataacattattattggaccatcctattataagtcataattgataaatacagcaaaaactaaaggattaagtagttttaatatttatctgtcaaaagaaaagcgtgtgtgtaatgggaggccagagattttttacacttaaattactcttgagaaatcctgtattt

SEQ ID NO: 487879 - DNA, 676 bp, Homo sapiens
aagtaactctaagatttcagactgtgtactttaacagacatagacacatttcagtgactctaagagatagttgttctacagatagagcaatcaaacttaaatgcaggcatattttaagatcacctagagtgtcagagtttcttaggcttccagaataactttaagtgatttataagaaaattcagctcaggggtctttatatgtggttatttttaatttacaaaataaacccagttgagaggctgtgtgtatatttgtagtgtatgcatttatgctcacatgcctatgttagggcaatgctaagaaaaataattatttataaacaatataaaatgatgttaygtgtacactgaaaattggttccttgccattgttgattacatgaaatcattgacaaaaactatgtctattcataaaaataaaatggagagtgagagagaatgagaataaatatcattctgtctttattgctttaagatttaatccctaaggtatttttgcactatacttaataacattattattggaccatcctattataagtcataattgataaatacagcaaaaactaaaggattaagtagttttaatatttatctgtcaaaagaaaagcgtgtgtgtaatgggaggccagagattttttacacttaaattactcttgagaaatcctgtattt

SEQ ID NO: 487880 - DNA, 547 bp, Homo sapiens
ctgcacatggtgaacaaacagtgtcaacaatattgatcaatgtgagataacagttgaggcacagggttttccaatagccaggcatggtggtgtgcacctgtaatcccagctactcaggaggctgaggcaggagaatcacktgaacccaagaggcagaggttgcagtgaaccaagatcgcgccactgcattctccagcctaggtgacagagcgaggctccatctcaacaaaaaacacagttgagacacagggttttccagcatcttttcccacaaaaaggaccggaatacatcttaccagggctctaattagtgtactggcctcttgcccttccaaaccgctcaaatctgttctcttttcaggctccttaaaaaacagttaaaccaatacaaagacaagttgcaagctatatacacctcccaggaagaaagaatttgtcgatttgaaacaaggattcacaaactcaaaaccaaccaggatagtctatggaccaagctacaacagataagacgggacctacaggtataaaatgtgagggacactggcca

SEQ ID NO: 487881 - DNA, 592 bp, Homo sapiens
gcccagtccccctggagccagtgaactccccaggatgggagccccagaggctggcaggacataacccaggtccttgggcatgctcctggccttgtgaccccaccttggaaggcagcccagggcccttcctgctggcatagcatgagctcccttccaccaggggaggtacaaagccaactgagatcaggtggacacygggcccttctcaccctgacatcctctggcaagtgaggggggtcccttaagggcaagatcctagagcaccaccccatctcaacccttcctggactggctttgctcaggacacccttgaaaccagactccctcttccccagggcctagcagccggggagggcctggaattagagaaaggggagcaattgccctgccaaccccttccccagggggatagagcctctgagctgggcccagttccctccccccttttcacttcctttctccctaccacactgcccaccactgagcctcctggggttgcatcagggtgagacacaggcattgcccaaggaccatggtccagaaacctcaagcactgtttcctcaacaccagggcaggacaggaagggctcag

SEQ ID NO: 487882 - DNA, 523 bp, Homo sapiens
gttttttcttcttgtgtgcacatgggatgtgatgttccttggcgactgctgagtgtgagtrcatacacatgcatgtgcatataagagtaacgtgtgtgcttctctcacttaagcactcatttgggttctgggcaacactccgtgagggcagagctcaggtccgcgggccatgctttgctcccttgaggttacaacggttctactcaccccataaggcctggacagtaaactccctcagcacctacaaagtcactgcccagggccctgaaacagggactggaagctcgggtcttcccttggccccatgtgatgacatccccctccctctgcagaaaggcagcccccagtaccagctgctgacagtgcctgagcactcaccacgcggcaccctcgtgggcaacgtgacaggcgcagtggatgcagatgagggccccaacgcgatcgtgtactacttcatcgcaggtggggccagacagagctagtgccctgattaccctggggctagagatgacccacatatgcc

SEQ ID NO: 487883 - DNA, 680 bp, Homo sapiens
tgctcagatcccacttttgccagacgctcattcagcatctgacctctaccttcataagatctgttatttttataagaaaaccaaacaaaaatgttaagcatctaaggacaaggtaaggagggtcactggggcccaagagtctggggaccagcttggctcaggctgagctgaaagaggccaaacaggccctcctccctcccrgctccaccccgcaagcaccatcccctccggctaagcaggcgcaagggaggcccagcgcggacatcccctgctggccggacacccgactccagtccaagtctcgctacatttccgccacatccctctctgctggacgtccaggtggaggtggcatccccacgtggacaagaaagtcaatgtcaatgaacaagcattctctccatttcactggcttcccaaatgtgtgcccagcttataaacagaagtgactgatgttccctccggttttgaatgtggagtgtttgtgtgtgttccttttttaaattaagttattccctcaatagtttccccttggttttgtttaactggtactcactacaagtttctggaatggtttgtttaaaaatcaaggcaactctcaaggaactggcaacgtgctctgactctggcctctagggagcagggacaggggcaggtgaagagcagagccgaccttcagg

SEQ ID NO: 487884 - DNA, 631 bp, Homo sapiens
tggccccatgttacttggtgacagcaggggcactgaccaccagagtgtgctgatggacaggctctctcctggatggagagtagtgaccggtctaggcacttagccagtggtctctcagtccaagggaggccaggccccacctggaggatgtagtgatccagctcttctctgtccaggggcctggccacaaacacttcgccaatggagtcattggtggtgacgatctcaaaggcccccgcgatgttgccagaggccagggagaagaccacctgtggggagaagagagggtgaggggtgagcaggtgtggaggagaggtggccaggtcaagccaagggggactccctggtcctcctctgcccacgtgggccctctgttgagcaagggcttttgggagtgcagtgttttaagcagaagtgattcatctccctcaaaatgggggtgcaggcccatggaggtagtgtagcacccatggaaagttccggggctaggagatatcagtatcctggcctggaagagtggggcttgagtcccatggcactgacgtcttcccagggtagaggggattgtgctcacgctgctggggtgggcacacgctgcggcrttacctggactctacttggttcttacggc

SEQ ID NO: 487885 - DNA, 582 bp, Homo sapiens
ggactacaggtacctaacaccacacttggccatctcaaggacattttatgacaaagaggagagtgctgtgcacacagaaggagctcaaccaatgttggttagattggaagaaatggtgctccctgcccccagcccctcaccgtgatggcgtctatcttgaagagggctttggcctgggtgctggtgtaggcgtygaagcggtacgtgatttggttgaggttgtcgatggagtaggcctggacccgcacaatctcagtacccagtgccagattctccaggatggcagcctcgtatgaggcattggagaactgcacggcctcgtccagctcgttgagcagagtgatgtagacgctgcagaagccctggttgaagggcggggcctggtcagtggccgacacattcatcatgtagctggtcttggtctcgtagtccaggtaattcacggtgatgataagccctgtgctctcgtcaatctcaaacttcccctctgcgcccgacaggatgcggtagttcaccaggccaccatcccctgtaggaggacacagaggctgtgcagtcccagatagaactgagtggggctgc

SEQ ID NO: 487886 - DNA, 630 bp, Homo sapiens
aattcctgaggtgaacaaaacccctgctgggcagccgtgggggccagcccgtgggggagstgacccagatggatgactgcaggggcacagcagtgaaagacaggtgctggggtggagctggggcttgtgcagtgtaggggtgggagctctccagagggggtggccagagtcctgggctctaagggcacgtgtggctcacaagcggaaccggccagagctcccctgccactgtccctgggctgcctgaagctccctttgacaaagcctgaggcctactgacactggaggccggatgagggctttcccttgacctctgactgcctttcaccatgcaggagaaccgctagaactctattgcaagagccagctcagagggacacagagtccaccagccccataggggaaggccccctggaatcgcagtgggaggggcacagacccctgggaagggccgcctggcagttctgctgctctgccaccacctaccgtggtcacatcagagtctggaggggtcatctccaccaggttgatgtagtagggtgcgtccttccacgtggggtggttgtcattgatgtccaggagggtgatgtttacctgtgaagccataaggggcgctgggagacacaccca

SEQ ID NO: 487887 - DNA, 604 bp, Homo sapiens
ctcaccaaccactcttgcaatctcccaacaagaattcctccctgcttccctcttggaggaagcctccccagcccacttggctcatgaccttctcccctttcccaagagtccagtgcagagctcaggagtcaggctgagtcccggcaccgtcgggcagtctttatgttacagtctttggcagttcctggtcgcttgctagtgcaaataggagttccatgagacggcctggcttctcatggaactgagagctcttagggggaaaggatcctgtatgaagccccctttgctggagtcgctgctgacagagcagccatgaaagatgggggcatgctctctggctgcaccccccttgggacatcagagaatctcagcctgctaagattgtgggtgcccagacaggagtgatcctctctttctccaatctgccccttggctctggatggcaccctgggtcacgctgacctgcccctctccccagatacccagcagtctcaggattcccctgatgtccaatgccccagctgcgtgcctgggcatctcccctgtccctggtgcgggtgcgagygccccatatacttatacatttaagcttctgcttggctgc

SEQ ID NO: 487888 - DNA, 626 bp, Homo sapiens
gcatcctattcagcaagcaaattgggtccctggcccagacaatggcctttccgcttggaagctggccctggagcttcagcctcgggttgagaagacagagcttgttaaggccgggcgtgggcagtggcagaggctgctggtgaagctggctgtgacaggaaggctctccagcatgtctgctccagggtgagattttcctgagcttatgtgaaatcacagcgcatctctgaacctgacaacctgatctaatcctcccggagccgataatgcactaactcttcsatcaacacgcgttcgctgtctcccacagatggggagggggcaggcggtgcatgcacaggtgtgtgtggggaggtctccatgcggaggggcccattggtcccgctgtcataccactctctgcatccccgtgtggcattgggcaaatgaaccagcgtggagatggattcagcaactgataatttcagacacagaaaatactaaggtgtgcttgatattcatgtcagagaaactgtggcttggtttcagaccgctttagatcttcagaggagtggaaaagggaagaaaaaaaggaagagcaggatagagagagagagagagagaagggagaagatgaccttctggtc

SEQ ID NO: 487889 - DNA, 626 bp, Homo sapiens
gcatcctattcagcaagcaaattgggtccctggcccagacaatggcctttccgcttggaagctggccctggagcttcagcctcgggttgagaagacagagcttgttaaggccgggcgtgggcagtggcagaggctgctggtgaagctggctgtgacaggaaggctctccagcatgtctgctccagggtgagattttcctgagcttatgtgaaatcacagcgcatctctgaacctgacaacctgatctaatcctcccggagccgataatgcactaactcttcgatcaacacgcgttcgctgtctcccacagatggggagggggcaggcggtgcatgcacaggtgtgtgtggggaggtctccatgcggaggggcccrttggtcccgctgtcataccactctctgcatccccgtgtggcattgggcaaatgaaccagcgtggagatggattcagcaactgataatttcagacacagaaaatactaaggtgtgcttgatattcatgtcagagaaactgtggcttggtttcagaccgctttagatcttcagaggagtggaaaagggaagaaaaaaaggaagagcaggatagagagagagagagagagaagggagaagatgaccttctggtc

SEQ ID NO: 487890 - DNA, 406 bp, Homo sapiens
gaaggagccacagagaccatggagtgcaaccccattttacagaaggggaacccagaggggaggaggcttgcccacgaagacatagtcgggtagcagagccaggtctagtcccggaatgctattctccaagtgcttcctgcagcaagtcccccactaggcttcagtgacctttaaccagagacttttaaatgtccccccttccccatgctgcctaccccaagggatgggacccagagcctccatttggaacttgtttctgaagcaggtagggatgaaggcaaggctggaagggtgagcacaggggataccaagaagaacagamcatgtgcccgcccagcctggccacggccccccgtacaaccctgtcctgccctgccctccctgctcagctccaggtgtacccgga

SEQ ID NO: 487891 - DNA, 376 bp, Homo sapiens
ctcctgcacatcctctgtgcctgtctccttctgggcagggcaggggcaatagggagcctcggcaggggccagggtgttggaggtgctctataaaccccgcctcgccccatgcaatccagcaacccctctgtcgctgcttgctgcccaccatggtgtctgatggtggggtatcagccccacagaaggaaggttatgctggccctccgtggctggcagtggaaatcacacattctactaaattgggcagagatgttgagccctgtatgggggtactacatacgatgcaaaaatgagttagacaaacttctytccttcacagggaggaaagtggggcacacacagacagttttcaggaatggcagattctgccacatgt

SEQ ID NO: 487892 - DNA, 584 bp, Homo sapiens
tagggagccattgaaggattttgggcagagaaggacaataattttagctaccggctttgacttyttgcccctgggcctcttatgagagccttcacaagtagtaaaatgcactagtgtgtacctctgagtgccagcctagagccagtggggagccattagatggcaacagagacacagaaacaccagagggaggagcctggagcacagttgaggtgctcacctggagccctgatttggcatcttttttttttttttttttttgacagggtctcactgtcacacaggctggagtgcagtggtgcaatctcggttcactgcaacctccgcttcccaggttcaagcaattctcctgcctcagcctcctgagtagctgggactacaggcaattgccaccatgcctggctaatttttctatttttaatagagatggggtttcaccatgttgaccagactggtcttgaactcctgacctcaagtgacccatccgcctcggcctcccaaaccaaagtgctgggattacaggtgtgagccaccatgcctggcctttggtttggcattttttaggtacaatatgaaaatggcca

SEQ ID NO: 487893 - DNA, 646 bp, Homo sapiens
agggaggagccctaactttgccttgggggtcagggagggcagaagggtgtgagctaggcaggagagggaggggcgctgttcaagcggagggggcagagccaggtcctgggagctacacgtggtccagtctgggtcagagatgaggctagacattcagggccgacaatgtgtgtaggaggggaggggttttccttcaagcacagatctaccgcctcctcccaggcccagggcccctgacaggccctgctgcagcccggcactggcccygcacccatcaaggcccaaggtcagtgctgctgccctcaccctggcagaggcaaggagcagcttttcatctagttcggcttcctacacttgaaaaatgaagctctccctctcctcctcacccaggcatacatatttcacatggtcattaggcggtggcactgaaggactcacaaatcttccctgatcagcatccgcagcctgggcaggcagtgagaggccctggggacaagggtcactgtgggaaccatggctgtgcccagtccaacgtgggcaggggaggccaagccttgcaggggttgggggtgtgaagccagcttctgctctaagacagtccagtcctgtctcctggcactcatcacctaatttccctgggcctcag

SEQ ID NO: 487894 - DNA, 530 bp, Homo sapiens
aaaaccttccccaagcaggttctctctgtctcaggggccccacccatggtgtatgcaacacaaagtaggctggactcctactttggtgtctggggtggtctggggtatctaggacagttgctggaggaaggaatgtgggcaggagaaggttagcagaggcctcatggggacacatgaggcacagagatggtaaattacatacacaagrccacccagcccatcggcaaccgagatgtttgtccaagcctgaagcctcataaccccacatttcactctctgtgccaggctcccccaacatcccctcgggtgacaagcatatgcagaagactgctggccagagaaccccaaggcctggcttccaggccactgagttgctgtgtgaccctgtcccattctcatactctctccagaccttagtttcctgctcagtccaaggagaagatgggctggaggccttctgaatgcccttcatagatcaggcatccctggggatgcagaccgcagccccaggaccaaggccaagggtaggg

SEQ ID NO: 487895 - DNA, 530 bp, Homo sapiens
aaaaccttccccaagcaggttctctctgtctcaggggccccacccatggtgtatgcaacacaaagtaggctggactcctactttggtgtctggggtggtctggggtatctaggacagttgctggaggaaggaatgtgggcaggagaaggttagcagaggcctcatggggacacatgaggcacagagatggtaaattacatacacaagaccacccagcccatcggcaacsgagatgtttgtccaagcctgaagcctcataaccccacatttcactctctgtgccaggctcccccaacatcccctcgggtgacaagcatatgcagaagactgctggccagagaaccccaaggcctggcttccaggccactgagttgctgtgtgaccctgtcccattctcatactctctccagaccttagtttcctgctcagtccaaggagaagatgggctggaggccttctgaatgcccttcatagatcaggcatccctggggatgcagaccgcagccccaggaccaaggccaagggtaggg

SEQ ID NO: 487896 - DNA, 520 bp, Homo sapiens
cagccccaggaccaaggccaagggtagggaggtgtaatggccaccagcttccaggatcgcctgggcctcctagtcctaatcagggcatacgagtccaaggtcaatgctgaaatctgcsctgcctctcagtctggccctgtagacaggtgggcgggagctgaccctgcttccctggctacttctgggcagggccaggtgccctgggccttcctggccctctgggagcccctgtgtctccctggatcgtctgctctcctccttcccctcccagagcagaactctgcactctctggcacaaagggtgccctccagatgcaaatccagcgactatttaaggcctggaatgacagtggtgagccagacaacttccctgtctgttccaggggcaggaggcagatgatgaacaaggaatttcagagcccatgggatggggatgagtgatgcggggaaatacgactgggcaggggcggggagtgccagggctggggttgctactgcatcgttatatcaagtggtgcag

SEQ ID NO: 487897 - DNA, 520 bp, Homo sapiens
cagccccaggaccaaggccaagggtagggaggtgtaatggccaccagcttccaggatcgcctgggcctcctagtcctaatcagggcatacgagtccaaggtcaatgctgaaatctgccctgcctctcagtctggccctgtagacaggtgggcgggagctgaccctgcttccctggctacttctgggcagggccaggtgccctgggccttcctggccctctgggagcccctgtgtctccctggatcgtctgctctcctccttcccctcccagagcagaactctgcactctctggcacaaagggtgccctccagatgcaaatccagcgactatttaaggcctggaatgacagtggtgagccagacaacttccctgtctgttccaggggcaggaggcagatgatgaacaaggaatttcagagcccatgggatggggatgagtgatgyggggaaatacgactgggcaggggcggggagtgccagggctggggttgctactgcatcgttatatcaagtggtgcag

SEQ ID NO: 487898 - DNA, 427 bp, Homo sapiens
gctgcaccatccctgcaccatcacggtgcagccctgggctgcgtgggcccaggtgagtgaggggctgggcccgcagcctctgctggtctcacagatcatgggtgatttatatttcccgcgtgggactttgaccttaatttcttccggcagcctggggctgtaaaattcatcagggacctgcgggcggagtgacggagatgtcaggygagcaatcgtgtgggtatttaatctatcagatgtgtggcttgccatttagggagacaacatgagaatgtggaatcaatatggttcattagtgagccgcatgtgccaacccaatcagcacccgccagtgacaggcgtggggggtgtcctgccaggcaccaagtcaccttggagtgaggacatgtccctggagcataggcagtgaccagcctccacccaggta

SEQ ID NO: 487899 - DNA, 564 bp, Homo sapiens
ttctaagtgtgtttctcaggtgattgtgttttgttttttttttttttttttctgtctcagacttgggtcaagtatctattgcagcaaaagtttgttcaaccctactgagatgcctgttggagtttgaccctcatgccaccatcctctatgtgtagtccgatgtaatctcttgtttcctagctaaataattgggctagaagtgagatgtgaatctgaggatttttttccccatttttttggttctaaaatcaaggacctgttttaagaaacataggcactctcaaggcagtttataaaatatttttagggctaggtatggtagctcaccgctggagtgcagtggtgagatctcggctcactacaacctctgcctcctgggctcaagctatcctcccacctcagtctctcragtagctgggatcacaggtgcgtgctaccatgcccggctaattttttgtagagatgaggttttgccatgttgcccaggctggtctcgaactcctggactcaactgaccccacctcggcctctcaaagtgctgagattataggcatgagccaccgg

SEQ ID NO: 487900 - DNA, 502 bp, Homo sapiens
ctatttagaaaaaatgaactgaccgtgcattgacctccacgccctccgtgcaacattcctgctctgcctcagacccaagctgaaaacatcattctttcattccacaaatatttaccaaggtcctaacatgggccaggcccaggcagggaggctgtggggatgcagagttccatcaggggcatctgctcagaacttgggcctggacctgtgcctgagatttctagctgtggcaccctcagatgtttctgtcccagtacaagggaaaggagctcttgttggcatcttctcagaatgccagtttttgtgaccttcacctctctccacccagcaggccccgggtgacccctgtgagtgtgcacgggatgggtgtgtgtgggtgtggacaggcctgtgtatttttcatgacrgggcgtgagcttagcccacagtcgccaaggcaacgccctagcctttggaggtgggacccaagcttggttagtcgggcctaggaagccccacccaa

SEQ ID NO: 487901 - DNA, 663 bp, Homo sapiens
ttaaagctctccagggattctgatgcatagcagccaaggttgacagcaactggattatggtattcactgactaaacaaaactatacaagctgcttgccacaaaaaaatgatcagtatgtgagctaatatgtatgtcaaatttaatttagctattccacaatgtgtacatgtaaaaaaaagttacacactataaacaacacaatttttacttgctaactaaaaaaaaactaaacaagctatcaaatagctgcccatgtcttatttgagggaccgatggaatctaaagcatcataaaaatctaagatgcttattttttttataatccttatccacattccttaagaggcattattcgtacctaatttccccccatatataaatttttgctaatgcttacaaatacaaaatgaatctcagcagaaaaatcaataaggcaaaacaaaactcccaaggacctagaaaaatttttctgtcatatacaattttgcttgatttcatagagttctgacatagcatggcacctcttctggcactcctctttatataakttttctgtatgtagagatttttgccatagaggtatttagcttgtacaatattgtgttttttaaaatacaaaaagtaattacttcatattttcttccaggttagttgaacactaat

SEQ ID NO: 487902 - DNA, 550 bp, Homo sapiens
taacttggtatcagagcaaaagagataaggactagtaaagaaaggtcctggcaatggaattgttaacatggatcacagtatttcttactgattttgtgacaataacaaggatcttggcacaggatatttcttttttcttggaacacacatgagtttggataagtgccatacatttaaattactgttatatgaattcttatctcaatgtcttccatttccttagctgctgttttgtagttgcagaaacattgctaaactgtttcaacgctcttagcaaccaaggktcagccttatttttgtttgttttgtgtaacttgggggtgggggatgtatcatttcatacttatctgagagttttttttttctgatctcatcattgtttatttttatagtttcctactaggtaaagaattataatttcagtttttaaaaatttgagttttggattttgctatcttaaataaggaaattacagtcatttagatagaatgctatctactgaaaggtaaaaatgttttctcagacattatgttattttaaaaaatggaag

SEQ ID NO: 487903 - DNA, 583 bp, Homo sapiens
tcagctggtgagggcactttccttctctagactgagtatgtgctgcactgagatgttcatgcttctctttcttgattataagcagaccatcctctttgggtaatgcttatctttagagggggcacaataatgttggttatgatttagctttttgaaattataaaggttaacatacaggctttggaatcagttagactcatatttgaattccatttctacttgtgtgaccttgtgccactttcttaacctctttttgcctcagtttcctaaatctataaaataggataattatattaatattaatatattaatattaattaaaagtaatggcaaaaaccgcaattacttttgcaccaacctgtagtatctaattaatgttgcttgagcgtatccatttattgcttctagaaggtgatcatgccatacaatcttttttactccaaccttctgtttttcatttgtggaataagaatgtctcagtgagccacagaatgaagaaaactcacaatcttccaccttggtatattcagtcsagtgtctctgcctattttttcaggtgactaggaaatggtcactgggctct

SEQ ID NO: 487904 - DNA, 599 bp, Homo sapiens
ttaagggaaccaaggtgctcccagactgctggcaacagcactctgtcggatgctgtgggctaaagtggtccaggagggcagcagaggggctgtgggtaaaaggactctggtcaggtagcacaggggctgcaggtgaaagcattatggtggtggccactggcaaaagtgctccagtgggatggctgaggctgccctgtgagccagcacagatcagactcaccccastttgttggaaaagacagccttgctctctccaggtcaggcagctaacaaaggtcaaagccaccaaaggaatatagagagctttgggagatgggtgcctattgccgtgttccattgcacctgaccctgcacaaaaccacccgggctccctgcagattcaagctctgtctccacccactctctgggcagttccccctgccaactcaattgtctgtgggtgtcatgatattttctgccactagggtcctggaggtccgtggtgggagtaggctgctctgcatttccttctctcaccccttccttaggagcccttcagagccaggaatgagtcctggtgctcaacaaccccatgcagggttcccagcttcctccccctt

SEQ ID NO: 487905 - DNA, 588 bp, Homo sapiens
aaagtttcttggacacgctggttaaaagttcctcaaagtgttcataagtagataaaatrgggggaaaaaagaacaaccaaggaaaaccaaacaaccccaacctttacaaagctgcagatgtgagaaatatgcatgaattgtcagaagtgcccttaggcaaaaagcttgagaaatattttatggtcagagcaattgggttgagtttaagcacatggaagtggtttcagacaaactggtactgggcaaggggttacagcagacagaccccagaccctagagttagggtctaggattgtggagggtagaggctcccgcagccagacagaaagaccagggagagcggcctctgtgtgtacttcaggatagcacccatcagaaatgaggtgtaaaggacactgggctgggtgcctagctcccctagaccatggagtgcctggtgccccttcctcgtggtgccacagactggtcaagagaagtgagggcaggcttagtctttggagaatccagacaaatctggtttgaatctaaatatagatggaagctggtgtatctccacactcttcttccccacctccacatgccccatca

SEQ ID NO: 487906 - DNA, 590 bp, Homo sapiens
caattatttgtttgttgtgctagaacatgtgtttctataagtgataaatgaagaatgatggtggtattcagaaaagttgtgttggcacattctcaatttttcccagtatgtttgcactttgayagatcaggatgaacttttttcttttttttcttttcgagacggagtctcgctctgtcgctcaggctggagtgcagcggctcgatctcggctcactgcaagctccgcctcccgggttcatgccagtctcctgcctcagcctcccgagtagctgggactacactcgcccaccaccacgcctggctaatttttgtatttttagtagaggcagggtttcaccgtgttagctaggatggtctcgatctcctgaccttgtgatctgccctcctcggcctcccaaagtgctgggattacaggcatgagccaccgtgctcagcccagaatgcacttttttcatgattgaaggctaatatatgaaaaaagcaaaaaaaaaaaaaaagctgaaaatctgtagatgcaactacctttagtgtaagtcagggctgttttagtattgttccattccccattcccttaagctctgttggcag

SEQ ID NO: 487907 - DNA, 642 bp, Homo sapiens
agatccacagttttttgacgggggcagattttacttcttagaaaacataagtgtcttggaaccactgaattatggagatctgagggaggtgttgctgtgcagtctggggtcttcatccgtcatcggcacgttagttagtgtgacttagattatcacagtgagaaatagttaaggctggagggtggaggtgtgggagctctcagtgttctgtgagccaacttcattttccacatgaagaaacagaaacctagaaagtgacagtgagcccgacagcacacctggaggcagtagggccatgccgttcatcggagcaagccaagactggctgtctggatgggatattggggacgggtagaggctaagggtaggagtgttgaggggcagccccctcttgggcctggtggtttgacaggcacccccagaaggaactgtgggaaattggggatggtctacccaaggacaccaaccctttggggagcactcacaaggggggtggtaggtagtgatatcagagacccagcaaggaccttttactgctggagctggtggggtcctgccaggcctgtctcgggggaggctgctgggaatgtgcrtatataactctgaatgtgcatgcatgcgtggggagagaggtagagtgag

SEQ ID NO: 487908 - DNA, 630 bp, Homo sapiens
tgccacttgacctgttgcatttctttcccttggcttcaggagctgagtgaccaggcgggttcggagttcgagaactctgatgtcagatgggtcatcacggtgcctgccatctggaagcagccggccaagcagttcatgagacaagctgcctaccaggtgagggtagagtcagggcgggtggaagccggaggagaaggactcaagatgtccagggtggtgactgtagccccgcccaggtacctcccacattcactggcctccatgggaggcagcaaggaggctcccctagccagggtgggagctgggagacaaggagccatccctttcctcagcttcctcctgggggagccatgggggtcagtcccacaacaagagctgggttcggtttccttcctggctttctacatttccaggtcatgtttctactgcggagtctccagggctaggatttcaaagctgtggttcagagacatttctctgtgggtgaaatgaagtgagaaccttaagggaaaggcttgggaaacaggaatatttgaacaagaaagcaagcaagccaaggccattggccacgaaccaggcattttcagcttggygtggaggctgaaaactgcatgtctgccgcagaaaaga

SEQ ID NO: 487909 - DNA, 555 bp, Homo sapiens
cctgatgtgtccttccagtgagatcttttggatacataagaaaaaaatagatgtaattatgtaattttaaaaaccataaatgggctgggcatggtggctcatacctgtaatcctagcactttgggaagctgaggtgggtggatcactggaggtcaagagttcaagaccgtactggccaacatggtgaaaccctgtctctactaaaaatacaaaaaagtagctgggcgtggtggcacatgcctgtagtcccagctactcgggaagctgaggcaggagaatcgcttgaacctgggaggcagaggttgcagtgagccattgcactccagcctgggcaasagagtgagactctgtctcaaaaaatacccataaatggtggtatactaacacaccattctgttccttgctcttttttccccccacttaagactatatcacagacaacattggaggatttggatctgggcaagaatgtgccccagtttatgtgttacaaaactcaccctggctagcgggagagagtggactggggtggggacggtgggtcaggactgttgc

SEQ ID NO: 487910 - DNA, 515 bp, Homo sapiens
tctgtttagttttgcttggtttttatgacaatagtgtcacacaggaggcatttttttgtgacttgctttttcttttgctccacattacaactctaagcatcatccttgttgctgggtgtacctgtagttcattcctttgcaatgttaggtaatgttccacccgggactatgccacaatttatttatccattcttcagtcaaaggacaactccctctcccgattttggttgttacraaaagcgctgctatcagccttgtcatatacgcaggcttgggcacaggcactaggctatgctagtggggttgctgtgtcaaagctcacgtatcttcagcttttcagagattgccaaatttccaaaacagtcgaataagcctctttctagctttgtgtaaagatccccggtgctcacccacttcctcaccaacccttgggatagtcacatttctgagttttgtccatctagtgagcacaaaatctcatcttatggtctcactttgtgttttcttggtcacag

SEQ ID NO: 487911 - DNA, 466 bp, Homo sapiens
tgcaggagccctcacaagaccccagggacagagaggtcataggggctgcaggattaggccaggtcactgtctcggggaggagttgggaaagggcttgaaagccccctgttacttctgtgccctgatgtccccaaatcctctggccccctggcctsagtgtttcctttagcaagcaaatgaaatggccccagcaccttcccagcatccgagcactgaggaaagtcagggctcacccagcactcctgtggggagaggcgggaggtccttcttccatcccctctcatcgggtgccctgaaagtcagtatcacgaggctgtcagtgggaacagacagaactgaccaggaaacaaacttcacggtcaatgttagatttcctgtttctagaaaatacattggccatttccagctacagagactcccttcccaggctgcccactggctggcccccgtcctccccagggctctc

SEQ ID NO: 487912 - DNA, 560 bp, Homo sapiens
gctgctggagcagcctgcctggactggagttggcatcaatataggccccagaggatgccacctccccaccgcccccagcagttctcccaactccatgcttctggaacccaaggcaccttgggggtgcactctcaccattgtccccttttctgcctttctatctgggccccttgtaggttgacaagcaagcgccccttgtttgggagagaaacctccatccactgcagagagaaactgcagggactgcctctcatccaccccgtccctgggctcctggtaaacatgctggcaggcagggatttcccatgatggratttcgcaattgccgtcccatccttttggatgtattcattccggaaacatcctcccgggggccctctgtctaggccctggaaatgattcagacccaggctctgccctggcctctttcgttgcttaaaatattccagtggcttctcttccttcctcagttcccatttcagctcccggaggagggtgacccttcacccaggcctgtcactggctttgctggtgggctcacccctaggttttcagttttg

SEQ ID NO: 487913 - DNA, 505 bp, Homo sapiens
ctggggacctgccctgtatgcatggagagactggatcatatcgcactatacaaacagaagcgatgtatgcagaagaaagaggtctgcagaggctactatcagaatgtgagcagtattwtctgggggtaggggtttttcacaagagatttttctttacatttcttgtcagttattattgcttgaaaatgatcgtgtttcaccggtgtcatttgaaaacattttattttaaaatattagctaaaagatcatttggcttctcctagcccatatgtacattgagatagaaaagcaaagccagatccattcagaagcagcaagtttccaccatgcctgagttcaagttgaatactaagttgggctgcctcctaccaacaccagggtatatcttttcataccctgtcagctctgtcaccatcagcaacaaaacttctttatgcatttaccatgtgtctggagctgtgctagaggtgaccatgatgtagctactgtccttaagatggtggca

SEQ ID NO: 487914 - DNA, 505 bp, Homo sapiens
ctggggacctgccctgtatgcatggagagactggatcatatcgcactatacaaacagaagcgatgtatgcagaagaaagaggtctgcagaggctactatcagaatgtgagcagtattatctgggggtaggggtttttcacaagagatttttctttacatttcttgtcagttattattgcttgaaaatgatcgtgtttcaccggtgtcatttgaaaacattttattttaaaatattagctaaaagatcatttggcttctcctagcccatatgtacattgagatagaaaagcaaagccagatccattcagaagcagcaagtttccaccatgcctgagttcaagttgaatactaagttgggctgcctcctaccaacaccagggtatatcttttcatacmctgtcagctctgtcaccatcagcaacaaaacttctttatgcatttaccatgtgtctggagctgtgctagaggtgaccatgatgtagctactgtccttaagatggtggca

SEQ ID NO: 487915 - DNA, 608 bp, Homo sapiens
atttgcaaagaaggtgaaagaagaataatgatgaatactgtacacctgtcacttagatgcaccagttgctaatattttatatatgtgtgtgtatgtatactttttctaaattatgtgaaagtaaattaaagacattatgacatgttacttataaaaactttagcctccatctcttaaaaacaagatccttctcctatagaataacattcaagaaatgtatctttgatacactaatattttctaatatatagtacatattcaagcttctccagttatccaaataatgccctctagagctgtatctgtttgcctgccttctttctttccttcccttcttcttcttttttttttttttttttttcgcattgcaattattttgttgtctctttagtcacctttagtcaagaacagcttcccattttttcttggtctttgaagacttgccagttatgaggctttcagaccaggtatttggcaggatatctcactctctgaaattgtttgattttttaggcggtgcttcagtgagtaatagcaggtccttctcagtgtattacaactaaagagattcatttaatgttcwcttattatttgatgacataaattca

SEQ ID NO: 487916 - DNA, 520 bp, Homo sapiens
ctggccacagggatcagagctggctcctaccttgcacatgtctgtcacccagctctcatctcctttgtctatgaagccatggatgatgaaccgggtctttctgtccatttgaaaatttgatgcctcaattgttgatggatcagagaggaggagaatctgtgacagacgcagaagtgctkcatgttttcgcagcccagcctcacaggcctttttccttcctcatctccgcctgcgccaatgcctctacttttcaaagcttagcaaaaagccacttcttccatgaagcccaccctgatctcccttttcttgccccatctctccaggtgagtaatcactgcttccactaggcctggattgtggtttgaggttttaccttccctgtggtttttgttagacagtaagctgtttgccccagaccagaatcacacagtagctagaggttctggcaaatgtgaaccattcattcattcaagccaacattactaaagacctgctctgtctaggtctagctaggtctggg

SEQ ID NO: 487917 - DNA, 530 bp, Homo sapiens
aggttgaaaatgcaggaaagagtagcccaggtgagggatgcaggtgaaagaccctgagcaacagcctggctgtggtggatgcacagagagcaggaggggcatggaggccgggaggtgatgaggcctgggagcccatcgtgggtagcaagtctaggagagccctgaggatggatctcctcgatgctcctcagtggagaataggcggggggtaggggatggaggggaccagggtggaagctggagacctgccctgaggctactgcaagaagcagggaaggatgagtmtccaaccacgcaggtggggacagtggaagtccagatccctcctgctgcttcaccctcctctccccacccttgctggagttgcttcactcttctccttcccaggccagcaaggtgcatgcgtctccatctccgcctgactgaccaggtgggccctgcaccatcccgaatgtcaagtggaaagggctgcaagtaggccctaggcggggttggggtcctgcctcggcttcctgcctgcaggttggcct

SEQ ID NO: 487918 - DNA, 530 bp, Homo sapiens
aggttgaaaatgcaggaaagagtagcccaggtgagggatgcaggtgaaagaccctgagcaacagcctggctgtggtggatgcacagagagcaggaggggcatggaggccgggaggtgatgaggcctgggagcccatcgtgggtagcaagtctaggagagccctgaggatggatctcctcgatgctcctcagtggagaataggcggggggtaggggatggaggggaccagggtggaagctggagacctgccctgaggctactgcaagaagcagggaaggatgagtatccaaccacgcaggtggggacagtggaagtccagatccctcctgctgcttcaccctcctctccccacccttgctggagttgcttcactcttctccttcccaggccagcaaggtgcatgcgtctccatctcygcctgactgaccaggtgggccctgcaccatcccgaatgtcaagtggaaagggctgcaagtaggccctaggcggggttggggtcctgcctcggcttcctgcctgcaggttggcct

SEQ ID NO: 487919 - DNA, 530 bp, Homo sapiens
aggttgaaaatgcaggaaagagtagcccaggtgagggatgcaggtgaaagaccctgagcaacagcctggctgtggtggatgcacagagagcaggaggggcatggaggccgggaggtgatgaggcctgggagcccatcgtgggtagcaagtctaggagagccctgaggatggatctcctcgatgctcctcagtggagaataggcggggggtaggggatggaggggaccagggtggaagctggagacctgccctgaggctactgcaagaagcagggaaggatgagtatccaaccacgcaggtggggacagtggaagtccagatccctcctgctgcttcaccctcctctccccacccttgctggagttgcttcactcttctccttcccaggccagcaaggtgcatgcgtctccatctccgcctgactgaccaggtgggccctgcrccatcccgaatgtcaagtggaaagggctgcaagtaggccctaggcggggttggggtcctgcctcggcttcctgcctgcaggttggcct

SEQ ID NO: 487920 - DNA, 526 bp, Homo sapiens
caacaggcctcttggtgctgcttctacaactccaacccgtgcagccccaaccccagacactccaagccccaccccagacgccccgaaccccaccccagacaccagagygacatcttccactcattctccttgtcctcagatggcaaagtctggccctgccgagcatctctcttcaaggcctgtcctggctgactgtgtgaagtccatgatcaagccatcccttgcccgtccggccacctccccatgcgcatgctgataattgcctgcaacctggatttgcacgttaataggagtgtctggagacggttaaaaagaagagggagctggcatttacccaggctccttgattcttctccccattgtaacttccagcctcgggtggcgggcactgtgccctcattagcagtccaggagtggtggcctggcactttgcttgctgtgggcgctaaagaggtagagtcccatcagcagagggtctgggtgagcctggggcagagccatggaaatgaggaggccctgcccatgg

SEQ ID NO: 487921 - DNA, 526 bp, Homo sapiens
caacaggcctcttggtgctgcttctacaactccaacccgtgcagccccaaccccagacactccaagccccaccccagacgccccgaaccccaccccagacaccagagcgacatcttccactcattctccttgtcctcagatggcaaagtctggccctgccgagcatctctcttcaaggcctgtcctggctgactgtgtgaagtccatgatcaagccatcccttgcccrtccggccacctccccatgcgcatgctgataattgcctgcaacctggatttgcacgttaataggagtgtctggagacggttaaaaagaagagggagctggcatttacccaggctccttgattcttctccccattgtaacttccagcctcgggtggcgggcactgtgccctcattagcagtccaggagtggtggcctggcactttgcttgctgtgggcgctaaagaggtagagtcccatcagcagagggtctgggtgagcctggggcagagccatggaaatgaggaggccctgcccatgg

SEQ ID NO: 487922 - DNA, 438 bp, Homo sapiens
aggagctgagacccatgcaggccagcrtgagcaagtggggtgcccatagaaaggacggcacaggcaggtcccagcaccgcagccatgggcaggagacaaagtcagcggggcctgggacagccagggtgggaggctcttggaggccctcatctccattttttctcctgcactgtgctctgctccgctcactgcaggtgggcttcctctgactgcctgtggcatctctgccaccctgtaactgtggcttttgtgtggctctcggcctgtcatggtgcccactccagccagataacaagatctttctttcagattctcagagaaaattgatttaatttctcaggccccacctgattggcatggcctgggtctgaagtcacttggaacaaacatgagtgcctagacccatcacctagagcagagctgtggtcatgaggagca

SEQ ID NO: 487923 - DNA, 438 bp, Homo sapiens
aggagctgagacccatgcaggccagcgtgagcaagtggggtgcccatagaaaggacggcacaggcaggtcccagcaccgcagccatgggcaggagacaaagtcagcggggcctgggacagccagggtgggaggctcttggaggccctcatctccattttttctcctgcactgtgctctgctccgctcactgcaggtgggcttcctctgactgcctgtggcatctctgccaccctgtaactgtggcttttgtgtggctctcggcctgtcatggtgcccactccagccagataacaagatctttctttcagattctcagagaaaattgatttaatttctcaggmcccacctgattggcatggcctgggtctgaagtcacttggaacaaacatgagtgcctagacccatcacctagagcagagctgtggtcatgaggagca

SEQ ID NO: 487924 - DNA, 514 bp, Homo sapiens
tccattttctcaactataaaatgggaagagtaattcctatctcagcaatgctatgaaataatgtatggccaggtcataggccagggcctgcctacagcaagtgctccaaaagcgtaccaatgcctgctgtgtcagacctccagggttctccatggttttctagaatagtcgtctctccctgcttctgatagcatccattcgacttgattytaccattgtataaagctgatgacaaaacttgccaacgtgaattattagtaagcctgggagatgataacagggcccaaggggtaggcccggtccacaggctttagcaaaaccaagaggacaagccggtcagagcagggtagacagcccttgcgcctctgcccaagaatcatcagaagctggacttccagagcctgctcagctcttccagcgcattccccagcacccccctgccaggtatcctccctccccaccccctcctgacacccccaccattggcatcttaattgatctcattgttctcaaa

SEQ ID NO: 487925 - DNA, 514 bp, Homo sapiens
tccattttctcaactataaaatgggaagagtaattcctatctcagcaatgctatgaaataatgtatggccaggtcataggccagggcctgcctacagcaagtgctccaaaagcgtaccaatgcctgctgtgtcagacctccagggttctccatggttttctagaatagtcgtctctccctgcttctgatagcatccattcgacttgattttaccattgtataaagctgatgacaaaacttgccaacgtgaattattagtaagcctgggagatgataacagggcccaagrggtaggcccggtccacaggctttagcaaaaccaagaggacaagccggtcagagcagggtagacagcccttgcgcctctgcccaagaatcatcagaagctggacttccagagcctgctcagctcttccagcgcattccccagcacccccctgccaggtatcctccctccccaccccctcctgacacccccaccattggcatcttaattgatctcattgttctcaaa

SEQ ID NO: 487926 - DNA, 539 bp, Homo sapiens
tggcagcagggccgtaagctggcctgttgtcccttagattctgttgacaaagcttacgccaagagcaaaaaaacatgggagtccctctcaaccctccaggtcctatctgcctgacactcagcatccactcctgacccacatagctgtcaaggggcctgccggcagcgctggggggctctccttggtaggtcacaggctctagatccaaggctctggatctggactgggtccagaatccagttttgaaagatggggtgcccccagacttggccaagatgcagagagaggcctcaagacccaggaaatgcgaacttcttgtttggccctggcccagtggctgtggggaggtcactgcaggtgacactcacgttctttccttctcccctgkttaagtgttagttgcctgggaggagctgtgtgctgctgtttgtaaaactgacctcagaggtcaaggggacatgcaagcccaggatttgctttttgtgcacatttgcctgcaccttccatgcagcctggcacccacacatgcgctgcccctc

SEQ ID NO: 487927 - DNA, 475 bp, Homo sapiens
gcctggcacccacacatgcgctgcccctccaccgcactgtttgcacacaccagggcccagaaacacgcagatgcttgcccgctgtgggataatttccacccaccataaaaatggctttggaccgtggggaatagaccagagctgggcacaggcaagaatctgggtggcggggcctatcaagaggactgggctcaagctgggatgatgaatacagttaaattgctgttactctcccagtaatcaggcttggaagcagcagaacaggaggggccctagaagtccctctctagatggcttcycccttgcttctggaggagctgacaccgagtccttctcggggctggtgctgtgcccttggctgctgagcacttccccaaggaaggagattctcggcctggcattgcgggcaacagtgtcagttcccagccaccactgagctggtaccaggatggggaaattgaggcatcctctggga

SEQ ID NO: 487928 - DNA, 596 bp, Homo sapiens
tgggggccccacacagtggaacatcgtagacactccactagtgccagttctgccctggaggctgctagctgtcctcacaatgcacagaaagccacttgcctctaggtagagatgattaatatggggtgttggggagtctgaatttgctgaaattctttggaaaaatccacgtggatgtgcattttctggaaagaggcccctgagttgtcatcagatgcacacagygattccaggcccaaataaagtaacaatcacgtttatagcattcaccatgtgccaggtgctcttctgagtgcttcacgtttatcggctgctgaggggtggggattgtgatttttacccattttatagatggggaaaacaaggcagaaagaggttataagtaacttactcaaaggattcgagcgcacgcagtctggcagcagagtcaaacccttaaccaccttgtggtgcttttctgctcctcccattacaaacagcggggcccctgcaggcctgcacactgtagcctctctctcggaggcgtcctactccctgaaatgtggattcctgtgcagggcagaagcccttggcaggtcgcaccctggcgcacaccc

SEQ ID NO: 487929 - DNA, 566 bp, Homo sapiens
cttctttcaagagtatctagggacagagcctctagagggtttttaatttaattatacaaacacgctggcctgttatttgcagttctctcccaccatcatgccgagacagcaataatgcatcacaccaacactcactttctcctgatgagccacagaaaagtctgcacttcttccttccccctgatctttcgccctcttctctgcagggtgygcttcctgccagccggcctctcctgatgctctcatgagctcgcctttgtgataaaccagtctttatagccatgctcatgattccctgttcttcctctctcctttaatgaggtcctgtatgctctttgtcagcaacagtggcttgccccttgcttccttcccataaataacactggtgggtggacttttaagaggtttcactgaagcacagtctaggactctccctttctgcgtctcgtcttccccataccctccccatgggcaggagtctgtctctgtcccttgctcgggacatagagtgctgtggaaacaccctcaaggcctctcccttctgctagacctgagtccacttcccc

SEQ ID NO: 487930 - DNA, 522 bp, Homo sapiens
catttaacagatgaggaagctaagacgcaaagagctcatgaaacatgcttagggccgcatggcaaatgagcggcagatccaggattcaaacctagaccttcctgcttctaaaactcacattttttttcctgctattgtttgctattctgcctgagaagccaagggattcatgtcagcctggtggtctgtgtgtaggagtggaatattaagattcattcaatcattcctttattcattcattcatttgttcattcrttcattcagctagccagtgagtacttattgagtggctactgtgtgccaagctccatgctagaccctggggaccaactgtgaactgaaagccaccatcaccaccctcgtagagttcacatgttagtggagaaaagggatcataaataaatcagcaaagagagtgtttccccgctgtgttaaacatcaggaagaaaataccagggtgaggagagggtacctaggaaggcatctaggaaggggatttaggaaggctggaccagggaaatt

SEQ ID NO: 487931 - DNA, 606 bp, Homo sapiens
cctgcatccacctttccaggttatgggcatgggaggagatcctcgtagctcccacctcagaaaaggtctccaatatcttctgggggctttgaacctgagacgagcccctctaagcagctcagattcccagctccctttttcatctgactccctggatgactgcttagctttcaaggcagcccccarccggggctaatctgaaataaaagtttttatttatctagcttgatacctggtgcaaggttaaatcatacaaaagaaaaagcaataagagagaaagattaagcataaggcgctgtcttaggcatgcccttttgcaatatggttacaaagatattaagcctgaagacacccacaagtccacattgctatttccttgtctctctgggctcagcttagctgctgctggagcaggaaggatgacagaacttggtgggggccgtaggagggagaccccctggggtaccctgcggagagggtgagcagccagatggagttctagttactcagcccatcagccacctcccaccccacacagctctgattcatggcttccctggggaacaaaaacattgacatctgcacctacgtttctatcagcgtgtc

SEQ ID NO: 487932 - DNA, 612 bp, Homo sapiens
tcctttcctacagcatctgtattcatttcctatagttgccataataaaatgccactaacttagtggcttaaaaaccacagaagtttattctcttacagttctagaggtcagaagtctgaagtgaggcttatggggttaaaatcaaggtgtcagcagggctggttccttctagaaactccaggagataatcccatccttgcctcttccacctcttctggtggctgccagcatcacttggcttgtgactgtgttgttccgatcccctcttccctggtcccattgccttgtcctctcctgtagtcaaatttccccctgcctccctctaatgaggacccttgtgattacatttagggcccacccagacaatccatgctaatctcccattgcaagatctttaaccaaactacatctgcaaagtcccctttgccatgtaagtagcatgcagagcttgcagcgtttcggacctgggtgcatttgatggccattcttcagcccaccayagcatccgtgccctctctgagcatctgcctctctctactggctcccttacagtctcactgggccatgatgtctacactgcctcttcttcgcgccgtcttgaaatgccctttc

SEQ ID NO: 487933 - DNA, 552 bp, Homo sapiens
gcagcattcttttaattacaaatacagaaaaaaccacagtggtattagcattacctgtggctttgaccccaagagacatctcagatattttcatatcacgttacaggtgtcacagaaatctcaaaataccatttacgctcatcactgctctgaaattacagcatgtatgagactgactgctaagtctccttgtttaatgcatcctgaagcgcatacaggattataacaaccttttagaatactttggtaactgtatttcaaaataattagttggctctgtggttccttgtattttagtgtgtggaaaataaaaattcttctgagaagggggtgcctgggcttcaccagactctcagaagggtcgtggcacaaaaagatgaacaccccacccttagtccctgtactgcgctaaccctagctccccrctcgggcctttactgcaaggctgacgtctgctggttcttagagctggcatccttagccttagccgtacaccgtgtggggatggacagggtgggagcagggaggagacaagacccgtggctccatgtc

SEQ ID NO: 487934 - DNA, 439 bp, Homo sapiens
tgtaaaaggcagtgcctgagcctaggctcaactccagaggttgtggcttccaaggttctataccctggaagctcaggtcatggggctcttccctggcagacccgagttggggacagggttggttttggtgagggcagcactgactctgggggccccactccrcactccagattcccagccccgatccagcttgggctgagggtgtcacaccagcccaccaaccagaactccctgggtgcctcacaagagccctggccctttatcttgccccagcatccccctaccccccgaccccaaacataaaggtggccttggtccttgctgtggctcctgaggccaccctgccttcacatgaccctggtccttcctcttccatgaaaaggaattaagacctcctccaagggcacattgtagtttacagggttggttgacggtcccc

SEQ ID NO: 487935 - DNA, 500 bp, Homo sapiens
tgttcctcaacgttgaactgtgctctcttaacattgcgtcacgcccctgggtcactaacccaggggccaccctgactgatggcagagagagacaaacatcccggagaggcaagctggtgtcaccaatagcagggcagtgcctcaggatggggagggccaaagagccagagagacaaaggaggcatctgcaggcctcgttgtgctggagggagcctggaggctggctcaggcctccctccytttgggggcccaggccacctgcagcggaatgcgccagtgctgagagccctcaggtaatgaatgaccaagggaagccatgcttagaagtcaggccacccaacccaaaggcaggacctagactgaaatccacccctctgaggcagggaaaggtctgcatgcaggtggttaagtagcggaaatatcacccttgaccctccctcccaagggagtatttaacgagctgatgtctgttgagggcccaacatgtaagctcaacaaac

SEQ ID NO: 487936 - DNA, 591 bp, Homo sapiens
tatgcacagttatggaccaatcaccaagatgtagttctaagtgaaaagactggacacagagcaatgtgcatagcatgctgttagtgtcacagcagggtggcatgtacccataatggtcatataggcatggatttcctggggaaagagacccaggaatggggtgtggtggctgccctgggaggtttgtcagtacctgggctcagggggagagggagaggcgtgtgttccccttacactttttaacttctggaaaatttgccatgtctctgctcatcatgtctctgacattttttatgttaggaaaataaaaacatgggggtgtttggggttgtttcctgcagggattttatccaggctccagggatgtaggatgtagggatggcccctcccatcccagcctacactgaggccttctgggtgagagtggacagagatcagggagacaggagcccttgcccccccytcacctcctcacccttcatgccgttgagcctcttctgggtcccatgcttgtccctcttcttcactgtccagcacacatgtgtgcacactcacacaatacgcctcctccagaccccagaagctatggcc

SEQ ID NO: 487937 - DNA, 504 bp, Homo sapiens
gcaactggttgttggaaagactgattgagagatattctgaggcttcctctgcagtcaatgccgtgatccattaggaatgtctaccattggcactggtgatggagtgctggctgtccagcccaagtccacaatggaacaaaagggagggaaggtccccttccctttctctgcaggcctcaccactagtcaggtccccatcctgtcctcactgctctcctgcttggtccctccacccaaccagtgctttgagcctccagcccagccccccttcccagtagcaccctcttgttctacggcctcccacatgctcagaaggcccagagcaggcacgagagccttttcctgtgatcacagccccccaatatctcccctccaccccaccgctcactccctggtaccattgccaacccaggacgtgtactctcttatccgtcacacaaartgcaatgggagccattttccttcgagcacccatcatttccttttctcccaggtgcatggcca

SEQ ID NO: 487938 - DNA, 504 bp, Homo sapiens
gcaactggttgttggaaagactgattgagagatattctgaggcttcctctgcagtcaatgccgtgatccattaggaatgtctaccattggcactggtgatggagtgctggctgtccagcccaagtccacaatggaacaaaagggagggaaggtccccttccctttctctgcaggcctcaccactagtcaggtccccatcctgtcctcactgctctcctgcttggtccctccacccaaccagtgctttgagcctccagcccagccccccttcccagtagcaccctcttgttctacggcctcccacatgctcagaaggcccagagcaggcacgagagccttttcctgtgatcacagccccccaatatctcccctccaccccaccgctcactccctggtaccattgccaacccaggacgtgtactctcttatccgtcacacaaagtgcaatgggagccattttccttcragcacccatcatttccttttctcccaggtgcatggcca

SEQ ID NO: 487939 - DNA, 505 bp, Homo sapiens
cccaaggctcctgtctttagcttcaaaggcctctgtcccaygcactctgtcccatgatctctggcaaacaggaaaagagcctcaagtaatattataagcaatgagctggcgccctatggctgagcctgttcctgggagccttgatgcagtcataagtgctgcaggagctgagccctctgcagaagcgcagccctgaggttcccagaaagcccttggcaaacatcccagccatggccattctgcaataatgatagccttcgtggctcctcaagcctgcacttgcttcttccctccacagggcaggccagacggggatttttttgtacattgcataggtggggaaaatgaggcccagagttaataacctgtccaaggccacactgtatttgtagaagagttggggctctcccagctccaccaggctctccctcatcctcctggctcttacagcaggggaagacacctcaactacctcctcctgggtatctaaggtccctcccaggtt

SEQ ID NO: 487940 - DNA, 505 bp, Homo sapiens
cccaaggctcctgtctttagcttcaaaggcctctgtcccatgcactctgtcccatgatctctggcaaacrggaaaagagcctcaagtaatattataagcaatgagctggcgccctatggctgagcctgttcctgggagccttgatgcagtcataagtgctgcaggagctgagccctctgcagaagcgcagccctgaggttcccagaaagcccttggcaaacatcccagccatggccattctgcaataatgatagccttcgtggctcctcaagcctgcacttgcttcttccctccacagggcaggccagacggggatttttttgtacattgcataggtggggaaaatgaggcccagagttaataacctgtccaaggccacactgtatttgtagaagagttggggctctcccagctccaccaggctctccctcatcctcctggctcttacagcaggggaagacacctcaactacctcctcctgggtatctaaggtccctcccaggtt

SEQ ID NO: 487941 - DNA, 505 bp, Homo sapiens
cccaaggctcctgtctttagcttcaaaggcctctgtcccatgcactctgtcccatgatctctggcaaacaggaaaagagcctcaagtaatattataagcaatgagctggcgccctatggctgagcctgttcctgggagccttgatgcagtcataagtgctgcaggagctgagccctctgcagaagcgcagycctgaggttcccagaaagcccttggcaaacatcccagccatggccattctgcaataatgatagccttcgtggctcctcaagcctgcacttgcttcttccctccacagggcaggccagacggggatttttttgtacattgcataggtggggaaaatgaggcccagagttaataacctgtccaaggccacactgtatttgtagaagagttggggctctcccagctccaccaggctctccctcatcctcctggctcttacagcaggggaagacacctcaactacctcctcctgggtatctaaggtccctcccaggtt

SEQ ID NO: 487942 - DNA, 505 bp, Homo sapiens
cccaaggctcctgtctttagcttcaaaggcctctgtcccatgcactctgtcccatgatctctggcaaacaggaaaagagcctcaagtaatattataagcaatgagctggcgccctatggctgagcctgttcctgggagccttgatgcagtcataagtgctgcaggagctgagccctctgcagaagcgcagccctgaggttcccagaaagcccttggcaaacatcccagccatggccattctgcaataatgatagccttcgtggctcctcaagcctgcacttgcttcttccctccacagggcaggccagacggggatttttttgtacattgcataggtggggaaaatgaggcccagagttaataacctgtccaaggccacactgtatttgtagaagagytggggctctcccagctccaccaggctctccctcatcctcctggctcttacagcaggggaagacacctcaactacctcctcctgggtatctaaggtccctcccaggtt

SEQ ID NO: 487943 - DNA, 563 bp, Homo sapiens
gagctgtggccctgcctcaggcagccatgtgaccttggccagtcactgaacctctgggtcccagtgagatgactgggccaggggctggttcagggccttctgggttggtgaggctttaattccaatttgcactgtccaaggagaaaggggagccattcttgctgtttagtttcatgcccagcaacatgaaygtgccacccaccctgcaagggtccccacccacccactggcctctagagcccgtctcctgccctacccctcctctctcagctcccatctggaagtctcaggaagattccccaggacttcacttccccctcctagagctaactggcttttcctcctggtccagcccagcctccctctcctgccacatcagcagacagccctgctgcatcaatgtcagccccattgctgtttgtccccatctctccttcccctcccacccacagcattgaccccacaaggaaaaggtgggtatgatgtcattgccctgggctggccgtgttgaaggcaagcttcaatcctggaggacttcaaatgcagcaggcctgttccaccag

SEQ ID NO: 487944 - DNA, 563 bp, Homo sapiens
gagctgtggccctgcctcaggcagccatgtgaccttggccagtcactgaacctctgggtcccagtgagatgactgggccaggggctggttcagggccttctgggttggtgaggctttaattccaatttgcactgtccaaggagaaaggggagccattcttgctgtttagtttcatgcccagcaacatgaacgtgccacccaccctgcaagggtccccacccacccactggcctctagagcccgtctcctgccctacccctcctctctcagctcccatctggaagtctcaggaagattccccaggacttcacttccccctcctagagctaactggcttttcctcctggtccagcccagcctccctctcctgccacatcagcagacagccctgctgcatcaatgtcagccccattgctgtttgtccccatctctccttcccctcccacccacagcattgaccccacaaggaaaaggtgggtatgatgtcattgccctgggctggccgtgktgaaggcaagcttcaatcctggaggacttcaaatgcagcaggcctgttccaccag

SEQ ID NO: 487945 - DNA, 535 bp, Homo sapiens
tgccagctccccaggctccccgctggtcctccagctgagccccaggctcactccagcactcacacccccagctcccatgctggggatgcccacttggaccyctgcgtaggtccaccaggatgatgacaaaagcttctaggactctcctcaaagatactgaagtatgctatggcagctcagggtcaggtggttcccagagcccaaactctggccctgggctggctgctggcaggtacagctagattcctccttgcacatgagaacaacggctcttccagcccctgggccacccctggcctagagccccacccctgtcagttctaaagcaatatctcttccagcccagcctttgccaatagccagagcacggtgcttggctgaggggctgagcctggcagggtagggtgggcaacttctgcctcctgctacgcaccccccaactccttcacaccgcggcccttcctcttcaattagaagagactttcctgccctttaatactcttatcctcaccaaccactcttgcaatctcccaac

SEQ ID NO: 487946 - DNA, 578 bp, Homo sapiens
ggcgctggcccagagagaaagcagggtccttggccagctccctgcacacgcgctgccaacatccgctgtgggctctgagcacccctgcacaggccctgtgggagtaggagaggcacctcaaagaaaaacaacccgaaacaaaggcaccagccaggaagaccttcacccattcacattcccgggtgtccccaagtaaaacagcaggattcacatgaggacctgggttcttctccctgagatgtggagagcaaggggtaacacgcgccctactgcccagggaggggaggggctcagtaaaggcagcgggcccctctccacacagcccccayacgccccaattccaccaggcacctccctcccccacccagaatgccttccagtctagcctcccacatcaaagactacagccaaagcttctcttctgcccagagagcagagaaagaagggatgagggagagaagaggctgtatttagcaggaagactgagacaaaagggatgaggtgggtcacacaggccaagccccacaggagcatgttcactcggtggcggaagggccatagaaactgaagggcccagc

SEQ ID NO: 487947 - DNA, 500 bp, Homo sapiens
aagactgcacttttcctggcttcgggggtgggcaggcacccctacttccgaaaagaacaaaaagagaacaaaagctgcctcataccttgtggaccatatcagagcagccagcacagcttgcattctcacactctgcctgcaaccaggacaccgcctgtgtgaaacaacgacccacatgtgtattcactgcacacacacggccccggagagttctttcatttagtgtagggaactaacttataaatgggacacatctttgtatgtgcaaaagatccctcaggcgagcctctgygagaacacccacctgcagccccggaatgtctcagcacatgcgacactgagtcatcttagcgccacacacatgcagacagaggcactgcacacacatgtggacacatccccaaagtaccaggggacacaaatccaaaaccaccaggtgattggggaaagttcctcttatgtggaagatagaggaaaagccaatggctaatgtgatgttt

SEQ ID NO: 487948 - DNA, 660 bp, Homo sapiens
gctgcacttagttaaacatggaccagcccattggaaccttgtgggcagtagtctgatttctgctgtcatttctgctctcttccaagcttcaattaagggagcaacaaaagatctctatcatgagccatgtgtggtgatctcatctgctgagacaaatatttttttttctggttatatttatagaacactctcttgtttccttgaacaaccctagctggcattatcttgtttacyttctcttcatctagatttgcatttgcaggggggcagcttttatctgttgctcttagctgtgtgggatttcaaattcctctgtttttcttcttttagctttcatctgtgagctcttttaaaatcaagcagtttgtaacttatagttaccaaggcagtaattaatattataagaaaatagacaataccggctccagctaagcactctgtgataatttttcttagcagtgtcttctggccttgcagaggaaaatggaacttggtattcctttcccctttgtgccagtcgtgtgcttcctgatgccaggcctccctccagccctcccatcacagggaaactagtacagaccacccccacagacctgtggactgacacctgactacctttgggggcatctgaccttgcctgcggtcccacggtgactcaca

SEQ ID NO: 487949 - DNA, 660 bp, Homo sapiens
gctgcacttagttaaacatggaccagcccattggaaccttgtgggcagtagtctgatttctgctgtcatttctgctctcttccaagcttcaattaagggagcaacaaaagatctctatcatgagccatgtgtggtgatctcatctgctgagacaaatatttttttttctggttatatttatagaacactctcttgtttccttgaacaaccctagctggcattatcttgtttaccttctcttcatctagatttgcatttgcaggggggcagcttttatctgttgctcttagctgtgtgggatttcaaattcctctgtttttcttcttttagctttcatctgtgagctcttttaaaatcaagcagtttgtaacttatagttaccaaggcagtaattaatattataagaaaatagacaayaccggctccagctaagcactctgtgataatttttcttagcagtgtcttctggccttgcagaggaaaatggaacttggtattcctttcccctttgtgccagtcgtgtgcttcctgatgccaggcctccctccagccctcccatcacagggaaactagtacagaccacccccacagacctgtggactgacacctgactacctttgggggcatctgaccttgcctgcggtcccacggtgactcaca

SEQ ID NO: 487950 - DNA, 660 bp, Homo sapiens
gctgcacttagttaaacatggaccagcccattggaaccttgtgggcagtagtctgatttctgctgtcatttctgctctcttccaagcttcaattaagggagcaacaaaagatctctatcatgagccatgtgtggtgatctcatctgctgagacaaatatttttttttctggttatatttatagaacactctcttgtttccttgaacaaccctagctggcattatcttgtttaccttctcttcatctagatttgcatttgcaggggggcagcttttatctgttgctcttagctgtgtgggatttcaaattcctctgtttttcttcttttagctttcatctgtgagctcttttaaaatcaagcagtttgtaacttatagttaccaaggcagtaattaatattataagaaaatagacaataccggctccagctaagcactctgtgataatttttcttagcagtgtcttstggccttgcagaggaaaatggaacttggtattcctttcccctttgtgccagtcgtgtgcttcctgatgccaggcctccctccagccctcccatcacagggaaactagtacagaccacccccacagacctgtggactgacacctgactacctttgggggcatctgaccttgcctgcggtcccacggtgactcaca

SEQ ID NO: 487951 - DNA, 631 bp, Homo sapiens
cgtggggtgctcactgggtgcttaccacgtgctgggaggattctaaatgcttgtgaccatacaaggtgagtaggactgttacgcccttcattgcacagatgaggaaactgagtctcgggaggataaggaacacactccyggtcacacactctagtaaccggtatagtacagcacagtcgggttccagagtccaaactcttaaccacaacacagtttgagtgtcttactctgatttagctccaccatttaccgggtgagagatctcaggcaagtcatctaacctcactgcgcctcatctttcaagtgggcctcatacgggtaactctgtaagattgtcatgaggattgaaggcgatcatgccatgacacatattatgaagcggactcctgagaaatcagttctctcccacttttcccatatcccaatataagtgaggtttttagccaaaccccttgacctcttttactactgggaatgatctatatgccctgctggattttcttgcctgcctgtgcctaagcatttggacctcataaaagcttacaaaaatggcctggagacaagcattaaaggaaagcaactgcacacggagctgagtggggcagtgcagcagagatggtccacacggctc

SEQ ID NO: 487952 - DNA, 547 bp, Homo sapiens
tgtttgtttgctctgggactcagtgccctcttacttgtttatggatatatattacactgacagaaataaaagtttaaatttaaagaacgagacarctcaaatgccagtacgaacctgtgagtggataaacaaaatgttgtctatccaaataatggaatattattcagtcataaaaaggaatgaagtactgatacacactacaacgtggatgaatcttgaaaacatcatgctaagtgaaagaagccagtcagaaaaggctgcgtaccttttatcatgcatcatccctgttgtatgtatgtatcatgtatcatacctattgtatgattccgtttacatgaaatgtccagactatgtaagtctgtagaaagcagattttgccaggagctgggaggaggaatgaatgaagaatgtctacttaatgggtacaggtttcttcttggggtgattaaaatgttgtggagttagagagtggtgatggtcacacaacactgtgaacatactaaggccactgaattgtatgctttaaaatggttaaaatggtaaaaac

SEQ ID NO: 487953 - DNA, 336 bp, Homo sapiens
aatctatctgagaatatttgagaaggacattcactgttaatgctgggtatctggcacctataatgtgctcggcattgagctaggtgctgtgctgggtatggaattgcaggctttgattcctgtgttcaaaggcctaaccatttaatgggattaaggactaagcatcattctgagaaccatttcaaatataatgaaaccgaagattagaccttatcaattatctcatttagaaatagatttcacatcaactttaaatcaaaactagcttcmcaataaaactctcagtgctttagaaatagccccaaatgcaggaatctacagatgcattcattcaac

SEQ ID NO: 487954 - DNA, 625 bp, Homo sapiens
ttagttagaggtatatgccttctcccttaggcaactctgccacagaatcatcttcagcagtgttggagctcagaaaccattctccaaaatatggtgctttgacatgctgaactgtagaagaagccttaaggtctcttcaaccttcccctcttcccaccatctctctcaaagcacaggataaagttgttaagttccattatctcccttaagtctggacccccctccccaccaaaaaggagaacaattattttgtcttcctgtcactgtaagaccaagaatgtaaccacacctgaacagaccttttcacaaggtaatgtctgcctctcaggcttattcaaattccaaagagaagtgtttacaagtaatctctgttccaggatccatggttcttcccagcaagcctttactgttcctcaaaagaattcctcttctcctcttcccataatctgttttgccaggatgctagagaagcgtccaaatccccttggcaggaggtaatcactgtgattctcctcatgtacgtgttaataaaattcgaatgccttttcaccaackaatctgccttttgtgagatgatctttcagtgaacattcagagggtgaacgggaagtttcccttggtccca

SEQ ID NO: 487955 - DNA, 480 bp, Homo sapiens
caatgatggaagtcagaaaacactagataagtatcttcaaaatgctgatataaaataactgtcaacctaggtcaatacattttgtagaaatatttctcaagaacaagagcaaaataaacacattttcagatgracactgagaaagttagcctccaaactcacactaatggaaaatctatgtcatactataaaaagtaagagaaaagaagaaaaaaaggattccagaatctagttctgagatacagaaagtagtaaattgtaattgtaaataaaggaataaattattttaaattgttaagtttggaaaaaatctaaaacatgttatacaaaataatatttaacttgtgggggtcaaaaaagctaacacaacggacaatttcttgttggggttttcctaaggtctttgtattatttgaaaggtgaattaaagacactgatgaacttttcattctttaggatgcatgttgtagtttttagaat

SEQ ID NO: 487956 - DNA, 480 bp, Homo sapiens
caatgatggaagtcagaaaacactagataagtatcttcaaaatgctgatataaaataactgtcaacctaggtcaatacattttgtagaaatatttctcaagaacaagagcaaaataaacacattttcagatgaacactgagaaagttagcctccaaactcacactaatggaaaatctatgtcatactataaaaagtaagagaaaagaagaaaaaaaggattccagaatctagttctgagatacagaaagtagtaaattgtaattgtaaataaagraataaattattttaaattgttaagtttggaaaaaatctaaaacatgttatacaaaataatatttaacttgtgggggtcaaaaaagctaacacaacggacaatttcttgttggggttttcctaaggtctttgtattatttgaaaggtgaattaaagacactgatgaacttttcattctttaggatgcatgttgtagtttttagaat

SEQ ID NO: 487957 - DNA, 480 bp, Homo sapiens
caatgatggaagtcagaaaacactagataagtatcttcaaaatgctgatataaaataactgtcaacctaggtcaatacattttgtagaaatatttctcaagaacaagagcaaaataaacacattttcagatgaacactgagaaagttagcctccaaactcacactaatggaaaatctatgtcatactataaaaagtaagagaaaagaagaaaaaaaggattccagaatctagttctgagatacagaaagtagtaaattgtaattgtaaataaaggaataaattattttaaattgttaagtttggaaaaaatctaaaacatgttatacaaaataatatttaacttgtgggggtcaaaaragctaacacaacggacaatttcttgttggggttttcctaaggtctttgtattatttgaaaggtgaattaaagacactgatgaacttttcattctttaggatgcatgttgtagtttttagaat

SEQ ID NO: 487958 - DNA, 563 bp, Homo sapiens
tcttaagttttaagcctataatgtaagttttatttcaacagacataagattgcagtcgatcatcttactcccaaccccaagaatgtctatgtcagagatacattttkttcctacataattgaactgagctccttatttaaaatattaggacatattgcttcaggttataccatgtagcactgttcttgacaggtcaatttcagtgaaagaaatataacttgaattagaaaaagaaatgagcagcctgccactgtgcaaaagtcagatggaaaggccctgtgatactgcatttccacacaataatccagaagtctatgggcaaacacggatgtgccttctgaatttttatgtagatttatggcactcccaaaagggtcccagaacaacatttaaaaaaagagagatatgtgtatgtagagatcaggagaggaataaatcctttgcataaatacctttttcaatttaaaagaatctcctttaattttcctagagaacactctgactcaaagtatagggccctccttccaaacaaacagccagtgaaattccaaagtacagaagag

SEQ ID NO: 487959 - DNA, 563 bp, Homo sapiens
tcttaagttttaagcctataatgtaagttttatttcaacagacataagattgcagtcgatcatcttactcccaaccccaagaatgtctatgtcagagatacatttttttcctacataattgaactgagctccttatttaaaatattaggacatattgcttcaggttataccatgtagcactgttcttgacaggtcaatttcwgtgaaagaaatataacttgaattagaaaaagaaatgagcagcctgccactgtgcaaaagtcagatggaaaggccctgtgatactgcatttccacacaataatccagaagtctatgggcaaacacggatgtgccttctgaatttttatgtagatttatggcactcccaaaagggtcccagaacaacatttaaaaaaagagagatatgtgtatgtagagatcaggagaggaataaatcctttgcataaatacctttttcaatttaaaagaatctcctttaattttcctagagaacactctgactcaaagtatagggccctccttccaaacaaacagccagtgaaattccaaagtacagaagag

SEQ ID NO: 487960 - DNA, 563 bp, Homo sapiens
tcttaagttttaagcctataatgtaagttttatttcaacagacataagattgcagtcgatcatcttactcccaaccccaagaatgtctatgtcagagatacatttttttcctacataattgaactgagctccttatttaaaatattaggacatattgcttcaggttataccatgtagcactgttcttgacaggtcaatttcagtgaaagaaatataacttgaattagaaaaagaaatgagcagcctgccactgtgcaaaagtcagatggaaaggccctgtgatactgcatttccacacaataatccagaagtctatgggcaaacacggatgtgccttctgaatttttatgtagatttatggcactcccaaaagggtcccagaacaacatttwaaaaaagagagatatgtgtatgtagagatcaggagaggaataaatcctttgcataaatacctttttcaatttaaaagaatctcctttaattttcctagagaacactctgactcaaagtatagggccctccttccaaacaaacagccagtgaaattccaaagtacagaagag

SEQ ID NO: 487961 - DNA, 642 bp, Homo sapiens
tggagacactatcctttacattttattccatacttattcctacttaactggagaaaaattattgtgatttatatctcttcacatgtgttatgggattaaacagtgttcctccaaaattcatatgttgaagtcctaacccctagtacttcagagtataatcatattcacagatagtatttaaagaggtgattaggttaacaaggcattaaaatggggccctagcccaatatgactggtgtccttaaaagaagagacagcagagatggactggaacagaggaaaggccatgtgaagaggtagcaagaaagtgaccatctgaagccaaggagagggtctcagaggaaaccaatcctgctggacgcttgatcttgaacttccagtcagcctcaagaactatgagaaaattaaattcctgttgcttaagctacctagtctgtggtacgttttttgtaaagtatgcttcaagataaagtgtcctataatctttagctttacagtgctttcaaaagctttcaccagtctcttttaaaaactttaaggaatttacttaggattatttagatctattctaagattttaaaaaacatcttgcacaattttgctgtcctaatataycacgtctctttgtatgataaaattcag

SEQ ID NO: 487962 - DNA, 548 bp, Homo sapiens
gggccaggaatgaacacttgacccaggcgggaccaatcaacttcctcctctccttgaagtgggaaataacccctggtccacgagctgcagggagctgtcgtgaaaatcatacagaggcttgtaatgctyatgggtagaagcattcaatgttgttaacatgtcaatcatgcctaaattggtgtatagattcagtgcaatccaattcaaacatcaagtagatgttttagagaaaattgataaactgacctcaaaattcacaaaggaattgaaaggatctaaaagagtaaaaataacattgaaaaagaacacatttagagaaacttatttcaagacttatcacaaaggtacaacaatgaaaacagtgtagtgtcactgttaagagtggcaaatagataaatggaacacaacagaaactccagaaataaacattcacataaatggatgtctgatttctaacaaagtagcaagaacaatttagtggagaataaaagatgatagtttcaaaaaatgattctataaacattagatattcatatgtaaaaaataac

SEQ ID NO: 487963 - DNA, 692 bp, Homo sapiens
tgtgcccagcccagagcagcatcccaatatgctttcagcaacaccatcacagactgatggatacacttaaacgaaaaacacaaaaacaaaattctggatccccaagccctggccagggtctcactaaccatccaaaaaatgaaattaaaaccacaatgaggtatcatcttacaccagtcagaataactactattaaaagataaaaaatagctgatgttgacaaggatacagagaaaagggaatgctcatacactgctggtgggaatgtaaattagtacaactactatagaaaacagtgtggagattttttgaagaactaaaaataaaactaccatttgatcctgtaatcccagtactgggcgtccacccaaaggaaaagatatcattatatcaaaaagacacctattcataacaacagatatgaaatcaacctaagtggctatcaatggaggactggatgaagaaaatatgatgtatatacacaatggaatactattcagccacaaaaaggagtcatgtcttctgcagcaatacagatggaactggaggccattactttaagtgaaaaaactcataaacaatragacaaatactgtatgctcttataattaggagctaaataatgttttcatgtagatatagagtgtggaatgatagacaatagagagccagaaggatgaggagtgggaagg

SEQ ID NO: 487964 - DNA, 596 bp, Homo sapiens
gcgctatcccttctcttggagttaattcaagtcttaaaacatgagcgctcacattagaccttgtttgttgtagtatttagccgaggacaggtttcactggattctggtggggggaaaagaggagagtgaatcaagtgaccacatctgtgacatggtccccaagctataattagcagtttgggcaccatatttggagggaggcatgctctggggagataaaggggcactcagagacacccacttgccccaactctgcaactttctcttctgtgaagagaaagggagagtattagatggcttggatttactcccaacctttggagcacagtaaattttcaacacatccaggttgaagggatgtattcaagcaacttatcttacaacgtgttaaaatgctccatgaccgtttctcctracaaatgatacagaagctgcttgcttttaaattttgcttttagactcaaatatagattcagtcttttttgaagtaatgcaaaggacaatattgaacctttaatataggttaagtactttgcctagaaccttagatattttcttttgctgaaactatccaatagccctctgaaggtaagcat

SEQ ID NO: 487965 - DNA, 564 bp, Homo sapiens
cagaaagcaagatgcatccgtcaagagtcgcacctccatggaaggcgtgttgctaatgtgaaatgtgcagatcgtggggctccattaatcactaggtcagagtcatggcacagcaggttcaatgccccacagctattcctcagtcacagtctaaggagctctgcacgtgagggagcgcaacggcaatgacagagcattgttgcctgcttccctcaacactgcctaccgcagtgcttyatctctgcacgtggccctcaatcctgctctgggctgaggcctctttgtgaaaaatgaacagcaaaggtttctcacctcctggagaagaggagagtgagatattcttaaggcctatgtgaggatgcagagtgtgggctccttccctgcatcacgctgtcctcgacgaccaataaaaaaggtgctatggctctcagggcaaagaggtgcaaagttctaatgaaagatttgagaagaaaaaaatgtctccaagccgtggttcttaatctggtgcaatgttgtccccccagggggcatttgacaatttcagaggtatttttctttgtccca

SEQ ID NO: 487966 - DNA, 564 bp, Homo sapiens
cagaaagcaagatgcatccgtcaagagtcgcacctccatggaaggcgtgttgctaatgtgaaatgtgcagatcgtggggctccattaatcactaggtcagagtcatggcacagcaggttcaatgccccacagctattcctcagtcacagtctaaggagctctgcacgtgagggagcgcaacggcaatgacagagcattgttgcctgcttccctcaacactgcctaccgcagtgcttcatctctgcacgtggccctcaatcctgctctgggctgaggcctctttgygaaaaatgaacagcaaaggtttctcacctcctggagaagaggagagtgagatattcttaaggcctatgtgaggatgcagagtgtgggctccttccctgcatcacgctgtcctcgacgaccaataaaaaaggtgctatggctctcagggcaaagaggtgcaaagttctaatgaaagatttgagaagaaaaaaatgtctccaagccgtggttcttaatctggtgcaatgttgtccccccagggggcatttgacaatttcagaggtatttttctttgtccca

SEQ ID NO: 487967 - DNA, 564 bp, Homo sapiens
cagaaagcaagatgcatccgtcaagagtcgcacctccatggaaggcgtgttgctaatgtgaaatgtgcagatcgtggggctccattaatcactaggtcagagtcatggcacagcaggttcaatgccccacagctattcctcagtcacagtctaaggagctctgcacgtgagggagcgcaacggcaatgacagagcattgttgcctgcttccctcaacactgcctaccgcagtgcttcatctctgcacgtggccctcaatcctgctctgggctgaggcctctttgtgaaaaatgaacagcaaaggtttctcacctcctggagaagaggagagtgagatattcttaaggcctatgtgaggatgcagagtgtgggctccttccctgcatcacgctgycctcgacgaccaataaaaaaggtgctatggctctcagggcaaagaggtgcaaagttctaatgaaagatttgagaagaaaaaaatgtctccaagccgtggttcttaatctggtgcaatgttgtccccccagggggcatttgacaatttcagaggtatttttctttgtccca

SEQ ID NO: 487968 - DNA, 577 bp, Homo sapiens
ggtcataaagcattttccctccgctcattcttccccacaatccctcctgcacaggtaggcagtgctattgcttaccccttgcaactggagaaataacacacagatgatatattagcctgtttttgcactgctataaataactacctgagactgggtaatttataaaggaaagaggcttagttggctcattattccacaggctgtacagaaagcatggctgggaaacctcaggaaacttycaatgatggcggaaggtgaaggggaagcaggcacatcttacatggctggagcaggaggaagagagagagagggtgggggaaagtgctacacacttttaaacaaccagatctcgtgagaaatctatcataagaacagcaataagggggaatatctacccctatgatgccatcacctcccaccaggcccctcctccatcactggggactacagttcaacgtgagatttggtcagggacacaagcccaaaccacataggaaggcttcaactttccttatcatgaagcacttgctttatttgtagttaaggactgtatctccgtcgacgtgcatttggtccc

SEQ ID NO: 487969 - DNA, 562 bp, Homo sapiens
ggaaacttcttaaaaatgtaaatactcaggccccaccacagacctactgaatcagaaaccctgggactagctctccaaatgtttctggtgcacactatatttagaagaaaaaaaaaaaatgcaggccaggcacagtggcctcatgcctgtaatcccagcactttgggaggccaaggtgggaggatcacttgagcccaggaattcaagaccagccagggcaacatagtgagatctcgtcyctataaaaaaaaattttttttaactgaaaaaaatttctttttaagtagtcacttaaacttaccctcctgagagaacaggtaacaccactcgaacaaatggaggatcaaatggaaagttatcctaaaaagcaaataagcaagtttaattaatttaaagaacatccttagtgttatactatttagaagattttaaaagatactataaagaatgtgtacatttattatcagataatgggtaagagtcataaaattagtacccaaaaccaaaatgaaaaccaaagcaaataaaaatgaagttaaaatcaggcccaaacagaacagca

SEQ ID NO: 487970 - DNA, 432 bp, Homo sapiens
ctttgttttagcagcatccagttttgctgcagagtttcatatcaaatacaagaaaaaagtacaatgaaaattaaaatgatttttaaataatataaacattatgctggaaaacaaaaaaaaattagatattcaacatgcagcgcatctatatttcttaatgggaaggaaaaaatacataaaaaaaagaataattatgtaactattaactatattactttgaatttcctttatttcatgatcacaagcatcctaaatttaatatttattttacagtagccacaagcatttatgctgttacttttttcaatttactctccttttaaaayacctaagtcaattttaaaggaaactgtatattgttacacaaataaacagcatttgtcataaataaaagataatagtgaaaataaatacatcataataattattaaa

SEQ ID NO: 487971 - DNA, 478 bp, Homo sapiens
gctgagaacttggctgggcacattggcccgaacacctacacatggcctcttcctgtggtttgkgcttccccacagcatgccggcctcagggtatttgaacttcttctctggtcaagctccaaaggtgagtgtcccagaagaaccagggaaaagctctgtggccttttctaattttagtctctgaggtcatgcagtgtcactttcaactgccctctattggcttcaagtgagtcactaaggttggcccacattcaaggatgagggacattaactttcacctctcaatgacaagagagcccagaatttacacaacatattttaatattgccacgattccccattggacagatagaaaaattgaggcttagaaagggtaagtggacttgcccaacggcacgcagttgccaagaaaacagcaagtcagaagtaatcccaattccctgtacaggatttactctcctatgtggcaactgcaggg

SEQ ID NO: 487972 - DNA, 606 bp, Homo sapiens
ctcctttttgcaatgcctgaattttctctggatatgtatacggagatactttaaaagaaaaaagccaacagttatagatcaacctttattctgtatttagaagcaactgcaaagtccttccttccattcttccttccttcttcctctcctcccttattctttttcctttcttcattacttctttccttcctccaatatttgtgaacatcctttttgtgtaagtcatagtatgcataaatagaatttttattcaatagcataagaaatacaaatatatacagtagtacaacaaatccaacatttattaaaggctttctgtgtcctaggtgctattctaagctcctwacatatatcagttaatcctctcaacggccttaaatgtgggtactaatattatcctctcttgtaaaaaaaaaaaaaaaaaagaaaaagaaaaaggagtaagtggatcaatgactttctcaagatcattgtcttaatctgatagagctaccataacaaaataccatagactatgtggcttaaaccacaggcatttatttctgacagttctggaagctgaggagtccaagatcaagtgtagctgattcggttcctgataaggac

SEQ ID NO: 487973 - DNA, 616 bp, Homo sapiens
tacctgacaagctgtaacatgaaaagctacacttagtccattaaagatttttcacagtgacacttgagtgcagcttcagaaatatgccaccttgccatttatcattttcagggcacgggtgtcggaaaggagtttgctatgaagaacaaaacaaaatggattgcatgtgtagaggtgagctggcgaatactgataaatgtacttcactgaatgtcagcaaatgtcacttgagaagccatttgcagctaccataacagcctcccaaacccaacaaagagtagcaaaaacgggcaaaatgaactgggcgtcttgcttccgcatgaataagcaatcagccctctcagaagttacaccagaaagttgttaaacttgatagaagaagcttttccaaccatactgatgcatactatagattgctgcagagggctggagaccttctgaggacgtcagcgctgtgactctgggcagaacttcacaaccccttctcttccaggtaggtgccttccttttstatgtgcagccactggctgtctctgagacatattttctgggttttcccacaccagcttgctgcttttgctgtgtctacagacccctctactccctacccactcct

SEQ ID NO: 487974 - DNA, 620 bp, Homo sapiens
gtcatcaagtcctcaccattcctccttggaaatgcctttaacccattctggcgtcttagctcagtcctgcctattggaatagtttcctaggggccttcctgtctacagcctcactgcccccgactacagtccttaagcaggacactggatattaccacttaagctttcatacagtttttttgtttgtctgtttgtttgtttgtttgactgttttgagacggagtctccctctgtctccaggctggagtgcagtgsggcaatctcagctcactgcaacctccgcctcctgggttcaagtgcttcttgtgcctcagcctcccgagtggctgggattacaggcatgtgccaccacccccagctaatttttgtatttttagtagagacggggtttcaccatgttggtcaggatgggctcgatctcctgaccacgtaatccgcccgcctcggcctcccaaagtcctgggattacaggcgtgagccaccgcgcccagccactttcatacagttttatttggctccccagtacccatgggatcaaggccacacaacttgcctgatcttgtaattaatccctactccctcttccctcagaatcaattaccaacctctcaaaaacccat

SEQ ID NO: 487975 - DNA, 620 bp, Homo sapiens
gtcatcaagtcctcaccattcctccttggaaatgcctttaacccattctggcgtcttagctcagtcctgcctattggaatagtttcctaggggccttcctgtctacagcctcactgcccccgactacagtccttaagcaggacactggatattaccacttaagctttcatacagtttttttgtttgtctgtttgtttgtttgtttgactgttttgagacggagtctccctctgtctccaggctggagtgcagtgcggcaatctcagctcactgcaacctccgcctcctgggttcaagtgcttcttgtgcctcagcctcccgagtggctgggattacaggcatgtgccaccacccccagctaatttttgtatttttagtagagacggggtttcaccatgttggtcaggatgggctcgatctcctgaccacgtaatccrcccgcctcggcctcccaaagtcctgggattacaggcgtgagccaccgcgcccagccactttcatacagttttatttggctccccagtacccatgggatcaaggccacacaacttgcctgatcttgtaattaatccctactccctcttccctcagaatcaattaccaacctctcaaaaacccat

SEQ ID NO: 487976 - DNA, 587 bp, Homo sapiens
tgcaggttgtgcactgaacaactccaggggcaggggatccttttacttagaatgcaatataaatggtgtcctctagagttcagtagtgcacaacctacctaaacaaacaagtggtagacctagtaatgactgaatgacattttaaagacctagcccattacctgccaagatgttaacttattaatagaatacattactaaagatttggctatgaaaaattacaaacttacaaagtgctccaaaggtaagcagtgtaggaaattttgttaaatgtttactattgtcatggaatattatgataaaacattgtaatattgttagaaaaggataactagttactttttgttttattcactaagggctggttycagtttccaagaaaagtgtgtcctacatggtaagcaaggagggaggtggaaacatctctgtcattgtccttgggggtgcaaaagaatcactggatgctcatcctggaaagttcactctgttcatccgccagcggaaaggatttgttaaaattgctttgacccatgggtaagtggctttttgtataaagtagggggtcagaaaagttaagacattattaa

SEQ ID NO: 487977 - DNA, 615 bp, Homo sapiens
taatatatttttcaagtattttaccrtagaatttctaaagtactttgtcattgaccccataatttattataaagtaggtcccataatcacattttttggaagttgctgaaattgagataaaaaatattgtttttttatgagaaaaactggacaaaatacagaatggccaaaactagattaactggctcagttatgtctactaggtgaaagaaaatacagaatctgttactgtagaaattttaagaggttttgagtcagttccagtataaaaataaggccaaagttctcctgtaaaatcatcattaaaagtacagagaagagatctatcattcaaattataaaaggaaacctcattcatttcacagtctaaaaaaatgccaatcttactaggtgttacttttggcagcagaataatttccttatggcccaatacaatataattattccgactagattaccaaattctccataatccatcctgtactaaaattggttgactcttcctccttgtgggaggagagtcactacagacaccaagaatccattcaggcatgtctttaacttctacttcccggtactgcctgccacaattttatcccttagaacccagaacag

SEQ ID NO: 487978 - DNA, 615 bp, Homo sapiens
taatatatttttcaagtattttaccatagaatttctaaagtactttgtcattgaccccataatttattataaagtaggtcccataatcacattttttggaagttgctgaaattgagataaaaaatattgtttttttatgagaaaaactggacaaaatacagaatggccaaaactagattaactggctcagttatgtctactaggtgaaagaaaatacagaatctgttactgtagaaattttaagaggttttgagtcagttccagtataaaaataaggccaaagttctcctgtaaaatcatcattaaaagtacagagaagagatctatcattcaaattataaaaggaaacctcattcatttcacagtctaaaaaaatgccaatcttactaggtgttacttttggcagcagaataatttccttatggcccaatacaatataattattccgactagattaccaaattctccataatccatcctgtactaaaattggttgactcttcctccttstgggaggagagtcactacagacaccaagaatccattcaggcatgtctttaacttctacttcccggtactgcctgccacaattttatcccttagaacccagaacag

SEQ ID NO: 487979 - DNA, 543 bp, Homo sapiens
gctgtcactccgacctgcgcgcttcacccgcgcttcaagcctcgcgcgcgctcccggcgcggaccatcccagagctcacgcggaggggaggcgggagagctccgcgtgaccccagcggccctgcacgtccaactccgctctcgcacgagagcctgagtcctccacttccccgcacacgtttccctggctgtctaagcagtggctatactttctctggagagcgcgttctttgctactccaagcccaagcgctccgctgctcaccctagccggcagccttggagccgcccggccrcgtgcctcactaaagaggcagggctgggatcacgtggaggggagcgcctctttatttttttcacctacttcctctcttacgccgacctagtccaggaattggtacacacagcgatagtgttcaatagaaactaggggattttggtttaggctcttttgcagtcgttgagggggaggtgacggaggcgtcagggaaggtgggaggacggaaaaggaaattaaaagctcttgggaactgaattgtggtaac

SEQ ID NO: 487980 - DNA, 557 bp, Homo sapiens
cagacctgatttgctttcagaaagtcatccttctccattgctggatacttcgtgcccttgaacattgggctcgaagttcttcagcatttggacttttggacttacaccagtggtttgccaggggctctcaggcctttggctacagactgaaggctgcactgtcagcatccctaattttgaggttttgggactcaaactgttttccttgctcctcagcttgcagacagcctattgtgggacttcaccttatgatcacgtgagtcaatactcctaattaaacccccttcatatatacatctatcctattagtcttgtccctcttgagaaccctaatacacaaaccttcacatgtggccccaaaatgaagataaaagttaaaaatataaaaaatttwaaaatgctttgtgattcacaaaagttaagaatgagtgatgtagatctgatatagaagtgtttttccaaacaaaattggttttctgccatgatacacagcaagatacagattttgcactgtgatccgctatgtgaatgggtgcacacacacaaaagcagaagtt

SEQ ID NO: 487981 - DNA, 678 bp, Homo sapiens
atcatgttgttggttcactctcagggccctatggctgattcttaggtcactttagccattgctacaacttctcctagtatcctgcagtcataattcactgtttttcatttatatcctatttccgggcattaagtgttgtcactgagtatatatcctgtgattgctagcatcgcagtaacagtcaatagtattgatggcatttcctcacaatttcctagataattgtgctattttaattagagtgtggataggcctataaatgagttgctagacttctcagtaaggagcatctatttctattttaattcactactggtattctttaaggaaatgccaaaatgctttccatctggaattaggaatcctttattttcattggggaaatgtgtgctactgggaaactctttagtttggctcattactcagttgccacgccacaagagatrgaaaacatcagaaatgaaaacacctcaaatgacaccaggggtatgtagagaattttcgagtacttttgatgcgttttcacacatagtatgtaaaaagtctcatagcagcgctatgaagtagttaggtagatattataatatttacactttctaaaataagaaaagcagttagacacatcatggttatgtattcactttagtaaagtcccttggtacattaatttcagagcca

SEQ ID NO: 487982 - DNA, 652 bp, Homo sapiens
tgccctgacttgaaacccatactccttcccttgcacgcactgtcccccagccatgagattcagaaaagaaaacatagtaaagtgtccgtaacatgaagtacaggaagaaagatttgctttgctttgtttagatcatgagttctatattaatgctacatcaatacagaagcggttcagtgatgggaaaatcacaaaagctgaartcagaaggcctgatgttcctttcttggttttgccaaccaagttttaggactttgtgcatttacccttttgacctcaatttcttcattgtactattaagattgataatatggtttatagtgatagatgaaccactcaacataacagtttgttggagttcactgtcagagaaggttcttaaaaatagcctagctcccatgtaaaacggtgggaagtgtgagtaggggtggatggaattatttgccccggttgttccattttttcctcttctcctctgagattctgtattatagagtacacatactcacaaatcggagaaatgaaacaaattaacagctttatatgactctctgaaaaatggtaataccgagggatatgatgcagcttcctatctccttccccaaacctagacctggagccccagatgatcagaatcagccacccagtatca

SEQ ID NO: 487983 - DNA, 571 bp, Homo sapiens
gaaacccatactccttcccttgcacgcactgtcccccagccatgagattcagaaaagaaaacatagtaaagtgtccgtaacatgaagtacaggaagaaagatttgctttgctttgtttagatcatgagttctatattaatgctacatcaatacagaagcggttcagtgatgggaaaatcacaaaagctgaagtcagaaggcctgatgttcctttcttggttttgccaaccaagttttaggactttgtgcatttacccttttgacctcaatttcttcattgtactattaagattgataatatggtttatagtgatagawgaaccactcaacataacagtttgttggagttcactgtcagagaaggttcttaaaaatagcctagctcccatgtaaaacggtgggaagtgtgagtaggggtggatggaattatttgccccggttgttccattttttcctcttctcctctgagattctgtattatagagtacacatactcacaaatcggagaaatgaaacaaattaacagctttatatgactctctgaaaaatggtaataccgagggatatgatg

SEQ ID NO: 487984 - DNA, 573 bp, Homo sapiens
ttttaaagaataaaaagtatttttatttattatgagaagtcattgcatgtctttatggttcaggtaaatctttattgaccaaggttttttaatttcacaggtcggaaaattcttcrcaaatcctagctaaccaaaatgcagataaaaaataaagtttatttctaaaactgaatctatctgtgtgacacagttgaaaatggtccactctctccatttcttctagttcaacccctttttgccctgtgtgttattgcctccacttgttctccctgctctcaacatctcctcattttatgtcttctccacattaccactataggtagttgattgtgtaaaatacctgattaataaatttttcactccccactcctgatgggctaaaaactttcataagcaatgtctgtattttggttctgtgctgttttcctgatttcattttcctctgctcttcttcagaatgcactctgcactttagctgctcaaagttcctgggggcacaaattgaattattttgttttctgcttttgtaaagtacagagaatttctttcccatatcttctgaaaatcctattg

SEQ ID NO: 487985 - DNA, 573 bp, Homo sapiens
ttttaaagaataaaaagtatttttatttattatgagaagtcattgcatgtctttatggttcaggtaaatctttattgaccaaggttttttaatttcacaggtcggaaaattcttcgcaaatcctagctaaccaaaatgcagataaaaaataaagtttatttctaraactgaatctatctgtgtgacacagttgaaaatggtccactctctccatttcttctagttcaacccctttttgccctgtgtgttattgcctccacttgttctccctgctctcaacatctcctcattttatgtcttctccacattaccactataggtagttgattgtgtaaaatacctgattaataaatttttcactccccactcctgatgggctaaaaactttcataagcaatgtctgtattttggttctgtgctgttttcctgatttcattttcctctgctcttcttcagaatgcactctgcactttagctgctcaaagttcctgggggcacaaattgaattattttgttttctgcttttgtaaagtacagagaatttctttcccatatcttctgaaaatcctattg

SEQ ID NO: 487986 - DNA, 573 bp, Homo sapiens
ttttaaagaataaaaagtatttttatttattatgagaagtcattgcatgtctttatggttcaggtaaatctttattgaccaaggttttttaatttcacaggtcggaaaattcttcgcaaatcctagctaaccaaaatgcagataaaaaataaagtttatttctaaaactgaatctatctgtgtgacacagttgaaaatggtccactctctccatttcttctagttcaacccctttttgccctgtgtgttattgcctccacttgttctccctgctctcaacatctcctcattttatgtcttctccacattaccactataggtagttgattgtgtaaaatacctgattaataaatttttcactccccactcctgatgggctaaaaactttcataagcaatgtctgtattttggttctgtgctgttttcctgatttcattttcctctgctcttcttcaraatgcactctgcactttagctgctcaaagttcctgggggcacaaattgaattattttgttttctgcttttgtaaagtacagagaatttctttcccatatcttctgaaaatcctattg

SEQ ID NO: 487987 - DNA, 540 bp, Homo sapiens
actctgttcccccactagagtgctttggaaaaggtcagtctatgtcagagccttcatgagacggactgtggtgctttcctctgaggacccaaaagcaacattttctgtgattagctgctgaaaggtgcttttcataytacctttggtcagagtcctagaactattccatggttttactttaattttagatattacctgttccatttccttgcttgttaaggaggggaaactaattagaagccaaggtagtaatatacaattagaagatatttgattgtaaagacatggacagtctataaagaaccctttgaaagaatgtaaaaaaaaaatgaaaagtttttaatgcttattttcataagtcaactcactttgagggttttaatttttaagaagttgattcatgatgaaaatttaggtgtataaacttttaaactctaagcaggaaagtcactctgttcaaataatctttcaatcctggagctttcagtattgtctgtaactcaaatcatgtctgaatttatgatttataatttgcagcta

SEQ ID NO: 487988 - DNA, 618 bp, Homo sapiens
tttccaacatattatatattgaatttgcactattttcacttcatcagtaagggacataaaatggcataaaatgaaataaaaatattttagaagaaagtctgtaataatgagtttaccaagagtctactccctggagttcaactgttacgggcttttgatagatgagttgtgttgctggccttccaaaggaggcaaatactcatgaaacagaggaaaagaagcactgtgcagacaccaaagatactgacatttgtgacatacaatctaattggtcagtaatgaggagtggaaagattgatctgtgttattgattcccacttttaaaagacagatttggcataaacaagattaacatttggcaaaatagaaaagaggtaaaatatcaaagttgcaaatagtaataggccttaaaagaagggttggagattggaataaagtattagtgagtttaattgtatgctgggtgatttccaacctgctggccggtctaraaggccatataagcagggctgccatgctgctaagtatgagtgccttgcctcagcttctctgaccccactggggattggccagcaaattagtagaaacctactaaagtggaagtttgggctgcaggaa

SEQ ID NO: 487989 - DNA, 618 bp, Homo sapiens
tttccaacatattatatattgaatttgcactattttcacttcatcagtaagggacataaaatggcataaaatgaaataaaaatattttagaagaaagtctgtaataatgagtttaccaagagtctactccctggagttcaactgttacgggcttttgatagatgagttgtgttgctggccttccaaaggaggcaaatactcatgaaacagaggaaaagaagcactgtgcagacaccaaagatactgacatttgtgacatacaatctaattggtcagtaatgaggagtggaaagattgatctgtgttattgattcccacttttaaaagacagatttggcataaacaagattaacatttggcaaaatagaaaagaggtaaaatatcaaagttgcaaatagtaataggccttaaaagaagggttggagattggaataaagtattagtgagtttaattgtatgctgggtgatttccaacctgctggccggtctagaargccatataagcagggctgccatgctgctaagtatgagtgccttgcctcagcttctctgaccccactggggattggccagcaaattagtagaaacctactaaagtggaagtttgggctgcaggaa

SEQ ID NO: 487990 - DNA, 478 bp, Homo sapiens
atgtgaatggagctaagtttaacttttcatgaaaaatcatgactgatacctagtaaaatttaaggacaatttctctttgaaaaaacaagaatgtcataakgtgtattttaaaattatttagataaaacatctttttttgttcaaggcaggataataaaagtatgaattttgaagtcaggcaaacctgcatataaatcttggctcaggcactattaaaaagccttattaacttattcagcacaaatttattaatactttgggttaaagattgcatttgatatgatagtataccagaaagtttctcctatttcagattattttttcccttaatctcagattactccaccataaaattggaataataatagatctatagttgctttttttctattcctaaatgagtgtgcttatagaaaaaccgtttagttctttagcgataaaggcagcttaatctatatgaaacacagcctcagtgtgt

SEQ ID NO: 487991 - DNA, 478 bp, Homo sapiens
atgtgaatggagctaagtttaacttttcatgaaaaatcatgactgatacctagtaaaatttaaggacaatttctctttgaaaaaacaagaatgtcataaggtgtattttaaaattatttagataaaacatctttttttgttcaaggcaggataataaaagtatgaattttgaagtcaggcaaacctgcatataaatcttggctcaggcactattaaaaagccttattaacttattcagcacaaatttattaatactttgggttaaagattgcatttgatatgatagyataccagaaagtttctcctatttcagattattttttcccttaatctcagattactccaccataaaattggaataataatagatctatagttgctttttttctattcctaaatgagtgtgcttatagaaaaaccgtttagttctttagcgataaaggcagcttaatctatatgaaacacagcctcagtgtgt

SEQ ID NO: 487992 - DNA, 606 bp, Homo sapiens
ttgggggtcttggtttggctccttggggatctcgattcggctcatttgaggtctttgttcagctcttttagtgtggtctcagtttgccctaattagtaggaagagtcttggttttggagacttcacttcaactgggaagattcttaaggagatttctcggacagaataggaggttagtttggaatgagtactcttgaaatttttggctaggtatcttggtttggaaggtcttctgtccatcttgtcttcgttgtatgtgtttgtatgtgtggaggggatctgaaggaattgctgatggagatccagcaggcctaactcctagaaccctgtataagtgtgttcacattcaatgagtcctgaaaaaagctcaacagcctgactagagtgtttgctcttcatcttgcccagagacaacctattgaattcccatttggaagtcatccttccccaccttgagtgkattaaagatggcagggacgaacaggagaaagtttgagccttgcctggttgatactgggtgttgaataaagtgagtagcatctgtctggttatgtgtattttactgagctgggatgaaaaatgttaattcggtgcgccatgcagcca

SEQ ID NO: 487993 - DNA, 518 bp, Homo sapiens
gcatcttggttctttttatagccatttaaaattctgtatataaaaaggaattaggctctcatttttttctrtttcctcttctgtatttttatgctcagagacactaataagttgatattcagaggcataaaactggtggaatattctacagaaaagtagaacaaaaatattataaggagtagtacagcttatgtggattacagagcaattaaatatccccaataataatgtaaaattcattcaatcacccactaacatgtagctggtcagttaacattctgtgtccgtgcaagcagggctctcaatcttggtattatgaatatgactaaataccaaaaattgcaatgtgttgacaaaaacctgaaaatcattaaagaagaggacaaaaatatcttaccctggaagaaagtgagataattaaggctaatgaaggtaacatacaaataaaataaattcatagggagataccatctctacaaacatttttaaaatttgccaggtgtgatggtgaacatgtg

SEQ ID NO: 487994 - DNA, 541 bp, Homo sapiens
gccctgcagcacctgacatgtgtgtaggagctccatgtttcttgggtgaaccacgcatgcccttcacagggagattgtatctttcagacctccaaagtgcaggctcggtcttgtcacctgattacccatccttcatccttcaratcccaactcaaatgtcacctcctccaggaagtcctccttgagccccgggttaagtcagctccctgggttacacactccacagcactaaatgactttccattgctggactcacctgagagtactgtaggtgcacacttacacctaggtgattgtttacgagtgtctgccttctccaccaggctgtgagcttcatgtgagcttccaggaaacatgtctgttttgagtcactcttgtactctcagtgcccaaagacagtaggtactgcataaatctttggtgaatgaatggacaatccaagagtaatggatgagagagggatttgcaaactgtaaagttccagtgttctccacctttctgaggctcctctcatgtaacattggccctccatgtgggtgcg

SEQ ID NO: 487995 - DNA, 610 bp, Homo sapiens
tgttgcctccttctttcccatcatttttcatctttaagttgtggctgctctttgtgaggtacgggagtatagcttgctgcaaacccagtatttccatrttctcaacaacccggccctgcacagtggaagccccacaaacatctccccacctggaggtgaggaggggagcagcagggctcaccatctgaggcccgcacacctgcatccatgaaaagcctcctcccgctcctcagcttctctgattggctgaaagtgacatcacagaagcccagagccagcgttttgggcaagcccaggtgctacacagtgtcgagtcgtgatacgcacctcgttcgtctttcagagtctgcctggtaaaaagttcaaagttaagaacagataaatagaatgcacccaaaatgagcagctattaatccctccaatctaaaaaggccacctgcaggacagcagagggctgcccctgggcactcatcagagtgtggtgctgacttgaagagggtgtcattttactgatggttatttgcccaagtgaaaatcagaggtatcagtggtccctttaggggtatctagttatagggatatttactctctcaccttatttatacagagt

SEQ ID NO: 487996 - DNA, 610 bp, Homo sapiens
tgttgcctccttctttcccatcatttttcatctttaagttgtggctgctctttgtgaggtacgggagtatagcttgctgcaaacccagtatttccatgttctcaacaacccggccctgcacagtggaagccccacaaacatctccccacctggaggtgaggaggggagcagcagggctcaccatctgaggcccgcacacctgcatccatgaaaagcctcctcccgctcctcagcttctctgattggctgaaagtgacatcacagaagcccagagccagcgttttgggcaagcccaggtgctacacagtgtcgagtcgtgatacgcacctcgttcgtctttcagagtctgcctggtaaaaagttcaaagttaagaacagataaatagaatgcacccaaaatgagcagctattaatcccyccaatctaaaaaggccacctgcaggacagcagagggctgcccctgggcactcatcagagtgtggtgctgacttgaagagggtgtcattttactgatggttatttgcccaagtgaaaatcagaggtatcagtggtccctttaggggtatctagttatagggatatttactctctcaccttatttatacagagt

SEQ ID NO: 487997 - DNA, 610 bp, Homo sapiens
tgttgcctccttctttcccatcatttttcatctttaagttgtggctgctctttgtgaggtacgggagtatagcttgctgcaaacccagtatttccatgttctcaacaacccggccctgcacagtggaagccccacaaacatctccccacctggaggtgaggaggggagcagcagggctcaccatctgaggcccgcacacctgcatccatgaaaagcctcctcccgctcctcagcttctctgattggctgaaagtgacatcacagaagcccagagccagcgttttgggcaagcccaggtgctacacagtgtcgagtcgtgatacgcacctcgttcgtctttcagagtctgcctggtaaaaagttcaaagttaagaacagataaatagaatgcacccaaaatgagcagctattaatccctmcaatctaaaaaggccacctgcaggacagcagagggctgcccctgggcactcatcagagtgtggtgctgacttgaagagggtgtcattttactgatggttatttgcccaagtgaaaatcagaggtatcagtggtccctttaggggtatctagttatagggatatttactctctcaccttatttatacagagt

SEQ ID NO: 487998 - DNA, 532 bp, Homo sapiens
tgccctgtgaaggaaacaatgcaggcagtggtccatttccaagacaaagtgccttgaactggcttaggtcagcaaactacagaagaaataggatacactaggcccatgcttggatcaccaatgcctgcttgtcagcctccccgtccccacctgcccccctccccacttgtttccctcacccgaaccaaagaagtttagtctaagttaaaagtttactagcctgcaaaatagctcattttttctgttcttatcagcctgcccagctacttaggttgtaagttctccgagtctctgagtccattctttgggtttaaatgactatgtttgtttctcacactgggaatgataatgtgctggaatattaaacatgtttgaattccagacaatgcacaattaactataaaacttgcaatttaattattcttctatcatgacataattttagaactgagaggactcagaaaatgtttagtctgaaaatatctttttaaaacaaasctggaagcaggggctgggaaaacaagtctgtgaa

SEQ ID NO: 487999 - DNA, 163 bp, Homo sapiens
acggcggctggcggtaatgagygcttgagccggaatcagaactgcacctgcagaaagctcagtgcttgttcacttcatcaccacgacgaagacacctgtgaaacttctggaagctatctgttaaaccagatccttataagttcagaaatgtaaagggaaggag

SEQ ID NO: 488000 - DNA, 621 bp, Homo sapiens
ctcaaactggaaccctgggacctactgagtggcctccccttctctctagtgaagtcgtgatgctctgcctccttgggattttgcagttctccattgcccctccacgctgagtggcttccttacctggggttactcgcggctctgctgttcctgattgctcatggtcaggccttctgccaaascttcagatgctggaactttaaggaaaccaagaagcctggtctaaatgacagggatctgtaagctcttcagacggttagaagccccctgaaggcagacatgaggtggtacccctctgtttgttcatcttttaattccccacccaagcagtgtatgctacatgtggcaggaagccaaaatcagttgttgtgaggttgcatgttaatgttctaccagatcacactggtagtgggttgggccataggcagacaagcatcctttaccacacacagaggggctgtccacacaagggagaaatcagaactgcctcattcccctcctggctgtgaaaatcatgtccggctctggagacatctggtgtgaacctagagacctaagaccagacatctcggtcatcctggatggccctggtaagaggtgccttgtgtctacttttgcagg

SEQ ID NO: 488001 - DNA, 621 bp, Homo sapiens
ctcaaactggaaccctgggacctactgagtggcctccccttctctctagtgaagtcgtgatgctctgcctccttgggattttgcagttctccattgcccctccacgctgagtggcttccttacctggggttactcgcggctctgctgttcctgattgctcatggtcaggccttctgccaaagcttcagatgctggaactttaaggaaaccaagaagcctggtctaaatgacagggatctgtaagctcttcagacggttagaagccccctgaaggcagacatgaggtggtacccctctgtttgttcatcttttaattcccyacccaagcagtgtatgctacatgtggcaggaagccaaaatcagttgttgtgaggttgcatgttaatgttctaccagatcacactggtagtgggttgggccataggcagacaagcatcctttaccacacacagaggggctgtccacacaagggagaaatcagaactgcctcattcccctcctggctgtgaaaatcatgtccggctctggagacatctggtgtgaacctagagacctaagaccagacatctcggtcatcctggatggccctggtaagaggtgccttgtgtctacttttgcagg

SEQ ID NO: 488002 - DNA, 608 bp, Homo sapiens
gctcaaactggaaccctgggacctactgagtggcctccccttctctctagtgaagtcgtgatgctctgcctccttgggattttgcagttctccattgcccctccacgctgagtggcttccttacctggggttactcgcggctctgctgttcctgattgctcatggtcaggccttctgccaaagcttcagatgctggaactttaaggaaaccaagaagcctggtctaaatgacagggatctgtaagctcttcagacggttagaagccccctgaaggcagacatgaggtggtacccctctgtttgttcatcttttaattccccacccaagcagtgtatgytacatgtggcaggaagccaaaatcagttgttgtgaggttgcatgttaatgttctaccagatcacactggtagtgggttgggccataggcagacaagcatcctttaccacacacagaggggctgtccacacaagggagaaatcagaactgcctcattcccctcctggctgtgaaaatcatgtccggctctggagacatctggtgtgaacctagagacctaagaccagacatctcggtcatcctggatggccctggtaagaggtgccttgtg

SEQ ID NO: 488003 - DNA, 621 bp, Homo sapiens
ctcaaactggaaccctgggacctactgagtggcctccccttctctctagtgaagtcgtgatgctctgcctccttgggattttgcagttctccattgcccctccacgctgagtggcttccttacctggggttactcgcggctctgctgttcctgattgctcatggtcaggccttctgccaaagcttcagatgctggaactttaaggaaaccaagaagcctggtctaaatgacagggatctgtaagctcttcagacggttagaagccccctgaaggcagacatgaggtggtacccctctgtttgttcatcttttaattccccacccaagcagtgtatgctacatgtggcaggaagccaaaatcagttgttgtgaggttgcatgttaatgttctaccagatcacactggtagtgggttgggccataggcagacaagcatcctttaccacacacagaggggctgtccacacaagggagaaatcagaactgcctcattcccctcctggctgtgaaaatcatgtcyggctctggagacatctggtgtgaacctagagacctaagaccagacatctcggtcatcctggatggccctggtaagaggtgccttgtgtctacttttgcagg

SEQ ID NO: 488004 - DNA, 529 bp, Homo sapiens
ctgggaagcttagctcccagggtggaaagctaggcgcgcttcttaccaatgatccaagcagccgcctgggactggcttgtcagaattaattgttgtctagaatgttattagtcgaaacactaaatttgctcttagggtaaagttccttcttaatgaactgcaattcttgctcaactccccctcccccrggcatttctcatcaatgtgataacatcagcccaggtgctgtaacagtctttaaaaatcgtaaatcttaacctgtcactgaagagaaggggagaagaaaggttaaacaagtttctggaagacgctttcccaggtgttattttgcaagtagagggctaattgatggttctgccatcatagttacaactgataaccatcatgtaaacactccctactctccaagggaacattctcaggttgtcccaggggtgcaccccaccccacccccaccccgccggatgtagtggtctccctcacacgcagacacacagacagcacctctggatgtcctgatggctttgaa

SEQ ID NO: 488005 - DNA, 263 bp, Homo sapiens
agactctacaccccacaaatacagaacacccaggctcagggcagtcacctgcagaagtgtgtgccacccaaggccagccggggactccatggtgtcaaggtcaactgtccagcatctgygacctgcagtctgaaactcagccacacctcacagactggcaagaagccaagagtggcacttaattttccgtatctggtgggaaaaacccattggcccctctgatcgccctgccttctaacagtgtttggagattcacagtggca

SEQ ID NO: 488006 - DNA, 560 bp, Homo sapiens
gggtctctagggtctcattatctctaggttttcagagtctctagggtcttggggtctccagggtcagggtgtgttggaggcacaaggagtcccagaagagctccctcaagtcctcagaatgacaggggccctctggctgccctcrggccctttggaacctgctggaggctcagcctggtcctgtgcaatgaccttatgtttctagaacagattttcttcaaacacatattgtctttaacaaatattggtgcagaaacagcctccgctctgtgtccacggaagaacatctcctgattctgcacggagacacaggcagagccaacacctggtgtcccatgtgggctgcagacccacccttgactctgaatgctcagggccagattcacccacgtgttgtttgcatactctcactagggtaccaggcccaaatgcaggaaaacatctcataattcatgtttccaatcattacatcagtcatcccagcgcagccaggcaatctgacttgaaccagcaataattttgctgagagcactgggacaccatattttcactccatcgat

SEQ ID NO: 488007 - DNA, 520 bp, Homo sapiens
ttgaaggtggtgatgctgagagttctggttccttcttagaagcaaaggaaaaaggcacaggcaccagtgcagtccaacacgtgtttgattagaaatgaaaatgaccatgtttcaccccttcttttattatttttttttgttttgagaccgagtctcactctgtcacccagcctggagtgcagtggtgccatctcagctcactgcaacctctgccccccaggttcaagtgattctcctgtctcaccctcccaagtagctgggattacaggggtttgccaccacgcccagctaatttttgtatttttagtagagatggggtttcaccatgttggccaggctagtgycaaactcctgacctcaagtaacccgtcttggcctcccaaagtgctgggatgacaggcatgagccactgcgcctggcccccttctcttattctatttttctatcccagtgtatacatttgaagggaaaattgctggtgacaatttgccccattccccatgcaggacaaggtaaggac

SEQ ID NO: 488008 - DNA, 549 bp, Homo sapiens
gctgaatttcacttttatcggctgtgaaccataaaaaaattggtcatctgtgtatgatttccccctcacccataagcccttgcagagctaaggatatgatctcttggctgtaatagggtacttcggggcagccatcttgtctcaggtagtggctactttccatctgtgacaagagcagagtagttcaattaacttctgcccttcactgccatttacagcttgctgtctctgctaaatggcatatattctgaatttatggcctgggcctgttagtatgtggactagttcattttactttcacagacatttttgacaaggctccacgggagtcttargtgtctaaagagggtttccttgtaagttggttaaaggccagaaaatagcaacatacttgactcacaggtcaaacagtctccccaccaactaactgtccctcatgtactgataaactactatttggcataggggaagtaggtagatgccaatttggcagaatccatttgtatgatttgagaagtgtgagagtgtgtgtctgtgtgtgtgtgtgac

SEQ ID NO: 488009 - DNA, 635 bp, Homo sapiens
gctcgctggttgtggcaatcacaaggccatgggagtrcctttactttaaagtgcatcactttaattagattctgggcccttttaattggattatttcacatgctgggagaaaggtacttgcaagaggaggggaaatccttgcaaactaggcagtcaaatcagccaagtaaatattctgaggctgtttccacttctgcctttccacttacagtcaggatactgcactgcccaggaaacacagtaccagtggtgttgtcaggagcatccagcattgacagaggactaaaggaaggcattaagggagacaaaatctgtttctttgaggttcttgcaggactcatgcagaaccttaattattagccacatttgacattgtaaataacacctctcttcttgaaatgttctctttccttagttttcatgatgtcacatgctgttttttatttatttatttatttatttatttatttatttttgagacagaatctcactctgtctcccaggctggagtgcagtgcatgatcttggttcgctgcagcctctgcctcctgggctcaagccattctcccacctcagcctcccaggtagctgggactagaggttcaggccattatgcctagataatttttgaactt

SEQ ID NO: 488010 - DNA, 628 bp, Homo sapiens
atcaggctcagaatcttcaatgaagcattaaaatttgaccagagcttagtgcagagccctactcagaaagagggcttaataaataggaacaactctgggaagattgtgtatattctcaagactgacaactaaaccaaaaatgacaatctccagtgagatttatttcaggacaaaataaaggtctgaagtttccttgggattaaaatttttaattgttcctgcctaaaatgtttctttcaaaaaaaaaaaaaaactggattagggcactaagctttatttaggtaaactgtgatcttctaccaattttattcacaaatataaaacagcytgagtagcgccaaatattctcagtacccaagttttacagctaccttccaagaacagaattttcaaagccacatgaaaaccagcaagctcaggccttttggttgtgtacatttttaagaagcagaagagagagggacgaggacctgagagcacaaagagagtaaaacaaaaacaaagtttagtaccagatgcagactcaggaaggcctgagcgctatccaagtgggagttttgagtgatcctcagcaaccgtgaggacctttgaaaggtttaaaaatataaattgtggccactaaaaaaaa

SEQ ID NO: 488011 - DNA, 612 bp, Homo sapiens
gtagaggaagaactgatggcgattcaagcatttttctagaatcattcagtttagattttgggtttctgatttggaattcaagaaaagcttcccttgcagtttgttaattagcattagggtagggggagcagtaaggactcactgggcttctgtgcaggtgcaattgcccacgcatgcccaacmaaaccctgggtatcagttgtcccccgtctcccatttctctgcagaacaagagacaacagataatttgaggacagtttggctgcttggtggtggcagaggtggtatgtgtgtccataaagtagggtaactactgcttgacacagtaaagtggtgttctttttcgctcatgtaacagtcctgtgtgagtctagggcagggattggcaaattacagcccatggtccaaatccagcttgtagcctgtttgtgtatggaccatgagctaagaaagggttttacgttttaaagagttgcaaaaacaaacaaaataaacccacagagaagaatatgtggcggaaactgcctgtggctcataaagcttaaactatttaaatctgatcctttacagaaaatattgggtaatccctgctccaggaagaagtgagtcgtt

SEQ ID NO: 488012 - DNA, 584 bp, Homo sapiens
gctgagaaattctaatttaagtgcagttacatctcaactatcatcatgcctcctgcagtttcctttaacttgtgtaggcagggttaaacactcccttcactgagcaacaatagcatttttcacatacctctatgataagagtaagaaaatgactataactggtataatatgttctataatacgttctatctcttttctcygtgatttcaaacttgttcccactggtctcaccttagtcaggcatatggttttttattcccatgactatcacacctcaatgtccaaatcatcccaccctgagaggagggaacaaagttgcttatgaacaaggaagcagaatagagttccagggaagaaattagcattgtcgccccacaggcaaggggctgaccccacctgttgagatcttcactcagtactgtttcaggtatctcgcagcccaggtacttatcttctctcttgcttctccttcctcagaccacagaatccatgcatcagacctttctaaggaaattcattctgcaagcatgatctgaatctcagttgctcccaacttggagtgattttgcctctcatgggacaat

SEQ ID NO: 488013 - DNA, 652 bp, Homo sapiens
tgagaaattctaatttaagtgcagttacatctcaactatcatcatgcctcctgcagtttcctttaacttgtgtaggcagggttaaacactcccttcactgagcaacaatagcatttttcacatacctctatgataagagtaagaaaatgactataactggtataatatgttctataatacgttctatctcttttctccgtgatttcaaacttgttcccactggtctcaccttagtcaggcatatggttttttattcccatgactatcacacctcaatgtccaaatcatcccaccctgagaggagggaacaaagttgcttatgaacaaggaagcagaatagagttccagggaagaaattagcattgtcgccccacaggcaaggggctgaccccacctgttgagatcttcactcagtactgtttcaggtatctcgcagcccaggtacttatcttctctcttgcttctccttcctcagaccacagaatccatgcatcagacctttctaaggaaattcattctgcaagcatgatctgaatctcagttgctcccaacttggagtgattttgcctytcatgggacaatgacaatgtatggagacagttttggttgtcacaacttgagggagtgctgctggcatccagtggggcagggg

SEQ ID NO: 488014 - DNA, 589 bp, Homo sapiens
tttggagtttgcctctatttcctttgttctccaggtggctgtttccctctgaatgtccttggcctgaagacatggtgttcttcctagttgcttttgatcagccttacatgtgaatgcagaagaggattttttaatttttaaattttttttattttttagatttgcagagtgagagtcattgacagattgggtcagagctgcaaagaggtttttccattgagtgggaatgcagatacggcacggttcaacatccttcctgcctagagcagcctgaagtgtcgtggtataatgatcttatgtctactgtcaggtggacaaagccctcaactttgtttccttatttatctctaagtacatccttgtcatgtagttttattttcctaattttagaaaggtagcargtctatgaagaggcttatgtaggattcaagtccaagtgttaaagcaaactaaatatggcctgagaaggactctgtacttctatagctgagtcctcgtggatgagctgtaacctagcgtaatagattacagtggaacaacaattatatacaattttgtagacctcatcatcataatatataaaattgaa

SEQ ID NO: 488015 - DNA, 571 bp, Homo sapiens
ttcaagtttcattagctgaggcatcagacattgtggaacttggagttaccattcctatggtgctctgtctgaattactgacccacagaattcacrgcagaacccacagtgatggccctatgctattaaatttggaggtagtgtgtcctacaacaatagataactaggatatttatgatggctgcaagttcaaaactccaaccaaactggcataagtaaaaagaggaatcttgtttcatgagtctgtaaagagcaggggctaagttgatctcaagcacaacagtccgggaactcattttgttatcagaactctctgcctgttacctctacttctctccccacatcagtaggaaagaaagcctgtctctcccaggagtcagtattcatttaaactttcagaggaagacattggcccagttggatcttgtgcacattcctggattaatgacttcttagaggactggaagtctacgaatggcctaagccagtggccaattcccctagccaacagcaagatatatggtaagagtgcaagagaaatttaccccaaaagaaacagctattctggagag

SEQ ID NO: 488016 - DNA, 504 bp, Homo sapiens
tgaggaagatgcaaaagcggaaaccccgataaaaccatcagatctcctgagacttattcactaccataagaacagtatgggggaaactgcccccatgattcaaattatctcccacagggtcyctcccacaacacctaggaattatgggagtgcaattcaagatgagatttgggtgggaacacagagccaaactacatcagagggggagctcagaggtagagctggactaggaaggtacttatccagaggcaggtcatgtagcaggtactgttgggccacacctggatgccctcagaaagtgcccttttgctacaagccagcccaacttccaactcttcaaccaagggcattatctgaatgctggagcccactcagcctgcatgctgggcaggcagagtactaaggacttctttctcctttccactttccccaagcaatgatgaatggtgaataaacatacctgagggaaacctgaggcatatatttcccggcaggattagcctc

SEQ ID NO: 488017 - DNA, 559 bp, Homo sapiens
tgtcactgacttctcctcttttccatcatccacgtaaccaattccctacatgaaacttcctcaaagtggttttttgttttcttaaaaaaaaaatcacatggactgatacatgtgaagatgacaatagaaagccagagcagatttatcaccatttcaccttgtggttatttgtaygcctttcattgccaccttaggaaggaggcaccaagtgttatgcatttactacattaccacaccaactcccaaagcaccttctacatattaaaacatccatgaatatttgttgaatgaatgaatgaatgaatgaatgaatgaattgaacctggggagctgtaatatcttaagtgtttaaagcttctatgaatatcataaagttatacattaattagaatcagtctatgagcacctttctcaataacacacaaatctggaagtaatgtaattaattcaaaattacataagtaatcaaggtgtgcttacttttccatcaatcaaggcataattacttagctgtgagaaagctcaaaaggggtttatatagcctttaatgaggcttaca

SEQ ID NO: 488018 - DNA, 566 bp, Homo sapiens
tgcctcactgggcctcaattaccttttctgtactatgatggccagaaccaaaaagacaaataataatgagaattgaacacctggggttcttttgaggattaaatgaatgaggtaggatccttggcatgaagcaagtgcttgataaggttagctattacagttatgccatgctgcctatgtgtgggagagacagtctgggaccacaggtgttagttcagaagatggaactgtctctgagctctttagtgcagaaagagcttctgcaggaggaggagtggtgtgatattagatggagaggtagagatcacaacagccagcagtcactaactacaggtgagcagcaacatcyggaggattttctaatctgtctgggaacatctgggtagttacttgacatcacagcgtgtacctgaaccccaaagatggactccctcttcccagggtgcttcctgaccttggaattcccaaggtcaggcatgtccaggagccccagaaataagccaaaccagagtgaccaccaagaacaaagaaatgggggccatgttggcaggcttcctgtcaaccag

SEQ ID NO: 488019 - DNA, 564 bp, Homo sapiens
attttatcttgactttgtaaccaagcaccatattttttagcagatgccatttctcttcagattactctatcccattatgaattacctctattgggaagaagatgggagaaagatttgtatcaaaacgtaaatctatgcacctgaaatacactattttctgaatacaataaaaaattatacacatacaaaatctatctttgccaatttgaaaaataatcaaacctttagagcagaaatactgatgccttagtagatatcatraaaccattagagtggtatatttatacttccaaaggtggtattattctaccccaataagacctttgcatatatgcaaacaataatgacagaaatgtaattgaaatatccataaaatattatatttttttcttataggattgttaaaaagatgttataagctacagtgctgctagaaagtgctatcatgttgcacaaaccaaggcttctaattagacttgtcaatcactgattgattaccaccacaagatgaaagagcaattgcatctcagcaattatattttcttgagggtacaaaatgcaatg

SEQ ID NO: 488020 - DNA, 605 bp, Homo sapiens
tgtggggtagggattggtgctgagaagggaaaacataggtgtctaccatagctggagaactgagggtgtcaacaggaggcctgaaaaggggactcggtgaatgccaggagcagttctcaagctgttggaaagctctgtgtcaacacagttcttactcagagattctcaagtaaagaaaacaaatccacatgaggtccagaaaaaaatacagcagaatgagaggaaaggaaacaattccaaaatccaggaacagaacagacatgaaaacgatctaatgcaagattcaaaaaactaatttcataaaacttcttggtattttcaaaagaatgcaaaaacagaggcaagccttcttgaaagaaaaagaaaagattgaaggataacaagacaaggtgaaaagaaatatgaatgagataagaaaattagaagctgaaagcaggccggatgcagtgrctctctcacgcctgtaatctcaacacttcaggaggctgaggtgggaaaatcacatgaagccaggaacttgagaccagcctgggcaacatagcaaggcttcatctctagaaaaaatataaaaattagctgggcatgatggcacatgcctgtagttc

SEQ ID NO: 488021 - DNA, 526 bp, Homo sapiens
aatatcttcctaatatcatactattttcaagtgctacattgatcaatatagtagcgattagccacatgttgctatttaagcttaaattacaaaaaataaaattttaaaatgcagtttctcagtttcactgcaaatgctcaatatagctacatatgactagtgactactgtattattcagacagataccaaacatgttcctctttgcataaagttgttttccttttttaaaaactatacatttatcttaaccacattgtaatttatgtttaattacattgcrtaattccaatgtaaaaaaaattgtgtcttatccatagacttctttggagtattttccaagtctactcccccatcttcatttctatagccactactgcaataggcttttatcatttcatattctttggtgtgatcactgcaagagcagtcaacgctggagaaatttttgctcctctaattcaataataataataactaacatacattaagaactaccaactaccaggccctttgtatataccttat

SEQ ID NO: 488022 - DNA, 526 bp, Homo sapiens
aatatcttcctaatatcatactattttcaagtgctacattgatcaatatagtagcgattagccacatgttgctatttaagcttaaattacaaaaaataaaattttaaaatgcagtttctcagtttcactgcaaatgctcaatatagctacatatgactagtgactactgtattattcagacagataccaaacatgttcctctttgcataaagttgttttccttttttaaaaactatacatttatcttaaccacattgtaatttatgtttaattacattgcgtaattccaatgtaaaaaaaattgtgtcttatccatagacttmtttggagtattttccaagtctactcccccatcttcatttctatagccactactgcaataggcttttatcatttcatattctttggtgtgatcactgcaagagcagtcaacgctggagaaatttttgctcctctaattcaataataataataactaacatacattaagaactaccaactaccaggccctttgtatataccttat

SEQ ID NO: 488023 - DNA, 618 bp, Homo sapiens
aatttgcagcataattcttaagttttaggagctaatgtttttacacaacagctcaaaataaaactgaaatatgcaaacacaatctgtgatatccttgagtaatgacatcatctgtctacatctttttccacttgagatttagttaagattgacattcagaaagcactctataaaggtgttttgatttactaaragacctacttgaattagtgaaaactacattgaaacacatatactgaatatatgatgtataaattcatgtgcagttgaaacatttataaatagagtaaaaattgtgattcatagcaggaaagttctatgctgcatcttagaaatgtaattggaaatacaactgagctcattgattgacttgtgtgtgaaaatggtagactccctacttaatcagattccagatggaacaacttagtctgaaaaatacgattttttatgtaagcaacatttttttggaaaaattgattagtaaaagcacatcatttacataaacagataagctgtcaaatgcaatcctttaggtccagtcttttttaaaataaaaattcatcgtactgaatctaaaatatcaaaggaaaaaagatgattatcactggtaacttccag

SEQ ID NO: 488024 - DNA, 537 bp, Homo sapiens
gtgtgcatatatgtgtgtgcattgtaatcaaaaggaagtctccagaaggagcagtttcccaggatccagtcttstggtgagacactggggatgacacggggattgacagggctccaggcatcactgccacattactttggatcttgtatctgaactctagaatatgtcacatagtcatcaaaccacagtttagtctgcttttccacaaaggaaaactttatctgttggcctgtgttacactataatgtgtgaggggaattggatggtgttacatcgggaagccaagcaaagtttattgtttcttgggattacattcttatatttttatattctttaataaagcacaggctggagcataagtaaaaggaagcaagttcttaactactaaaaattgactgcatggccctgtctcacaccgtagataaatactagctaaaaatggaccgtagacccaaatgtcaaagctaaaactataaaactcttagaggaatctgcaggagtattctttgtgacctggcgttatgtaatgatttctta

SEQ ID NO: 488025 - DNA, 635 bp, Homo sapiens
gctttttatcagtctacatccagaatccaggcccaataaaggattccraggctctgatcattacatgctatctgggcttctatgaacagaggttctcaagggaaccctggccttccaggttgcctgctgctccagctccagtaatctgtcatttgttctcctatttccttgggcaagtagcaagagagattggtagacttttctacctcctgtggaaacaactaagctattcaggatcagactgccctaaagtgatatattccctagaacactcagtcttccataaagctggaagcagtactctcatttctttttgtattcagtgcactttcatgtcaaaaaagaaaatagctcagcagaaaaaaggatggtccgttataacaggggcttctgaattcaggatcactcaccaacccttctgaaatttttgctgatccttagtaaaagataaatgtaatttgttatccagctaaatttattaaattaaatgacagagaattttttctataattattcctatcgtttgatataaaacatattttattaaaaaacatagtgtgaataaataacagagttttagttgttttgtgttgttttaaatgatttgcccaacttccaaaaaatacaatgatata

SEQ ID NO: 488026 - DNA, 619 bp, Homo sapiens
gctaggctacaacccagaggctgatgaatcaaaccactctttactatagctctgccttttctggtttcaaggctttcagcttctgtgtccatcccataactcatactgtggaccttccaagtggttatagagaaagggtatggggakccccagacacctgcctcctagtgttctctattttaagggttcccagtccatctctaaggattcagggtttgtactaaaaagagctatagcagcctctccttgggacagtgcagttagctaccttgttcctttgcatgtagatatatggtggcacttaataaggcccaagcatactgtctgcagtcttgtataatttaagcaattggataactagttggtgttctggtgggaaagggagaaaggactgctgcaggaatgagatatttgttcccttgatccagaggccccttttggagtaaacattgagatattgtcttcccagggcacaacccatgatacttctaagggtctggaagcaagaagttcactggcaatagtagttaggaaaacaacagcaagtaaggcaggtaataccacagtccttacatgggcaacgtaaaattatatgctggggagccattatttctcccaa

SEQ ID NO: 488027 - DNA, 679 bp, Homo sapiens
ggatttggggagagcaggcatagagacatagtactcccttttgaaaccaagaaagaaataccatccgtaattctgagcttttatgtaaaacaaaaatatcctcaaatttagtatttcttccctgcttctccaatgagggatagcatgactgcttgttctccagtgatagtaaataaaatgctggaattcagggactccagttagcagctctgactgcttgtctgcttcttctgtaggaagggaattggtgacatctgtctcagtgagcatctggtgacagcccmagaacacacaggcactgagagggaccacatccttctgaatccctttggattgaagagcttgcctctgaaggccttgggagtcagaatcagcttggaagatttttatgaggtaaaatggcaggcaagtttggatgaattaaaagaaagagaatttcacatgccatgaaaacttttctttaaaataacatatgatttcatcatatgacataccgttgcatcctggtttgattcacaaactttgaagaataagctaacagagggagtggcataaatttctggaaaaagcttccctgattcctctctggcagggctgccttacgacttaggcggaccccagaaacatctgccttcatgggccccttctgccattaaaaaaaatacaaaaattattcttt

SEQ ID NO: 488028 - DNA, 318 bp, Homo sapiens
ggttggccttttctttctcagcaacattgcagagagaaagaggtgagtgtgtgagtgagtgagtgagcgtgtgtgtgtgtgtgtgtctgtcgtgttgaaaggcttggggraaaaggagcacagctctcccccaggaaagcctcagatcagcagatgggagggaacctagggtcgccttcctaggtctgagcgaagtgtcccagccgctccccttacccctgcggtgagccctgcgtcctggaacggtgccaggactcctgacagagcctggcaggtcggtgggtggcggggagctgggtgttctctttgcagaagaac

SEQ ID NO: 488029 - DNA, 607 bp, Homo sapiens
tatgtaaagagatgactggctgtgttaaggagttttgtccttgtcttaaaaacaataggagggggcygggtgctgtgactcacgcctgtaatcccagcactttgggaagccgaggcaggcggatcaccaggtcaggagatcgagaccatcctggctaacatgatgaaaccctgtctctactaaaaatacaaaaaattagctgggcgtggtggcgggcgcctgtagtcccagctacacaagaggctgaggcaggagaatggcgtgaaccctggaggcggagcgtgcagtgagctgagattgtgccactgcactccagcctgggcaacagagctagactctgactcaaaaaaaaaaaaaaaaaaaaaagaacaacggaaggttagtgagagtcagtggcatggctcaatgtgcgttttgagaggatcactctgctgtggtacatagagcactctgggaagaggctgacagtggatgggagtagacaagtcagtagactagtgctgtgatccaggcaaaagaggatgagtggatggattatgcttgtttaggaagtaaaatttgcaggactgagaggatattaagggagagtcatgagagggaggaagat

SEQ ID NO: 488030 - DNA, 607 bp, Homo sapiens
tatgtaaagagatgactggctgtgttaaggagttttgtccttgtcttaaaaacaataggagggggccgggtgctgtgactcacgcctgtaatcccagcactttgggaagccgaggcaggcggatcaccaggtcaggagatmgagaccatcctggctaacatgatgaaaccctgtctctactaaaaatacaaaaaattagctgggcgtggtggcgggcgcctgtagtcccagctacacaagaggctgaggcaggagaatggcgtgaaccctggaggcggagcgtgcagtgagctgagattgtgccactgcactccagcctgggcaacagagctagactctgactcaaaaaaaaaaaaaaaaaaaaaagaacaacggaaggttagtgagagtcagtggcatggctcaatgtgcgttttgagaggatcactctgctgtggtacatagagcactctgggaagaggctgacagtggatgggagtagacaagtcagtagactagtgctgtgatccaggcaaaagaggatgagtggatggattatgcttgtttaggaagtaaaatttgcaggactgagaggatattaagggagagtcatgagagggaggaagat

SEQ ID NO: 488031 - DNA, 607 bp, Homo sapiens
tatgtaaagagatgactggctgtgttaaggagttttgtccttgtcttaaaaacaataggagggggccgggtgctgtgactcacgcctgtaatcccagcactttgggaagccgaggcaggcggatcaccaggtcaggagatcgagaccatcctggctaacaygatgaaaccctgtctctactaaaaatacaaaaaattagctgggcgtggtggcgggcgcctgtagtcccagctacacaagaggctgaggcaggagaatggcgtgaaccctggaggcggagcgtgcagtgagctgagattgtgccactgcactccagcctgggcaacagagctagactctgactcaaaaaaaaaaaaaaaaaaaaaagaacaacggaaggttagtgagagtcagtggcatggctcaatgtgcgttttgagaggatcactctgctgtggtacatagagcactctgggaagaggctgacagtggatgggagtagacaagtcagtagactagtgctgtgatccaggcaaaagaggatgagtggatggattatgcttgtttaggaagtaaaatttgcaggactgagaggatattaagggagagtcatgagagggaggaagat

SEQ ID NO: 488032 - DNA, 554 bp, Homo sapiens
acactaaactaggaaattctggaagaaaattagtttggtgaagttgtgttgaatttgagataataattcttttgagatatccaaatggaattataaataggaaaccagaggtttggaaatccraggagaaatgtgaattaaggtaaaaaattattgagtctggccaggcatggtggctcacacctgtaatcccagcactttgggaggctgaggcgggcagatcacttgaggccaggagtttgagactagcctggccaacatagtgaaaccctgtcactactaaaaatacaagaattagatgggtgtggtggtgaatgcctgtaatcgcagctatttggcaggctgaggcaggagaattgcttgaaactgggaggcagaggttgcagtgagccaagatcacgctactgctctccagcctgggcaacagagcaagactctgtctcaaaacaaaaaaaattactgagtcactgtcatataaaaatatatgttagttattaatttattgactctcagctccaaatcaaatttgtgatgttggagctggaccctgtaga

SEQ ID NO: 488033 - DNA, 375 bp, Homo sapiens
caaccccattagcccccaagtgaccctaaggaacttcctggaccccctatggcaccatggaaaccagggaaaaccagagtttaaggtttttacttcacagcagagaaaacagagggccagagaaggaaaaggtcaaaattcgagttagcagataagatgccactggctgggctcagttttccctctgaaattcctcacaatttcaaacaactttkattgcatcaggaagaaaagtgcaggcagtgttacgttgtagagagtgcaggctctggagtcacaaaggctggctatgaattgcaggcccgcttcctgcaaactatgtggccctggacaatcacttagcttctctgagcctcagtttccccatctataata

SEQ ID NO: 488034 - DNA, 588 bp, Homo sapiens
ctgcctgtgacagtctggatgaatttcacaaacacactgttgaacaaagtaagccaaagacccttgtcactttgttctgtgtgccaggcatggtgctgtgtgtactttatatacgtctcagacctactgtatgattgcattatataaagtacaaaggcaggcaaagctaattgatgcagttggaagtcacaagagtagcaatttttgggcaatacagcctgggtttctcagggtgccaatatgttctgattcttgttcccgtttgggcatgagtgtgttcaatgtttgaaaattctttaagcygtacacttatcataagtgcacttttctgtatgtatttaagttttttaagtaagtttaaaaaaaaagaacaaaggctattcactagggaaaaggagagtcttggaggggaggcttgattgtaggtctttacgtatctgagtgagtgccaggtggaaggtgtgaagttcagaaaagtaaagctggaacatggtgagagtgactgggagacacatggagctcagtgtagggtgagctttttgagaattaggtcttttccccgtgcaagctatgctaccttgaaaggca

SEQ ID NO: 488035 - DNA, 507 bp, Homo sapiens
agaagctcggaagagatgtctccaagacactttctaccatgaccttttgaatttcataactctctaattccagaattcaaagagtgactgttttacctcccactgaatgattcctctgagaaaaaagctctctgctagctaagctagccaagacaccatacctgaagataatacctaaacttctgttkgtgtcccaggaatcccaaattgatgtcacaccaaaacaatgtcatttatacaattcattatatgtcactcattaatacatttgcttagttgattttcattaaaatcctgcagggagcattattacactcatttttcaaaagagataactgagtcgtaaaaggattaaattatttgcccaggtcacacggaaagaaattaacgtggccacggcataaaaccagattttctgtttttaaacatatttttttcgctgacctccaccctgtaagagcttttattaccaagcgattgagaagcacaggctcagggacactgaat

SEQ ID NO: 488036 - DNA, 627 bp, Homo sapiens
ttcacctgcaaggaccagaagacctgatgaataaatagagtttaatttctcaagtataactggtctggagtaggttatgttgggttgctgcagtggttcaatgaggtcaataggaaccaggttctttgtctttgcactcagccacaccaagctagcatgctagcttgtttccttaatgtagccaggtacctttgccaggtctaagtagccagacccactgtaaaaacaggggtaaatgaagctctagtctggctgtcctttttatcaagaaaggatacaccttcctgaaaactcaacagtggacttcagcttattcaaaagtgtgtcacttggtcacgcctagctgcagggcagggtgcagaaacaagtgtttatagattttccagcctccctggtggagacaggcaagagagaaggggcctgggaatggtgttgggaattggcttccccaacagtgtttgccacacacactttccagagccacatgcatttgctygattccttccagaagtgactcccacaacccaatatagtgcttcaactgtggtctgattggcctgaggttgaatgggactagtgccttccttgccaaaaaagccatctgattagtactgtatcatttggggc

SEQ ID NO: 488037 - DNA, 325 bp, Homo sapiens
cattctttctccttagctaacaaccccaaggcttgtccctataatactaatagtatggaggcctgtcatcgctgcagaaatccaggacactggagtagagaatgtcccaaacctctggcttacaagctgctttcaggaccctgtcttcatttcaaacaagagggccattggaagagcgattgtccctctttccctcatgagatgggaccacctcttctttctgtgctgtcatagccacaaccttgccaacctacctgatgagaaattcctgcagaaygaggactagggcaagggcaaggacaagcacctctaacactattcctgg

SEQ ID NO: 488038 - DNA, 582 bp, Homo sapiens
atattcacatttcatttgtcaataaaacttaggtattaccacatgaaagatttttccccagccctcacatccagtagtcatagggttacaagcacactaaaaaataagcggaattcaaattgagatgtttggaaaaactatgcctatgtttgcctacacaaacataacgtgttttatgtttgtgtaaaatacacaaaaatgctagtgtttttaaattttatcaataagctaagttataactgtaaatggttgaaaggccactggcacatattatatactattttgtaatatctgataatctcttcagttttaaccatcctctgtgccattctcagtgacagtatatttgtcggatttcattcattcattcaagcacttataagcatttactacaatatgccaatatgcaaggtgctgaagtaagttagacattattcctgtactcaaaaaactcatcttagaaaggggaaaaaagacacctctcatgattccatatcctgtatctctctcccacctggagcacttctattcaagttstactgttgcctcatccttcaccctcattaaatcttggtgtttatt

SEQ ID NO: 488039 - DNA, 548 bp, Homo sapiens
gctagggaggctgaggcaggagaatcacctgaaccaggacccaggaggcggagtttgcagtgagctgagattgcgccactcactctagcctgggygacagagcaagagtctgtctcaaaaaataaataaataaatacaaaagaagtttacagacaagcaaattacttttgactcattatattactaatctcaaaagatgtgaccagttttattgcttttatacacatttgtctatttcttagggatctttgtatccttttaccttcacattaaaaaggtcaaggagaaaccatctgcctgggtacaaattcttgtagtgtaaaatagaaagatcataggcctttgaatcaaagtcttggatttgaatcctgccttgatcaaatgttgtgtaaatttggaaaaagtcaactaacttctctgaccttcagtttattatttgccatgacagggattatattagatggaatgaagagctgtgtgggttaaatgagattatttatatcaaagtggctaatatattcctagcacttaagtgagggtcacaataa

SEQ ID NO: 488040 - DNA, 548 bp, Homo sapiens
gctagggaggctgaggcaggagaatcacctgaaccaggacccaggaggcggagtttgcagtgagctgagattgcgccactcactctagcctgggtgacagagcaagagtctgtctcaaaaaataaataaataaatacaaaagaagtttacagacaagcaaattacttttgactcattatattactaatctcaaaagatgtgaccagttttattgcttttatacacatttgtctatttcttagggatctttgtatccttttaccttcacattaaaaaggtcaaggagaaaccatctgcctgggtacaaattcttgtagtgtaaaatagaaagatcataggcctttgaatcaaagtcttggatttgaatcctgccttgatcaaatgytgtgtaaatttggaaaaagtcaactaacttctctgaccttcagtttattatttgccatgacagggattatattagatggaatgaagagctgtgtgggttaaatgagattatttatatcaaagtggctaatatattcctagcacttaagtgagggtcacaataa

SEQ ID NO: 488041 - DNA, 626 bp, Homo sapiens
ccgtattcgatccacatcacatggcctatgcgtkcagcgttgtctgccttccttgcctaccttgacaaagatacttaaacaaggacaggtaattggccaattagctatccagtgatacatccttcatgttctataagagagaaagttcgttaactaatccatggtatgaaaaggccttcaagggctctttgattcaggactgaccaagcagcagcagcagaataaaagaggagacagagagaatcaaagaaactggaaaccatgtgggttgggccctgagagatggagagagcactgctagttcccagtagcacctcctccagtttccaagagacctttccattgttcatatcctgtgacaccccatgatactgcctgttgcctagtgtttccttaaagttaagcatcttctacttgggttaggtttagagatttttttgtttgtttgtttcataaaacaaatgatggtggaataaagtaggcaaaaatttcatgtcttgcataacatttagtaaatagatttcagaaaaataggaagttgcaacatttcatttggaaagttacaagtcttttctgacagagaccaggaggtcctgcaaacagcaaaacaaaggtaagagtgaggg

SEQ ID NO: 488042 - DNA, 626 bp, Homo sapiens
ccgtattcgatccacatcacatggcctatgcgttcagcgttgtctgccttccttgcctaccttgacaaagatacttaaacaaggacaggtaattggccaattagctatccagtgatacatccttcatgttctataagagagaaagttcgttaactaatccatggtatgaaaaggccttcaagggctctttgattcaggactgaccaagcagcagcagcagaataaaagaggagayagagagaatcaaagaaactggaaaccatgtgggttgggccctgagagatggagagagcactgctagttcccagtagcacctcctccagtttccaagagacctttccattgttcatatcctgtgacaccccatgatactgcctgttgcctagtgtttccttaaagttaagcatcttctacttgggttaggtttagagatttttttgtttgtttgtttcataaaacaaatgatggtggaataaagtaggcaaaaatttcatgtcttgcataacatttagtaaatagatttcagaaaaataggaagttgcaacatttcatttggaaagttacaagtcttttctgacagagaccaggaggtcctgcaaacagcaaaacaaaggtaagagtgaggg

SEQ ID NO: 488043 - DNA, 561 bp, Homo sapiens
caacaaattacaatagattttagtggcacaagccttctgagactcttaaaaccaggaaggaaaaatattgtttactaagcatgtatgacctaagggtgctgtttcttggcagggagccacaggttttcagggggcataccacaattcctgccagtcttttctttcctagcactccccaccaaggctgcacagaacttgctttgggaaatgctattatatccatatgaaaccttgatggttgcctaggaaacaaggcaamtatatgactaagataattctaatcaaatcatattttgcactaaaatattgcccagaccatcacagttttattttacatgtcacacagttaatatatttttacaattagtaatccattctgattgtcttaataatcatgatttaagtcatcctatgattgcctatgactcagttgtcttttgcttggctcatggcgaggcattaatccatgagttaaataaaaattaactatttaccatatgattatcaaaggatatcacaaggagttttactctatattctgcatttgaaattatttgagtc

SEQ ID NO: 488044 - DNA, 455 bp, Homo sapiens
agaagaggccacacattcccactcacgtctctggcatctagtatacagtaactaatatcaaaaaaatttccaataaaggtccatcctcaaagactaagaggtctcaactcagacagtacccccaaaaaaagacgtgtttcactgtccatctctcaaggagatgttgttttgttaacctttctggcagaaacaaatgtgtcccctgagtagctctaaktggtatttggcaaagcacgtcccttcaaatactgattttcataccacgaataatacatgcctaggtaagatatttttttaaaactgaagtattattttcatagaataagatagactgtggctttaaatgactttttcccaatattctatctttataatctgcagagttgcagtcatttttcagactctgagtgagtatgccttttctccctttatcttatgtctctttctcattcccc

SEQ ID NO: 488045 - DNA, 456 bp, Homo sapiens
actttgggaggccgaggtgggtggatcacctgaggccaggagttcaagaccaacgtggccaacatggcgaaaccccatctctactgaaaaaaaaaacccaaaatttggcagggtgtggtggcgggtgcctataatcccagctacttgggaggctgaggcaggagaattgcttgaacccaggaggtggaggttgcagtgagccaagatcccaccattacactccagcctgtgtgacagactgagcctctgtctcaaaaaaataaaagaaaagaaaaacacaattaatgctcttttagcagttgccatccacagatggctaagtgttagccagctcagcggagagtcaaggtgacagcctttttacaccctgccctcttggtacagagttaagtgttaaccagctcagtggagagccagggtgacagscttttacaccctgctctcttggtacccggg

SEQ ID NO: 488046 - DNA, 579 bp, Homo sapiens
gacctcaagtgatccacctgccttggcctcccaaggtgctgggattacaggcttgagccacccaggcccggccgcattctttcatttaatcctcataatgacactttgaaagaggaaagtgaagattagcaacatgaaataatagacaaagctgcacagataacacacagtggagtcaggatgcagacccgggtctgctgggtccaagcttgagctttcagccactgcactacaatgcctccctcatgcaccatcatgacccttatcccatgatatgatctttctgcacctgttagtcacaagcggtagactgtcggctgtttagagtcaggaactgtagctcttttgtctatttatcctgagtgcctagcacagtacctggctaagaatgaatgaaaggaargaagaataaatgaacagatcttctccaaagccccaaggaaggagacagcaccattgttcctcctaggtcaatacaactcaaaacctccattcccatccaagcatgccagagggggaggggataggtggctgcatatggaggctgccccttccctgcagtgcacccctcacccattc

SEQ ID NO: 488047 - DNA, 642 bp, Homo sapiens
taactatttgttgaaggaaggaaggaagaaaggaaggaccagttttgcccctcactctcctccttctgacaatcatgtccatcccccatctctcctttcccatcaagaccccagcaagtccctagggtcgggactggggatataaaaggattaggaagggccagactcagtggctcacacttgtaatcccagcattttgggaggccaaggcaggtggatcacctgaggtcaggagttcgagatcagcctggccaacatggcaaaaccccgtctctactaaaaatacaaaacttagccgggtgtggtggtgggtgcttataatcccagctactcaggaggctgaagcaggagaataacttgaacacaggaggtggagattgcagtgagctgagatcgcaccattgcactacagcctgggcaacaagagtgaaactccatctcaaaataaataaataaataaaaataaataaaaggattagacctttctcaccttctgcacctggagccacttttgccatgtgtcacatacaccctgtgacatcttgacaagggagtgagtctcaaagagggacgcaaccccctcacaccctaatcaggaatgagtgggygtgcagagggttatttgcacagaaaaccacagca

SEQ ID NO: 488048 - DNA, 583 bp, Homo sapiens
tttgttttgttttgttttgtttttccgatatggagtcttgctctgtcacccaggctggagtgcaatgttgcaatctcggctcactgcaacctccgcctcctaggttgaagcgattctcctgcctcagcttcctgagtagctgggattacaggtgtgcgccaccacgcctggctaattttttgtatttttagtagagatggggtttcaccatgttagccaggttgttcttaaactcctaacctcgtgatccgcctgccttggcctcccaaagtgctgggattagaggcgtgagccactgtgccccgcctktttttttttttttttttttgagacagagtcactgtatcccaggctggagtgcagtggcgcagtctctgctcactgcaacctccgcctcctatgttcaagcgattctaagttcttaacccatgtccaaggattccataagccacctgaattcacatgcaaaaaatcccaaattttgtttttgtggatgcatgtgcatttttctagggatagattagatattacaagatttccaagggcatctatgacccatgaaaagttaagaatttcactttca

SEQ ID NO: 488049 - DNA, 523 bp, Homo sapiens
caagaataagatttgtcaggaaatattctctctgtcctagagaggagaaaattatggcagagagttgttttcataagactgtgaaacctgccagtgccagagatggcattgggtacagtagtcctgtcccatctgtttcactttgctatgaatttgagaaaaacactagccctggaccagacccacagaagacataagcaaaatgcacttgggatctgaaggtcagaaatgatgatctgatgtaactgaacttgacgcacctttgggagccatcatctctgcaagtccaccacattgttcttagttactctgtgggttccctttatcattccttcttctctgtggttttccctgagtctttctcagacctacacagccatctctgttttcatagcttttctatcttccacatattaaaacatattctctaaaactaccatcyggaaagaatttagatatgccaatcccacagaagtgacaacctcaggtgaatttacgtttgaacaaggaacaatgatggtag

SEQ ID NO: 488050 - DNA, 595 bp, Homo sapiens
aaaagaataaaaaaaaaactaaataaaagggagaaacaaaaacacaggtaaaaccaacaaaaaatgcctcaagaataagatttgtcaggaaatattctctctgtcctagagaggagaaaattatggcagagagttgttttcataagactgtgaaacctgccagtgccagagatggcattgggtacagtagtcctgtcccatctgtttcactttgctatgaatttgagaaaaacactagccctggaccagacccacagaagacataagcaaaatgcacttgggatctgaaggtcagaaatgatgatctgatgtaactgaacttgacgcacctttgggagccatcatctctgcaagtccaccacattgttcttagttactctgtgggttccctttatcattccttcttctctgtggttttccctgagtctttctcagacctacacagccatctctgttttcatagcttttctatcttccacatattaaaacatattctctaaaactaccatctggaaagaatttagatatgccaatcccacagaagtgayaacctcaggtgaatttacgtttgaacaaggaacaatgatggtaggat

SEQ ID NO: 488051 - DNA, 625 bp, Homo sapiens
cactgcatctcagcatagtccctgaattgaatttactagtaaaaccaactcagatgaatttttatttattatttagccaatgagaatgtttccaaggtcactaattagcagttttaatctctttaaacccccatcttatttggattcatggctctgatctacatcttgtgttcccatctgcatttactttgatttgccacttggacattcatactgaccccatctgcacaatggtgtctgccagcccagaagctggtcagttgcattaggggtctggatgctgggcctggagatggcaatgaggacagtaggcagcagtgacagttatcagaggccaagacccaaagccaaagcagatattcagttgattgggcctaggagttkggactaaagcgcaaggtgcacggcaggtggactgatgagattgcagagcagcagcagtttggagttggcaaggttttgctcacagtttgagtgcagcagccttattagcagggttgaagcagtggtttcatccactgaagtttcctgacaaaaacattgtcccactttcaaaactcaaataaaatctcaacaggaaagaaaacctcctgcgtgtggaaaggtattgctctttgaccaagca

SEQ ID NO: 488052 - DNA, 625 bp, Homo sapiens
cactgcatctcagcatagtccctgaattgaatttactagtaaaaccaactcagatgaatttttatttattatttagccaatgagaatgtttccaaggtcactaattagcagttttaatctctttaaacccccatcttatttggattcatggctctgatctacatcttgtgttcccatctgcatttactttgatttgccacttggacattcatactgaccccatctgcacaatggtgtctgccagcccagaagctggtcagttgcattaggggtctggatgctgggcctggagatggcaatgaggacagtaggcagcagtgacagttatcagaggccaagacccaaagccaaagcagatattcagttgattgggcctaggagtttggactaaagckcaaggtgcacggcaggtggactgatgagattgcagagcagcagcagtttggagttggcaaggttttgctcacagtttgagtgcagcagccttattagcagggttgaagcagtggtttcatccactgaagtttcctgacaaaaacattgtcccactttcaaaactcaaataaaatctcaacaggaaagaaaacctcctgcgtgtggaaaggtattgctctttgaccaagca

SEQ ID NO: 488053 - DNA, 530 bp, Homo sapiens
actagcacattctggaaaaaaagcaagttgaacatatctaccatcagtcctctcctacttacttcccaccccaccctatccactacccccactgatgctatgtttgcatcatcaaagtcaggggaattgagaaaagagattatcaaaataaattattaaaatccagaaaacagttttatgtgaagtaattcaggaagatctagtgttcattttgcatggattgtccagataattggctcttcactcckctgccttcccagtgcacaggtattgctaaagtggttaggctttaatgttttatgtttttagtttcaaactatgggaaatggagatttgaagaggcatttattccttgtcatcattttgtgtgctctgtgagaaggtggttatatgtttttgctggtttgtgtcccacagtgttcaactgcacattattctgatgaaaatccacaatgtctttgagcttctggttgtgtaatgctggggtttaaagtcaccatttgtgggtttggcatcaattaatatttagc

SEQ ID NO: 488054 - DNA, 530 bp, Homo sapiens
actagcacattctggaaaaaaagcaagttgaacatatctaccatcagtcctctcctacttacttcccaccccaccctatccactacccccactgatgctatgtttgcatcatcaaagtcaggggaattgagaaaagagattatcaaaataaattattaaaatccagaaaacagttttatgtgaagtaattcaggaagatctagtgttcattttgcatggattgtccagataattggctcttcactccgctgccttcccagtrcacaggtattgctaaagtggttaggctttaatgttttatgtttttagtttcaaactatgggaaatggagatttgaagaggcatttattccttgtcatcattttgtgtgctctgtgagaaggtggttatatgtttttgctggtttgtgtcccacagtgttcaactgcacattattctgatgaaaatccacaatgtctttgagcttctggttgtgtaatgctggggtttaaagtcaccatttgtgggtttggcatcaattaatatttagc

SEQ ID NO: 488055 - DNA, 549 bp, Homo sapiens
caaatatatcagggtatctgagcctcaaagcccaaggaaatcctatgagtgcaagaaggatggaaatagatacgatgaagggtagccacatgtagttgaatggtaatactattaggaaagaaagtagagtagttttcttctatttcattgtaacctacatttcccatcaagttcttgagttggggaggggcatgtggttgtttggagatgggaaacaaactcaaattacacaayccatatttgccaacacttgactataatttgatagggtttacctgaaaggaggcatcaagctctctcacatttttcagcacagaagtgtaaaagactcactgctccagtcgtgtctgtctgtctctttcagtctggctctgcttgattgtctttctctttctctttctctttctctcgtaacagccatagtttaagaagagatatcttgaaaacacggaaagagaaaagtcaatacaatatttcctaattttttaagaggtcagagaagggagttactgtgtggcctggagcaggtgattctgactaccaagggaa

SEQ ID NO: 488056 - DNA, 549 bp, Homo sapiens
caaatatatcagggtatctgagcctcaaagcccaaggaaatcctatgagtgcaagaaggatggaaatagatacgatgaagggtagccacatgtagttgaatggtaatactattaggaaagaaagtagagtagttttcttctatttcattgtaacctacatttcccatcaagttcttgagttggggaggggcatgtggttgtttggagatgggaaacaaactcaaattacacaacccatatttgccarcacttgactataatttgatagggtttacctgaaaggaggcatcaagctctctcacatttttcagcacagaagtgtaaaagactcactgctccagtcgtgtctgtctgtctctttcagtctggctctgcttgattgtctttctctttctctttctctttctctcgtaacagccatagtttaagaagagatatcttgaaaacacggaaagagaaaagtcaatacaatatttcctaattttttaagaggtcagagaagggagttactgtgtggcctggagcaggtgattctgactaccaagggaa

SEQ ID NO: 488057 - DNA, 458 bp, Homo sapiens
taaaatcgatcatgcctgtgaatagcctctgcactacagattgggcaatatagttggtaaaaacaacaacaacaacccaggctcactgataattggtaatatatctgtcatctgggtttcgatgcaactgtttcccctgacttcctattatcaggaaaggaaaataatatgcctttgtcagtcttgaattaatccaggctaatgtcatcattctcataattttgccacagtttttggtgaaaccttattaaaatgtcaagctaattagttttcagtactattacytaaagcctcttgatttcccaatacccattataaagtcatgattcatgatgtactgagaaaaacttacaggcaaccttttctctgatagatttcccatcatatcctgagcagacacgtctatcattctatcacaaattccgcctgtagtcatacttaagcaagttaatttgtgg

SEQ ID NO: 488058 - DNA, 458 bp, Homo sapiens
taaaatcgatcatgcctgtgaatagcctctgcactacagattgggcaatatagttggtaaaaacaacaacaacaacccaggctcactgataattggtaatatatctgtcatctgggtttcgatgcaactgtttcccctgacttcctattatcaggaaaggaaaataatatgcctttgtcagtcttgaattaatccaggctaatgtcatcattctcataattttgccacagtttttggtgaaaccttattaaaatgtcaagctaattagttttcagtactattacctaaagcctcttgatttcccaatacccattataaagtcatgattcatgatgtactgagaaaaacttacaggcaaccttttctctgatagatttcccatcatatcytgagcagacacgtctatcattctatcacaaattccgcctgtagtcatacttaagcaagttaatttgtgg

SEQ ID NO: 488059 - DNA, 496 bp, Homo sapiens
ctgatatggtgcatttcttccaagaacatggagttctaggctgatccgctgttttcccgttagacaggtctcaagagggatgacccagctcagtggttctctgtagggacagtccttatcccaggcagcattttgaaaattgctggaaacacttcttgtcacawgattggaggcacttagtaggtgggctcagagacactaggctgccgcagtggacaagagatttctgcaaatttctcatgactttgtaatgttctcaccgacattgacatgataagaagatgaaaaacctcttcataattatctacacttagatgaaactcagatttatgtgtaaacacaaagtatgtttgcgtggttttaatacacgttgaatttccaggaaggtaaattcagtgggacgattgtgctactattttttggaattttaccaggaggttttctgtttaaccttttcggaaaaaccatatcaccagtggcaatgctaatcataata

SEQ ID NO: 488060 - DNA, 621 bp, Homo sapiens
tatttatcctttgagcacaattccacatttttgagttatatttagctagcattccttgttgacctgttttcttgactatgagcacatcagaaagagccttaccattttctgccataaataaatccttcattagtttcttaatcagattcaagagcaaggtgagagaaagtggctgagcaggaggtactgtaaagacactcttcatctctcatcttcacgctgggctaagcttyaagtcagtgttagggatgacacagaaattgaaagcacagttgatgagtaagtaaccagtggtgaaaagggacctgtgcggtgaagggttaactcagcaggtcttagttgtccaaaccctgcacattaaaactctggtccttaactggctcctgggaggtaacctctaagcccttatgtggcagaataggcaagcccccaaaatgggggttagaacaggagggttcttggcttcacccaagacagaattcaagggcaagccaatggtgttagacagcaatcttttttgaatggtacttctccttgtggagcaaggcacaacctatgggccattgacaactgtatttatactcatgttaacccacttttaattacctgcaaattaagggg

SEQ ID NO: 488061 - DNA, 627 bp, Homo sapiens
taccattttttagaagaataaattctaaataactttactattgtcattcayagtgtattaggcttgaaacgctcaatgataggaagccatgcacaaataatttgatactgttaatggaacagcctcattaattcaatcaaacaagttagaactatctcagtttgctcaaagctgacaaatcaatattaaatatacagacacagcttcagagaattgattctactcctcctactcttagaatcattccaggtataggtgtattattctggaaagaaacccaacacacaaaatgttaacctccaaaaccacaaagcaagcatgcaaagggtaatatttcttttttcaaatttttatctacaattggtttccctcttggtacttggaatgctctcctcagccagaacatttaaaagagtttgttttacaaaattttatttacaggttttttttttttcagacacttttcaactatgtaaagcaaagtagacctgaatcaagaaccaatgtaagacaagatttacctgacaaggatcttgattaacatttcacttttgataaatttggtccttccctgggaatccacagaaatatgctcctcatgttaggtagtgagatagacattagcag

SEQ ID NO: 488062 - DNA, 554 bp, Homo sapiens
aagataagattttgtgttttcttttttccccttcatgaaaagtacagcattgtgggaccactaactcttgaggtgacatgacaaagcaaaagtctgggcacactactcattatcctccaaaatagacagtgagaattcaccaaagattcactctgagaccttgttgcacgggcttggctgaataattggccaaataaactggaagacgggcatattcttactttttaccctaatctccctctctgttccctctttcctacgtgcttataaacctgttactaccttttctctgtttttccagtgggattaatgatgaagactgaaatgacccatatttacttttttattamaaaaaactcaaattactaaaatgaacaagtgctagcaggcaagaatttaatgttaaattaacttatgtcatttcagttccagttaattttgatcccaatttagtatctagaccaaaataaaactttcctcacattcaactttatctgccacttaaaagcaatcatatcacttcatttactgaattatattctcttaggttttgc

SEQ ID NO: 488063 - DNA, 635 bp, Homo sapiens
agagcttgctagagtccaaggagacatagacttgatactacctggatatttattatttaaatggggtcagaatcacagacttaatccttatagggtttttttgtttgtttgtttgtggtacagacacattataaaccgtagtcatctcatacttgcaaaacggcctaatagaattgggagatagaatgcaaatttaccaataagaatccttggctattactgaaaagtaatcttgaagatttcggagatgggtagaactttatatatccactttacacaagaagaaaccaatatctttgcatatgaaggacatgtttataatatttttagagatacttatctttcaaggcaaagtggagagaagtaaggtkaatatgttgtttgaaagttaaaacaagaatccaaatcaaatcttccttgcaacaaagtcaacatttgttctgtactaaccaatggaacttttctgtggtgatggaagtttcctatctgtgctgaccaatatgatgccactagccaaacgtggctactgagtacttgaaatgtgatcagtgaaattgaagactggaattttaaattttgtttaataaaaattaatttaaatataaacaaacgtgactagaggatattacattgga

SEQ ID NO: 488064 - DNA, 639 bp, Homo sapiens
tactaagttctgaaatggaaatcatgctgtaggtcatatgccaaggtttacataggaaaagtctcatctcctttatctctactaattttattaatgataaggctactggtgacctagaatagraagcatgagtctttactcccgttccaggctcaaaacccagcatagcaggtccaagctgtgatggaaaaatctgtaggcccatgactcatttgctcttcagaggggagcccccaattttcctctgaaaaatctcccttatcctacttacagtccaaaatgtttatatagtattggtttcatctcaactccagcttctatgggggacaagttattaatttggcttgtgtgagcatttcattgcctccttactcacccaactactacggttggatcaagaatgagtccatacccaatatgagcctttgagacacaatctgggttttattactaggacttgtgtattttgttgaaaaatagaggcatagttcctctttttgctaaacctggacacgtagaaatataaggtctcagtttccatgagctgtatgtagaagaattttacttgagagtgatactaacagaaagggaagataaggctagaggaaaagaaagaaagtccctgttacttggtagcac

SEQ ID NO: 488065 - DNA, 482 bp, Homo sapiens
acctatataacaaacatgcacatgtacccccctgaacttaaaagttaaataaattaattgattatcttcttttgaaacatttctcaaactttccatgccacaattygcacacctgggaaataaataaagtacatgaaaaataacatagattatggaaatcttttttgagatcattagaagaaaaatactaaatggagtcatcaaggcattatatttatttgttcataacactatgagcattatttctatcatccatgattaaaaattctaaagcattcatatttaagaaaatatgtataccatagtggtggggctgagaattcaaaaatattacttttactaataacctcagttaagaagtcagacagccaggcattgagccatcagcagaatatattccaagttaggtatttagacaaagaaatctgatgttccatgtactcaaaatttattttcctcttattatttttgatgagctgatg

SEQ ID NO: 488066 - DNA, 482 bp, Homo sapiens
acctatataacaaacatgcacatgtacccccctgaacttaaaagttaaataaattaattgattatcttcttttgaaacatttctcaaactttccatgccacaatttgcacacctgggaaataaataaagtacatgaaaaataacatagattatggaaatcttttttgagatcattagaagaaaaatactaaatggagtcatcaaggcattatatttatttgttcataacactatgagcattatttctatcatccatgattaaaaattctaaagcattcatatttaagaaaatatgtataccatagtggtggggctgagaattcaaaaatattacttttactaawaacctcagttaagaagtcagacagccaggcattgagccatcagcagaatatattccaagttaggtatttagacaaagaaatctgatgttccatgtactcaaaatttattttcctcttattatttttgatgagctgatg

SEQ ID NO: 488067 - DNA, 516 bp, Homo sapiens
acagtctgacacaatctagcatcttgtgggtagaggccagagatgctgctaaacatcctacaatccacaagacagcctccacagcaaataatcatccagtctaaaatgtcaatattgccaagrttggaaaaatcctgctttatagcctcagtttcctcatctgtaaaatggggattatgagttatctgcctcataaaatttatgtgaggattaaatgaaatatagcatttaaagaaactgacaccatgcctggcacatagaaaatgtttagtgagtgttagttattgaagtaattttttatgcatagtcaccagcctataatttaaaggccaaagattttgatgataaatgtggagaaaacaacttctttaaatggagaaatggtcctgatggacctagtgttggggggctgggggaaacaggtgcagactgcccaggtgctggcactaagagggctgtgttgcctgtgagcaatttaaaaacaataatgaactggactaaaatcagcctatttgt

SEQ ID NO: 488068 - DNA, 616 bp, Homo sapiens
tgtcttttcccttcatttcccagcattatgaacatgacctggagcatattagtttactcacaaaatattgatgattgtatgactgaatgaataaagaytgaacaaagtgaggctcagagaaattatatggaacttaatctgtggcttctgtggctagttcaacatgaagtcagcatcagtaagcaagatccaggaagtgctgaaatctctaagtgttggggaacacagatgagtacagctcaaggagtcaaaggagagctggtatttgagctaagtcttaaaaagggtaggatgcagacacgaaggtgagggcaatcaaagcagggtacagcgtgggcaaaggcagagaggtggagacattcagggcaggcgtgctcccctacacgaacaaaatatcaaattggcagagataagcaaagaagagaaaagcgttgacacatcagcttcccactctgcagccttcaagactgtgggagagtttttgcaactgacactagagttaagggattcttaattgtaccttttttattttttagctcggctgctgcaatgcctagcctatttctactctgcttccattatgaagttctcacacagctcaaatttaattactttt

SEQ ID NO: 488069 - DNA, 627 bp, Homo sapiens
ggaataaagcatacaattcaaaaacaaaactataaaagccttggggaaaaaagggaatttttatcatcgttgaatgatcatgaatcctaatcaggacaaatcccaaaaccataaaaggaagactgacaaatttgatctaaaaaaaagttaaaagctaccgtaaaacaacataccacataaataaaggtaaaagaaaattaacagaaagggagaaaatatttgtaatatacagcacagatggatactccatttaaaaatcacccatacaaatcactagagaaaagaaaacaacacaaagggcaaaaaaggttcttagtagamgttataaaatggttattttattcaatttcacaagtaatcaaagaagtgtaaattaaaacaacttacaaaattgaaaaagattaataatgtggaatgaggttgtagagaaatggatactcatacactgttgccgtttttgggggaaaaattggcactatctactaacattgaattgtacatatcttaagccttggtaatttgctacacagcaatagataaataatccttgggatatataaactgatacttggaagtaggatgcagccataacgaacaccttaaatatgggagtgattttggaatctg

SEQ ID NO: 488070 - DNA, 536 bp, Homo sapiens
cacctctgagctaatagcaagtcacagcagtgcaggtcccaggagagtggcactccagcctgaggaaggagtgaccccttcaagytgggagtctctggatccagaggtcagcctcctcttcctgccccatgaccatcaaacactgtgggcactgctgagagacagagggactcagaagggtgctcagaggccgtgaggggaaggaatggcaaggtggaatgtctgcagctgaggcctataaatctgcaggcctttcccagggactaagcctcaagcagaggagcctgtgggacgttgggggaagccaaggggcagctctctcctgtcattgggcagaagctgggaccgggagagggcggagctgtgggggcagtcaaggcccccgagtgggtgagtgggtgcttccgccagaatggaagggtgggggtctctggtttctgtcagactctgggggctcggcctttccgatgctctcgcaaatctgatttattttcctcctagtaattcatctcatcctgacagcttcggtgaaggat

SEQ ID NO: 488071 - DNA, 487 bp, Homo sapiens
agctgttccccagagaagggtgcagccacctccccgccccaactccccgcagtgaatctggtggttatgtgtctggtctcactagctggcacctgcagagtgggtgggcccctgctctgttgtttcagtctacaaatctagtctaaaatgtctgaggactgatcttcactgtcttgaactcatctgctatggaataggcaggttataaaaaagacaaatcatttgcagagaaagatctccctatgctaggagaagtagacagagataaatggaaggaactgctctccaagattcttagtcacttccttttctttacaggggcaagctagcctgctttccaccagagcatctccctccaaagatgcaagtgtgtggaaatgagactgcagggagaacttccaggcaacaaaggatgtgagactatagaagaggcactatagctgggctcatggaggagggatgccrctctggactttgcccaggggat

SEQ ID NO: 488072 - DNA, 367 bp, Homo sapiens
ggaccctgctgcccagcacttggctggtatacatggagcacaggcctgcttgtgtctcaaaataaattccacwtctataaaataatcctgagagctggtggctggtggttggcaagtactgcagcgagctggcctgcagcagaggaggcaggaccaaccaggctgttactgcagaactaccgttcacctatggcccctggaggcctgagccccacaggcaggaggctcagcaccatgcgattctgacgcctcccctggagcccagatcatccaggttcactgtatcccccacaccaatcttgggagactcagtacaagtagatcaacccatctcctctctacattttcagggaaatttggctcagag

SEQ ID NO: 488073 - DNA, 367 bp, Homo sapiens
ggaccctgctgcccagcacttggctggtatacatggagcacaggcctgcttgtgtctcaaaataaattccacttctataaaataatcctgagagctggyggctggtggttggcaagtactgcagcgagctggcctgcagcagaggaggcaggaccaaccaggctgttactgcagaactaccgttcacctatggcccctggaggcctgagccccacaggcaggaggctcagcaccatgcgattctgacgcctcccctggagcccagatcatccaggttcactgtatcccccacaccaatcttgggagactcagtacaagtagatcaacccatctcctctctacattttcagggaaatttggctcagag

SEQ ID NO: 488074 - DNA, 469 bp, Homo sapiens
ctacttgcctactataagacttgttgcttagagctcctcttcaaagagcatttttacatctttttcttgctaaaagatgtaagtgttctgaactcaaaacacttcccttcttgattaataacaaccaatcaaattgggaagtggtgggaaaagtggtaggaagaaaatgaaataaaccttcagatcatcaggaaaggaaaattaaagtaaccctacctgtggaaaatacttattttttcctaacagaggcctggaaatatcatagcctgaagcccccattttgtcctggtcagagcacagcaatctatttgcattcytgaacagatcaccaaaccataatgccggcagcagacattgtcactatggatgtcctgcctgtatgctaacctggtgccactaactgactgacagttccctagtaggaggcttcctgtgtctctctgcctccagacacccatgggtcctggga

SEQ ID NO: 488075 - DNA, 275 bp, Homo sapiens
tggcatgttgaacacttccccttgcctgttacataayatgtctggggatatataattcaaaggggaaaagaaccctgaagtggcctcaatgcatgagaaaatcatacttaagcatgatggaaacctttacaaaatatataattaaagtaaaactcatgacttcatgataaaattttgatgaaaataatcaaaaacaagtcataaaatataaatgcaaagtagttaactttgttctgatgtttgaactagtggcttagaaatctaaataaaatgat

SEQ ID NO: 488076 - DNA, 616 bp, Homo sapiens
aacaaccaaaaaggaaatacaagtggcaaaatctatccatagagcaacaattaacttcattagtaatgtcttttaaatgggaaaaatgttttatcttccatattgatgaaaagaaaaaaagacagcattctcaaacacagctattagcagcattgacaggatctcttaccaagttctctagaaagactatatcaaagttctaaaaacatgtacatccattgatctagtagatcccattaagaaattgacttaaggaaataatgatggatacgtaaaaaacagggagaatgaatgtttactacagagtgtttgttactgtgaaaaatttaaaacaaattgttaatatagaacaatggggtactgcttaattttgtgatatatgcatgcaatataataytgtacacatacatacttgcatacatacacatttaatttagcatatataaattccatgtgtctggtattgttctaatcttttataaatattaattcatttaatccccataatggccctatcatataggcactataattatccccatattacagatgaggaaatcgaggctataggctaaatatcctgcccaaagttacacagccagtaggagaaacagct

SEQ ID NO: 488077 - DNA, 638 bp, Homo sapiens
ggtctccagtggtacgtctgcaagattgtctgttgccaacttatcaccaccatcaccacacccttccgagtcctgaaactacatatcccagagtccacgtcccagcacagttctgagttacagtttgtccatgaggattagacatagcagcttcatttatatggccctttgcagattccttcaagatcctgcattgcagtctcagtttatgcttctactacaatgactagatactcatagcttctagacacttttatgagttctggttatgccacccctgctagtgcttctgggaagtggtttgtgactgttttcctgcgtaatggttaattttatatgtcaaattgactagcttaagggatgcacagatagctggtaaaacatttctgggtgtatctctgagagtgtttcttgaagagattacaaattgaatcagtggactaagaagatgcacccttaccagtgtgggtaggcatcaytgagagccccaatagaacaaaaaggtgaaggaaggacaaattatctctctcttgttgagtgggacatccatcttgccctagttctcaggtcttcagacttcagtatttagaccagcagtcttcctgattctcaggccttcaacctcagagtgtgagtta

SEQ ID NO: 488078 - DNA, 546 bp, Homo sapiens
tggtcaggcctgggtgctccctgagccctcctcagagatgaggtgccttgagtgtgatactgcagggcttcttacaggctacttgacaacagccaggttcactcttacccacaatgggaagagagtggtttccctgaaggatcacgcagttctgtgtaaatgatatggcaagctactccctgccgttccagggctggggtgcagggacctcagagaaggcggttttgaaggattccactttgagcacaatctggctctgcagccaggcctctcagcactcatgaatttccattttaaaacaacaactgctctttgaattgaaattctatagccagagaataagaacaaaatgaaagcctttatccttaatgaaggtttatgacaataaggtgattttgagtatttcttaatattattatgtgttcaatggaaaatcattttgttttctttggtagaacataaataattaaaaataatttttcccaaaccaaatgcaaatacttagatatctgaggggraagaaacaaaaacaataacaaatgatcc

SEQ ID NO: 488079 - DNA, 510 bp, Homo sapiens
aaaaacgtgtatctataaaggaaaatcagtagaaattcttacaataggtgagagcattagtccaaataaactcaccttcaaccattttgtctgaactgggcttcttagcatcaactttctgtcttggcaaataacaatatttaggcctgaaatgtaagttctctgcctttgagatgtaaattttctaccttgtgttacctaggaaccatccctttcaaaatgcaattcagggtaraaaatttttaaatggttattttaaaaagggatgaatagtggactgtgatgggtttaaaacaaagatttaatctactaatgattggatggatcagaggaactcattgctggtcccctaacattacaaagctcaaaaccagtcagctcaatttactccaatctggaaaaatttttaaagccagaaggcagagattccaatgggcaacctaactaacaatcacttagggcaataatcaagcaggtcagtccagaaaagggcaaggtcccttgactcaa

SEQ ID NO: 488080 - DNA, 367 bp, Homo sapiens
aggttttgttattggcagaaaatgtcatttcaccattatgtcacctacccaaatgtgaccttgttataactgaatttctttcttatggaaaggctccataagaaaaataatattgccagatacttccttgaacttcccactgtgtcagatagtgttaygaaactcatctgaaatccacattgcctagatttctagctctgcaactggaagggcctactaacacaaaccacagaaacattattaagtaaacagcagcaaacaagctatgttcaagttctcttactaataaaagcaatacagtttggtcagttaaactgatatcctttcaaccactaaagaaaacaacaacatacacttggattaacag

SEQ ID NO: 488081 - DNA, 307 bp, Homo sapiens
ctgccagtgacgtctcgggaattgtgtcatggatggtgccactcacccgagtcaatgctattcttgtttctgaggtgaattgatctctgtctccagcagcctgacccaaattctgatccctagtgatcacctcttwtctaacaggacaaacccggtccacttgtgttctctaatgaacagtaatggaaatctgaggcaaggtgacatttccccttatggtccatccacacgttgttaaccctggcttctctgggctggggtactgtcctagaaaagctgccagctcaggctcaagcagctgtgggct

SEQ ID NO: 488082 - DNA, 508 bp, Homo sapiens
ttgtcaccactcttcctttcacattcttcggctattctgaacttcttttccattcctctagtaaccaacactatctcctgaatccaagaacttctgcaggtctttttcctccacctggaatattccccatctacatccactgtgtctaaatagaatttctatcatcttcactgctcaacttaaggatcctgttctccaaagagtctttcctcactctcctacaagaagatgataatattattgctgcaataacaaacaactgcaaaatctcagtggcttacattttgctgcagtaacaactgcaaagtctcagtggcttacaacaaccaacacttaattttcttctcatttcacatgtcagtggctacaggtcagctctgctccctgtgccttctcattttaggacccaggctgagggcacagtcccaatctatggcatgacattctcacagtggaaacaygggatgcctcttaaaacttctactcagacatggtacacattccaccc

SEQ ID NO: 488083 - DNA, 575 bp, Homo sapiens
tattccgttttctttgcaaaactaagatgctgaaatttgaagaagatacagatygaaagaccttaagactttagcttttatgatgccatgccacctccagcctaggcacgtaagaaggaggtaagaggactcatttaggctcccgccagcagttcccaaagggctccctcccagagaggaattaaatatgctctgatgattatgatgtagggaagggaggctttcacctgtaaatataataggaggcatcattagacatttgggaaggtccatagaaaagtcaacagggggaaagcgggactggacaaaacctactagcatgtaagcaggaatctctctactgtcataggttttaccctagtctctgtacacactagctatctaaattacacatgccctaacataactactcaccctgcatgagcattagtttcctcatcctgtaaacgtgaatgataatagcagccatggcatagggtttgcacgggagttaagtgagatcattcatgtactgtgcagtgccgacacttcgtgcattatcttcaaggtggttgttgctatctatcctgttacca

SEQ ID NO: 488084 - DNA, 575 bp, Homo sapiens
tattccgttttctttgcaaaactaagatgctgaaatttgaagaagatacagattgaaagaccttaagactttagcttttatgatgccatgccacctccagcctaggcacrtaagaaggaggtaagaggactcatttaggctcccgccagcagttcccaaagggctccctcccagagaggaattaaatatgctctgatgattatgatgtagggaagggaggctttcacctgtaaatataataggaggcatcattagacatttgggaaggtccatagaaaagtcaacagggggaaagcgggactggacaaaacctactagcatgtaagcaggaatctctctactgtcataggttttaccctagtctctgtacacactagctatctaaattacacatgccctaacataactactcaccctgcatgagcattagtttcctcatcctgtaaacgtgaatgataatagcagccatggcatagggtttgcacgggagttaagtgagatcattcatgtactgtgcagtgccgacacttcgtgcattatcttcaaggtggttgttgctatctatcctgttacca

SEQ ID NO: 488085 - DNA, 495 bp, Homo sapiens
aaataaacagatttggaactattataccgagaactgaacatgaccacaatacgcattgggaatgtgctgtgcatatgcctattatccaaaatgtctacagctgctcccgcaaaaagtttgagggaaataggcaattatatggtttctgggagtcagaatttttagaacttgaaaaaaaattagatattatctaggatcattatgttatcaaattctagagataccatctcccttcattttatgtgactggcacatctgagtgatacatagamtacaatgaaaatggtgccccctgcagcatgaaattagcaatatcacatccacctctcatttaatacatttggaaactcagacccacagagaggaatcctctgccctgacagctccaggagcctagctttgacgtaggaagggtaagtccatgaaaagttggtgttgacaagtcctccatgccatctgaaattctacaagtatgatcttgtatctgtgttgaag

SEQ ID NO: 488086 - DNA, 585 bp, Homo sapiens
taatggctttggtcattattgtaagagaaactagatgtcatgaaaatgattgaagcaagagaatgacatgataatctaagtatttgagatcacactatccataatatgcagatcaaatgagaagtacaggataaccagttaaaaagctattgcaaaagttgttttaaaaaacaytgaaaaggcgaggcaggagtcacagagaagatatcatgacaggagcagaggtcagagtgatgtggaaccaaaagccaaggaataggaattgcttccaggagctgggaaaggcaaggaaacaaaatttccactagattctcaagtaggaaatcagttttctcaataacttgactttagccccataagacccatttcacacttctaacttccagaactgtaagataataaatttgtattcttttagcaaaaaaacaaacccagcaattgcagtcatccatgagaaaggtgatgatagcttgcttggaccagtatgctactctgttgcagcagtagaaattgagagaaatagaaagaaattgagaaatatttaggagctaaaattgataggtcttgatgataccaaacctgacc

SEQ ID NO: 488087 - DNA, 437 bp, Homo sapiens
aacactctgctattgactttgcactttttttagcttgctgccgaaagggtgattcttcagtggaggtgattctctgggccccacaaattgtgccccagatcctaaaaacagctagcagtcttcaagcatttaattaaatcctcaccacaaccttacgaatccaagagctccatctyttgaatttgaaatttccggtaagcccctgtgagctagtattggtattattatccctaaaggaaatgaagactcaaaagatgaagtggcttgccctagtcacacaaagccaggatttaaacccaagattatgatgacacctttggccacctgctttcctgcctccctggttatggatgtagccatggagagggaagctcattggtgaggctgagcccaggatttctcctgcatgttgaaaagctagttgtatagttattatc

SEQ ID NO: 488088 - DNA, 646 bp, Homo sapiens
tgggggacatgatattgaatttcagagaacacaagaaaggaaggtatttttatctgcctgacaatgcttcaaggatgcactttatggttcgcttgtgacatcatatttgatggaaggaaaataaccaccaaaacaagtgttctgaaggcaactgggaaactcacgtgcacctcagcatcagttcgtgactgtgtcagacttcggtttctttccacctctgaaagcaaatctccagatgaaagatccaagagrcgtgagtgaagtttctaggtaaaaccaagcagaaacattgaatagcgataatttaattatttgtctcaaaatcctgccttggacagttaaatctcaaaagacttgacatttccagattagataatacatgtcctaattaaaaaaagtttattctagtttatcagtgttcccatacatgtatatgtacgtgtatgtgcaaattacattttgtaaacaatagtgatgcttttacagtctgtcagtctgccttggaagatatgtagtagaaaaatataagtagtagttaaaaaaataagcagtaggaaaagtatgaatactctgatatatttattgggtagtatgaaaattaacatttgatattcacattaagaaaaccaatcaccaagttcacctt

SEQ ID NO: 488089 - DNA, 547 bp, Homo sapiens
tgctatgatgtataaaccataaaggcagtgtaataatgtgtagaacagtaaaatgtatttgcttaacctagaacttcacatgcatatatagtgggtcatatatatctctggcctaataaataccttattaggtgtttattcttcacatatatgtgaagaatttatgccataaattttttcatcaattaaattatttttattkttattatgacttgccaaacggggatttgaagccaacaagcgaaatatttcaaagtccagatttcctgtttagacaaggcattttatagtgattccagtctgttttcacctaacctcgtgtagtcaatatcacaaagatataattagaaaattgggtacaatatttagccctggtcgctgtgtgatggaattgtttgactgctgagtaactgaagcttgtttgcatcccagtgtgttgtgaaggcaaacttcaaagaaaatattatatctcccaactccagctcctgagtgtcttggaagtataatacagcaaggcttaaaactccctgctgaggaaagggcaatt

SEQ ID NO: 488090 - DNA, 643 bp, Homo sapiens
ctgaagccgtgcgtcgtcccatcctcctctgtctgagaatttaaaggacaacgaggacctgctgtgaaaaacctgtgagatggtgttgggcgagtygtagatcatctttcgaatattccccaagggctttgtccatcagtatgaaaatgagcacatgcctgcaacgaaaccattttaattctatttttaggttgaatttctagaacctactgcaaattttttattattatcatgattcatgtcttaaaagtcctcagaagagatatttgaagaaaagtaaagtttgctaaaatggaagcaataaaatattttattctaaaataattaatggtcataaatgtcttagatgtttggtttgttttccattttgacataaatatggcactcttaaaagcagaatacacattataacttataaatattagtgacttactaactggccaattaaaattcatttatggagtcccaccccacaggccaagcactatgttaaagtatgagggacaaagattgtataacacaacccatagcccttgctcataatctagaatatttaaaaattaattagcaaatatcttaattattttatttactcgggttttaatgacattttttactataaataagcttgaccatttgagct

SEQ ID NO: 488091 - DNA, 404 bp, Homo sapiens
atttattttctttcctttctttttcccttcagctcctcctcttttccttcttctccccacccaatacaaagatggtaattgtaatgtattcacatactcacaatccaaatgaagagcaaagtatgaaacccagtctaaggggaaggagcacactgggtgccatgtgctatcacctgtagtcccagttctgcaatgtcctagcagtatrattttgagttgctccttctgacatttgtgacgaaagctatggtttatctatgtcacaagggcgttctaaagactaaatcagaggacagatgaagaagcgcatcttaaattataaagagctacccaagtataatagagtgaataccagatggcagattccatcagtagaaggtccaagagaacgaggcaagaaccca

SEQ ID NO: 488092 - DNA, 596 bp, Homo sapiens
ctggcttgccccttgtctagccacctttcccaggctgtgcctcactttgtggtgtatagaagttactcatttcaaaagctagggaaagttacaatttacctgtcagtaaacagaagatggtttatcaacagactttaccttaatgactacaaatgtttacctcctgctttccagaatgcaaagaaaatcttggaaatgtcataatatcttacaaacatttgcaaaacagatccttgttcatccggaaaagaaacaattgtattygttgtctctgtcacaaggaaaacgttcagtgagaaacacataggtagatgtatacatctatatgtaaatgaatatgctaattaaaaattgcagtgggtactttattaagaatttattttaccatctagccattcaaaacatctttacatcaacaaacacagcagtttgactattgaaatcataagcgatttatcttgaaaaggttatatttgtaggtggatgcaagtatattggagaaatatttctatcaaaatcactggttttgttaggagtattttgatttttctatttttacgctgggaaaaaaattaaaacaagtatgtcagtgttca

SEQ ID NO: 488093 - DNA, 645 bp, Homo sapiens
tggtaattccaacagtgccaattcacagggctattgtgaagactacataaggcaatgcataaagggctgagaacggcatctagcacatgctatgtgctcaagaaatgtcagttctatcatttttaaggaatgttctattaagtgatgaacaaagcactggagtgggactataagtttcaaatgtcacagaacatgtctacttcattcaccattgcatcctaaatgttcaacagtgcctggaacaaagaacgtattttaaaaacatttattgaaaaaatgtagcagtgactagggctgaggaaaacggactcccaggttctactccaaaccctgccactatctactgcccatctcacccactgcgcccagcagtgaggccttgggaaagtcactgattctagatctctcatctcctgtaaaatgaagggatgatgcaaaagatctataaactgtagcactataaattgtaactgacactcttaattctactatacwttttaggaaaaagattacaaaaactttgtaacaacataatttttgcttgaaaacaatcaacagtatagagactctacaaagttgctgagttatagttttcaaaagaaatttagtgatgattgtttgcttcatcagaaagggcagtaaaac

SEQ ID NO: 488094 - DNA, 586 bp, Homo sapiens
ctttaacttttgcatttaaagtaattgtattcacttcatctgcttaatttgtagtttactaaatcttggaatggaatagtagacacaatgcaggagaggcaagccgcaaacagagctaagcctcctggtttcttggctttgttcaggaaagaattcaatgtcaaaccagaagtagaaaaaaaaaatagcttagctgatgatgagaggtgataatgtgctagcagccctcgcttgctcttggtgcctcctcggcctcggagtctgctctggctgtgctccaggagcccttcagcctgccactgcactgtgggggcccctctctgtggctggctgagggtggaaccagctccctctgctcacggggaggtgtggagggacaggtgccagtgggagccagggctgtgcatgrcactcctgggctgacattggttccatgtgggtgcaggctgggtgggccccacactcagcgaagctggccagcacctgctgggcttgatcagaggatgagctccctctgggctgctggagtgcctgggctagatgccacaaagtccccagtgagttccattgagaggtgaagccagct

SEQ ID NO: 488095 - DNA, 585 bp, Homo sapiens
cccatttatgaaactgattgatagctagaggctgagtcgggatgcaggctcagggtgaagaccgccttctgagagcacaaggagaccagaatggtgaggagcatttgtcgraggagtcttacctgactgtgggccccactgtccttcccacctgtcactgcttatgtgtggtcaaatgaacacagtcatcccacgtagagtacttttgaagctaaactttctgcccagacctggctttcttctgtggtcttccctggttctccatggtaccaccactcccctagcctctgaggcctgaactcaggcaagccctgttgattcttctacaggagggttttacatctgtcccctgggcaccttctcagtctcacacatcttcctctctggcccagaacttacaatcatttcctaaacgggcctgtccagcctgtcatacgcaaaagccacagtaatcttcctgacacgactttgcatgtgatcttttctcataaatttgcaatgttccacaaaacaatgagctgggacttcaaggccctctataattggattcttttaccaagtttccaggctcatgtccccattacg

SEQ ID NO: 488096 - DNA, 585 bp, Homo sapiens
cccatttatgaaactgattgatagctagaggctgagtcgggatgcaggctcagggtgaagaccgccttctgagagcacaaggagaccagaatggtgaggagcatttgtcggaggagtcttayctgactgtgggccccactgtccttcccacctgtcactgcttatgtgtggtcaaatgaacacagtcatcccacgtagagtacttttgaagctaaactttctgcccagacctggctttcttctgtggtcttccctggttctccatggtaccaccactcccctagcctctgaggcctgaactcaggcaagccctgttgattcttctacaggagggttttacatctgtcccctgggcaccttctcagtctcacacatcttcctctctggcccagaacttacaatcatttcctaaacgggcctgtccagcctgtcatacgcaaaagccacagtaatcttcctgacacgactttgcatgtgatcttttctcataaatttgcaatgttccacaaaacaatgagctgggacttcaaggccctctataattggattcttttaccaagtttccaggctcatgtccccattacg

SEQ ID NO: 488097 - DNA, 585 bp, Homo sapiens
cccatttatgaaactgattgatagctagaggctgagtcgggatgcaggctcagggtgaagaccgccttctgagagcacaaggagaccagaatggtgaggagcatttgtcggaggagtcttacctgactgtgggccccactgtccttcccacctgtcactgcttatgtgtggtcaaatgaacacagtcatcccacgtagagtacttttgaagctaaactttctgcccagacctggctttcttctgtggtcttccctggttctccatggtaccaccactcccctagcctctgaggcctgaactcaggcaagccctgttgattcttctacaggagggtttyacatctgtcccctgggcaccttctcagtctcacacatcttcctctctggcccagaacttacaatcatttcctaaacgggcctgtccagcctgtcatacgcaaaagccacagtaatcttcctgacacgactttgcatgtgatcttttctcataaatttgcaatgttccacaaaacaatgagctgggacttcaaggccctctataattggattcttttaccaagtttccaggctcatgtccccattacg

SEQ ID NO: 488098 - DNA, 598 bp, Homo sapiens
attcagtccctgtaaaatgagccatttttgaacctgccagcaactgaggcagcctmttaaccagcagacagccaacacagtcacagccacagcccgtgtttgggtttttaaggagggacctacattaagtacttgtgttttaagctgataggtattcatcatcttgtggcacaagaaaagggtctgagaagccttcccctgactcccagccatctctctcattaacctgcctctacacctaaaacttcatcgttggatgaagaggcctcgatacaaaggcaaatatgcctgggaagagtggcacgtcaccacgtgtgacccgtcaccatgagttagcatgagtctgtagatgggattcctctcagggttgcagctcccatgccagctttgatttcctggcaaggaagttacactggggctcaaatcaggctctagcagtgcaaggttagggaaggggcagggcctgcctgagctgtctggggtgggtgcaggctctgctggggttggcagagaagaaacaagccaggtgctccagaatttgccaaactcagatcttacacagaatcttataaagatctaaacacaggtttggagtgac

SEQ ID NO: 488099 - DNA, 457 bp, Homo sapiens
gcggagggtctcccttatgatatcgttggagtctccctcaataaatcagccaggcatggtggcacacacttgtagtcccagctactcgggaggctgaggcagaagaattacttgaacccaggaggcagaggttacagtgagctgagatcrcgcctgggtgacagagtgagactccatccctcccccgcacccccccccaaaaaaaagagagagaaggtataactctttgaccctctggtccaccagcctttttcatacttgccaaccagaagggagccagtcccctccttgcccaggggccatttgaccaaactgactctttaatggcacctacagtgagcaaggtagtgtgctccgtcctcagccagcctctaatctagtggtagagatgacacaaggccagaacattttatcaccaggcagccagagagacgtgtagcacaggtggtagtagctg

SEQ ID NO: 488100 - DNA, 636 bp, Homo sapiens
tccaacttgattataaattccagaaaggaaggaattgtatatgatgatccttggtgtttcctcggagtgcctaggacagggtcatgaatgtggaaggggcttgcaaaatactgtttttgggtgaacttctcaagtcaggacatttccccagggcaaagaggcaggtgtgttgaaaggaaactgacttgctagtaagtacacactatgccagtttcccatgtattgcctctctgcrgcacatcctcacttaatttccctgcttgtgataactgaagctgaacctattaacatgtcccttgttagctagcacagtattaagctttgtcagtagatagcactggagagacgtcactggaggaaggggcttctcttcctggttcttgagtgccttccttttttcctactctggcaaagctctaatgcttggcccacatgtagaacacttagtgactgtcacccccagaaaacttcagtagcaccttggggaagctccccaaaaagtttcccagctaaggttctcttcagtaacttcctggcaggttcaatggcaggaagcttaccaatgagttttgttcacatccagcacttaccagggttgacctgtttgaccttgacctcagcaaacttttatgccat

SEQ ID NO: 488101 - DNA, 483 bp, Homo sapiens
tgtgtctgctaaggcccacagcacttagtcccttcttcccccgccgaccccatctgaactctgatgctggttcttagtcctactcttaacattccaggtgttctcctaaggtgaatgggtgcacacttaaagacatgaggctcccctcatgaaatttttgtcactgtatttaaaaaagtattagcccttcttcccaaagtatgtgtgagcatccaggttgtgggaaagtatcaacacagcacagggaacatcaaagttgtacagtaaatgatagtctccttgctgccaatggaaaaacttttgatcttggacccagaagaactaggtttgagacaatgtttttagcaaattatttaatctctctaaatctccacatcctcatctattaaatggagatgatagtttctatctstcagggttgtgagaatcaaatgagataacacatgttaagaagaagtgctttctgtaaaggcattattattt

SEQ ID NO: 488102 - DNA, 387 bp, Homo sapiens
cattttcccatgtccgtaacactgagtaggatattaatggtacrtcagggaagacacgatgttcataggggaagaggcagaagggtcttcagcagatttgtgacatgagcctccacggtgaggggctacctcctggctccccagttttcactctcagctccaagctgggagtgacctggccaggttccttcagaagctcccaggagaacaagcaggtgctgtgagggcaactagttccacagagggaagagaccctgtcccggccctgccgtcacagggtccctggggccaacctgctggcttcctggtcctccagccattgtgaccgcagtcccaagacattctgttacccttcgtggccctagattgcccctctccctcccggag

SEQ ID NO: 488103 - DNA, 387 bp, Homo sapiens
cattttcccatgtccgtaacactgagtaggatattaatggtacgtcagggaagacacgatkttcataggggaagaggcagaagggtcttcagcagatttgtgacatgagcctccacggtgaggggctacctcctggctccccagttttcactctcagctccaagctgggagtgacctggccaggttccttcagaagctcccaggagaacaagcaggtgctgtgagggcaactagttccacagagggaagagaccctgtcccggccctgccgtcacagggtccctggggccaacctgctggcttcctggtcctccagccattgtgaccgcagtcccaagacattctgttacccttcgtggccctagattgcccctctccctcccggag

SEQ ID NO: 488104 - DNA, 387 bp, Homo sapiens
cattttcccatgtccgtaacactgagtaggatattaatggtacgtcagggaagacacgatgttcataggggaagaggcagaagggtcttcagcagatttgtgacrtgagcctccacggtgaggggctacctcctggctccccagttttcactctcagctccaagctgggagtgacctggccaggttccttcagaagctcccaggagaacaagcaggtgctgtgagggcaactagttccacagagggaagagaccctgtcccggccctgccgtcacagggtccctggggccaacctgctggcttcctggtcctccagccattgtgaccgcagtcccaagacattctgttacccttcgtggccctagattgcccctctccctcccggag

SEQ ID NO: 488105 - DNA, 387 bp, Homo sapiens
cattttcccatgtccgtaacactgagtaggatattaatggtacgtcagggaagacacgatgttcataggggaagaggcagaagggtcttcagcagatttgtgacatgagcctccacggtgaggggctacctcctggctccccagttttcactctcagctccaagctgggagtgacctggccaggttccttcagaagctcccaggagaacaagcaggtgctgtgagggcaactagttccacagagggaagagaccctgtcccggcccygccgtcacagggtccctggggccaacctgctggcttcctggtcctccagccattgtgaccgcagtcccaagacattctgttacccttcgtggccctagattgcccctctccctcccggag

SEQ ID NO: 488106 - DNA, 586 bp, Homo sapiens
gtattaaatgcctgctgtgtgcccaatattgtgttggcataatgaaaaagagaaaaagtaggatatgtggtccctggcctcaaggagctataatctaagtgaggagaggacattaatatacaggagagtattagagaattagagaatattagaaattaaaagctaggtggtatgggcagtgagaacataggaatagagattttagaatggaccagagtagtcaggagatttgatagtgacctatctaatgtttagaaccacagagactttagacaggagctcagacttgtttacaaatyccatgaattctgaagcttggaacactgccattaatatttaaattaaagttgaactgcagaaaaacaaaagttacctatttggaatataaggtgggacaaagtttataaaactccatgtctaaaaccggtagtgtggatggaagctataaagaggctcaaaccagcttcccatatatccttggatgacaattccattagaatatagcccctggcacagagtaggcacacacaaaaattcatctgttgagtgacttgtggaaaaagtgttctgccctgttcagctttga

SEQ ID NO: 488107 - DNA, 545 bp, Homo sapiens
gcatgcttcatagctcccttcagaggcttctagcggtgttaaagctttgaactgaatgaatcaggtgggatcatacatgagttgacaaaagggtggtaacaccaagggacctcagagggtgacgctgctttggcatttcttagcaaatttaccatgatcagagtctggccttaactgaccaggaagaggactccgtcattcatgcagagatgaaaatacttattagtaatcaactgatgctgatccaatgcagaagagagctataaaatcccatctaaatgcattcatttacattgggtgrggtatatgagtaatagtgaccagaatgctcactgctgtcaggggtcaccaacccaggaatggggcatggccactgtgagacaggagtgaaatcagcacacaggaagcagagagcacaggaaaaacaggtctcttgctgaggcagtctgccccaaaggtatagcacacctctctggtcatggcccactagaccttttgctgggcagtggggaaccatctaagaaccagaccaacctaggccctgc

SEQ ID NO: 488108 - DNA, 399 bp, Homo sapiens
gtcggctttttgccatctgtgatatgccataggtgtgacaatccgagcagtggagtcattcagcgggagcactgcgcgctatcccctcacattctctatgtactatgtatgtatgtattattattattgctgccaagagggtctgatggcacgttgtggggtcggggggtggggcggggaagtgctctaacttttcttaaggttttgttgctagcccttcaagtgcactgagctatgtgactcggatggtctttcacacggcacatttggacatttccagaactaccatgagatggtttagacgggaattcatgcaaatgaggggtcaaaaatggtatagtgaccccgtccacrtcctccaagctcacgaccttggagccccgtggagctggactgagg

SEQ ID NO: 488109 - DNA, 651 bp, Homo sapiens
actggtgaaggaaagactgtgttaaatacttggtagttgcctaagtctgaaaattcatattgtatcttccatatttctgcaagtatttttctatctatctatctatgtgcctcggggccattttttgtatcctatggggaacccaaggaaagaagtcatggtctctgctttcagaaaattacatgaagtcgtttgagagccacactgttctgtatattcacatagtgcactttgrgatggaggtcccgaagggaaaggggcagcctgggcattaggacttcaatttggaggcggctgggctggagtagggtcttcccaggtagactgtgattgggaagagcagagatcccctcggccagagacagagcacagtgaaagcccagaactggacatgagcatgatatgttccccaattcaaatttcacttttccagatcatgacctgcttgtgagcagacctttgtctccatggagagatgggggcaaggggagagaccgtgcagcagcctgcgctctcactgtctaccctagaaccagccattccagcagcatgtactttgcctaagcatttggtccatatagtatggtctcacatgtttgttagcttgttagctcactggatcctaggtctaagcaatgccatgggcaccca

SEQ ID NO: 488110 - DNA, 651 bp, Homo sapiens
actggtgaaggaaagactgtgttaaatacttggtagttgcctaagtctgaaaattcatattgtatcttccatatttctgcaagtatttttctatctatctatctatgtgcctcggggccattttttgtatcctatggggaacccaaggaaagaagtcatggtctctgctttcagaaaattacatgaagtcgtttgagagccacactgttctgtatattcacatagtgcactttgggatggaggtcccgaagggaaaggggcagcctgrgcattaggacttcaatttggaggcggctgggctggagtagggtcttcccaggtagactgtgattgggaagagcagagatcccctcggccagagacagagcacagtgaaagcccagaactggacatgagcatgatatgttccccaattcaaatttcacttttccagatcatgacctgcttgtgagcagacctttgtctccatggagagatgggggcaaggggagagaccgtgcagcagcctgcgctctcactgtctaccctagaaccagccattccagcagcatgtactttgcctaagcatttggtccatatagtatggtctcacatgtttgttagcttgttagctcactggatcctaggtctaagcaatgccatgggcaccca

SEQ ID NO: 488111 - DNA, 651 bp, Homo sapiens
actggtgaaggaaagactgtgttaaatacttggtagttgcctaagtctgaaaattcatattgtatcttccatatttctgcaagtatttttctatctatctatctatgtgcctcggggccattttttgtatcctatggggaacccaaggaaagaagtcatggtctctgctttcagaaaattacatgaagtcgtttgagagccacactgttctgtatattcacatagtgcactttgggatggaggtcccgaagggaaaggggcagcctgggcattaggacttcaatttggaggcggctgggctggagtagggtcttcccaggtagactgtgattgggaagagcagagatcccctcggccagagacagagcacagtgaaagcccagaactggacatgagcatgatatgttccccaattcaaatttcacttttccagatcatgacctgcttgtgagcagacctttgtctccatggagagatgggggcaaggggagagacygtgcagcagcctgcgctctcactgtctaccctagaaccagccattccagcagcatgtactttgcctaagcatttggtccatatagtatggtctcacatgtttgttagcttgttagctcactggatcctaggtctaagcaatgccatgggcaccca

SEQ ID NO: 488112 - DNA, 634 bp, Homo sapiens
tccagctagagagtcaagttccctagaccccatccctgtcttctggtgtccacgattctgacaagcaggcacatgsccataggcggccttcaacacagcaccccctcccccagtgttcctaagttattgtcaccctaatttaccccacaatctgaccgttggagggatccctaacacctttaaggaaacctaaagaacttttaccagtgacctcaatattgtagatcaaggccagggcatacctccctttctcccgtctccctggagaaaacagtgcctagaaatacacgtgcaggggccccaggctgtgcacatcccccacagggcccgataccacctgtttggtgttcccaaaagctttttccagatggagccacgcaggcgtttctagtcccttaaatcctaaaccttaaacactaactttaattcaactgggtttatacatcatatcaattttactggagttgttgaacatttcattacatggaaaaaaccaccctgtgttggcctaatagactatccagactaatactggccctctgatacctgtcccagctctactcagcttaagattggtccttccccaaactcccgccaacactggttctgcctctgcacatgtctgcttcctgtg

SEQ ID NO: 488113 - DNA, 634 bp, Homo sapiens
tccagctagagagtcaagttccctagaccccatccctgtcttctggtgtccacgattctgacaagcaggcacatggccataggcggccttcaacacagcaccccctcccccagtgttcctaagttattgtcaccctaayttaccccacaatctgaccgttggagggatccctaacacctttaaggaaacctaaagaacttttaccagtgacctcaatattgtagatcaaggccagggcatacctccctttctcccgtctccctggagaaaacagtgcctagaaatacacgtgcaggggccccaggctgtgcacatcccccacagggcccgataccacctgtttggtgttcccaaaagctttttccagatggagccacgcaggcgtttctagtcccttaaatcctaaaccttaaacactaactttaattcaactgggtttatacatcatatcaattttactggagttgttgaacatttcattacatggaaaaaaccaccctgtgttggcctaatagactatccagactaatactggccctctgatacctgtcccagctctactcagcttaagattggtccttccccaaactcccgccaacactggttctgcctctgcacatgtctgcttcctgtg

SEQ ID NO: 488114 - DNA, 634 bp, Homo sapiens
tccagctagagagtcaagttccctagaccccatccctgtcttctggtgtccacgattctgacaagcaggcacatggccataggcggccttcaacacagcaccccctcccccagtgttcctaagttattgtcaccctaatttaccccacaatctgaccgttggagggatccctaacacctttaaggaaacctaaagaacttttaccagtgacctcaatattgtagatcaaggccagggcatacctccctttctcccrtctccctggagaaaacagtgcctagaaatacacgtgcaggggccccaggctgtgcacatcccccacagggcccgataccacctgtttggtgttcccaaaagctttttccagatggagccacgcaggcgtttctagtcccttaaatcctaaaccttaaacactaactttaattcaactgggtttatacatcatatcaattttactggagttgttgaacatttcattacatggaaaaaaccaccctgtgttggcctaatagactatccagactaatactggccctctgatacctgtcccagctctactcagcttaagattggtccttccccaaactcccgccaacactggttctgcctctgcacatgtctgcttcctgtg

SEQ ID NO: 488115 - DNA, 586 bp, Homo sapiens
agcttaagattggtccttccccaaactcccgccaacactggttctgcctctgcacatgtctgcttcctgtgggtcacactctgagcgacagccctaagtctctgatttgtctctaattagccctgctgtctcccctttactaaactgaaagctccttctaggggggcctgggtcaaggaccagagaaactggcactggataggggcacatagcaggtgctcactagggacttgcggaatgaaactggaacagagacattaccaaacaccctgaaagccctgaatagtctaataggaatgtcatccctgacctcatatgtaacacccaattcaagtaatttgtcatatagtgtctcccagttattagcttcygcaatgtggctggtaggcatagtcccctttgccagatcatctatgcatatctgaagtatagtacaagtcccctaaccacagaggaatgttgaaagttgaaaatattatgtagcacatgttggctctgcctctgccctccctgccttctgggtacctacagctcctgggcacctactgccagttgagcccacataatcctggaggcacacacttcc

SEQ ID NO: 488116 - DNA, 632 bp, Homo sapiens
ataccacctccacggagtgcctgtgtgcagtcagtggtttgcacaccttgtggaacagcactgtagagagtaaaataattcaacatatcatcaacttgggtgcatgctatagattcaagtacatacattcacagaagaggagggcagggggagttgaggaaaggacacttgagttggaccttgaaggatcggggaggcttaggctgaacagaggggaaagtattaygggtccaacttaacacatatgttgaggtaggccacagttctcagagagcttgcttgctggatcaagggagctttagaaaaggctgtccaggcaacccagggatggcgtatggaaactctgctttgcagtttgaaagaagcctgagttatgtaaggactctggaagagggctgccacatagaactttctgcagtggaaatgttcttgaaatgtggctagagaaaccgaggaactgaactttatacaatgtagttttaattaatttaaatgtaaatatccacacttggcttgtagctaccatattggacagagaagttctagagtgtatccttggccatgttcccaattcaggcttcctataggcaggtgatccaggaccgttcccttgaatccatgcgactcatcac

SEQ ID NO: 488117 - DNA, 628 bp, Homo sapiens
tatatacaatatcctttgggtaagacaatattttctcttttctgattctgtgtttcccaaggtctgttctattctggtctctgttgtgttgtatggccaagaagagcaagtcccacatagataacttgggctggcaaattgattattgcaaaggcattaagtagcagttgagctttaaaatctgtttcttgggaacttggtgggtatgcatctattccttggagtctgactgaggaagtgataaaatcaaatgtgcaatacatgtcctgcaaatcttggatgtaaagattctatcaaagggtagctgtccagggaatttcagcctaaagcagccaaccagagtttagatgagagaggaatsactgtcacgttgtaggttagggatcgggaaaactatctggaggggtgagaaaaaactgtctggaggtgtgccagtcctggcacagttaatttgctagcttgctctaccataggcagacagtctatgaagtccatgaggcttttaataaaggtcaaggctggttgtaaaacccaaaactttttctattcatgatgcctctaacttgttgcttaggtcatgtggtagtacgtacgccagtgtgtttacttttgagcttcaactttggtc

SEQ ID NO: 488118 - DNA, 624 bp, Homo sapiens
taatttttcattgtaacattttttactacccttcttttattggtttgttgtctaccttcctcacctggaatttaaggtccacgagcccgagggctttccccatggcatcagtcagggtccagccaggagaacaggaactgcactacatatttcagaggtgtcatttaataaaagaagttactttcaataaaacrtattagagggagaggaaaaatctaaacacgaacactgaagtaagacagaggtaataaccacaagaagtagtgtgtgttgtcagaatctatgtactggggccgggcacagtggctcacacctgtaatcccagtactttaggaggctgaggcgggaggattgcttgaggtcaggagttcaagaccagcctaaccaacatggtaaaaacccatctctactaaaaatacaaaaattagctgagtgtggtggtgggtgcctataatcccagctactcgggaggctgaggcaggagactcactttaacccagaggcagaggttgcagtgagccaagattgtgccactgcactccagcctgggcaacagagactccatctcaaaaacaaacaaacaagcaaaaaagaatctatgtgctgtgaggaagaacccacaga

SEQ ID NO: 488119 - DNA, 624 bp, Homo sapiens
taatttttcattgtaacattttttactacccttcttttattggtttgttgtctaccttcctcacctggaatttaaggtccacgagcccgagggctttccccatggcatcagtcagggtccagccaggagaacaggaactgcactacatatttcagaggtgtcatttaataaaagaagttactttcaataaaacgtattagagggagaggaaaaatctaaacacgaacactgaagtaagacagaggtaataaccacaagaagtagtgtgtgttgtcagaatctatgtactggggccgggcacagtggctcacacctgtaatcccagyactttaggaggctgaggcgggaggattgcttgaggtcaggagttcaagaccagcctaaccaacatggtaaaaacccatctctactaaaaatacaaaaattagctgagtgtggtggtgggtgcctataatcccagctactcgggaggctgaggcaggagactcactttaacccagaggcagaggttgcagtgagccaagattgtgccactgcactccagcctgggcaacagagactccatctcaaaaacaaacaaacaagcaaaaaagaatctatgtgctgtgaggaagaacccacaga

SEQ ID NO: 488120 - DNA, 628 bp, Homo sapiens
attcaggtgtaactctgggcattggtagccgttcaaattaggagagctcactaaaaaatgcattcattcaacaaacattcattaagttgctatcaaattcctggcatcttgctaggcactgtggataaaatgatgatgataatgatgatgatgattgctagcatttattgagcactcactatgtgccaagcaycattctatgcatgtaaatgcattactttactcagtcttcatagtagccctctgaggcaggctcagaaagcttaagtgctgcgcccaacatcacacagcgagtggcagagatgaaactggaatcagaatcacgctttacatcacagagtttcccaagatgaataagaccccattcaatcagaagtcatcagcaggtggcatctccaaggagcagaagacgcaactacaggcaggcagggtaggtagatgtttctagggagtgcttcaaagctctgtgacgcttggggattgtcccatgtgtcccctgctcaggaagactgtaggctcccaggccagccagatctctaacatgggcattagtctcctggctgcaccacacacagacacaaagcccaccctgctgatgactgcagctcgactccctggtgagcccaaa

SEQ ID NO: 488121 - DNA, 530 bp, Homo sapiens
acaagttttttattgcaggacttctcagaacatttactatgttcacttagattgtatttctccaaagcaggcaatcataaagagtaagttgcaaacttacagtgaccggacccttttttttcccaaggtgcagtgtacggcttgggaaatgctggatgctaagtttttccaagggcttgctcagctccagtgtctctgctctgtgaacmattttcatctagagacgtttctttactcattcagttattccacaagtcatcactggctgctgaccatgtccatggcattggcctgtagactgcagatacagcgctgcatggaatccaggtgctgcctcccacccacatccacatcccctcggcctgccctagaggtcttccggagtcatttccactcacatctccctattcttgcatcactgtgcctggatgcattttccagctgcaggagtagattccccccaagcacgggcaggctagatatgccaaggagttaacatccctccagctctgagcaaccctcaaccaaca

SEQ ID NO: 488122 - DNA, 613 bp, Homo sapiens
ctggggggatgtccccgtatcagctatttaatctgcctgaacctcactttatctgtaaagtgggaatgacaccaatcccatcttgtagaattgttggaaaatcaggcagcatgatacatagtaaggagtaaaatggtacccaaagcctagcagacacttgacaaatgctagtgctcacctctttgtacctcaacttccttacctggaaaggaaaagggtaggacttggtggtctctgtggctccatctaactggaacattcttagtgcttataaaaggaaggggagttctaaagctgaaacgttaagaacatttctccaaaatgaagataaagtagctctgcaattgtgttgtaaatcattgctgaaataggattccatttataaaaattcaatttgagtgcaattttctcaggaacacatacttactctacagagtaaggtcaacctgtgagcaacactctcccttgcggactgtcttctgcatctcagcccatggggctsggcagctttgggggaccgtccagggatggctgtcctaggcccctccatataagagctcactattctcacactctgcctggagggcctctgagctctgagccaggcagagta

SEQ ID NO: 488123 - DNA, 605 bp, Homo sapiens
tctccagaaacctcacagaactaccttgatctctgcatctgaaaggttgtaatgatgagcctggatgtggatatttttttcactgactgagttggatactcagtggatcttaccatctaggacacatgtcctttaattctgggaaattttcttgtattatttccttgacaatttcattccttcctctctccatttccgggacccctattagctgaatgttggacctcctagattgattcattaattatatataaattttttcagagacaggtcttgctctgtcrcccagactggagtacagtggtacgatcagggctcaacagcagtctcaaactcctgggctcggccgggcatggtggctcacacctgtaatcccagcacaacagaagaaaaaaaacctcctgggctcaagtgatcctcctatctcagcctcccctagtggctgcgactacaggtgcaccatatgcaactaatttgtttattttctgtagaaatgtggttctactatgttgcccaggctggtcccaaactcctggcctcaagcaatcctcccacctcagcctcctgaagcactgggattataagcatgagtcaccacgcccagc

SEQ ID NO: 488124 - DNA, 628 bp, Homo sapiens
ttattgttagcaactaacctatatatcgcctacatgtcagcattcccaataggtgtgctttatgtatcctctctgtcatgatcttttcaacctcactgggattcttaaatattctaactattgaatacttacgtgtgaaaactgtatgatcaaagttaactaacatctaagttaacgcttttcaaaatcaagtctagattttcttatgctattaatgttttcacctggtagtcctgaatctatcaaattcctgatgttttttccatacaatttgtcatgtagttycaacattaaattttgtcgtgttttattcatttcatattacaaatcattagtaatattatgttagcatttataatcaatacacaattcttccaatctatgaatttcttcccataataaatcatgaattatcctaaaagaagcctttgtagagactgccaatgtttttcttgctgtaaaggctcctatattctgtttcatattgataagagatgcctcagtttacacagaaattctaagtttaatatgtgttaaaatactccatagtgtagtctgtagtggtatatggagatcaactgcacattcacaaaatagattgctcattacaataactgagttaataacc

SEQ ID NO: 488125 - DNA, 628 bp, Homo sapiens
ttattgttagcaactaacctatatatcgcctacatgtcagcattcccaataggtgtgctttatgtatcctctctgtcatgatcttttcaacctcactgggattcttaaatattctaactattgaatacttacgtgtgaaaactgtatgatcaaagttaactaacatctaagttaacgcttttcaaaatcaagtctagattttcttatgctattaatgttttcacctggtagtcctgaatctatcaaattcctgatgttttttccatacaatttgtcatgtagtttcaacattaaattttgtcgtgttttattcatttcatattacaaatcattagtaatattatgttagcatttataatcaatacacaattcttccaatctatgaatttcttcccataataaatcatgaattatcctaaaagaagcctttgtagagactgccaatgtttttcttgctgtaaaggctccyatattctgtttcatattgataagagatgcctcagtttacacagaaattctaagtttaatatgtgttaaaatactccatagtgtagtctgtagtggtatatggagatcaactgcacattcacaaaatagattgctcattacaataactgagttaataacc

SEQ ID NO: 488126 - DNA, 639 bp, Homo sapiens
ctgctttggaagactgaggtggcaagactgcttgagcccagtagaacaagcccagcctacgcaacatagtaagaccctatgtctgaatattaagaaataaatgtttatttatttatttatggatgagggagagaattatttgtggctatacgtgtagcagaatgtatcatgttaactgaacttttccgtatttttactgtgttcatgtatacctacatatgtgataaaatttagaaaactaaatagaagcaaatacaaatacatataaaattggtaaaaatctgataaggtcagtgggtcgtacgaatgacagtttcttggttgcgatattgtactacagttatgcaagatgtaaccactggaaaaaaccaggtataagatatgygggaatccctctgtgttatttccacgactgcatgaaaatttacataatagcgcatcatctgccttagggcggacttacgtgtgaacagtttcaggactgcaatcttagcactttactagaaaatgaatatctagaaaaacatgcttaattgtcacagtgaattatttgtccttattaaaccacatttgaaatacagtgtgtctcacagaaaactagaaaaaatataaaactatcagtcaatgaaaagctctgaa

SEQ ID NO: 488127 - DNA, 562 bp, Homo sapiens
cggcagcagtccgcagccctgggttcccggggtggcggtggcggcggyggtggtggtggtggcggcggcggcgggggcgccggggccgggggaggctcggacttcggctgcagcgcggcgccgcgttccgagagcggcttcctgccctactcggccgcggtgcttagtaagacggccgtgagcccgccggaccagagggacgaggctccgctcaccagataactacgtcgccaccgccagggggccgcgcccgcctctctgagtgtgcccgggagtcccctgtgcgccccctgagccctccgcgcgttgcccgctgctgccgctgccgccaggggccccggggcgcgggaggccgaaaggaacctgctccgaattgggggagaaggagcaggcgcaaaagctggcgggcatccccctaaattatttctatttttgtatttgccacccagccgtctgcccttctctctcttttctggctcccgggacccactttccacctctgtcctgagcgcttggtttcccaaagaccaacccctcgccccctaagctagtcctggctgtg

SEQ ID NO: 488128 - DNA, 562 bp, Homo sapiens
cggcagcagtccgcagccctgggttcccggggtggcggtggcggcggcggtggtggtggtggcggcggcggcgggggcgccggggccgggggaggctcggacttcggctgcagcgcggcgccgcgttccgagagcggcttcctgccctactcggccgcggtgcttagtaagacggccgtgagcccgccggaccagagggacgaggctccgctcaccagataactacgtcgccaccgccagggggccgcgcccgcctctctgagtgtgcccgggagtcccctgtgcgccccctgagccctccgcgcgttgcccgctgctgccgctgccgccaggggccccggggcgcgggaggccgaarggaacctgctccgaattgggggagaaggagcaggcgcaaaagctggcgggcatccccctaaattatttctatttttgtatttgccacccagccgtctgcccttctctctcttttctggctcccgggacccactttccacctctgtcctgagcgcttggtttcccaaagaccaacccctcgccccctaagctagtcctggctgtg

SEQ ID NO: 488129 - DNA, 572 bp, Homo sapiens
aggtccccgtgtcgcgtgattcaagaggcgaaggaagcattggagccgggactcacggtcagacaaaggggcgactgcagtgcttccccgcctctggcagccccctgggtccctctggctccgctgtcaggggcggccttgccgccaagatctccggctttcggaggcgctaggctgcgtctgaaagcgggctggcgaccccagggaggccgcaccgcccttcactgttgatcttgaccgtgcggctgcgccccgataggcatggagcgcgctcgccatctcctgggcrttgggcggcattggcagagctctctattcgctcctcagccaaatcctgttccattctctcaatcaccagccaagccaccctcccgccactactttccaccccgatcctccctcgatcaggttccccagctcgcataagactttgcctgccagacctcgaaagtcataaacccgggggatgaagtgggaagactgtccaaggagcaatggagggaacctagttgttcttgtttttcctgtttttcactgagttcttttatgcctttagtcctgaggcgcaaaca

SEQ ID NO: 488130 - DNA, 572 bp, Homo sapiens
aggtccccgtgtcgcgtgattcaagaggcgaaggaagcattggagccgggactcacggtcagacaaaggggcgactgcagtgcttccccgcctctggcagccccctgggtccctctggctccgctgtcaggggcggccttgccgccaagatctccggctttcggaggcgctaggctgcgtctgaaagcgggctggcgaccccagggaggccgcaccgcccttcactgttgatcttgaccgtgcggctgcgccccgataggcatggagcgcgctcgccatctcctgggcgttgggcggcattggcagagctctctattcgctcctcagccaaatcctgttccattctctyaatcaccagccaagccaccctcccgccactactttccaccccgatcctccctcgatcaggttccccagctcgcataagactttgcctgccagacctcgaaagtcataaacccgggggatgaagtgggaagactgtccaaggagcaatggagggaacctagttgttcttgtttttcctgtttttcactgagttcttttatgcctttagtcctgaggcgcaaaca

SEQ ID NO: 488131 - DNA, 585 bp, Homo sapiens
gggtgggggaacgaggtccccgtgtcgcgtgattcaagaggcgaaggaagcattggagccgggactcacggtcagacaaaggggcgactgcagtgcttccccgcctctggcagccccctgggtccctctggctccgctgtcaggggcggccttgccgccaagatctccggctttcggaggcgctaggctgcgtctgaaagcgggctggcgaccccagggaggccgcaccgcccttcactgttgatcttgaccgtgcggctgcgccccgataggcatggagcgcgctcgccatctcctgggcgttgggcggcattggcagagctctctattcgctcctcagccaaatcctgttccattctctcaatcaccagccaagccacyctcccgccactactttccaccccgatcctccctcgatcaggttccccagctcgcataagactttgcctgccagacctcgaaagtcataaacccgggggatgaagtgggaagactgtccaaggagcaatggagggaacctagttgttcttgtttttcctgtttttcactgagttcttttatgcctttagtcctgaggcgcaaaca

SEQ ID NO: 488132 - DNA, 626 bp, Homo sapiens
tgaagggagaagttttcgaaaaggaagtcatcagtaggtggagagggcttgctggtgtcataagtggacctggagtagggaaggtaaaccctccccgcccccactgaaatagggccaggagctgcagaccctctcacggcatttatcgcttcaagttaaagaatgtggtgagggctctactgcactttatgttgcagggccaggccaggctgtttacaaaaccttgaactgtctagacaacaccataaaagccaaagttctaaacagcttaattgggttatattatacaccttctggtgggcccaaaagagatttccgcaatgtgcaataaactggagaagtgagaaaagctctctctctgaaaagagtgaagtgaatcttatgastcttaacctctcctaagcccaaagacaaaatataaatctataaatgcacagtaccccatgcatcttccaaggagtcatgcacttcaaaatgcaattaaaaaaattgctaagccttatttgggaaggaaaaaataagtgcataaatgtatgcctttgaacttccaaaatgtcaaggtcatcacctttaacctttctgaataattaggcgccttaagttcttcttgattttcagctgccacc

SEQ ID NO: 488133 - DNA, 530 bp, Homo sapiens
ttgtctcaaggagcgggtctgaaagcagaaattttaaagataaaaaatagaattgtgtgagaacagattcaaaattatgtctgatatacacatttttgtctgtgagtaaaaacctatttaactctaaccaataagggagtgactttgagctcaaagccactgaaagctgaaatggaaaggtccccaaattctgaagacacatcctgcctattctggctcactgcagacctacccgcccgcaaggaattgcttgtttttagcctgtatgttttcttcatgtataaataaagattatgaaagggcatttgatgggcataaaattcccgattagattaaacagtcttgcctttcttagggtagggaaaattgggcaaacaagttcccagcagctcttctggccragaggcaaaagggcgacactcgatactgctggagcgccaagctagtgtcagggcgcctgcggcaagcgagtgcagcgggcacttcattcagctttgggcacgcttagccctggcttgaaacaagatctc

SEQ ID NO: 488134 - DNA, 576 bp, Homo sapiens
caatgcttggatgttgacacatttgagcccattagaagggcatcttgtgcgcaagtcactgccagtctgtctgcatgaaacaccatgatggggggtggggatgtctagtcagtgtaagaaagaaggtggcgagtgtstgtgatgtgtaattcccccaggcctttatttgaacacaaatctatgctctttcccagctacaaaaggaaacatttacctacatgaataatcaacactctgggcgtgtgtgtaagctatgtatacatacaaattcataatctaatatataccagctattgcaacagtctttgtctgtacatgaggtatgaatttaccatggtttaggcggccagtggggccagaagttacactttgagaccagcacagaatgctgaagaaatgacaattttatctcctcttccttccttgatttccgtacccacccatacacagggctcccacctgacagtcttgccaacattatttcagggttctaaaagtatctggtgagcatccttgagcaggagacagccagttttgctaatatataaagaagtcctgagtcccttaaatccaggg

SEQ ID NO: 488135 - DNA, 576 bp, Homo sapiens
caatgcttggatgttgacacatttgagcccattagaagggcatcttgtgcgcaagtcactgccagtctgtctgcatgaaacaccatgatggggggtggggatgtctagtcagtgtaagaaagaaggtggcgagtgtgtgtgatgtgtaattcccccaggyctttatttgaacacaaatctatgctctttcccagctacaaaaggaaacatttacctacatgaataatcaacactctgggcgtgtgtgtaagctatgtatacatacaaattcataatctaatatataccagctattgcaacagtctttgtctgtacatgaggtatgaatttaccatggtttaggcggccagtggggccagaagttacactttgagaccagcacagaatgctgaagaaatgacaattttatctcctcttccttccttgatttccgtacccacccatacacagggctcccacctgacagtcttgccaacattatttcagggttctaaaagtatctggtgagcatccttgagcaggagacagccagttttgctaatatataaagaagtcctgagtcccttaaatccaggg

SEQ ID NO: 488136 - DNA, 573 bp, Homo sapiens
attttagaaaaggagactttgctttaaaataaggttccattagcacatttaaaatagaatttcctaagaaagagatcatcagaaacgtatatagcatgcaacaagagtacatgttctagagggagacttgcccaggggagaaatgagtacagggaaaagtttctggtgaattatytgaataccaacaacacacacaaggtttgactccctcacattcctacagcaggtgggaggcaagagtacattgaaactgggaaaccccccataactctcaatattcagcctcattaatacaaatatttccatttccaccaagcatgttagaaacactgccgtcaacagaaacatttttggctagattgcttgaattaaaaatgttagtgtcccagtagagggcaatattcactcccagaaaccttgggtacacaattcaacacagaacacaacacaagcactgaagagaaacttcttagatactcccacactggtgtcctgtcagctcagtgctccaattaattccacaaatgctgccaaggcggcaatgggctggctgcgtttgtggctgatgataaa

SEQ ID NO: 488137 - DNA, 553 bp, Homo sapiens
tgaacaggtaaatatgaactgctgggagatgttcttctgattcttttcacaaagaaggacaaaggctggcttctatccacactcaccaggggaatggattcaaaactgagatctcatcaagtagtggtttgtttgcacatcctcgattcattccattgccccagtgttcactgcacatcaactaagtttgctgtgtacttgacaatgtgctagggacttccagatggaattcagttatgagacttcatctcagaggggttkcttatggaagaactcaagagacaaatcattaatattagtgctaccttagagccatgtaagtctttagtgtccacagagtgtttgcagatccattaccccattcgctcaccaccacaaccctgtgagatagtctggaaaaactacattgtgtggtggttaagagctcagactctggatccagtctgcctgtgttcaaagcctggctctgccactgaatagctgtgtgaccttgagctgttaacttaacctctctatgcctccattccctcatctattaaaatggggttaggaa

SEQ ID NO: 488138 - DNA, 553 bp, Homo sapiens
tgaacaggtaaatatgaactgctgggagatgttcttctgattcttttcacaaagaaggacaaaggctggcttctatccacactcaccaggggaatggattcaaaactgagatctcatcaagtagtggtttgtttgcacatcctcgattcattccattgccccagtgttcactgcacatcaactaagtttgctgtgtacttgacaatgtgctagggacttccagatggaattcagttatgagacttcatctcagaggggtttcttatggaagaactcaagagacaaatcattaatattagtgctaccttagagccatgtaagtctttagtgtccacagastgtttgcagatccattaccccattcgctcaccaccacaaccctgtgagatagtctggaaaaactacattgtgtggtggttaagagctcagactctggatccagtctgcctgtgttcaaagcctggctctgccactgaatagctgtgtgaccttgagctgttaacttaacctctctatgcctccattccctcatctattaaaatggggttaggaa

SEQ ID NO: 488139 - DNA, 589 bp, Homo sapiens
ggactctcaagcctcctggaaacagagccccttggagagttggagccagcaaggcagggcagaagaatgagcctgaacacgaagctaagctagcacgtggcaagaacttggtgctttaactgcttagacaacaaacatatagccctctaccagacctacaggatgtgatcccctttccccttcttcactctcccacagaactatccctctttgtctcttctttaaggccatggttctcaaatkgtgtcactatttgccactaggcactattagttatcagagaagtggaaagtattttgtagttagtattaaaatacctaagcattaaaatatatattttcttaactcaaaagagaccagggttatttccacaataacatcattttcactcccctgctctattaatcaggtattgttggttggaaaagacaaaaatttcactcacactagcttaagccaaaaagaggatttatttgaaggttattgaatagtccagttaccattactgtgtaacatattatccccaaacctggtaggttaaagcgaccactttatcaaccattttatcatgcctatgaattatatgggt

SEQ ID NO: 488140 - DNA, 535 bp, Homo sapiens
ggaggccattatccttagcaaagtaacacaggaacagaaaaccaaatactctggtctcttattggttttagtcaatccttcatatctttcaaagtytggctcaaatgccatgtatatactgttagtattgcctaacctaacttgaacatctaagagcatccaacagctttccaattattttgtatttgtacaggtataggtactttagctcctccaactggtggaaataaggactgtatcttacacactattgtgttcccccacatctggttcaatgctttataccatagaagctcaatactttgacactatgcaaaaatcaagtactttcagatagcttgggaaaaaatgttttgacagttcctaattctttcttgcatacagatcttcctttcacaatttcagatagagaataaaagtctggttttctactggcaaatggaactattcttggtctttaattttctttcatgccattatttcagaaaagtaaacagctcaaacccaatcataattcacacgccaaaatggcaaa

SEQ ID NO: 488141 - DNA, 303 bp, Homo sapiens
tcatgaaatcgagaaatttttcatggtataaaaatcacataayatgtaacagtttcactaccaatgagtctaaatctctagtttaaaaagaaaattcatcagcatcagactacagacacagctataaagtaaaggaagaaaaaaaatgctatgtagggtttttttttagaccttaaatgttgttgttcaaaagttgctctatgttatgattttatgattgctccctattttaaaaatatccacagcatgtattaaacatccatcatatcacaccagacaacttcaaagacacaactggaaatt

SEQ ID NO: 488142 - DNA, 303 bp, Homo sapiens
tcatgaaatcgagaaatttttcatggtataaaaatcacataatatgtaacagtttcactaccaatgagtctaaatctctagtttaaaaagaaaattcatcagcatcagactacagacacagctataaagtaaaggaagaaaaaaaatgctatgtagggtttttttttagaccttaaatgttgttgttcaaaagttsctctatgttatgattttatgattgctccctattttaaaaatatccacagcatgtattaaacatccatcatatcacaccagacaacttcaaagacacaactggaaatt

SEQ ID NO: 488143 - DNA, 621 bp, Homo sapiens
gcatagcatattcatagcagagcccagaaaaggaatttctcacattgaaacaaacatccccctacttaatcagagggagccatagtcagcacagctaacagattcttttgctccaaagtcaattcaatgtacacttttgttaccctggaacatattcagcatggggtaggcattaaggkggggaggttctaagaagtccttggctttaaaaagcttaaactcttggtgtgctgactgccttatcgaaatgaaacaaaagagcaatcatgcagtggaaagagatctgaattaggggttctggttccaggtttactatttatcagctttcatatcaacacagcagtcttctcactgcattcattttcaaacaaggacctagctagattgtctgtaaactgcagttcccacattctaagattctaatcaagcatcaaaatgcatggaacaacctattatggctcagaaatctttaagagaggctgctgctgcagccctccagaaagaaaggtttcaattgaattacattatgaatccacagagaaaaagacgctagaggaaaggggcaaaggggcaggtaggtatacaaccagactttctggctgtatttacataggttcctga

SEQ ID NO: 488144 - DNA, 648 bp, Homo sapiens
gcctagcctaccttaaatgtgctcagaacacttacattagcctagttgagcaagatcatctaacacaaaccctattttataaaaaagtgttgactatctcatgtaaaagtatcataccacatatccctagtctaggaaaaaatcaaaattcaaaatttgaagcttggtttctactaaatggtattgcttttgtaccaccacaaagtagaaaaattataagttgaaccatcataagtcagggaccatctgtatttgttttgatgattatccaaggcccattttactctggcaagatttatagaagcaaattttataactcagctaaaatggccttcaagtatagcatarttttttgttttaaactacaatacacgttggaaatgatttagaaactcatggggtcaagcttttactttgggacgactgaccaatttattggggcatcaggggtacaggataatcttggtctatttcatttagggagctctgatagaaaaacaatttcattcacattcaccttcatattttgacatctggaggctggttgtgaaatcaggaaaatgacagatgagactgaataggaaatgctatttggtttatgtcccagggatattgttaaacaaaaatgctgagtgagctatttcaaaa

SEQ ID NO: 488145 - DNA, 648 bp, Homo sapiens
gcctagcctaccttaaatgtgctcagaacacttacattagcctagttgagcaagatcatctaacacaaaccctattttataaaaaagtgttgactatctcatgtaaaagtatcataccacatatccctagtctaggaaaaaatcaaaattcaaaatttgaagcttggtttctactaaatggtattgcttttgtaccaccacaaagtagaaaaattataagttgaaccatcataagtcagggaccatctgtatttgttttgatgattatccaaggcccattttactctggcaagatttatagaagcaaattttataactcagctaaaatggccttcaagtatagcataattttttgttttaaactacaatacacgttggaaatgatttagaaactcatggggtcaagcttttactttgggacgactgaccaatttattggggcatcaggggtacaggataatcttggtctatttcatttagggagctctgatagamaaacaatttcattcacattcaccttcatattttgacatctggaggctggttgtgaaatcaggaaaatgacagatgagactgaataggaaatgctatttggtttatgtcccagggatattgttaaacaaaaatgctgagtgagctatttcaaaa

SEQ ID NO: 488146 - DNA, 682 bp, Homo sapiens
ctagccattaatattgtttacagaatataagcagtactgtgtttatatcatggcttttataagggagagatgcccatatgcttgttagaacctagaataccttggtgacagaaagactctctttgccttagctttactgagaataggaagttagctaccctgtaacagtgggaagaaaagagtccatgccaaggtaactgttcatatgcaaggaaattttgcacagtgrcttttttaaaaatcatctttaacattacctacatactaggataaagactcaatctaaatacttcacaaacttctgaatacaaagttacttgacaaactttgattttcctcacatcataaacagtataactaatatctttttttcttttttttcccagacagagtcccgctgtgccgcccaggctggagtgtagtggcgcaatctcggctcactgcaagctctgcctccggggttcaagcgattctcctgtcccagattcccaagtggctgggactagaggcgcctgccaccacgcccagctaatctttttatatttttagtagagacagggtttcactatgttggccaggctggtcttgaactcctgacctcatgatccacccgcctcagcctcccaaagtgctgggattacagacgtaagccaccgcgcccagccctaatatctttatataa

SEQ ID NO: 488147 - DNA, 621 bp, Homo sapiens
catagcctaccctcccacatccactgtcctgcatcacctcatgcagagatgagcaaaggcaaactgagctcagagygggtgttttatcaaatagatgttgctagacttttcaaagctgctgaagatcactttaaaaacttcccctctgccttcccaaacactgtatgccacgaaaagactaagttagaatacggctgacccttaaacaacagaggtttaactgcatgggtccatttatatgtgcactttcttctgtctctgacacccctgagacagcaagaccagctcctcctctcctcttcagcagtctgttcagcctactcaaagtaaagacaatgaggatgaagacctttatgatggtccacttccatttaatacagtaaatatattttttcttttttatgattttcataaatttttttctctagcttagtcttaagaatacagtataaatacacataacatacaaaatatgtgttgattgactgtttatgtaatcagtaaggcttctggtcaacaataggctattagtagttaagatttttggggaatcaaacgttttatgctaattttagactgcacagagagttggcatccctaacccccatgttgtgcaagggt

SEQ ID NO: 488148 - DNA, 621 bp, Homo sapiens
catagcctaccctcccacatccactgtcctgcatcacctcatgcagagatgagcaaaggcaaactgagctcagagcgggtgttttatcaaatagatgttgctagacttttcaaagctgctgaagatcactttaaaaacttcccctctgccttcccaaacactgtatgccacgaaaagactaagttagaatacggctgacccttaaacaacagaggtttaactgcatgggtccatttatatgtgcactttcttctgtctctgacacccctgagacagcaagaccagctcctcctctcctcttcagcagtctgttcagcctactcaaagtaaagacaatgaggatgaagacctttatgatggtccacttccatttaatacagtaaatatattttttcttttttatgattttcataaatttttttctctagcttagtcttaagaatacagtataaatacacataacatacaaaatatgtgttgattgactgtttatgtaatcagtaaggcttctggtcaacaataggctattagtagttaagatttttggggaatcaaamgttttatgctaattttagactgcacagagagttggcatccctaacccccatgttgtgcaagggt

SEQ ID NO: 488149 - DNA, 546 bp, Homo sapiens
tgtttggttatcctgtggtataggccacataggaaagacagaataaatttctagatagttcttagtcctgggttcttgtaaaacttacatgcttgggtgggatctgtggtcttacctttcctactcctgttgatagagatgtcaagaggcacaatctcttttgttttttgccccagtttatagtatactataatcctacttcagattcctgataattctattattttttaccttcccttataagcacttgtattaaaaaaatagcacctgaataatgaatgtataatgagtacaattcctagcctagaaatacaagtgtatgggaaatccaattcaagttcatttctatttcaaatttctagtccattgacacgaaagtttatattttggtcaatttggcttttctcccctatttgctctggatttgtttaagttcccmgacttacctagtgctaagaactgagattgtgtttgggagggagatattatatttcaaccctgacaccgtcttttctcattagtgttaattgagatgtccatcatcct

SEQ ID NO: 488150 - DNA, 616 bp, Homo sapiens
ctgggaatatgaatagaggtatttcactgaagttctaaatgttggcgttactgtaattatggtggttatgtgagagtaagggtgctagttaatctgggctgctgagactgtttgatgaaattatcttgatttattataagggtgaatcatgcrgcagttggcaagggacaaatcttatgagaattcccgtaacaacaacaaatataaaatgagtgcctctgatatacaaagtgtcatataaatgcacaaattatcttcaaaggtacttttggtttctagaggagggttccctcttttagggattatgcaaagacagagagacctttgtaggaacaatgaaagagaagttatatcaaatgggagaggtagatgacaccatttcaagtaagaaatatagaaaaattaatttttttttctgctcttgtctgtgagctataagggtaactataagattgtgggcaaagaaacaaaaaggtgagagaaaagaatcaggaggtaaggaagcctgacaagaccagttgtgccttcctaagaagagcgctgtgcataaaatctgtctcaaaatactgacagagatgattttatatgactaatagaaaaacaccatagaaggcta

SEQ ID NO: 488151 - DNA, 502 bp, Homo sapiens
ctgcctactgtgctacctgatgttagtacctctgtatttcagggttcacacaaagcattgtggtcaatgacatcaatggcatgacgtcattgaactcaaacaaccacaccctccactagagagagctccaagggacagttattcaagtcagcactggagaacaccaccaactttttattctcttgaagccttgtctcttatttatctaagatccatgcagacgtagttcagtacaagtcctcttgtttagcaaagtggagaaatgtagtttgtcagaagaattttttttttttttytgagacagagtctcactctgtcactcaggctggagtgcggtggcgtgatctcagctcactgcaacctccgcctcccaggttcaagcaattttcctgcctcagccttttgagtagctgggcttacagatgcatgccaccacacctggctaatttttgtatttttagtaaagacggagtttcaccatgttggtcaggctggtctggaa

SEQ ID NO: 488152 - DNA, 623 bp, Homo sapiens
agaaaaaacaagaaagactccattgctttggtctgagtaatttggtggtagtagtgccactaacagggaaactgggagaggagcagagtttttctagggaaaatcaagcagttggttttgtccatgtgaagcttmcagtgcctgttagatctccaaatggatatgtagataaaatggttgatatatgagtatggcaagatgtcagaactgaagatattatcctcctgtgagtcattggcatttagatgctatgtaaagctacaagactgagtgagctcatcaagggagagcatgttgatatgagcagcaaggactaagccttgaatatttttgcctttgaaaaatacagtattctatagactagaagtacattatttaccaggcaaatcagccagttttaaaaacccactttgtcttcctctctcagcaagtagtgggaggccatcttagaaggaagctatcctggtgagaagctctaatcacacagcagcccctgggacttgccagtatgtcatcagatacacaaagaaagattctggttccactatgcctctctctcatcctaagtcttccctgactctcccaggccacagtgatccctccttctcctaactcttcttcct

SEQ ID NO: 488153 - DNA, 459 bp, Homo sapiens
gtcagaatcatgagccaaataaacctttttttcttactcgggctggagtattcctttatatcaatgcaaaatggaccaagacaaagcyctccagccaatttccactccacgtggccactgtagcagtcagagttcaggatgaaaaactaaaatgactctatgcattctggatgtaaaagggcccctaattctttatatagaattaatggcatacactactgctcagagagtagaatatgaggataaggttcaaaagctctattcttgaatgtcagagttgctgaccctcaaagatcttagcctggaacacctaggtgcatattaatatttcctgaagtttgtgccaggaaactactaggaatttctcatttgccctgctatacagctataaccatatccagaggaataatgtccttctctttccaaatcttgcctctgttctcatgagtaataacctgg

SEQ ID NO: 488154 - DNA, 544 bp, Homo sapiens
aagaaaaagctgttggttaaacaagcagcagagcctactgcatactatataacaatataatcatcattttatttgtaaataaatatatatgttaccaaagtagctagctatatagtttaaagaaatatgctgtatatggctgggcatggtggctcacccctgtaatcctagcactttgggaggccaaggcgagtggatcatgaggtcaatagattgagaccatcctggccaacatggtgaaaccccatctctactaaaattacaaaaattagctgggtgtggtggcatgcgcctgtaatcccagctactcgggaggctgaggcaggagaattgcttgaacccgggaggtagaggttgcagtgagccaagattgtgccattgtactccacctggcgacggagcaagactccatctcaaaaaaaaaaaaaaaagaaagaaagaaatatgctgtattacattgaccatgcatacctattattacccacaaggtacaaactcctrcaagttgttcaggtttcaggctaaactgtaaaactaaagtcag

SEQ ID NO: 488155 - DNA, 739 bp, Homo sapiens
gcatggagcatgagacataggcttaaagccatcaatgtctcctttcgcttggttacaggtgatgggctctaatgcatgggctttgtgacaactatctccccttgttttgagcccttttctggctcccatgcactcagatatgttttggatagatatagtcactgtgagtctggcctctgtttatgagagttactgaagtgaatgtattttattttatcttattttttagtgctcttaaaattcactttggtttttkaatatttttaaaagactcatgagactgttcatatttcatgacctgcgactatactaaggagaaacagctcagaaaactaatttaaaataattcatacctaattgcggtctcatttctgaaaatattttgcacacaatcctaccctgccctggtaccctggacatcacaaagagtggcacaacgtaacataagataccataccatgtatccagcaatcagcttttatgagacttgcatcattataaacctataagaaaaaagcctgtgcattatggaaaaatttgcacaaaactctgtgtacctgactcattgtgaacacccaatcccttaggcctaatggtttgaaatagtgggtgaagcaaaggccaatgatgggtcaaattcctgtatttgtttcattgctgaggtagtgaagggaccagggatggtgtcagaagctaccacatcaagatgtgagagagaagcagcagccaaatcacacgc

SEQ ID NO: 488156 - DNA, 533 bp, Homo sapiens
aacatttaaacatgaaacatcaataaaattatttcaataagatatagaatagtaatcctaaaaccttggaatcgaaagtgttttcattctcagacrtccaaaagaaacaatttgactcatttaaccatgtaaaaatatataatttttatggtaaaaaaaaacaccaaaaatcttaaaagaggaagtcactggtaaaagtattcacaactaaaatgatcacagagggtgtaatcgttgaattgtgctcctcaaaaaatatctgttgcactcctaaccccagtacctcagaatgtgaccttatttggaaatgggatcttttcaaaagtaagtgcctcatatgaggcattagggtgggccctgatgcaatatgactggtgtatttgagtatttgaagtgggagaatacttgatgccagagatgggaggccaggaagaaataataaatttacaatgcacagcaaacaccatcttttagggagaattctgggaatatggtaacctgagcccagatccatttccttcattcccacatgt

SEQ ID NO: 488157 - DNA, 533 bp, Homo sapiens
aacatttaaacatgaaacatcaataaaattatttcaataagatatagaatagtaatcctaaaaccttggaatcgaaagtgttttcattctcagacgtccaaaagaaacaatttgactcatttaaccatgtaaaaatatataatttttatggtaaaaaaaaacaccaaaaatcttaaaagaggaagtcactggtaaaagtattcacaactaaaatgatcacagagggtgtaatcrttgaattgtgctcctcaaaaaatatctgttgcactcctaaccccagtacctcagaatgtgaccttatttggaaatgggatcttttcaaaagtaagtgcctcatatgaggcattagggtgggccctgatgcaatatgactggtgtatttgagtatttgaagtgggagaatacttgatgccagagatgggaggccaggaagaaataataaatttacaatgcacagcaaacaccatcttttagggagaattctgggaatatggtaacctgagcccagatccatttccttcattcccacatgt

SEQ ID NO: 488158 - DNA, 533 bp, Homo sapiens
aacatttaaacatgaaacatcaataaaattatttcaataagatatagaatagtaatcctaaaaccttggaatcgaaagtgttttcattctcagacgtccaaaagaaacaatttgactcatttaaccatgtaaaaatatataatttttatggtaaaaaaaaacaccaaaaatcttaaaagaggaagtcactggtaaaagtattcacaactaaaatgatcacagagggtgtaatcgttgaattgtgctcctcaaaaaatatctgttgcactcctaaccccagtacctcagaatgtgaccttatttggaaaygggatcttttcaaaagtaagtgcctcatatgaggcattagggtgggccctgatgcaatatgactggtgtatttgagtatttgaagtgggagaatacttgatgccagagatgggaggccaggaagaaataataaatttacaatgcacagcaaacaccatcttttagggagaattctgggaatatggtaacctgagcccagatccatttccttcattcccacatgt

SEQ ID NO: 488159 - DNA, 533 bp, Homo sapiens
aacatttaaacatgaaacatcaataaaattatttcaataagatatagaatagtaatcctaaaaccttggaatcgaaagtgttttcattctcagacgtccaaaagaaacaatttgactcatttaaccatgtaaaaatatataatttttatggtaaaaaaaaacaccaaaaatcttaaaagaggaagtcactggtaaaagtattcacaactaaaatgatcacagagggtgtaatcgttgaattgtgctcctcaaaaaatatctgttgcactcctaaccccagtacctcagaatgtgaccttatttggaaatgggatcttttcaaaagtaagtgcctcatatgaggcattagggtgggccctgatgcaatatgactggtgtatttgagtatttgaagtgggagaatacttgatgccagagatgggaggccaggaagaaataakaaatttacaatgcacagcaaacaccatcttttagggagaattctgggaatatggtaacctgagcccagatccatttccttcattcccacatgt

SEQ ID NO: 488160 - DNA, 634 bp, Homo sapiens
tggggcagccagctatctgatgccttcctcccccatgsccacgcttcgtttccagcaccaccttgagactgcaattcccagccacctaagcagccccaagaagagccctctgagaggccacactgacctactgggggagcccaggagacccaggggccttgcgctttgggttttgatttttcttgccagaggaaaaccctgcagattgctgcaagctgcgggaataaactcatgcctttgtggaagaacagccagaccacaggctctcagaagactcaactctcaggacagcagaggctcacgacactaaagcctctaggccaccaggaagttggcaagaaatgttttgctcaagttacccttctttcaagaggtagcgggaggggcagtcatccactctgtttaccaacaagcaccaggtccatatggatctcctctccttcaagtaggagtaaacagggggaaatgaggcctgaaaagattctagatcagagaagacagagactgaatgttccgccatgggcaaaattgaggaagttgtcaggaagctacactcacagaggaagagcatatttgttgagactactcactacaaaagcaaaatgtacatttcagcaaacatttgcaaagcaat

SEQ ID NO: 488161 - DNA, 604 bp, Homo sapiens
ggttacagctcggcgtttgccttatttgaacacagtttgaacactgagtggtgtatgggtggttgaagtatggctgctgggattggccaggactcagcgattgttacaggtgcatactcctaagttagattttcaatcttgtccacctattaagttaggttgcagttcatccacaaggactcaaacatagaagtacagagtccttctcaagccatatttagtttgctttaacagcttattaaagtggggtttgtgaaagataaagtagccccaatattcaccagcatggtacacgttccctgcttgtcttagcctctgtttctcattatttatcaaaaggcatcacaggcaacagctagctggagggtccctcctgcagccaggctgattgtgatctcatggactccctctagtgggcagaccatccccgctgaaaggaggaggctccttggtagacttggatgactaggyagcctctctcccagggacctggctgtttgcaatgtaggcagacatcttggggtgaagggtttcttactctaggttctttaggctgtggtttaaaacaaggagaagatggtccctttggctttggcccctgtaa

SEQ ID NO: 488162 - DNA, 451 bp, Homo sapiens
tgccatggcccagggccagggacagcagggccctgaccctgaccctgaacctgaccctgaccctgaccctgaccctgascctgagggcttggggtgtggagaacttcatggaacccagaggagtgcagcgtgtagggactgcttgggagatgcggcaactgtgatcataacagggagcagggaagacccagctccctccctcacctcatgtccttccaggaccctccaatggctaagtctctgcaagtcagaggtagagaggcctggggctgcagccctcccaggtcagactccaagcaccaggccccgtgaagggtggggagtggaccagagggatccgcagatgagtggcactgtccagtcagtggagagcccacctcatgttgctcagtggagggagctccatgtgaagtagctgcaaaagtgctggaaatgctgcagggcaaaaaga

SEQ ID NO: 488163 - DNA, 536 bp, Homo sapiens
accttcaagttaatgtttcctttgcagcgtacacacagtcccagttactgattccccaaaaacaagctgaatcatcattatacaacagaaagagaacccatgtctatcccatcccccattcacagagccctgagccaggcttgtctcctaatctgcctctggattggagcagtagcccccattgttctacccagacttgggctgtgtaagtgcacactgctttccctgggaggacttagccaccagggccctgcggaaagcccgggcagaggctctctctgcagggcttatccagccactgtcactgcaggtgcctctcctggatcagggcctgtgcagggctgtgggatacacagatgaaacaggccctgtccctgccctcagaggtgttgcagttgataaagagacagacacacatataaatagttgcattagagtgtggtctgtgctgtgagtgagggaattcccaaggagaaggytggggtcaggcttcccaaaggagatgatgcacaagcccatccctggggcacaggcag

SEQ ID NO: 488164 - DNA, 506 bp, Homo sapiens
caagtgagcagaacgtggcactggttggggagcacaggatggtgccatggcccagggccagggacagcagggccctgaccctgaccctgaacctgaccctgaccctgaccctgaccctgagcctgagggcttggggtgtggagaacttcatggaacccagaggagtgcagcgtgtagggactgcttgggagatgcggcaactgtgatcataacagggagcagggaagacccagctccctccctcacctcatgtccttccaggaccctccaatggctaagtctctgcaagtcagaggtagagaggcctggggctgcagccctcccaggtcagactccaagcaccaggccccgtgaagggtggggagtggaccagagggatccgcagatgagtggcactgtccagtcagyggagagcccacctcatgttgctcagtggagggagctccatgtgaagtagctgcaaaagtgctggaaatgctgcagggcaaaaagaagtggtgaggcag

SEQ ID NO: 488165 - DNA, 458 bp, Homo sapiens
cctatcctttccctccccttgtcattcaaacctctaaaatacaagcttttctcaacttggggcttggggacaaggktcacagagtcagtaaccattagaagcagtatgtaatcatttgtgtgtactgcatacagtggcatttttctctagtgagacaatttgtgactttagaatgagctttttcccaaagattgagaatcctgggatgtttattcaatttcactcatgaatgcaatggtttattaaagaatacatttccagaggaagtgatggtcagagacgcttgctaagcttctaacagaagcttgcagccctgaaggctgcctgcctcctcctggaggtcatacccagatctatgctggacacccaggtcgtgcaaagctcagaggtcagcagggctgcctctgccagctcctttcatggaagctgaggcacaagcctgacaacttgttcacttg

SEQ ID NO: 488166 - DNA, 458 bp, Homo sapiens
cctatcctttccctccccttgtcattcaaacctctaaaatacaagcttttctcaacttggggcttggggacaagggtcacagagtcagtaaccattagaagcagtatgtaatcatttgtgtgtactgcatacagtggcatttttctctagtgagacaatttgtgactttagaatgagctttttcccaaagattgagaatcctgggatgtttattcaatttcactcatgaatgcaatggtttattaaagaatacatttccagaggaagtgatggtcagagacgcttgctaagcttctaacagaagcttgcagccctgaaggctgcctgcctcctcctggaggtcatacccagrtctatgctggacacccaggtcgtgcaaagctcagaggtcagcagggctgcctctgccagctcctttcatggaagctgaggcacaagcctgacaacttgttcacttg

SEQ ID NO: 488167 - DNA, 575 bp, Homo sapiens
tgacttcatgctttttgctttagcacatacttgagagaatgtttcaattggagtccaatcagaccagccatcctactttgccattttatcacaacctcagcacatacacaggaaagttttagcagttcaacagaacatttttagtcatttggcagaagtagtatgccaatttgcaamtttgctggaaatttcccaatatactatctctgttaacaagctcattacaaaacttctcacagcctccctgggggattgtactaggaactagatgtatccaaggcactaatgttgtttctagatattttatttttattgtgattgtaaaagagatctttgttcactttattttgtaaagggtttttgcaagtatatataaatgcaacttatcactgtgtttattttatatccagccactttattctcttactattatccctaaatacttgctacgtctttgaggaatgcccatatttttctgccctgtggacatcacttcttgaccaataaattgggagttcagtgctggattctgagcagggaagtgatgtgtgccttctaagcagaagctctctggg

SEQ ID NO: 488168 - DNA, 575 bp, Homo sapiens
tgacttcatgctttttgctttagcacatacttgagagaatgtttcaattggagtccaatcagaccagccatcctactttgccattttatcacaacctcagcacatacacaggaaagttttagcagttcaacagaacatttttagtcatttggcagaagtagtatgccaatttgcaaatttgctggaaatttcccaatatactatctctgttaayaagctcattacaaaacttctcacagcctccctgggggattgtactaggaactagatgtatccaaggcactaatgttgtttctagatattttatttttattgtgattgtaaaagagatctttgttcactttattttgtaaagggtttttgcaagtatatataaatgcaacttatcactgtgtttattttatatccagccactttattctcttactattatccctaaatacttgctacgtctttgaggaatgcccatatttttctgccctgtggacatcacttcttgaccaataaattgggagttcagtgctggattctgagcagggaagtgatgtgtgccttctaagcagaagctctctggg

SEQ ID NO: 488169 - DNA, 418 bp, Homo sapiens
gattccgaggtggcttgaacagcatcataaccagaaggaaggaagggagggtgggaggatggatgggtgggtagctagatggacggtggggtttctttacccatggttcatgttggtacaagatccccccttgtggctttccttctctctctaaagagtggrgtaaggtcatctcccgaggtgggatgcaggagagggaagctcgagcagtccttgtgggattggggaatgggagagcggtggaaggaccctgggccgtattgaaggcacacctcagtttacagtggggcgaaactgcgcgtttgagaccccagaagcatcagactactcaagaagcaggcacggaggaaaaggaaacccatctctgagtttacccaagactgacccagatggtttcagtgaaaatcaaagggcagtc

SEQ ID NO: 488170 - DNA, 418 bp, Homo sapiens
gattccgaggtggcttgaacagcatcataaccagaaggaaggaagggagggtgggaggatggatgggtgggtagctagatggacggtggggtttctttacccatggttcatgttggtacaagatccccccttgtggctttccttctctctctaaagagtggagtaaggtcatctccygaggtgggatgcaggagagggaagctcgagcagtccttgtgggattggggaatgggagagcggtggaaggaccctgggccgtattgaaggcacacctcagtttacagtggggcgaaactgcgcgtttgagaccccagaagcatcagactactcaagaagcaggcacggaggaaaaggaaacccatctctgagtttacccaagactgacccagatggtttcagtgaaaatcaaagggcagtc

SEQ ID NO: 488171 - DNA, 597 bp, Homo sapiens
accccccaaggcctgggccttctacatgtgctcaactgcttagagctgtggggagggggacacccggccctgcccccaccctcaccctttcttgctcgaatgtcaaagctagaggctttgctggtaccaggaccagcttccacccaagggctctgcctgccaggctcagagtggagcaaacaccttgcccctctggctgcccccctgcctgtctctcaagcctcaggtcacacctaagctggtcgctttgacttcctcctggagaccctggtggagacttgctgcctagaggggaaggggtgtggaccctgggcccctgggtgactgcccctgttcctcttccagggctccaccatccccatcaaccaggccagacccaaccgcaacctgaccttgaccaggaaggagcctgttgggtgagttcctgcccagggcgaggtgcagcctcgcggtgctttccatgcagtacacggaactgtagcacagcctgcgggagctcacagcaccctgtgcgtgcatttatcaaacagccatccatgtgcttcttgagcacctgctccatgccaggcaytgttgtaaggacttgaggacaattgt

SEQ ID NO: 488172 - DNA, 615 bp, Homo sapiens
gtaacactggatcagtcaggtccacggtgggaaacaagagtaaacccaaaaaatgtccaaaatgggtatggtggtcagtgttcataaagatgaggaactcctgcacagcactgaggaacaggaaatatagaacaaaggaggaacaggcagaggacgagagcygctcagcaggaggagttcggaccccgctggatgccaagcatgtaggcgccgggaaatgaacctggcgtgaggcacctcacctcgccacccagtggccccagggcaggagtagggagaagggcttggaacacagccaccgggctctgggttttccctgctagaggaaactgggcagtgacctctcgaggccatacatcctgatttggccccagtcctggtgagttactcacacgcgtgcctgaggaggcttacccaagagtgcatggccactgtgctaggccggtgacagcaaacaccagagcagcaggtgctggtgcagccctgatccatgatctgcactgaggatgcgcctgcaactggacctagagagccccagccctgggtccaccctcactgcgcctgcacgcggtgccacaggagagcctggccagggtgacctgggagcagggccca

SEQ ID NO: 488173 - DNA, 615 bp, Homo sapiens
gtaacactggatcagtcaggtccacggtgggaaacaagagtaaacccaaaaaatgtccaaaatgggtatggtggtcagtgttcataaagatgaggaactcctgcacagcactgaggaacaggaaatatagaacaaaggaggaacaggcagaggacgagagctgctcagcaggaggagttcggaccccgctggatgccaagcatgtaggcgccgggaaatgaacctggcrtgaggcacctcacctcgccacccagtggccccagggcaggagtagggagaagggcttggaacacagccaccgggctctgggttttccctgctagaggaaactgggcagtgacctctcgaggccatacatcctgatttggccccagtcctggtgagttactcacacgcgtgcctgaggaggcttacccaagagtgcatggccactgtgctaggccggtgacagcaaacaccagagcagcaggtgctggtgcagccctgatccatgatctgcactgaggatgcgcctgcaactggacctagagagccccagccctgggtccaccctcactgcgcctgcacgcggtgccacaggagagcctggccagggtgacctgggagcagggccca

SEQ ID NO: 488174 - DNA, 500 bp, Homo sapiens
gaggaacaggaaatatagaacaaaggaggaacaggcagaggacgagagctgctcagcaggaggagttcggaccccgctggatgccaagcatgtaggcgccgggaaatgaacctggcgtgaggcacctcacctcgccacccagtggccccagggcaggagtrgggagaagggcttggaacacagccaccgggctctgggttttccctgctagaggaaactgggcagtgacctctcgaggccatacatcctgatttggccccagtcctggtgagttactcacacgcgtgcctgaggaggcttacccaagagtgcatggccactgtgctaggccggtgacagcaaacaccagagcagcaggtgctggtgcagccctgatccatgatctgcactgaggatgcgcctgcaactggacctagagagccccagccctgggtccaccctcactgcgcctgcacgcggtgccacaggagagcctggccagggtgacctgggagcagggc

SEQ ID NO: 488175 - DNA, 615 bp, Homo sapiens
gtaacactggatcagtcaggtccacggtgggaaacaagagtaaacccaaaaaatgtccaaaatgggtatggtggtcagtgttcataaagatgaggaactcctgcacagcactgaggaacaggaaatatagaacaaaggaggaacaggcagaggacgagagctgctcagcaggaggagttcggaccccgctggatgccaagcatgtaggcgccgggaaatgaacctggcgtgaggcacctcacctcgccacccagtggccccagggcaggagtagggagaagggcttggaacacagccaccgggctctgggttttccctgctagaggaaactgggcagtgacctctcgaggccatacatcctgatttggccccagtcctggtgagttactcacacgcgtgcctgaggaggcttacccaagagtgcatggccactgtgctwggccggtgacagcaaacaccagagcagcaggtgctggtgcagccctgatccatgatctgcactgaggatgcgcctgcaactggacctagagagccccagccctgggtccaccctcactgcgcctgcacgcggtgccacaggagagcctggccagggtgacctgggagcagggccca

SEQ ID NO: 488176 - DNA, 576 bp, Homo sapiens
acgcaatgtaagctgaggagagaagagggcctggtacagagccagaggtgctgggtattttaaggttaggtgagaaaggagatggaaaaagagccgtcagagaagtaagagtcgaattaggagggtgcagagtcagaagccaaaacaagataatggcttaagtggggagctacgctgagtctgggaggaggcagygtcagggagcccactctgaagtctcgttgagatggagacctgagggacagagaggacttagccaggttggggacagggtttgtgcagggcgtggctcggagtaggggctgggggcgtgggacggggcaggaatcacggcattccctgggaggaacagcaggtggcaaggcctctgtggctggctcacctgagggcgggtgttttggagtctatgatgcttaggatgccacatcctcggggacctgatcaggcatccttgggtctctgttcgagcccctgcaagagctgaaggtttggtgccctcaccttggggtctgcctgatggtgaaaagccatgtggggagtgggttgatttgcttgggctaccatgtcaaagctccg

SEQ ID NO: 488177 - DNA, 576 bp, Homo sapiens
acgcaatgtaagctgaggagagaagagggcctggtacagagccagaggtgctgggtattttaaggttaggtgagaaaggagatggaaaaagagccgtcagagaagtaagagtcgaattaggagggtgcagagtcagaagccaaaacaagataatggcttaagtggggagctacgctgagtctgggaggaggcagcgtcagggagcccactctgaagtctcgttgagatggagacctgagggacagagaggacttagccagrttggggacagggtttgtgcagggcgtggctcggagtaggggctgggggcgtgggacggggcaggaatcacggcattccctgggaggaacagcaggtggcaaggcctctgtggctggctcacctgagggcgggtgttttggagtctatgatgcttaggatgccacatcctcggggacctgatcaggcatccttgggtctctgttcgagcccctgcaagagctgaaggtttggtgccctcaccttggggtctgcctgatggtgaaaagccatgtggggagtgggttgatttgcttgggctaccatgtcaaagctccg

SEQ ID NO: 488178 - DNA, 576 bp, Homo sapiens
acgcaatgtaagctgaggagagaagagggcctggtacagagccagaggtgctgggtattttaaggttaggtgagaaaggagatggaaaaagagccgtcagagaagtaagagtcgaattaggagggtgcagagtcagaagccaaaacaagataatggcttaagtggggagctacgctgagtctgggaggaggcagcgtcagggagcccactctgaagtctcgttgagatggagacctgagggacagagaggacttagccaggttggggacagggtttrtgcagggcgtggctcggagtaggggctgggggcgtgggacggggcaggaatcacggcattccctgggaggaacagcaggtggcaaggcctctgtggctggctcacctgagggcgggtgttttggagtctatgatgcttaggatgccacatcctcggggacctgatcaggcatccttgggtctctgttcgagcccctgcaagagctgaaggtttggtgccctcaccttggggtctgcctgatggtgaaaagccatgtggggagtgggttgatttgcttgggctaccatgtcaaagctccg

SEQ ID NO: 488179 - DNA, 608 bp, Homo sapiens
agacaccagtccctggggtgcttgggggctgcaagctttgtccagtcttggagaagagccctttcccctcagcagatgatgctgggacctgccactgtgagaccagccaggccgcgccctcccgggggccccacttctycatgcataaagtggggctttcagcgaggaggtctttatgctcttccaggtctgacatctggaattctgagattaagaacaaaagaaaaaccttctccaacccaagtaaaggatgcacaaatggctgaatttccccctgtgtggagtgtggaggcacagggattctcaaagcctgtttctttttgataccttttaatttcaaaatgtagatatctttgtacatttttctggttattgaagcaatatgaacagatgaaactaccctcaacttccccagtaccaaggaactaaaaccataaattatattattgtgtcacttgctactcaccagactggcaaacacagaaaagcccatgggttgttgagggcagaggagaggaggacctggggcctttcacaccaaggtgcaagtgggaggggcacacagactgggggtgggggaagtgtcagcagcacccatcacaggaagt

SEQ ID NO: 488180 - DNA, 631 bp, Homo sapiens
ttgtgatggtaacaggatggcagaaaggagttcatttayttggagttcatttttgatggggatcccactggaagtgagaagccccctttgtttccataacatgctgaaattatgaagtacttctaaagtatatctgctatctaaaaatatctactgatttatcttaactatgtgacaatctcaggtaaaagcaaaaagctctgcaggttaggctgatttaaattggggaagagtttcctttcctattaattcattttgagtggtaacagcataccccacctgacattttccttctgagttttcagcccaagactcatcaacaaacaaatgtcgccttgggattagctaatggagtgcttcataaagcagcatgctagaccactgattgagataccacactcacactgtaatcagccagaggtagcagagtgcaacagcttagatggagattgggaggcaaaaggatttcattagatgacaatctacttgctgaaaaatgctgaatttgactggaatttaataaattttccacaacatgtggggcttgcgtaaaagttcattccctaagactaactcaggttaaaactctactgatatggcagctgtggctactgcttttagtggtgaggat

SEQ ID NO: 488181 - DNA, 631 bp, Homo sapiens
ttgtgatggtaacaggatggcagaaaggagttcatttatttggagttcatttttgatggggatcccactggaagtgagaagccccctttgtttccataacaygctgaaattatgaagtacttctaaagtatatctgctatctaaaaatatctactgatttatcttaactatgtgacaatctcaggtaaaagcaaaaagctctgcaggttaggctgatttaaattggggaagagtttcctttcctattaattcattttgagtggtaacagcataccccacctgacattttccttctgagttttcagcccaagactcatcaacaaacaaatgtcgccttgggattagctaatggagtgcttcataaagcagcatgctagaccactgattgagataccacactcacactgtaatcagccagaggtagcagagtgcaacagcttagatggagattgggaggcaaaaggatttcattagatgacaatctacttgctgaaaaatgctgaatttgactggaatttaataaattttccacaacatgtggggcttgcgtaaaagttcattccctaagactaactcaggttaaaactctactgatatggcagctgtggctactgcttttagtggtgaggat

SEQ ID NO: 488182 - DNA, 631 bp, Homo sapiens
ttgtgatggtaacaggatggcagaaaggagttcatttatttggagttcatttttgatggggatcccactggaagtgagaagccccctttgtttccataacatgctgaaattatgaagtacttctaaagtatatctgctatctaaaaatatctactgatttatcttaactaygtgacaatctcaggtaaaagcaaaaagctctgcaggttaggctgatttaaattggggaagagtttcctttcctattaattcattttgagtggtaacagcataccccacctgacattttccttctgagttttcagcccaagactcatcaacaaacaaatgtcgccttgggattagctaatggagtgcttcataaagcagcatgctagaccactgattgagataccacactcacactgtaatcagccagaggtagcagagtgcaacagcttagatggagattgggaggcaaaaggatttcattagatgacaatctacttgctgaaaaatgctgaatttgactggaatttaataaattttccacaacatgtggggcttgcgtaaaagttcattccctaagactaactcaggttaaaactctactgatatggcagctgtggctactgcttttagtggtgaggat

SEQ ID NO: 488183 - DNA, 631 bp, Homo sapiens
ttgtgatggtaacaggatggcagaaaggagttcatttatttggagttcatttttgatggggatcccactggaagtgagaagccccctttgtttccataacatgctgaaattatgaagtacttctaaagtatatctgctatctaaaaatatctactgatttatcttaactatgtgacaatctcaggtaaaagcaaaaagctctgcaggttaggctgatttaaattggggaagagtttcctttcctattaattcattttgagtggtaacagcataccccacctgacattttccttctgagttttcagcccaagactcatcaacaaacaaatgtcgccttgggattagctaatggagtgcttcataaagcagcatgctagaccactgattgagataccacactcacactgtaatcagccagaggtagcagagtgcaacakcttagatggagattgggaggcaaaaggatttcattagatgacaatctacttgctgaaaaatgctgaatttgactggaatttaataaattttccacaacatgtggggcttgcgtaaaagttcattccctaagactaactcaggttaaaactctactgatatggcagctgtggctactgcttttagtggtgaggat

SEQ ID NO: 488184 - DNA, 683 bp, Homo sapiens
taatgtgcaatgggcctattgttttccctcatgcctgattgccatgttcatgaatgaacaaggtgaaaagtttagtgcaatttggaagtcctaaggttggggctgcggtaaggccggtttctgccagtgagaagccyactcctgactgccctcccatggtgcaggttctggtgctgcattcttagtgagctcatacaatggtgagatggttaaggaaaagcttggaacccaggatctgcagtatcctgcaagtctcagaaaacctcttcactgtcttttagctgtaggccagggaaaaccttgagtggtttttattcttttggaaaccctttccacagtcaggtcatgccttagagtgaaactttctccttgaaaactgaaggctttccatcaaaactttgtgacctttatgtgcaagttgctgtaagaggtgaagtaagtccattttagaccacactttagtgggagagcaaagcaagagataatctacatgccaaatgaggggagaatttcaaggaaattgcaaggttgtcaagtcctggtgtaatgcctgggaaaaataaggaggcgcttcaggaaacctctgtggcattacagtccaggtatactttgatttttctaagtaaaaagcgaacaaatactgactctctttctcagctagaatgctaaagaaagctggacag

SEQ ID NO: 488185 - DNA, 644 bp, Homo sapiens
acaggaaaccttggtatcacgattttattaagtgctcgtaaatcgtgaacaaatctccctccttgtgcatccttgtcccttgattttttttaactggtaagactggaatattacaaggactgatacatagaataagtccttgtttaattaaatcttctgcaattgatgagagtccttgaattgcccaggcctcagtaaatattaggataatttacrtaaaggtttagaatgaatcggtttagacttttataggtaccatacttttaacccttcctatatcagtaaaggaagaagcctataaacatttgggtattttagagagatcaaagatattgcaggcctgagttttgatcttgtcagtttctgcctgtggagagcacaacagatctcgttcaggaggtcaggaaattctaacattaactcctgctctgcaggaaacttcatatgcctctttagcttagcagataagtcttgccctagtgagttactagaagagtgtcacataggaagaaggttcacttttctgaaaatggccccagcatcaactggacagtttccgacatgggtactattgtgtctgattcaaaacccccaccacagaaatgacctttccactttcagggatttgtcagcttgttaaaaga

SEQ ID NO: 488186 - DNA, 644 bp, Homo sapiens
acaggaaaccttggtatcacgattttattaagtgctcgtaaatcgtgaacaaatctccctccttgtgcatccttgtcccttgattttttttaactggtaagactggaatattacaaggactgatacatagaataagtccttgtttaattaaatcttctgcaattgatgagagtccttgaattgcccaggcctcagtaaatattaggataatttacataaaggtttagaatgaatcggtttagacttttataggtaccatacttttaacccttcctatatcagtaraggaagaagcctataaacatttgggtattttagagagatcaaagatattgcaggcctgagttttgatcttgtcagtttctgcctgtggagagcacaacagatctcgttcaggaggtcaggaaattctaacattaactcctgctctgcaggaaacttcatatgcctctttagcttagcagataagtcttgccctagtgagttactagaagagtgtcacataggaagaaggttcacttttctgaaaatggccccagcatcaactggacagtttccgacatgggtactattgtgtctgattcaaaacccccaccacagaaatgacctttccactttcagggatttgtcagcttgttaaaaga

SEQ ID NO: 488187 - DNA, 644 bp, Homo sapiens
acaggaaaccttggtatcacgattttattaagtgctcgtaaatcgtgaacaaatctccctccttgtgcatccttgtcccttgattttttttaactggtaagactggaatattacaaggactgatacatagaataagtccttgtttaattaaatcttctgcaattgatgagagtccttgaattgcccaggcctcagtaaatattaggataatttacataaaggtttagaatgaatcggtttagacttttataggtaccatacttttaacccttcctatatcagtaaaggaagaagcctataaacatttgggtattttagagagatcaaagatattgcaggcctgagttttgatcttgtcagtttctgcctgtggagagcacaacagatctcgttcaggaggtcaggaaattctaacattaactcctgctctgcaggaaacttcatatgcctctttagcttagcagataagtcttgccctagtgagttactagaagagtgtcacataggaagaaggttcacttttctgaaaatggccccagcatcaactggacagkttccgacatgggtactattgtgtctgattcaaaacccccaccacagaaatgacctttccactttcagggatttgtcagcttgttaaaaga

SEQ ID NO: 488188 - DNA, 644 bp, Homo sapiens
acaggaaaccttggtatcacgattttattaagtgctcgtaaatcgtgaacaaatctccctccttgtgcatccttgtcccttgattttttttaactggtaagactggaatattacaaggactgatacatagaataagtccttgtttaattaaatcttctgcaattgatgagagtccttgaattgcccaggcctcagtaaatattaggataatttacataaaggtttagaatgaatcggtttagacttttataggtaccatacttttaacccttcctatatcagtaaaggaagaagcctataaacatttgggtattttagagagatcaaagatattgcaggcctgagttttgatcttgtcagtttctgcctgtggagagcacaacagatctcgttcaggaggtcaggaaattctaacattaactcctgctctgcaggaaacttcatatgcctctttagcttagcagataagtcttgccctagtgagttactagaagagtgtcacataggaagaaggttcacttttctgaaaatggccccagcatcaactggacagtttcygacatgggtactattgtgtctgattcaaaacccccaccacagaaatgacctttccactttcagggatttgtcagcttgttaaaaga

SEQ ID NO: 488189 - DNA, 459 bp, Homo sapiens
gcgtgcaaaaggacaggctttgcctgatgtggtggcaaaataccaggctttgggggccgagctcaacgtcctgcccttctgcagccaattcatccccatggagataatcagtgccccccggcatggctccatcatctatcacccgtcactgctccctaggcaccgaggggcctcggccatcaactggtgagatggggcaaaaacacagggggccatccccatacatgtccctccatcagcctgacttgtcactttccattagcccaaagcatttctagggctgcagagtgggcatcgtgcaggtgcctgtcctgtggctgccagatgtcagccacagaacaggctgtgcaacgttatcaatgagtgaaggctctagagcactgggagcaggtgttgctaagcwctctgcattcccacagttattggagaagctggcactgtcagtgttcccatccccca

SEQ ID NO: 488190 - DNA, 497 bp, Homo sapiens
ctgatttgacgctgcggtccaaggaattttgctaacaaaagcaaccggcctactgatacttgtatgaagcaccatggcacctttccatgctaaggcagccatctttaggctcaaaagttctttttttgttgttatttgagttccttgtatactctggatattagtctcctgttggatgaagattttgcaaatattttctcccattcaacaggttgtctcttcactctgttgattgtttcctttgctgtgcagaagctttttgccttaatgtagtcccatttgcctaatattttgttgcctgtgcttttggggtcttagccaaaaaatcattgcctagaccaatgtcctggagtgtttgccctatgttctcttccagtaattttatagttttggktcttacatttatgatgagagataggggtcttgttttattcttctgggtatggatatccagttttcccagcgccatttattgaagagactgtcctttccccagt

SEQ ID NO: 488191 - DNA, 636 bp, Homo sapiens
gtcacagtgccttgagcacaatgggacttgggatgttaatgttttgcacctaaatccaaactagcactcatattttataatttgaagatatttgttcaggatgttgttttcctcttgttgatgctctgcttataaggacctacaggatggagctttaaagaccagtcaccttcgtgattgacttgggcccttcttctttacccagcatcaataatcagtcaaatgtccaggattttagaacttctgcatattagctagatagaaggtaaactatctgggggcaaatgaaccatagatagcaaccaaatggcactagataaagcatgcaggggcccaggagatcaaaaaggaagaaatagtaactaggttgtcttaatcaggggttaagcgtggagcccaaaacagaaaacgattttttccccatagactcaacacatctgaatagaaaactatttttttaagatgagaccctaacagtatagaccatgatggaaacacakaatttaaactgagaaactgaaactattctctgccctttagaaaactatacaaaaggaagcaaagcttctagcaggaggtgacctggggagcgtaaactcagagcagagaaaatttgatggccttcatggtcagtgc

SEQ ID NO: 488192 - DNA, 421 bp, Homo sapiens
ctgccttgagagactagagaaaggaaagaaaatcaattaaatttagtacacattgtctgagcatctactccgtgccacaaaccgtgattggcaccagagctacatagatgagcaagacaaaaatcctcgcccttcccaactgttgtgagtcagcccagtgagtctctgccaggcatcaagagctgtgaaggctacagggaagacagcaaktcattccacccaagggctcggggatcccttcactgtggagggagtatttgacctgtccttagaaggaagctgttccagaaatctatccttgtgtcacaaaccactcccaaacatggtggcttaaaacagtgattcattataccctctcatagttctgtgggataactggtgattctcattccaggtttcccaccgagttgcagtcaggtta

SEQ ID NO: 488193 - DNA, 584 bp, Homo sapiens
tgcaggtcaatgaatgttttacactgtttgacattggggaaatttgttagtgtttcaaaaatatgtcttaacagagatgcaaattggttcaaaaagtttagtcacatttattatataacagtaataatacctaatatttaatgagtgcttgttacataccaggtactttaaatatatcatattgttcaatcttcacaatatgagttgggtgaggaggctcagagaggttgtcatacttgttcaaggtcatggagctaataattggaagagaagggatttaaatccagtctcaccgcagagccagcacttggacttagaactgtagactcggagctaagcacaatcatgtttgagcaaaccaatgagaagactgcagtttcacatactgctttctggacaactgtgcggtgtgtcaattaagtgtgtytccttcctggacctaggtctatgtaattgagggggctctcagtttctatagcaagagttaaataaaagacaacatgatatctgtgcactgagtggatccaggaattatccacggtttggccacagtgtccaaaattttattatcattctgggattca

SEQ ID NO: 488194 - DNA, 559 bp, Homo sapiens
tgctaaagtaataaaaaatgtaaggctgggcgcggtggctcacgcctataatcccagcactttgggaggccgaggtgggtggatcacctgaggtcaggagtttgagaccagcctagccaacatggtgaaaccccgtctctactaaaaatacaaaaattagctgggtgtggtggcgtgtgcctgtaattccatctacktgggaggctgaggcaggagaattgcttgaacccaggaggcggaggttgcagtgagccaagatcgtgccattgcactccggcctgggcaacaagagtgaaactgtgtctcaaaaaaaaaaaaagtaatgtgtttttaaattaaggtttggatttcaaattagtatttcaaacactgttaggttggggatgggagtgggtaaatatccagtattagactcccttttcttaagaagctaaagtttagttggcaaatataagacttacatgaatttaaaaaatcatacatagagtatgccacataatccaataccattctaggcaccttctatgtgctaactcatttattctttgtaataacacct

SEQ ID NO: 488195 - DNA, 563 bp, Homo sapiens
tgtgaagcctttctagggccccctctggttgcaaaatctcatccttctctatatttctatgataattgctcagtgscatactagaggctcaggactggtcatagatttgccttcatctctgttaaattctaagtttctagggagtgaggattgctttaattcacatctgatcccccagtgtgcctggcacagagtaggtgttcaattaaagcttcctgaattaaatgggattcaaactcccagagaagaaaccatatttctctccttgccaacctcctcgaaccagcctcgcttcctggctcctgctgtctagccaggtgccactgagcctgtgtgagtgtgcaggcctggccctcaggactgaatatgccatggggacccagatcacaggacaaacttgtgcagcgggaaggactcaggccagccatgacctgcccaggggcccatcttctgtctctttagcaataaatcgtgaggtgaaacaatcaagcccaccacactctgtttaggccaaagtagctgttctcgtcgtttctaatggaagcctccagcagaacatcaca

SEQ ID NO: 488196 - DNA, 386 bp, Homo sapiens
tgcgagggatgaatgagataaggatgtagacctctgagtatgataaatggttagttcttcctattagttgttgtttctgatgtagaaacagcgtctttctccctatatctggtctaaaatccaacctgataggagacgttttcgtttgggattatggaaagatacaacagttctgggggttgagttcagggctaattttctgaaggataagagagcaagccccagccaagagccragagaaagcaatgatgaggaagcgggcagtagcagccatttagactggttgctttgtgggactcccttctatttgtacattattaggctttccaacaggggacaataaacagtatgaatccagacaggatgagggtgggttgcacaagcag

SEQ ID NO: 488197 - DNA, 652 bp, Homo sapiens
gctgggcccactgaactagagcctgactcaaaaaaggaaggaggctgggcgcagtggctcacacctgtaatcccagcactttgggaggccgaggcgggtggatcacgaggtckggagttcgagacaagcctggccaatatggtgaaaccccatagctactaaaaatacaaaaattagccaggcatggtggcaggcacctgtagtcccagctactcgggaggctgaggcagaagaatcacttgaacctgggaggtggaggttgcagtgagctgagattgtgccactgcactccagcctggtgacagagcaagactccatctcaaaaaaaaaaaaaaaaaagaaggaagatctgccatggtgttaggacccaccatccgttccttctggtcgagtcaggctgtgtccccattgactggggcatgattgcacttcttgtgatccggtagcatgttcccaggcccagggagtgtccaggcagtgcatcagattatcaggcattgaccagagatacctataagctgagagctacagccattttggcaagctctgaaaacccagagttggcgctgttcatgggggagggatctgcatggtgactcgctgagccgatggtttttgtgttctgtttggaaagcctacacatatgtgttta

SEQ ID NO: 488198 - DNA, 652 bp, Homo sapiens
gctgggcccactgaactagagcctgactcaaaaaaggaaggaggctgggcgcagtggctcacacctgtaatcccagcactttgggaggccgaggcgggtggatcacgaggtctggagttcgagacaagcctggccaatatggtgaaaccccatagctactaaaaatacaaaaattagccaggcatggtggcaggcacctgtagtcccagctactcgggaggctgaggcagaagaatcacttgaacctgggaggtggaggttgcagtgagctgagattgtgccactgcactccagcctggtgacagagcaagactccatctcaaaaaaaaaaaaaaaaaagaaggaagatctgccatggtgttaggacccaccatccgttccttctggtcgagtcaggctgtgtccccattgactggggcatgattgcacttcttgtgatccggtagcatgttcccaggcccagggagtgtccrggcagtgcatcagattatcaggcattgaccagagatacctataagctgagagctacagccattttggcaagctctgaaaacccagagttggcgctgttcatgggggagggatctgcatggtgactcgctgagccgatggtttttgtgttctgtttggaaagcctacacatatgtgttta

SEQ ID NO: 488199 - DNA, 662 bp, Homo sapiens
tggtttttgtgttctgtttggaaagcctacacatatgtgtttaaaccatccctatgcatcattagcctgctcaaaatattgaagagggctcactgggtcccttgttggctccataaccggtaaaacatccaccaacatatctcacttggggcattgttgtttcaaatccaaacaggtcatccttctaaagacctcaatcccgtgcttgctccatggctggccactcccagtgatggaaattcttcctgtgacttctaccctctgactctagttctgcctaaacgcatcccctaattatggcaaattccttttccgcagatgaaccctcacatctataaayccaggtgtccttaaagcttttctttccctactaagcaccctcagcttcttaaatcattaactggcaatttttccagatccttgagcagatcctggccaccctcctcaggcctcagcccaggagggtttattaacctttactgtgtcagtaaaggcagcctgcattgtggtgttactcctgcttgtctgctctggaagtttttagatattgagggtctcactcttcctccagtcctagggagctaagggtcagggctcagtttggttgtcccaagctcaggcaatggctattgtttgatttggccctcccttgacataccagc

SEQ ID NO: 488200 - DNA, 585 bp, Homo sapiens
tgttcagtgctttccttccaagccccccacttctcccagggctgagtatgggtggtaggctgtgagctgtgagattccaggattggatcccactaattttgttctctgtccctttgtcaaagacattcgaaccagagcaactcatcttgartaagtgctgggtaaaataaggctgggacctgctgggctgcagccccaggagggtaagcatccttagtcacagatgagacaagaggttggcacaagctgcaggtcacaaacaccctgctgataaagcaggatacagtaaagaagccagccaaaagctaccaaaaccaagatagtgacaaaagtgacctctgatcatcctcactgctcattatacactaattataatgcatcagcatactaagattcactcccacctgtgccatgacagtttataaatgccacggcaatgtccagcaattactttatatgatctaaaaggaagaggaatcctcagttctgggaactcctttcccctttcgccgggaaactcatgaatgatccaccccttacttagcatacgatcaagaaataaccatagaaagagccactcagcag

SEQ ID NO: 488201 - DNA, 605 bp, Homo sapiens
tccaccccttacttagcatacgatcaagaaataaccatagaaagagccactcagcagtcctcaaggctgctctgactatggagtagccattcttttgtttctttacttgtctaataaccttgctttcactttactctgtagacttcccccgaattctttcttgtacaagraagatccaagaactatttcttggggtctggatcaggatccctttctgataacactttgacatccccagaagcccatgctgtaggacctggctcagatgcagaaaagacagcagtggtagcctcttaactcctgctatttgtccaacacccacccaagtaggagcaagtctcctctgagcccagagtggtgacaggctctgtgcagcctcgtgcagctctgcaaaggcagggctgtggttttattctttgtagaggacctcagtggggtagagatgactgaaggggggaatgtgcattgggcaggagccacagaggagctgcaaagctgacggacaagttggagtgctctctgtgcctccaactctcggcacctcccaccttccttaggctgagaaaacaatccagaggcagaggaggctccactgcagagacagg

SEQ ID NO: 488202 - DNA, 617 bp, Homo sapiens
atccaccccttacttagcatacgatcaagaaataaccatagaaagagccactcagcagtcctcaaggctgctctgactatggagtagccattcttttgtttctttacttgtctaataaccttgctttcactttactctgtagacttcccccgaattctttcttgtacaagaaagatccaagaactatttcttggggtctggatcaggatccctttcygataacactttgacatccccagaagcccatgctgtaggacctggctcagatgcagaaaagacagcagtggtagcctcttaactcctgctatttgtccaacacccacccaagtaggagcaagtctcctctgagcccagagtggtgacaggctctgtgcagcctcgtgcagctctgcaaaggcagggctgtggttttattctttgtagaggacctcagtggggtagagatgactgaaggggggaatgtgcattgggcaggagccacagaggagctgcaaagctgacggacaagttggagtgctctctgtgcctccaactctcggcacctcccaccttccttaggctgagaaaacaatccagaggcagaggaggctccactgcagagacagggcttcaatttt

SEQ ID NO: 488203 - DNA, 545 bp, Homo sapiens
tctgactatggagtagccattcttttgtttctttacttgtctaataaccttgctttcactttactctgtagacttcccccgaattctttcttgtacaagaaagatccaagaactatttcttggggtctggatcaggatccctttctgataacactttgacatccccagaagcccatgctgtaggacctggctcagatgcagaaaagacagcagtggtagcctcttaactcctgctatttgtccaacacccacccaagtaggagcaagtctcctctgagcccagagtggtgacaggctctgtgcagcctcgtgcagctctgcaaagrcagggctgtggttttattctttgtagaggacctcagtggggtagagatgactgaaggggggaatgtgcattgggcaggagccacagaggagctgcaaagctgacggacaagttggagtgctctctgtgcctccaactctcggcacctcccaccttccttaggctgagaaaacaatccagaggcagaggaggctccactgcagagacagggcttcaattt

SEQ ID NO: 488204 - DNA, 588 bp, Homo sapiens
aaataaccatagaaagagccactcagcagtcctcaaggctgctctgactatggagtagccattcttttgtttctttacttgtctaataaccttgctttcactttactctgtagacttcccccgaattctttcttgtacaagaaagatccaagaactatttcttggggtctggatcaggatccctttctgataacactttgacatccccagaagcccatgctgtaggacctggctcagatgcagaaaagacagcagtggtagcctcttaactcctgctatttgtccaacacccacccaagtaggagcaagtctcctctgagcccagagtggtgacaggctctgtgcagcctcgtgcagctctgcaaaggcagggctgtggttttattctttgtagaggacctcagtggggtagagatgactgaaggggggaatgtgcattgggcaggagccacagaggagctgcaaagctgacggacaagttggagtgctctctstgcctccaactctcggcacctcccaccttccttaggctgagaaaacaatccagaggcagaggaggctccactgcagagacagggcttcaatttt

SEQ ID NO: 488205 - DNA, 529 bp, Homo sapiens
tgggaacaggctcccagctccagttggccccattgtttctggccactgtggggagtttatcagaggctcttgtagaagctgtaatctgcatttcattttatggatttatatttgctttgttcatttccctttgtttcctcagagtcacttttggtgtaaatgtttcttttgaatatccttcaataatactaaagaaggaaggagtcctcccccaacccctgttctatcttgatgactcctaagcctgcagggactaggtacagacaccctcccccaggcaaaggatggcagcaagaaagagctcgaggcggtgaagtgaggggtgaggattactgagycccttctaagtgccagccacctttatgtatgtaatcagatttaattctcactgcaaccctgcagataaacttgattattgccacttcatttttttcagatgtgaaaacacagagactcagagcagttaagttacttggattacccccagtagtaagtggcagagtcaggattggaattcaatctgacccca

SEQ ID NO: 488206 - DNA, 602 bp, Homo sapiens
gaaggattgcttcagcccaggaggttgaggctgcagtgagctatgatcataccactgcgctccagcctgggtgacagagtgagaccctgactcgaaaaaatgggaaaaaattgtcatttaaataaaagaaaaatacttaaaacaggtcaaataatagatcaaatacagaccaagggaaaaatcaattaagaatccctatcaagcttggtgtcatggcatgtgcctatagtatcaccagcttctaggagtatctagtagctgatgagactactaggagcccaggagtttgagtccagcctgtgcaatgtagcaaaacatggaaagaaaagaaaagaaaagaaaagggaagggaagggagagagagaaagaaaagaaagaaaaagaaaggaaggaaggaaggaaggaaggaaggaaggaaggaagggagggarggaaggaagtaaggaagggagggagtgagggagggaagaaaggaaggaagagggaaggaaggaaggaaagagaaacgaaggaaggaagagaaaagaaaaaatatacaattctcatcatctatcttgctctcttgatcttttatatcacaacttctgtgtagggatttgcac

SEQ ID NO: 488207 - DNA, 608 bp, Homo sapiens
cagcatgcccagctaattttttgtattttcagtagtgagggggtttcaccgtgttggccaggcttgtctggatctcctgacctcaagtgatccgcccacctcckcctcccaaaatggtgggattacaggcgtgagccaccacgccctgccaagctttgatttttcttttccaatatgtgtcccatagcttctaaaagtttcagctcccgctcctgaattaaacaggacagagttgcatagatagctagtatgttttgtgcagtcccagagcctcagcctcctccaagctgtgctgctgctctctgggaactagtgggacggaccacctgcagtagggctggagagtcaggaccaacaggcctggcctggtaacagagcctccgtgatcaatgggaacaacaagagtgttgcttagttttggcttctggctcagccctactttgaactcatatccaagttctgttacaaataagaactgaagagactgtccctagaggaccccaggaagttcaggtatctctgttttgatgcctgttgacagcttgtaacacagcagagaaaagaggccttcctctacagtctgcacagagctctggatggccctgggt

SEQ ID NO: 488208 - DNA, 608 bp, Homo sapiens
cagcatgcccagctaattttttgtattttcagtagtgagggggtttcaccgtgttggccaggcttgtctggatctcctgacctcaagtgatccgcccacctcctcctcccaaaatggtgggattacaggcgtgagccaccacgccctgccaagctttgatttttcttttccaatatgtgtcccatagcttctaaaagtttcagctcccgctcctgaattaaacaggacagagttgcatagatagctagtatgttttgtgcagtcccagagcctcagcctcctccaagctgtgctgctgctctctgggaactagtgggacggaccacctgcagtaggrctggagagtcaggaccaacaggcctggcctggtaacagagcctccgtgatcaatgggaacaacaagagtgttgcttagttttggcttctggctcagccctactttgaactcatatccaagttctgttacaaataagaactgaagagactgtccctagaggaccccaggaagttcaggtatctctgttttgatgcctgttgacagcttgtaacacagcagagaaaagaggccttcctctacagtctgcacagagctctggatggccctgggt

SEQ ID NO: 488209 - DNA, 608 bp, Homo sapiens
cagcatgcccagctaattttttgtattttcagtagtgagggggtttcaccgtgttggccaggcttgtctggatctcctgacctcaagtgatccgcccacctcctcctcccaaaatggtgggattacaggcgtgagccaccacgccctgccaagctttgatttttcttttccaatatgtgtcccatagcttctaaaagtttcagctcccgctcctgaattaaacaggacagagttgcatagatagctagtatgttttgtgcagtcccagagcctcagcctcctccaagctgtgctgctgctctctgggaactagtgggacggaccacctgcagtagggctggagagtcaggaccaacaggcctggcctggtaacagagcctccgtgatcaatgggaacaacaagagtgttgcttagttttggcttctggctcagccctactttgaactcatatccaagttctgttacaaataagaactgaagagactgtccctagaggaccccaggaagttcaggtatctctgttttgatgyctgttgacagcttgtaacacagcagagaaaagaggccttcctctacagtctgcacagagctctggatggccctgggt

SEQ ID NO: 488210 - DNA, 475 bp, Homo sapiens
aataaaaattaagtctctttcctccattcttyacctcccaaactctttcccaagagaaggacttttaaaaatcccttgttatatatggcttaaatattgtattttcccttaaggttataccatgaggactttctcagatcattaaatattcttcagaaagattatttttgaggttacataatattggatgttatgtacgtgttaatgtattcaacattccccaatttttggccatgtatattgtttccaattatttgttcttataagtaatgctacagtggacctctttgtaaatctctgactatgtctttgagaatcactagactggttgacagaattttatgacatttaatttttttgtaataggagtcactttttaaagaaaatgcagtttttatcaggcttaatgtatccattttgttaatttactttaaaaatgggctttaatttttagagcagttttaggttgacagta

SEQ ID NO: 488211 - DNA, 475 bp, Homo sapiens
aataaaaattaagtctctttcctccattctttacctcccaaactctttcccaagagaaggacttttaaaaatcccttgttatatatggcttaaatattgtattttcccttaaggttataccatgaggactttctcagatcattaaatattyttcagaaagattatttttgaggttacataatattggatgttatgtacgtgttaatgtattcaacattccccaatttttggccatgtatattgtttccaattatttgttcttataagtaatgctacagtggacctctttgtaaatctctgactatgtctttgagaatcactagactggttgacagaattttatgacatttaatttttttgtaataggagtcactttttaaagaaaatgcagtttttatcaggcttaatgtatccattttgttaatttactttaaaaatgggctttaatttttagagcagttttaggttgacagta

SEQ ID NO: 488212 - DNA, 311 bp, Homo sapiens
cataactagtctcataaaagtggtgtcatgtgagccaggaatcagagtgtggggctgcaagaggccttgcagctcttctggtgcaaactgcaggccaggaaactgaggcccagagaggggaargcgtttgtataggttgcacagtaacctgttttcctcttggtctgtgtgaaagtcattctctgtataaattcaagtattcagacattaatttgctttttttgtttttttgtttgtttgtttgttttaaaagtataacgatcaacacaaaagacgttttgaaagaagaaaaaaaatcatccaatacccaa

SEQ ID NO: 488213 - DNA, 597 bp, Homo sapiens
ctgcagttgcataaaacacacttaaaattatttgrcagaatatgagaatgatgggagggttgtttaatgagaagggaatggaggtgattagagcgagacctggagagtgctttaaaagaggggataatgacatggaagatttatttctggtccacaagaggcacttgtggtggctttctgatgctgagactcagcaataattaaaagacttgggctggcactatctggtaaactaagtgtttgtagcatccatctaaggcagcctgtggcggatatctctgggccaccctgatggactagaatcctccagcccaggacctatgggagctgtccagggagttgggaagtatgctcctcgccaggaggcaccaggtccacaaacactgaactgctattgatgagcaaagagtgatggtcacttccaacctcctccatccctctttggttcagcttttttaacattggctcaaaggtttttctttcctctcttatggaaagcttttccagcactgatttggcacattcagcctcactagtcaattctaggcactctgaggtttccttgattatctctgttgggtcttgtggctgcctatc

SEQ ID NO: 488214 - DNA, 655 bp, Homo sapiens
cttgtcaacactaggtatggtcagtctttttaatttaagccattctagtgagtgtgtagtagtatctcattgtaattttaatttgtgcttctctaatgaccaatgatgttgagcatcttttcatatgcttacttgccatccaaacatcttgtttggtgaagtgtctcttcaaattttttaccctttttattggttttgtttttgtattttgggacagtttccctctgtcacccaggctggagtgcagtggcaccatctcagctcactgcaacctctgcctctgggttcaagtgattctcgtgcctcagcctcccaagtagctgggattacaggtgctcaccaccacacctggctaatttttgtatttttggtagagayggggtttcaccatgttggccaggctggccttgaactcctgacctcaagtgatccacccacctcggcctcccaaagtgctgggactacaggtgtgagctactgcacttggcccatacttcttcatttttgtagcagcgcattttgaagcacaaaagttttaaatcttttttatttttattttatttatttttttacagaagcacaaatccatgtatatttattgacttttcattagtttaaatccttgaggggtacagcatcactcagattctgtgtc

SEQ ID NO: 488215 - DNA, 446 bp, Homo sapiens
tcgctgtggacactgggagtggatacttgtgggaactggatcaggcagcctgggctagatagatggtggctacattgtgtagtacttgctctttctgttgttctsctggccatcatctggtctctcatcctatgggaagtagatctctgtgaagattatctcaaagctgcacagtacctttgctatgcaagtgctgtgaaatcagggtcacttattggggagggcaggtctgggaggggcatgcttatcctctaggggtatcaccttgtagtgtatgtctgtgttacccttgtttcctctctgaggaaacagtatttctgagacacctagtatttctgagacactgcctgtgactgaccagcaacgtcagcgccatgcccttccagacatggaggccaaagtgacaaaagttgccttgcaacgtagtcctgcacccacatcataag

SEQ ID NO: 488216 - DNA, 454 bp, Homo sapiens
ttcagatgtgggttctgtccctttagggtgagacatgaaaaagtggtggctttgcagggagggctgcggttcagaggcctgcctagggcaggtttcctcacttcccagttcgccttcagaagcaaccacactccgcctgcccagggaaacactggtgcgcaacctggcgcctgccatgagtggcagagcttgtcttcaagccctatgggagccagggcaggcagcaagggccctggcccccacttctggttcgtcsatggctcttgtgtggctctgccaggcccagagtttgggtcctctgctcttcattcacagcaagggatgctgaaattgaagcaactcctgacagatagatccaaccttcccattttggcatatggtccgttggtgttctgttccctggatatatttttgtctcgacagctagagtgactttctggggaggaaggggatg

SEQ ID NO: 488217 - DNA, 273 bp, Homo sapiens
gtgtcctgtgctctcagggccacagtgactggcaggtggcagcactgaccccctcctcccccaggtgcaggtgggaagcacacctcaggaccaaagaatcgtcgggtacatcgcctgcacacacctgcatgccccrcaaggtagggttgccgcccacctgtgttttttctaggcatgggatcagtgcctggggcctagctggggtctggggcgaacttcatcatccagtctctgtacttctgccctgcagaggacagcgccatccggtgtggg

SEQ ID NO: 488218 - DNA, 628 bp, Homo sapiens
tggtctcaaacgtctgggctcaagcaatccaccagcctcaggttcccagagtgctgggatgacaagcaggagccacgtgcatttccttaatacacagcacggcccatgctcctcaccctgcccctctcatgtggatggaacacgactctcagcttcagtcctcatgaatccaaggaccactggcgctgtcaggacagcccatggttctggagaacgtaggcccagttgctaacccctaccatgtaaataacctgtgggaatctcctcaggtacccctcccgggaatggagcccccaccatggaaatggctgcctaagaaggttcccagatggcctctggaaagtcagccccactagaaaagaagctgtgggcactggcaggggcagttgcaatgacaggacgtgcaggcccagtggagattctgacacagggtgacagcacggagccaagaacagggctggtaccaagcaatgctcatgttgaaccacacaaaatggcagcacctgacctcactgcccccaacagaagagcctgtgctgcccaagctgggaccctgtgagaggcctgcgatacaggagcaggtcgggggkactatgcagagtgtggccctgcctaccttaatcatgtc

SEQ ID NO: 488219 - DNA, 524 bp, Homo sapiens
atcctaaatctgaaaatctgaaattcaaaatgctccagtgagcatttcctttgagcatcacgttggcattgaaaaagtttcagattttagagaatttcagaattctgatctttggatttgggatgctcagccctgcaataagaaagtacacagaaagatctactttaggaaaaatggtcaggataagtacctctaagaaagtaacatttgaactgagactcaaaggatgaggagcaagccatataaagagcattctaggacctggaaaagctcctgtttactctgtgcagtacttcaggtatttcaaagaactcctcagcagcagtagatgcagtgtcttttctctagcaacaagacaaaaaccrggcatttttaatacacgtatacaaaaccaactacaactcattagttattcttgggaagaagaataaataaacaaagaattccagctctattttacatcttcatagcagaagctagtagccttagtagcagaggctagacattgtttgaaggcatttcta

SEQ ID NO: 488220 - DNA, 648 bp, Homo sapiens
cggcagctcaaagctgtcatcaatgacccaatttctttgtttctccctttctgccatctggtgtcagctctgtcctcatggtcacaggacgggtgccagctacaaacagagtgcagcccagtctagcatcccaaacaagagtcataaaagtcactcaattggcccagcataggtcagattcccattcctaaaagaataatgtggctaaataaatgaaatgcactaattgacctatcaatcaaagcccactccaggggctagagtgtgatccattttactagacacacataggctgcactggccaggggagatacccaaacaaagatcagataatttttggaggagaaacatgtggcaaastatgctaggtagacaactaataaatgtctaccacacttggttcttccatgtgttactagaaaataactttaaaattccactttattttgtaaccattacagtaataattagttcaggcaagaatcatcatgctaaactggtgaatgagagcttaatgaggaagaagatatttataaagtctcaaattatatccccacaaatgactcaactaatattaaagtaaaaacatagtaactttactatgagaaaacctggtagagaccaccttaaccaagtgattgaagttaa

SEQ ID NO: 488221 - DNA, 557 bp, Homo sapiens
tattcactttacttagtttaaagtttcaaaggagcctactgtctctaacgtcactgaagaaggaaaggtaggagcaaaattcaatagggtagaagactctgaaacttctattagatttattttctgaccgctgtctagctcactagtaacagtacggaaaaaataacataagagtaactttcattaaattggcttgaggctaaagctttgtttggaagcatgtccaattttccatattatagaaatgaaaaaggaagctttgaggtctacgtggacctaaactccgtaaattcttagaaaaagaccaatgtcttcaattaactccagccattaaaataaaagagttagcattaccatttactgtgaggaaayggaaacaccaaattaaagtgttgagtccacagccacacaactaggaagcagagcaaaaggaaaagacaaaaactctggaatgagcatcataaattctgtattgaattccaggttaaaatcatcaaactccattcagatacaatttcaaattcagaatactgctatgcaaggatcacaaaggatca

SEQ ID NO: 488222 - DNA, 557 bp, Homo sapiens
tattcactttacttagtttaaagtttcaaaggagcctactgtctctaacgtcactgaagaaggaaaggtaggagcaaaattcaatagggtagaagactctgaaacttctattagatttattttctgaccgctgtctagctcactagtaacagtacggaaaaaataacataagagtaactttcattaaattggcttgaggctaaagctttgtttggaagcatgtccaattttccatattatagaaatgaaaaaggaagctttgaggtctacgtggacctaaactccgtaaattcttagaaaaagaccaatgtcttcaattaactccagccattaaaataaaagagttagcattaccatttactgtgaggaaacggaaacaccaaattaaagtgttgagtccacagccacacaactaggaagcagagcaaaaggaaaagacaaaaactctggaatgagcatcataaaytctgtattgaattccaggttaaaatcatcaaactccattcagatacaatttcaaattcagaatactgctatgcaaggatcacaaaggatca

SEQ ID NO: 488223 - DNA, 579 bp, Homo sapiens
tattcaaacatttgtttttggctgtgaagttacttggtattccatgagaaaacaactgttagtattttacttctaccttgactgatgtagcctttattttatgactaccactaaaagatgaattatgaattaatagggaattgttcatttcagttaagtcaataatatcgttaataagtgaggattgcccatgaaaagccaatagatcattgtgttaaacattagtaacttacattaaacccaatgtgactaatatattaaatatatattagaaatttgttacacatatccagkaataaacttatacgaaccttaaatttgagttatatttgctgactccagtcgatatgataataggagctattttcaaggccttaggagcaggttctcatgccagagactagcgagtaaatttaatggacgcttccctgaagtcagacttgcctcatctgtgtagcattcacatgaattttcaattcaatttcaacctcaaatgggagttcccacaaatccaaacaccttgttgaagcaggagaaaatgaattatgcggataacaatattttatcaagctcgaaact

SEQ ID NO: 488224 - DNA, 558 bp, Homo sapiens
cttctggcttctcccctgaggattctcagacctactccaatagcatctaccatgaacaagctcggtctagctacagatgaagatgaagtggcagcagaggaagccggtgatgctgttcctgatacaatactccctcccsactcgagggcgattaggatgtgtcttgcatggaggaggtagactaggagtttatacttggaaatcttgtgccctctgaatagtgtccccatggctcccaccacagcctcgagtggtcctgtctcacctggctccctctgctaatgtcttgtgtttattctctactgtccttgtgcctaaggcaggaaacaagggcccctaaccccatcccctccctaatttgacaacaggattggatgttgcatattatgggttttttgtttattttgttctgagattaaagtatgcaaaatacagaagatgcagttttatacaaaaaattttaaaagggtaactctttttcttcagcatctctctctccctccaataactgttagtctccatccaatatttggctctcgtttgtgcacagcatagtga

SEQ ID NO: 488225 - DNA, 640 bp, Homo sapiens
ctgcagtgctggggcacggctctggtttttaccttctagttgtcagatcactgggtcatcctagtagttcctgggagataatccagggtatgtggaggctcttggggaatagagcactcatgaactctgggtaaaacaatttacccacagttgtgtgtcttctgttaagaatgttttcaaataaaaagaacaagtataatcagagacttgctcaagaccccagaggtgactgagtccagtgatttttccattcttttgttcaatccagaagaatgtcactttgaatgctaatagaatattaaaggacaaattggagasaggaagcaaaaacaaattgttgtaatctgtgtgtccaataaatgagggggctgggagaaccaatggagatcatgggattgacaaaagaggaacacatgtctccatttctgcccatcaaaagcttctagagatgaaagaaggcaactactacatggttttataatggatgcaatttgtacttagaagaaaacaacgttttgcagattagcattcaaggaaattctgctttctttttctggtctactgaccttaacaaggtttcctttattttgtgctctcttgctttcatgtttaaacaccattttctctccccacaataaag

SEQ ID NO: 488226 - DNA, 666 bp, Homo sapiens
gtgcccaaatggacagaagtcagatcaaaggagtcaagttcaagaaatgcagttttatgctgaaactgaagataagtagaaagaaaatgaagtctatgcccttgtgtaatttctgaacttagaacttatagaggacttcccatgaaggttggatgaaggcattctcactctgttttcttttgaaagcgtagctccttctgacttttatctcattttcaagatctgttgactaatgttttgagcaagtttacataaacttgaagcatgtaacttaagaacaaataaaaataaatgtagataatcttccaaagagcaggttctattattgctactgctaataagaaacagctaatttctcttgagaaactaccagttagttgattrgtgaaccttgaaattcatttttccctttaaaaagcaatgctttaagtaagtcatgatcaattatcctcaaagcctctttaaatcataaaatcaatgaggactgagatccagagaatgaggatgacctataacagggtacccctttcttgaatgctgtgttgacactggatatggcaaataggtttcttatcttagatcaatttcattaggttggaaacaactacctacgtatctgtgttcagaaggattctgaagcagagtcatgattactgcgaaaagtac

SEQ ID NO: 488227 - DNA, 671 bp, Homo sapiens
tgccacattgctagaaatggaatccacaaggtaagttgaacactattttttcagttatttaaacttttgagtttggtgatatgcattgctaattaatttgaggaaaaacctattacagatgaaatagattatcctgccattttaagcttaaaaaagaaatttaacatattaagctcttcccccttcttaatgtatttcttcttgttattgaatgaagatcaataattctctcctaatattttgaagagatcatcatttattgacaggcctacatggaaacttacattttatgctagttttgatrttaaaaactctgtaaacttggaatatcacataatccaactggattacacttacaagaaattaataacctcaaaaaagaaggttttgtgtttcttataactacttaatcatggacaggaacaatacttggatgtaaaaattaaccacgaagagccagtttcaggactaaaatctcatttgtaaccataagatccctgagtatgttgattttaaatcaatgcatcacttcgtgacagatactcccctacttataattctggtgtcatttggtctcgtaagacctgacctaaagttggtgatgcttattacattaaaactttccaatgccacttggaaaaaattaaactatgttagttaattaaaatatg

SEQ ID NO: 488228 - DNA, 572 bp, Homo sapiens
gctacccatgagtcagccctgaggctctggccgccttcctccagggtatcttccaatcttgctctacacccgttagggagtggctgggaggaaaaagactcccaggggtgacrgaagcacccacaggcctgcacagggagtgaaactggggcaatcacggggctgcgcgttgccacgggactgcgcgttgccacgggacgccggtgccactgcggggaagcgacggcagccatgggggagagggtcgggttcgctgacctcgttcgggggagcaatgggcgccccccggcgggcaggcccttgtggcaaggaggccaaggtgccgggggacccggggacccgggtcgggcgcgcgttacctcctccgcgctgcagcagcgagctcgggttcgcctgctggtctgagagcgtaccctgtgcggcgcgccgcttctccgagtgcacgatcagcagcatgtcgatagatacagcgttgatgtccttcttcagctccatgatgccgcctcctttccgacctgggcgccgcggccgcacgctaggctgcttgcgctgcaaatggccccgtgcgcgca

SEQ ID NO: 488229 - DNA, 465 bp, Homo sapiens
atctgtttaccacctcatccccaaggcctggtcagtgctcaacaggtgatgagtaagtatttaccaaatgaatgaatgaacaacatraatttgatcatttgtcttattgggacattagcctatattctaattaagcagaatatgaataccttatacatacactatcatggtcattcccaaagtatgattcttgaaccagcaacatcgacatcatctgagaacctcttaggaatgcaaattatcaggccctaccctgacctgcagtatcagaaactttgggggtggggcctagctatcaggttttaataaaccctccaggtggttctgatgctcctccaagtttgagaaccactgtactgtcatataatgagacctcaaaggagtgaaaacgttaaaggattctgaaagtaataggactctctggtattggtgaagtcaatgatacgtgaaaactgctagaagtat

SEQ ID NO: 488230 - DNA, 521 bp, Homo sapiens
tcacaggcatcctccctgaatgctcagaccgagggctgcacaatgccaaggcggtgtccggggctccacgcatgcctttctcctggagggagtccaagtcctgaccttgccctctgagctgcagcaggccttgttccacaccaggttctctctcaggcgccttcattttacatattcatgtgcatgaaaattaaaaaccctgaagatttaattaggggaccatgttgggagaacaaatgggcagagctttgtagctggccaagggaagcttgcaggctcagggagtaggggcatctgagcatttaaatgaaatagaacagtggatgtgcagaggaatcaccccagtgacaatggaaattgcttccaggttcttcctcagayacaaagctgaagtggttttgtcctagaatatatcatctaacagcaaaaaagattcctcagcctttcttttttttttttttaacaaatgtcttttgagcaacatgttttagtcataccagaggattaaacctgaatacctg

SEQ ID NO: 488231 - DNA, 598 bp, Homo sapiens
ggtgaagatgactggtctgatgttatagctggaatcctgctgcaaactgctgcatcctatgatacccagatgggatgtgaacccctagtcaaggctcaggttcacccccttggtccagtgaagtaggcccaatagagccctgaactcatacatggagtgaatcctcagtcaaatagttccatgagccctaacatcgcctcagttctgttctcacrgcccagcctgaatctctacctctgacctagatttaaatagaaaggtttctgtctcctgtcaggagccctcccagcctgccttttctactctaccagcgagaattttctagaataattatgaccatgtatttttgaaggaggttccctgtgcactggttatcacctcaggccactgcatcttgggctgcaatttctactacttgcatgagtccagtgagacagaatactcacccaacaagttgagcaaagcaactttattactcacacataagcagggagagacagtagaagcctaggattcatggcaagctggtccctcaaggctcaggaatgctgcccagggtggatgaaatcttatccatgcatgccccatatggcacaac

SEQ ID NO: 488232 - DNA, 529 bp, Homo sapiens
ttaattgaccttcagcagctcttgtccttcctgtctgtgcttgggccaggctcctgtgggccacgtgttcacagatcgtctctgaaggtgccaggcmaccgtccctcacttcacagtttacaatatgccaccgagtaaagtgacatgttcccacctgaatagccacagaaggctaattccaccaccccccgacccccagctctcttttcatggtgtctgctttcctggctctctcctcaaaatcagaggaccccttataggaacagggccctgtgaggggtctgcccctcccccttggctctccccagcccttgaaccttgtcctgctccgaggcctgcctggggtgttcagaggctcctgtcccgagtgccacctgtcttgtggcttcactaacaagtgccactgtcctgcaaagctcctctgggctcagctgccagggcaggaggcaagaattaagacaccacagttgaaagatatcaggcttcagaagcaagttctaaacagacttgaatagcagaaagtttcaaa

SEQ ID NO: 488233 - DNA, 513 bp, Homo sapiens
ataaatggtttaaaagaaccctttctacccccctgaaatacaaaggaaggagcctgttgcatgtcgggggacttgttaatggcatctatgtgtgtcaggaccttagcaggagagagatgggacacactagccggctgagtggctggaaaacctaataaagggtcagcggggaggagtagatcctggaaccaggagacrgactcatggcaggagaaatgtagacttggcaggagctctggccttggtagaagaacacagtgaccagcagagactggaaggagcctgggttgaaatactcctctccactgaaaactaaaccctaaagcattacccatcgctcagtgtttcccatagaagttaatggggagaaatcaggaagaaaaaccattgattaatataaaacacagcttctaatgtctctgcttctgcagctcatcatgaggccttggttgacagttgtagcgtcttttccaccacacattttgtgttccctaccctctctgccagacttca

SEQ ID NO: 488234 - DNA, 391 bp, Homo sapiens
aatggcagctaggaaaatcatgatttaagtttctctccagcttccaactaccaggggctaatagtggtgggtttaattataaaacctctgactcccttaaagccaacagtaattggcaggcactgtctttgaaattcacaattgcatgtgctctggaaggaaacccagctaagcaaatataatgtctttctgctggcagatttgatttacacagaagcctttacttaaacaattagcaatagaaaaagcaataaatataatgccttaattgtttttacttcaggctatctttaactgagacaagtgtrtgagtttatagtatattacagcatatagcttctcttaatggctttccttggcttgtaaactctgtcagagcaatgaacgtctt

SEQ ID NO: 488235 - DNA, 598 bp, Homo sapiens
tgcttatatcagttagcacatagtggttcagcttgtggttccatgaagtagggtgtcataatttctctccttggaagaactataaaagtatgattgattttcagattctcatcctaacaagaaggtggtaacaccaatgcaacaactctggtgggatcagaaattagattttatagtgctgttgcctcctctcctcaccacctccagcctcagtacaaccattacccattgcagcaaarctcttgcttctcaaaacttcatttctctgaaggtttttatcttatttatttatttttttaattaacagacagaatcttgctctgtttcccaggctggaatgcagtggaatgattatagatcaatgcagcctcaaactcctgagctcaagcaatcctcctgcctcagcttcccaagtagctgggactacagatgcgtgctcccacacttgtgtgatggttaatattgagtgccaacttggttggactgaaggatgcaaagtattgttcctgggtgtgtctgtgagggtgttgccgaaggagattaacatttgagacagtgggctgggaaaagcagaaccaccctcaatctgggtgggcac

SEQ ID NO: 488236 - DNA, 623 bp, Homo sapiens
ccagcctaggtaatccaaaataagtgccttctcttaagatccttgatttaattatatcttttgccatataagataatatccagggctctggggcttatgacataggtgaatcttttttaggacccaccatttgacccactccaggtcgttagctcctggaggggtctgcatcttgtgagtgagcacaagccctggcacagagggaatgcttgcttagcatttgtggaatggagggccagatgcttggatgaaatgcacacacacagtggccatgaatcttaagaagcgtcagtggctagaaagaagatggtgtaaattttatccccctccctgtttctgacagaatatcctcctcttctggtaacaggttttgagacgaaacatggcacgagtctctcagaaccctgcttgagcagagcagttrcattatattccacaagtcataaatatttggggagcaaaatcgattcctgcagcagtggtggagggatggtaagttggacatttaatttttttgggggggtcaatcaagaggatttgtatgtgttggagtacaatgtttctgtttctcttcccagcagagtgattgctgtactttgatacaagtcatctacctcgtggcc

SEQ ID NO: 488237 - DNA, 519 bp, Homo sapiens
gaaggcacttgctccatgcaacaagtatttatgaatttgaaacacatggtrcaatggcgcaggcatcttgctgtgtagcatcatgtgggagggaaatctgcagccagcggacacttgccttcaagaaaagtagttacacacatacacatacagcccagatcctgtcctttcagctagaccctagtctagtgggaggcatttcttgccctgaatcatgagtggcgcaaaagatgatgcgagcaggaagacagcagcagaaagaatttattggaaggtgatgatgctgagcaacatctcggctcacttcagctcaacaaactctacaaactctttattgagtacacgccatatgcctggcatggggctggatatcaggaaaaagatacgaacaagacacagggaaaatgaattgaccacaagcctctcaatggaaggactatgtgtcttctcccagagccgtcacagggtccagagtacagcagtcagtaaatgttgaatcagtgtatgattggaaaatga

SEQ ID NO: 488238 - DNA, 653 bp, Homo sapiens
aagtcctagcgcaggctctgggactgagtctgcttagataatatagggcagaggtcaacaaactttgtcttgtaaagagccaaataacaaatattttaggtttggcaggccatacagtatctgttgcaactattcacctctgctattccagcttgaaagtagccatagataatactcaaatgggcatggctgtgttctagtaaaactttatccacaaaaacagactgcgggtcacatttggctcagggaccatagtttgctgacccttgttgtagggcatctcagactggggaggaagggcccctggggactgagtctgaagaagtaagttgtgataggggaagtcatgacaaccccccaaggggagtccagtgacccacccttggacaagaaagcatttcctgaagcctgccacagtgcaaatgatgggtaaacagtcattttccctccctgctttggggttcagcaggtatagctgccttcaatactcaatgctaccggtgtgtgatcataaaaagtttctaaaacgtgaaatgcccctgggaagccacatgaggtcttgtgtgaaatccccagcattcctcaagaagtggatttccttaggtgaactgagggtcagtggcctygtctgaaccaggatgcttaattagaga

SEQ ID NO: 488239 - DNA, 515 bp, Homo sapiens
aggaaacattcaaggctgcaggtaacaactccagaaaagagagtgtgagaagagccacatgtgtttggcttgggcaaaccctgcttgcaggagcaaagggcatgggagaccaaacacatgaaacagccccaggggtgccgggaacataggctcagacgtgaaatgggaattaggagtttttataaatttgaaggagatggaaccccaagtaaaatctggaggctcggctgcacctgggcaaatgccagtcttattggcaactgtagtgagtttgaaattcagaatcttttctatgtctcacatttgttttctccaactcttctttcccagatgtcaccaagcatctgctacatcccatggctggcaacagaaacatggcttctgagaacataatgttgctcagctaaatttggtagktttggggctggggctgcgatattcttgtgtaccctattgactttcatatcccttgcaaaccaggacacatgagggccttgggattggataagtccgac

SEQ ID NO: 488240 - DNA, 638 bp, Homo sapiens
ttccacaatgtcaatgtgcttttctttttgcaaatgtgcttggctctctctaatcttatattagtttcttaggactgctgtagcaaataccacaaactgggtggcttaaaacaacagaaatatatttccccaaagtttgggaggacaaaagtctgaaatcaaagtgtcagcagggttggttccttctggaggctctgagggagaattcttcctcgcctcttgtagcttttggtggttgtcagtgacattcagtgttccttggcttataggtkcagtattctagtctctgcctccatgatcacatcagcttttcctccttgtctctgcatgtacttttctgtctcttttaaaaatactctcactgggtttagtacacaccctaatcctgtacgatcctatctcgacccttatctaaattatacctattttttcttgttatttgtcatttatttattttattttttgtagatctgggatctcactgcattgcccaggctggtctggaactactggtctcaagtgattctcctaccttggcctcccaaagcactggaattatagatgtcagccactatgcttgggacaaagactatttctaagttaggtcacattctgaggttccaggtagacattaattt

SEQ ID NO: 488241 - DNA, 545 bp, Homo sapiens
tgtgttgctgtagacatgacagtaaayatccagaaaattgagtgtttttggtcttcaatttaagaagtcatttgctggatggtgctaactaagaacagtcattaaacttgagaaagcgcccttctgcctcattccttaattaaatggaagagagaaacaaaatcctggctttgcaaagccgcaggcttctagtggaaatgccctcaagggaagagacacagaaggatgtgtggtctccagcacacatgtggctgggtgctgggagtgagtgggcaggcatactcagagactcagacacctgattcctgcattatttcctggccagaatggaaaggttgtgggggcggggtgggcaagatgggaatgaggcaatcgggaaaggcctggagaagtgactattggagattgaattatgtccccctgaaattcatatgctcaaactctaacccccaatatgactatatttggagatagggcttttattttttatttatatatatttttaagacagagttttgctcctgttgcccaggctgtagtgcaac

SEQ ID NO: 488242 - DNA, 554 bp, Homo sapiens
gctatgcaggttgtctccctttactmattttagataagtatttacttttcatattgagtctacccaatttaggaacattaaatgtgtcaacacactttgaaaccatgctaacgtaatataaataccaagtttcttgaacctgtgacatgttacataagagaaaacagtaatgggtgtttcaaaaacaatgctgagattgtcaggcttaagaacttatttatattcttacaaaaagaatacaattgagacatttgggcaggagtttatttaatccactgtccccaagtcagaggctacagtatttgtggtttaaatggcacatatatgatatttgaatcatatagatatttaccctcttttatttctgaagcttgggtataaagtagtttataggttattatgcatcaaagcagaaaaatgagactgggaggagagattttagaaagcaaatctcagacatattaattcaatctcataaaaataaatcgcctatattttaccaaatggtataatctatgtggtgcattgtatctgtaattaatactgtatttgta

SEQ ID NO: 488243 - DNA, 649 bp, Homo sapiens
cttcctcaagttgtattaattcactgatttaacaggtatttattaaaagctcgctgttctagatatcagaactgtaagactgaaaagaggaaaaaaatccagaaaaatagaaaaaaatctcccacacagaagacaaagaagtaaataaataggtaaataaagaactaaataaattgatcaatagtgattagtaattagtgatgtggaggaaagtaaggcayggacaggggatagaaagctctgtgattaggggtgtctgggcaagggggtgcagtatttaatagggtgagcaagaaaggctctcactgaggtgacagttgagcatagacctgaagaaggtggggagggagcaacaagcgaaaatacaccaaagcagccacaaaactggtatgttcaaggctcatgggtatgcttgtatctccacatatctttacacaccttaaggactcccctctttatccacctacccgatatgaaaggagatttccaacttgttaatcaaaattgttatcttggatagtcaaatttaccaaacgagaccccaagacagcaatgaaaaagacaagaggagagtatgaggctggacagctccttgacaagctttggctaatcgcaaaatgagagctgttaaacgaatcatctatttcca

SEQ ID NO: 488244 - DNA, 637 bp, Homo sapiens
cttcctcaagttgtattaattcactgatttaacaggtatttattaaaagctcgctgttctagatatcagaactgtaagactgaaaagaggaaaaaaatccagaaaaatagaaaaaaatctcccacacagaagacaaagaagtaaataaataggtaaataaagaactaaataaattgatcaatagtgattagtaattagtgatgtggaggaaagtaaggcacggacaggggatagaaagctctgtgattaggggtgtctgggcaagggggtgcagtatttaatagggtgagcaagraaggctctcactgaggtgacagttgagcatagacctgaagaaggtggggagggagcaacaagcgaaaatacaccaaagcagccacaaaactggtatgttcaaggctcatgggtatgcttgtatctccacatatctttacacaccttaaggactcccctctttatccacctacccgatatgaaaggagatttccaacttgttaatcaaaattgttatcttggatagtcaaatttaccaaacgagaccccaagacagcaatgaaaaagacaagaggagagtatgaggctggacagctccttgacaagctttggctaatcgcaaaatgagagctgttaaacgaat

SEQ ID NO: 488245 - DNA, 677 bp, Homo sapiens
tttgggcttttgctctcttaagttttgtttatctttcctctcccattccccatcctcctagtctctgttttttgcacacaccagaagaagagctggctcattcattgagccctctgtgtatttctttctttccctgtcctgccattttccatatactgtctctttggttgttctgcctttcactgtccacttgttaagtgctgatgatgacctttccatcatcagcaagatcttcatcagtaaggaaaggaggagataaaatgaatcaaattatagtcaaataatcccaaatggagctaaatcgaaaattggctgagagtctgaaatgtgcagaagaattagatttaagactaaatgtgtatccataaaagatgaatatgaaggaaataataacasctagctaatatttagctaaggctaaatgggaaataattaatttttaaatggccaagaaatgtcagacctgcagagcataggtttcctctcgtaaattagtgagtcacaataatttaggcaataaatgaataattgtggggtaagattaactaggtgttttaaggttgttgaagctcttaaattgcaccaatttagcagagagtgggttcggcatgttttaatataacaattagttcccagtaaaagaagagaatttaagggttcctatctcatgtgtgggt

SEQ ID NO: 488246 - DNA, 677 bp, Homo sapiens
tttgggcttttgctctcttaagttttgtttatctttcctctcccattccccatcctcctagtctctgttttttgcacacaccagaagaagagctggctcattcattgagccctctgtgtatttctttctttccctgtcctgccattttccatatactgtctctttggttgttctgcctttcactgtccacttgttaagtgctgatgatgacctttccatcatcagcaagatcttcatcagtaaggaaaggaggagataaaatgaatcaaattatagtcaaataatcccaaatggagctaaatcgaaaattggctgagagtctgaaatgtgcagaagaattagatttaagactaaatgtgtatccataaaagatgaatatgaaggaaataataacagctagctaatatttagctaaggcwaaatgggaaataattaatttttaaatggccaagaaatgtcagacctgcagagcataggtttcctctcgtaaattagtgagtcacaataatttaggcaataaatgaataattgtggggtaagattaactaggtgttttaaggttgttgaagctcttaaattgcaccaatttagcagagagtgggttcggcatgttttaatataacaattagttcccagtaaaagaagagaatttaagggttcctatctcatgtgtgggt

SEQ ID NO: 488247 - DNA, 482 bp, Homo sapiens
tgtgtatccataaaagatgaatatgaaggaaataataacagctagctaatatttagctaaggctaaatgggaaakaattaatttttaaatggccaagaaatgtcagacctgcagagcataggtttcctctcgtaaattagtgagtcacaataatttaggcaataaatgaataattgtggggtaagattaactaggtgttttaaggttgttgaagctcttaaattgcaccaatttagcagagagtgggttcggcatgttttaatataacaattagttcccagtaaaagaagagaatttaagggttcctatctcatgtgtgggtttctaccttatgagatatctttagcatttgttgatttgaggttggaacctcagaatatagttagcaggcttcgggttgactttcattttccctaaaataaaagattgttttaaaataaaaaccagtctcacaggaataaaactcatggaatgttagatct

SEQ ID NO: 488248 - DNA, 482 bp, Homo sapiens
tgtgtatccataaaagatgaatatgaaggaaataataacagctagctaatatttagctaaggctaaatgggaaataattaatttttaaatggccaagaaatgtcagacctgcagagcataggtttcctctcgtaaattagtgagtcacaataatttaggcaataaatgaataattgtggggtaagattaactaggtgttttaaggttgttgaagctcttaaattgcaccaatttagcagagagtgggttcggcatgttttaatataacaattagttcccagtaaaagaagagaatttaagggttcctatctcatgtgtgggtttctaccttatgagatatctttagcatttgttgatttgaggttggaacctcagaatatagttagcaggcttcgggttgactttyattttccctaaaataaaagattgttttaaaataaaaaccagtctcacaggaataaaactcatggaatgttagatct

SEQ ID NO: 488249 - DNA, 510 bp, Homo sapiens
tcaaaaaactgtaataaaattcagaataagatttacttctgggggtggaaaggaaaagagaatagagaagagcaaacaattatgtttgacagttttggtaatattgtagtttatagtttgctgaaagattcatgaattttcatttttaaattactctccaaggcccgggaaaggtgtaataaaggccatagggcatagcttcttaaacttacctctcttcaactgttttagaaaagtaaataagatgccaatatcaagctttcaccatccccaaagctctatcctttcccaaagcaccagcrccagccagacacacacagatgcaaaccagacttcacacaattgccactgataagaaaaatgcagccacggaagagattccctcagcagagatgttgctgcaattacagctaatatggccacacctccacattctctgcatcactaatggtaaaaagaccaactgaagtgatcaacttaaataaaactttcccgtagttccccattcca

SEQ ID NO: 488250 - DNA, 541 bp, Homo sapiens
cttacatatcatttttcaacatttcctaatttggagttagtatttgttccccttttttattccctcgggacttgcttcattttctctcccctgtgctgttattcttactgcaacatcttcgaggttgtgataggcagctagattggtgaatgatacacgggctcacacagctctgacggcttcacctctttcacctctaaactacatctctgatgatctccacagtcctctccattctaccttttgtttctttttcccaaaacttcactctcctctctgctgccagaaatacagcccgtgcatgctgtgatatgcatatgagaaaccacactgctatgcagcttgggttgtacttgacagattagagattattttttcttatttggctgtgtcagggcagcagtrtatttatttttctctttgacaccagtgacagctataactgtgcccactcagaatccagagagtaaatgaatgcacagaggaagcatggggtcttccagcctaactcaacacagcctccctaagctctgctgttttg

SEQ ID NO: 488251 - DNA, 622 bp, Homo sapiens
gaactgaccaggaatactggcgacatcactcttggcactttttcctctctgctgctgcctgccaacccgagttgttcttattaaaacacacagacaaaaacaacagaagaatcagagtttcccagaaatggaagtaagcaacataatcagagttttataaatctactaaatagctcccatcatttgttgtctctcttattttctttttaatataattgatacatgcaagagaatatatagacgatatacacaattataaatcatcataatattttgaatacctagaaacataccccaacccatgagccagaacattatcaatcatttgtctttatttgtttcttttcattccattcttttgcctctcccccagaaataatcataccattgaattttgttttaattcccctgcttactacatacatgcatatatacctttacacctccatacatgcttgcatgcttaaayaaaattgttttttcttggtcatctgtgaacattttgaaaagataccatattacatgtgatattacaggacttgatttgtttattttacattgtttttgaaatttatccatgtcatcatagatgactttatttcactgtttttcactgctgtgt

SEQ ID NO: 488252 - DNA, 532 bp, Homo sapiens
gcactggtcatctccttctgcctgtctaactgtgaaacgctctaggtcttagccccaggtgccctgcccttcyctgtccatgtggcctctcagagagcctgtccagtagtgtggggtataataatttactcaggtctcagaattaagtgctatagtccaagttctatctcttctctaaccagtagtgggaccctgaactcaccatgtattttctctggacattaatgtattatccatatatgcacagctaagattaaagaatgtctcaggtgtctacaaacattaagcatccaggacactacaattctaccaactccaagaatgataatttctaaatactgtatgtttctctagccatatgtgctctgccaagatctcagactcatcaattatttattcattcattcattgtttagcagctattaggcatggggccccaggataggctttggggatacattggtcagtaaaaaaggtatggtccctgcctttgtgaagtttacagtctaatggacaataagcaatgtaagaa

SEQ ID NO: 488253 - DNA, 516 bp, Homo sapiens
agtgtagaaagtgtccccatcaaaaggaggcagccaggcagccaccactaagctccaatggattgtttccattgtttccatgagaaaacaatggcccaacattgccagatcttcttattttccaagagaagctcatagcctgaatttttatgtgtaatctgtttattgtcagccacgaattctaacaatttcataaacactcactgccactcaacaaccaattttcaacttctatsgtagctgaggaattaaagagagaagccatagtcagagccattcattaggaaatgaccttgaccttagtttacaaccttgacacaaaacatctagtccagtgaccagcaacatggtatcactgggactgtattagaattcataatctcagcacctgcctccccaacagatctactgaataatagtctacatattaaccagatacctaaatgattgatatgcacatcatggttggaaaagcactgatctgtatgaggttatgtttagtgtaaggacatccct

SEQ ID NO: 488254 - DNA, 632 bp, Homo sapiens
gtcactcagatactgggcatgttgcacagattccccattaaacggcaccatggctcattaaacctcactggtgagaaaattgaatctttgttaaatgtttatgttctttgctaatgttaaatttagaatatctctgatgtaggtacccttggggaagattttaaggcactaggtaaagtgccagcagatttcagtccataagttcccagatacaagacctggaaaacattccccacctggattgattttccagtttctccctttccagtcttaatatatcctacttttcttaatccaaactgcatgaccttctggttacctttttctactctcagtgactgctagggattgtatttctgktttttaatcaaaaaaaggcaattgattattctcaaacaccactcagccatgtttgaagtcaaagggatggaggtgggattgtcagtgtttttatcatgcacccataataaatctctgcccacaaagccttacatttcaaaaaaaagggcttaaacaaatataaatatcagcaacagaaatatgactctagaaatgtgacagtggagttaatgtaaaaagaataattttcctcatttaaaagttattagaaatcccctacatgtataccaaaa

SEQ ID NO: 488255 - DNA, 527 bp, Homo sapiens
agtaccaaaatgatatagcatattgatggttaaaataaaattgcaaagttttagggctaaattcctcatgatgttttgtgtaacttaaaatttagaatgacctaaacaaattgaatgactagtcattagctttgtagatctggcattgtttctctcatgtaactcagaaggttagtcttttcacttgtattctaggattatgactggcagagcttgactgrcaaaatcaatccatgcatcaattttgctgctaagtcttcactgagaatttaataattctcaaaataattcccatatttcagcctgcacccagataccacaacttttttgaaagcctctccttcagatctcaccgtatacaatttttcaggaaagtgggaaaagttacaggagaatttcctcctccatcctccttcttagaaaaagaaaatacattttcacaataatcattttttggaaatggaaaaatgctacctcgtttatgagaataccaaggttctacacctgtcaggcctgacaccgattca

SEQ ID NO: 488256 - DNA, 589 bp, Homo sapiens
gtgggtcatgctcaatacacattaaatgttagctgttgctgttactcctatcatcaaagaccaataataaaaggtaagcataatagaaaaatggacaaatgatataaatagttaataaacaaaagaagaaacataaatggacaacagctatactaaataagatcagctttactaataatgaagtaaarcaaattaaaccaacaatggagtattatttttacctggcaaatatttaaatcttcaggactcaaaaaagaataatcatacttggagtaagtcagggtttgggaattgagaaccctcctatatgattggtgaaaaaggaaagtgataaaacttttacaaaggcagtgtttactgagccattagattttgtgaatcatttgatccagcaattttgtttctagaaatttattctaagaagtaattatgggcatgtgcaatagtctctccatggagatgaatgcattgatttgagcaagaagttgtgcacaatggttactagttggttgagtgaattatagcatattaatatcatggaaccctatgaagtcatttaaaaaataataaagaaaaaatatattgatgg

SEQ ID NO: 488257 - DNA, 580 bp, Homo sapiens
ttagaggcccagatagaaccaaaaaccaaaaaccaaaacaaaacagaaacccaatttcctctctctcctgaagttggaacactcttcccccacctttggacatcaaaactccaggctgttaggcccttggactgcaggacttacaccagtggcctgctgggttctaaggcctttatcctttgcctattggcttccatttctgaggcttttggacttggacagagctgtgatatgggcattccagggtctccagcttgcagacagagccagttcccctaataaatcccctctcatctatctatcatctatctatctgtctgtctatctatctatctatctatctatctatctatctatctatcyatccatccatccatccatccatccatccatccatccatctatccatctatccatccatccttccttcctattggtctgtctctgtggaaaaccccgactaatactgatgtccctttcctactggtggagcctgttacctgggtcatgggttctggaagtggagtagtgtctaaatttcagcacctcgtcactttcctaaactggcataaattggcac

SEQ ID NO: 488258 - DNA, 630 bp, Homo sapiens
cattcctttctcactgccatccttctctcaacctgtatccccagtctctattcackgaccagtttgtaaagctctctcctttatttcatctaggtcctaaattccacgtacacatcattaaaaccttagaagatgattctcagaatattcttatgtgactaatttgagagacaacacatttgggctattctgccttctgtattttctgttcccatctccattccatgtacccattacccagtcctgctaggtgctaaggggttcagaagatgtggcttctgtcctccaggactcacagcttgggaggagggataacaagcatgtgcaaataactgactactaagtgaaaaaatgacaattcagtaagcaagctaaggctaaagtgataaaaggttcagaggagggaaggagaaccatggtctggggaagaagaccttgaaggtgagtctatcctgatgagcagataggatcagacatgagttatagtaggagcaggaggaacacagggagtcactactggaaaaagtaacatggaccaccaaacataaatgagtagtaattcacaggcgtgggcggcaaaagttgggtaatttattggtgaattcttctactatgtattgctatattgta

SEQ ID NO: 488259 - DNA, 551 bp, Homo sapiens
gtggcagtccaaaaagcttttttactcaggtttctgaatgagcaagtataacaaaagaaatggctggagtttaatcatgtctgattcataaatgtaagtaaaacaatttttctagacatgtggaatatgtgctagtgagaggaaaccaacgtttgatgagcagctatgatttagcaggcatttgaccttaggctttcttactacctaagcaaaaaacctagaagtgatttctccctttcctgttaccctcaacacctaacttgttgactgctcattctgcctccccagtatacttgggtactgccttctctccccaactcccggccaccatcctctctcaccgggattctgcagaagccacccaagtgactttcttaaagcatcgaratggtctctcatccccgcccagccctctaccggcaccttctccatttgggatcacctcccagcactgcccaattccacctgggtcttcttcaaccccatctgcccatgctatggcctttgcccactccacccagcccctctggcctttgggtttctgaacacac

SEQ ID NO: 488260 - DNA, 551 bp, Homo sapiens
gtggcagtccaaaaagcttttttactcaggtttctgaatgagcaagtataacaaaagaaatggctggagtttaatcatgtctgattcataaatgtaagtaaaacaatttttctagacatgtggaatatgtgctagtgagaggaaaccaacgtttgatgagcagctatgatttagcaggcatttgaccttaggctttcttactacctaagcaaaaaacctagaagtgatttctccctttcctgttaccctcaacacctaacttgttgactgctcattctgcctccccagtatacttgggtactgccttctctccccaactcccggccaccatcctctctcaccgggattctgcagaagccacccaagtgactttcttaaagcatcgagatggtctctcatccccgcccagccctctaccggcaccttctccatttgggatcacctcccagcactgcccaattccacctgggtcttcttcaaccccatctscccatgctatggcctttgcccactccacccagcccctctggcctttgggtttctgaacacac

SEQ ID NO: 488261 - DNA, 647 bp, Homo sapiens
ttattagcaaaggtgaacttccttttaattttaattcattagcatagcaaaaccacaaccaacaacaatcacggggcaaaagccatcttgtatacttctatatttcaaatgcctggtgtaatatgtacctctagaaagaatgaataatcattttttgagactatcttaatgttaaagaaataagaaaatataatagttatttttttggattttttttccattaaatattttatcccagtgtttaagaatgtactcttgagccaaatcatttgggcttgaaatctgctctgtcttttactaccacacaaccttgtgcacgttctttaatcttcctgtctcctctcacattccccatctgtgaaacagagataataataatacttatcttgtggggttggtaaaaagaattaaattagactttacaagacatactatagaatgtgctagcatctggtgaaggtttgataaacattacctgctgccactgctgttattatttttttatcttgatgctgtacagtcagtgtaaactttctgtacayactcatgaacaataataatgaggcacagatgtgaaacatgcaacaccaactagaactttgacatttttaactgtgagattaatatttactattacttagaaatct

SEQ ID NO: 488262 - DNA, 591 bp, Homo sapiens
ttacagtgtgtatccacacttcttgggatgyttttttcttttcaataattgtgttgttcttacaataatccatcacccttttatcataggattcagtcactaaaggaagaaatccaggcatattctaataaacacaatggtagctaaatgtccatcccaaggtatcatatgtgtgtttcatctatactgctgtatgtaccctgtattttctactctgaatacaaaatgacatctatgtgtattaagaattacataactaacaaggtgtgtactattttgagctctagcaagaaagaaaagaagaaggaaaaaaagaagttatcagtagtcagtatcttatgatttaagactccagggaatgtgagctagtgtgagagagtagcctatatagttaaaaccatggtttaaagacattataagatgatggtaaatttgcaattagtgtttcagggtctcctaagaatttgtacatgacaggcattagctctctaccgaagagggcaaaaaccatatagaagccttaccaagtgctttgatcaaactttattatctcttttttactgtcctcattaacatacttcaaaaacgctg

SEQ ID NO: 488263 - DNA, 591 bp, Homo sapiens
ttacagtgtgtatccacacttcttgggatgcttttttcttttcaataattgtgttgttcttacaataatccatcacccttttatcataggattcagtcactaaaggaagaaatccaggcatattctaataaacacaatggtagctaaatgtccatcccaaggtatcatatgtgtgtttcatctatactgctgtatgtaccctgtattttctactctgaatacaaaatgacatctatgtgtattaagaattacataactaacaaggtgtgtactattttgagctctagcaagaaagaaaagaagaaggaaaaaaagaagttatcagtagtcagtatcttatgatttaagactccagggaatgtgagctagtgtgagagagtagcctatatagttaaaaccatggtttaaagacattataagatgatggtaaatttgcaattagtgtttcagggtctcctaagaatttgtacatgacaggcattagctctctacygaagagggcaaaaaccatatagaagccttaccaagtgctttgatcaaactttattatctcttttttactgtcctcattaacatacttcaaaaacgctg

SEQ ID NO: 488264 - DNA, 562 bp, Homo sapiens
gtgactcgaaatagaaatttaagtagtgcaatctctagtcatcagcttaaattagtgttatttaataatatcacctataactttgtacagtgccttttatccatactttattaatctgacagcacattaaaagtataaaatattaaataatcatcagaaataccgaaagtttagaggggttgttttacttctagtacatggttcctatttaaatataaactacctaatacaaatgtgtaataaatgtatgcatttctcccaaatgctcagcctctttgcaaacaaattgaccttcatgacagctctataaaatgggaatagactggcaatttacattcattttccatatagtatactatgagaataattactttccagtgcgatgtttgttggtgcacaatggaattggtgccccctaarggtgtacagcatgacagtcctgtttgcttctcagatgaggccttcctgttaaatgtgtttaccaaaattattccaagactctattgcctgggttttttcctataaatgcttgctttgaaatggacagcatctgcattcttgc

SEQ ID NO: 488265 - DNA, 587 bp, Homo sapiens
cacatcaactaatcaatatttcttggtcatcaactactactgtaccttttcatgcataaaatatttgtatagatccttgatcttctaaaaaaaaaaggtcctgagtctaacctttatcttcaaagaatttatttagataactaagtcaaaatgtggttgctttgtcatccttgtaaatatttaatatatgatattagaagtcatgacagaactgtaaggcattgtgcatccaaaaatgactggtaaatatcaagatgtgatttcattaaattatttaaacagatcaatgtatcatttgttttgattgtctagaaaatggtgaacaaaactataagcaacaattttttgtgattaaagtaagacgatcatatactgtaaagaattttattttccaatgtatgatttttagatagtgatattttccctttcatacttcatttgtaggatttttctgtcaagaattttatcaacattttaaaagttttacgagtatcattaattaacatttayctgtctggatacattgttgttgtggattaaattaagcatatcttaaattgtaggtggtctctttccattacctagaa

SEQ ID NO: 488266 - DNA, 601 bp, Homo sapiens
tatgaattggagataaagcaggaagaaaacagaagagtcctctaaaatgtttaacatatgactgacaaatctttttaaaagttcaagcaggctgggcgttgtggctcacgcctgtaatcccagcaccttgggagaccgaggtcaggagttcgagaacagcctggccaacatggtgaaaccctgtctctactaaaaatacaaaaattagctgggtgtggtggcagatgcctataatcccagcttcttgggaggctgaggcaggagaatcgcttgcacctgggaggcagaggttagggtaagtcgagatcgcaccactgtgcttcagcctgggtaacagaataagcttccatctcaaaataaaataaaataaaataaaataaaataaaataaaataaaataaaaggtcaagtaaaaaaagaaaaaaacaatgtcatcaataaaccgccatgaagacattcactgccaaagaattaagaacaggaatactggctagccacacacctttccaaagatggcastaggaccagcaacagaaaactgaagtttgaggatatcatgctagaaagtcatatgaaaagttgggttacttgagtcaatgcag

SEQ ID NO: 488267 - DNA, 662 bp, Homo sapiens
ctgccgaagaaagcatctgccacacgtttgctaagaaataattctttaaattcctttcttatttatacaacaatagcaacaacaaaagctactctcaataagcactttaggatgaccttctctattagaaatagtcactgctctttcaggctattgaaagctgagtatagtgtttttttaaaaagtcaacaatgtgctaaactttgttggctcaactgacacgacttaagcgtcaggttaatctagtccatttcggcgactctaaaaaaatcacctatttaccaccttcaaacttggagaaaaacttcctggcctgtatattttttaaagacacacacacaaaatccccacacacatttttattctttttctcaaaatattagaggaaaaggagtagtgtgacatcaatgaatrcctatttgccttcaaaaaaaaaaaaaaaaaaaaggcaacaaaatctgacccagtaatcccaggaattttacttgaaagtacattttgatgtgaagtgtattaaatgcaggttactacagaccagaaagaatattggtaatatttccaatcaagcaaatgcctgaatttcaacagggtcagcggggagcagacaattccctctttactctggctgtaaaagagacaagcgcgaagtgaccatcaaagta

SEQ ID NO: 488268 - DNA, 646 bp, Homo sapiens
tctctggttggttgaaatgttttcttgtttctattttccatggtttccaacatttctacaaagaatgtgtattatccttgcgataatggaaagtggcagaatgagttattacaagacagcgactggctctctcctggccctgctccagatcctgctctctgctctcagcctctaactgtatctgggaccttgggtttgcctggcttctgtgaggaccgtrgtcctcagggagacagcttccatgtccagccctaactctgagctctgggcctctgcaggtccttgctaggacatttgctcttccctggcagtgacagtttcagggaggtggtagtgggagagcaaagccagccagcatcaggcctatattccagttctgctgctataactatgtggctttggcaagtttcttaacctccatccatataaagtaccagacacttagtaggtgctcattaaatggccacagtgatcctttggttacttagcaaagtataaagtggccccattttgtgcccccatttcctaggtactctgttgcctagaatacttcttcagaattctctatcttcccctgacccaactgggaaggtcttgcagcaacttcattgatcatttacagaattttacagaggctcataaaagc

SEQ ID NO: 488269 - DNA, 645 bp, Homo sapiens
tctctggttggttgaaatgttttcttgtttctattttccatggtttccaacatttctacaaagaatgtgtattatccttgcgataatggaaagtggcagaatgagttattacaagacagcgactggctctctcctggccctgctccagatcctgctctctgctctcagcctctaactgtatctgggaccttgggtttgcctggcttctgtgaggaccgtggtcctcagggagacagcttccatgtccagccctaactctgagctctgggcctctgcaggtccttgctaggacatttgctcttccctggcagtgacagtttcagggaggtggtagtgggagagcaaagccagccagcatcaggcctatattccarttctgctgctataactatgtggctttggcaagtttcttaacctccatccatataaagtaccagacacttagtaggtgctcattaaatggccacagtgatcctttggttacttagcaaagtataaagtggccccattttgtgcccccatttcctaggtactctgttgcctagaatacttcttcagaattctctatcttcccctgacccaactgggaaggtcttgcagcaacttcattgatcatttacagaattttacagaggctcataaaag

SEQ ID NO: 488270 - DNA, 491 bp, Homo sapiens
ctggttttaaccactgttgctttactataaatcttgatatcagggatgtatgctccctttctttagtcctgtggtacaaaataatctgagctattcttagctcttacttttccctgttaatttgggaaccacctagaagttgtgtacatrcagacacacacacatacaaacacacacacacaaccttttagagattttgatagaattgcattgaattgctggattaatctggggatagcttccatgttttagatacttagcttgatacttcccaaacgtgagtgactgtatccccccatttatttagaccatctaaaatgacctccaataaggttgaatttatttacttatttttgacatcgtgaatgggatctatgtcttttaatgacattttaaagtagctgatgcagggagcaggtattaactttgagaaacagtgcaacatagtgattgagagcattgtctctggatccagattgatggaattcaaa

SEQ ID NO: 488271 - DNA, 491 bp, Homo sapiens
ctggttttaaccactgttgctttactataaatcttgatatcagggatgtatgctccctttctttagtcctgtggtacaaaataatctgagctattcttagctcttacttttccctgttaatttgggaaccacctagaagttgtgtacatgcagacacacacacatacaaacacacacacacaaccttttagagattttgatagaattgcattgaattgctggattaatctggggatagcttccatgttttagatacttagcttgatacttcccaaacgtgagtgactgtatccccccatttatttagaccatctaaaatgacctccaataaggttgmatttatttacttatttttgacatcgtgaatgggatctatgtcttttaatgacattttaaagtagctgatgcagggagcaggtattaactttgagaaacagtgcaacatagtgattgagagcattgtctctggatccagattgatggaattcaaa

SEQ ID NO: 488272 - DNA, 590 bp, Homo sapiens
tatatttaagccttccagagccaccactggatgggtagtggctctctgactagtcaaagcttagggatgtggttcgtcattgtcctgggaggggtatatatggggaggccaggtggcctggagtagaccattgagagacgaggacaaggtgaagatggccaagaaaccataagcctccagcccagttgtggaacaaccacctgccaacaccaaagaggcgaggaggaggaagaccccttctcaatcaaggtccagaagccctatcaaggtgaggaacccacccaagctcctcctcgtcttccccttgactcctccctcccaagacttctaccctatcctggcctgacacaaccccccaccccagcctgtatcccttctcatgaaacccgtctttccatccctcctccatccacttccccaaaascaatgcctttctgtgatctccttgttgtcctttcaggttcccaaaccagcaagggaaaagaaacactttgatggcgttccagaaaagaagcctctcccaaaatgaccactgcttgaggaaaactccaggaagggagtaggccaacactaccaggccaccgtgacca

SEQ ID NO: 488273 - DNA, 627 bp, Homo sapiens
gtcactagccacatttagctatttgcacataagtttacactatttaaaattaaatttaaagttcaggtcctcagtcacactaaccaggtttgtatactcaatggtcacatgtggctgctggttaccctattggacagtgctggctagatatattggttcccaaagtaagattacttccacctggaaaaaaacaatttaatgggactctttccattaaatttcaagctattgctcccatctgsgcactttgagcttctcatgctataggaccagcaagcataaaaaggagttgccatgcttgcagggatattggctctgatcatcaggaggaggtagggctgcccttatacaatgggaacagagaggaatgtttggctctcgagtgaccccttgaatgtgtcttcgtagtcccctgccagatttctatagtatagggacaattgtaagtgccacagcctgagaaggtcgtggaggaccaggagcccagaaccttccgggatgagggtttgcactactctattgggtaagtaatagagaacagcaaagattctggttgaaaccgacagtactctagaatggatagtagacaaggaacagaattatcatcagttgtggcttagaggccag

SEQ ID NO: 488274 - DNA, 501 bp, Homo sapiens
gctctgtgtttgaagagagcaatcagtgttctcagtggcagtgggtggaagtgagcacactgtatgtcatctctgggttccttgtctattgggtgatttggagatttatccttgctcccttttggaattgttcaaatgttcttttaatggtcagtttaatgaacttcaccatcgaagttaatgaatgacagtagtcacacatattgctgtttatgttatttaggagtaagattcttgcttttgagtcacatggggaaatccctgttattttgtgaattgggacaagataacatagcagaggaattaataatttttttgaaacttgaacttagcagcaaaatagagctcataaagaaatagtgaaatgaaaatgtagttaattcttgccttatacctctttctctctcctgtaaaattaaaayatatacatgtatacctggatttgcttggcttctttgagcatgtaagagaaataaaaattgaaagaataatttttcctgt

SEQ ID NO: 488275 - DNA, 598 bp, Homo sapiens
ggacccaaggagtgcccccttcatgaggactgayggtacccctggcccagaaggaaaggactccacagattatggctgtcacttattcttagctctgggacaatcagatcaggaatgtccctaattggcaatctcacttgtaccacagataggaagttggggaacccttggggacatggggtgttggtgtaaaggcgagatggctgctcctctcaggagtttgggagttgaggaagggcaggcgccaggaggagtaaagatgaataacccaccggaagacattggaagcctcaccccagaaccaaaggggccagctcctggagtgagccctggacaccccacccaatggtgatgggatgtggcgcctcctcacttctgtttctagatcttagggaggtgaggaccttgttttcagagggtgactcaggtcaacacagggaccccagtctgatcgactgacacactggtcccaggatctgccaggtgtccaggtgaggaacctgagggaggactgagggtacccccaggcaagaacgcaaacgggggctccacagaaatcttccctgcccctgatgtcaccccagagagcataggcagg

SEQ ID NO: 488276 - DNA, 642 bp, Homo sapiens
ttgttccaataccactaattgaaaagactaatatttttccaataaattgtctttacccctttctaaaacctccattgctatattcgcgtggatctatttatggattctctgttttaatccattaatctatacgtgtatcccttagaaaaktccataatgacttgattgttttaggcttatgctaaatcttaaaattgagtggtacgatttgtgcaattactctgtgttttgaaaattgttttaattatttcaaaacctttacctttccgtatgctttttgaatcagcttgtgtacaagtacaaaaaagcttgctggtattttactggagttacattggatctatggatcgctttgttacagatcacatatcttcactgagtcttccagtgaatgtacatgctatgtctatttagttgggccttctttgaatttttcatcagcattttgtagttttcaccatcctgatatgtacatgttttgttagatatataccaaagcatttcatttttaattttattaaaatggctattttgtttttgtttttgttttttgggtttttttttggtaaaaaaaatcaagaatgtatagtacagaatctacagtgtagctggagtcaacaaagcctttgaggataatatgct

SEQ ID NO: 488277 - DNA, 636 bp, Homo sapiens
ctgtggaaaatatggataataccattcaattagaacatgaagtaagaagttaatcagaacaaacatgaagtcctgagaaacatcattgtttcagagggaaagacaaaaagagaagacggcaaaggagaatgagaatgtcgtaggaaaactgagataaactgaccctaggaaggaatggatttaatgacttgttaaagtgtcaacagcactaaatgctgtaaggaagtcaagtatagttagaattgaaaatggcatttaatttggcaatatgaaaggctttaaacatcttggcaagtacattatcagtagagtggttaggggaagaggcagatattattggacagaggagtaaagagaagttgagtaagtgggtgcagttaagtgtggattattcctttcaagatcttgcrgaatgaaaggaaaggagagagagaggaagcatcctgaagggacagaaaaaaggtgagcagatctagtccatgaaagctggtccaggctcacaataagaaaaaatgaagacttgaactcagccttaggttactgttccttagaatttctattcagtcagtaaacagcagtgcaaaaacatccatacctaagatcaaaagatacaatgagtagatacaactttcctat

SEQ ID NO: 488278 - DNA, 566 bp, Homo sapiens
gttggtcccttctgagggctgtggggaaggatcctcaccaagcctccctttttggctgtggatggctgtcttttccccttgtcttttcacattttcgtccctttatgagtgtttctgtgtccaaggttcctgtttatataaggacactaatcatactggatcagggacccatgataataacaacctcattctaatgaaattaactctgtgaagatcctgtctaccaatgaggtcacattctgaagtactaggagtygagacttcaatatatgattctgggggggaatcatatattgaagtcttggaacaattcaactcataacaggattggtaggagattttttggcaaaacagactgcagtgagattataaggcatcttatatgcagttctacgttggtaccatttcctgctgacaaagtgcatcctctgaagatcttatggaagggagtgatatgatgtgttttctgggagtgacaggcttttttgattagagcgagaggaagccagggtaggcaaaggtttgagtaaacaggtgcatcaaaaggctgcttaaatagaagcaag

SEQ ID NO: 488279 - DNA, 644 bp, Homo sapiens
tttgggatgttttatagtcttgatgggtcgagttaagaggctacttttccttgagtacttactgtattcgtccattttcatactgctatgaagaaatacccgagactgggtaatttataaagaaaaagaggtttaatggacttacaggtccacatgcctgggcaggccccacaatcatggtgtaaagtgaaggaagatcaaaggcatggtggtaggcaagagagcgtgtgcaggggaactgcgctttatacagccatcagatctcatgagacttattcactatcatgagaacagcacaggaaaacccacccccatgattcaatttcctcccactgggtcctcccatgacacatggggattataggagctacaattcaagatgagatttgggtggggacatagcaaaaccatatcacttactaagtgccagacactatgctaggcatttgaatgcaatatctcattcaatcctcgcaagagacttaytgaggccagtgttcctaggactcatgaattgcagataagaaaaattgaaggcacagagctggtaaggggaagtgactgttaagtcacactgattccaaagtttaatgttctgaatgaagagctggcaaactttttctctgaagggcatagaatacata

SEQ ID NO: 488280 - DNA, 366 bp, Homo sapiens
ttagtcttcagtgttcattccttgtttctgccccataagaataccttgctatcggggaaccaaagtcaggagcttacaatggaaattcaagcccctaagatcccagggtayatgagctccaatattaaagcacaaaggaggaaaccgagacattatttaaatgctttttagagtaagagatacaaagagtccctcactgttttacacttgtaaagagacccctgctggattcccaggtataatctgcagtaaaaagctacagggctacaacaaggcctctggttccattggctcacttcctttttccccatagcctctggcataaaaacgcaaaccagagagacactttagaattcacttgtgcag

SEQ ID NO: 488281 - DNA, 528 bp, Homo sapiens
caatgagtcagcggacatgactttgtgacccctaagtatatgtttcctggtctctactataaataataataataatattagtaaactaatgtcacaactattatttattgagtgtttactgttaagatattttgcaggatgctttaaaaacattctcttgattaatctcatttattcattcaacaagctttgaatctatcacattctgactactatgctagagtctgggtttaatagtgtgtaacaatagccacagttctaccttcatgaaggtcacactcctgtgagggaaaatgatgatcaaatgattcctaaaaaaaacaagtaaaattgcaaataatgaaaaatttcttaaaaggggggacaagatagaagtggtacctcaagaggggatttcacccaatcatgagattttagaaagtttccycaaggagtataattgagctgggattcaaatgatgaaatggacgataactagagaagatggtaagcacttactggtttgtgaacacacggcttagtaagcaa

SEQ ID NO: 488282 - DNA, 397 bp, Homo sapiens
cctactatgtacctaaccttccaattatttatggctgagatgcttaagatgtactggagaaacagccatggctgagagatacacaaagctgaaatattatagagagttataacttcatgaatgaaaaacctataaaaatcacttaagggtcctaatctttcagttaatctcacctcagtgccactcaagggtttaaaggagtttcactgattggtttttaaaggacaacgataaaaatgctttgaaataactaattataatttcaggtatctatgtaaaggtccagacacaaatatttgaaaatggactgytcctagaatcagggattgacacagatctttaaaactttctagcccaaacatccatgtgacatttgtatccctttggccatattgct

SEQ ID NO: 488283 - DNA, 537 bp, Homo sapiens
atatagccctgccgacaccttcattctagctcaatgagaacctgtcagacttctaacctacagaactgtgaggtgacaaacgtgtgttgttttaagccactacgtgtgtggtaatttacgtcagccatgggaaacgaatacaagcattctaagctaagctttctgccattattaacttaatttttaccccacatcagccttacgagaaggcatcatcattacctccattccacattgctaaaaatagtgagacctgaacttaaactcagatgtgactgattccaaaacctgtgctccacgaccatcccatccctctgtaaaacatcctagatttggaaacttttaaactattcatgcaggatgaatatacagagtacctgagtcaccagccaccagatgcacrgggttgcctggtcccagcctctcattttgaaaatgaagaaaaagtacagagagaagtggtgtcggagacccagaacaagttttctggagcctaagtagagtctaggtcttctggctcctagcccagcacagcag

SEQ ID NO: 488284 - DNA, 620 bp, Homo sapiens
gctgccagtactctgtagaaactggccactgccaagtgctttaagaagcaatcctggggccaggtgcggtggctcacgcctgtaatcccagcactttgggaagccaaggcgggctgatcacaaggtcagaagatagagaccatcctggctaacatggctaacacggtgaaaccccgtctctactaaaaatacaaaaaattagccgggcatggtggcgggtgcctgtagtcccagctacttgggaggctgaggcaggagaatggcatgaaccctggaggcagagcttgcagtgagccgagatcacgccactgcacyccagcctgggcgacagagagagactctgttaaaaaaaaaaaaaaaaaaaaaaaaagcaatcctgctgcattccaagtcttggatagcaacccttgctgccactgccaccaccattgccacccattatgccaggtaagagatggtttcttcttcaagcaggaactatgaagtgacaaattcggtctcaagcttttcttattatagatccacaactgtaaggcttgaaattaagcttccagatcggcgaaggagctataaaccctgagccagttttagggattggcactgagactccaacttaccat

SEQ ID NO: 488285 - DNA, 622 bp, Homo sapiens
ctgagcatttagtttggtagttttgcccggagccattcgagtaacataagtcatctgatagcttaattgggactgatggcctcactcacatcactggctaccagttttggctactkgccagctattggctactagctatctctgtgtgacctgtgtttctcaaggaggcttgcctggacttctccacagggcagactcagtgtgcaagaatagaagctcccaggcttaggagcagaattcacaataacgtcagttgagccacattttatttttcaaattcaataggctaactcagattcaagggaaagggaaatggactccattgcttgaaggtaagagtgagtcaccatgcaaactgccaaggaaggtattgtggccaccatcttgcaaacagtctattataggcctgatgtgtgttttatctttttctgaagttatttttctctaaatagcaaacttaatacattttacatcccctattcccatcctgccctctcccctcaaaaaaaagtgtgagtaaacatatgcaatttttccactagagaccattgaaagcattcagccactatgggtcaatacagaagagtctattcaaaaacacaaccaaaagcaaacaggaaca

SEQ ID NO: 488286 - DNA, 627 bp, Homo sapiens
gtagcaggcaaacaggaatgctacattgtatattaagtttattttactacaattaaaaaatataaatagtaccaggtggactgagaaagaagacttaggatgtatggcgaggttaccatttttccccctctggttttccgttcacctcaactcagtgaaactcaacataaaatcaacattgatgtagacagagaaaggtccaggagaagttcccactactcaggtcccagactgactgcttggagaggcacacatgaggcagattcaaatagcacagtagagtcttggaaaacrtaacagctcctggaaccacattctacagagggctcattggaacttgcaggatgaggccagcccagtggattacttgccaaaacaaaaatatacacattttccctcagatttacacaatatccccagagttccataatgtaatattcaaaatgtctagaatataattcagtattatgtgccatataaagaacacaaacaaatttaaattcacttggaaaaagtaaataaatgtgttaatcataacataatacattgttggaattaacctgatgaagacttcaaagcagctactataaaaatgctctaacaagttaaggatgaagagttttaaaa

SEQ ID NO: 488287 - DNA, 418 bp, Homo sapiens
aaataaactgataaatattcaccattatttaagacagatgggttttccagataaatatctgattttttaaagcgacaaaattactaatctcaaaaaataatgatattacttcttcaatcagtaaagcataagagatgatgactttttwaaaattattttaattttatggttcatttttcactaggaaaaaggggataactaagtctttcaaactcctgttgtgtgataagcaacctaagaaatttaaaggaaaatcaagaaatagatgatgttaggccaaagtaatgtgatttggataaactatgatgcacattacacagataggttgatccctatttagactagtatatttatgtatggtgatgtcataatcactgaaaataattttggtagccaaatgttaaacactatactctcc

SEQ ID NO: 488288 - DNA, 531 bp, Homo sapiens
gcagtggctcatgcctgtaatcttagtacttcgggagattgaggtgggaggattgcttaagcccagaagtttgagactagcctgggcaacataatgagatgctacagaaaaaaaaaaaaaaaaaattagcatggtgtagtggtgcatgcttttagtctcagctacttgggaagctgaggcgggtggatgagcccaggaggttgaggatgcagtgagctgtgttcatgcctttgcactccagtcagggtgacaaagtgrcatactgtctgtcaaaaaaaaaatgcacgtatacataaatatatatatgtatatatgtaatatacatgtatatgttactttgtatgtatactatatatatgtatacacacacacgtacgtgctgcataataaatatattttagtacatccattgcttagcagtttgccattcatttaatgctacttgtttattattaatggagcttaataaaattatttattccccagtaaactactatcaattgtgataataataaaaaattattattaagc

SEQ ID NO: 488289 - DNA, 531 bp, Homo sapiens
gcagtggctcatgcctgtaatcttagtacttcgggagattgaggtgggaggattgcttaagcccagaagtttgagactagcctgggcaacataatgagatgctacagaaaaaaaaaaaaaaaaaattagcatggtgtagtggtgcatgcttttagtctcagctacttgggaagctgaggcgggtggatgagcccaggaggttgaggatgcagtgagctgtgttcatgcctttgcactccagtcagggtgacaaagtggcatactgtctgtcaaaaaaaaaatgcaygtatacataaatatatatatgtatatatgtaatatacatgtatatgttactttgtatgtatactatatatatgtatacacacacacgtacgtgctgcataataaatatattttagtacatccattgcttagcagtttgccattcatttaatgctacttgtttattattaatggagcttaataaaattatttattccccagtaaactactatcaattgtgataataataaaaaattattattaagc

SEQ ID NO: 488290 - DNA, 528 bp, Homo sapiens
gtcgcacaggtgcctgccattgatcactagtgaagcactgacagatgggagtggatcactttgtgctggagttccaaacacttatgtggcttctagtactgcccaggtaatgttaatatcctctcaggatgagaagtcagggcagcatagcagagctgcgaaagccagagcttgctttktttgtttgtttgtttgtttgtttggagatggagtctcactctgtcacccagggtggagtacagtggcgcgatctcggctcactgcaacttccgcctcccgggttcaagcaattctcctgcctcagcctcccaagtagctgggactacaggtgcacgccgccacacctggctaattttttgtatgtttagtagagatgggatttcatcgtgttacccaggctggtctcgaactcctgagctcaggcaatctgcccgcctcggcctccaaagtactgggattagaggcgtgaaccaccacgcctgcctgaaaaccagagtttttaagtcacttcctcatcagtccaccagc

SEQ ID NO: 488291 - DNA, 528 bp, Homo sapiens
gtcgcacaggtgcctgccattgatcactagtgaagcactgacagatgggagtggatcactttgtgctggagttccaaacacttatgtggcttctagtactgcccaggtaatgttaatatcctctcaggatgagaagtcagggcagcatagcagagctgcgaaagccagagcttgctttttttgtttgtttgtttgtttgtttggagatggagtctcactctgtcacccagggtggagtacagtggcgcgatctcggctcactgcaacttccgcctccygggttcaagcaattctcctgcctcagcctcccaagtagctgggactacaggtgcacgccgccacacctggctaattttttgtatgtttagtagagatgggatttcatcgtgttacccaggctggtctcgaactcctgagctcaggcaatctgcccgcctcggcctccaaagtactgggattagaggcgtgaaccaccacgcctgcctgaaaaccagagtttttaagtcacttcctcatcagtccaccagc

SEQ ID NO: 488292 - DNA, 528 bp, Homo sapiens
gtcgcacaggtgcctgccattgatcactagtgaagcactgacagatgggagtggatcactttgtgctggagttccaaacacttatgtggcttctagtactgcccaggtaatgttaatatcctctcaggatgagaagtcagggcagcatagcagagctgcgaaagccagagcttgctttttttgtttgtttgtttgtttgtttggagatggagtctcactctgtcacccagggtggagtacagtggcgcgatctcggctcactgcaacttccgcctcccgggttcaagcaattctcctgcctcagcctcccaagtagctgggactacaggtgcacgccgccacamctggctaattttttgtatgtttagtagagatgggatttcatcgtgttacccaggctggtctcgaactcctgagctcaggcaatctgcccgcctcggcctccaaagtactgggattagaggcgtgaaccaccacgcctgcctgaaaaccagagtttttaagtcacttcctcatcagtccaccagc

SEQ ID NO: 488293 - DNA, 437 bp, Homo sapiens
tcattttaaaagtgataaaattctcatgtcaaaaaaattctagcacacaatgattataattacatgtatgtatgacaataagataatgaaccacagagaaaaaaaaatcagttaatgatttcataatcataccttatatatgtgtgacattttcagttctttgactacattaaagtaatttgaattggttacttgctgtgggtaggaagttaagccagctccatttcattatttccagttcttcacgaaagaaatgaaaaggtttgggggtaaggtgtattgctaattctttcacrtctctgttgtaaaatttggttccattcttgattgcttttgttgctattatttcctttcttcttgtatttaaacattgataattacttttcagcaggataattgcactcacttggaatttgtataactgtagtacactcacc

SEQ ID NO: 488294 - DNA, 567 bp, Homo sapiens
ggtgtggtggcacgcacccatagtcccagctactcaggaggctgaagtaggaggatcgcttgaacctgggaggtggyggttgcagtgagctgagattgtgccactgcattctagaataggcaagagagtgggaccctgtctcaaaacatcttaaaaaataaaagaaggagaagctttagagacaggtgctccaaacttcctacgtaaaatacaaaacaatacagcttactactaaaaacctacaaagtcttcacctaacacattaatttgtaactcagagagcaaatgatttctagatgcagagttaggggcagagattaggttttatcaactttctactttaaattcttggacagtgccaggcacgtgcaagttctaaataagagtttcaaagaaaaacattgaacaaggctggtgtttaactgatcttaccctcaagggattttcattgaggtatggaggctctccttctaccatctcaatagccatgatacccagagaccatatgtcgactttagggccataagctttccgtgtaaccacctctggtgccatccagtatggcgt

SEQ ID NO: 488295 - DNA, 485 bp, Homo sapiens
acaaaacaaaacagagttaatggcttccatggatggttttagcagaagagttcacttcagattatgtaattaattatattttgactattaggcctcttgtttttaaagatttcattaataaagtaaaccagaatgagtttaaaaatattttcatgatgtaacacactctcacattttacttttacttgccacagagtccaaattatcaggaggccttttattctgaataattcattctatcctaaaaaatttaataaaactgaaagaggtctacgaaaaagtaaagcaaaagtagacaccaaaactaaatgcagtgaatcaggtaaaggtcaggtcatggaaactactttgtcttttaattttgtttaatttttaaaattttttgtagagacagagtccccctgtgttgcctaggctggtcttgaactcctgggcaacatgggagggatcttcccaccytggcctcccaaagtgttgggattaca

SEQ ID NO: 488296 - DNA, 517 bp, Homo sapiens
cgccatcctttaagttgcatatgattttaatatgttaacatgccgatgtatacaaatacatacatttaataagaagtctttgtcaaatgaacacagttgagttgaccatcatatggctttctactttactgaggcctgtatgtgaagtccataattgacaaaaccagacttgactgtccaccatggacctctttaccaaaagaatgaagctgtccttgagtcagtgcaaacagtcctacaagggaagctagctttgcaattccagattcataaacatgctgtgaggcttaccattagcctgggtggctcaccagcattaagccacttcttgaccattcycctcaaagtgacaatttttccttaaaatctgtaaatctttctaatgtggaatcatcacaaaagaagagacagaatggaaacattagaaagcatttgtgttgtggaaacacaccgatctggacttgaagttccaccactaactagctgagtgactctgggcaagttgatagacttccag

SEQ ID NO: 488297 - DNA, 584 bp, Homo sapiens
ctttcatttgcatcctggttacacttccttcagtgagaaaatcatggtggaattagagctagcacacaggttcatgatcctgggtacagctatctattacggtttgttatgcatatgatttttttaaaactgtgttaaggtatatttaaaataaaaaggtttgagagcaatgacctagaaagctcatcagggaaccatggcactgcatgccaacttgaggaactacagagaaaggtcaaaaattccaagaactttcctaggaattaaaaacaaaacaaaacaaaaagggacatacctgattcttctcgtgggaccctgaaggttgtaatgcattttgytgagtgtgaaatgcctcccataactttactggaaaagataatcaaataacttaaaaaaatctctttataccttagcctatctgacaacaaagattttcctaatgagcatgtaataataacttaaagaagaaaccctgcagagaagtaaaaataaataaaaatttaggatatggagactggaagttttaaggaacatggagaaaaaacttagacatgtcaatctgatcacgtgatcctgccctcctc

SEQ ID NO: 488298 - DNA, 635 bp, Homo sapiens
gtagtcccagccactctggaggctgaggcaggagacacatgtgagcctaggaattggagactgcaatgagttatgatcatgtcattgtactccagtctgggtgacacagcgagaccctgtctcttaaaaaaaaaaaaaaagttttagagtgatttgttatgcagcaaaagttaatgggaacagtagatgttaaataaatatttgaagaataaatcaatgttgaaatgaacaaacatgtacagagcagaggcttagrgtacaaacagggataaggtgaaggctttgcaagaatacaggtgagatggtcttctacacaaacagacataatacactgtgttaaatgatactactgaatatataaagaaaccaaagtggtaaaacataagaaagagcaattaatcttgcctattcagctccaggaaggcttcccatagcaagtaacaataaagctggaccttgactgatatgtaagggttttctaggttgagaagaaaagacattccagccagagaaaaccacaagactacaaatacagaatgcaaggagaattctgcttctttctcttctcctttcttttcaaacttattcaaaaggtaatgatatatgaactcttgtactgcaacttgattttgtta

SEQ ID NO: 488299 - DNA, 622 bp, Homo sapiens
aaaaatctgctgctgctgtattggtctcacttgtaaatttcgagtttgtgaggcactgcatacctaagtgcattgcttggatacaatggggactttgtgagaaaacacatagtatctttaatcctatctctaaatgccacctgaggaatcaacaaagctcagcaaaaatacgctggatgaatagatccaaaatgtctaatggtgaggaggacaaagggaccgcggagttccttagtcaaagtatttaataactgttccctatatagggtggtgagtagaatgatgtctccaaagaacccatgaaagtgacctcaatggactctccttggtccttgacattcccccagcatggtgactctcaagacagtcagacatcttatatggcagttcaggggcccaagagaccaacatgggaggtgccagctcttttaaaggctaggctcaggactagctaggctaggctcgcatcactttcatcacactccatmggacgaagcagctgctggccaattcagatggaaaaggagggaaatgatgtcatcttctgatggggtcgtatcaagaatttccagtcatctttaatctggcacagtcacaaattgaggaaacaaatgcccagcag

SEQ ID NO: 488300 - DNA, 652 bp, Homo sapiens
aactctaaacatataatttctatagtaaaataggttttacttggatttggagaggaaaaattcgtatgaacctccttggaaactaggagaagaatttttaaggagtcttttagtttggcacaggtaagtggtttaggackttgacaatgttaatcattctatttaaagaattgataagatttatctataatttgtaggaggcaaataactagactattaaagatctaaaagaaatgattagggaattctgcttttataggagatccaaaggcaaatttaagtaaaactcagaataaggaaaaaaaatcaaattaatgaagttttgctaaatattttttgacatcttttcttcacaccctcatacttttctccctattttgcaccactcttgaggggttcctcttgcccacgtctcacctgccaaaaccttaccggcatttggatgtaagccttgctggaaagaaagaatggacagagggatactgattgactcactatggcggatagtaacactgatgtcaataaagtaaataatggcttcaaccaacttactggttattcgtggaatcctgatctgttcactactggtcccatcccctccatctgttgtggccttgacttcaataatgtagtcctctttaatgggcagcac

SEQ ID NO: 488301 - DNA, 568 bp, Homo sapiens
ctgcttgatactgctaagcccaggcctggactccattgacagaggagcagagagtcacccctgggagagactgatggcatttcccttcagcttggcgggatttctgctcagaatgtatagcagaggccagcctcaagctggcccatcatgctgggttacaggctaaggaaatgggctcctcattccatgagcttgggaagttttgactgagcgtaagccatgctggctggggccagccaaagctgtcttggaaacaagagagccagccatgggagaaggaaggggyggggcctctggcaggagctcttggcttcgttcccattcttacaatggaggaaattcccagtctctgggtgaaaaaaagccacatctggcctcaagagaggacacccccaccacattctgtgtgttctcccaattgggtgggaatgtggccaccatgtgtgatccacttcagggactgctttttcctgggactttggatgctggagcttggtcctaggaagccctgcagaaaactctgcctccattgagaaaaagtattccattcctttgcctcctggacttg

SEQ ID NO: 488302 - DNA, 604 bp, Homo sapiens
gcgtattatataaaaaatgttttaagtgcctcgggtgttttgttcctcattgcttcatagaagtgacattaatagccagggaagagctctgctgagtgcaattatggaggatgtttcaggtatgaaagctgttttgagcctgctaatgtttcctaattacaggccttttggtagagagagaaaaagataaagagtgggtgggaggcctagggtggggagctctgacttatctcagtggtttacctgaagagggaataggaggggagggtatgagggagggaacagggaggtcagaggcccaacagcagggaggctgggcctctcggttgagaaagtggtactaattcctaggaaacagctcagagaaaggacaccacccatgtctcttaccgtgagaaaaaagaaaaccttttgcagactgagcctgaattcaaggaggcttggtctgggagttccttctggaacccactctctgaagataccacgatgggtagcatttcactggggaagacagtggagcataattgttggcargagagccagcatccaggaggttaaaggtcagcattggcactttttcaccatgagaccttaggcaatttac

SEQ ID NO: 488303 - DNA, 618 bp, Homo sapiens
caagcttgagccttggccacagcaccctacccaggtggtcacgcagtctccgcttgctcacctccaaagatgaggcacttactactttcccagagagacattttcttgttagctggttccaactttcagaaggctggctccttgggattccctttccttggtccttgttgtgttcctgaaaggccccccacagaatcaactactcccctttctccatggcatcccttcagattatgagaggccaggacctcctgagcattctgtttcctagccaccacactcttgggtccatcagcttttcttccagcccgccccccgcccccaccttrtgtgtactgttctctgatgggccagcacccattgctgagctctatatgctccacggggtctgatcagcccagcgaaaaagtgggttatcaccttcttggtgggcacatcctacctctgttgatggattccaggaccacaacaactgtctgaggagccccatggcaccatcaggctcacttcatctctctatctgttcccttatgaattccactgagcatcctacagtctctccaggagaaatgtggctctgcagaatccatgtgcaggacctgaaggactctgacaaga

SEQ ID NO: 488304 - DNA, 627 bp, Homo sapiens
taagatttccatcaccagtgctggctggctttcttggtggggagggggcgggcaggggggtcagtcacttttcttccacttcacgggaggsagttaatctaatgtatgtaatgcaatgatgataactggcaatcagcaaagcacttgcatccctcttggctggtaccttagtgcctgtgggtcaaatttgcatctcagcaaaatgacacggaacttcactctacagcattcaaatctcagtgttaaatctggtaatggccagagacaactgagctgtgttttctttatgtttcaccaagcactttgggcccatctgcccttcctttagaaaaatgatgcaaagctttgtctaccagcagaagaaaacacatatctactttatttagtggactcttacctagccagccatggtgcaactaagagagcactggagttgaagtcaaaagataaaggttccaatctaagctgtgttgataatggcaatgtggcactgggtaacccacacaacctctctgagccccagatttcttatcagtagcatggatgcaatatacctgtttcccacgttaatttgaagatcgaatgaggtactttttgtgaagtgtttaacactgcacctggcccata

SEQ ID NO: 488305 - DNA, 627 bp, Homo sapiens
taagatttccatcaccagtgctggctggctttcttggtggggagggggcgggcaggggggtcagtcacttttcttccacttcacgggaggcagttaatctaatgtatgtaatgcaatgatgataactggcaatcagcaaagcacttgcatccctcttggctggtaccttagtgcctgtgggtcaaatttgcatctcagcaaaatgacayggaacttcactctacagcattcaaatctcagtgttaaatctggtaatggccagagacaactgagctgtgttttctttatgtttcaccaagcactttgggcccatctgcccttcctttagaaaaatgatgcaaagctttgtctaccagcagaagaaaacacatatctactttatttagtggactcttacctagccagccatggtgcaactaagagagcactggagttgaagtcaaaagataaaggttccaatctaagctgtgttgataatggcaatgtggcactgggtaacccacacaacctctctgagccccagatttcttatcagtagcatggatgcaatatacctgtttcccacgttaatttgaagatcgaatgaggtactttttgtgaagtgtttaacactgcacctggcccata

SEQ ID NO: 488306 - DNA, 596 bp, Homo sapiens
ctgccctcgctccatccacccatccatccagactgttgtccctaagctcctcctataaattccagagcagaacccagggagactgaatgtcacgcatcgactctacctgctactggaaagaccaagggcagaatgatgccactggtgaggaaagtaagttggaactcagggtagggtcagaatgaagaggaggagctccatttgcagagaacaagaatccactaaacccactcccagtttatttaatctgctttattttcttctggtctctctgtatctttgtgctgcttgcatctcagattccctgggccccacacttgataagttaagcctcattgttggagttgaagcactgttagycagttgaaagcttccattctagccgactttgcctcctaaacagctttcccctccatcctgcccaccacctcatctatgagtcacttctaacacccaggattgagggctgattagaatttaagattattttcccagggcattagagcacttcctttctttcaagaggtatcggggtgagaaaaggataaagcttatatttcaaggaacaaataatttaagactgatggggaaaatgg

SEQ ID NO: 488307 - DNA, 505 bp, Homo sapiens
gggcaccctagtttccccaaacccacatggcaaataactgcaggccttctgcaggaagtgtcatgaaaggaagctgacccgcagaatcatcggctggtataataactgccttcctgtgagccactgctaaaattctgccactcttccagtctttaagccacacaagcattgccttctaagccaagggaagaatttactgtatcaggaaaatgtattgcaacatcattctaaggattaacatgtctctttaccttagatctttatttatctttytgcccggtggccaaagtagggcctgaagaattatcctccccctctttccccaaaaaaaaaaaaaaaaaaaaaaaggcttctgagctgagtggggtggtgcagccctgtaatcccagctactcaggatgccatggcaggagcaatgcttgcgtccaggagtttgagatcagcctgggcaatatagcgagaccacgtctgttaaaataaaaataagttactgtggagaaatatt

SEQ ID NO: 488308 - DNA, 449 bp, Homo sapiens
gctatgcaagggcacaggttgtgccaagtcactagttatgctgtagatgacagaagctgtcactgtgtgattgacagcctttgcgctggcctatataagctaaaccctgactttgttcaatgctcagctttttggatacgaatcctctgagctggtgcaccttaaataaacatcctcctgtttcccgtattggtctctccagtcctctgttcctcgcaacagtttcccctgaagatgagaagacgtgggaagaggggacktctgtaaacattgacctgcttttgtgaagcacagggagtgggtgtgctaggagaatggttcctaactagcggcttctgtgctgatgaaggcaaacagcagtctcagtctttttttttttttttttttttgagacagagtcttactctgttgcccaggctagagtgcagtggcgcactctcagctaactg

SEQ ID NO: 488309 - DNA, 585 bp, Homo sapiens
cctatatatgctaagctccctatagagctccctatagagatcaataagacataatccctactccctatagggaccactgcactccagcctgggtgacaagagtaagactccacgaaaaaaagcgcttggctgggtgcggtggctcacgcctgtaatcccagcactttgggaggccaaggcgggtggatcatgaggtcaggagwtcgagaccatcctggccaacatggtgaaaccccgtctctactaaaacacaaaaaattagccgggcgtggtggtgcatgcctgtagtcccagctactcgggaggctgaggcagtggaatcgcttgaacccaggaggcagaggttgcagtgagccaagatcacgccactgcactccagcctgggtgacagagcaggagtccgtctcaaaaaaacaaaacaaaacaaaacaaaaaaagcactagcgcttacgatttgactcgggtaaccatagcacttctcagactatgggtgcgtacgaatcacctggaggatcttgttcaaatgcagattcggattcattgggtgcaaggtggggcctgagagtctgcatttctagcaaattc

SEQ ID NO: 488310 - DNA, 627 bp, Homo sapiens
tgaagcaattatgactttttcaccaggcaagttggaaacgaatagccttactattcagtcataaatcttccttttgatattttttattctctgttgacaatattgtaatctatcatgagactgatgaaaatatcttactttatcatagctattattgatatgtgtgtgtttctgtgtatatacacacatatcatttctatattaaaattagataactgcatgtttaaatatctagttataaaataatatattactataatcttctggaaaatctttccttaattaaataagakgatgcatagagtttgactggctgaggcaggccgtgttttctggaaagcagataataagaagttaggtgtgtgaaaggtttattgttaacaaccatggaaagagagggatgcaagtggaattggttaggaggagttgtcagaccttgatgctgactctataaagtctccttgactttaagcaacagagtaaagattgctcattagggagtcctttgtgaggagagatggttaggttcctgtacaccaccttggaaaaccattggtcaaaagccaccttggaaaggaaaggaaaggactttgccttggaatctaaggtgactcttaatgagttaac

SEQ ID NO: 488311 - DNA, 507 bp, Homo sapiens
ttatctattaattttactcattacaaaattttccaayccgtgtgtaattacatatattgtaacatcactatgttataaggctatgtgtgactttgggaatttgtgtagctcattttcttaggtacagaaaaaactggctacaactgtccctaaaattagtctttcttaaaattccctaaaaaggaagatatttcttcagcctctcactctgaaaaaagacctgacttttaaagaaatgaccaaagagaccttgactataatgcataacaacttgacaaaggtatacatttatcattggcttctgaaggtctcatactaaaccttgggatacatttcataaagtcagtggatattatattttctttttccctctcctgatcatccttttgtctactttaatacaaactatactggaatcaaatgcctagattgttaaacaggaaaagatgaatctcattttagctactctgttggcagcagaactattttgaaaccattcctttttca

SEQ ID NO: 488312 - DNA, 571 bp, Homo sapiens
catttacacttagccatcaagtttttatgttcactaaatgtttttaatkcattaaagctatagcgacattttaatagtattttcatctctacctcataagaccatattttcttgatatattatgagtcttatttattaagaaaacaaaacagaaatggaaatgaggaaatgtttttacttgattttggctatttctatgtaatgttattaaaatcattttaaaatgaaaaagcccatgtaaaatatgactagattttgcatccatataatggcaaatagatgttcaatattattgaaggctctgtgtatataatataaaacccatgtgagagttggaattacagtaatttttaagtctcccaaataaatccattttgatttgactacgcgcaattctaccattttctccaattttctgaagccatgctaagagagcaaaacaaattcaattatgttcttgctaaacgttatattgataatactaaactggtttctgtgaaagatgcgaatgaattactattagtatcaggatccagtggtttcctgaaagagattagtctaagttactttg

SEQ ID NO: 488313 - DNA, 501 bp, Homo sapiens
tattttggatcttaaattgtaatggagagccaatattattatataataaagtaaaaaaaaaaactatgagaaagagaaaatatgtttggtgtttgttatgggttgaattgtttacccccaaagtatatatgctgaagttctaacacctgatactcagaatgtgaccttgtttggaaagaaggtcattacagatttaattagttaagagaaggytgtactggagcagtgtggacccctagtaccatatgtctggtgtctttataaaatgagaattgtggacatagacacatatatacacacaagggagaaaaccatataaagatgaagagagattgatgcagaagaaaccacagatttccagcaaactaccagaagctaggggagagcctgaaacatattctgtgtcacagccctcactcagaaggaaccaatcctgccaacatcttgatctcaaacttctcgcatctaaaactgtgagataataaactctgttgtttaaga

SEQ ID NO: 488314 - DNA, 598 bp, Homo sapiens
aaaaactaaaagagagaagtataaatggaacaaaaagagcagagttgtattaaaagagactggagctacaggatagaggattttgttgtatatgctgatattttggatcttaaattgtaatggagagccaatattattatataataaagtaaaaaaaaaaactatgagaaagagaaaatatgtttggtgtttgttatgggttgaattgtttacccccaaagtatatatgctgaagttctaacacctgatactcagaatgtgaccttgtttggaaagaaggtcattacagatttaattagttaagagaaggctgtactggagcagtgtggacycctagtaccatatgtctggtgtctttataaaatgagaattgtggacatagacacatatatacacacaagggagaaaaccatataaagatgaagagagattgatgcagaagaaaccacagatttccagcaaactaccagaagctaggggagagcctgaaacatattctgtgtcacagccctcactcagaaggaaccaatcctgccaacatcttgatctcaaacttctcgcatctaaaactgtgagataataaactctgttgtttaag

SEQ ID NO: 488315 - DNA, 533 bp, Homo sapiens
caaaaattacacagaaacacaatattaacatatatacttaatgactgagaagttggcatttataatctaaactgtgatagagctcaaccttgaattatttgctgaattttatcccatttcttgctctttaaaaatattgacttctctgagtttttttctctctttagcatgcatctcaacagcagaaacaaatactaacagcttgcaatttctctctctccaaataaagctataattgccaaaaagcatgtgcaatgtcacggaaagaccctggaacactaaaactgcccatctccatataggtgtgattyggtaggaaaaagaaagaactgtatcattgtgtattgttttttcagtgtcgctgttctaaaacaattccaaaactttgccttttttcaagcagatcagaactaaaaagggtttaaaccttcatctgggaaactaaacggacactccaatgttattcttgtaatggctgattgatagatgaggtggcatctgtcaaccacaaaacttcctaatgctttagtgca

SEQ ID NO: 488316 - DNA, 621 bp, Homo sapiens
tactagatttggggctggagaaaggctaccattcttcttctgttgtgtattgtgtttcagttattcaacctgtggctgttggggagttcttctatttccacttctgtcagatgttccattgtgttctcagattcctcctacacatataatgaaactgtactggtcttggagtagtggtggtatttgtcccccacttgcttatattttaggattcattattatactttatggccaacttttgttgtagatgttgtctactaatttttggtatctggtttctctctctgttgttttgttttattattgtttgttttctgtggattatgaaacattaaataactatgccgtcattgactcattccataatccagttgttaatttttgatgtaggggcaagaatagcattttcaaattactaggtaaaagagttgaataagttgtagacacaattatagacaattgtagctataaagttaataatctcacaatataagaaaaaatacaatcatgttttatcagaattttgattaattttgaactttgcagmattttttattttatcttttgcttataattaatctaataattcatcagatttcatcatatcatgtatttgtttag

SEQ ID NO: 488317 - DNA, 498 bp, Homo sapiens
aaacttggtgttgtctcatttggaaaggacattctatgtgtggaaatmaagtagcaaaagaaagagctgagcaacaggtaaatcattgatgtctagttatacagagattttggggtttcttcatatagtagcatatccttaaaaactgctaaaattggaaccttgaagtcaggtatcactgtaaagtaaataaaatatagactattggcataattgtctaaaaataagccacaaacatagatattggagagtagaaatatggagatatatgatatataatacaagaacccttggtaaaaattttgcctacattaaatctgaacttttaaacctattgagacagtatctttaggagaagtttgctggaaaaaaaggtgttagcatatattgatattgactatatctagcacaatatttcaacaaaggaggactataaagataattaggaattaaatagcttgaaagtataaataaaagaaaggtgaatagaattcataa

SEQ ID NO: 488318 - DNA, 520 bp, Homo sapiens
agtagcttcctgactcctgtgtcatagttgtgttactcattagcactgcacaccaatattttggacattcttcttccaaacatgtgataggattgcatttcttcaacttcttgaaataagtggggacatggttgctttgatcaatggaatgtgaagaaagttatacgtatcacttccaagtacaagcatttaagtgctgatatgtaattctttaatcttctcttcccttagccacagataaagtggaattatgcactgaaaagaagttgcaatgctgaaccatcacatacatgacagctaccctggagagtcttccagatatgcaatagatcttgtgtgaggaaaaaatattccatcgttctgttttgcattttgttttaagtaaccaagattcagatattkttactttagcatgacctagactaatcctaatactacaaacattgataacagatttggaatgtcacgagagcaaagcctaaaatatgtgacattggctttggcagaagtgatacaaaaa

SEQ ID NO: 488319 - DNA, 587 bp, Homo sapiens
ggatctggagggtcggggacagtggctcatgcctgtaatcctagcactttgggaggccgaggtggcctgatcacctgaggtcaggagtttaggaccagcctggccaacatggtgaaaccccacctctactgaaaatacaaaaaaattagacgggcatggtggcgggcgcctgtaatcccaactactctggaggctgaggcagaagaatggcttgaaccggggaagcagaggttgcagtgagccgagatcgcaccattgtactccagcctaggcaacaagagcgaaactccgtctcaaaaaaaaaaaaaaaaaaaaraaaagaaaagaaaagaaaagaaaagaaaaggatctggagtcagaactggacttctcatttcttctgtgcaagccagaagtttggtcatcatgatcaccagttggcagtgagtggcaattccattttctgaattgaggaatacgggaccagccccaagtgtatacagaaagttacaactggtctgttatgaatctgagctgccaatagaatacagaaaaggaaagtagtaacacttgaagtaagttcaaatttaataattttctgtgatctt

SEQ ID NO: 488320 - DNA, 608 bp, Homo sapiens
ctttctttttaagtttctgtattgatggctccatttgacctgggacattaatacagttacaaaagcaattgcacagacctcatattggtttgcacctatctatccataacaaccctggccagtaaattgagctgacctgatgacttctaggactaaagtggtgtcattgaccacttcagctaaagtaagaaacaaatttcataccaccttttctaattgaatgaccacactgtagggacaactgcttacagagcamaaaaataacaagtcaattatccctccaggtagctccaattatccaggtagctcctccaagtaatcacgtgtagtttcattttagagaggtagtcatggtcatctaaggactacattataatccactgctggggtttcctttaacactggaaaatctcttatgaccaccactaaggtgcaagtcgcagtgttttggggagggagggaagttaatgtctggcttccatacaagaagtacagtcccaagggtgcatgtggtaccactggaaataaaggtttgctaacaattgttgggaacctccaagtagaacctacatcagtaggggcagaattttatagtgtcttcaacatga

SEQ ID NO: 488321 - DNA, 608 bp, Homo sapiens
ctttctttttaagtttctgtattgatggctccatttgacctgggacattaatacagttacaaaagcaattgcacagacctcatattggtttgcacctatctatccataacaaccctggccagtaaattgagctgacctgatgacttctaggactaaagtggtgtcattgaccacttcagctaaagtaagaaacaaatttcataccaccttttctaattgaatgaccacactgtagggacaactgcttacagagcaaaaaaataasaagtcaattatccctccaggtagctccaattatccaggtagctcctccaagtaatcacgtgtagtttcattttagagaggtagtcatggtcatctaaggactacattataatccactgctggggtttcctttaacactggaaaatctcttatgaccaccactaaggtgcaagtcgcagtgttttggggagggagggaagttaatgtctggcttccatacaagaagtacagtcccaagggtgcatgtggtaccactggaaataaaggtttgctaacaattgttgggaacctccaagtagaacctacatcagtaggggcagaattttatagtgtcttcaacatga

SEQ ID NO: 488322 - DNA, 607 bp, Homo sapiens
tgcttctttaggatgtttgtgatttggtccaatttgaacatgtcaaatttcatctgagtatatgggtgatgggggtccaactccttatgccctcctggctcctttttagagacctctggcataatcatctccattttggatttcttttcagattttccccttttkatttaaatatttccttagaaaccactgagatcaattatttcagtaagccctttggttctggaatagatttgtcccaggaagtcatgtcccatggaggagggagtcatggtaatgatagtggatgatctgtgtcaaatggaatagtccaaatttgagcaacaaggaggagttgaggatgtgggccccaattgtggtgcacatatgtggttagggtaggattcatgattgtaggcctaatctgtcagttcaatgtgttgagccaccataattttagtttcgttgacagcaacagtgtggcatcaagctgagagaggagaaaagaaagaaccagctaggaaggcggttagggcaggtgctcagtagaattctttcaaacaaaggaacaacctgaaaactcaggctacagatacagataagggaactagcacaggcagcttgccta

SEQ ID NO: 488323 - DNA, 644 bp, Homo sapiens
ataacataaataaaaataaacaaaaaagtcagtgtctatcatcaagatagcttctaaggaagcttctactgatatttacaatttattgtctatatcaaaggctattttatttgtggctttttggagaggccagtggagattacagctctgccagattacttttttgtgaagcaatttgcaatcacattcttgttatatggagaaaaatccttgttcttgaagggaattcttaaagggaagkgatggttgctgtcttgctcttcttcatttttcctgcagatatctaatgtatattcacttgaagtaagtcttatttggggagtgtagcaatatgtcaaggcacttaacattgtgtcaagggtcacagtgccaagcaccatgtcaaggcagagggaagatgattgatgatgtatcctgaagaatactgcagtcaaagcttggagaatgagttgagtgctgtggaaaccctgatgacagggactacaatgaggaagaagacccagagcagcgaaagctttggcaatctggccagggagactattggataactaggtatcctggatttatgcaaaggctctacaatgagattactcagtttataatttggattaacctgtcgtttctgtgggctcacccaggaattt

SEQ ID NO: 488324 - DNA, 608 bp, Homo sapiens
tttgtacttttgtatttttcagaagttcttgtttttaaaatgtcaatgtaaaagcacacacacaataaatgtctccatsaactctttgtccacgactagagaaatggtttagtaaactatatttcttttccttggaaacatattcaatcattaaaattatgtttataaggattacattataacatgtaattaaagaaagggaaaactatgcacagaaaagttataggaggaaaaacaccagtgcattaattatattgataatattttatttttttaagtattcttatctaatgagaatgtaacatttttgtaataaggaaaatgttagtaaaaacaaaacacagcatgtttcagcatgccctgactcttctttgaggatatgtgatacaatagattggccttttgtgacttttacaaaaggttgtagtttttgttccctccacacttaagaattttatctcacatcatgaatatctgacttctggcttttttttttttttaaggtaagcaagctaacatttaaaactgtgattaaataagagtatctttcaaggtttggctaaggagagctaacatttccgtgctgtgctgttaatcaaaggaacttc

SEQ ID NO: 488325 - DNA, 563 bp, Homo sapiens
ctgagtgtaaagatatgccatgttcaaatatttgaagacagcattaaagatgccaataatctcaaaatttaggtcaagcgcagtggctcttgcctgtaatcccagcactttgggaggctgagctgggcgactgcttgaggtcagaagttcaagaccagcctgaacaacatggtgaaatcctgtctctaccaaaaatacaaaaaaaaaattagccaggtgtgcacacctgttgtcccagctacttggaaggctgaggtgggaggattacttgagcctgggaggtggaggttgcagtgagctgagattgcaccatttgcactccagcctgggcagcagaatgagctcttgtctcaaaaaaaaaaaaaaaaaraaagaaagaaagaaaaagtaattaagagtcaatacaatcccagtggattttttgattttttggggtaacaagcttgattataaactttccatggaaatgcaaaacaagcatgaatagcgaagacatacacacacttttatatatagacacttgttttatgacaaagttaggaaaaaagttcttttcaatacat

SEQ ID NO: 488326 - DNA, 553 bp, Homo sapiens
tggttcatttaagctctaaatttatgagctttttattgattaaacccatcactgtagatcctcttagattctcttttttgtaggtcttgttttgttaggaagtacctgtcactactggtccacatctggatttacctgcaggcttgtttggaataaaaaatgcctccaaattcctaggcaggacaaacttgccccaaagctttgttgttctacattatctctgtgattgtacaggaatctctcttccctcctagattatcagtgtcttggatataattggagctcaaatgcttagggaattgatttaatgttgcttaaaacgtatttgtaggccaggtgtggtggctcacgcctataatgccagcactttaagaggctggggcaggcagatcacttgaggccaggagttcgagaccagccctggcctcaagttggccaacatggcaaaaccccatctytactaataataacaaaaattagtcgggcgtggtggcacatgcctgtaatcctagctactcaagtggctgaacccaggaggtggaggttgcagtga

SEQ ID NO: 488327 - DNA, 398 bp, Homo sapiens
actaaagtgaattatcttgatcatgacatcatcatgcaaaagggaaaatctcttttccttcagagaaaggaagctctttatgattttacctggccaattaccagaacataatttagagaatttcttggactcrtgatattgtagacactggattctgaatttgtctatactggctccccctttctataatcaaaactagttgacacacctgagttcttgtcccaaataaactcactacccttgaattccctaattgttataaactctactttctatttgtgtataaaaaatcaggagaaattttagaggtgttaacagcatgatggacatcaaagacccgtttcttgttacatcttctcatttggccccgtagcagttgcctaccctctttgggtact

SEQ ID NO: 488328 - DNA, 413 bp, Homo sapiens
agggaaggcaggaaaaaaatactaggaagaagtaagaaagcaatggatgaggggtctggyatatgattggatgtggtgatctgatgagtttctgttcctcacttgagggtcagtttcccgaggaaggatctcagataagacaaatgtgagtttcacttttgaggaccaggagggtcaatttctatgtttattcaaaaaagtcatgaatatcagttctatgaggaaattgggctggtttcaaaatgagaggaaaagtaaactttatatagaatttcatttagaaaaataaagtagttggattaactatgtttgataaaaagggaatgaactatggcatcacatgaaaaacaagccacatggcaaattccttcaaatactcattttatgcttacagcattttagtactttattgc

SEQ ID NO: 488329 - DNA, 564 bp, Homo sapiens
tgtccttatgccaaatccatctccttggacaaggcttacatttgtgctctggaagaagaacatagttttatttgggttttgttgatagtcataataattcttattatttcctttcctctctgtgtgacattgatcacatttgctgtttatttttctttctttttctttctctctttccccccttttttttttttgacagagtcttgctctattgcccaaactggagagcagtggcgtgatctcagctcacagcagcctccacctcctggattcaagtgactctcctgcctcagccacccaagtagctgggattacatgccgtttcttttttttttacatcgaaggggaagyaagtgaatcctgtattctagttccttatataccaccataatgtgtcagacacataacttgaacaaaaaaatttcaaattaagcacttggattcaagtgtgtcttcctatgtcaattcctctttgttattttgtatattctttaaagacaataaaaactaattactggaaacattctgtatagtaagaattaaccccacctatctataccaatc

SEQ ID NO: 488330 - DNA, 564 bp, Homo sapiens
tgtccttatgccaaatccatctccttggacaaggcttacatttgtgctctggaagaagaacatagttttatttgggttttgttgatagtcataataattcttattatttcctttcctctctgtgtgacattgatcacatttgctgtttatttttctttctttttctttctctctttccccccttttttttttttgacagagtcttgctctattgcccaaactggagagcagtggcgtgatctcagctcacagcagcctccacctcctggattcaagtgactctcctgcctcagccacccaagtagctgggattacatgccgtttcttttttttttacatcgaaggggaagtaagtgaatcctgtattctagttccttatataccaccataatgtgtcagacacataacttgaacaaaaaaawttcaaattaagcacttggattcaagtgtgtcttcctatgtcaattcctctttgttattttgtatattctttaaagacaataaaaactaattactggaaacattctgtatagtaagaattaaccccacctatctataccaatc

SEQ ID NO: 488331 - DNA, 625 bp, Homo sapiens
ccatttattgctctttctatatgcttttatcagttatatttgtggcakgaattaaatttatgacagatttactattaagaaaaataaagcacagaggttcaataacttgccgaaagccacaaggcaagtaagtgttgctccaggatttgaatcaatttgtctgtcttcatagtgcttcattttaattgggatattttattatgctggtcaggtatattcacctgatggggtaaatatattaatacatttcaaaataaattccatcctatattcatcctctgtctccttcttgtggccatttattttccttctgcttttagtttatttttgtttcctttaagtctttgatacctctggctttcatcttcacttttccctatttcttttttgtaaataattcggaattaattgtcattcttgccattctctgggtactttcccatttaaaccccactttaaaagtgtcctctgaaataggcatgaaatgtgagaacagaaagaacagagtgagaatgaatccttctgtcatgttaactcaatatttcttttaagatcttctaaatcaataatacttccacatttaataactgtgtttccatattttccaaggtgaacaatattttct

SEQ ID NO: 488332 - DNA, 625 bp, Homo sapiens
ccatttattgctctttctatatgcttttatcagttatatttgtggcaggaattaaatttatgacagatttactattaagaaaaataaagcacagaggttcaataacttgccgaaagccacarggcaagtaagtgttgctccaggatttgaatcaatttgtctgtcttcatagtgcttcattttaattgggatattttattatgctggtcaggtatattcacctgatggggtaaatatattaatacatttcaaaataaattccatcctatattcatcctctgtctccttcttgtggccatttattttccttctgcttttagtttatttttgtttcctttaagtctttgatacctctggctttcatcttcacttttccctatttcttttttgtaaataattcggaattaattgtcattcttgccattctctgggtactttcccatttaaaccccactttaaaagtgtcctctgaaataggcatgaaatgtgagaacagaaagaacagagtgagaatgaatccttctgtcatgttaactcaatatttcttttaagatcttctaaatcaataatacttccacatttaataactgtgtttccatattttccaaggtgaacaatattttct

SEQ ID NO: 488333 - DNA, 625 bp, Homo sapiens
ccatttattgctctttctatatgcttttatcagttatatttgtggcaggaattaaatttatgacagatttactattaagaaaaataaagcacagaggttcaataacttgccgaaagccacaaggcaagtaagtgttgctccaggatttgaatcaatttgtctgtcttcatagtgcttcattttaattgggatattttattatgctggtcaggtatattcacctgatggggtaaatatattaatacatttcaaaataaattccatcctatattcatcctctgtctccttcttgtrgccatttattttccttctgcttttagtttatttttgtttcctttaagtctttgatacctctggctttcatcttcacttttccctatttcttttttgtaaataattcggaattaattgtcattcttgccattctctgggtactttcccatttaaaccccactttaaaagtgtcctctgaaataggcatgaaatgtgagaacagaaagaacagagtgagaatgaatccttctgtcatgttaactcaatatttcttttaagatcttctaaatcaataatacttccacatttaataactgtgtttccatattttccaaggtgaacaatattttct

SEQ ID NO: 488334 - DNA, 567 bp, Homo sapiens
taacatcaatcgctaaaaagatcccacgtgtatctcttttttttatttttaattgcgacagagtctcgctcttttgcctaggctggagtgcagtggtgtgatctcagctcactgcaaccttcgcctctggggctcatgcgatttttctgcctctgcctgccaagtagctgggactacaggcacctgctaccatgcccacctaatttttgtatttttagtagagatggagtttcgtaaagatgggttggccaggctggtctcaaactcctagcctcaagtgatcagcctgcctcagcctcccaaagtgctgggattataggtatgagccactgtacctggctctaagtgtatcttcatatttcacatcatagtaatgttctgtttaattttctaatgttattaatattttggctgattcatatatctaaagagttagctttctaaaaaaaaaaaaacaaaactataaggatattgacatggtttatttggtagtagcataaagttagtttcaaaaraggcagaaattcaagtaagtaaactgctggcttatttttattatataaaaca

SEQ ID NO: 488335 - DNA, 552 bp, Homo sapiens
taaaaagatcccacgtgtatctcttttttttatttttaattgcgacagagtctcgctcttttgcctaggctggagtgcagtggtgtgatctcagctcactgcaaccttcgcctctggggctcatgcgatttttctgcctctgcctgccaagtagctgggactacaggcacctgctaccatgcccacctaatttttgtatttttagtagagatggagtttcgtaaagatgggttggccaggctggtctcaaactcctagcctcaagtgatcagcctgcctcagcctcccaaagtgctgggattataggtatgagccactgtacctggctctaagtgtatcttcatatttcacatcatagtaatgttctgtttaattttctaatgttattaatattttggctgattcatatatctaaagagttagctttctaaaaaaaaaaaaacaaaactataaggatattgacatggtttatttggtagtagcataaagttagtttcaaaagaggcagaaattsaagtaagtaaactgctggcttatttttattatataaaa

SEQ ID NO: 488336 - DNA, 483 bp, Homo sapiens
tgattctattagaatccagtctgacactggcactcatatgttgagcacagcattatttacaatagcaaagtcatagaatccacctaagtgtccagtggattggataaagaaaatgtggtacatatacatcatgaaatactgtgcagccataaaaataatgaaatcatctcctctgccccagtatctcccaatatacgcatgtaacaaatatgcacatgtatcctctggatccaaaataaaatttaaaagcaaaaaagaatgcagtgcgagaggggaagaactctcgaagctcccaaggataggcttgggaagagtaggtgaatgagatggaaatgtgctctatttttccttccttggaaagtctggccttaaagaggaaactggtgacaagggaaaatcaggctgaggctttcagagcaattcagcacgtgaagctgatggtgcaggakatggtgtctggccccacaccccaccaccactgct

SEQ ID NO: 488337 - DNA, 653 bp, Homo sapiens
aaatgcagatgatctttcaaaaaacaatctcctccttgcccaccctcctactgctaaactagctcccctagagccatgtttgggaaacagccagaagrtagagcctgtggagggggagttagggactggaggcatctgtcaggagggctgagagtcagaagagagtgcagggcacaggcctgagtgaaatccagggaaggtggtggtctgccaagtgggttagcatctctctcggtgggaatcccccctttccaattttaatggctgctacatgtgggtataaagggggcagaagacagcctctctgttttcagggagtggaggccttcactgaccatggagtcaagatgggtattactgggcacaggactgtggtatttttggtgctgggcttacagcaccacggattgggggccctaagttgtggagtgaagccgatgacatttttgtccttgggatcctcatgcctcaaagggctcagatgccaggagagccttagtttatctgccaaagaccctgactgtacattgggacagaaggcgccaaggggagactgagggaactcaggcaaggccagagcggggaatctgacccaggtgatgaagcgagcccggagcacacttacggtcttgccacctttgccaatcacccgg

SEQ ID NO: 488338 - DNA, 619 bp, Homo sapiens
caaaaggctaattaaggcttcacaggattcacattaaatttattatggctataaatgttttcctggaatgtcacattgtagaataataggtattaatttttcttatttcttgaacagaaaggcactatgtccccgttttgacacatattagctctagatccttgaacaaattatgaaacttctctgagtcttcaattcytcatctggaaaatggggataatgatagccctcagggttgatgtgtgtaataaacaatataatctatagaaaatctcctagcatctagagggatatagcaaatatgaactcacatgtgaggttttttttttttttttttctattctcttggtgtcactccgtttacttccaggtgtaatgatcaaaagctgagagagggcccccagtgtgcatgtgtggcaatttcttgtgtattccccagcacgaaatttgtatcctattagtgtctcagcttgacaagccactctaagtatccttatgatgatgagagaatcataagtttgggggtagatgagttcttttaattctgaggatgagaataaatagccaaagtactgtaactatcaagatcctaatgataattgcgcacacacccctttac

SEQ ID NO: 488339 - DNA, 558 bp, Homo sapiens
tcatgtctttctgtgtatttcttagacatttaatgaaaagctgagaagtgccccattagaaaatcatatctgttgccatgttcacctagacagtcctgcacacactttacaagttgcaaccttctgaagggattggtcctcaaatttagtctctacttttgatttacaattttctgcraaaaaaaaaatttaagccattatcctctgtgcttctggtattgtgctgattccactgaattagtcagccatgcaaggaagaagaaattgacagataaattcaataaatagcattgtgctgaacttgctgagtctccaaacaagaaggaagtaagcacaaatgagccatgtaggtgcatctcacctacaatggagggaaatcaatattttccaagtgacaaaaggacaaaccaggaggaagagaagagcaaaaaagtatattaatgttaacttgaatgagaattctgccaacaatggagacaggagggaaacctgaatagttatgcatatatgtgtttcacgtacggatatgcaacacaaagtacctgaaagatggacaaa

SEQ ID NO: 488340 - DNA, 584 bp, Homo sapiens
ctggtttttgaaatcctgaaatgatgtatacaaatcaaagcaggagagattcatttggaatgaaaggaatatttgaattgcatcccagtttcgaataggatattgtttcacggttctacagtattataaacatgtcatgtctgttatacatgacaatcatatctcatctgtgactcatgaactttataagaaagtgacaatttgaaagcatagaattgcaggattggatggaacgatatcttctaagttatttccactycttttcccatttttggttgaccatgctaattcccctctaaaacattcttctgtagctacttgaaaacacccattgcttcttaaagtaacctattgtcaaagaatattggattttcttatgtacattgaaaaaatgacactttattggttttgattctaccaccaagagtcacagggaactttctatcttttcatcatatatataacaggcttttcatcttatatgtaacagtccttaaatattttcatattgtaataatttcctatggaacctgttgacttttacgctagagttatagtgatggaggtaatgagaagtgatcata

SEQ ID NO: 488341 - DNA, 584 bp, Homo sapiens
ctggtttttgaaatcctgaaatgatgtatacaaatcaaagcaggagagattcatttggaatgaaaggaatatttgaattgcatcccagtttcgaataggatattgtttcacggttctacagtattataaacatgtcatgtctgttatacatgacaatcatatctcatctgtgactcatgaactttataagaaagtgacaatttgaaagcatagaattgcaggattggatggaacgatatcttctaagttatttccacttcttttcccatttttggttgaccatgctaattcccctctaaaacattcttctrtagctacttgaaaacacccattgcttcttaaagtaacctattgtcaaagaatattggattttcttatgtacattgaaaaaatgacactttattggttttgattctaccaccaagagtcacagggaactttctatcttttcatcatatatataacaggcttttcatcttatatgtaacagtccttaaatattttcatattgtaataatttcctatggaacctgttgacttttacgctagagttatagtgatggaggtaatgagaagtgatcata

SEQ ID NO: 488342 - DNA, 393 bp, Homo sapiens
tgcctgccttgcatgtaatcagtaggcaacaaataattttctgcacagaagaaaaaamaaatgagtgtgggtgagaaacaatgcgttgcttaattctggctttaccatgctaagcactggggatgcagtggtaccaaaaaccaggcatgatcccttgccttcaaagagcttagagcctagttagaagagcatgatttttaaaaagaaatgaaagtatataatgacaaattataagtgctaagaaggaaatgactagagggcagggatacagagtaaaacagacgggttagaaggaggccctacggagagggagcctgttgtggggctggtccaggcacaggtaccagcacatgcaaggtcctgcgagacaaatgcggtgtgtctgagaatcat

SEQ ID NO: 488343 - DNA, 506 bp, Homo sapiens
acttttctttgcttccttctttattctaactcaactgattttctcaaatattcactgtcagtcttgaatacacaaagcaatgtaacttgcaccctacaggtgattaaagtgatcttcaatggtaagtttgactatatgcaacatttaccttaggctccggctttagaactcaaatcctctcccttaggatatgactttgctatatttgtgtataggttatttagatccttgggaatgtcttgaagtttgtgtttcctacatacctaaatgtgtttctaactcctacattctctcttattgtttcacatatgctcttgctttgtggtayatcttttttagagacagatatcatttacaaatatataatacattaggcagaagggtgataaccttttaatttagcttcaggttttaaaattttatgtattgccttaagaatagggcatgctgtattatgtagtgttgctctctaacaatgtagctaagctgttaaagacaagcagagc

SEQ ID NO: 488344 - DNA, 641 bp, Homo sapiens
gtagagggaaatagatttagtacaaagagcttagtgcagagcctgtttcacaatgaagcactctgtaggtgaaagcattgccatgattaatgattgccacaaagcatccatgttggttaaacagacaccatgcctaagggcatataatgactctgaggaaagctagacttgaagaaaacacgacttgcccagccaagtaccttggtcaaaacacatatttgtttgactctatagtgttgagacttgagtatctaatatacagatgaatgagccagtacagaatttgaaatttcaacaaaaaggcaagtataatctgcctgatartaataagcaacttgtaaatctttgaatggatgggcttgcctgttttcacccatgctactcaaactgtgaaccacagaacagaacatcagtttcacctggggacttcatagaaatgctgagtcttaggtctcaccctagaccttctgtattccagaattataataagatctccagatgatttgtaggcatattaaagtctgaaaagcactgctgtggaccacaaaatttaatgtactgcttatcccactttgggtgtgtttctgtgatctttacaacttaataaaccacccccaaaagttagtgactttaaacaacaa

SEQ ID NO: 488345 - DNA, 718 bp, Homo sapiens
ttatcatcaaccctgctcacatcaactaatgttttctaaaggcttatacaacctttaaggtttcagaaggttaaaaactctgatttctgggctccacttagatctattaaataagattctttggggtcagggcccaggaatctgtttttaataagagctctgggtgattcttatgtactaaggtttgagaatttgctaaagaagcaagatgatatttataagtggggttcagtgaaacttcagaggagagtttgcaaatcacagtaaattgagggcaaggttttttatgctttttaaatggtagtgattttggtacattcatctgggtctaactggagtcatgcatggttataatagcatccactttatttagggggaaaagacccccactatctagtgccatgtaagacctgggaatacacacatattctattgcctctttaatctttaggtaccaggaactaatgactagggccaatgtatttttcaagggcctatgaaaatattcagaactaacagagagagaaaaactactttgatttcagtgtatgcagaaattgcacaatctgaacaatgtcatatttaatgatatgtcaataaatgaaattttatgctmttgtgattaattactaaatgtaatagttattaaaatgtctactcttagagacattttatgagttagcttttctcagttcttaagaattcctgaaactgcatg

SEQ ID NO: 488346 - DNA, 544 bp, Homo sapiens
tgattcctgcagtgacaatgtgaagaaaagtagcagagggccgggcgtggtggctcacccctgtaatcccagcactttgggaggctaaggcaggcggatcacaaggtcaggagttgaagaccagcctgaacaatgtggtgaaaccccatctctactaaaaatacaaaaatkagctgggcatgatggcgtgcacctgtaatcccagctactcaggaggctgaggcaggagaattgcttgaacctaggaggtggaggttgcagtgagcggagacctcaccattgcactccagcctgggtgacagagtgagactccatctcaaaaaaaaaaaaaagaaaagaaaagaaaaaagaaaaaaaaagcagtagaccacttctgcacctgagagaggcagacattctgtgagctcacatatttttctcatcagactctgaaacagcatttcactgtattttgatacaaatgttcaaactacacattaggggtaatttctgcctcatttggagcacgaatctaaatgattgtatctccattagagaaaatgaa

SEQ ID NO: 488347 - DNA, 544 bp, Homo sapiens
tgattcctgcagtgacaatgtgaagaaaagtagcagagggccgggcgtggtggctcacccctgtaatcccagcactttgggaggctaaggcaggcggatcacaaggtcaggagttgaagaccagcctgaacaatgtggtgaaaccccatctctactaaaaatacaaaaattagctgggcatgatggcgtgcacctgtaatcccagctactcaggaggctgaggcaggagaattgcttgaacctaggaggtggaggttgcagtgagcggagacctcaccattgcactccagcctgggtgacagrgtgagactccatctcaaaaaaaaaaaaaagaaaagaaaagaaaaaagaaaaaaaaagcagtagaccacttctgcacctgagagaggcagacattctgtgagctcacatatttttctcatcagactctgaaacagcatttcactgtattttgatacaaatgttcaaactacacattaggggtaatttctgcctcatttggagcacgaatctaaatgattgtatctccattagagaaaatgaa

SEQ ID NO: 488348 - DNA, 544 bp, Homo sapiens
tgattcctgcagtgacaatgtgaagaaaagtagcagagggccgggcgtggtggctcacccctgtaatcccagcactttgggaggctaaggcaggcggatcacaaggtcaggagttgaagaccagcctgaacaatgtggtgaaaccccatctctactaaaaatacaaaaattagctgggcatgatggcgtgcacctgtaatcccagctactcaggaggctgaggcaggagaattgcttgaacctaggaggtggaggttgcagtgagcggagacctcaccattgcactccagcctgggtgacagagtgagactccatctcaaaaaaaaaaaaaagaaaagaaaagaaaaaagaaaaaaaaagcagtagaccacttctgcacctgagagaggcagacattytgtgagctcacatatttttctcatcagactctgaaacagcatttcactgtattttgatacaaatgttcaaactacacattaggggtaatttctgcctcatttggagcacgaatctaaatgattgtatctccattagagaaaatgaa

SEQ ID NO: 488349 - DNA, 626 bp, Homo sapiens
ggttcaacccatttgttacatgtacttaagcaaggtaggatactcctttgagatttagcattctcctctttaaaatggagaaaataatagctacctcataaagtacttttgagaattatcatatacgttacatgtgatgtgcttgagacacagtagagacctaacacactgtaactgtcatccttgcctgcactctagaaagccactgctgtagctcactctggtggtataaccatctstccagcggcctcagggcatgcagtggctcagacatattttttcatggaaacctcatcaatggctaatagatgtaaagctatttcagctttttccaggtccttagtttagtggttttatatttctgcccttgttctttccaatttccaggtgcatgggatccagttattttttcttttctttttttcttttttttgatagggctgtacaggaatcagaattgacacattcgcccatgaatttccctcttttcaggtctccatttctcctggtactgcaaaagcctagatttctctgatctcacctctcccagcctcatctgggtaaccaacgtacttatttcattctggtcaagattcctctcaataggtttattgcagattgctgca

SEQ ID NO: 488350 - DNA, 615 bp, Homo sapiens
gttacatgtacttaagcaaggtaggatactcctttgagatttagcattctcctctttaaaatggagaaaataatagctacctcataaagtacttttgagaattatcatatacgttacatgtgatgtgcttgagacacagtagagacctaacacactgtaactgtcatccttgcctgcactctagaaagccactgctgtagctcactctggtggtataaccatctgtccagcggcctcaggrcatgcagtggctcagacatattttttcatggaaacctcatcaatggctaatagatgtaaagctatttcagctttttccaggtccttagtttagtggttttatatttctgcccttgttctttccaatttccaggtgcatgggatccagttattttttcttttctttttttcttttttttgatagggctgtacaggaatcagaattgacacattcgcccatgaatttccctcttttcaggtctccatttctcctggtactgcaaaagcctagatttctctgatctcacctctcccagcctcatctgggtaaccaacgtacttatttcattctggtcaagattcctctcaataggtttattgcagattgctgcagct

SEQ ID NO: 488351 - DNA, 615 bp, Homo sapiens
gttacatgtacttaagcaaggtaggatactcctttgagatttagcattctcctctttaaaatggagaaaataatagctacctcataaagtacttttgagaattatcatatacgttacatgtgatgtgcttgagacacagtagagacctaacacactgtaactgtcatccttgcctgcactctagaaagccactgctgtagctcactctggtggtataaccatctgtccagcggcctcagggcatgcagtggctcagacatattttttcatggaaacctcatcaatggctaatagatgtaaagctatttcagctttttccaggtccttagtttagtggttttatatttctgyccttgttctttccaatttccaggtgcatgggatccagttattttttcttttctttttttcttttttttgatagggctgtacaggaatcagaattgacacattcgcccatgaatttccctcttttcaggtctccatttctcctggtactgcaaaagcctagatttctctgatctcacctctcccagcctcatctgggtaaccaacgtacttatttcattctggtcaagattcctctcaataggtttattgcagattgctgcagct

SEQ ID NO: 488352 - DNA, 611 bp, Homo sapiens
gtaaaaatattcagccatgaaatatgcacttgtggatggctttctgcagatgtctgcagaatgcagataatctgtcttctgagaaggtctgcaaattaaaggtctctctgaccagttagaattataccacagtgaggatggtgatgcagtgggtaatgaaatggccttgaatcttgggcaataatgattataactgcctatggttataagcaaaaatgggtgatttttacccckactctttttaagagagaaaggatcagttggcagaaaaatgatgaacttttggttgttttggaattccttcaatgcaagatgtattggtatcatgaatagaagcatgaattgttatattgtctttggaaagctatttggctctaactatcaaaatagaatgcatatataccttttgacctagcagttccatttctagtaatttattttagaactatagtcatgcaggtgcacaaaattctatgtacaaaaatattcgccatggcattgcatttaacaacaaatgattaaaaacagcttaagtgtccaagcaataggagaatctgtaaataaattatggaatatctatactttataatctttgtaataaaattagacca

SEQ ID NO: 488353 - DNA, 647 bp, Homo sapiens
atttgtatgttaaaataaaaactaatataaaaggaatacacctcaggggaagagagttggccagggtgaaaacagataattagagtcacccatatttaggaagaggtgacactgaatgaaatcgatgcaccctttaactatggtccaaacagtagttctagaataagttagtaaaatgccatataagccataaaaagaaacaatattttattccaaagtgaaaaacagttgttgtttttttttttwaaaaaaggagtcattttatataatattttatagcttgtgtttcggaggccaactgtggctttcaaaactctggttaagatacgtattaggaggcaacacttgagtatataagattaagttataagtagatggaagagagagtgaattggagagagagagaggaattggagagagtggacagataacttatttgaagacaagtttctttgaaaattttatattaagattttttacaattaatcatttattttaatgctgtcaatcaaaattcttaaacagtcaagctataataaaagaccttttgataattaataattttgtgaatgtgtgagttttatcatttggaattactgagttttgttagagtagatttctgtttctatatacaagcagtgtaaatt

SEQ ID NO: 488354 - DNA, 647 bp, Homo sapiens
atttgtatgttaaaataaaaactaatataaaaggaatacacctcaggggaagagagttggccagggtgaaaacagataattagagtcacccatatttaggaagaggtgacactgaatgaaatcgatgcaccctttaactatggtccaaacagtagttctagaataagttagtaaaatgccatataagccataaaaagaaacaatattttattccaaagtgaaaaacagttgttgttttttttttttaaaaaaggagtcattttatataatattttatagcttgtgtttcggaggccaactgtggctttcaaaactctggttaagatacgtattaggaggcaacacttgagtatataagattaagttataagtagatggaagagagagtgaattggagagagagagaggaattggagagagtggacagataacttatttgaagacaagtttctttgaaaattttatattaagattttttacaattaatcatttattttaatgctgtcaatcaaaattcttaaacagtcaagctataataaaagrccttttgataattaataattttgtgaatgtgtgagttttatcatttggaattactgagttttgttagagtagatttctgtttctatatacaagcagtgtaaatt

SEQ ID NO: 488355 - DNA, 647 bp, Homo sapiens
atttgtatgttaaaataaaaactaatataaaaggaatacacctcaggggaagagagttggccagggtgaaaacagataattagagtcacccatatttaggaagaggtgacactgaatgaaatcgatgcaccctttaactatggtccaaacagtagttctagaataagttagtaaaatgccatataagccataaaaagaaacaatattttattccaaagtgaaaaacagttgttgttttttttttttaaaaaaggagtcattttatataatattttatagcttgtgtttcggaggccaactgtggctttcaaaactctggttaagatacgtattaggaggcaacacttgagtatataagattaagttataagtagatggaagagagagtgaattggagagagagagaggaattggagagagtggacagataacttatttgaagacaagtttctttgaaaattttatattaagattttttacaattaatcatttattttaatgctgtcaatcaaaattcttaaacagtcaagctataataaaagacmttttgataattaataattttgtgaatgtgtgagttttatcatttggaattactgagttttgttagagtagatttctgtttctatatacaagcagtgtaaatt

SEQ ID NO: 488356 - DNA, 663 bp, Homo sapiens
cctggtcactcacaaccaaaccccagaagtcacagcatatcacttttgccaaagtttatgggttgaagaagtcacagatgaacctagcttcaagaagagggaagttgggccccacctcttgatggaggagtgtcagggtcacattgcagaggagcatgcaggaagggagacattgctgaggccagctttggaaggttcaggctgcacacagtgcaaaacccagctctgaactattcagaaacgaggaagacaaactcaaaaattcacttatgacttctgtctttgcctcttgtcctcatcaatcaacttttttcattaagatattgtgcctgagccactgacagtaataatttggtgtttcatcacatctcacaaatagatctgaatgtgcycaagtgccctgtggggctgagaaagaagaggccctccacatctgatggagagggtacatctaggacagtgagtctcaatcccaggtacatgttaaaaccccctgaggagcttttataaaaaaaaaaaaaacccaggggtgtgtcttctctaagaccaattaaatctgggaacctctgggagtgtggctacagctttagaactgtttgaaacttatatgactggggagtccagtagatgccctaaaccccagggacaagcagggaaggtatt

SEQ ID NO: 488357 - DNA, 549 bp, Homo sapiens
tttcagtttcatcagaagtgtctgaaagacagactgagaagaattttgacagcttcatgggatccagaatacaataatgtyagggagacttagaaaacatccctgttcctgaagcctagggtggggatcctgaggaaagcatctcacaataaatgtgaaccaaaattggagcagctctcagagactgaagcacagctctgaggcataccagtctctgagagtggagtaaaattactagtgacacaaagcaccggtcaagatccagtgtcaatcttctctaggagaagacaatgtcatctaggcctcaaactgttctacacatagtttttcaaatgcaatgtccaggatgtcatcgacatcatcatctctgccatcatcatcaatatcaccatcatccttatcatcacaatcaggcacataaaaagacaggataatgacaacagaaacaactgccaatagaaacagatctgcagatacacagatatcggggtgaccacttatagactttaaagtaactatggttattatgctcaagaaaacattgagaat

SEQ ID NO: 488358 - DNA, 549 bp, Homo sapiens
tttcagtttcatcagaagtgtctgaaagacagactgagaagaattttgacagcttcatgggatccagaatacaataatgtcagggagacttagaaaacatccctgttcctgaagcctagggtggggatcctgaggaaagcatctcacaataaatgtgaaccaaaattggagcagctctcagagactgaagcacagctctgaggcataccagtctctgagagtggagtaaaattactagtgacacaaagcaccggtcaagatccagtgtcaatcttctctaggagaagacaatgtcayctaggcctcaaactgttctacacatagtttttcaaatgcaatgtccaggatgtcatcgacatcatcatctctgccatcatcatcaatatcaccatcatccttatcatcacaatcaggcacataaaaagacaggataatgacaacagaaacaactgccaatagaaacagatctgcagatacacagatatcggggtgaccacttatagactttaaagtaactatggttattatgctcaagaaaacattgagaat

SEQ ID NO: 488359 - DNA, 567 bp, Homo sapiens
tcccttgtatgaatgcaaaatagatgatttaatcaattcttttttttttttttttcagattgtggttgtttcaaagtttttgtattataattgcccctacagggaacacacttggagctgaatctttactcacttaattattaccttggaataaattactacaactagaattgttggttcaaaaggtatgtgcattttaaaggcttttgatacagattgcaaattgccttctcagaaatgttccatgaatgtgcactcagaccagcagggtgttcgagtccccattccctacaccccccgccaacactgggtcctatctcttttgtgcctcatctcttgccaattgcactagttgttgttgtttttctttaagtatcttattgttgtttgcatttgcatttctatgatcgctggtaatgttgggcacttgtcatagatttattagccacttgcggttccaagtcttttgtctgcatcctttgtcctttctccccatagaggctcccagcttctccttaatgactgataaaagctctgagtgtacctgytttcctgagcggggcccag

SEQ ID NO: 488360 - DNA, 589 bp, Homo sapiens
tggattcctgtgtcccagcacctggcccttccacagccctgaccagagcaggtcctacccaccctcatcctgctctgagaggcggaaagcctggggctaccaggtggccccgagactgagggctctgcgtggtagggtgtccttgttgcagcattcaggagctgggattctgggagagctgggctgacttcaggctttgggggccagggcccaaaagttcaaaagggcccaagaagatggaaggcagggatgagcaygggtggccctgggctggaaggaaaccaggaggcagaaccatgagggacacatgcaacctggccaggctgggccccgggcggtcaggccagacacaggagaagggcagcatgtcactagcatggcaaaggatcccagcggcacaggaggcttccccttggcagtgctgtgtttgctgcctggcttaatgtgccgccgcctgttaaacaaatattgtgacaggcccactccatacactcagggacggcggcggcactggctgtcaccaagggtggccagtaacgcgggcactctgcaccacgcaacctctccttccaactcagagcaagcctgc

SEQ ID NO: 488361 - DNA, 542 bp, Homo sapiens
ctatgcaggacagagtgctactacaaggtgaaggacccagccactttgagcaaaaagcccaggagcatctacaggaggctgtgggtacagccacacttggtggcgtcctgtctgcccagcacatctctaccagcctatgggttttgttttataagcacttttatagtgccaggcactgccgtaaatacagtacatatattaactcattctgtcttcatacagccctatttctttttttctttttttgagacggagtcttgctctgtcgcccaggctggagcgcaatggcaygatctcggctcactgcaagctctgcctcccaggttcacaccattctcctgcctcagcctccggagtagctgggactataggcatacgaccctatttctgaagtaaatcctactgttttcccatttaacaaatgaaaaagctggggctcagagatggtaagtgatttgtgtacagtcacacagctccaaagtggaagagtcagaattcaagtccaggcagtgtggctctgatccagcccttgcaccctggct

SEQ ID NO: 488362 - DNA, 573 bp, Homo sapiens
ctgctacggtttcaatatcccctctaaaacttgtgttgaaatttaatccccaatgcggcagtactgagaggtggagcctttaagaggtgattggatcatgcagtctctgccttcatgaatggattaatccatttgtggattaatggattaatgggctaagggattaatgtgttctcrtgagagtgggactagtagaggaagtgcggcctgagatcgcatgctcaacccccttgccacgtgaggccctgcaggactctgcagagtgtccgctgcagcaagaaggcccttaccagatgcggcccctccacctcggatttttcagcctccagaactatggaaacaaattcatctttttaaattgcccagcttcaggtattctatttataagcagcagaaaatcgacaaggacaccacctctttcatataaaagaatggaggagcagtcactgggcacaggagacagggagggatgagggctcttgcctgtctatacacataatctagtcaacaaattaagagaaagcggatttggttgctaacacttaaaaaaatgagagattatacattaaaagc

SEQ ID NO: 488363 - DNA, 573 bp, Homo sapiens
ctgctacggtttcaatatcccctctaaaacttgtgttgaaatttaatccccaatgcggcagtactgagaggtggagcctttaagaggtgattggatcatgcagtctctgccttcatgaatggattaatccatttgtggattaatggattaatgggctaagggattaatgtgttctcgtgagagtgggactagtagaggaagtgcggcctgagatcgcatgctcaacccccttgccacgtgaggccctgcaggactctgcagagtgtccgctgcagcaagaaggcccttaccagatgcggcccctccacctcggatttttcagcctccagaactatggaaacaaattcatctttttaaattgcccagcttcaggtattctatttataagcagcagaaaatygacaaggacaccacctctttcatataaaagaatggaggagcagtcactgggcacaggagacagggagggatgagggctcttgcctgtctatacacataatctagtcaacaaattaagagaaagcggatttggttgctaacacttaaaaaaatgagagattatacattaaaagc

SEQ ID NO: 488364 - DNA, 372 bp, Homo sapiens
gggcctgttccgccccaccctgctgcatctggtggacaagcccccggggctgctgatgacccatgccctctgacctcaggggaggggcgggccgacgacaggcctttcyagaagggccctacaagcggcttcagggagtctgggaaccaaagcagccaccctgtccatggcactgtccgcccctggcaccacggccccaccgggagtggaagccgccaggtgaggcaggggtggttcccttccccggggaacaatgtgcagaaggcatcggtgcctgccagagaggaagtggggaggtggggagacagagcacagagagtgactcagacccgagggcgaaccagaagctgcccggagattcccactgtatgg

SEQ ID NO: 488365 - DNA, 495 bp, Homo sapiens
ggaggagtctgtgcagtgtgtcccaggccgtctttgttaccactaggggagatatgaatgaacgaatgaagaatgaaaactctgaaaaaaacagagctaagaaataaagccatattgagwcttgaagactttgcagtgcctgacccattcccataacttcttgcttcaaccagtttgagctggacttctgtctcttgcaaccaagagagttgaccaacagagccttaccaagggtgggcattcagtccaggtttggccaaattagtcgcttcagggtctaacatgggaaggccttgtggtgacaagagctggggagaaaaggtctaaggggtcagaagggagccctggagctcacatcagaggccaacacgggacacagccagggcatcagaagtgagctgccagggaggtgtgagggggaggcagaccaagaaggaaagtgggggatagaggaaggtctgcaggtgcccaccatccccagcctctcaatgccta

SEQ ID NO: 488366 - DNA, 534 bp, Homo sapiens
cccaccatccccagcctctcaatgcctagtggggagcactgggtgacactgatactgattaatgagagcctcctggccacagggctcagttcatgggtgggcaggtgaccctagcaggaccaattagagtcaaagcgcctcaggcccaagcattctaccagagttaatgtctccagaccggtcccagtgtgcgccttcctctcacccccaccatgtggttatcaccacatcccctcccctgtaggtcccctctccagcccarctggaagcaggccggtgctgttgaacctcaagccttgcgccctttgggccagaccttcctggctcgcaaaatctccttgggagcaaggccaggtctccagtcatctctgattgctctgccacctgcccctttccagtggactcagcccatctgattcacactgaacacacatttgtttagcagagagtgtcagacagaggtggggactgggggaggcagggagagaaaagggaaattcaatgacagaaacacacaaatgaaaacaaagtcca

SEQ ID NO: 488367 - DNA, 523 bp, Homo sapiens
tgtctgtgcagttatttgattgatacctgtctcctcacataagactaccagctccaagagcacaggaagcacttccttttattttatttcactttattttatatttyattttatttcattttataagtctaccacgcttagagacacacgcacaagccctcagtgcacagctcactgaattcccacacagtgcgcacacctgcataaggggtgcctaggtcaagacatgaaacccagccatttcccagcaacatgccatgtcaccctcccactgaagggggaccactagcctgacttccaacagtctagctccattttgctggttttgagttgtatgtacatagaatcatatctctgtgatcttctgttggacagatgcccggacctgtgagacccaatggtggtgttgcctgtgactgcccctgcttcttctcatgctatgtcatgccccacagggggatttcccacatttatctatttagtctatgtcaagggacatgtgagttgtttctggttggggttg

SEQ ID NO: 488368 - DNA, 504 bp, Homo sapiens
taagtcagagttaagactggagcccaggccatctccctccaccacccacacctgacatccgcacactgcgcttcctgcatggtggacagtgcctgcctgctcacaactgggaccactgcctcctctgcttctctgtagccctggccctagctcgtggraggagcaacagggccatatttgagtttcagagcactgctcaggggggcagaaggcagggtcagattcttctggaagaggtcggaggtttcccagccagaacaaaactgggatgagaagctggggttcctcccacccctctccaggacctgtgaatgtccctcccctgtggagctggaaagccagcccgaaggcacctgccccgtgggaggacacacccctgagcctggatgcctcatctcctgcagctttggaattctagcccctacccccaccatgcccacccccccttgccttcctctcatgggcccccatctttccccagcccatccagctcctgacagccag

SEQ ID NO: 488369 - DNA, 702 bp, Homo sapiens
ctccatgctgctcagttggtggcatttggcttctggctctttgttaggccgccctgcccctgccctctcctctcagagccctccacccctctgaccacaccccagaggcttccttagctcctccatggtctcctctcccctaggctgacttctccccggagaccacctccctgggagccttgcctgatcactgtcttgtgagtattatgcagaaccctctgggcctccagccacccctgcacagcaaccacctcctaccccaagccagagtagactaagtctgccccatggctctgggcagaccctgccacagagcagaagggacccaccgcarggtggggaaagatgactggggtaatcagagagccaaactcagagccccagagggctggaggcttagggacatgagtaacagggttggcagtgagcaccaggcgcttgtgggaccgtggccccacctaagggggatgacctccgcccagccccagccaactcatccagatgggagtgggcacagtgtggaccgattcctccatttccccagagagcttagatgtctaggtttttgtttcaattaccttgatttttggttaaagttggcctctactttcaaattaacagaaacactggattgtgtgactcaaaccaagaccctgcaggccctggagtggacaaatgaatgcaccacccccgctggggctc

SEQ ID NO: 488370 - DNA, 510 bp, Homo sapiens
cccctctctacacagagtggtagcattcctgcagcagagatcaggtgactggcaaagccatctgttttgcgctgaggtaagaagttaccctccaaggccatttggaggaagagtcacragaaagttgttttctgtggccctcagctacaatgcagcctggagatagtgacagtgtctatctaagttagaaatcatgagccctggagcaggggtgtgatagagaagcggattacattcctgcctgcctgagacatgaagctagtgcagccccttccctctgaccccacccacagaaacctcatttcaccacaagctccccctgccacttccattagggctggtgcttatgcttgtcattggggttcccaagggtaagcttagcaggccagtgccatccagttttgttcccaacactggggcttaggagcaaactcagggcaccaggctttccacaggccagtctaccatccaagaccacagaaaactcctcccagctgacaaagatcacat

SEQ ID NO: 488371 - DNA, 640 bp, Homo sapiens
ctgcgtgtggttctacattcacctctctcactctgtatcagtcatcttcaaaatgatggtcatgggtagcatgtttcctaagatattttcctacatttcttcatgtatctgactattcataattctggcaacaattttgattatttctgaaagctcaaactatttctaattatctcactcatatttgatggtcagcatgacaagtggtcataaaaagtactttctgaatcattcagtagtgttcagttgcacttgagaaatcctcctaatggcagtggcatacatgaaaaaggaggaagctggattagattttgacattgyaacttctctaaatccaacaggacagtcattcctggtctttctgtcaattctgaacaaatttgtttggcgccaaaatcagtattgcttttctaatcaagaagcgattggaacattctgtcttgcagagagacacatcattgacaatgaaaacactaacttagaagaaaatgaatcaactttaggaatgaaggaactcagttggatttgcctcaagccattaagcttttatgacagtcagtcactagattttagaacactaagccaccctaaatttatacatgtaagaaagagcattaaattattatattcaaatgatgtt

SEQ ID NO: 488372 - DNA, 522 bp, Homo sapiens
attaaaaatataattcattttttaacctctcagattactgaggtataaagagattcaatcatttactctagttaacaaagcaaaccaatgatgtgatttttaatccaaagtgagcttttctaattttcatagttattttaccaccaataaaaataatcacattccagcctgcaagctctggagagtccagctggtctgaatgaggagatgtcccccataatayagcacagctgctgtaccaaaaagcagccaggctacttctttaagtgggtccctgatcctgttcctcatgactagctgagtcttcccagcaggggtctccatacacttcgtacaggagtgtttgggccagcaacaggtcagtaccctcctgaaatggagctcctagaggatggagcagggtgccatcttttctgttccacagacttcactggtgatacctccaggtatgggaaaaaacaaggcaaccatggtctggaaaaaacaagtcaaccagcaaaccacaggagacctacggaagac

SEQ ID NO: 488373 - DNA, 548 bp, Homo sapiens
atctgtactgtatatatgtttaaaatatttaataaaaaattaagatgacttaakgctcacacatgtttaatttcaatcctgtctttgccagttacaaactctacgactttgggcaagtcatttattctctctgtacttcactatcttcttatttctatgttcaaataaaccttgagataattcacagaaaaatgaggaatcccagatttaactgttaatatataaatattgtagctaaaattaaagaggagagagtcaccaaatatttcaattttcttattaagtgcacagttgaagaatggcaatatgaagaatctccactattagtgacagaatggcttagggattgtttctggaattgatgcctaacatacagtcaaagaggaagaaggcaaacttaataaaatccaaataaaagattacaaaattacgagtagttttgccttgaataatttgtcataaaacctataaattatgaaaagtaatatctctaaaattgaataataagtgtacattacttagagcaataaattcccattcaaaatccc

SEQ ID NO: 488374 - DNA, 611 bp, Homo sapiens
cacactactgctaattccccccsacactgaacttctgattacctttctttttgccaccatcttttccccagcagcttttgttaaccttggttctctgcagcaattaacttcagcaggtcggccacgttggctgcttctcaaagtgcagccagcccaacagagcccagggaccggaaggccgctatgggtcgtgttttagccccacatcacatggttggcagagcagatctgttcctatgctctgcaaaccaggagagtccgaagtgatttggaatgttttcaagatcctgagttactgcctgtggcagcagcttgtaaactgttaagcactgtacaaatataaaccattgttcttgtgcagtcactgcagggacacaagactgggtaggccctgagctgtttctgtagtggcccagtcagccctcggtgcctgacaacgttttcgagatgatccagtctgtgtttgagtcaggttgctctgttccgagttgtgcgtcttcttattatccttgtacctatggccctaatgcttagccatttaaagaagccaccataactttcctataatattttaggattttattctggagttgcatgttgtttacataaag

SEQ ID NO: 488375 - DNA, 590 bp, Homo sapiens
tgcgacagcatcccgaagtcctggcatattctcccattctgcatgccaaacagaccaaactttcacaatagaaaaaggacacatttccaaccaaggacaagggtaatacattacaaagcccctttggataaagtagaacaagaaacaccccatattcacaggttgtccgagaaacagggaatggggcctagagataagaaaggcaggctgaaaggaacccaaaaccccagccaagtcatccagatacacagcagttataggcctgtctagacacaagggctggaaccacttgctgatccaccctggggaatacaagctcattggaaatcattctgttgkctcgccagttaacccagtgaaccaacaggcaactggcagagtaataataagccaattcatggaacaaatatgtaccaagcacctactgtgtactgagcactggggactgaggtgagtaagacagcccctgtcttctaggagttcacaatcaaaccaggaagagagatgtgcacttagcaaataaaatgacagctaacacttttatatggcacttactgagttcacaaagcttaaaatgcatcaacacattt

SEQ ID NO: 488376 - DNA, 590 bp, Homo sapiens
tgcgacagcatcccgaagtcctggcatattctcccattctgcatgccaaacagaccaaactttcacaatagaaaaaggacacatttccaaccaaggacaagggtaatacattacaaagcccctttggataaagtagaacaagaaacaccccatattcacaggttgtccgagaaacagggaatggggcctagagataagaaaggcaggctgaaaggaacccaaaaccccagccaagtcatccagatacacagcagttataggcctgtctagacacaagggctggaaccacttgctgatccaccctggggaatacaagctcattggaaatcattctgttgtctcgccagttaacccagtgaaccaacaggcaactggcagagtaataataagccaattcatggaacaaatatgtaccaagcacctactgtgtactgagcactggggactgaggtgagtaagacagcccctgtcttctaggagttcacaatcaaaccaggaagagagatgtgcacttagcaaataaaatgacagctaacacttttatrtggcacttactgagttcacaaagcttaaaatgcatcaacacattt

SEQ ID NO: 488377 - DNA, 634 bp, Homo sapiens
actggtgttgaccttgtcaaaacactagtagaaattaattagagtctggcctgtcatttaactaacaggatagtaaggccccaaaataacttcttgttttgaggttaatcctgtctctgagtttacggctgacattcctgtacatccggccctgtttgcatccagcagccaggaccgtgggctcatggtgttcatggggctcacaaagagggcacacaaggtcaggggcctggctctccatgggagccgctcattgtggtaggaggacaaaggccacagtgatcaagatgctctgtaggagaggcggcagaacaacatgtgggcctggtagatattgcaggtgaagagcctccccatcccccaagcttctttcattttaaattcacagcttttgtttcttgagaagttccgaatcttttgcatctggtgctgcgagaaggttcacctggttaaacatcctcaagtcarcagcacagctccttctggaaggcactttaactggatgggatcctctcactgtagacattgctacctccctttcctgaaataaagcctgctccagagcagtgattgtcttgtggtgtgttgtggaaagctgttaatagcttaaaaggtctcattagctgctagatag

SEQ ID NO: 488378 - DNA, 412 bp, Homo sapiens
atctggatataacctcaaataacttctctgtctctgttttttcatctctaaaataaaatcacctaagaaagtgcctttcaaattttttagacccattgttaagggctgtacattgagcctgagcacacacacacgtatgtgtatatgtgtatatatatatgtatataacagaaatgaaagtgccacaaaataataccttcttacacttatctgtgtgatgtactctaattttattcgcyattctatgctaactcatttttaaaaattccggccaaagaccgggcgcggtggctcacgcctataatcccagcactttgggaggccgaggtgggcggatcacgaggtcaggagctctagaccatcctggctaacacggtgaaaccccgtctctactaaaaatacaaaaaaatca

SEQ ID NO: 488379 - DNA, 580 bp, Homo sapiens
gggaacctttttttttttttttttaaagcaaaaagctagacaattgtttcatcattttttattaaatcacctgtcttttctccacagatacaaatgctrtgtctaaattttatcacagtcttgggtctgttgttgggctgtcttttgctccattgatgtgtcttttggcaactgtggcatattgtttcactgtatctttatatgtcataatattgaggcagattctttgtaattcttgtttttagaattttcatagctattcattctcatgcttctcagtgtattctgaagtcattcatcattttctagaaaatttatgattggcattttgattggaatcccttggaattcatcagttagagttgactactgtaggctattaaaacgtcttcctataagaatgtagatatcagactggtgaaaatttaaggagctgaagtaattttaaattttaattgtaagattttcgtggaggtgatttttcaaaaaggtttagttactgatgttggttcctgtgttatttctggtagatgaatcaattatattaggtaaaagtattatcattggcatgattaaaaag

SEQ ID NO: 488380 - DNA, 550 bp, Homo sapiens
tttccagtagagcaaaatgtctagcaaaagtgaagtcagaaagactggtttaagaaatattctggggccaggcatggtgactcatgcctgtaatcccagcactttgggaggccgaggcgggtggatcatgaggtcagcakttcaagaccagcctggccaaaatgcaaaatggtgaaaccctgtctctactaaaaacacaaaaattagccaggcgtggtggtgggcgcctgcaatcccagctactcaggaggctgaggtagagaattgcttgaacccgggaggtggaggttgcagtgtgccgagatcacgccactgcactccagcctgggcaacaagagcgaggctccatttcaaaaaaaaaaaaaaattctggaaagcctggagtctagaatgaggagttgatactgaattccctttgcaattgccacatatatcacatgaccagaggtataattaaggaagattcatctgagagtggaggttgctgtaatggtgaagttctaaagagctgactcagaatggtgatggaaagtttctgagagacaatgca

SEQ ID NO: 488381 - DNA, 375 bp, Homo sapiens
atggtgaaaccctgtctctactaaaaacacaaaaattagccaggcgtggtggtgggcgcctgcaatcccagctactcaggaggctgaggtagagaattgcttgaacccgggaggtggaggttgcagtgtgccgagatcacgccactgcactccagcctgggcaacaagagcgaggctccatttcaaaaaaaaaaaaaaattctggaaagcctggagtctagaatgaggagttgatactgaattccctttgcaattgccacatatatcacatgaccagaggtataattaaggaagattcatctgagagtggaggtygctgtaatggtgaagttctaaagagctgactcagaatggtgatggaaagtttctgagaga

SEQ ID NO: 488382 - DNA, 641 bp, Homo sapiens
aataaaagtaaattttcagtgtcttagccacacaacataagccacaattcaaagtatttaatagcaacatgtgccaagtggctacaatattggacaaagcagatgtaaaacatttycactattcaagagagttctattggacagaactaatctagacagtaaaaatctcttttaggtgttcccattgctttccaaagttagtattaattataccacacaatctgaattttaagcccaaatagttgaaacattacaggtaaaaatcttttcagggatttttgtgtgatgatttaacaaactgatagacaaacttaattttggagctctggttgtccaactctaattgctcatcattcctgaaggattttctcagtcctttttagaaaacctccaataaatattatttatttaagcagatgaaaaagaattataccatcttcctgaaaatattggctaccaaattgaaatgggcctatgcctgaatcccttatgcagggtttttcatttaaccaaattcatagcacccacactcacaaagctcttttagtatgggcattggcaggagtatggaaagacaaccgtatattatttgctaattgttagtgcatgtttctctgttcatagaaatatctttggaaaca

SEQ ID NO: 488383 - DNA, 641 bp, Homo sapiens
aataaaagtaaattttcagtgtcttagccacacaacataagccacaattcaaagtatttaatagcaacatgtgccaagtggctacaatattggacaaagcagatgtaaaacattttcactattcaagagagttctattggacagaactaatctagacagtaaaaatctcttttaggtgttccmattgctttccaaagttagtattaattataccacacaatctgaattttaagcccaaatagttgaaacattacaggtaaaaatcttttcagggatttttgtgtgatgatttaacaaactgatagacaaacttaattttggagctctggttgtccaactctaattgctcatcattcctgaaggattttctcagtcctttttagaaaacctccaataaatattatttatttaagcagatgaaaaagaattataccatcttcctgaaaatattggctaccaaattgaaatgggcctatgcctgaatcccttatgcagggtttttcatttaaccaaattcatagcacccacactcacaaagctcttttagtatgggcattggcaggagtatggaaagacaaccgtatattatttgctaattgttagtgcatgtttctctgttcatagaaatatctttggaaaca

SEQ ID NO: 488384 - DNA, 641 bp, Homo sapiens
aataaaagtaaattttcagtgtcttagccacacaacataagccacaattcaaagtatttaatagcaacatgtgccaagtggctacaatattggacaaagcagatgtaaaacattttcactattcaagagagttctattggacagaactaatctagacagtaaaaatctcttttaggtgttcccattgctttccaaagttagtattaattataccacacaatstgaattttaagcccaaatagttgaaacattacaggtaaaaatcttttcagggatttttgtgtgatgatttaacaaactgatagacaaacttaattttggagctctggttgtccaactctaattgctcatcattcctgaaggattttctcagtcctttttagaaaacctccaataaatattatttatttaagcagatgaaaaagaattataccatcttcctgaaaatattggctaccaaattgaaatgggcctatgcctgaatcccttatgcagggtttttcatttaaccaaattcatagcacccacactcacaaagctcttttagtatgggcattggcaggagtatggaaagacaaccgtatattatttgctaattgttagtgcatgtttctctgttcatagaaatatctttggaaaca

SEQ ID NO: 488385 - DNA, 641 bp, Homo sapiens
aataaaagtaaattttcagtgtcttagccacacaacataagccacaattcaaagtatttaatagcaacatgtgccaagtggctacaatattggacaaagcagatgtaaaacattttcactattcaagagagttctattggacagaactaatctagacagtaaaaatctcttttaggtgttcccattgctttccaaagttagtattaattataccacacaatctgaattttaagcccaaatagttgaaacattacaggtaaaaatcttttcagggatttttgtgtgatgatttaacaaactgatagrcaaacttaattttggagctctggttgtccaactctaattgctcatcattcctgaaggattttctcagtcctttttagaaaacctccaataaatattatttatttaagcagatgaaaaagaattataccatcttcctgaaaatattggctaccaaattgaaatgggcctatgcctgaatcccttatgcagggtttttcatttaaccaaattcatagcacccacactcacaaagctcttttagtatgggcattggcaggagtatggaaagacaaccgtatattatttgctaattgttagtgcatgtttctctgttcatagaaatatctttggaaaca

SEQ ID NO: 488386 - DNA, 643 bp, Homo sapiens
aaatttcttttaaggtaaatggttgtgaatatcaaaacataattttttaaaacttgtaaagtttacgtgggtatattataggatcttaagtctttatatgtatgctacaattagctgtaattatatattccttgacatcttaaaataacattttttaaaattgatacagtaagtaagaacattgggtttagacartttttccagtataactgaacactagggatttgtttccttattttgctttttctactttagtggactacttaccttgaagcttcatctgataaaagtgaggccatataattcattgtgtaaactccacagttttgcaattgaaaggagctacaaaatatttggattgtaaaatttatattatttttttaaaatagaaataattgtacctagttacaataaagcaatattaaaaataatattcttattcataatttttaacagatcatcagaataattattcataatatacattaaatatgtttatggtgaaaatataatttattattcaattattgattattttgagagcacagcaggttattaatgattacaccaaaagacctgttgcaaacaatagcaccatcgtggataatccaggaggtatgatcaatccacaaaaatcagagtt

SEQ ID NO: 488387 - DNA, 390 bp, Homo sapiens
tgaagcaatgagtatattttagtttgctttgcattaaatttatttatatccttattagagaagacacaaaagaaaaagaaagcaagagtttttaaagaaattccaataagtscaagcattatttaatgctggacatttttattaataaaaaatagcacaccttcacttgcatgttttaaaataacatattcaaccagagacatgatatctgagtagagaaatataagtttgattagattatgtttaatcatggcactaaatactaagtttgatcatgacactaaatgctaaattgatttaaatttatttacttcttttaaatctctgaatatcaattattttatccatatggtaggaataaaattattgtaaatgatatgagtagttaat

SEQ ID NO: 488388 - DNA, 562 bp, Homo sapiens
gagacaaagcaagaggcagagacttcgagacagagagatggacaaggagaggcaacaaatgagacaaacctgctcgcccagcaggggccacctgtcacatgattgtccaggtcccatgccatggggccaggccagsctggtgcctgatggagcctcccaccctcctcagtgggcatcatcccccgtagggcctgtgtgaggttggtgccaggctgtggtcctgtgtccagctcagcactgggcacatgtgcaggctggagaggggctctgaacgactaagaccttcccttggcgatttgctgttagccattcacttacacccagggaggcttgatcacccaaaccaggaaactttagagagggaaaggagtgtggttaacagtcatccctggacagcaaagcatgcaaaggggctgtcccagcgaacgggaatgtgcagtcccagggctgacgactgtccctgttccaaagtgggtcccatcacaggagtccaagcataggcaggccctggcttgtgggctgccatcggtcacgctggccatggccatgttgaccacccctg

SEQ ID NO: 488389 - DNA, 562 bp, Homo sapiens
gagacaaagcaagaggcagagacttcgagacagagagatggacaaggagaggcaacaaatgagacaaacctgctcgcccagcaggggccacctgtcacatgattgtccaggtcccatgccatggggccaggccaggctggtgcctgatggagcctcccaccctcctcagtgggcatcatcccccgtagggcctgtgtgaggttggtgccaggctgtggtcctgtgtccagctcagcactgggcacatgtgcaggctggagaggggctctgaacgactaagaccttcccttggcgatttgctgttagccattcacttacacccagggaggcttgatcacccaaaccaggaaactttagagagggaaaggagtgtggttaacagtcatccctggacagcaaagcatgcaaaggggctgtcccagcgaaygggaatgtgcagtcccagggctgacgactgtccctgttccaaagtgggtcccatcacaggagtccaagcataggcaggccctggcttgtgggctgccatcggtcacgctggccatggccatgttgaccacccctg

SEQ ID NO: 488390 - DNA, 388 bp, Homo sapiens
ccaaggggaaaaagatgtattatgttttgtgaactatgcaatgatgctataactgtaattattgttgtttcaaaatggtttcattatgtcttataggaaaatcccattttttcagagttagaattatataattctaattagcaatttaarataatcaataactggtcatgtaaattcgaacaagatctctctgagccatggtttcctcacgtataaaactgggaaaattctacctaactggcatgattaagtgtgagaatatatgtgaaactgggcacagtgtctggtacttagtaggaactcaataaagttaatctcttctctcatttaagcaaaacaaaaagctactagtgaaataaatttcatttaaaatcattggaaatttttt

SEQ ID NO: 488391 - DNA, 628 bp, Homo sapiens
ctatgctctggtggcaagctctagttgacagagcaggagattccacattgaatagaaactgtgtttcttgcatactacctttcaggaaatctcaaaatgtgcaagaaatgtttttctgacaataatttaggttctaaaatccaaattgatttaaagtctttatctttttggcattcacctactccttttggaaatgtcacaagttcaataaagaggtgatgattctcatgttgaaatggatattcactgaaccaattactcagttgatcagactaactgaggtatttggaatcatgtagacaagtttccttggagatcaagtaaactatttcattcatagaagagtagacatagaatggagtttcattttgctttttgcttttctttctcaaaaatacaggctaaataagtgtcmttcaatggtcagaattacatctttttaataataacttacaaaatgaagttataagcataaaattacatgggtaattattagaataagaaggttaaagtgaaagaaaatttcaatttcgttatattttagaggaatcaagctgaagtatgtctaaaagtaatttacattctcttataaacctgatgtttcctaaagtgttaatttgaaggaaag

SEQ ID NO: 488392 - DNA, 431 bp, Homo sapiens
gtcttcaagttcgtgtagagtttcagagttaggttttttctgagtcaacgtattatacataaattatcattgtcacacttcacagttttctgtatccatcgggttattagaaaactgtttcataatcaacacatgaattcccctaccttttaatgctttccaaaaagttttactcatggcattattttatagctataggccacattaaatatgtcagtcatcaggaagattttataacatcttgttatattataccatctattacatcttggggtatartaattaatatcactttattgtgaatattataattatttttacaccaacatgtcttcactttttttttacttgctagagaaaaataagaatgactaattttgaatgtctcacttccaacaatggaggcacattgtagcatgtcactaaaacaa

SEQ ID NO: 488393 - DNA, 609 bp, Homo sapiens
gaagaataaaatatgaaaaagagaatacttttaatgctgaaatccacaatgaagacatgacaattttgcatatttatgagtcacattgtgtaggaagtaacttcataaaggaagacttacataggcataaatacacacttaataagacatcttaaaatatcaccatcagtccaaaacaggtcaattagaccacaaaaatgtgaacatggaataattaaacaacatactaatgaaggtaggtcttaaggctatatcatgattttaagccctaatatcagagactctacctttctcccgagtatcaatacacttcacaaaataaaaagaataaaaactttttctatttacagtgcaaaaaaagtagaaattaacaagaaaacatttataatgaccatatacatgaaaatgtaaatgatcattctgcttagaaaagaaattaacaaaaattacataattgtaaaaattaatgaaagccctgtacatggaggacaagccctaatagcccccaccttcatgctctgtataatctcctcccccytgtgaatgagcagaacccatgacttgcttttaacccctggaatttgtcaaggggaatggaatgcactccct

SEQ ID NO: 488394 - DNA, 480 bp, Homo sapiens
gcttagttggtacatgagtgcacagcacattttaatttttatagttatgcatttatatgtaytagacaaatgaccgacagaaaatttaccatttcacaggtattagtgtttaggatgaggctaaagtaggtatttctgtttagaaaagtaaatttgaagaaaagctacccagcaaattatagtagtatgtggtacacagacaaaaaaaaaattatgcagtcgtccaaatgactgaaactgataaaatgctggtcctggtctatggatgccccctctgacaaagcacagaatactcgcaccttctccagagtcagtgaccaaagatgagacagcagggcacccagcacagaaaccaccaggagccaacgacttcctcctgtgctccatcctactctctcactcacaccaagaattaaatccttttatgtagacagatggtcaagaattgctactataaagcaactcagtatggtctgaact

SEQ ID NO: 488395 - DNA, 480 bp, Homo sapiens
gcttagttggtacatgagtgcacagcacattttaatttttatagttatgcatttatatgtattagacaaaygaccgacagaaaatttaccatttcacaggtattagtgtttaggatgaggctaaagtaggtatttctgtttagaaaagtaaatttgaagaaaagctacccagcaaattatagtagtatgtggtacacagacaaaaaaaaaattatgcagtcgtccaaatgactgaaactgataaaatgctggtcctggtctatggatgccccctctgacaaagcacagaatactcgcaccttctccagagtcagtgaccaaagatgagacagcagggcacccagcacagaaaccaccaggagccaacgacttcctcctgtgctccatcctactctctcactcacaccaagaattaaatccttttatgtagacagatggtcaagaattgctactataaagcaactcagtatggtctgaact

SEQ ID NO: 488396 - DNA, 480 bp, Homo sapiens
gcttagttggtacatgagtgcacagcacattttaatttttatagttatgcatttatatgtattagacaaatgaccgacagaaaatttaccatttcacaggtattagtgtttaggatgaggctaaagtaggtatttctgtttaraaaagtaaatttgaagaaaagctacccagcaaattatagtagtatgtggtacacagacaaaaaaaaaattatgcagtcgtccaaatgactgaaactgataaaatgctggtcctggtctatggatgccccctctgacaaagcacagaatactcgcaccttctccagagtcagtgaccaaagatgagacagcagggcacccagcacagaaaccaccaggagccaacgacttcctcctgtgctccatcctactctctcactcacaccaagaattaaatccttttatgtagacagatggtcaagaattgctactataaagcaactcagtatggtctgaact

SEQ ID NO: 488397 - DNA, 480 bp, Homo sapiens
gcttagttggtacatgagtgcacagcacattttaatttttatagttatgcatttatatgtattagacaaatgaccgacagaaaatttaccatttcacaggtattagtgtttaggatgaggctaaagtaggtatttctgtttagaaaagtaaatttgaagaaaagctacccagcaaattatagtagtatgtggtacacagacaaaaaaaaaattatgcagtcgtccaaatgactgaaactgataaaatgctggtcctggtctatggatgccccctctgacaaagcacagaatactcgcaccttctccagagtcagtgaccaaagatgagasagcagggcacccagcacagaaaccaccaggagccaacgacttcctcctgtgctccatcctactctctcactcacaccaagaattaaatccttttatgtagacagatggtcaagaattgctactataaagcaactcagtatggtctgaact

SEQ ID NO: 488398 - DNA, 612 bp, Homo sapiens
ctctcttctaagacatcttgtctcttttttggttaattactgtggcaaaccttattttctctttaaattaagccatgagatgcctttaattcaactaggctgctactaaaatgtggttttcatgggaaggaattaggagtctttcttttgagaaaaaacatatatcatgttgactgttgtctctttgccactgatgttggagaggatgaccttatgtcactagcccacacctgtggaataagacgctcatttacaaacctgctccraagaagaaggtaaggatgctgttcctgcacagtcatgaacggctgctgttcctcttgaaaaccacaacctctttctctagtagcatgaagtgagtgctgtttgggaatctcttttaacttagagagctctcaggcacagtattggcctgggcagatttctgtggttgctgctcagcaaagaatagacaggtctcacacttgtggagcaagcattgtatgatggctgcctcccaagcactttatccaggtccactcatcaaacaccacaacccaaaagattggggctatgaatataccctcactgtaataaaaacaagagaataagggagtttcagcaatttaccag

SEQ ID NO: 488399 - DNA, 498 bp, Homo sapiens
tgtggagcaacaggaattttcacgtgctggtggtgggagtatagtttggaataattattttggataatattgtgatattatctagtaaaatttaggatgcatatatcctatgycagagaaatcacactactgagtatgtatccttcagaaacaaatatatcgaaatgttcagaacacatgtataagcgtgttcactggcttagggatgaatatacatgatagtatattaatacaacagcatactaaaaagcactcaaaataaacagtactatggtactacaagacaacatgctcagtcttacaactagagtggaaaaagcaagacacaaaataatacaaatgaaatacttccattaaaatgaagttcaaaaaacaggtaaaacgattgcataatttaggaaggcatacatacgtgggaaaataaatataaggaaatacaaatctatttttatttaaaaaataaggaaattcttacatacctcatcaggataataatta

SEQ ID NO: 488400 - DNA, 481 bp, Homo sapiens
ctgtagatgaaagatggcatactcttcggttaagagagctaaatgaggtactggaactagtctcatcaaagcccgcacctactcataatcttgaaacacaacacactatcctgtggtcacagattcagctccacaaccaagcatggcataagctatgtgaacaggcatgggtggtggattcacgatgctgcacattcctggacatgcctccctcacttccctcaagaggcgggggtctatgttttgtcccctggaatcaagtgagccctgcagtractctggccaatagaattgcacatgtgatgctgtaccagttactaggtgttggccttaagaaactggcagtggcagagaagaattcaaattcttgattttctgtgttttcagacattctccctaggatccataagctgccatttaagaagtctaattactttgagaccaccatgcaagaaagactatgtgcaggcacatggtcaac

SEQ ID NO: 488401 - DNA, 443 bp, Homo sapiens
cctcgtacagaatcaagcacatattaggggctaaacacatatttgtcaaatgaatgagcctaaagggccaagctgcttgctgactggtctagcagtggaattagcctgggaagaaggggggttccgggagcaaagggatctgaaactgctgagggagagcccagctatggcaacacaagagcctgggtatctctggcaagacagggtgagagtctggggcaggtggggaaatgaatgtgatccagcgaggaaggggaattctgaggagagccaatgcaggcccatctggtgcagaacctacaccactctgcaggagggaaacgtatttgaaccctgccatgsccccatcaatcaaaaaagattagaattggtattttacttgaaaactaggaagaaatagtgatggctaatgttgtgtgccatcttggctaggccacagtgcc

SEQ ID NO: 488402 - DNA, 652 bp, Homo sapiens
ttcctattctcctaggagaatatgcatacttggaattgtaattttcagtaactgggataactcccatattggctactagacccactgagtagaaaggaaaactgagaagtccgtgaacctgttacagtgatgaaatcgcactctggctctaaccagtaggaagtggtgcacaccctaaatcactgggaaaggcaaactgccagagggagggagataagcaccatgaacatgcagggctcaccctgataaagcactggggtctagtgtcctggggcacatcgggatacccctcccagacaaaggagacaaaggacaagctgctaaacctagagctccccacctccaagaagacaacacgttggactttgsatatatatattccataacttttggggggcccattttgattcacttactgttttttcaaattacttccagttttgattggtacccagaggaaaaatcagtttttcaagtgatgcagctgcagtaaaagaagctgggttcatcaacttacaaactggcagagccaactaagggcaaagtacccaaacagcttggctgctgtctgaagcccgcagtgagcccaagtggagaatgagagcctctgcattccatcaggaattaccttccctttgagaaaacatttctt

SEQ ID NO: 488403 - DNA, 607 bp, Homo sapiens
ctgcacagcctaacaggtcaaaccaccatatccttaggcacaatgtcatcacctaactctgtgaatttcaaactcactccagcaacccatagggcagtcagagtgggagggtagtagtgtgtgaggccaagaaattgaccrtcctttactgataggaagggagagaccaaagctgcctgaacctgagggcccacaggcccattataagagtctttggtaccatttgaaccaaaagagttgatagatcactgctatggatattcacaggttgaaggaaagataccaatgagatcgcacttgttttgacgttggaaacctagcttcattttcagaaccataacaaccaaaggttatctcaggctaggaagggactttttcttctcaataaactttctgttttggaataatttgagaagtacagaaaagttgcaaatatagtacagagagttcccatatgcctttgacccagttcccactagtgttaacatctttcattactatgctacatttgtcaaaactaagaaatgaacattggtacagtaccatcaattaaactgcagacgtgattcagatttcatcaatttttccactaatgttccaggatctc

SEQ ID NO: 488404 - DNA, 620 bp, Homo sapiens
tgcacagcctaacaggtcaaaccaccatatccttaggcacaatgtcatcacctaactctgtgaatttcaaactcactccagcaacccatagggcagtcagagtgggagggtagtagtgtgtgaggccaagaaattgaccatcctttactgataggaagggagagaccaaagctgcctgaacctgagggcccacaggcccattataagagtctttggtaccatttgaaccaaaagagttgatagatcactgctatggatattcayaggttgaaggaaagataccaatgagatcgcacttgttttgacgttggaaacctagcttcattttcagaaccataacaaccaaaggttatctcaggctaggaagggactttttcttctcaataaactttctgttttggaataatttgagaagtacagaaaagttgcaaatatagtacagagagttcccatatgcctttgacccagttcccactagtgttaacatctttcattactatgctacatttgtcaaaactaagaaatgaacattggtacagtaccatcaattaaactgcagacgtgattcagatttcatcaatttttccactaatgttccaggatctcatccaggatcccac

SEQ ID NO: 488405 - DNA, 559 bp, Homo sapiens
ccacattctaacaaaccactgaatttactttattacatttttgcctgactttctacaaagactgacatttttgtctcttttattctttgacatttccctaatgcctgtaactagtacctgataaatatctgtgaaatgaataaattgatcaaatgaataattactgctcctacaactgctatcctcctgcatacaacatatggtaccatataaatatttggtatttatacatgacatatggtacctaataaatacttgtggaatgaataaactgaatgatcaaatgaatgaatgaatgaatgactgtttctataattgctgtattactactactgctactaccactactgcagccctcttccttggcccttccaacttcattttctacattcaccttgaaaaattctgcctgagcaagaagtcagattcagagcaggaagttactgagycaacagcataatctttcctcaggttcctacaactgtaatgataactatctcaagaacacaaagcttttaattctgaaatgcaattttgtttgggggataggagaaagaga

SEQ ID NO: 488406 - DNA, 358 bp, Homo sapiens
aatgttttaagacttctctgtgggcaagacaaggagttcactatgacttgagtgtgaaaaaaagtttcacagaaacagagaaggaagtgggaagtggcaggaaatgggtgggctaacacttaccttgttgtctgctctctccgttaggattatattgacggcaagtgggaaaacaaattgcagtggcttatgtacagtagtttatttctctctcaaatgcaaatyagcccaggcaggaagtccagggttaatagggtggttctattccaacaaagctcctggctcctttcagttcataacgccactcttgtcttcatgtcttatggtcccagatgacagcatcctcattccaggactg

SEQ ID NO: 488407 - DNA, 531 bp, Homo sapiens
ttcaatttatttctggctgcaaaaaaatcgtgcccagagtcaagccatggtaatatgtaataacgttatgtttcagttggttaatttttgcttcctttaaacactgaagactcaagcaccaaattgtttcaattatttaaaaaataaaccaatgctcaggttagtacagttctttatttatttgatacgaataaatgaagaaactgttggcagttgctcacttcgacagtgaatagggtttggcttgttgactgagtggcgaaggatttggatatgaatattttcagttggcagtaaggaggagaaagaattttctattttctttttgacattgtgagtataagaaatgctttgtgctgttatcctgacaaccttacaaatcaaaataagaaagaaatggtaacctacagctttcagtggaagataataagtrggggaaaagacaagtatattttcattctcaaaagggtaaaatctgtcagtaggaggaagaggaactctcattttgaggttaaagtataaaatattaac

SEQ ID NO: 488408 - DNA, 530 bp, Homo sapiens
actcataatcccctggggttttgccacaacatccatcaattcagttcttctctcagtaatgcatggataccattcaaaatatatttctaagtataactcctttgccatttttccacctaaaaagtaatctctactacaggatgaagaaaagtcaaagaacaaacaatatataattgagttccgtgccaagtacaacttcttaagacttaagttgtatacattaagcagtcaatctcaaccattcaactttggcaattcttttttttwaaaaaatctgcagggctctttaagtatcagcatctttggaatcaattatccatcttctaatgtacactggtatttcttttagattttgggtccatagatacttcttaattagttgggctttttattttttttgttttattttccttaaagaaaggaaaagtacctgaacagcctatcaaaatcttctgtatcccactaagtctagggtcactccttttggttttaggttgaaactgctgcctaagtagccaaataaccaagca

SEQ ID NO: 488409 - DNA, 625 bp, Homo sapiens
atgatgaggttagtcagccctgtagtcagatgatagaccttcctacgtaaggctatttagacacttccttctgcatgtagagtttctaattaactcctgaactcataatcccctggggttttgccacaacatccatcaattcagttcttctctcagtaatgcatggataccattcaaaatatatttctaagtataactcctttgccatttttccacctaaaaagtaatctctactacaggatgaagaaaagtcaaagaacaaacaatatataattgagttccgtgccaagtacaacttcttaagacttaagttgtatacattaagcagtcaatctcaaccattcaactttggcaattctttttttttaaaaaatctgcagggctctttaagtatcagcatctttggaatcaattatccatcttctaatgtacactggtatttcttttagattttgggtccatagatacttcttaattagttgggctttttattttttttgttttattttccttaaagaaaggaaaagtacytgaacagcctatcaaaatcttctgtatcccactaagtctagggtcactccttttggttttaggttgaaactgctgcctaagtagccaaataacc

SEQ ID NO: 488410 - DNA, 633 bp, Homo sapiens
aacagagatgtagacccttagtagcaactcaataaatgcactgatgattaatttaaagctgctgcccagagggcactgatttttcattgagccaaatttcaaatcaatgtattacatttctttcttatgaatgatatcgtctaaaaaggaaagggcaaataaaaagttagcaaactccttcctggcatgtattgatcctcaaatattgaggcatatattagaatcaactgagttcattgcaacggaaaattaatacacccaactagcctcaaaagcacaagcattttacaatttctgagtggtttaaaaatatgtacacattttttaatgtgtatgggttrgtaggtgcagcaaaccaccatggcacatgtatacctatgtaacaaacctgcatgttctgtacatgtatcccagaacttaaagtaaaatttaaaaaaatatatgtacacattttaaaagtctcattaagtatgtaacaccagcaaactgatgtttagagaccattacttaatctcatctctgccattcctgattgttggaggcgatgatgtgcctatggtgtttgaacttcagaacagcacacagcttttgaatggcagtgacacagcctcagcagggagtgtgccttgtaaa

SEQ ID NO: 488411 - DNA, 471 bp, Homo sapiens
tcatcctggggtctgtctttatcatcactttagtggaatttcaaaagaaaaccaagtggtgcgtgtgtcccatttgccatctttacccaaacttcctggctttctttccgatcttttctaatgtgcctcagggcctttacataggctttttcttccttaaatctcaccctggtctttgcccaatttcttctctttctttagacctgagcttaaaggtcactttttcaggggcaggtcctgatttcccaatccatcatccttgtaaatcacactttactctttcataatgtccttgtacttctccttggtagcacttatcacaagtcttagtgttgtgcagtaataacttgaaatattcactttgggttkttttccttccacaacttatccatgacctttccccaaatcagatgcatccatttactcaaggacaagtataatttttataaagggaatgacaaaaacaagaaa

SEQ ID NO: 488412 - DNA, 588 bp, Homo sapiens
gctgattcttctgttccacttagtattgggagggctgtaattgtctgaaggctgggacattcattcacattgctggaagttggtgttggctgttggctgggagctcagcaagggctatcaatcagagttccctggttctgctccaggtggcctctccrtcttggtggctgcattccaagaacaaaggtgaaaactacagatcttagggcccaaccttggaatgtatgcagtgtcacttctgtcacagtttattggtcaaacatggagccaacccagattcaaggagaagggaagaagactccatcactgtattagtcggttttgcattgctgtgaagggatactggagactgggtaatttataaaggaaaaaggtttatttggctcacagttctgcagactgtacaagaagtgtggtgctgacacctgcttctggtaaggccccaggaagcttccaatcgtgtaaggtgaaggagaagcaggtgcatcacatggcaagagagggaacaagagagtgaggggtgggggagatgccacgttttaaaacaaccagctcttgcctagaggaaaagagtgagaacttacccat

SEQ ID NO: 488413 - DNA, 588 bp, Homo sapiens
gctgattcttctgttccacttagtattgggagggctgtaattgtctgaaggctgggacattcattcacattgctggaagttggtgttggctgttggctgggagctcagcaagggctatcaatcagagttccctggttctgctccaggtggcctctccgtcttggtggctgcattccaagaacaaaggtgaaaactacagatcttagggcccaaccttggaatgtatgcagtgtcacttctgtcacagtttattggtcaaacatggagccaacccagattcaaggagaagggaagaagactccatcactgtattagtcggttttgcattgctgtgaagggatactggagactgggtaatttataaaggaaaaaggtttatttggctcacagttctgcagactgtacaagaagtgtggtgctgacacctgcttctggtaaggccycaggaagcttccaatcgtgtaaggtgaaggagaagcaggtgcatcacatggcaagagagggaacaagagagtgaggggtgggggagatgccacgttttaaaacaaccagctcttgcctagaggaaaagagtgagaacttacccat

SEQ ID NO: 488414 - DNA, 588 bp, Homo sapiens
gctgattcttctgttccacttagtattgggagggctgtaattgtctgaaggctgggacattcattcacattgctggaagttggtgttggctgttggctgggagctcagcaagggctatcaatcagagttccctggttctgctccaggtggcctctccgtcttggtggctgcattccaagaacaaaggtgaaaactacagatcttagggcccaaccttggaatgtatgcagtgtcacttctgtcacagtttattggtcaaacatggagccaacccagattcaaggagaagggaagaagactccatcactgtattagtcggttttgcattgctgtgaagggatactggagactgggtaatttataaaggaaaaaggtttatttggctcacagttctgcagactgtacaagaagtgtggtgctgacacctgcttctggtaaggccccaggaagcttccartcgtgtaaggtgaaggagaagcaggtgcatcacatggcaagagagggaacaagagagtgaggggtgggggagatgccacgttttaaaacaaccagctcttgcctagaggaaaagagtgagaacttacccat

SEQ ID NO: 488415 - DNA, 588 bp, Homo sapiens
gctgattcttctgttccacttagtattgggagggctgtaattgtctgaaggctgggacattcattcacattgctggaagttggtgttggctgttggctgggagctcagcaagggctatcaatcagagttccctggttctgctccaggtggcctctccgtcttggtggctgcattccaagaacaaaggtgaaaactacagatcttagggcccaaccttggaatgtatgcagtgtcacttctgtcacagtttattggtcaaacatggagccaacccagattcaaggagaagggaagaagactccatcactgtattagtcggttttgcattgctgtgaagggatactggagactgggtaatttataaaggaaaaaggtttatttggctcacagttctgcagactgtacaagaagtgtggtgctgacacctgcttctggtaaggccccaggaagcttccaatcgtgtaaggtgaaggagaagcaggtgcatcacatggcaagagagggaacaagagagtgaggggtgggggagatgccacrttttaaaacaaccagctcttgcctagaggaaaagagtgagaacttacccat

SEQ ID NO: 488416 - DNA, 630 bp, Homo sapiens
tggtggctggggaagcactgactgggctcgcccaagatcctgtaccctttcccttccccttcagctactcgcttcccaagacccctctccatacaattactcggaatccctttaggacatccatgcctcacatgtcctccttcctactcatgactatggggcactgactcttccttattctcacgttcttgttcttcatttggactatgattctgcttcccacygcaatggtgcctgcacagggaactctcagactgaccatactctgagcccataccttggcctcagcttaggggcccatgaatccatgatatcaggatagcctcagtgaggccagcgagaagctaatagtagtgactggctaatacaaaacttaggcaggtggagatgactcttttacatggttccccagtcattcaccagacagactcagcctcttggattcagggggcaatttcaggctgccctagtttcttgtttcccaggtgatgttcagcaagaggcatatggctttccccctgatttgaagaggtggtacaaagccctctgccaggaaaagggattctacccagcaatgtgggctctgcttcctctggtggagaggggcctcatgagcccctaggatggaga

SEQ ID NO: 488417 - DNA, 318 bp, Homo sapiens
tagaatatttactatctgtccctttacagaaaacattgccgattcctgccctaaaacaaaacaaactcagaaaagytgaaagtaaaagagtgcgcaaaatgtgtggcagacaaataaaaaagtctctgcccacatgaaaccttgcaaatgacatcatccctcactgggtgctggttctcctccagtaccttcactgccctcagccagcagccacagtgggatgggagcagctccagacgcgaaagtgcagggcttggcacaaggcggggctgggtgtctgtgcctcagtagaacgatgggctttgcccagccatccag

SEQ ID NO: 488418 - DNA, 596 bp, Homo sapiens
tttgtttaaaaaaaaaagagtctcaaatcagcagttttgccataggtttctttctttttttttttttttaaaagagtgttcttggccgggtgtggtggcttatgcctgtaatcccagcaccttgggaaaccaagttgggcagataacttgaggtcaggagttcaagaccagcctggccaacatggtgaaaccccatctctactaaaaatacaaaattagctggtcatggtggtgggcacctgtaatcccagctacttgggaggctaaggcaggagaatcgcttgcacccaggaggcagaggttgcagtgagccaagatcatgccactgcactccagcccaggtgacagagtgagactccacctcaaaaaaaagagtattatttgaaaaattatcaaaacaatatatctattttgattaaattgtcttcatttttatatagcatttactttgctgttttctgaataaaatcctggaagattagtttatctgggtataaaatttgaggttggcagttayttgcttttagctccttcgagattattatcccattgtcttctggcctctgttgttcctgaatagtcacctcagtcaaatg

SEQ ID NO: 488419 - DNA, 536 bp, Homo sapiens
tgtccctccttattcaggccttatctcctccccaagacacacacatgcatgcgcacgcgtgcgtgcgcacacacgcgcacacacacacacacacacacttgtcgagacccagtaatctaccctgcttctttggtggtgatggtaattgctttggaaactcttataaaaatgaaattaccctgtgtatttattagttaggtgctcagcatctctcttcctggtaaaattttagttctgtccagagcaggaaacttaaccattctcttctcagtcatgtgcccataacaatgtccaacacactgtgtaaacatctgttcaaatgcactgcattgaatccagttgaagtgatttcaaaggaaataaatgaaactgttaaaagatggatatgtttttggcttgagggctcattcaaaaggaacaaagctgctaaaattaagtattggccatgaattamtctagactttcaatagaaaagaacatccaccaggcatggtgacttgctcctagagtcccaggtacttggaaagctgaggtgg

SEQ ID NO: 488420 - DNA, 611 bp, Homo sapiens
acttttgggttaatgctgaaatgagttaagactttggggagctgttgggaaggcatgattcattttgaaatgtgaggacatgagatttgggaggggccaggggcagaatgatayggtttggctgtgtccccacccaaatctcaacttgaattgtatcttctagaattcccacatgctgagggagggacctagcagggaggtatttgaatcatgggggccggtctttcccatgctattctcgtgatagttaataagtctcatgagatctgatgggtttatcaggggcttccacttttgctttttcctcattttcttttgctgccaccatgtaagaagtgccttttgcctccccccatgattctgaggccttcccagccatgtggaactgtaagtccaattaaacctctttttcttcccagtctcaggtatgactttatcagcagcatgaaaatggactaatacatgcactatgaatcataggtcacaattaacccagtttcatacacctgaggtccgatttacaaaataaaatgattgtcatgatatattatttaaaaataggagaagtttggcatacaaaagacactcctttaaaaatagtagaagttaaa

SEQ ID NO: 488421 - DNA, 617 bp, Homo sapiens
tgcctcctccagagagctgtaacctgggaaatgtcacttagcaacccagagctcatatcctccaatgtcaaatggggatgtcggtatagcatatgataatacacattatatcatggctggcaacaagctctgatgtgtttacttaacacatttgtgtttgtgcataatatattattgtatatttcattattcagaaaagtatttacactaatatattattgctattattaaataaaatttccaataattttaatattttaattatataacatagtaatttattgatcacaaggatttttgaagggtcaagtggaaatacaagtccagcattcctgaccaatgcccagcattttgccaacacccagtaaatgctatttggtgataataggaggaggaagagtatcattattattgttattatcatttaataattatttgtgagatgagttgctgtakgaattcaaaagaattaaaatttgagtcttcagaaatagtctaagtttcagaaactgttttctgcaatccaatcaagcctttccttaagtaccccagactctctcgcagcatccatattctgtaaacagaggttaaacacagagcttcagtctacccgcacc

SEQ ID NO: 488422 - DNA, 617 bp, Homo sapiens
tgcctcctccagagagctgtaacctgggaaatgtcacttagcaacccagagctcatatcctccaatgtcaaatggggatgtcggtatagcatatgataatacacattatatcatggctggcaacaagctctgatgtgtttacttaacacatttgtgtttgtgcataatatattattgtatatttcattattcagaaaagtatttacactaatatattattgctattattaaataaaatttccaataattttaatattttaattatataacatagtaatttattgatcacaaggatttttgaagggtcaagtggaaatacaagtccagcattcctgaccaatgcccagcattttgccaacacccagtaaatgctatttggtgataataggaggaggaagagtatcattattattgttattatcatttaataattatttgtgagatgagttgctgtagraattcaaaagaattaaaatttgagtcttcagaaatagtctaagtttcagaaactgttttctgcaatccaatcaagcctttccttaagtaccccagactctctcgcagcatccatattctgtaaacagaggttaaacacagagcttcagtctacccgcacc

SEQ ID NO: 488423 - DNA, 588 bp, Homo sapiens
agaagagcctcatcaggatcagctatagaatttgcctaatgcaaatggcattcagggcctcttgctaaaaaaagtattaagtatgacaagacagcaggagcagagcattgggccaagcacaggtccttctgtgtaggggcctgcgcaagttccaggctgcaccccatgagacaggccctactgcaaagagctggaaagcattttcatactccttgttttttgaaatggagtctcgctctgtcgcccaggctgaagtgcagtggcacaatcttgggtcactgcagcctccgcctcccaggttcaagcgattctcctacctcagcctcctgattagctgggattacaggtgcccaccaccacacccagctattttttgtatttttagtagagatggggtttcaccatgttgaccaggctggtttgaaactcctgacctctgktgatctgcctgccttggcctcccaaattgctggattacaggcgtgagccaccgcatttcttaaaaggcgctcacccgctggactcattccctcaggaggcatttctctgagtactgcacatggaccactgaaaacaggtggaacccct

SEQ ID NO: 488424 - DNA, 588 bp, Homo sapiens
agaagagcctcatcaggatcagctatagaatttgcctaatgcaaatggcattcagggcctcttgctaaaaaaagtattaagtatgacaagacagcaggagcagagcattgggccaagcacaggtccttctgtgtaggggcctgcgcaagttccaggctgcaccccatgagacaggccctactgcaaagagctggaaagcattttcatactccttgttttttgaaatggagtctcgctctgtcgcccaggctgaagtgcagtggcacaatcttgggtcactgcagcctccgcctcccaggttcaagcgattctcctacctcagcctcctgattagctgggattacaggtgcccaccaccacacccagctattttttgtatttttagtagagatggggtttcaccatgttgaccaggctggtttgaaactcctgacctctgttgatctgcctgccttggcctcccaaaktgctggattacaggcgtgagccaccgcatttcttaaaaggcgctcacccgctggactcattccctcaggaggcatttctctgagtactgcacatggaccactgaaaacaggtggaacccct

SEQ ID NO: 488425 - DNA, 589 bp, Homo sapiens
agaagagcctcatcaggatcagctatagaatttgcctaatgcaaatggcattcagggcctcttgctaaaaaaagtattaagtatgacaagacagcaggagcagagcattgggccaagcacaggtccttctgtgtaggggcctgcgcaagttccaggctgcaccccatgagacaggccctactgcaaagagctggaaagcattttcatactccttgttttttgaaatggagtctcgctctgtcgcccaggctgaagtgcagtggcacaatcttgggtcactgcagcctccgcctcccaggttcaagcgattctcctacctcagcctcctgattagctgggattacaggtgcccaccaccacacccagctattttttgtatttttagtagagatggggtttcaccatgttgaccaggctggtttgaaactcctgacctctgttgatctgcctgccttggcctcccaaattgctggattacaggygtgagccaccgcatttcttaaaaggcgctcacccgctggactcattccctcaggaggcatttctctgagtactgcacatggaccactgaaaacaggtggaacccctg

SEQ ID NO: 488426 - DNA, 577 bp, Homo sapiens
aggatcagctatagaatttgcctaatgcaaatggcattcagggcctcttgctaaaaaaagtattaagtatgacaagacagcaggagcagagcattgggccaagcacaggtccttctgtgtaggggcctgcgcaagttccaggctgcaccccatgagacaggccctactgcaaagagctggaaagcattttcatactccttgttttttgaaatggagtctcgctctgtcgcccaggctgaagtgcagtggcacaatcttgggtcactgcagcctccgcctcccaggttcaagcgattctcctacctcagcctcctgattagctgggattacaggtgcccaccaccacacccagctattttttgtatttttagtagagatggggtttcaccatgttgaccaggctggtttgaaactcctgacctctgttgatctgcctgccttggcctcccaaattgctggattacaggcrtgagccaccgcatttcttaaaaggcgctcacccgctggactcattccctcaggaggcatttctctgagtactgcacatggaccactgaaaacaggtggaacccctggc

SEQ ID NO: 488427 - DNA, 540 bp, Homo sapiens
attgaatgggccccagaaaatatcctgattgccagacagatggaagatggatagacagaagcagctaaggcacttgtcycccctgctccaggtctctgggagaccctcccattgcttgacttcaaacctgttgtccttgctttttcttgcaaatatcggaaccccagatcctctggacttagcacaggctgagacatggcagcacaaagtgatggccagaaaccactccagcaggttggttcactcaaactcagaaagtcttgggctcaatgtttcctgcccttctttactttacacacatgcattttaatggaaatacagttctttcaatatgcaattcctttttcctctaccaatcaaagtatttacaaagcacttgactcataagaaggcttttattattgacagaagttggaagctcctctcccagctctgattcatgttccatttagagtgaaacatatggggaacaagaactctctgtttcacaatctgactcttaacggttctaagggccaattctgctcttcccaggactag

SEQ ID NO: 488428 - DNA, 540 bp, Homo sapiens
attgaatgggccccagaaaatatcctgattgccagacagatggaagatggatagacagaagcagctaaggcacttgtcccccctgctccaggtctctgggagaccctcccattgcttgacttcaaacctgttgtccttgctttttcttgcaaatatcggaaccccagatcctctggacttagcacaggctgagacayggcagcacaaagtgatggccagaaaccactccagcaggttggttcactcaaactcagaaagtcttgggctcaatgtttcctgcccttctttactttacacacatgcattttaatggaaatacagttctttcaatatgcaattcctttttcctctaccaatcaaagtatttacaaagcacttgactcataagaaggcttttattattgacagaagttggaagctcctctcccagctctgattcatgttccatttagagtgaaacatatggggaacaagaactctctgtttcacaatctgactcttaacggttctaagggccaattctgctcttcccaggactag

SEQ ID NO: 488429 - DNA, 666 bp, Homo sapiens
aaagtgggtacaaatatgactgctgaactgcccctgagctgctactctgggcacactgcctgtggggtagccctgctccacagggagcagtacagctgctgctgcctcaataaaagttgctgtctaacaccaccacttgtgcttgaattctctcctgggcaaagccaagaatcctcctgggctaagccccagtttggggtcttgcctgtcctgcatcagttgcaaatggtaagctgataagaaatgaaaatgtaaggaaaactcctacataccacccagggagaagcccactcccaggcagcatcaagcccagaaggaagcaaatggggtttgcaggactgcttggtgtttgtctgtgcaacagccactgggcctggtacggggcgagtatgtgggcagaaagaggagctggcaagtaagagttagctttaaaaagatgctgactctgggctccccatttggccatggcatcaaacgctsctgccaagtaatttggctcacaaatattcaccatatgagaatatctgagcattaaaaaacaaacaagaaaacaatcaggaaccaagtacctcagctggctggacaaaaaggcatatgcttacaagccaggagatgggtgtgcaggctactgagtgtcacaagaagtgcagcttggccaattgtgac

SEQ ID NO: 488430 - DNA, 666 bp, Homo sapiens
aaagtgggtacaaatatgactgctgaactgcccctgagctgctactctgggcacactgcctgtggggtagccctgctccacagggagcagtacagctgctgctgcctcaataaaagttgctgtctaacaccaccacttgtgcttgaattctctcctgggcaaagccaagaatcctcctgggctaagccccagtttggggtcttgcctgtcctgcatcagttgcaaatggtaagctgataagaaatgaaaatgtaaggaaaactcctacataccacccagggagaagcccactcccaggcagcatcaagcccagaaggaagcaaatggggtttgcaggactgcttggtgtttgtctgtgcaacagccactgggcctggtacggggcgagtatgtgggcagaaagaggagctggcaagtaagagttagctttaaaaagatgctgactctgggctccccatttggccatggcatcaaacgctcctgccaagtaatttggctcacaaatattcaccayatgagaatatctgagcattaaaaaacaaacaagaaaacaatcaggaaccaagtacctcagctggctggacaaaaaggcatatgcttacaagccaggagatgggtgtgcaggctactgagtgtcacaagaagtgcagcttggccaattgtgac

SEQ ID NO: 488431 - DNA, 461 bp, Homo sapiens
cagggtttctagaacacaacaccctaccttctcctgtagacattttagtccgtcctcgctcctgcactgtggctttcacagtcaaatgtgagttgaccagccgtcatttgtgagctgtgagtggtatttttggaacttgcccacccccattcccccagagtcctgtggaggtcatgctcatgggttctgccaccgggacaggaaagtttggacattactaccaaaaaaatgcaacgtgactaagcaccgtttaaaatagcctttcttattctcttgtaaaattgcagggatttccatgacagatgtcgttttagtcattttaaaacttcagcgcgctgagcctcatcagcatatttttatttttgacatttcatattttagagtggattgaaaactaatttgatccrtttcaatttggaacatccctcaaggtcattttaccagcatttaggccagtgttg

SEQ ID NO: 488432 - DNA, 551 bp, Homo sapiens
ccattgaaaacaacccatttacacgtcagacaaaggaaataaaaatcgctgacactctgttttgcaasgacaaattaatttgccccagaatggcatgtttgccaccaatctcattaaaagtactatgagattatcaggaaaaattaatacaagctgttggttatcagcgacatcatttcagctcacaaaggcaagtcctagttgtcagtttgctgctgggggcaaggacaggcatttacaaagaaagtcatattcaattagaaaccatagctggagctggcatttgcggttcctctgcaccggatcagcttgaagaacaattgcactgcttctttttggcttgaacttgaaagcaagggcatttatggcagcaaggggaaacaagtcctttctcaaatgtgcttatgagagaacagagaagtctgcttggaaatgtggaaactgaggctctatggcactgagcatgctcaggagacacaggattggataactattaaaaagtgtcttggaactattcatctacaaaacatggggctggatgaatctgctga

SEQ ID NO: 488433 - DNA, 551 bp, Homo sapiens
ccattgaaaacaacccatttacacgtcagacaaaggaaataaaaatcgctgacactctgttttgcaacgacaaattaatttgccccagaatggcatgtttgccaccaatctcattaaaagtactatgagattatcaggaaaaattaatacaagctgttggttatcagcgacatcatttcagctcacaaaggcaagtcctagttgtcagtttgctgctgggggcaaggacaggcatttacaaagaaagtcatattcaattagaaaccatagctggagctggcatttgcggttcctctgcaccggatcagcttgaagaacaattgcactgcttctttttggcttgaacttgaaagcaagggcatttatgrcagcaaggggaaacaagtcctttctcaaatgtgcttatgagagaacagagaagtctgcttggaaatgtggaaactgaggctctatggcactgagcatgctcaggagacacaggattggataactattaaaaagtgtcttggaactattcatctacaaaacatggggctggatgaatctgctga

SEQ ID NO: 488434 - DNA, 551 bp, Homo sapiens
ccattgaaaacaacccatttacacgtcagacaaaggaaataaaaatcgctgacactctgttttgcaacgacaaattaatttgccccagaatggcatgtttgccaccaatctcattaaaagtactatgagattatcaggaaaaattaatacaagctgttggttatcagcgacatcatttcagctcacaaaggcaagtcctagttgtcagtttgctgctgggggcaaggacaggcatttacaaagaaagtcatattcaattagaaaccatagctggagctggcatttgcggttcctctgcaccggatcagcttgaagaacaattgcactgcttctttttggcttgaacttgaaagcaagggcatttatggcagcaaggggaaacaagtcctttctcaaatgtgcttatgagagaacagaraagtctgcttggaaatgtggaaactgaggctctatggcactgagcatgctcaggagacacaggattggataactattaaaaagtgtcttggaactattcatctacaaaacatggggctggatgaatctgctga

SEQ ID NO: 488435 - DNA, 314 bp, Homo sapiens
ggttttgtgacttacccattggggggtgtctggtgagaagctgtggtgagcggaaagacgacatgaaagtaggtatcattgagaagcagcagcagagtgcgtgaattctaaaaccattggtggtgaggtggttaaaaaacattttccctcctgtagctatcatgaccaccagacttttgtggggtaggatagagaaaaccgtaagcacagttcagggcctttcgtggatgtggcgtgggtgcagagggaggctccctggtgggactcgccccygctgactggactgcacgtctccgtccactgcatccctgcac

SEQ ID NO: 488436 - DNA, 596 bp, Homo sapiens
agcagctggattttgctggttcccaagagcaaggaaaattcccttgttttaaaragccagatccatttggaatagtctttcttccccacatattacagcatgaacgtgactctaaagtacctgccgagggtctttctttttgtgacggtgggcgctgttccccactgtcgtggacttctcacagcgctcagtgtgcattcagttgcttctctccataacgcctctcagctaactgtgctgtttctgtgctcctgggttgttaatgttcaagtcttggctctataccattttccttatcatttaggattccactgggaagacatcactaagttgtgaaatcaaacttcatgagttggctgagatcatagggttgggtgtcctctgagcacttgcaggctgggggaagacagaaaacctggacaccttgcaattgtttgcaacaaagtggaaaaactaaagtagttttgatatgtgcattagtttgcttggactgctataacgaaatactacttggtggcttaaacaacagaaatttcttttcttacagtcctggaggctggaagtgcaaaaggaaggtgtcggcaagatcgtttttt

SEQ ID NO: 488437 - DNA, 596 bp, Homo sapiens
agcagctggattttgctggttcccaagagcaaggaaaattcccttgttttaaagagccagatccatttggaatagtctttcttccccacatattacagcatgaacgtgactctaaagtacctgccgagggtctttctttttgtgacggtgggcgctgttccccactgtcgtggacttctcacagcgctcagtgtgcattcrgttgcttctctccataacgcctctcagctaactgtgctgtttctgtgctcctgggttgttaatgttcaagtcttggctctataccattttccttatcatttaggattccactgggaagacatcactaagttgtgaaatcaaacttcatgagttggctgagatcatagggttgggtgtcctctgagcacttgcaggctgggggaagacagaaaacctggacaccttgcaattgtttgcaacaaagtggaaaaactaaagtagttttgatatgtgcattagtttgcttggactgctataacgaaatactacttggtggcttaaacaacagaaatttcttttcttacagtcctggaggctggaagtgcaaaaggaaggtgtcggcaagatcgtttttt

SEQ ID NO: 488438 - DNA, 596 bp, Homo sapiens
agcagctggattttgctggttcccaagagcaaggaaaattcccttgttttaaagagccagatccatttggaatagtctttcttccccacatattacagcatgaacgtgactctaaagtacctgccgagggtctttctttttgtgacggtgggcgctgttccccactgtcgtggacttctcacagcgctcagtgtgcattcagttgcttctctccataacgcctctcagctaactgtgctgtttctgtgctcctgggttgttaatgttcaagtcttggctctataccattttccttatcatttaggattccactgggaagacatcactaagttgtgaaatcaaacttcatgagttggctgagatcatagggttgggtgtcctctgagcacttgcaggctgggggaagacagaaaacctggacamcttgcaattgtttgcaacaaagtggaaaaactaaagtagttttgatatgtgcattagtttgcttggactgctataacgaaatactacttggtggcttaaacaacagaaatttcttttcttacagtcctggaggctggaagtgcaaaaggaaggtgtcggcaagatcgtttttt

SEQ ID NO: 488439 - DNA, 584 bp, Homo sapiens
atataattttttcacactaatttttttctatgtagaagaatttaaagattatgaatcatacaaatttaagtataaatgcaaattacataggatggatactgtttgtgaggccttgtgagtgtgatatgcacgtttgtgtgtttggtaggatgtacacaaaatacacaaagtacacaaagtgtgcatgtgtatttgtgtacacaaagatattaacagtaattatttctgggtattgagattactggtaatatttgctttctattaaaaaataagatataattagttatttgatttttaatttctctttactactaacatctcttaaacatatcaaaagttgaattgcaacttcaaaaatatgatttgtatattttctttaataaacacacaatgatcaatgttttattaagtatagtccctatatacctaaatatttattaaatggatgaaaagagttaaaagaaaaattagtaacaaaaaactttaaaccrccagtaatacccaaaggcttgaaagaacatctaattttactgttgctcaatataaaaagatttttttgttatttaactgaaagacaacaggca

SEQ ID NO: 488440 - DNA, 626 bp, Homo sapiens
acttgaatttaaatgttttaaactggaacttggtgttcagtttggtcatataaactgagtgtatgttgggcaaaaatttgtctctggaatttgttttctttttaatggagagatatttctgtgtatgaacggttggacttgatggccttattcccattcattatttcttgtccatatatgaaggtgtgtggggaggggtgttggggggtgmgagagacagagacaaggaaaaagtaagaaaagacagagacagataggcacagaaagagctcttgttccataaatttatccaagaatgtcaagagctaaccttcactttaagctagaagtaaaaaatgaatggcttaggcctggccaagtacagttcaaattagaaaatggaaacctcatgcatggagtcatttgaaaatgaataatacttaatgctgtattttctctattattccactgtgagtctccttaagatgggaatggggcatacactgtcaactgtcctaggttagagcaggacctaagaagggaaataggtgctaaagaacagcctacaagctcaagaaacaagaatgtctctcttctagaactcccactgtttgcacttaaattctgagaaagaatggcatggtcta

SEQ ID NO: 488441 - DNA, 598 bp, Homo sapiens
agtacagaaggatttgattactggagggtgaaagtcatgatgtggcaaggagctaaacatcagtttgattaacatgtagattatttccattttttttttgtccgttaaaaattatcctgctaagaacatttgtatacaagtctttgtgtgaacataagtttccatttctagccaataggtccctagaaatagaattgcttgatcatatggtaacttcatgattaatattttgagaagttgtcaagctcttttctaaatcagccacatggttttacacttcccaccagcagtgttagagaattgcaatttctctacattatcaacagtgcttgttattatatttttttattatagccatattagtaggtatgtgaggtacactctccttacagttttggtttccattttcctcatgtctaaygatggagcatttttccataattaagcatatttccatgtctctttggccatttgtatatcttatttggggagatgtatttcaaatattttgctcatttttaattgtattatttgtcttctagtattgaggtataagatacagatatgagacttgtatataagatatgcaagatatatg

SEQ ID NO: 488442 - DNA, 596 bp, Homo sapiens
tcaggcccaaatacctttaaaaataaattttatcaaatatttaaaatacatataactccagcctcacctatttttttattttttattttttattgagactgattctcactccattgcccaagctggagttcagtggcaccatcttggctcactgtaacctccacctcctgggttcaagcagttctccggcctcagcctcccgagtagctgggattacaggcacgtgccaccacacctggctaatttttgtatttttagtagagatgaggtttcaccatgttggccaggctggtctcaaactactgacctcacgggatttgcccaccttggcctcccaaagtgccgggattacaggcgtgagctatcccacgtggcccaattttccctatattcttgaaggagatagaaaaagagaaaatactccttctttcactgatgaggctaaaataggttttatagcaaaaccaaacaagggcaaagcaaaagaaattacaggcttatcacactcatgaacaacactgcaaaaatcctatggggaatactgaaatcttgaarataatgcattattaccaacttgggttaactgcacaaatcca

SEQ ID NO: 488443 - DNA, 614 bp, Homo sapiens
aaaatgtgtaaataaccgaacacacacacacacacacacacaccacacacacacacacacacacacacaaggaagaaacaaaaatatatccatgtagcttatcatggtgcaataaataaacacacttggagactgtccttgcttaaagaatgataacccataaagacctttatatttttctagtttttttctcattgtcacgtagtttgcaagattacttgaattttaccccaaagaaataaaagaggggtctagagttctggagcaaagaataaacaaaatagtcccaggcacagattatagatggagaaggttggaccagatggtggaatgtgatggatggctacggtcctcaaggatgcggccccagcaccttacacttaaggcaaaggggtataggaagtaacagtgagtgtccaatgctagacaatgggtcaagattcagaagctgttaggttgtagcaaatatttgcttatccccccaaaagaacctagatggtagatattawcatcaccattttatggcgaaaaaatatttacaaactagagtttgagatgacatgagcagaattcataggcacaatcagtaggagagtgagctagaatgtgaactt

SEQ ID NO: 488444 - DNA, 507 bp, Homo sapiens
tgcataaatttagtagggcaatctgatagtttagagttggtgtctgacatatgaaaggtaatttataatagtatatgctgggattacatatgaaagaagaaattcgtggttcatttagttcagttttctctgaatgttaggcctgaaaaagcataaaggaattggctaaattcaagcaggaaattagacacaaatctggatcaggatcctgatataagaggacactttctactatatgaatgtcaatagtaaaatattacctgccttcaatagaatagtatgttctaagagatgggatttggagccatacagatctagatmtttcacttactgtgtgaccttgggcaagttacttaacttctctaagcttaaatttcctgacctatgaaatgataaatgtgcccaccacattgttctatctgggatgtttattgaaataagctatccagagtttggctggatggcaagcagacaattaaacaccccaaaattagtagctattgttat

SEQ ID NO: 488445 - DNA, 624 bp, Homo sapiens
gatcattccacgaactacatggttagttgccttgttcctacaggactgaatagactcactttcttaagttagtgtcacgaaacgccccagtgggttttttatcctgtggcctagaaacatattctcgcctcagtcaggactggagttagtaagacattatttggcatgatttctgttaatatttattgaataaataaaaaatggaataaataatgctttatttgaaaagcaccacttagatgaaaaaagaagaaagaccagattttcaatgaatttaaatatatttagatcattatattactcaccacatcactgacatcacactcctagctttatatcttgtgtaaaaatggagtaattggccaaatgccctcatttgaacaggcatggaatgctgacagacatctacagggacctgggacaactcagcattgctgcatatgtaggtctgtgagataaaataaaagcacagtcccagttaaacttaaatgtaggtgaccagcaaatagtttctcagtrtaagtgtgtcccaaatatcatatatttgcttaatctggaaatgtttatgcagggattttgattttcaaataaatagataagatgaataggcagtgtattaattga

SEQ ID NO: 488446 - DNA, 605 bp, Homo sapiens
ctggagtgcttgaagaggtcctgaggatgaaattctcttgagctacggtcccccaatcacctagagaacactttttttaaaatacaaattcctgaactccatatatcagrtctattgaatcaatagctccaggagtattactctggaatctgtgtttatgattattatggcaaaacatacataaaagtagacagaatagtgaactccaagtgcccatcatccatctccagcaatcacctactcatgaccattctgttttcacccatccccttacctatttcccctccccaagtattataggatctgtatttttttaaaccagagaccctgaggcagtcagatcttggatgcaatctgggaaccactgatgcagacacagattaggagcaagggaatcctagggacaatgggggcaaagtctcagagaagtgagaggcaatggtatttgggggataatggcaagtaatttggagtgcctaaagggtggcaatagggataagggccaaaaggtcatcatggccatcggggccctgttaacagtagggtgtctttgtgagaagcataaaactccatctcctctgggcagaaaagcatctcttgctgag

SEQ ID NO: 488447 - DNA, 605 bp, Homo sapiens
ctggagtgcttgaagaggtcctgaggatgaaattctcttgagctacggtcccccaatcacctagagaacactttttttaaaatacaaattcctgaactccatatatcaggtctattgaatcaatagctccaggagtattactctggaatctgtgtttatgatyattatggcaaaacatacataaaagtagacagaatagtgaactccaagtgcccatcatccatctccagcaatcacctactcatgaccattctgttttcacccatccccttacctatttcccctccccaagtattataggatctgtatttttttaaaccagagaccctgaggcagtcagatcttggatgcaatctgggaaccactgatgcagacacagattaggagcaagggaatcctagggacaatgggggcaaagtctcagagaagtgagaggcaatggtatttgggggataatggcaagtaatttggagtgcctaaagggtggcaatagggataagggccaaaaggtcatcatggccatcggggccctgttaacagtagggtgtctttgtgagaagcataaaactccatctcctctgggcagaaaagcatctcttgctgag

SEQ ID NO: 488448 - DNA, 605 bp, Homo sapiens
ctggagtgcttgaagaggtcctgaggatgaaattctcttgagctacggtcccccaatcacctagagaacactttttttaaaatacaaattcctgaactccatatatcaggtctattgaatcaatagctccaggagtattactctggaatctgtgtttatgattattatggcaaaacatacataaaagtagacagaatagtgaactccaagtgcccatcatccatctccagcaatcacctactcatgaccattctgttttcacccatccccttacctatttcccctccccaagtattataggatctgtatttttttaaaccagagaccctgaggcagtcagatcttggatgcaawctgggaaccactgatgcagacacagattaggagcaagggaatcctagggacaatgggggcaaagtctcagagaagtgagaggcaatggtatttgggggataatggcaagtaatttggagtgcctaaagggtggcaatagggataagggccaaaaggtcatcatggccatcggggccctgttaacagtagggtgtctttgtgagaagcataaaactccatctcctctgggcagaaaagcatctcttgctgag

SEQ ID NO: 488449 - DNA, 575 bp, Homo sapiens
ctgttaagtgttggaatcccacgaggctgggctccagatgctccccatcctcactgagtgcttgctgaggatcttgtccacgcccagtttccaaggcacctctatgcagatgactcacaagctccggaccactcatccaactgcggttctgacatctccatccagatgccccaaaggcactcaagcccaatatgtccaaaattgacttcacgatctaccccaatgaactagttctctaggtctcggggcaaagcttcacccttcagaaaccttagtcatttaatacctctctctccctcagccctcaccaagtcctgtcatatttacttatcgtatctttgcattttgtacctttttccctgtatacttgtccatttctctctctctctaccaccatcatgcccaccattatggcccaagcaactatcatcccttgtctagattcttgcagatgccttgcttctgatgctccccacatttattgcaaatgctggtcacgctccaggtagagggaccttgccgaaacagaaatctgcttgtaacccaccccscttcctcctctaagtccactgctt

SEQ ID NO: 488450 - DNA, 570 bp, Homo sapiens
agaatttttacattctatcatttaagtctaatatttccttcttccctccttccccttgatttaaatgtagaatctggagaattctccacatggatgcaatctatttgaattatttagaatcaaataactttattgacaaccttatagcaatcaattttataagtaattatgaagataatgttctgatcacagaaaacaaattcataagccyttagagaaaatagatgactttggtgaacaaatcccaatgtgtttattatgtctattgtattcagatttctttcctccacctccctttttccagcaatgaatatcttgaggaagagacaatctatttaccttttcattcccaaatgataccaatgataattgcctagactacagaaagaaaagtcttatagtatattacatttcttataattaaaaaattgttaatgctataacatctttaaatctgttttcataaaaattgtttttaccaaaatagtacttaattacattctaacctccgtgtctttttataagattcctttaaagtaatatttaaaataccaaaagtaccttttgcaa

SEQ ID NO: 488451 - DNA, 570 bp, Homo sapiens
agaatttttacattctatcatttaagtctaatatttccttcttccctccttccccttgatttaaatgtagaatctggagaattctccacatggatgcaatctatttgaattatttagaatcaaataactttattgacaaccttatagcaatcaattttataagtaattatgaagataatgttctgatcacagaaaacaaattcataagcccttagagaaaatagatgactttggtgaacaaatcccaatgtgtttattatgtctattgtattcagatttctttcctccacctccctttttccagcaatgaatatcttgaggaagagacaatctatttaccttttcattcccaaatgataccaatgataattgcytagactacagaaagaaaagtcttatagtatattacatttcttataattaaaaaattgttaatgctataacatctttaaatctgttttcataaaaattgtttttaccaaaatagtacttaattacattctaacctccgtgtctttttataagattcctttaaagtaatatttaaaataccaaaagtaccttttgcaa

SEQ ID NO: 488452 - DNA, 544 bp, Homo sapiens
gctagaaagatccttaaaagattatctgttttaatcccttcattttcacagatgaggaaattttaatggccaactaatttctgatcggcaatcctcttaccactcttatgaaatgtaaaaaataaagaggctgatcctgagaggttaaagaaaatcagttgcttttctttataaccatgtatgcaaataacttttgcttgagacagatgatgttttccatttgaactcctattgtggagaaggggaaaatgaaaaaagtaacaaggatgaagacatgaacaaaaggcattgaacaaagaaagggaatattggcagactgggtcaaagaaccccaggctcccaggaaaaccyaggagagagaaacaacttctgtcatgggggaccagaagctatagctatgcaaggtgtttgaagagagccatggttttagttttgcctgaatgaaaatttaaagaattggccacttcctcagtgaacagttatcagagaagctcagagaaagagcttctctaacctcggctgtaagagaaatatgacttgtcag

SEQ ID NO: 488453 - DNA, 177 bp, Homo sapiens
tactggagaaacttgaaaggagatcaaggaagaggcagatgtcgagacagkcttcctaaatcagtggtgtcagagaatataaatcactaaaagcagcagttataacaacagccagtaatcagaccaatcagaacagacacaggctataaataaccactgcagcctaccagtgagtac

SEQ ID NO: 488454 - DNA, 177 bp, Homo sapiens
tactggagaaacttgaaaggagatcaaggaagaggcagatgtcgagacagtcttcctaaatcagtggtgtcagagaatataaatcactaaaagcagcagttataacaacagccagtaatcaraccaatcagaacagacacaggctataaataaccactgcagcctaccagtgagtac

SEQ ID NO: 488455 - DNA, 634 bp, Homo sapiens
gtggcagtcattcatggttcacttgtcattgcatgaacttgggatagctgttcatattgtgttcatttcagttgaatttatgtgtgtgattgttgtattacacatgttgaatttatttttttttaattaaaaaaattttttttgagatggagtttcgctcttgtcacccaggctggaatgcaatggtgtggtctcagctcactgcaaccactgcctcctgggttcaagcaattctcctgcctcagcctcccaagtagcgcaggtactcaccaccatgcccggctaatttttgtatttttagtagagacagggttttaccatgttgtccaggctggtcttgaactcctgatctcaggtgatctgcctgcctcrgcctcccaaagtgctgggattacaggcgtgagccactgtgcccggccatgttcatattaaaaaaacaattttattttaagcctacagcacccagtattttcaggcagcctcccaatcccaatactactaaccaggccccacgctgcttagcttttgagattggatggcatggctgtagaccatggtcatattttggcaagtgatgtcccttatagcagttcttacccttgatacaggatcctgtctggaatcacttgtaata

SEQ ID NO: 488456 - DNA, 611 bp, Homo sapiens
ctgctccatctgccagacacagcagcctgggcctggccgcccacttcccgcagacgtggccctgcccatccgtcaggatggcagctctgggtcaggccccagccagtctccagcagtgctcacaatagtctctgggagggcttgtccagcacattctgggcggccagcattttcttgggccataatggccccaagaaaacaaccgagaagtccaggcccttgtcagaaatacttctttttttttttgtctgttgttttcctgagagggagtctcactctgttgcccaggctagagtacrgtggcgtcatcttggctcactgccacctctgcctcctgggttcaagtgattctcatgcgtcagcctcccaagtagcggggattacagacatgcgccaccacgcccagctaatttttgtatttttagtagagatggggtttcaccatgttggccaggctggtctcgaactcctgacctccagtgatctgcttgccttggcctcccaaagtgctgagatgacaggcatgagacaccacgcccggccagaaatacttctcttatcccctaccccatcggcctgatgccatgccaccccacacaccaggtccccag

SEQ ID NO: 488457 - DNA, 611 bp, Homo sapiens
ctgctccatctgccagacacagcagcctgggcctggccgcccacttcccgcagacgtggccctgcccatccgtcaggatggcagctctgggtcaggccccagccagtctccagcagtgctcacaatagtctctgggagggcttgtccagcacattctgggcggccagcattttcttgggccataatggccccaagaaaacaaccgagaagtccaggcccttgtcagaaatacttctttttttttttgtctgttgttttcctgagagggagtctcactctgttgcccaggctagagtacggtggcrtcatcttggctcactgccacctctgcctcctgggttcaagtgattctcatgcgtcagcctcccaagtagcggggattacagacatgcgccaccacgcccagctaatttttgtatttttagtagagatggggtttcaccatgttggccaggctggtctcgaactcctgacctccagtgatctgcttgccttggcctcccaaagtgctgagatgacaggcatgagacaccacgcccggccagaaatacttctcttatcccctaccccatcggcctgatgccatgccaccccacacaccaggtccccag

SEQ ID NO: 488458 - DNA, 611 bp, Homo sapiens
ctgctccatctgccagacacagcagcctgggcctggccgcccacttcccgcagacgtggccctgcccatccgtcaggatggcagctctgggtcaggccccagccagtctccagcagtgctcacaatagtctctgggagggcttgtccagcacattctgggcggccagcattttcttgggccataatggccccaagaaaacaaccgagaagtccaggcccttgtcagaaatacttctttttttttttgtctgttgttttcctgagagggagtctcactctgttgcccaggctagagtacggtggcgtcatcttggctcactgccacctctgcctcctgggttcaagtgattctcatgcgtcagcctcccaagtagcggggattacagacatgcgccaccacgcccagctaatttttgtatttttagtagagatggggtttcaccatgttggccaggctggtctcgaactcctgacctccagtgatctgcttgccttggcctcccaaagtgctgagatgacaggcatgagwcaccacgcccggccagaaatacttctcttatcccctaccccatcggcctgatgccatgccaccccacacaccaggtccccag

SEQ ID NO: 488459 - DNA, 671 bp, Homo sapiens
tgtcatgctctatccccccatcttgttctctcctagacaaccatttcatacctcgtccactttcttcaacctgcagtacttggaaaagtccacacatttctatatcttccctttccccarcatttgtacctcacttctctgtctttacacttcttgctacaaaataaccatccagtgctccagtcaaagggttacctcatcttttagttactcagatccatttgcaatcgtcttttattcctcttttgctctcaagccatatcgaatacattagctaatcctgtccacattatcttcaaaaatatatccagaacctacccatttcatattgcctccactgctacccctttctttgagctcttcttcagtagctgccttaaaatgtctcttccatacattatggcatggtatcctaactgacatcttgtttccctacttgctctccttagtctgttgacaacccagcagccagaatgatcctggagagatgaaagccagagcacttcactcctccactcagaacccggtttcatttagtcaacatgcacgtcctttgagagtctcacccatctcccccatcctgtcccatcatgccctgtcacctctgtcctagtcactcactttttctttctgcttcctgtttctctaacatactaatcaccgaatcagtg

SEQ ID NO: 488460 - DNA, 671 bp, Homo sapiens
tgtcatgctctatccccccatcttgttctctcctagacaaccatttcatacctcgtccactttcttcaacctgcagtacttggaaaagtccacacatttctatatcttccctttccccaacatttgtacctcacttctctgtctttacacttcttgctacaaaataaccatccagtgctccagtcaaagggttacctcatcttttagttactcagatccatttgcaatcgtcttttattcctyttttgctctcaagccatatcgaatacattagctaatcctgtccacattatcttcaaaaatatatccagaacctacccatttcatattgcctccactgctacccctttctttgagctcttcttcagtagctgccttaaaatgtctcttccatacattatggcatggtatcctaactgacatcttgtttccctacttgctctccttagtctgttgacaacccagcagccagaatgatcctggagagatgaaagccagagcacttcactcctccactcagaacccggtttcatttagtcaacatgcacgtcctttgagagtctcacccatctcccccatcctgtcccatcatgccctgtcacctctgtcctagtcactcactttttctttctgcttcctgtttctctaacatactaatcaccgaatcagtg

SEQ ID NO: 488461 - DNA, 587 bp, Homo sapiens
taatcctactgatacaccttccagtaaacctcttcttgggttggtttctgtagctagcagccttactgactcacattccatttgttctctcctccacaatctcaagccccacattctggcaggccaagtctggcctgccttgttaatgacccagccaagcctgccctcctccccaaaggacatgtcatctcacactcctgtgtctctacacatgctgtgccttctgccagggatgtccttccctgaccttgtctacttttaacactcaatgcaaacatcacctctgcagcaatatggcttggatggctttgtgtcataattccccaccagcctgtgagcaacctggggtttagcatgctgtgcagcgattcctggggctcaacrcatgtggcttgaatgagggaatgaacattatagtcatgcgaggcgatctcaagtgttataactagatccatcaatctcttgcccaggcctgctgcctacctggctgttttcacgcatggaagagatttctgtgcgtcactgtggctcatttcctgccatgaggcactgctgtccctcatccattccaaacactggttcgattt

SEQ ID NO: 488462 - DNA, 665 bp, Homo sapiens
actaaagaatgtgatatgcttaggctttgtgtccccacccaaatctcatcttgaattatagctcccataatccccacatgttgtgggaaggacccagtgagaggtaattgaatcatagaggaggtttctgccgtgctagtctcatgatagtgagtaagttctcaagagacctgatggttttacaagggacttcccctttcactcgactctcattcttctccatcctgccaccatgtgaagaagtatgtgtttgcttcccctttcaccatgattgtaagtttcctgaggcctccccagccctggggaactgggagtcaattaaacctctttcatttataaattacccattctctggtatttcttcatagcagcaggagaaggagctaatacagaatgcaagtatgaagtctttatcaggccaaattttagtttgatttaacaaatattatatagcaaaggatgctcttttaaaaaaaatcaaggtacatttttaagtaattttttaatattcacttctcagtgaagaatcaatacagattaattagccttgagcaaacaaaatgcttcgatgcctatgtgccaggataagtaatgaccagagggatagkattcatgctatactgcaatctgttaattcttctgaacaggtgtttaaacactaattt

SEQ ID NO: 488463 - DNA, 582 bp, Homo sapiens
aggctgcaccatctgagacacggggcacctccctagtcctgccagagccgcagtagcagtggaccagagctggaaagtcacacatggagccttaaagtctttaagcaataagccacaactagtaccatggccccacctactgcaagagggctgagaaatgggaggagttcatagcatgagcaatcaataactgtcactgatatccagggaagtcgtctctgacacagggaaatctaagcaaagaccaactaaagaaagaagctacacagaaagttggagacaggatgatgtcatttatgattccaagaaatattctgtttgtctgccatttgtttccagtgaacarccacatcaaatctttaatttagatattttgataattaaatgcattaaaaatctgtctctatttctatgcttagttcaagtaatagcttacctcagtgattttaacagtcttacataccatatagtatcactgcccttacattacatccttcaataattatcccctcccgagtaaaatcataatacaagggctgacaaactcattcttgattgacacacatctcgactcctcactca

SEQ ID NO: 488464 - DNA, 582 bp, Homo sapiens
aggctgcaccatctgagacacggggcacctccctagtcctgccagagccgcagtagcagtggaccagagctggaaagtcacacatggagccttaaagtctttaagcaataagccacaactagtaccatggccccacctactgcaagagggctgagaaatgggaggagttcatagcatgagcaatcaataactgtcactgatatccagggaagtcgtctctgacacagggaaatctaagcaaagaccaactaaagaaagaagctacacagaaagttggagacaggatgatgtcatttatgattccaagaaatattctgtttgtctgccatttgtttccagtgaacaaccacatcaaatctttaatttagatattttgataattaaatgcattaaaaatctgtctctatttctatgcttasttcaagtaatagcttacctcagtgattttaacagtcttacataccatatagtatcactgcccttacattacatccttcaataattatcccctcccgagtaaaatcataatacaagggctgacaaactcattcttgattgacacacatctcgactcctcactca

SEQ ID NO: 488465 - DNA, 480 bp, Homo sapiens
  misc_feature (1)...(480): n = A,T,C or G
acgtggggccagggacgcgctcccggggtcctccccgccgagcccgcagcccagcacccggagcgatcccccgagcccgaggggcgtgggaaccacgcgcgcaagccggctgcccttccagtcccgggacgcttccccatcaggccagtgctaggcgggcggtcgggacccggggatcgcagcctccggagcgctcacctgggtggcgcaggccaaggacgcccatggacagcgcgacctcctcccattccacacacgcgcccacgaccaaagtgcgcatgctcgrcacctgngaccaataggaatctcggtccgagggtagctggggccaatcacagcgcgtctggcgtgtgggcggtgtctcctcgtgttacgcgtgcgcggaggggctgcgctacccggtcttgggtttttcatcggggagtgggagtggactgaaggcttggcgctccgcctcactgagccggctcagccagcgca

SEQ ID NO: 488466 - DNA, 667 bp, Homo sapiens
agcaggtgtctctgagaaaccaaatattctggagtatatttgaaaacctaccaagaaacacagtctcattgttcaaacacagtaggcaaagagccagaaaattcacttaaaagcagttcacagacagaaggtggcacagatttctagagctgtcctgccgccctccaggagtgccctgtaagtaagtcctaataaactcagctactcaccaagctgtgctggtccatgtcattctttggtctctcagctccttcccagtttggggggatgtcgcagtcctaagtttttctcatagcaggctgtagcattttccttgactaagatgaatgagacttgagaggataataggattttgcagaccccaatgagatcctttcagacactgaaaattaagtaatggatttatctcactaccaaaaattctctttctcaacatttatatgcaatttgcaactacctcagtgtcatcaacaaacaatgaattgtgaaaattctcacattaaaatgttttctagtattgaaatgatttactgtcatgggaatttataaatctaaacttaatttaaaacttgttctaaatgttttcatatatgtaaggggttaygtataaaagaaaagggaaaaggtaggatgaacttcataaattatataaaatttagttgatttt

SEQ ID NO: 488467 - DNA, 174 bp, Homo sapiens
gtcaggggagccggtaaacttgctttcaggtctgttggtgcttgcgttggaaggcaaaactttaacttggagctgagatttgcaaagtagggtctttgggtcaaatccggtccccagcmtgtttgttgtaaattaagttttattggaacacagccacacccatcatttacatat

SEQ ID NO: 488468 - DNA, 496 bp, Homo sapiens
ctgggggctagaatcagcatccctgtttgtgyctcccagcaccgcatcttattaccccagcaatcttaccatgctgctagtttttgatcttagaggctgttcagaagaacttctaccttgttaactagcaagctggaatttattttaccaactgatatagttaattgggtttcttgcaggagctgctgtttttcttggcctcaataataaccgccccaaggcaacaccctcttctgaaggatcttgggttcccagatacacctctgattatatttgcagttactttgcagttcatcgagcagacctgggctggtttcccttaggtttacttcatcacctgagcattgccagtgactcgggccaggtgctgccctgagtgtttttggaattccggggacttggagggtctccttgctgcttcaccttcctcctgcggcaccaggaaaaataatgattccttggctgcagaaagcagggtgacaaatgcaggcccttt

SEQ ID NO: 488469 - DNA, 641 bp, Homo sapiens
agatgttcccctttgctcagacagggccttagtgttatctagggctgggcgcagggttgcagtgacatgatctctggatgtaggcagataggtaggtgccacttctctagggccacacacaggggccaaggtgccatctgatgccacttgggggctggctcagcttccctacagcctctggctctgtcagggtgtcaggtggtcgggctgtaacaagggatataaagaacaaaagagaccaggtgcagtgcacatgcctgtaatcccaatgcttcgggaggctgaagtgggaggactgcttcaggccaggagttgagaccaccctgggcagcayagcgagaccttatctctacatgtaccaaaaaaaaaagaacaaaagggcaggctaagaggaagggccgtggctggggtagggagaggggttcctttaggtggggtgatcgtgaagaaagggagagagcaggcctggaggtatctgggggaaggtgttgcaggcagcaagcacagcgagtgcaaagcccccgtggcggcccacgcagggcgcatgggaggaacagctgggagccagaccctgcagggcctcaggccatgagcaggacttggggttcttgctctgagtgaggaaggaagccagcagggag

SEQ ID NO: 488470 - DNA, 641 bp, Homo sapiens
agatgttcccctttgctcagacagggccttagtgttatctagggctgggcgcagggttgcagtgacatgatctctggatgtaggcagataggtaggtgccacttctctagggccacacacaggggccaaggtgccatctgatgccacttgggggctggctcagcttccctacagcctctggctctgtcagggtgtcaggtggtcgggctgtaacaagggatataaagaacaaaagagaccaggtgcagtgcacatgcctgtaatcccaatgcttcgggaggctgaagtgggaggactgcttcaggccaggagttgagaccaccctgggcagcacagcgagaccttatctctacatgtaccaaaaaaaaaagaacaaaagggcaggctaagaggaagggccgtggctggggtagggagaggggttcctttaggtggggtgatcgtgaagaaagggagagagcaggcctggaggtatctgggggaaggtgttgcaggcagcaagcacagcgagtgcaaagcccccgtggcggcccacgcagggcgcatgggaggaacagctgggagccagaccctgcagsgcctcaggccatgagcaggacttggggttcttgctctgagtgaggaaggaagccagcagggag

SEQ ID NO: 488471 - DNA, 530 bp, Homo sapiens
ctgctgtggggggttggcacataagactaaacttatttgctactcctgatatagagataatattttggatgggaagttagaggaaaargagggcagatggtctggtggtcagcaaagccttggagtctggctgggaaaggcatttcaggccgggcagtggcatacccagcattagctaacattcattgagacttagaatggttcagcccatgtggtaagtccattacatgaattaactgattaaactctgtcaacagacaactgaaagaggcaagtgctattattattcccttttttctttgaggcacagagaagtcaagtagtgtgtccagggtcacacaggtagggagtggttggtgtgaacccctgtgatctgaccatagagcttgtgcccttcatcccccacagctcactgcctctaacagacaaggaggggcccagtcaggccagagctaagggttaatttagggaagaggagattcatttagggatgagactagaagaggactcaacatccagactgtagaaag

SEQ ID NO: 488472 - DNA, 530 bp, Homo sapiens
ctgatgatgctgtgcctacgcgaaggcgcataacagtagaaattgtttctttgttttgttttgagacagggtctcgctctgtcactcaggctggagtgcagtggtgcaatctcagctcacggcaacctccgtctcccaggctcaagtgattctcctgcctcagcctcccaagtagctgggattacaggcgcccaccaccacgtctggctgatttttgtatttttagtagagacggggtttcaccatgttggccaagctgktctcgaactcctgacctcaagtgatccgcctgcctcggcctcccaaagtgctgagattaaaggcgtgaaccaccacgcctggtcaataataggaattgttaacactattattattttccagccactgctctgaatgcttgtatgtatcttaactcaagcaatcctcatgatagccccgatgccgtgggtaccatgatccttgttttacagatgaggaaactgaggcacagaacaatggagtcacttggccaaggtaacacaactagaagg

SEQ ID NO: 488473 - DNA, 576 bp, Homo sapiens
ccagccatggacacttcccagcacctctgcatctgggtgtagccatgtgactcgttcatccaacaggatgtgggccagagttttggagagataggacaccctttcttctctccttcctgyttcctggattttctggctgcttgcagaaaatcctaagttattagaagatggcagagccacaagatagtggagactgagttcttaaatccccacatgaagagaagctgcctgctgaccccaggaatacccaccatcggaccatcaggttagcaaaaagtaagctttattgttaagccagaggtcagcaaacttttctgtaaagagctagagagtaaatattttgagctttgcaggccatgcagtctctctcacaatggctcaactctgttatcatagcataaaagcttccttagatgatctgtaaacaaatgggtgtggctgtgttccaataaaactttattcacaaaaacaaacaagggcccaaattgggctggagaaccacagcttgtcaaatcttgtgctaaggcattaaaattttgcaggaattatttgttattatagctaatgttaatcaag

SEQ ID NO: 488474 - DNA, 576 bp, Homo sapiens
ccagccatggacacttcccagcacctctgcatctgggtgtagccatgtgactcgttcatccaacaggatgtgggccagagttttggagagataggacaccctttcttctctccttcctgtttcctggattttctggctgcttgcagaaaatcctaagttattagaagatggcagagccacaagatagtggagactgasttcttaaatccccacatgaagagaagctgcctgctgaccccaggaatacccaccatcggaccatcaggttagcaaaaagtaagctttattgttaagccagaggtcagcaaacttttctgtaaagagctagagagtaaatattttgagctttgcaggccatgcagtctctctcacaatggctcaactctgttatcatagcataaaagcttccttagatgatctgtaaacaaatgggtgtggctgtgttccaataaaactttattcacaaaaacaaacaagggcccaaattgggctggagaaccacagcttgtcaaatcttgtgctaaggcattaaaattttgcaggaattatttgttattatagctaatgttaatcaag

SEQ ID NO: 488475 - DNA, 576 bp, Homo sapiens
ccagccatggacacttcccagcacctctgcatctgggtgtagccatgtgactcgttcatccaacaggatgtgggccagagttttggagagataggacaccctttcttctctccttcctgtttcctggattttctggctgcttgcagaaaatcctaagttattagaagatggcagagccacaagatagtggagactgagttcttaaatccccacatgaagagaagctgcctgctgaccccaggaatacccaccatyggaccatcaggttagcaaaaagtaagctttattgttaagccagaggtcagcaaacttttctgtaaagagctagagagtaaatattttgagctttgcaggccatgcagtctctctcacaatggctcaactctgttatcatagcataaaagcttccttagatgatctgtaaacaaatgggtgtggctgtgttccaataaaactttattcacaaaaacaaacaagggcccaaattgggctggagaaccacagcttgtcaaatcttgtgctaaggcattaaaattttgcaggaattatttgttattatagctaatgttaatcaag

SEQ ID NO: 488476 - DNA, 576 bp, Homo sapiens
ccagccatggacacttcccagcacctctgcatctgggtgtagccatgtgactcgttcatccaacaggatgtgggccagagttttggagagataggacaccctttcttctctccttcctgtttcctggattttctggctgcttgcagaaaatcctaagttattagaagatggcagagccacaagatagtggagactgagttcttaaatccccacatgaagagaagctgcctgctgaccccaggaatacccaccatcggaccatcaggttagcaaaaagtaagctttattgttaagccagaggtcagcaaacttttctgtaaagagctagagagtaaatattttgagctttgcaggccatgcagtctctctcacaatggctcaactctgttatcatagcataaaagcttccttagatgatctgtaaacaaatgggtgtggctgtgttccaataaaactttattyacaaaaacaaacaagggcccaaattgggctggagaaccacagcttgtcaaatcttgtgctaaggcattaaaattttgcaggaattatttgttattatagctaatgttaatcaag

SEQ ID NO: 488477 - DNA, 544 bp, Homo sapiens
cttgttaaaaatactactatcatgaggccagggagaaatctgaactcgggaaagtggtgtgggggccagaatttgagaagagaagaagcctacgctggaatcgcacttagttcacgtcacttcccagatctggcttccaatggcctcttctcaccctctaaataaaatacgtaaatcctcaatgtggcctttacaatctgcctcttttaatccttctctgcagccacaatgacttctatgatggtcttccaataccctgagcctgttcccacctcagggtctttgccattgctgtgctgccccctggaaagcccttcccccagatactcacatgggtgtcccttcacttcaaatgtcagcacaagaggtttttcctgcctaaatggcagccaatatgctctagtctctcgccctgcttttaagtatttcttcccagccacactgcttcctgmcacattcattcacttgcttgtccatttgccgtctctgtccttatacagaaacgtcatctctctaaggcaggggctttgtcgtggtcagtgct

SEQ ID NO: 488478 - DNA, 419 bp, Homo sapiens
actgccttcctaatcatcatcccaataagtgagagctttaatatttcaaagggtctgctctcaagcacagctaatttctctctcccttatagcttttgcccacaggtcctactcttccctgcgggacagtaactagtggctcttgtttctcctccacaggacagyccttcgtatgtttgaagactgctctctcatgccctctgcctttcttcctgagaccttcctggaatcatagctcttctctctgtgctcattctgtctgacccttctaaaacgcaaagattggtaccaaccagcatcctcctgggtcaggagcaaggacagcgaaaccatgaccactgaagtgtttctttttaactacaaatcatctaaactctccttaaaattattcaatctttttccaggcaaagagattttct

SEQ ID NO: 488479 - DNA, 591 bp, Homo sapiens
tacttgcccaaccttagtctcagccctgctggatcctctattattatgttaatcatggaattcttggcattaatttctattctctaaaatattgcactgaaatggtatttaccttgataacttaattgtttggcacccttttaaattttgcatccaaggagggattcttaatctcytcttccttgtcctggccctgatacgtggctttccaattttctacgatgagagtagttacttttacatttagaagaatcaaatgatatgacttttttaaagagatgagttattaaaaggagacgtgatcagaagacatttagcttcgtttaggaggcaaagcagatgcacgtgggccatttcaaatagaaaaccataagactgtatgtgaaaaaggaccctaagatgaaacagtggtgggtgttataagaattctgatctcagtaaggtaagaggaggctggtgttttccagaaacagaagagaagaaggtggggtttctgtgctagcaccagaagacacaaactggaggcagcaatcccactgcagttgatgtgacagaagcccctggagaacagttcaccaaaacgtgaaaggg

SEQ ID NO: 488480 - DNA, 591 bp, Homo sapiens
tacttgcccaaccttagtctcagccctgctggatcctctattattatgttaatcatggaattcttggcattaatttctattctctaaaatattgcactgaaatggtatttaccttgataacttaattgtttggcacccttttaaattttgcatccaaggagggattcttaatctcctcttccttgtcctggccctgatacgtggctttccaattttctacgatgagagtagttacttttacatttagaagaatcaaatgatatgacttttttaaagagatgagttattaaaaggagacgtgatcagaagacatttagcttcgtttaggaggcaaagcagatgcacgtgggccatttcaaatagaaaaccataagactgtatgtgaaaaaggaccctaagatgaaacagtggtgggtgttataagaattctgatctcagtaaggtaagaggaggctggtgttttccagaaacakaagagaagaaggtggggtttctgtgctagcaccagaagacacaaactggaggcagcaatcccactgcagttgatgtgacagaagcccctggagaacagttcaccaaaacgtgaaaggg

SEQ ID NO: 488481 - DNA, 421 bp, Homo sapiens
ttgtcctggccctgatacgtggctttccaattttctacgatgagagtagttacttttacatttagaagaatcaaatgatatgacttttttaaagagatgagttattaaaaggagacgtgatcagaagacatttagcttcgtttaggaggcaaagcagatgcacgtgggccatttcaaatagaaaaccataagactgtatgtgaaaaaggaccctaagatgaaacagtggtgggtgttataagaattctgatctcagtaaggtaagaggaggctggtgttttccagaaacagaagagaagaaggtggggtttctgtgctagcaccagaagacacaaactggaggcagcaatcccactgcagttgatgtgacagaagcccctggagaasagttcaccaaaacgtgaaaggggagtacagcagc

SEQ ID NO: 488482 - DNA, 530 bp, Homo sapiens
aagtcacaaaggcatgagctcatcatctattttcataacactaatgcaagagacctccaacacaagcaaagcaaaggcaccgactgggtgcagccacatatcatgastttccaggccattctgcctgagttgagatcattatgctgcttctttcattgcacaggaacgtgggggttttctctaaactatgactcatagcaaagcatacaggcaatcatgtagagaaacctgttctccccaggaaaggagggtgagcaaatgctaaaagttttgatactttaatatagcactggccttggctaattttacttaatatgaaagatttcaaataatggaaacactgacaggcaaaaacattaaaagtttgcataaaatctcaaaaaaccctgcaaacaagagagaagcatggtctaattaaaataaaggaaaagattgctactgggttcctgaatactcttttcacaaaggcttcacgtcagatgaacttcaagcaccaagcagcagggatcccactgaagtttattcagcgc

SEQ ID NO: 488483 - DNA, 530 bp, Homo sapiens
aagtcacaaaggcatgagctcatcatctattttcataacactaatgcaagagacctccaacacaagcaaagcaaaggcaccgactgggtgcagccacatatcatgagtttccaggccattctgcctgagttgagatcattatgctgcttctttcattgcacaggaacgtgggggttttctctaaactatgactcatagcaaagcatacaggcaatcatgtagagaaacctgttctccccaggaaaggagggtgagcaaatgctaaaagttttgatactttaatatagcactggccttggctaattttacttaatatgaaagatttcaaataatggaaacactgacaggcaaaaacattaaaagtttgcataaaatctcaaaaaaccctgcaaacaagagagaagcatkgtctaattaaaataaaggaaaagattgctactgggttcctgaatactcttttcacaaaggcttcacgtcagatgaacttcaagcaccaagcagcagggatcccactgaagtttattcagcgc

SEQ ID NO: 488484 - DNA, 615 bp, Homo sapiens
ggtttgtctggaaggactgctgggtgtgggagagggcttagaaatgggagtagagccaggcacaatgattcatgcctgtaatctcaacaatttgggaggctgagacaagaggattgcttgaatccaggagttggagagtagcctgggcaacatagcaagaccctgtcactgtaatacaaaaattagctgggtgtggtggcatgcgcctgtctcagatactcaggaggctgaggtgggaggatcacctgagtccaggaggtagaggctgcagtgaactctgatcactccgctgcacaccagcctgggtgacagtgcaagaccctgtctctaaaaaataaaaaccaataataaaagaaataggagtagagaagctgtcagatggagatgaatgaagacccttgaatatcatgctaaggggtttagactttatcttagggaaggggaaacattaaagtgttttaagcaggttttaagtaacttagtccaatatactttttagaatgatcactctggataatgcrtgtcgggtgcggtggagggtggcagggctgcacacggcggggagaggcttcaaatgcgggctgttagtgcatgcaagcggagaagtgatcacca

SEQ ID NO: 488485 - DNA, 602 bp, Homo sapiens
ctgcagtaatagtccctggtaagcccagaatatgggctagatctttacacttctgctcagtgtccttaaccctctcaccccccatcacttctccccatattcctaattgctccatgcaggaaaagacgaggctcagattttagctatatccatccatgccagttatcacttgggtttcgttttctatgttattcctatgcaagcctcatgtcttctgccagagtgtaagtcgtttgagggcagatttttaaaaaaactgtttatctgtatatgtgtatttgacatgacaaatgcttctctcctccgcagacatataaaaataatgccttttcattgtagagcacttaggaaatacattgaaatttaaagaagataaaaatctctctccaaatcctatcaccatgggtaaacattactgacactttggtgtatttccttttatctatttagttgcatgctcaggattttatagtatatatggtttttcttattgtgctttgccctctgtggactttcttagaggattcaagattttctttaattctggaraaaatctcagccgctatctgttggattctttctttccatcattctttctattc

SEQ ID NO: 488486 - DNA, 521 bp, Homo sapiens
ttatcttttggactggtttttccctttcaaatataggaaaagagtctttttaaaatttttcttctctagatgagtaacatactacagaaaattctgctctgaactcttaaccactggacttcaaagaaaacatctcaaatccattacatgtttctcaagcctgtgattttatatamgtaaatatatgttatctaatatacgtatataaaatatctatgtatgtacttctctccaccttggatttgttttctggcatttcacaattattcctgccatagctctccaattacttcaattctcaagaacctttcctctaagtcaaggctgattttaggcaatttgagtctgacttaaggagggtaaaacccaggcccagttttggtgtattttgagactccccattctactgaaggatggatgtagttctattcagctcttgaggccataaaaagatcaaatggtctggaggtgaagagcctagtgtatggatcagactgccaggggtgaaatcccagttccta

SEQ ID NO: 488487 - DNA, 632 bp, Homo sapiens
ccagttcagggttgtgggtggctggagcttatcccggcactcagggtgcaaggcaggacccaatcctggccaggacaccattccatcacgggacacactcacacacacatacacacacatgcacacacgtacacacacacacacgctcactgagactgggacaatggagacacaccagttcatctaacatgcgcatctttgggatgtgggaggaaaccaaagtacccaaagaaaagccacgcagacacarggaggatgtgcaaactccacccagatagtgggcctggctggaaatccatttctcccctcaatgttacaacgaaatgacgttgaacagaatggtgttattcaaggacatgctgtactaacaaatttgagctgcaattgaaattcatcgttatttgctgtgctggagatgatttggttaatggaagtttaatgggctaaaactgcccttatttggtaaggattgaaaagtgattttattgctccttcattttcacatggttttcatcaacactgatggttcagaaaataaacatgagtgcttctgagacctgcaattttgagaaagctgagtccaaagcattagtattgaatttgcatacaatgaagtatgcattcatgttaat

SEQ ID NO: 488488 - DNA, 632 bp, Homo sapiens
ccagttcagggttgtgggtggctggagcttatcccggcactcagggtgcaaggcaggacccaatcctggccaggacaccattccatcacgggacacactcacacacacatacacacacatgcacacacgtacacacacacacacgctcactgagactgggacaatggagacacaccagttcatctaacatgcgcatctttgggatgtgggaggaaaccaaagtacccaaagaaaagccacgcagacacaaggaggatgtgcaaactccacccagatagtgggcctggctggaaatccatttctcccctcaatgttacaaygaaatgacgttgaacagaatggtgttattcaaggacatgctgtactaacaaatttgagctgcaattgaaattcatcgttatttgctgtgctggagatgatttggttaatggaagtttaatgggctaaaactgcccttatttggtaaggattgaaaagtgattttattgctccttcattttcacatggttttcatcaacactgatggttcagaaaataaacatgagtgcttctgagacctgcaattttgagaaagctgagtccaaagcattagtattgaatttgcatacaatgaagtatgcattcatgttaat

SEQ ID NO: 488489 - DNA, 632 bp, Homo sapiens
ccagttcagggttgtgggtggctggagcttatcccggcactcagggtgcaaggcaggacccaatcctggccaggacaccattccatcacgggacacactcacacacacatacacacacatgcacacacgtacacacacacacacgctcactgagactgggacaatggagacacaccagttcatctaacatgcgcatctttgggatgtgggaggaaaccaaagtacccaaagaaaagccacgcagacacaaggaggatgtgcaaactccacccagatagtgggcctggctggaaatccatttctcccctcaatgttacaacgaaatgacgttgaacagaatggtgttattcaaggacatgctgtactaacaaatttgagctgcaattgaaattcatcgttatttgctgtgctggagatgatttggttaatgraagtttaatgggctaaaactgcccttatttggtaaggattgaaaagtgattttattgctccttcattttcacatggttttcatcaacactgatggttcagaaaataaacatgagtgcttctgagacctgcaattttgagaaagctgagtccaaagcattagtattgaatttgcatacaatgaagtatgcattcatgttaat

SEQ ID NO: 488490 - DNA, 659 bp, Homo sapiens
atttagaatagagatttgtactcaggggtgttttgcaaatgtgtattgactaggggtctggtctagcttgttctgtaatattaggaatctakaaatatttattactgtcgttgttggagggtccctagaaacagttgggagtaattcttttatcatgtagtggcctgtggtgggcaaaacctctctcacataccgcttaacctttctcgtgtctaatactactcatgaagaagattgtaatttgtgcattgtgcttttatcaggttgctgttcccaatgcagttagtgtaatttttcatttcctaacagtcctcgggcaattctgtttaacatgctttctatttcagaacattctcctatttaaaaaacttctttcgcctcaggcccaacatgattttccagccaggccagtagtaatttctatcattcctggcttcattcaccttcactgttaaaattcgatgtggatttcctaagaaggtttcctttttgtgtttatggcatagcaaatgatggggcgcctatgccttctttgatattatttggttcacaaaaatattatttcatttttattactaaggggaagacatgcatgcccagttttcatatttatttcaaatctgtttcagttatttatgtcataaaccatccttttttaa

SEQ ID NO: 488491 - DNA, 624 bp, Homo sapiens
ctgttcctttaaaaaaatctatcttaccacaataagcctactatagaaaaagtgacacccccacaaatgttcagtagagtatggctcaagaaaattcgttagtaaaatgtttttgtctttacataaaactcgagcgaacatatgttttactcttatctatacttcttttttcttaagaatctagagaggaataacaacttttcatgatattgttctcagagcctctgagtggtgatattcccatcaatgagaacaataagatattaatgccaaaatctattcattagctaatatatgcaaacatagttgctagtgtctrtggatacttaagatgaaacaaacatgatgtcccccttctagtgacttgtaatctaataaccaactcctatgggctggtattttaagaactgttgagataaatttaatcagtaatttatatttttaaaaggttagtaataattatacatgtgagagtaggagctattactaaatgtgagagaaatactgtaataagaaacaatgtattattttcatgaaaaccaagaggaaaaccataattcactaaaaaatattatacgcacagtcccccaaacagacatttgtcttaagaatacttgtacatgg

SEQ ID NO: 488492 - DNA, 624 bp, Homo sapiens
ctgttcctttaaaaaaatctatcttaccacaataagcctactatagaaaaagtgacacccccacaaatgttcagtagagtatggctcaagaaaattcgttagtaaaatgtttttgtctttacataaaactcgagcgaacatatgttttactcttatctatacttcttttttcttaagaatctagagaggaataacaacttttcatgatattgttctcagagcctctgagtggtgatattcccatcaatgagaacaataagatattaatgccaaaatctattcattagctaatatatgcaaacatagttgctagtgtctgtggatacttaagatgaaacaaacatgatgtcccccttctagtgacttgtaatctaataaccaactcctatgggctggtattttaagarctgttgagataaatttaatcagtaatttatatttttaaaaggttagtaataattatacatgtgagagtaggagctattactaaatgtgagagaaatactgtaataagaaacaatgtattattttcatgaaaaccaagaggaaaaccataattcactaaaaaatattatacgcacagtcccccaaacagacatttgtcttaagaatacttgtacatgg

SEQ ID NO: 488493 - DNA, 606 bp, Homo sapiens
cattttacacaaagtttccctgctttcttaactaggaattattcctccctcctggcatttttataacacttccttgcaggtatttctcattcatttttctggaatacttattgtgcctatgttcttatggctcaatgaatttcagagtactacagagtagggacagtttctaacacatcttgagatcctgcagtactttgcacagagtagtattaataactagctagtggatgaattaatgaatgagatataaaatgatttttaaaatgttaactatgcttagttaagacaggtgatgttctggcagaacaaagtcatcyaaaagaaataggccaactaggaattaccaaggaaccggtaacctaatcccagcaaaatgaggagttttgtcttcctaacctgttcagagctaagtatttgaaagcccccacaaaagctaattctgacaaaacaaaacattcccttctctaccattagaaaacagaagctctaacacccacagagaatttggaagccctcaattactgaagcagtggaaaatgaggctgcttcataatccatagcagttttgcagaaatcctccatttttattgtcaagagaaagct

SEQ ID NO: 488494 - DNA, 531 bp, Homo sapiens
agaaggagacggaggcataagaacctcaagtgacctcctcaaggtgagagagctaaagagtaacaaagctaggatttgaacataggcaaggcagctcagagcctgtgcacttctccacattgctatattgcctcttgttaaaaaaaataaggaaaatgtcatattgtcttctgtataggtgctgaaaagacatttggtgaaagtcaacctccatcaagaattatttttttcttggctacttttttattgtgataaaatatacatgatatgaaatttaccattttaaccatttttaagtgtacacttcagtgacataagcacgttcacatgttgtgcagccatcaccgccatccatctccagaactttcatcaagaattttaagaaatggataaattcctcgacacatacaccctcccaagactaaaccaggaagaagttgamtctctgaatagaccgataacaggctctgaaattgcggcaataatcaacagcttaccaaccaaaaagagtccaggaccagatggattcac

SEQ ID NO: 488495 - DNA, 640 bp, Homo sapiens
ctgctttgggtaaggctgacagttcattatttttaccaagagttcaaaaggggaaaaacagagagtgatgtttcataacaatttgtctttaccaggtaacaaatgaataattcaaagttaaagatatttagtcttgggattaaatctggagataagttagtcctatcctcttattttgaaaacttagaaagtaaagctcakaaatcatttgcccaaaattgtatggcagagtcagaataagatctctgcttccagatacccaggctccactcattctaccacatttaataattctaaaacttcgttgtgcttcaagcctcatggagtgtctaacaagcctcacagagtgagaagaaataatggttttttaaattagtattttccagaaggaaaatgttcatcttttaacaagtgttcaatttcttctaacatcaatattcaatcaatgttcatctcttttaacatgaaaccaactataacttatttggcaattatattgtactgagaaagacttttctgtagtagaacagagctaatttgatgaaaacttcacaaattcaatcttaggttgcattctcatttaaccttccctcaaatttaaatcagagaaaccaactttccctgaagcagtagaaaataa

SEQ ID NO: 488496 - DNA, 601 bp, Homo sapiens
tacatgatgtgatcctacatcttaagcctgaagccataatcgatgagacttgcaagactgtctatattttgtatgtgagaagaaaaaataatttgtggccaggggatggataatagtgatttaaaagcaggcccacacattctctgatgcttctctcatgaagaggtgggggtctctgtcccctctcttgaacttgggatgatcttagtgactggataatcaatagactctaccagaagtaacactgtatgacttccaggactaagctacaaaaaaataagaaaggttcttcttgtcctcaggaatagtcaagctggagctcaaggcttctgtgtaagattctgagggctctgaagccactgttctgtgaggaagcccatagtagcctacatggaggagccacacggagaagccctgtgactgcctgaccagttcccagatgccgctgacattccagctccaactaccatctgactgcatcctcacaagggscctcgacccagattcacccagctaagcctctcctgaattgctgacacacagaaaccatgagaaaaaaataaaatcattattgttgttttaagcccactaattttggact

SEQ ID NO: 488497 - DNA, 496 bp, Homo sapiens
gagaataaaatgagatctgctatgaatactaatcaggtgtttttccctcctgtctttggtttctgataatgtgtttgtttttcttgccgcctccctccccacccctactcagcagaagacatctgtgggcttttgctacccactgccttgtactcttttgcttgtaaagtagtatccagaattttctttgtgaaacttccaacctttattctcagcccatatgacttgagtggggttaaccccaccagctccagtattgggccctgattgaattaaactaatgagtacattccatgcctttggcctttgtagttggtgcagggatgggcctatggcctttggaaccaatgggagctgggcccaggaattttaattagtaaatgggtgttaaagaaaaattcttctgacacttgttaaaaatgacaaggaagactttttattcaaggctgttgcattaggggagagagactmaactcaactccaaatacagcaaagg

SEQ ID NO: 488498 - DNA, 511 bp, Homo sapiens
ctggcttgcgcttcaagtctgtrtttccagccccaactccaccctgtctccagtatgtccttgaagatgaccttgaaggttaattgatatatgtccgtaaagaactgagcacagtcctggtacatagtgctcaataaatgctgggtaaggtgtcaggcaccagcctgcactctgaggaaacagtggcggctgagccagacacacagccaaccttcaataggcttccagtcccatggggaggacagaggagtgaactgttgcttatagtgcagagagtacagctaggactggagaagttcagggcagccacgggaggccagggaggggaagtggaggtgttggaggaggaaacagcatgtacaaatgcccagtggcccagagaagagagacaggagccattgccgcaggagcaaggcaggggcatggggtgatcaaaggggcttttgtaggagcattttgggaaataccaagactagactgagcggggtgagcttggcatcaccaggagggc

SEQ ID NO: 488499 - DNA, 520 bp, Homo sapiens
ctggacatgcggggaaagtaacttacagagcggaaaactccaactccaaggaaagcatctctgctcagacgtctggggccaaggtcttggcaaatcagtgcattcctctaagagaaggttcctaaagtgacttcagttcagatttaataagaacattattaaccaaatatcaataytggtatagagtgggccactccctaggataaaccctaggtacagtggaaagagaaaaacagaattgcctgtattgctttcacattcaagtcacaggttattacctattatgtagcaaacataatttacataatgattttaataatcaatatttaaataacacatttttactatctccctaaaaattaacctccaaccagagtaatgtcagcttgggaagttttgctgtgtggtgtgggaatcagggataagggttaagctgtcaccgtgatcatcttatgagaccctgaggccaggtgatgctgtggacagagcttgggtatagggactcaaaaaacctgggccc

SEQ ID NO: 488500 - DNA, 533 bp, Homo sapiens
acaagtagagacatcataaaaccttcttggggcctgtccttggcctcaggcaatgtgctcagtccctcaaacttgagatgctaaccaagggtgccaggtgctgtccagggaagtgtgctcagcagagaggttgttgtgttggaagggaatgagggggacctggagatctgctggcttgtctgcactgacccaggaggctgaccctgagcaatgagagtgttgcaaactcccaggcaaagtccagactggagtgtgcccgggatgcatttcctaccgcattttgcagagggcagcatgaaccccagcatrccttagaatccagaactgagaatcaggggaatctggagtttcataaacccaagatttcagattctgagaatctcagaatttagaaatgtagaggctcagagcccggaaagtagagccaccaggtagtttatgacttccagtctaacagaattgtcttcaaaatacaggaaaaaaaattaaaaagacgaacctcccctgggagcccagtacatggatcagaagaa

SEQ ID NO: 488501 - DNA, 215 bp, Homo sapiens
tttccctatctgcaaaacagagatagtaatgacacctacaccacagagcgtgcagggggattaaatgatttaacacagcaaaggtgcagcacagggcctggatcacaggcagtgcagagaagaagctrctgagtcaagatctcagcctcgctctcccactcgaggccagggctcctttagtttcctggagctgcccctccagcaggtgcaggatg

SEQ ID NO: 488502 - DNA, 490 bp, Homo sapiens
ctgctgtcctcatgcatgaaactgggcctggaggcctgggccgtgcagggcccttgcccagaggcygctccagaagctctgcctccccagtggagggaccggggcctctcaccttctccccctgctgcttccagaagccggatgggctgatggggggagcagggctggatgggctgatgcgggcgtggcaggaagatagaccctgggcaggtttctgttccatatcctttatggcgggtgatggccccaggcctggtggtttctggggagaatgggcacacgactgagaagcccaggttggaactcagcccctgccgacaagaaactccttctcggttgggctgttggcagacccatgtggtgagggaggagggaggatggcttcacacagcccatccccgctgctaaaaataaataaataataaataaataaataattgatctgattctaggtctagccaccttcctagtttggggtgcaatgggggca

SEQ ID NO: 488503 - DNA, 490 bp, Homo sapiens
ctgctgtcctcatgcatgaaactgggcctggaggcctgggccgtgcagggcccttgcccagaggctgctccagaagctctgcctccccagtggagggaccggggcctctcaccttctccccctgctgcttccagaagccggatgggctgatggggggagcagggctggatgggctgatgcgggygtggcaggaagatagaccctgggcaggtttctgttccatatcctttatggcgggtgatggccccaggcctggtggtttctggggagaatgggcacacgactgagaagcccaggttggaactcagcccctgccgacaagaaactccttctcggttgggctgttggcagacccatgtggtgagggaggagggaggatggcttcacacagcccatccccgctgctaaaaataaataaataataaataaataaataattgatctgattctaggtctagccaccttcctagtttggggtgcaatgggggca

SEQ ID NO: 488504 - DNA, 634 bp, Homo sapiens
ctaggtgctcaggacccagaagaaagcgtatcgctgaactgagagcaggcattctcccagcttctgcatagaaccatgtcccactcaggaagcttgacgacgggcagctcaaaggtcatgaggacccaggctcttaggcactttcgtcccgactgaggcccttgaagtccttcttgtggcttcccaagtgcaggtcagtggcagcaggagggagaacagagctgcctccccactctgatcgtaggtgacccgttggctgttgagcccacctgagacacccagtggctctcagggagcttgcaagagaccagattccctctaaggcaggagggcctcagagctggcraaatccaggtctccctgttacctcctgcatttctaccctagggcctgagaagcctgcagacattcagaggccatggccaccaagccaggagtgcccttcctccagtgtccccgccatgccagccccctgctgtccccatgccagtgcctgccccatcaggctgccagacacagagtcagtctacagctcagaaaacctgtcccactgtgattatcaaggacttgcttctgcgacattggcagtcgcatcctacccgcagtggcctgcctacagtgggcacagcagcag

SEQ ID NO: 488505 - DNA, 523 bp, Homo sapiens
agtctatgtcacacctggagaagtgaaattatgtccgaggaaatccagcgggtcaatagctgagctcagtttcgagcccaggtttcctgtgtgcacctgggtcccaggctcttccctccacatgttgtgctccagagtgaggcagagtcacgggtggccagtggaacctcagacatgggttcacctgagtagggggaaggaggcacacaggtggtcaacctrttgtctctgttgcctggaggaatgacaggtaagggacagagagccacagctccagggctctgggctgtgaaatgggtccagatgcagagttgacctcaggcagccgttgggaacagtttcctctcctgccccacaaggctgcagggagaggacccactgtataggattgtgtgagggtgaagggagatttgacaccctcattgctcaccttttccagccctgctttcagggcttctttcagggccctactttctgaagggcagttctgatgtagtcaagctaaggactttgaacaatgtta

SEQ ID NO: 488506 - DNA, 485 bp, Homo sapiens
gaaattatgtccgaggaaatccagcgggtcaatagctgagctcagtttcgagcccaggtttcctgtgtgcacctgggtcccaggctcttccctccacatgttgtgctccagagtgaggcagagtcacgggtggccagtggaacctcagacatgggttcacctgagtagggggaaggaggcacacaggtggtcaacctattgtctctgttgcctggaggaatgacaggtaagggacagagagccacagctccagggctctgggctgtgaaatgggtccagatgcagagttgacctcaggcagccgttgggaacagtttcctcwcctgccccacaaggctgcagggagaggacccactgtataggattgtgtgagggtgaagggagatttgacaccctcattgctcaccttttccagccctgctttcagggcttctttcagggccctactttctgaagggcagttctgatgtagtcaagctaaggac

SEQ ID NO: 488507 - DNA, 473 bp, Homo sapiens
ctggattacatcttctgtggcaaagacttcataataccgtttttcatagagagaagaaagattatttagtgtttcctctggctgagtttgatagaaattgattttttgttactgatggtttaggaacattttattttcatcgttgcaattgattattgatgacgtcccatatatcattagtactattgccaaatctgggaaaatcactatccaggttttttcatatagcagccatgagatttcagggctttttaaaacttcttgagcaaccgtgaaccccaagtaattcttgaattgataattctcactaagcacattgctagggcccttcccagggtcttaaaagggtcaggggaatggygggccctaaagctaaagccacatgtaaagccgcctctaactgaatgggattccactaaggagaggaaggatctgactatcctggccgctgtgcagagaatagacaatggggc

SEQ ID NO: 488508 - DNA, 535 bp, Homo sapiens
aaacccaggaaagaggtggtcattgcatataacctaaatcccctttctgctgcctctccctcaacccctgaaacagaatgctgttgaggtctgctacgttgattccccctgaaagcaaagaggcaactcatgaggtatggaagcctggagggaacaaaggcaagtgtgaacgtgtgtgagctcatactttggtatgatgaaaagtaggtactcttcaaaaggtctgctctgtgacagaggggctcgttactgagagcagaaccgcactgcccacacaaaggcaggtggggagggaaggggctcactgaagttagaatacagacaatatggaaccaaagatcgttgaatcttaaaatctgcctgttacaagcattcatttaaagctgttggtaagggcaaagatcaawgaatagacgtggctggaagatatgttttcctgtttactctccccaggtagcttttggaaatgattgttgaaaaaaaatatcagtcaaagtaaaaatgagtctgtggtaaaataatgcccttcccccaa

SEQ ID NO: 488509 - DNA, 422 bp, Homo sapiens
agacatagactgtgagaccaaagggcaatattaagccttgggaaatgattcttagggaaagcagagtcactatctcaaccccacaaacaaagggagagtgggaaaagccatgggcgaaaatgaaaaccaacagcgcttattgmagatatcagagcaaccagaagctggggcaaaactggggaacttcgaaaataaaggctgactcaaccacagagggggcagtcatccagtgagattcagaatctctgaggaattgacttgtggcaaagccagaagagtcctgaagacattttccttattattttttcccactccagatcatgtgtatgggtgagggtgagaggtctgatgggtcactgagacaaagagctttgaagtgaaaagctggtatgtactgtgacaaggggctctgggattccacc

SEQ ID NO: 488510 - DNA, 422 bp, Homo sapiens
agacatagactgtgagaccaaagggcaatattaagccttgggaaatgattcttagggaaagcagagtcactatctcaaccccacaaacaaagggagagtgggaaaagccatgggcgaaaatgaaaaccaacagcgcttattgcagatatcagagcaaccagaagctggggcaaaactggggaacttcgraaataaaggctgactcaaccacagagggggcagtcatccagtgagattcagaatctctgaggaattgacttgtggcaaagccagaagagtcctgaagacattttccttattattttttcccactccagatcatgtgtatgggtgagggtgagaggtctgatgggtcactgagacaaagagctttgaagtgaaaagctggtatgtactgtgacaaggggctctgggattccacc

SEQ ID NO: 488511 - DNA, 396 bp, Homo sapiens
ttgtcaaaacagaatcaccaacgagacaaaagggcaataacagaggcayactgttacatctgggcaaatcatcccactttgtaaatctaagaaatagaggcccagagaggtgaagtaacttgcgcgggatcacacagctagttaaacagaagcctgcattctcatgttcctgctgctgcacttccttctggggaaggagaagatagttctcaactgggttgggtcttctgcaccctgggcatttcggatcatgggctccgaacctgctgagtggccaccgtgtcctttccgtgggtgtgagcatgtgcgtgagtgtgaacactgattaacacactctgccatggtggtgaaggactgatatctgggaagccagttttagaacctagatttgccagc

SEQ ID NO: 488512 - DNA, 396 bp, Homo sapiens
ttgtcaaaacagaatcaccaacgagacaaaagggcaataacagaggcacactgttacatctgggcaaatcatcccactttgtaaatctaagaaatagaggcccagagaggtgaagtaacttgcgcgggatcacacagctagttaaacagaagcctgcattctcatgttcctgctgctgcacttccttctggggaaggagaagatagttctcaactgggttgggtcttctgcaccctgggcatttcggatcatgggctccgaacctgctgagtggccaccgtgtcctttccgtgggtgtgagcatgtgcrtgagtgtgaacactgattaacacactctgccatggtggtgaaggactgatatctgggaagccagttttagaacctagatttgccagc

SEQ ID NO: 488513 - DNA, 575 bp, Homo sapiens
atactgtacttataagcacagacagcagatgagatacgagtgccatcaataaaccacatcactcagcaacaaattcattactgtcaattacttgggygaatcaacaaacttttttacttttgctatgttatctaaatgtctaatttgatatggtggggaggagagaggaggacagttttgtcttaatattctagaatatgtagaaattgaagtgatagagattatgcaggtgaatataagagtcacaaatctatgctttgggttgaaaacacatgataaacaactgtttgcttttattttccatcccattccttagtttgctccttcctttcttctgcacagtatcatttccatggaactgaaatgccccaaaacatgatacatgctgagcctggggcttggtctatcctggtaaatttcacaggtcctaacctgctgagtccgtcattgtttcatgatgagaacttacaggcccatgagccccaaacaaatgctgttcttgccttctcagctctcacatcccttctggcaggagtttccaggctaacacagaacaggaaagggtgaggaaaatg

SEQ ID NO: 488514 - DNA, 575 bp, Homo sapiens
atactgtacttataagcacagacagcagatgagatacgagtgccatcaataaaccacatcactcagcaacaaattcattactgtcaattacttgggcgamtcaacaaacttttttacttttgctatgttatctaaatgtctaatttgatatggtggggaggagagaggaggacagttttgtcttaatattctagaatatgtagaaattgaagtgatagagattatgcaggtgaatataagagtcacaaatctatgctttgggttgaaaacacatgataaacaactgtttgcttttattttccatcccattccttagtttgctccttcctttcttctgcacagtatcatttccatggaactgaaatgccccaaaacatgatacatgctgagcctggggcttggtctatcctggtaaatttcacaggtcctaacctgctgagtccgtcattgtttcatgatgagaacttacaggcccatgagccccaaacaaatgctgttcttgccttctcagctctcacatcccttctggcaggagtttccaggctaacacagaacaggaaagggtgaggaaaatg

SEQ ID NO: 488515 - DNA, 293 bp, Homo sapiens
taagtgaagcccttcgcttcctctacgtctgcccatgtgtgcactgcccaggccgcaaagccctttcccttgctgtgtttctagtacctgtcacctacaccgccatgcggtatgggacaggacgacatactccttctttggtccttctcacatcgcagatgyttgcggtacctccccctgcatgagaagaacagcacttctgagggagctgcagacaccctggcgcgcatgttggtggtctgctcaccccaacactgtcccctgtgaacacagggagcagcccccttcctgca

SEQ ID NO: 488516 - DNA, 591 bp, Homo sapiens
gaaatctaaaattgcaaagtgacttattcatcatcacccagctatcagtggtggtattagagctgaaagccaacccttgagtgcatttcattttctcacattgtgtattaataaatttcagctatagttatcttcaaagacatctttatgtataacgctaacacagtaccttccacaacttcataaaaaggcattgttattatcccaatgttaccaaagaaaaatatgtagcttagagaaacaagtcctggtggtatggctccaaattcacaagccacactctctcctgcacaagcagccatggccccggtctacctgctaaatcccacacaggacttggcccttccgatgctaggggaacagaagatggattcaacacctcaagacttcaaagtgcacagtgggttcaggggacattaaatagatccatgtgtctggagcatgaatatcaagttgaaaaaaatgggaccagatgatggggrctttgagtaccatgatgtgaacgttaatttgcagggagtgagcactgagtatacgcagatctgtactagattctgtgaacaaactgaatacataaaagtgtagtcttaa

SEQ ID NO: 488517 - DNA, 568 bp, Homo sapiens
ctgctgttgaccagtggttgccataaagggtttgcaggcgagacaagggaagtggtttgctgaatgatgatgtggagaaggaccagaagatagctagtgcttctgtgcaggggccacaccagcatttagcacagtcggggtgggccaggagtcaaaggtagccagaaggagcctagctaatggactgggcaaatttggaaaattgctaatacattcacagactggtgtcagtaaggtggcgctctcttcactgtgtgaatgaatgaaaaggtcatccgactacactgctttgctttcccgtgattattcagcatcactggggcatgaggtaatgggaagataatgggctctgggttcagatcccagctttgctgtttcctagatgtatgaactttggcaaggtaattaatctctctgatcttcagctccctcattttaaaatggagatcacaataacaaacttgtagggttacttaacagtaatgtgtgtgtgtgtgtgcatgtatatatacatacactttgcctggaaaraaatgcctgagatcaacaagtaaacgtttctatgcta

SEQ ID NO: 488518 - DNA, 638 bp, Homo sapiens
cagaaatactaattgttgtcattttccccctttaaacaagtaaaatagttcaattatctcattcattgtctctcctacttctttctcatttttttctacttattgattgtgctctccttctatttcttcctgctctgattgcattatttttctttccaataaacttaagaactggcattgaatttgggcaatgaggaaacctagaacttgatggaatagtaaggttattatgacaaacttacagctaaaactgtcgtgatgtatactaayatggttaattattaagagatttaaaggttggggtgatgtaatcttaaagttggagaagttatagtctagttacagtattgtactgtaaattctaaattatacaattaaatatatcagtaaataaaaaatgctctttatattgaaatgagaaaatgatatgcatcaactgcactagtatattcaactgcatgccataaatatttgaaaaagaataaatattgagattctgttggcagaggcccggtttttgacattttgtttaagaatttacacttgcccattagtatttgaaataatacactaaacctatgtaatgagtagaaggtgggcagaaaaatgagagaaagatggtacctatttctgatcag

SEQ ID NO: 488519 - DNA, 638 bp, Homo sapiens
cagaaatactaattgttgtcattttccccctttaaacaagtaaaatagttcaattatctcattcattgtctctcctacttctttctcatttttttctacttattgattgtgctctccttctatttcttcctgctctgattgcattatttttctttccaataaacttaagaactggcattgaatttgggcaatgaggaaacctagaacttgatggaatagtaaggttattatgacaaacttacagctaaaactgtcgtgatgtatactaatatggttaattattaagagatttaaaggttggggtgatgtaatcttaaagttggagaagttatagtctagttacagtattgtactgtaaattctaaattatacaattaaatatatcagtaaataaaaaatgctctttatattgaaatgagaaaatgatatgcmtcaactgcactagtatattcaactgcatgccataaatatttgaaaaagaataaatattgagattctgttggcagaggcccggtttttgacattttgtttaagaatttacacttgcccattagtatttgaaataatacactaaacctatgtaatgagtagaaggtgggcagaaaaatgagagaaagatggtacctatttctgatcag

SEQ ID NO: 488520 - DNA, 596 bp, Homo sapiens
tggcaaactctgaattacctggaaggtaaaggctgkctgcctgccatcactatcctggtagctgaggcaacaagattctcatcaaagtgtgagatgacctgtatgtcacaatgtctacaccatctcatcatgtcccttctcagcttcaaactaaggacttttcattgctttcaaaattggagccataaagttcacaatgactttcaatgccctacaacatctagaccttcatttaacctcttaaaattccccatttcactcaacactactccagcatttgttgtcctgtgtgttcttggtcaaatatgtgaaacacactgccaccttctgggctatgggcttcctctgccctcggcctacttgacgtgaactttccctaacaactcactgtccactttctcgtcatttttaatgattttttcaaatatcatgctgatcatatgaaatattaagagcacccagctttactttctatttctctttttatcatttatctatctatccgtgtatctatcatcacctatttatcttccctccaagttttcaacatgaagtacattattaaatttttatgttcctcaaaagggaaaaataat

SEQ ID NO: 488521 - DNA, 616 bp, Homo sapiens
tgagaatgacaagccagataaagagaaaataagatataaggcaaactggattatttttaaaagtaggatgagaaawgatggcaagaaaaatgcaatttgtgttagattttaaatcatattcaagacttctccttccaagcacaatggaataacttatggcagaataacactctcattaaaaataatcaggccgggcgcgctggctcacgcttgtaatcccagcattttgggaggccgaggcaggcggatgatgaggtcaggagatcgagaccacggtgaaaccctgtctctactaaaaatacaaaaattagccaggtgtggtggcaggcgcctgtagtcccagctactcggagaggctgaggcaggagaatggcgtgaacctgggaggtggagcttgcagtgagccgagatcgcatcactgcactccagcctgggtaacacagactctgtctcaaaataaataaataaataaataaataaataaaaataaccagaaaaaattcaaacaattactctctcaaaaaaatggtatttacaaaaaggcaacaaaaagctattaaagaagactctatggggactaaacttccagatagttaacagtcttggagaagtgagt

SEQ ID NO: 488522 - DNA, 616 bp, Homo sapiens
tgagaatgacaagccagataaagagaaaataagatataaggcaaactggattatttttaaaagtaggatgagaaaagatggcaagaaaaatgcaatttgtgttagattttaaatcatattcaagacttctccttccaagcacaatggaataacttatggcagaataacactctcattaaaaataatcaggccgggcgcgctggctcacgcttgtaatcccagcattttgggaggccgaggcaggcggatgatgaggtcaggagatcgagaccacggtgaaaccctgtctctactaaaaatacaaaaattagccaggtgtggtggcrggcgcctgtagtcccagctactcggagaggctgaggcaggagaatggcgtgaacctgggaggtggagcttgcagtgagccgagatcgcatcactgcactccagcctgggtaacacagactctgtctcaaaataaataaataaataaataaataaataaaaataaccagaaaaaattcaaacaattactctctcaaaaaaatggtatttacaaaaaggcaacaaaaagctattaaagaagactctatggggactaaacttccagatagttaacagtcttggagaagtgagt

SEQ ID NO: 488523 - DNA, 616 bp, Homo sapiens
tgagaatgacaagccagataaagagaaaataagatataaggcaaactggattatttttaaaagtaggatgagaaaagatggcaagaaaaatgcaatttgtgttagattttaaatcatattcaagacttctccttccaagcacaatggaataacttatggcagaataacactctcattaaaaataatcaggccgggcgcgctggctcacgcttgtaatcccagcattttgggaggccgaggcaggcggatgatgaggtcaggagatcgagaccacggtgaaaccctgtctctactaaaaatacaaaaattagccaggtgtggtggcaggcgcctgtagtcccagctactcggagaggctgaggcaggagaatggcgtgaacctgggaggtggagcttgcagtgasccgagatcgcatcactgcactccagcctgggtaacacagactctgtctcaaaataaataaataaataaataaataaataaaaataaccagaaaaaattcaaacaattactctctcaaaaaaatggtatttacaaaaaggcaacaaaaagctattaaagaagactctatggggactaaacttccagatagttaacagtcttggagaagtgagt

SEQ ID NO: 488524 - DNA, 569 bp, Homo sapiens
cattattaatctaagtatctgcagtccgtgtatgtagacagtggcatataacagataaaattgtgatcaaagacacaacagagatcataagcaggaacatgtaactcagaggaacaattgtcagaaagaagattcaagggaaaagatagactggcttacatgtacgagatctcttcaaagcattctgttaagacagaaactgctatccttagtcaatgatgttgaagtcagttcattaatgttgaattaagtgttcaaaactattatttcagtaaatgctaaatttttgatgttgtactaatttctgagtatatggcacctgwcctcatcaattgcacatatttttttatagaaatatgctaccataatgtgaccaagtaagggaaatggctaacattataaatgtaatcagcactaataataaataaacatcaaagtaatttttgtattgcatttaacaaaatgcaacaacaaattatgaaactacacagtttacctataggagaaaatgtgttaatgaatgaaaatgacatatcactaaaacaagcaaaaaattgaagacggtggaa

SEQ ID NO: 488525 - DNA, 364 bp, Homo sapiens
gcttgtgtcttctcccaccgatctgctcctcttcatgtccagcagcttgtgtctctaccttgctagggtctcgggtttttataggcccaggatgggggcgtggcgggccagggtgggcttggaaaatgcaacatttgggcagcaaaacagaaataccggtcctcacctaggtctgtagtggtagagccctagccagggactatgccttcctctacccagcacttcccttcccccrttccgtatcatttaaagggaccacgttcttccctacccagcactcctgtatcagttacatttaaaagaacacccttctgaagaaactcttcattaaataatagacagaagataatatgtggtcgtgggt

SEQ ID NO: 488526 - DNA, 382 bp, Homo sapiens
gaaacacaagcaatgtgctcatgcactaacattagtgcatacaaaatgtgcaatctatcatcatcatcaacaaatatttatggagcactcactgtatgtaaaagctagtttcagaagttgcaatggaaatttatgtggaatagagaaaccatcctattgttttttcccttccttttcttttcattcacacgtttctaagcactctgaatgctctctctctctctmtatatatatgtatatataaaatatatataattataattattatataggtgtaattacagttgtatacatggaaagtatgcaaaatatatatgtttctaagacacgcactctctcactatatattataatgatacatatattatacatacataatttg

SEQ ID NO: 488527 - DNA, 359 bp, Homo sapiens
ctcactcacaacactataattgaaagcactacgggtgcatggtacatctccctgagaggtgaggagacaggcctggaatgactagaaagcagtagtggttgcattctgctcagggctccaatttaccctcaaaaagaggttcaactgcccagaaggacatgaggctggctcttccatctagcttgaaacctccaattsatcctacctcagagtacaggttttggagtccaacttttctcagttgcagtctgagctctgtctccagttagccctgaggcctctggaaagtgattttatttttttcatcatttccttgttttagttggataggacatattcaataacttcccttgaagtgc

SEQ ID NO: 488528 - DNA, 599 bp, Homo sapiens
gcctattggcattagatcatcttttttgtccaatcatatttcaacacagctgtctatactttgttgagcctaagcataaaaatgaataatttcctctgtatctttgagtcttcattctgaaggctcccgtgcatacatgttaagtacatttgtattttttctccaattaatctgccttttgcaatttgatttttcagtgaaccttcagagagccaagcctttggcccctacacaggtaaatattatttccagtacaccaacaactctgcatggcttaagtaatccatagaaaaataaactatagcaagtttataaaatagaaaataaactacaaatatgattacaaaatgctataccagtattcataattggtattttggtgcattcaaaactagaaaagatccagttcccagcaggcatctcttccaggaaaatgagctgaatcaaatcagatgaaccatttgtcttagtggtgataaggcctacttttttttaaatctaattcagtgtgtgtgtgtgtgtgtgtgtgtgtgtgtgygcgcatgcgagcacgtgggtgtgtttgtttccatactgaaaatgtgattacaaattgaaca

SEQ ID NO: 488529 - DNA, 553 bp, Homo sapiens
gtggtgaccagtggaacacaaaaaataatggcctaagggctctaggcataaacactatactgcatttcagtaayctatttttatgcttctggtacaaggaagatctaaagcagtagccaattcaacaaagggtagcggggcacaaaaggactggaatctccaaagagaagaggatgtagagattttggaaaagcataatcaaaattataattgcttgaagtcatctttagccatgatattaattccttttgaaatttcaagtaatattagcaaagagcataaaatcctctggatcaccaaaaaggggtgggcttggtagcaggttaacaaagaaattctgattaagagcaggaaaattcagagtcaagactcctgagttcaatgttcatcttcctatataaactttggctctttaagacataatattctttattttcaacatcattattaatataaagcaggagttctcaaactttggtatctatcagaattgccttgtagagtctgttaaaagtgcaggtacccaggcctgacctagacctactgaatcaga

SEQ ID NO: 488530 - DNA, 543 bp, Homo sapiens
agcaaaaataaccttcaaagattaacctgaaatcacattttgaacagaaagaaaattcatcaccattagacccacattaaggtaaacaaagaatatcacagatgaaagttcagacatgcagaaattaataaaagtggaaaggataaatttatgagtaaatcttgactatataaaataataacaacaatgtcttgtgatgttaaagataagtttagagttaaatacaggtcaaaatagtatataaattaagagttaaagtatcccagacccttactttgccagaattggcaaaagtattaatttagataaggctgtgatagattaaagacagttgttgaaatcctactgataatcagtaaagaaacagcaaaatagtgattaccaagctggtgaaaaaaaatatatatatatatatatatatatatcactaaaaacatacaytaaaggcaagacaagtgcattagaatagttgagataattataattcatattgtacaatgatagatttaagcataaatatatcaataattacattaaatgtaa

SEQ ID NO: 488531 - DNA, 543 bp, Homo sapiens
agcaaaaataaccttcaaagattaacctgaaatcacattttgaacagaaagaaaattcatcaccattagacccacattaaggtaaacaaagaatatcacagatgaaagttcagacatgcagaaattaataaaagtggaaaggataaatttatgagtaaatcttgactatataaaataataacaacaatgtcttgtgatgttaaagataagtttagagttaaatacaggtcaaaatagtatataaattaagagttaaagtatcccagacccttactttgccagaattggcaaaagtattaatttagataaggctgtgatagattaaagacagttgttgaaatcctactgataatcagtaaagaaacagcaaaatagtgattaccaagctggtgaaaaaaaatatatatatatatatatatatatatcactaaaaacatacactaaargcaagacaagtgcattagaatagttgagataattataattcatattgtacaatgatagatttaagcataaatatatcaataattacattaaatgtaa

SEQ ID NO: 488532 - DNA, 622 bp, Homo sapiens
ccctcctcagagctatggagagcacctcgcgctgaagctgacattcaaacgcctgaacggtcataactgagacccattccaaacgctgacttacatgtgatgtcattttcccccagtgttcttaactgaattgcaactgttgtatttaccatggtggggaggggcacgcacgcaaagtagagacgaggtagagaaagtagaagtattctttaaggtaaagatwtaaaaatattctgtagataacatgtaacttaagtggccctaccttggagcttcgtatgtaggtgagtttttatatgccacttctgtttctctcatttagatggatatatgcaatgccaaagacaaaagcttatgttaacaatcactgtaagttaaattatgcttgaaaaataagaataaaaaatattatggtgcaagaagaaggtgctttgtattgctttccattgaaatcaaaatgtaaagaaataaatgcaaagagaagatacagtggtatttatggatgtgcacaggggaggctttctctgtgtggggctgggcgggagagagacgcgtcacaggcagattgcattcgacgccgtgctcggagtggcgttctcggtgcagagttctagcatgaagg

SEQ ID NO: 488533 - DNA, 566 bp, Homo sapiens
ctggagagagaggggtgccttcggggtagcccacactttaggagcagtccacgtgggattacagaggccaggccctcactgtcatgcagggcagggctgagtccatggggccggctgaggcctctgttgagaccgtgtcacggctcagcacctccctctgcccggctctgccacctcccttccttcgcatgggaggagctcaccggcacccccagcgaacccggggtctcagagccgcctgctggaagaccaaaactgcaccatgagagaggggagcagaggacacccccgtccttttggtgccacaaattctaagataaattttagaaaggtgaaaayatgagaagtgcacatcttggacaaaagagcagaattatgagctctcagctcagtcaagcttcttcatttgcaaggacagaaaccccctgtggctgggaccaaggaggatggggcgttgaaagactgggcatcttgtgtcactccgggcttcacctcgcccagctccccctgcctctgccagccctcccaactcctctgccctgggctcctgcattcccctacagatc

SEQ ID NO: 488534 - DNA, 566 bp, Homo sapiens
ctggagagagaggggtgccttcggggtagcccacactttaggagcagtccacgtgggattacagaggccaggccctcactgtcatgcagggcagggctgagtccatggggccggctgaggcctctgttgagaccgtgtcacggctcagcacctccctctgcccggctctgccacctcccttccttcgcatgggaggagctcaccggcacccccagcgaacccggggtctcagagccgcctgctggaagaccaaaactgcaccatgagagaggggagcagaggacacccccgtccttttggtgccacaaattctaagataaattttagaaaggtgaaaacatgagaagtgcacatcttggacaaaagagcagaattatgagctctcagctcagtcaagcttcttcatttgcaasgacagaaaccccctgtggctgggaccaaggaggatggggcgttgaaagactgggcatcttgtgtcactccgggcttcacctcgcccagctccccctgcctctgccagccctcccaactcctctgccctgggctcctgcattcccctacagatc

SEQ ID NO: 488535 - DNA, 566 bp, Homo sapiens
ctggagagagaggggtgccttcggggtagcccacactttaggagcagtccacgtgggattacagaggccaggccctcactgtcatgcagggcagggctgagtccatggggccggctgaggcctctgttgagaccgtgtcacggctcagcacctccctctgcccggctctgccacctcccttccttcgcatgggaggagctcaccggcacccccagcgaacccggggtctcagagccgcctgctggaagaccaaaactgcaccatgagagaggggagcagaggacacccccgtccttttggtgccacaaattctaagataaattttagaaaggtgaaaacatgagaagtgcacatcttggacaaaagagcagaattatgagctctcagctcagtcaagcttcttcatttgcaaggacagaaaccccctgtggctgggaccraggaggatggggcgttgaaagactgggcatcttgtgtcactccgggcttcacctcgcccagctccccctgcctctgccagccctcccaactcctctgccctgggctcctgcattcccctacagatc

SEQ ID NO: 488536 - DNA, 638 bp, Homo sapiens
ctcctgcagggcacctcggttcagggacaggtcttgttacctggggcggtaggaggtgctcacagagtgtttggggtactcccgaggtcagggctgagctaccaaggtcaacacagaagaacaagtgcagggtcttggatagaccctacccagcctgggaaggccccgtgctgctgcttcagggacgacgctctgccctgtgccaaacctgcagtcgggactgtgcccagcagcccagcctgggagactgatgggtgaggaggcagggtcctcctgccggccttggagtgcaaaggcaagagggaagccaaggagaaagccccccagaggagggctgggcaccctccccgggcctgcgtgccagacgcaccaggcaggaagcaggagggggcggggcagagcagggcagggcaagagcaggttggagactcctgagcagcctggcctgagtccctggatccttcctgtggctgcgctgttttcccctgtccccactgtggtgcctgtgagcctctgctgtgggtcgcagcaggaaaaccctcttcccccagcccgctgggcccaggcggagctgggactrcagattcaccaaggatgcctgcgtgaccctgtccagagattctttcccgccaaaagcc

SEQ ID NO: 488537 - DNA, 566 bp, Homo sapiens
tcccacagctggcctggggaactgagttgctcattaggcctggtggagattaatgtcatcaactccaggcgattttcgctgtcattaacggtgtccagtcccctccagcaggagggaggacgcgcccactgaggccgactctggaggcctccgaaggccgcggtgcccacgcgtggaaygccctccaggcctcgctgcaaggaggtagagtggcagggctgcacgcacctgactccaggctggcccagtttaggagacttggcccacgggggagcccgcaggagagcggggctgctaggctagggggtgggcgcgcctggcggggacccccacctgccccgccccaccccaccctacccggctgctcccacacccaggccccgctggggaggctcgtggactccatcgccacctggtggtgctgcctggaaccgcggcctcatccggaggccccaccccacccagtgcccgccagccctggtcccaaaccctgaccccagccaatgatggaggtgacagtggtgcggcctgcagaagccaggcgcctcaaaccattccccaatatt

SEQ ID NO: 488538 - DNA, 566 bp, Homo sapiens
tcccacagctggcctggggaactgagttgctcattaggcctggtggagattaatgtcatcaactccaggcgattttcgctgtcattaacggtgtccagtcccctccagcaggagggaggacgcgcccactgaggccgactctggaggcctccgaaggccgcggtgcccacgcgtggaacgccctccaggcctcgctgcaaggaggtagagtggcagggctgcacgcacctgactccaggctggcccagtttaggagacttggcccacgggggagcccgcaggagagcggggctgctaggctagggggtgggcgcgcctggcggggacccccacctgccccgccccaccccaccctacccggctgctcccacacccaggccccgctggggaggctcgtggactccatcgccacctggtggtgctgcctggaaccgcggcctcatccggaggccccaccccacccagtgcccgccagccctggtcccaaaccctgaccccwgccaatgatggaggtgacagtggtgcggcctgcagaagccaggcgcctcaaaccattccccaatatt

SEQ ID NO: 488539 - DNA, 567 bp, Homo sapiens
caatgtctgctcataaattttaaaagagaactgtaaatataaatttgtgaatctttaccgcaccaataatttgaaggtaggtggcaaaaaaaaaagcaaaacaaaggcaggaaataactcaaatgtggctttttgccatttcaaatagagtaaacttaaataaaaattataaatggatgtagtataccaataaagatctagatcatgttatcaccataaacatccctgaaccactgatcctacccctctctgctaacttgatactgaagaaatcagcactagggtaatccattttgaagcgagtcttgccaaaatcttctctctggcttctacctrtagtatattatcttttcttccctgacattttatctcttttgttctatttgctcccatcagcctgaatttctgaatgtttcatcttttcttggacactccagtatacaaacatgtcttcactttggacataatcttagtggaattcaactgtgagttgtgtaagtgtaataaacagcttaactaccattctgtaaggaggctgcttacctaatccagcaggctcttgatgac

SEQ ID NO: 488540 - DNA, 494 bp, Homo sapiens
ctggtacttgtaggcaaagagtagagtgtgaggggtcagtggaatggaaagttactcagcggggacattaaaccaaactcaactgacctagcaggattcttgctgaaagcagaccaaagacttgtaacatcaaaggtggggaatgaggaacttgagcaggtatcaagtttgggggattcttgctaacctgacttaacaggattcttgcttaaggaacaggattggcgccaacgttgtgacttagtagagaagagaggcctgactcaagtttggtggaggagagaatctttgtcatccttgcagatgggggagaagggggagagagtaggtgggactgcagttatttaactgtgattttcattctgacttatctgcattacttctgtgaccctccataattgactgtgtttcctactgaycatgtaaggagagcagatgcccttaattatggtgcaaaagatgcaggattgaacctaattatacaacataatgtt

SEQ ID NO: 488541 - DNA, 659 bp, Homo sapiens
tcctgcctcagcctcctaagtagctgggattacaggcgcccaccatcacgcctagctaatttttgtacttttagtagagatggggtttcaccatggctggtctcgaactcctggcctcaggtgatccgcccaccctcggcttcccaaagtgctgggattataggcatgagccaccgcacccagctgcaaaactcaatttctaatgacctgtcatgcatgcacgattttgattgtaaacaagtcaataaggagattgtcctgtactcatcgtcaatactttttaatcttrtgtactacattttaaaataaagggaatgttaatttcttttctgccttgagcttttaaaaattatcttaattgatgttgccctgatagcttcagaggctggttttaaagcctttacactctgttctgaatgtagagagagcattacaaggacagccatgagggggagaagggtactctttctgtcagcctctgggagctgcattggttgttaggcacctttttccagatctgaaactgaagtgcaggctggtatggagagcttgtcacacgtgtgtgactagtagaaaacttaggatgagttcctctttttggtacaggtacacgtttaaattctccaggtcacacagagcactattgagattcaggctgg

SEQ ID NO: 488542 - DNA, 485 bp, Homo sapiens
tgtgcaagttattagcaaattcaagacctataagagaattaagaaatagccaaagaaaatgcagccctttctgtaattatttttttagattctcatgaaaaatgttatttgtgggattagcagaagaatccagttctggtctatgtcattttattttctrcaccagctcatctgttgagttggaaatggcctctgggatcagagaataggaagtgggtagattttcttcgctgggtaatcccaagttgccttaagaactcccacttggggaggctgaggtggatggatcacttgaggtcaggagttcgagaccagcctggccaacatggcaaaaccccgtctccactaaaaatacaaaaattagctgggtgtggtggcaggtgcctataattccagctactctggaggctgaggctggagaattgcttgaacctgtggggcggaggttgcagtgagccgagatcacatcacttcacttcagcctc

SEQ ID NO: 488543 - DNA, 522 bp, Homo sapiens
tccttctctgactttgttgctgtctctctcactgtttctttgtctgtccctctcttctctgtcattctgtttctctcacttggtccctgtcctggatcactctgtgtctctgtgtcttctgtctctgtgtcctggtttcaytctgcctccgtatctctctctgtctcttttttttttttttgcctgtttggtctctttgttttcctgtcattctttttccctcatttggtcctcagtttcagctctgcctgtctctctctctgtttctgtcattctctctctctctttctgtcatcctctctctttctgtgtcattctccatgtttgtccttctgttccctttccttgtctgtctctgcacaccaaggttgctcccagctgggaggttggccctgtcccgatgcctggcccttcttctgccaaaggcatcttggaaagacttgaggttattctggtgcattcagtccagcgcttgataattgtactaacctggcaattggcaagtgctcctcccaaagaaaa

SEQ ID NO: 488544 - DNA, 596 bp, Homo sapiens
aaccagtaaaaaaattgttaatgagatgtgttacatgcttttattcctactacgtcttcaaaacctggtacctatcttgcactcacagcacatctcaattaggatagccacattgcaagcactcagccacacacagctcgcggctaccctactgaacagctcaggcctaactcgttatcattattgactttccactgcttcrgaattctagtctagcttagtaaaagtcccatcaatacacaaaatatggtgatgagaattctccccaaacctcagtccttcctcacctttgaatcttagcttcctacagacttctatttggtcgcttacatttactgatgaaaacacagttatttttcttccctcctttcctccctcccttccattcatttaactcacaaacgttcccagaatcgtaggagggttacttgcgattctgtgggtgaggccggtgccccgcccaagggattaagtcagcctgtgcctctctccccacccttccacacccttgacctctccgcgcagagctggtcgacagcacctcccttgttctgccctggattgctgcccgctgcgttcttgataagcttggagtg

SEQ ID NO: 488545 - DNA, 596 bp, Homo sapiens
aaccagtaaaaaaattgttaatgagatgtgttacatgcttttattcctactacgtcttcaaaacctggtacctatcttgcactcacagcacatctcaattaggatagccacattgcaagcactcagccacacacagctcgcggctaccctactgaacagctcaggcctaactcgttatcattattgactttccactgcttcagaattctagtctagcttagtaaaagtcccatcaatacacaaaatatggtgatgagaattctccccaaacctcagtccttcctcacctytgaatcttagcttcctacagacttctatttggtcgcttacatttactgatgaaaacacagttatttttcttccctcctttcctccctcccttccattcatttaactcacaaacgttcccagaatcgtaggagggttacttgcgattctgtgggtgaggccggtgccccgcccaagggattaagtcagcctgtgcctctctccccacccttccacacccttgacctctccgcgcagagctggtcgacagcacctcccttgttctgccctggattgctgcccgctgcgttcttgataagcttggagtg

SEQ ID NO: 488546 - DNA, 596 bp, Homo sapiens
aaccagtaaaaaaattgttaatgagatgtgttacatgcttttattcctactacgtcttcaaaacctggtacctatcttgcactcacagcacatctcaattaggatagccacattgcaagcactcagccacacacagctcgcggctaccctactgaacagctcaggcctaactcgttatcattattgactttccactgcttcagaattctagtctagcttagtaaaagtcccatcaatacacaaaatatggtgatgagaattctccccaaacctcagtccttcctcacctttgaatcttagcttcctacagacttctatttggtcgcttacatttactgatgaaaacacagttatttytcttccctcctttcctccctcccttccattcatttaactcacaaacgttcccagaatcgtaggagggttacttgcgattctgtgggtgaggccggtgccccgcccaagggattaagtcagcctgtgcctctctccccacccttccacacccttgacctctccgcgcagagctggtcgacagcacctcccttgttctgccctggattgctgcccgctgcgttcttgataagcttggagtg

SEQ ID NO: 488547 - DNA, 472 bp, Homo sapiens
tcttgagagggaccacgttggggagtgctgagacaggaccctcatgctcaggggctcacagtgttgtgagctaagtggataaacaaccagtcaaggtgctgcaataagaactctgacactggtgcagaggaatgatttgatatgatgtgagatgctatcatatgatgtaattgacgtgacgcaatatacattacaatacatgcagaccgctcatctaagtgcctagcatataataagtacttagtaaatgtcatacactttcttttggggcaggaaacagagaatagtataaacaaggtgaaaggcaagaaataatgtggtgaattccaggaatgctgactagaccagtccagtggaagagaaacattagggaacttgggggcatttttactgactgtctgggaagattgcattctatcttkatctctacttccagataaatctttctaaaacactaccttgatgataaagc

SEQ ID NO: 488548 - DNA, 612 bp, Homo sapiens
caaatctcaacactttctaatggaaaaaaaaatggattctcagcagagtagtacccacaacttcaatttaccataagaagttacaaacatatacaaaaacaagaaagtaaaatgtataacatgaagaaagatacagttgttagaaattaactcagaaatgataagaatgtgaaaataacattataaatattgtcataatttaatgggaaagatggctaccataggtgaagaaaaaactgggagatttcatttgtgatatagaactaatagaaaaacacctaaatggaaattctaaaactacaaaacaacaacatatgattttataaagtcactagataggcctaatattgcagaagaaaagatccgggaacttaaagactgaccaatagaaactatccaactgaaatggagacgtattttaaaaagaaaacttcagtaccatgtggattaatgtcaartggtctaccattatagtcttagaaggagaggaaaaagaagttgagaaacaaaacttatgtgaagcaatgctagccaaaatgtttcctaatatgatggaaaatatgctgaatatctgcccaagcaggattaaaaaaaaaaaaaaccaaactaaac

SEQ ID NO: 488549 - DNA, 485 bp, Homo sapiens
gtctgatgcaatccctaacctttggcttgtactctgcaatgtcgccagctcttcccagtattttaccatattgcagataaggtgtgggtgtatggaaaagaaaaacagatgtactagattggacgctgtcccttcaaaattcatgatcatcctgaaatctcagaagtctcagagtgtgacatgatccaatataaccgtgtcctaatcaggaaagcagaagaggcatagagtcaagctgactctatgaagaagacagaggtagaggttggaatgatgcctctacaagccaaggaatatcaaggattgctgtcaaccaccagaagccaggaagagacaaggaaraattctcccccagagcctgtccctgccagcacctttctttcaaacttctagactccaaaactgtcagtcaatacatttctactgttttaagccttttgctgtttgtggtcatttgttagggcaatcctaggaaactaatacac

SEQ ID NO: 488550 - DNA, 436 bp, Homo sapiens
tgtggtgggcacactgtaattggtccaggaatctgttgaatgaagataagcaggaacatctgagacccagaatccagcttctccaggagtggaagaaatggctccttacaggaaatatctgtgcttctggaacttaatggtacaatcttgtcactcctttacttcaaaatattcagagcggcccagaatctcaatttccagaactgcatctagcactgtgttagagagctgattgctgttctgtgagtgccagcaggtaagcctcaggggcctggtgatgcctgtccaaggagaagaaagtcccagatcccagagcagcggcccctcaccctcccctsagccactgcatccctacaggcagcccccactgttacaaaccaacagtcacatggctgttgtttcacctcctgtttccttctcttctaccacttagttt

SEQ ID NO: 488551 - DNA, 645 bp, Homo sapiens
taattggtccaggaatctgttgaatgaagataagcaggaacatctgagacccagaatccagcttctccaggagtggaagaaatggctccttacaggaaatatctgtgcttctggaacttaatggtacaatcttgtcactcctttacttcaaaatattcagagcggcccagaatctcaatttccagaactgcatctagcactgtgttagagagctgattgctgttctgtgagtgccagcaggtaagcctcaggggcctggtgatgcctgtccaaggagaagaaagtcccagatcccagagcagcggcccctcaccctcccctgagccactgcatccctacaggcagcccccactgttacaaaccaacagtcacatggctgttgtttcacctcctgtttccttctcttctaccacttagttttcctcttttccatcttctctcttgttttacatttcccttttgcctgagctctctttcttccccttctctcggctccatttaaactggaaaagtcactctaaactgcattagagcccacagagtcaggaatgacacccagctcagctccgccgtagcaggatatcccacacaatgcgcagaacttctcggaayctcagcatcctcatctattatactaaggcctta

SEQ ID NO: 488552 - DNA, 611 bp, Homo sapiens
ctgcatcaataacagagtcagagcttactagaaaagagcggagatttaagagagtgggtgatgctaatagctcaccccatctccctttgcactatttctccaagtaaagactgcctcctgcctgcatctgagctgcttgtaaaaatgcagctttctggcctgcatcccaacctaaggaatcagaatctggaatcctgaatctgcatttttaataagttccctagttgatttctttattctttttttttttcttttttgaggcagggtctcactctgttgcccaggctggagtacagtggcatgatcccagctcagctaaactctgcctcctgggctcaagtgatcctcccacctcagcctcccagtagctggaattacaggtgtgcrccaccatgcccggctaatttttgtatttttagtagagacggggtttcaccttgttgcccaggctggtctcaaactcctggcctccagtgaaccacctgccttggcctcccaaagtgctgggattacagacatgagccaccacacgtggtcccctagttgatttcttatggctatacattacatttgagattagaggtaagcctcctggggcgaggcaagagggg

SEQ ID NO: 488553 - DNA, 611 bp, Homo sapiens
ctgcatcaataacagagtcagagcttactagaaaagagcggagatttaagagagtgggtgatgctaatagctcaccccatctccctttgcactatttctccaagtaaagactgcctcctgcctgcatctgagctgcttgtaaaaatgcagctttctggcctgcatcccaacctaaggaatcagaatctggaatcctgaatctgcatttttaataagttccctagttgatttctttattctttttttttttcttttttgaggcagggtctcactctgttgcccaggctggagtacagtggcatgatcccagctcagctaaactctgcctcctgggctcaagtgatcctcccacctcagcctcccagtagctggaattacaggtgtgcgccaccatgcccggctaatttttgtatttttagtagagayggggtttcaccttgttgcccaggctggtctcaaactcctggcctccagtgaaccacctgccttggcctcccaaagtgctgggattacagacatgagccaccacacgtggtcccctagttgatttcttatggctatacattacatttgagattagaggtaagcctcctggggcgaggcaagagggg

SEQ ID NO: 488554 - DNA, 611 bp, Homo sapiens
ctgcatcaataacagagtcagagcttactagaaaagagcggagatttaagagagtgggtgatgctaatagctcaccccatctccctttgcactatttctccaagtaaagactgcctcctgcctgcatctgagctgcttgtaaaaatgcagctttctggcctgcatcccaacctaaggaatcagaatctggaatcctgaatctgcatttttaataagttccctagttgatttctttattctttttttttttcttttttgaggcagggtctcactctgttgcccaggctggagtacagtggcatgatcccagctcagctaaactctgcctcctgggctcaagtgatcctcccacctcagcctcccagtagctggaattacaggtgtgcgccaccatgcccggctaatttttgtatttttagtagagacggggtttcaccttgttgcccaggctggtctcaaactcctggcctccagtgaaccacctgccttggcctcccaaagtgctgggattacagacatgagccaccacacgtggtcccctagttgatttcttatgrctatacattacatttgagattagaggtaagcctcctggggcgaggcaagagggg

SEQ ID NO: 488555 - DNA, 674 bp, Homo sapiens
tgtgattgcatcactgtattcccacctgggtgacatgatgagacccccgtctcaaaaacaaacaggctgggcgtggcggctcacacctgtaatctcagcactttgggaagccaaagcaggtggatcacttgaggtcaggggttcaaaccagcctggccaacatggtaaaaccccatccctactaaaaatacaaaaattagctgggtgtggtggcacgcacctgtattcctagctactggggaggctgaggcatgagaatgtcttgaacctgggagacagaggttgcagtgagccgagattgcaccatgcactccagccagggcaacagagtgatactccatctcaaacaaacaaacaacwacaacaacaagaatcttttattcatggaacccaatagaaaaggtggagagacataaaaaaaaaaattaaattctacagaggtatccacctatgcctgtgcccagtctgtcatccagcagtttggtttcagtgtttagtgattacctctgtgtgtctaaatactatgtttacactgcttgctatttcctggtttatcatctttagacattatctcttgacttcctcttgtgaaagataaggatttaacttgctcacaaagataaggatttaacttgctcacactcctgtcccagtaaagctatatcattattttt

SEQ ID NO: 488556 - DNA, 693 bp, Homo sapiens
atggtttacgttatttatttatttatctttttgaggtggagttttgctcttttgtccaggctggagtggacaatctggggtcactgcaacctccgccttccagtttcaagtgattctcctgcctcagtctcccgagtagctgggactacaggggcccgccactatgcctggctgatgttttgtgtttttagtagagacagggtttcaccatgttggccaggatggtctcaacctcctgacctcgtgatcctccctcctaggcctcccaaagtgctgggattacaggtgtgagccaccgcatctggctaccttacattttaaaataacccttatcactactgaaaatgatgtctttatatgtctatctccttatkttctgtttccttactctcctcccaggaacataaacttcatgagggcaaggactttgcctccttcacttttgtgtctctggtgcttagctccgtatttgaatatttgttggatgaatggataatgactattccaggactcgcttgatacagaactatcttctctagagaatggaaaggtaaacgtatcatttaccagccacttatcttaagtagagtcccagagtgtaggcttatgccatggagctcatgtgaatttccacttgggccatctgggattcttttctcaaaagagcctgatgcctggtgcaggggccggtca

SEQ ID NO: 488557 - DNA, 646 bp, Homo sapiens
atgcatttaatcaatgtcctgatctaattaggatccttttttcttcttgtaggaagaccatgaaaacgtattatactcaataatcagaatattttatgctaatttaatatatcattatatttattcattcaaggttcaaataaaaaagtttcacattttttgagaaaaactataatgtatgaaatgacagatttgaaaacagcttattaatatatgttaatatacttcttaatcctgaaaatagtgataattttcatttatgaatctaatttacattggcttcatattatttagatgagcaagaagaatagctatggagaaagacacaatctgcatttgaatataaagatttatggtaatgttayggtgtaattccataatttataccaagtgtatcaggtctaggatatctacaggatatactttgaaagtcaaatgactgtagacttgcataaaaaataataatatctagatagtacatgaataatgcaagagtgtacattgaaatggtcacattaaattaatctgagttgctttcagcatagtaaattccttttaaatccaatcatttctcaggctaggcgatgacaactacagggacgtttttgtctgagtcctccactctcttatcttcttttgagtcacc

SEQ ID NO: 488558 - DNA, 547 bp, Homo sapiens
aaagtcaaaaattagcagcaaaatgatcaacagctttgagaatttgatggtcattggagagagaatccatagccacagctgtatccacagccatagcttgacccatggtcactgccacacccagagccttaactayagcccagtcttgggaagttcttgctacccatatcatagccatagccaagcccacaagagcaatttgttcttaattttaaaattatattgcacaatgtactccttatactattcattttggccaaatcttttgtttgagaggatcccattgtgacaagcaattattacaatctgaaatgtctacaaaagcttgacaggtactacaagcaagtgaagtctgcaagaataaactattaaaaattgtgagtgctaaggttacctgaagagagaatgccccatctgtgagagtgaaccaatggttaccatgggaaaatgtctccatatgccaatattgccagatcttccaatttttcaagagaaaaaaaaggaatatgattttgaatataaaattccccaatttttaaatattgac

SEQ ID NO: 488559 - DNA, 558 bp, Homo sapiens
acatactaaaaagtcatgcttttaagttaatggacagaagagtgtgactctctagacagtccaaagcatcaacacaaccagaactgttagtagagatttgtaagaattatagtttctccataaaatatgacaaattttccattgatggtgctttgcaggcttgatttctagccataacatttgacctttgttttgccctgttctcccagatgaccatgtaagattttctaatctgaaaagaatgatgaactaatgttataccaatcttactccacacttgcagtgaggaaactagaagatgacagctacaagtttctgaatctggacaatcttatctcttgaaactaacacattcactgtactctcataacagatcattcttttgagcataaataatgtgtgggmgtgtgtgtaaaaagtgtagaaagatcacgtggaaagtcagactagtgttcagcacacagtgagtgattagatgacagatttgagcctggcccagcgctctgttcggggagaaagacttggcttttaaggtgtaccactcattctgctgaaaaa

SEQ ID NO: 488560 - DNA, 348 bp, Homo sapiens
tgaccatgtaagattttctaatctgaaaagaatgatgaactaatgttataccaatcttactccacacttgcagtgaggaaactagaagatgacagctacaagtttctgaatctggacaatcttatctcttgaaactaacacattcactgtactctcataacagatcattcttttgagcataaataatgtgtgggcgtgtgtgyaaaaagtgtagaaagatcacgtggaaagtcagactagtgttcagcacacagtgagtgattagatgacagatttgagcctggcccagcgctctgttcggggagaaagacttggcttttaaggtgtaccactcattctgctgaaaaa

SEQ ID NO: 488561 - DNA, 625 bp, Homo sapiens
ctgtctctaggcattataaatcaatgaatcttccttggttcttcccaaacctactattttgtaattgcctatatataaataaacacttagaccaatgaatacgtaactaacatttygcttggaatcattctgctgccatatatgaatttccttcctgtgttatggctacttttttagtagaatgtatttaaataggcttacagagtttcagagatttcagattagagtcttatctctcaattattccttttcatattaatgcataagatatatattctagggggccaagctctgtgactcactcttataaacctagtgctttgtgaggccaccagaggaggatcacttgaggatatagttcaagatgaacctgggcaacatagtgagactccatttctaaaaaaaaaaaaactgttttaaaaaattagccgagcctggtggcacacacctgtggtcctagctactcaggaggctgaggcagaaggttcacttgagcccaggagtttaaagactgcagtgagctatgattgcaccactgcatcccagcctgggcaagagagcaagagcttgtgtcttaaaaaacaaaaaagatacatatttttaaaatcttaactatacttaagca

SEQ ID NO: 488562 - DNA, 456 bp, Homo sapiens
ggccattccataataaatacgaagattaaacgtttatttwaaatgtacaagtagaatacatttttaaaagtagccaacaattttgcttatttttttattttgtggaggttttctgagagcttgtactatattttgtctgtattgtatacattcatctaattggcagtctattgaaactttaattacaataaaatagtaagtaaataactgtgtactatttttcgttggtgttgggtagctagattttcaacatttgcaatactgattcattattgcttaccaaataggtaattatagctaagtctcctaaccttagggtactagatttttcagaaagacaaagtctgtattaagaccaatataaatacaaacaataatttaaaccatgttggcgaaacagtgatacaaaataagtaaaatggtactgacagaatcctaaattctaaaacacatcaa

SEQ ID NO: 488563 - DNA, 456 bp, Homo sapiens
ggccattccataataaatacgaagattaaacgtttattttaaatgtacaagtagaatacatttttaaaagtagccaacaattttgcttatttttttattttgtggaggttttctgagagcttgtactatattttgtctgtattgtatacattcatctaattggcagtctattgaaactttaattacaataaaatagtaagtaaataactgtgtactatttttcgttggtgttgggtagctagattttcaacatttgcaatactgattcattattgcttaccaaataggtaattatagctaagtctcctaaccttagggtactagatttttcagaaagacaaagtctgtattaagaccaatataaatacaaacaataatttaaaccatgttggcgaaacagtgatacaaaataagtaaaatggtrctgacagaatcctaaattctaaaacacatcaa

SEQ ID NO: 488564 - DNA, 664 bp, Homo sapiens
acacttttaattaagtgacttctatcaaatatagtattatgaaaatactaaaatggaaattatgattttataataaatctacaaacatttcatcacataaaggagctagagacaaktggcaagatgctttcaaagagttttatttttgtctgcaacacttggcagacatgaaatctttgaggatgctgatttaataacattcactgaaattttggaaggtatagtcagtcatattgtaaaagaatcttctttattagaagtttcttaaataataaattatatgtatttaaactctaccctttcacctttcacatctagttctaattattcatccttaataatggaatacttttattatactgtcaactttttagcaaatggtttctaaagtggtaagtcaatgtaaacagatggcaagattttttaagcaataataataatgcctgtaagtagatgctacaagcaacacagtaagaaaacaaacaaacaaacactggctttggagtcagaaatccctatcttgtgcttttccatttagaaggtttgtaatttgtgtcaaattacaatctatgagcctcagattcctcatgagtaagacaaccataagaatactagtcatattgttcagaatttaatattaactgaaaaacagcattttataaac

SEQ ID NO: 488565 - DNA, 664 bp, Homo sapiens
acacttttaattaagtgacttctatcaaatatagtattatgaaaatactaaaatggaaattatgattttataataaatctacaaacatttcatcacataaaggagctagagacaattggcaagatgctttcaaagagttttatttttgtctgcaacacttggcagacatgaaatctttgaggatgctgatttaataacattcactgaaattttggaaggtatagtcagtcatattgtaaaagaatcttctttattagaagtttcttaaataatraattatatgtatttaaactctaccctttcacctttcacatctagttctaattattcatccttaataatggaatacttttattatactgtcaactttttagcaaatggtttctaaagtggtaagtcaatgtaaacagatggcaagattttttaagcaataataataatgcctgtaagtagatgctacaagcaacacagtaagaaaacaaacaaacaaacactggctttggagtcagaaatccctatcttgtgcttttccatttagaaggtttgtaatttgtgtcaaattacaatctatgagcctcagattcctcatgagtaagacaaccataagaatactagtcatattgttcagaatttaatattaactgaaaaacagcattttataaac

SEQ ID NO: 488566 - DNA, 664 bp, Homo sapiens
acacttttaattaagtgacttctatcaaatatagtattatgaaaatactaaaatggaaattatgattttataataaatctacaaacatttcatcacataaaggagctagagacaattggcaagatgctttcaaagagttttatttttgtctgcaacacttggcagacatgaaatctttgaggatgctgatttaataacattcactgaaattttggaaggtatagtcagtcatattgtaaaagaatcttctttattagaagtttcttaaataataaattatatgtatttaaactctaccctttcacctttcrcatctagttctaattattcatccttaataatggaatacttttattatactgtcaactttttagcaaatggtttctaaagtggtaagtcaatgtaaacagatggcaagattttttaagcaataataataatgcctgtaagtagatgctacaagcaacacagtaagaaaacaaacaaacaaacactggctttggagtcagaaatccctatcttgtgcttttccatttagaaggtttgtaatttgtgtcaaattacaatctatgagcctcagattcctcatgagtaagacaaccataagaatactagtcatattgttcagaatttaatattaactgaaaaacagcattttataaac

SEQ ID NO: 488567 - DNA, 313 bp, Homo sapiens
gaacatgatgtaggaagaaaaatggagaatagttcagacagctcaaaatacccacttagagaaaaggaaaaggagtttactctgaagtcctagaaagatttccaggcagcattgggcatccagttgttaaaaagcatgaattacagtggtagggttctgagattttttaaggcaactcttaaaatcctttattatcccaggaaaactcaatagatgaaatgaaattgtttcatgcagattttatttaatgaacatgtattttcataattaaaamatcagtaattttgaataaataaaagtaaccacagtatta

SEQ ID NO: 488568 - DNA, 424 bp, Homo sapiens
agcaattatttgaacatatatattttttaaattttgcttttctgtctcttccactagacagggagctcctagaaggcagcaagtgtgttttatttatctccgcattccaagcacccagcaatatgcttcgtagatgtttctggaataaatgagaaaatgagttctaaatcctgaagctgaaggaccacggggtctcctcccgcaaytgcaggggccaggatattccgttccccgcctccctcccctcccccttctcctgtgagacacactccaagctcgtatgggacgcagacgcctttctcaggatatctggtctccacagtgagaatacgtgatcacatctcactgccagggagagggaggaaagcacgagggaccctcaagcgagaaatggaggctccaaactgactgggaggaaaatgga

SEQ ID NO: 488569 - DNA, 617 bp, Homo sapiens
ttaaaccattgaagtttgaaagcaggagtggaggacagagggatgggctggtgaccctggggccgctcaccagagcaggctccrcacatgttattaagcaaatgtcaagcctgaaatttaaaaggtggctctttaaatgaattagagtcagagacactggaaagtgccaggaaattcttcacgtgaccttgaacagacagaaacctcctgagatgagagagtacaggtctattatttgacttggcaaaggacccttctggtggataggggtgtcccttctctaaaaaatgatgtgcagtgcatttctgtatgtttcctgtgaataaccactgaggcaccagcaaggggagtcatgggggtagaaggacagccgcggtagccatcacccattgagaccctgctcagctctgcctgtgctgccaggagcctcacctcaccctttcaacagccctttcatgctgatgctagtaacctctgacgcttatggagcacacactgtatgccaacatctcttcaaagccttcattcattcatttaatccaaacagtaacccaaggagaccatcattattactcccactttacagatcagaaaactgaggtggaaagggtaggtca

SEQ ID NO: 488570 - DNA, 652 bp, Homo sapiens
ctttgagttgtctccatatgtctctgaagcaggtcttattagtcccattttgcaaatgagtcaactgaggttcagagaagggctataattaggatcacagaactaagcaaaatctcccaatctttttgcccatgtggtcaggttttgaagcccaatgggcaggaccgataacaaccactgygaaaatagtgagtttggattcagtttctcagacgtgacattcataatatgttggagttccaaatgtttcaggacccagagttggggtatgatccccaacttcatcatttctctgaatttcatcatcatggcattcataaatgtcacaaatgggacagtgttgtgttcagactcctgaagtctccatcagagacctgccccatcccagtctctatggttgcactgaccagcacttttcatgtcttgacccaaggacaagaaagaatccagtgaaaatatcttcactcccgccccctgccaccaaacttcttcaacttgtccgagtgggtattacgcaaaaccattgtggtgggcattggtggttttcaacctacgtttatttcttgtttggggttaacattttatttactttggggaatagaatagattggaatattgctttcgattcttcattcccctttaagagaattag

SEQ ID NO: 488571 - DNA, 652 bp, Homo sapiens
ctttgagttgtctccatatgtctctgaagcaggtcttattagtcccattttgcaaatgagtcaactgaggttcagagaagggctataattaggatcacagaactaagcaaaatctcccaatctttttgcccatgtggtcaggttttgaagcccaatgggcaggaccgataacaaccactgcgaaaatagtgagtttggattcagtttctcagacgtgacattcataatatgttggagttccaaatgtttcaggacccagagttggggtatgatccccaacttcatcatttctctgaatttcatcatcatggcattcataaatgtcacaaatgggacagtgttgtgttcagactcctgaagtctccatcagagacctgccccatcccagtctctatggtygcactgaccagcacttttcatgtcttgacccaaggacaagaaagaatccagtgaaaatatcttcactcccgccccctgccaccaaacttcttcaacttgtccgagtgggtattacgcaaaaccattgtggtgggcattggtggttttcaacctacgtttatttcttgtttggggttaacattttatttactttggggaatagaatagattggaatattgctttcgattcttcattcccctttaagagaattag

SEQ ID NO: 488572 - DNA, 527 bp, Homo sapiens
tgaaagttcttacatgtttaacagctgacatatttagcaattttcacaagcatttcaaatatattataattgaattattttaaatgaacttgacttattatctttggagaatgtcagagcaaggttagaaagactatcaaaattagtaaaaactcattataaatcatcgttactgcaaacatttaaaaataaaaatgtgccaggcgtggtgactcacacttgtaatcccagcactttgggaagccaaggtgggcagatcacttgagctcaggagttcaagaccagcctggtcaatgtggcgaaacctgtctctacaaaaaataaaattaaccagacatggtggcgcaagcctgtagtcccagctccagaggctgaggtgggatgactacttgggcccggggagtagaggttgcagtgaaccgaaatygcaccactgcactccagcctcagtgacagggtgagaccctgtttcaaaataaataaataagtcaaaataaaaatgaaaatgcctgtatgtcaattttcct

SEQ ID NO: 488573 - DNA, 543 bp, Homo sapiens
ctaactttgtctggacggaaaggagacttccagtaaagagcaaagagccggcctggcacggtggctcacacctgtaatcgcagcactttgggaggccaaggcaggcagattgcttaaggccaggtgttcaagaccrgcctggccagcatcacaagacctcatctctactaaaaataaaaaaaattagccaggtgtggtggcacacacctatagtcccagtgactcgggagtctgaggtgggagaattgcttgagccctggaggcagagcctgcagtgagccaagattgcaccactgcactccagcctgggcaacagagcgagaccccgtctcaaacaaaaaacaaaaaagagtgaagagccatgactgccagccactggtcagcaggattggatagcagcaaaaataactaatttttattgagcacctactgtgcacccggccctggattaagtgctctacacacaccatctgcacctttcacagcaactgcatgaagtagaactatgataatccactttgcagaggaggaaacagtctcagc

SEQ ID NO: 488574 - DNA, 543 bp, Homo sapiens
ctaactttgtctggacggaaaggagacttccagtaaagagcaaagagccggcctggcacggtggctcacacctgtaatcgcagcactttgggaggccaaggcaggcagattgcttaaggccaggtgttcaagaccggcctggccarcatcacaagacctcatctctactaaaaataaaaaaaattagccaggtgtggtggcacacacctatagtcccagtgactcgggagtctgaggtgggagaattgcttgagccctggaggcagagcctgcagtgagccaagattgcaccactgcactccagcctgggcaacagagcgagaccccgtctcaaacaaaaaacaaaaaagagtgaagagccatgactgccagccactggtcagcaggattggatagcagcaaaaataactaatttttattgagcacctactgtgcacccggccctggattaagtgctctacacacaccatctgcacctttcacagcaactgcatgaagtagaactatgataatccactttgcagaggaggaaacagtctcagc

SEQ ID NO: 488575 - DNA, 543 bp, Homo sapiens
ctaactttgtctggacggaaaggagacttccagtaaagagcaaagagccggcctggcacggtggctcacacctgtaatcgcagcactttgggaggccaaggcaggcagattgcttaaggccaggtgttcaagaccggcctggccagcatcacaagacctcatctctactaaaaataaaaaaaattagccaggtgtggtggcacacacctatagtcccagtractcgggagtctgaggtgggagaattgcttgagccctggaggcagagcctgcagtgagccaagattgcaccactgcactccagcctgggcaacagagcgagaccccgtctcaaacaaaaaacaaaaaagagtgaagagccatgactgccagccactggtcagcaggattggatagcagcaaaaataactaatttttattgagcacctactgtgcacccggccctggattaagtgctctacacacaccatctgcacctttcacagcaactgcatgaagtagaactatgataatccactttgcagaggaggaaacagtctcagc

SEQ ID NO: 488576 - DNA, 543 bp, Homo sapiens
ctaactttgtctggacggaaaggagacttccagtaaagagcaaagagccggcctggcacggtggctcacacctgtaatcgcagcactttgggaggccaaggcaggcagattgcttaaggccaggtgttcaagaccggcctggccagcatcacaagacctcatctctactaaaaataaaaaaaattagccaggtgtggtggcacacacctatagtcccagtgactcgggagtctgaggtgggagaattgcttgagccctggaggcagagcctgcagtgagccaagattgcaccactgcactccagcctgggcaacagagcgagaccccgtctcaaacaaaaaacaaaaaagagtgaagagccatgactgccagccactggtcagcaggattggatagcagcaaaaataactaatttttattgagcamctactgtgcacccggccctggattaagtgctctacacacaccatctgcacctttcacagcaactgcatgaagtagaactatgataatccactttgcagaggaggaaacagtctcagc

SEQ ID NO: 488577 - DNA, 554 bp, Homo sapiens
ccatgtaaatttccttgctgttcttccaactacatccaaacttcactcatgtacaactttctgggggcctcagccgttgagtcaaggagggtccagttgctggagcttggagtgcaggtgaatcaagctgtgttagaggtattatcttttcagaatcaacttccacaaatggtgatttatgaactcatgtattacatatgggtctcatccttttaatattaaatataatataccagatatatggctaaaccatttcaacgattgaggtggaatkaattcattttttacagtgctaataacaacctggatttttactgtgtatattatatacaaatacaacacaatttttgtaaaattcttaataagaaaatcccaacctcctctactggactgttcttttaataacttctttcctggttcctcttctctcatacctacctactctaattatcacccaaggactcaatactagtataatgagtcctaaaagacattttttcttatatattttgacataaagaacacctgactagaagccatatcccctggatgct

SEQ ID NO: 488578 - DNA, 554 bp, Homo sapiens
ccatgtaaatttccttgctgttcttccaactacatccaaacttcactcatgtacaactttctgggggcctcagccgttgagtcaaggagggtccagttgctggagcttggagtgcaggtgaatcaagctgtgttagaggtattatcttttcagaatcaacttccacaaatggtgatttatgaactcatgtattacatatgggtctcatccttttaatattaaatataatataccagatatatggctaaaccatttcaacgattgaggtggaatgaattcattttttacagtgctaataacaacctggatttttactgtgtatattatatacaaatacaacacaatttttgtaaaattcttaataagaaaatcccaacctcctctactggactgttctttyaataacttctttcctggttcctcttctctcatacctacctactctaattatcacccaaggactcaatactagtataatgagtcctaaaagacattttttcttatatattttgacataaagaacacctgactagaagccatatcccctggatgct

SEQ ID NO: 488579 - DNA, 554 bp, Homo sapiens
ccatgtaaatttccttgctgttcttccaactacatccaaacttcactcatgtacaactttctgggggcctcagccgttgagtcaaggagggtccagttgctggagcttggagtgcaggtgaatcaagctgtgttagaggtattatcttttcagaatcaacttccacaaatggtgatttatgaactcatgtattacatatgggtctcatccttttaatattaaatataatataccagatatatggctaaaccatttcaacgattgaggtggaatgaattcattttttacagtgctaataacaacctggatttttactgtgtatattatatacaaatacaacacaatttttgtaaaattcttaataagaaaatcccaacctcctctactggactgttcttttaataacttctttcctggttcctcttctctcatacctacctactctaattatcacccaaggactcaatacyagtataatgagtcctaaaagacattttttcttatatattttgacataaagaacacctgactagaagccatatcccctggatgct

SEQ ID NO: 488580 - DNA, 611 bp, Homo sapiens
ttgctaaattctaagctattttatttaaataaaaaatgtagaatgacttcattcatttcacactaaaatctaagmatttagagatgacaaactctacaaagagttctgttttgtttaaacatgtcctctttctgcgtggctataaaatttgagtccctaaaattatagaagtcagatgattaaaatatcagagggagaaattaatttatttctaagtcacttctatgcccgtggcttaatatttggttttgaatacatctttaattaattatttttggaaaagttttggtcttctctagttgctaaaacaggctatacttaaatactaaagatgaacatgagatttttatattttctctcccacttagcaataaatacctctatcaagtaacagtaaaattatagctttataattttctgtatgcattatattagtttaattctttttatattttattaatgagggaagaaatgggtaatgtaataatactttgcagtgttttacagttatgcagaaaagtaaaattaagggagttttaattaactgcgtacatgtattcacatcaaattgtgttataaagattgtttccaaaagatggaaaagaattcca

SEQ ID NO: 488581 - DNA, 611 bp, Homo sapiens
ttgctaaattctaagctattttatttaaataaaaaatgtagaatgacttcattcatttcacactaaaatctaagcatttagagatgacaaactctacaaagagttctgttttgtttaaacatgtcctctttctgcgtggctataaaatttgagtccctaaaattatagaagtcagatgattaaaatatcagagggagaaattaatttatttctaagtcacttctatgcccgtggcttaatatttggttttgaatacatctttaattaattatttttggaaaagttttggtcttctctagttgctaaaacaggctatacttaaatactaaagatgaacatgagatttttatattttctctcccacttagcaataaatacctctatcaagtaacagtaaaattatagctttataattttctgtatgcattatattagtttaattctttttatattttattaatgagggaagaaawgggtaatgtaataatactttgcagtgttttacagttatgcagaaaagtaaaattaagggagttttaattaactgcgtacatgtattcacatcaaattgtgttataaagattgtttccaaaagatggaaaagaattcca

SEQ ID NO: 488582 - DNA, 637 bp, Homo sapiens
tttaacaaactgccagacccaggctatgtactgaagagataaaacaaaataaactcactattctcaaggagcttgaaactccttttcaagaatcttatttaaaaatttttaaaagtctctctttgtgccatgagggcttgtatagaacacaagcagaagttgtgaaatgagtatttatctatagatcctaaataaaggtttattggagatttctctctctacctctttttttctctgtactattcaaagaaaccttgtttctgataaggtaaggtagaagttaactagataaagttctgacaatgaaatttaaattacaggttctagtgtgattttggcacatcaaaacccaaagaacatttagaatgtgcccagcccatggaatctattcctttgatctactcagctcaccaagatgattgttcagccctccccsactttctctcaaaatatctcaaccactaacaacagcaacaataaataaaaaggaaaggaggaaagaagaaaaatctccttaggggcataaattattttcatttgctttctgcaatgacaaaattaagaaaacaccaaatagctacattactttgcattgggtaaacctccagccttcaattgctaggtaacatttcttgca

SEQ ID NO: 488583 - DNA, 600 bp, Homo sapiens
tccaaacacagtggtttaactaacattttcttaactgccatgaagttcagaagtaatataatatgcacagagttggtgccatgacttttaaaccaccaaggaccaggctccttccagcttcttactttgccatcttaatatgtggctttcatttccatggtttcacaaaagaaagagaaaatgacaagaatgtagaaaaaatggggcttttatgagaaaagtaaaaattttccagaaaacctcakcaaaattctaattggtcaaaactaggttactcttaactgcaaaggagactggaaaatacaatgttatctggaacaaaatgaggagtctgtgggcaggagaaaggaaaaggatggagactataataatatagacaataaggtgtgtctgccacacccacatacctagtgtctacgaagtatagactgatctcagtgtttctaacgtacacacacacgtgttcacacacacacacactaaaaatatactctgcaatataatattttttctgaagactgggatgattataaactttctagatgctcctgtacaaacagtaattaaaatcccttagacactttcttatttgcaaaatga

SEQ ID NO: 488584 - DNA, 600 bp, Homo sapiens
tccaaacacagtggtttaactaacattttcttaactgccatgaagttcagaagtaatataatatgcacagagttggtgccatgacttttaaaccaccaaggaccaggctccttccagcttcttactttgccatcttaatatgtggctttcatttccatggtttcacaaaagaaagagaaaatgacaagaatgtagaaaaaatggggcttttatgagaaaagtaaaaattttccagaaaacctcagcaaaattctaattggtcaaaactaggttactcttaactgcaaaggagactggaaaayacaatgttatctggaacaaaatgaggagtctgtgggcaggagaaaggaaaaggatggagactataataatatagacaataaggtgtgtctgccacacccacatacctagtgtctacgaagtatagactgatctcagtgtttctaacgtacacacacacgtgttcacacacacacacactaaaaatatactctgcaatataatattttttctgaagactgggatgattataaactttctagatgctcctgtacaaacagtaattaaaatcccttagacactttcttatttgcaaaatga

SEQ ID NO: 488585 - DNA, 604 bp, Homo sapiens
ccgcaactgctgcattgtgacccggaagccctgagcgcccagcaccacgaggcctgtgtgtctaattggcactgcagccaggaaagcctcctccctctgtgggccccatgcaggactgccagagtcaaagaagggggttggggagaatatgttgcatgcgagtgtgtgtgtgtgtgtgtgggtgggtgtgtgygcgcgcgcgtgtgtatgtgcatgtgtgttgtgtgcgatcacctgcttcccttcccttgttgccatgggttacgaagcccatagctggagagcagggccaagcacttgaggtggaaataactgcgtcagcctctgaaaaaagaaattagaaatagggagcctggaaacaatggcaaaagaacaaaaatcaacatcccaaggcagcccgactgtgagcaaggaagccaggcagccaaaaggagggcggctcttcataaatctcactttcaccagacatgttggtctaaacagtgatgacgagaaaagaatgaatgcaaatatctacggcaatcctgtgtctccacccgcttggccttaggtctataatccaacttggagaaaaataaacaaagtctgtgaagagttaagtcaa

SEQ ID NO: 488586 - DNA, 626 bp, Homo sapiens
gcatcaccttcatgaccggggacttcaggtgggtggccattacaaccagaccaggggaaagagccattaaacagtgtttcccaaagtgtgttgctaggaatggaatatgtataacataagaaaaggggtccaaggtcgaatttattggagaaattatgggttaagtaaagctaaagaggtttgtttcaggacttcttggagctttcctacactaatgaatctgtaagaagagtgcaggctgcagtctcaacaattcctttttaatggggtgcaggggagcctttttatggagcagctcatctcactggactactatgctctgaaacatgctttgggagagattccaaacccctttcttgtggtcagccctgggcttgcccagaagatcctggtactcactctctgtcctgctccagactctcccaaatcccctaaccatgctacctgttataacsaacatatttctgaattcttaccccagattcttccttgccccgtcccaccctattttcaactttcctgtttgcagccttactctttgacatcaccatgcctctcagttttcccagtgacaacactgactttatcttaccccagctgggtttgcttagattatacttgcagtt

SEQ ID NO: 488587 - DNA, 530 bp, Homo sapiens
ggctgtgaggccagcccttgacaggcatgccttttgtggctcacagcttcaactactacctcaggcaagcccttgagacatctctctggaccaacttctcttcatatagccacttagtctctggtcagagtcaactagctatatgagactatagatcaaacattcattgtgatttacacgaaattaatttccagaaagtgtaagtaatggtactttgtatgaaaacacayattttccaggaattttttattgcccatgacacacacactaagattttgccaaaataagttcaagccagttgtgtaactgtactcaaaatagctgaggctacataaaatgtcttttgggcactgactcagggggaaaaaaaacaaatgtgctccttaataaccctggtagctgtactgactctaacagataattttctagtccagcaacagtattgcagtttgtcattaatagatgtgaggaatttctttagttggaatgaagccacaattagtagatgtcctttacccctacacctgcac

SEQ ID NO: 488588 - DNA, 611 bp, Homo sapiens
cagccgaggcggtggtgcagttttatgtgtacaactgttttgatatagattgtctgctagaggcagagataatgatagctttcaaggctggtgtgttggacggggaaggatgcagatacttgaaggaggaatacagactctggaaggattgtgaagcacacagagttttaaacactgaaaggcaggccctccatcgttctggtgccattcaagtatgtgattttaacactatttcatcactaacatgactaatgttattccaaggatttttttttcaccattccagttacaccaaaatcttactcattttttaaaaataataacctgagatgagcacagggtttttatttttcttttgcttttcaaagaaaatccaaggagccagtcacagtggctcacgcctgtaatcccaacactttgggaggccgaggtgggtggatcacctgaggtcaggagttcaagaccagcctgaccaacatggtgaaaccctgtctttactaaaaatacaacaagtagctgggtgttgtggcacatgcctgtaatcccarctactcaggaggctgaggcaggagaatcactcgaacctgggaggcggaggttgcagtgagcca

SEQ ID NO: 488589 - DNA, 620 bp, Homo sapiens
tcatttactactgaagcagatatttgtcagaaaatgtataccagtcctgcctttrtttaacattttgatattttgttaaatttttaaattttaaaaactgtggcaaaatacacataacataaaatttaccatcctaaccactttaagtgtgcaattcagtgtattacatatattcacactgttgtgtaaccaatctccagtacatgtttcatcttgcaaaactgaaagtcaaacaatgactccccattcccttttctacctcctagcccctgacaactgccattctactttctgtctgtataaatattgactactctaggtgcctcatgcaagtggaatcatacagtatttgtcttttattttttattttctgtatctggcttatttcacttatcatagtgttctcaaggttcatccaagttgtagcatgtgttagaatttccttttgaagactgaataatattcccttgtgtatatatgctaccttttgtttatccactcatcagttgttggatatttgagttgcttccaccttttggctgttgtgaataatgccactatggacatgagtatgatatatatatgtatattatatagatagaagatatagatatatatct

SEQ ID NO: 488590 - DNA, 620 bp, Homo sapiens
tcatttactactgaagcagatatttgtcagaaaatgtataccagtcctgcctttgtttaacattttgatattttgttaaatttttaaattttaaaaactgtggcaaaatacacataacataaaatttaccatcctaaccactttaagtgtgcaattcagtgtattacatatattcacactgttgtgtaaccaatctccagtacatgtttcatcttgcaaaactgaaagtcaaacaatgactccccattcccttttctacctcctagcccctgacaactgccattctactttctgtctgtataaatattgactactctaggtgcctcatgcaagtggaatcatacagtatttstcttttattttttattttctgtatctggcttatttcacttatcatagtgttctcaaggttcatccaagttgtagcatgtgttagaatttccttttgaagactgaataatattcccttgtgtatatatgctaccttttgtttatccactcatcagttgttggatatttgagttgcttccaccttttggctgttgtgaataatgccactatggacatgagtatgatatatatatgtatattatatagatagaagatatagatatatatct

SEQ ID NO: 488591 - DNA, 621 bp, Homo sapiens
tgcaatagcagtggtggcagtctaggcaaggcaytagtgggtgcaggctgctggcctctgtgcgcatgttcacagaggcagcagtggcagtgttggtggggaacagactgccagcatccatgagcacatttcagccagtgatagtgttggtgtaggagagcagggctgctagcacctgtgtgtgcatttacactattggtggtgtcattgcaaaggcagtggacagggacactggtgtctgtgcactcatttacaccaacagcagtggtgtggagttgctggtggagccgtggagttgctgacatccatgagtgcccatgtgtcagtggaatgtaagcaggttgcattcatgccagcagcagtggtgcaacagaacgcatgtgcacatgcatgtcagcgggggagggaagaagaggtcagcctgtgtacatgctccagcaaagcagtaaggaggtggccatgggcaagcatgtgctggcaaagcagcacagcggaggctgcagtgggaggagggtgcaggtgggctggtgcatgttgatggagattgctctgttggagctctctgatgatcaggcagagtcttccagcaaaagagctataatgaaggcacccaggaagcac

SEQ ID NO: 488592 - DNA, 621 bp, Homo sapiens
tgcaatagcagtggtggcagtctaggcaaggcattagtgggtgcaggctgctggcctctgtgcgcatgttcacagaggcagcagtggcagtgttggtggggaacagactgccagcatccatgagcacatttcagccagtgatagtgttggtgtaggagagcagggctgctagcacctgtgtgtgcatttacactattggtggtgtcattgcaaaggcagtggacagggacactggtgtctgtgcactcatttacaccaacagcagtggtgtggagttgctggtggagccgtggagttgctgacatccatgagtgcccatgtgtcagtggaatgtaagcaggttgcattcatgccagcagcagtggtgcaacagaacgcatgtgcacatgcatgtcagcgggggagggaagaagaggtcagcctgtgtacatgctccagcaaagcagtaaggaggtggccatgggcaagcatgtgctggcaaagcagcacagcggaggctrcagtgggaggagggtgcaggtgggctggtgcatgttgatggagattgctctgttggagctctctgatgatcaggcagagtcttccagcaaaagagctataatgaaggcacccaggaagcac

SEQ ID NO: 488593 - DNA, 569 bp, Homo sapiens
tttctttgtaattctcaccacccttgagaatgtactttgtgagatccaccccctacccccaaaacattgcttttaactccaccgcctatcccaaaacctataagaaccaatgataatcccaccaccctttgctgactctctttttggactcagcccacctgcacccaggtgaaataaacagccttgttgctcacacaaagcctgtttggtagtctcttcacacggacacatgagacagtatgctagttcaagctgagagtaggttaaagtaaggagcctggggaaaggaaagaagcttaacccaagtttggttaataagcattttttccaactggtcaatggagacaagcagctctgtaatcatttatgaggcaaagaatgggaattcagaaggactgtgtttgaccttgccacagtaaacaagggaggcaaccaggagtcatttaagtgacatgagaatgrgtatttctttgtagtgaacattttctgaagcacaaaaaggttaagaaagatttctcttttttgctttatctttttttttttttttttttgagacggggtctccctct

SEQ ID NO: 488594 - DNA, 574 bp, Homo sapiens
cctaaatgatatggaggaggttataaggggacacaccagaggcacataaagcatgaaataaatctagcatatctttttagaggaaaattctcaagtgagaaggggattatgttattggaaaagcatattcgttattttacttttctatttgaaaaacaaacaatttttttaaattacataaatcatgccaagtaatatgtaacaagacccttgctagtaggctggaaatgktggctcacacccataatcccagcattttgggagtctgaggtgggaggattgcttgagggcaagagttaaaggtggaatgatcacttgaggccaagacttgcagcctgggcaacacagtggaatcctgtctttacaatgaaattttttaaaaattgtcctataatacacctatagtcctagctactcaggaggctgcagtcagctatgatcacatcactgcactccagcttgggtgacagggcaagatcctgtatctgaaaaataaaaatgaaaaccctttgctactaaggctctactgaaaacggactgtatcctctgttattggtgatactcaagtcgggtg

SEQ ID NO: 488595 - DNA, 574 bp, Homo sapiens
cctaaatgatatggaggaggttataaggggacacaccagaggcacataaagcatgaaataaatctagcatatctttttagaggaaaattctcaagtgagaaggggattatgttattggaaaagcatattcgttattttacttttctatttgaaaaacaaacaatttttttaaattacataaatcatgccaagtaatatgtaacaagacccttgctagtaggctggaaatgttggctcacacccataatcccagcattttgggagtctgaggtgggaggaytgcttgagggcaagagttaaaggtggaatgatcacttgaggccaagacttgcagcctgggcaacacagtggaatcctgtctttacaatgaaattttttaaaaattgtcctataatacacctatagtcctagctactcaggaggctgcagtcagctatgatcacatcactgcactccagcttgggtgacagggcaagatcctgtatctgaaaaataaaaatgaaaaccctttgctactaaggctctactgaaaacggactgtatcctctgttattggtgatactcaagtcgggtg

SEQ ID NO: 488596 - DNA, 583 bp, Homo sapiens
taccataccattcactgcttwatgaataggctggaaaatgctggctcagtcagcttggaagacaaaatagaaatcaagtgtggaggctggcagatcaacacaaaataaaacatcctcttccaaagcagggcatcctcttccagggcagagaagatgatgtcaagtggctcagagaggttgaacaaattgtccaagggcaaccagcagagtcacacctggaggttggtcttagttttttttctcttattgattctctttccactacacaaagcagccactcagtataaaagttaacaactactaaaagtacatttaagcctgtatgctaacatttaagtatagtggtctttgagaaaaaatataggtagacatatgtattactcagggttctctagagggacagaactaattatatatataaaggggagtttattaagtattggatcacatgatcacaaggtcccacactaggccatctgcaagctgaggaacaaggagagccagtctaagttccaaaactgaagaacctggagtccaatgctcgagtgcaggaggcatccagcacgggagaaagatggagact

SEQ ID NO: 488597 - DNA, 552 bp, Homo sapiens
ttctttctgacttaggagtatttctccacacccagagtcaagtacrttgttggctcttgtactggccattaactattggttttaatgctttgtaatcagagcatttgagacagaaacacgttttaactctttggcatgtactagggtgtatatatgtgtggtgtttgtggctatatttgtgtcaatttttgtgaaaggtctatgttacttgaaataagcattttatctattttaggacacaggttttgatatatctgttaggtttaacttttatttggatcttccacatttttattgacaaaaaaactgatataaatacaaatctccatcttctagtgtgtttccagttctctttttatctcctgtatttttgcagaataaatattaattttgaatgtattgttgcataaacactcatagtgttatactctatcgggaactgtaaacttcacttaataaataaaatattcttatttatgatttatataaccctctcttaataaagaaaatatttattcttatttatgatttatatattatatattttgcatc

SEQ ID NO: 488598 - DNA, 552 bp, Homo sapiens
ttctttctgacttaggagtatttctccacacccagagtcaagtacattgttggctcttgtactkgccattaactattggttttaatgctttgtaatcagagcatttgagacagaaacacgttttaactctttggcatgtactagggtgtatatatgtgtggtgtttgtggctatatttgtgtcaatttttgtgaaaggtctatgttacttgaaataagcattttatctattttaggacacaggttttgatatatctgttaggtttaacttttatttggatcttccacatttttattgacaaaaaaactgatataaatacaaatctccatcttctagtgtgtttccagttctctttttatctcctgtatttttgcagaataaatattaattttgaatgtattgttgcataaacactcatagtgttatactctatcgggaactgtaaacttcacttaataaataaaatattcttatttatgatttatataaccctctcttaataaagaaaatatttattcttatttatgatttatatattatatattttgcatc

SEQ ID NO: 488599 - DNA, 612 bp, Homo sapiens
aggcagaaggcagccatcaatgaaccaggaagagagtcctcaatagacttccttgttcatgaacttccagaattgtgaggaatacctatctgttgtttgtaagccacccagcctaactactttgctatagcaacctgaatagactggttctaactttatttaatagacaaagaaactgatgctcgaggaaatcgaaagacttatctaaggtcactcaatttttatgtaaaccacctctctggatccccaatccatatccttgtattcatattctgtaatatttgatgtttcattgcaggctttcaggcctcaaacttttcctgagtgtcgtttcttcaaaaaragtcaacaccaggatagtaaaatttcctcccacttccccttccagcacattgtccatggtcaaagatgtcgtgaaaaacaaattaaaatgaagtccagtcctacccctgctgttctctgtgtgaacctgcgttcatggcttcacttcctggagcgtccgcctgcatgtgcaaagtgagggcattggtgctgtgtgctctgagcacgctgtatgtcagtaacactgtgttactccattctgcaaggccatgttctatgagatggaatcat

SEQ ID NO: 488600 - DNA, 590 bp, Homo sapiens
gaaagtaaatatccggatattatatatcaattcagttctgtgttgcccctgaaagtgtcctgcctgtgtaacgtctttgttgtgaagattaatactagtttcatcataaaataggcggtgttctactatttttccaattatttattttgttttaatctttattatttctttttttctattcccattktatcttcttgttcctttgctaactttctggatcaaatgtttaattagtttgttttcttctttcttatttgtgcatgtatgtaattaatttccctctgagagctgtcatagtgctattccttaggcattctgatatgtactgttttcattactgttatattttagtatactaaatagactgcagtttcactttgggttttatctttgactcaaaaaattatttgaaagagaaagaatattttttgtttgcttatttatatacccagatggcatataatttttttttctgattctgtttttattctagttttttatttcattgtgaatgtagatagtgtgacatttctaagctttgtaattttatttccaaattattgtttcttctgaggacttcacacgaccaa

SEQ ID NO: 488601 - DNA, 590 bp, Homo sapiens
gaaagtaaatatccggatattatatatcaattcagttctgtgttgcccctgaaagtgtcctgcctgtgtaacgtctttgttgtgaagattaatactagtttcatcataaaataggcggtgttctactatttttccaattatttattttgttttaatctttattatttctttttttctattcccattttatcttcttgttcctttgctaactttctggatcaaatgtttaattagtttgttttcttctttcttatttgtgcatgtatgtaattaatttccctctgagagctgtcatagtgctattccttaggcattctgatatgtactgttttcattactgttatattttagtatactaaatagactgcagtttcactttgggttttatctttgactcaaaaaattatttgaaagagaaagaatattttttgtttgcttatttatatacccagatggcatataatttttttttctgattctgtttttattctagttttttatttcattgtgaatgyagatagtgtgacatttctaagctttgtaattttatttccaaattattgtttcttctgaggacttcacacgaccaa

SEQ ID NO: 488602 - DNA, 579 bp, Homo sapiens
ataacccatataagaccctgccaaccagatattgattattggatttatgtttgaaataaaagacaatttgatttcatttgaagtcttcagggaaaagatattgaacttcatattcctcagtggggacaaaaaaagaaaaaaagaaaaaaaaagacctagacagtaagtcaagtgatttgggaaacagattaagtttcttaggccattaggtactatatggctgtttcttaattttctgtgactgatgcatttctttgacattcctaccctgaaaattgggttaaaccgatgaaccrcatttttgctgtaaaactgcagttgacagaaatatagaagtgaagattcagaagcatttacatggctgaatatctccagaccagaagttacaaactgaaatacctatagggttagggtaggtataggacaaaagatacacattttgtaccaaagactctgctttcctattaaacaacaataataatatttatttctacaaagaaacgtagtctctctttctctcttttttgaaacactagctcattcagatttgtttttcctttgtgaacttttgctagaaac

SEQ ID NO: 488603 - DNA, 465 bp, Homo sapiens
ttgtgggtggcaacccattagcagatcacaaaatcactgtagtgggtaactaaacaagaggaaacacaagatggcatcctgtgtaactggggttaagcattactctctgaaactcatggcatcagtttcctcttaggctcttccaacagagtataatcatgttcatttcagtttacaatccttgcagtcccatcgatttgtgagattatacccaggtcatccacagtggaggtctgaaaatgttcktagttgtactctaatttcactaactgccaaaaggttttccagaataatctcagttgcttcattcctttaaaggtgaagcccaaagaacgcatggcgattactttagaggaacaattagcagcagaggcagggctgtgctgatcccatctggcatcgctgggagctaacacacattaaagacatggcactttgggtccgggtccaggtcctggttcagag

SEQ ID NO: 488604 - DNA, 640 bp, Homo sapiens
tgaagagtggagttcttatctcctacagagctctgtgttgcaggacagttgttccagtgagctagagagtcagatgtcagctctaatttcttccagcttcctatggcagaagtattattcctagtaaatttggcagtcactaaacaagatatatcccatattcccagttctggtctggggaaggtccataktggacagttcccactgtctctccacccatacacacagctattctccatatgggaggtatctatgaggcagtgggggcagatcaagctctcacaaaatgtcctcaacccacagcttctccgtgtggctcacggtgtgttttcagaggagggtatgagcaagcctcagacactaacaacatcctcagctcttgccaagacacccagctttaactgcattagattgtgaagcaatttataccccatggtatggttcccaacaatgaaataatcagctataaattaatgaaggctaacagctagattttatgccaatacaggcagattacacagaagttaaatggcatatcaagaaaagagacaaagagatctcagctaaaggcaaaaacaaaatttaaaagacaaaataatatacaataatattttatgtgtattttttgattattatggat

SEQ ID NO: 488605 - DNA, 640 bp, Homo sapiens
tgaagagtggagttcttatctcctacagagctctgtgttgcaggacagttgttccagtgagctagagagtcagatgtcagctctaatttcttccagcttcctatggcagaagtattattcctagtaaatttggcagtcactaaacaagatatatcccatattcccagttctggtctggggaaggtccatattggacagttcccactgtctctccacccatacacacagctattctccatatgggaggtatctatgaggcagtgggggcagatcaagctctcacaaaatgtcctcaacccacagcttctccgtgtggctcacggtgtgttttcagaggagggtatgagcaagcctcagacactaacaacatcctcagctcttgccaagacacccagctttaactgcattagattgtgaagcaatttataccccatggtatggttcccaacaatgaaataatcagctataaattaatgaaggctaacagctagattttatgycaatacaggcagattacacagaagttaaatggcatatcaagaaaagagacaaagagatctcagctaaaggcaaaaacaaaatttaaaagacaaaataatatacaataatattttatgtgtattttttgattattatggat

SEQ ID NO: 488606 - DNA, 602 bp, Homo sapiens
agaaccacaatagaattatttttttctggatttgtataataaggataggtactcatcaaaggatgataawgaaagtcaaaactcttgcaacttgtaactgcaggacaaacaatagccaacgtagttttatcgctgcttttcagaagtagaattctgcaagtcaaatgtcacaatatttggaaagctctttttgtaaacatttttaaaaataaaaagagtatttaaattcatgattcaagtgctgtctccccctcacctccttaacctgtggttactgatggatcctagaactcagtccttggactccttttccctagatcttcttaagccatcaagcctgataatacatatctactctgtatttaagatctttaacttgcttgtctgtggactccagactcatatacccaattggctatcatgtaatctcctcttgtatgtttaataagctcaaaaggacaaatccaaaccttcccacaaaacaatcaccaccttcacctcctgcaagcttctccatctcaagtttgttatttcaagtgttcaagtcaaaagccatgaaatcatccatgactcctctttcactcttcaacctcacattcttg

SEQ ID NO: 488607 - DNA, 497 bp, Homo sapiens
gggtgaaacccaggagggagcctgtctccagaggctgtgcgtgcgaggggcagaggctgagctaggggagtcactgaggggcctagagaagaggatgatgtaatggggtctgtatttaaaaataattctgctgacccccggttggcaggagacatggctggacctgaggcaggccctccgttctaccttcagtccgatggggacctggggcccagggcaccttttgtcccctgaccctcacagatggccccagacatgtgccccccatgcaggagagcaaacggtggggggtgtcgcctggttacagtgataaactgcctttagaaaggggacctgagccttcacaatggttagcattctccctggtagggactctaggggaggctgccgccttcacaacccccctatgctgcataatgatggtaattttgcccttgaggctgtgaagccctsacacaaatgaagccttactaccgggaaaggcttggctctgtggt

SEQ ID NO: 488608 - DNA, 588 bp, Homo sapiens
aacccataaatcacgccacgtggttggggcacaggtgtgggtcccagagaggagaggggagctggagaggtgggcacagcccagagcactggagattaggccaggagtgagattcgctctacagggatggaacccagggaaggctgcatgaccggagcacggtcaggtaggtctctgctaaagtacaccctatccccacaggacatctggacccgagaggtcgggtgagaggctaggcactcctcaacagggacagcaatagcccagatggagaggacggccgtggcggtggagaaaacgggtggattcaagagatactagtacaaataattcattaatgcatcatttatttcraaataaaaaaatctgctgattgtaagaccaacctgtgtgtttgagaaaatctctatcaccaactattctctttgtaagcctaaattttgtatctctttaaactaaatcaggaggataagcctttatttatcaccccagtggggaatgaaagcagttcccacttgccctcttcttttgctgcttcttctctttcttttaggccgaagaactattctcactaagtggactgggcag

SEQ ID NO: 488609 - DNA, 629 bp, Homo sapiens
cttgctttggattttgttgttgataggktcacccccagggtgtctcagccttctaggggtcccttttgtttagggtggatttactgggagatttttgtcaatgactgtgccaccttcagctttagatcttccctgtgcatctgcacctcagaaaggcacccctttgtcctcattcttccccagcagtcaactgcatttccttgttaccgggtgcctccagcctggtgctggggtgagggtgatggcattccttcccatgctgggttagcttcagtctctggtaggccctgtgtccctgcatctcggggctggggtcttcaacctgatcctacctttctccagcagtacaggtgtctcacactctggcctaaggtattctggctcctctttcaggcgtagtgggtcttctctttgcattctggagtagaaagctttaggtctttttttccaggggcacttcctctctttaccacaatggctgccatttatcctcctctgttacttggtgagcctgaaaaaaaagaacctatgaatttgtgtgaattccttttttcttttctttgcttccagtggttccatactcttgcactagctcacatttgttgtttagtaacttgttcagactttca

SEQ ID NO: 488610 - DNA, 629 bp, Homo sapiens
cttgctttggattttgttgttgataggttcacccccagggtgtctcagccttctaggggtcccttttgtttagggtggatttactgggagatttttgtcaatgactgtgccaccttcagctttagatcttccctgtgcatctgcacctcagaaaggcacccctttgtcctcattcttccccagcagtcaactgcatttccttgttaccgggtgcctccagcctggtgctggggtgagggtgatggcattccttcccatgctgggttagcttcagtctctggtaggccctgtgtccctgcatctcggggctggggtcttcaacctgatcctacctttctccagcagtacaggtgtctcacactcyggcctaaggtattctggctcctctttcaggcgtagtgggtcttctctttgcattctggagtagaaagctttaggtctttttttccaggggcacttcctctctttaccacaatggctgccatttatcctcctctgttacttggtgagcctgaaaaaaaagaacctatgaatttgtgtgaattccttttttcttttctttgcttccagtggttccatactcttgcactagctcacatttgttgtttagtaacttgttcagactttca

SEQ ID NO: 488611 - DNA, 573 bp, Homo sapiens
cactgcaaaggcctgaatgccttgttgctcttttcaagcggccttggccctggaggccaattctgcacagttagatgaagggagaaaatccctgtgaccaaggggacgatttttcctgaataaaaatgcaaagcctgaaaagcagagtgcgttggcacagtcagcctggtctctggcctgatgcctgtaggagccctggccgtgggggaccgcactgcggagactgccctggagcagccagcaggggagggccgtctggtctatcggggcgccctggcagtcctccaggcctgaagggccttccctggacttcttgtctgatgggraaagccactgcttcctcatttaagcagcaagccatcaggtttcccgttgctggtgactgggcttgcttgcggcaggcggcggtggaatccccagctcttcccgcagcaccagccatccagggtgctaaaagggccgagtgaggggctgtgatttgcatgtggatgaatcagaggaggccacaggcggtgggtggtggaggtagggccttctgcaaaggcaagacgtggagctgagaggacttcaaga

SEQ ID NO: 488612 - DNA, 573 bp, Homo sapiens
cactgcaaaggcctgaatgccttgttgctcttttcaagcggccttggccctggaggccaattctgcacagttagatgaagggagaaaatccctgtgaccaaggggacgatttttcctgaataaaaatgcaaagcctgaaaagcagagtgcgttggcacagtcagcctggtctctggcctgatgcctgtaggagccctggccgtgggggaccgcactgcggagactgccctggagcagccagcaggggagggccgtctggtctatcggggcgccctggcagtcctccaggcctgaagggccttccctggacttcttgtctgatggggaaagccactgcttcctcatttaagcagcaagccatcaggtttcccgttgctggtgmctgggcttgcttgcggcaggcggcggtggaatccccagctcttcccgcagcaccagccatccagggtgctaaaagggccgagtgaggggctgtgatttgcatgtggatgaatcagaggaggccacaggcggtgggtggtggaggtagggccttctgcaaaggcaagacgtggagctgagaggacttcaaga

SEQ ID NO: 488613 - DNA, 573 bp, Homo sapiens
cactgcaaaggcctgaatgccttgttgctcttttcaagcggccttggccctggaggccaattctgcacagttagatgaagggagaaaatccctgtgaccaaggggacgatttttcctgaataaaaatgcaaagcctgaaaagcagagtgcgttggcacagtcagcctggtctctggcctgatgcctgtaggagccctggccgtgggggaccgcactgcggagactgccctggagcagccagcaggggagggccgtctggtctatcggggcgccctggcagtcctccaggcctgaagggccttccctggacttcttgtctgatggggaaagccactgcttcctcatttaagcagcaagccatcaggtttcccgttgctggtgactgggcttgcttgcggcaggcggcggtggaatcccyagctcttcccgcagcaccagccatccagggtgctaaaagggccgagtgaggggctgtgatttgcatgtggatgaatcagaggaggccacaggcggtgggtggtggaggtagggccttctgcaaaggcaagacgtggagctgagaggacttcaaga

SEQ ID NO: 488614 - DNA, 642 bp, Homo sapiens
ctgccaggcttccaatttctaaagagtagccacctgatcctgaaaaggaagatgaaggcttaacaaatatagcaagagacttatacataccaactatatactgagaattatctagctgagaattcattattctcagctcaaagattactcaaatctgttatggttttgattcaaagagaaattttcagtagctagctgttcatgaattcaggtctcattaagaattcaaaataagcctgggcaacacagggagaccccgtctctacaaaaaacgaaaaattagccaggcatggtgatgcatgcctgtggtcccagctacttgggaggctgaggtgggaggactctttaagtctgagaggtcaaggctgcagtgagccgtgatcatgccactgtactccagcctgggtgacagagtgacctttctctcaaaagaaaaagaaaaagaaaaaagaagtatttaaaacaagcattgctttaagtctaatgaatttctgagatacatcaaatagggtcaactatgccaaaccaattggtctacaaggtgactaggatcaattttaggcaaggggtcatgttcatagactgtgatatyagcatctcctttgcttccaataattgtttcacttcagctaagtaaaaagt

SEQ ID NO: 488615 - DNA, 666 bp, Homo sapiens
ctgaaactggtggcctgagcaatacatgtaacagtgtgcctaatggacacgtgataaatggatggttgactgtgacttgtgttcctaattatgcagactacaaaatcaactgtgtccaataactgacacttccctattagacaatactgtctawcctttcgtgaagttccaatgatataaaaaaattaccttgataacgctctcaatggaccagtaaggaaaatggatgcaaatattatgttttctattttgaactggaaatgcaggtgtcaagggcttgaatacccttctcatattgctgaaagaagccagagctggggttggaacaacatgggagtctccttttgttcatcatggctatagacaattctctgtgttctcattcaccgtaacccggcaaacagcccaaaagtgaaacacagagactccagtacaagctgatcacgaagctccgcagctcactactcactttcccaacactcccaaggcagctaggattataaactgtccattaaacctagcaaaaatacttatagttgttaagggtggggggctcttgggtcagactgcctacatttgaatccctgatatatcccttactagctgagtgatcttgggaagttatttaacctttttgtgcctttgtatttatcttatataataatg

SEQ ID NO: 488616 - DNA, 666 bp, Homo sapiens
ctgaaactggtggcctgagcaatacatgtaacagtgtgcctaatggacacgtgataaatggatggttgactgtgacttgtgttcctaattatgcagactacaaaatcaactgtgtccaataactgacacttccctattagacaatactgtctatcctttcgtgaagttccaatgatataaaaaaattaccttgataacgctctcaatggaccagtaaggaaaatggatgcaaatattatgttttctattttgaactggaaatgcaggtgtcaagggcttgaatacccttctcatattgctgaaagaagccagagctggggttrgaacaacatgggagtctccttttgttcatcatggctatagacaattctctgtgttctcattcaccgtaacccggcaaacagcccaaaagtgaaacacagagactccagtacaagctgatcacgaagctccgcagctcactactcactttcccaacactcccaaggcagctaggattataaactgtccattaaacctagcaaaaatacttatagttgttaagggtggggggctcttgggtcagactgcctacatttgaatccctgatatatcccttactagctgagtgatcttgggaagttatttaacctttttgtgcctttgtatttatcttatataataatg

SEQ ID NO: 488617 - DNA, 297 bp, Homo sapiens
cttagttgctgatgggacttactaagaattctcagcccagaaaacagtttcctaggctgtgctattaagtcacttccagttctctaaactgttacccatgatatccagtgttaaatctacatggcactggaatctggaaaacaatgcaatttgaatgctctgcacgtccttagttaaatacagtcctgcagtctgtaacctgggatgtagcacagacttcagactcaaccccaaaagacagtcrtcagtgaaacagcttccagcaagggacgccattttatgatgtcacatgaaaag

SEQ ID NO: 488618 - DNA, 646 bp, Homo sapiens
gagcattttgtgttcgttgccagcggggaatgggtgatggagtagatagacagggaccaaaaaaggagttgattctatttatttacctagaagtcgattttcaacctttgagttccaaagcctgggcatcctggtaataggaagaaaccatgtggagtaatagatttggtacaagttgtgaggagttagagaagagcacatttgtaaccagaattctctagactggagtaagggggagaaaggggagagggagggaacatagcctagtgggagacaaaaataggtgggatctagagaaagcccagatctggagggttcacacagatrggtccacagccagcctccagagagagcttggccccacctgcccatcctctcgagtgagtgttgcttggcatcagcatcagggacccgagtgtgaacagttagcagccacagacggtcctgtccccattccagtgtggcttaaacatcagcttagctgtccttctcagtgctggggtcttttattgtggaggaggggtggagatggagggaatatacgctggtaggaggcagagataagtgggatctgggatggcaggagagacctgaactctgaacaaattgaggaatacagccaagaactgacaagggctacagtatc

SEQ ID NO: 488619 - DNA, 599 bp, Homo sapiens
catgattttcatcacaagagagttatgatctaacaaagaagatggacaaaatatataaaataggggagaacatgagcacatatagaactacatctctatgacatgagatcatgtatgcattactagaaaacaatgatgactataacagtgatagatacatgtctagggactacaaaaatggccagaattaagcaggagtgcttctcatagactgaatatgataaagtagtcaattctgagaaaaatttggcagaaattttataaaattagaaacaaaaggagtctgtagaattcaaatactttttagacttttaatctttccaagttgtgcagtctgtgactaataagtgatataaaatagaaaaacttcaaacaaatttagcatgcaatgttttacattctcagtagagcttataaacttcattcgttttcaaagttgctcaaatttaaacagaagataactggaaagctagtgggtaaaaatgaarcagtacacagagtcatcaaaacaaatatatatgatattatgataaaagttgctcatattaattcatgataacattcattaatttagatttaacagtaaaataaggtattat

SEQ ID NO: 488620 - DNA, 665 bp, Homo sapiens
tataatctgtgagttatcatatgggaaacatttttcagaaacaaggaggtcatttttatttataagtcagttaacatcaactgatgtcttaaggacattttgctatacttttgatagttgaatactttttccttattaacaactgagagttattccaataaacatgatagaaaccagaatatctgggtttttcatgaccaaagtgataaggttaagaaaatacatagattttgatcaaaacaccgaagataaagatttgtgaaacactgggtagaaagttatcaattaaaacacaatgaagacaccagatactaagagacgatcacaattcttcatgtcaaataccgaactatggctcctttaccagtaactcatatgcttcaggttgtttttccatttkcccttttaactaacattttctttgattgaacagacatactttgctcaaggatgaaatttcatttagagcaacatttcccaaaattagatctccggggggaaagattttgaaatccattaagtgaagataaacatttacactcacacacttgaagtgtcatacagctattggtgtgttaagagcaaaggagaaagctgtttaatgtttttatttcagtgcgtcctgagtatttgtccaagggaacttaattttgagtaacacctgt

SEQ ID NO: 488621 - DNA, 609 bp, Homo sapiens
tttccactcaataaaaccttgcactcattctccaagcctaaatgtaatctgattcttcaggtacaccaaggcaagaaatgctgggatacagaaagccctctgtccttgtgacaaggtagaggggctaactgagctggttaacacaagccacctatagatggcaaactaaaagagcaccctgtaacacacgcccactggggcttgaggagctgtaaatattcaccccagacactgccgtggggtcagaaccccacagcctgcccatctgtatgctcccctagaggtttgagcagtggagcactgaagaagcgagtcacacccccatcgcacgccctgcgaggaggacaagggaacctctcccatttcagtatccttgacagcgtattggacttagcatcagaaagtccgagtttcagtattagggctcctaacacatccttgtgattttggataagtcgtttagactctctgggtagcagtttttgattcataaagcaggaaacatactatctgtcttgcctgctttataggtttgttggaaacataagataatgtgaacaaaatttgttatcaaaaaawttgggatggaattattacctcatgaaggct

SEQ ID NO: 488622 - DNA, 649 bp, Homo sapiens
tctgaaatattaaactaaaataactttagctcatccttaagagccaatcctagggttgctgttatttaatgaataattacttttgaagaggttttgtagactatattgctgaaatcttwcctcaaggagagtagtcactaattctgaaatgaatgaattagaaaacagtcaatgcccaaatctccaaatggccttattgctttctcccactgagcacctctgatgaggcctccctttgaggtcttatcaaattctcccagatttcaagatctttctgaaccacaattactcttgtgtgtcagttttgatatatttaccatctgttgcctgtttatagtgaatacatgcatgtagtactatgtatatacagtgtgtgactactttacaactgatttggtcaaatgggaatcaaatgaaggtgaaattttattcaaggatatatgtttaatttaaatcattttgcttatgacataatcattgtaggttgattaaataaaatgattaacctacttaagaaaaagcttgttcattacttaaatctcaatgacatcaatttcatttaataaaagtttttcatttatttacaggactgaaataaaaccctggtaaaactagattttaagactcaaagcagtgtaggccattccta

SEQ ID NO: 488623 - DNA, 649 bp, Homo sapiens
tctgaaatattaaactaaaataactttagctcatccttaagagccaatcctagggttgctgttatttaatgaataattacttttgaagaggttttgtagactatattgctgaaatctttcctcaaggagagtagtcactaattctgaaatgaatgaattagaaaacagtcaatgcccaaatctccaaatggccttattgctttctcccactgagcacctctgatgaggcctccctttgaggtcttatcaaattctcccagatttcaagatctttctgaaccacaattactcttgtstgtcagttttgatatatttaccatctgttgcctgtttatagtgaatacatgcatgtagtactatgtatatacagtgtgtgactactttacaactgatttggtcaaatgggaatcaaatgaaggtgaaattttattcaaggatatatgtttaatttaaatcattttgcttatgacataatcattgtaggttgattaaataaaatgattaacctacttaagaaaaagcttgttcattacttaaatctcaatgacatcaatttcatttaataaaagtttttcatttatttacaggactgaaataaaaccctggtaaaactagattttaagactcaaagcagtgtaggccattccta

SEQ ID NO: 488624 - DNA, 583 bp, Homo sapiens
gaataattacttttgaagaggttttgtagactatattgctgaaatctttcctcaaggagagtagtcactaattctgaaatgaatgaattagaaaacagtcaatgcccaaatctccaaatggccttattgctttctcccactgagcacctctgatgaggcctccctttgaggtcttatcaaattctcccagatttcaagatctttctgaaccacaattactcttgtgtgtcagttttgatatatttaccatctgttgcctgtttatagtgaatacatgcatgtagtactatgtatatacagtgtgtgactactttacaactgatttggtcaaatgggaatcaaatgaaggtgaaattttattcaaggatatatgtttaatttaaatcattttgcttatgacataatcattgtasgttgattaaataaaatgattaacctacttaagaaaaagcttgttcattacttaaatctcaatgacatcaatttcatttaataaaagtttttcatttatttacaggactgaaataaaaccctggtaaaactagattttaagactcaaagcagtgtaggccattcctattat

SEQ ID NO: 488625 - DNA, 635 bp, Homo sapiens
tttatagcagcaagatttgcaattgcaaaaacatggaaccaccccaaatgtccatcaatcaacaaatggatacagaaaatgtaaatatatatgatgaaatactaatcagccataaaaggaactaattttaaggtggatctatgtcacagttcaaattcagtgttcagtgacttattgyctaaatgtacaatgatctatctaatctcttaaatgaggccagaagagtgagctggtaaaaagagggctaagatcctccaagaactgagttcctgttccagctctgtcacttactatttgattatcaatgggcaatttatggaatctgttttaaatcatgggcactgagggaataagtgttgggcaccaatagcatccactatagaagttactcaatatcttccctgaaagcctttgaacatagctaggcctctaaatagtctgcttaaactccagttcttttggaaaatggcagagaaaatgattatcagattttaagtctatcaaaattccattcagcattgaatacatataaagtataaggtgagttacgaatatatccaaaaatttgtattcaaaacgtaagacaggaaatgttcatttttataatttactcttataaatcagtctcagtaagg

SEQ ID NO: 488626 - DNA, 600 bp, Homo sapiens
tggcatgtttttctgcaacactgagattgtctccgcattctaatttgccaaactgtattcctttattcttttgaaatttggctaattgctttcatctcctttaaaaccttcttaatctagctttagttatctaatgtcatctctctctttttttctttctgccctttcccatctyttttgccatttcactactttccacaagactgcacatgcagtgagttcgagaactacttatgccttctttgacaactgcttaggaagtaaatggctggtttctccctctactcccaacgaaatatctaggtatggataataaaaatgcatgtatggtcatctttgtaactaacatagagcatataaaataattgtttgagaacataacaagaataaaatatagattatttcattatcttttatgcagaattaactcttaaatatcagtagttatgattttgaagcaaaaatatatttggtcatttagttagtatgatgtggaaagaaggagttaaagagtaaaatcctagccagtgtttgcccagtgggtaattgtgtgaacactttaataagtgcaatagaagccaacctgaaacttattaagaa

SEQ ID NO: 488627 - DNA, 630 bp, Homo sapiens
ttggttagagaggaggtagtgcaactttacttgggatttatttttcakaatataagagcatattggttggtattcattagcattaatgagtcaacagagatgagtgaaagaaattggctgattctgaaggctttaggagaggagctccttgggaacaaggcacccgtctcagaagtaatgaatgatgaatggattcacagatactggttttctgtctacttcctgttctccctttaaaataaatttaaaaatatatagacagacaggcagacataaagaactactcgaacaagttaggaactttacagtgtttgttattaaagcccgtatggtcttgtgtgtgtagaactgagcaataagggaatcccagctagcaatgggattagagcatttggatgggcatctatttctaaggaacattcagggctaaaaatctgtaaaagtcagtgaaagcatgtacatttgataccactttcttttctttaaattgaaaaactggtgttgtgttaagtcctcagagcttaactctgtgctccttggatggtttgcttttacgcaaatggggtgaatctccttccaaggagctagcaccaaggcacaatgtcctggaatggggtggagaaatgcaca

SEQ ID NO: 488628 - DNA, 630 bp, Homo sapiens
ttggttagagaggaggtagtgcaactttacttgggatttatttttcataatataagagcatattggttggtattcattagcattaatgagtcaacagagatgagtgaaagaaattggctgattctgaagsctttaggagaggagctccttgggaacaaggcacccgtctcagaagtaatgaatgatgaatggattcacagatactggttttctgtctacttcctgttctccctttaaaataaatttaaaaatatatagacagacaggcagacataaagaactactcgaacaagttaggaactttacagtgtttgttattaaagcccgtatggtcttgtgtgtgtagaactgagcaataagggaatcccagctagcaatgggattagagcatttggatgggcatctatttctaaggaacattcagggctaaaaatctgtaaaagtcagtgaaagcatgtacatttgataccactttcttttctttaaattgaaaaactggtgttgtgttaagtcctcagagcttaactctgtgctccttggatggtttgcttttacgcaaatggggtgaatctccttccaaggagctagcaccaaggcacaatgtcctggaatggggtggagaaatgcaca

SEQ ID NO: 488629 - DNA, 479 bp, Homo sapiens
tattacaatgtacacataaagaatgtgctgtttctcagtggtgctattaatcttccttctataccacttatagttcttgggcatctgattaacaatgacctccttatatgtttattgggggrtagatagaggttaggtataattgtatatctagttagttttatcactgcttgattaaccggctatatgactttgcattaggaatctcaataatactgacttaatattgagaagggtggcaatcctcatgggagctggtcaaaactggagagacaagataactcacttgtaaaagcatattgaatatacatattatttttataaagcaactggaataatgtaagacttcgcaaaatcttcctgagagatgggcaagtataaaatatagacagctaaatcatattgaggatggggattaaaaggggttgaaatatactatatgcaatgatctttataaaacactacattcaataatcttg

SEQ ID NO: 488630 - DNA, 479 bp, Homo sapiens
tattacaatgtacacataaagaatgtgctgtttctcagtggtgctattaatcttccttctataccacttatagttcttgggcatctgattaacaatgacctccttatatgtttattgggggatagatagaggttaggtataattgtatatctagttagttttatcactgcttgattaaccggctatatgactttgcattaggaatctcaataatactgacttaatattgagaagggtggcaatcctcatgggagctggtcaaaactggagagacaagataactcacttgtaaaagcatattgaatatacatattatttttataaagcaactggaataatgtaagacttcgcaaaatcttcctgagagatgggcaagtataaaatatagasagctaaatcatattgaggatggggattaaaaggggttgaaatatactatatgcaatgatctttataaaacactacattcaataatcttg

SEQ ID NO: 488631 - DNA, 559 bp, Homo sapiens
tcattatatatggtctatgttcgtgatactccatgtgaacttcaaagaatgcatattctgctgttgttggatagagtgttctataaatattgatgaggtcaattggtaatgtaactttgggcttctatagttttatcaattttccatttatttgttctatcaaatatacatacatgtatatgtatgtatgactagatagctatttcagccctgaattcaccattaagtaaaataagcatttgtttaagacattaagggaggcaaaccatacaattttatttcccctggttataatgctgttaactctttcattgccacagtcaactttagtcttttttttttttttttttttttttggcaaaggtctttatctgccttattcaactttaaattgcacrgttaaacacatttttttttttttggacatggtgagagcttaaagtttacaactttcgtttgaaagtggcatgttgtatcacatttgtttctcatttatctcaggagagtttcacttccattgaatgtaaacatagtcacctgggccagtctataaataaat

SEQ ID NO: 488632 - DNA, 630 bp, Homo sapiens
tatctaactggaattttgtaccctttatgttagctaatttgatctcacaaccctctagatgtagacactaccattcttattttatgaaaagacttctaaagctcagacaagggtaaggctatacaacttatgaagcaaaagatctgggatacaaacctaggtataacttcaatggtcttgctcttttcttcttatgtcatattgcctaaaaataggaatttaagtagggtctacatgaaacagaatagtacatatatacatatatccagaacaatggtgcatacatacgacagacatactttaaatacagagacttaaagtaccactgctagtgtctgaaaagttaacaccatrtttccctcattggcatttctcaaggtcaattatattttcctcattcgacagatgagtaaatcgagaaaggtatactatgatggttgatttggtccaatcaacagattagttttgtttgtttttgcttttgttataacctaacagctgcaacttcattggctgcatatgtatctctttggaatgcttttgtctgacagtaatagaaaacccaacttagagtggctctgagcaataaggaagacattaaattatctcatggaaccagaagaccacagc

SEQ ID NO: 488633 - DNA, 581 bp, Homo sapiens
tggcaagtacatttggggccaaagttggtaaatgtatatggtctgattcagattcataccctctgagagcatcaattctataagaacccctgtctgaccataaaatcaaaaggttgtgagagcaatgacaatgtcaccttgatttctgcgtgatttctcttctcttcccatggctattttttttttaagttagatggttgtacagataattgaggtatttgttgagaagacctgattcctcatcagaaggaggaaaagggatgattatttcctgagtatataccctgggccaggtacagtgctcagtggtttagacttgactattgtgtattattttctctatctggaagttattattgccctttttttttcaagtaaatctactgagagtaggtgtattagtaccaagatgtgttcatgttagatagagatgatattacctacttcactgcgttgttgtgagaattacaggagataacatggagaaggtgcttagaacaattcccaggaattagcgtgccatcaataaaactccaycattgacttttgtatactatcacctagctgataagcgacaggag

SEQ ID NO: 488634 - DNA, 591 bp, Homo sapiens
aataaaagagatacataagaaatcagagaaattcaaagcctgagaaggactcaacccccattgctggaggggggcatgtggaaggtatgagaagggatgcaggcaacttctaggagcaaagactggccttggctggcagccagcaaggaaataggacctcagtcctgaaaccacaaggaactgaattgggccaataacctgaataagattggaagtagattgatcatcagagcctccaggaagggaaacagccctggtgacatgttgattttcaccttttgagaccctaagcagaagtcttagctgggccatgctgtatccagacctctaaagaactgtgaaatcatcagtggatgttgttttagacactgcatttatgataatttgttatggcagtaatagaaaactagcaagctgccttgcaataggacaatttgctccaacayctgcaggctactgtaccagtttccatgtctgaccccaccccgccatagccgctgcccacataggagcccatgatcatggctattttctcttggccatgcaaacaatcctaaccttccttgaagatattgaaggctctgcatcaat

SEQ ID NO: 488635 - DNA, 582 bp, Homo sapiens
gctgtataatatgaagttgatcattatttttgtctaagcagttgaagatatcctgctgctctcttaacagtttaacttttgctgctgagaaataagctgtttgcctaaatgtcattgtgtgttggtaaactttctctttgatttatcctaagaattgtcctcggtgttttatgttctacatctttactatgatacatccaagtgttcatttccttccactgatttcactttggatttttgatyttcctagatctatcagtttgtgtgtgtgcgcttgtgtgtctgtgtgtgtgtttcagttttcaaacatccaagccaatatctcttcaaatatttcctgtaacttatattagactttattctctacttcccgaggctatcgtgctttatccatatttttcacctaattatctttctatgctgcaccctgttgcttcctcagatatatatctttctacctcatttattttcaatcaatctgctgtttaataaatccatagaatttcttttgtcaataattatatttttctattttagataggttttaaaattattttctattattttctcatacaccagttt

SEQ ID NO: 488636 - DNA, 582 bp, Homo sapiens
gctgtataatatgaagttgatcattatttttgtctaagcagttgaagatatcctgctgctctcttaacagtttaacttttgctgctgagaaataagctgtttgcctaaatgtcattgtgtgttggtaaactttctctttgatttatcctaagaattgtcctcggtgttttatgttctacatctttactatgatacatccaagtgttcatttccttccactgatttcactttggatttttgattttcctagatctatcagtttgtgtgtgtgcgcttgtgtgtctgtgtgtgtgtttcagttttcaaacatccaagccaatatctcttcaaatatttcctgtaactkatattagactttattctctacttcccgaggctatcgtgctttatccatatttttcacctaattatctttctatgctgcaccctgttgcttcctcagatatatatctttctacctcatttattttcaatcaatctgctgtttaataaatccatagaatttcttttgtcaataattatatttttctattttagataggttttaaaattattttctattattttctcatacaccagttt

SEQ ID NO: 488637 - DNA, 553 bp, Homo sapiens
cttcccagcctgaagtcaacttcatgtgaacaattgttgtctgtgttattacaacaaagacactgtaagtaggacctgyttatttaatttctattgttgtttcttatatggtaggtatgttttatgttgtcatggagtgttttttttaagaaagctaatagatttttacttaacagttattttttgtaggattggattatcatgcttttattgccttattttattcaatcatttatttttaggttaaaaaaagtttacacatatttatcaacaacttactttgtgtagtatttactatttctaaataattttgtatctattattcatgtaatttttaaaccaagactgtaaattaggaaagacaaatgttagatttctacaacaccagactaaaaatcatttattcaatattcctattttacacgagagaaattcaaaaacttcagagccaaatctagctagtttgcagacccattagcaccattttaggtttgaataaatagaggattgatgaagttaccaagaacaaagttagcatggtatagtgcagaca

SEQ ID NO: 488638 - DNA, 553 bp, Homo sapiens
cttcccagcctgaagtcaacttcatgtgaacaattgttgtctgtgttattacaacaaagacactgtaagtaggacctgtttatttaatttctattgttgtttcttatatggtaggtatgttttatgttgtcatggagtgttttttttaagaaagctaatagatttttacttaacagttattttttgtaggattggattatcatgcttttattgccttattttattcartcatttatttttaggttaaaaaaagtttacacatatttatcaacaacttactttgtgtagtatttactatttctaaataattttgtatctattattcatgtaatttttaaaccaagactgtaaattaggaaagacaaatgttagatttctacaacaccagactaaaaatcatttattcaatattcctattttacacgagagaaattcaaaaacttcagagccaaatctagctagtttgcagacccattagcaccattttaggtttgaataaatagaggattgatgaagttaccaagaacaaagttagcatggtatagtgcagaca

SEQ ID NO: 488639 - DNA, 553 bp, Homo sapiens
cttcccagcctgaagtcaacttcatgtgaacaattgttgtctgtgttattacaacaaagacactgtaagtaggacctgtttatttaatttctattgttgtttcttatatggtaggtatgttttatgttgtcatggagtgttttttttaagaaagctaatagatttttacttaacagttattttttgtaggattggattatcatgcttttattgccttattttattcaatcatttatttttaggttaaaaaaagtttacacatatttatcaacaacttactttgtgtagtatttactatttctaaataattttgtatctattattcatgtaatttttaaaccaagactgtaaattaggaaagacaaatrttagatttctacaacaccagactaaaaatcatttattcaatattcctattttacacgagagaaattcaaaaacttcagagccaaatctagctagtttgcagacccattagcaccattttaggtttgaataaatagaggattgatgaagttaccaagaacaaagttagcatggtatagtgcagaca

SEQ ID NO: 488640 - DNA, 567 bp, Homo sapiens
tgtgtttacccaataccagtactcccattgtatctaggaagtaactagcttgcttgtgattttacaggctcatagtggaagggactttccttgtctcagatgagactatggactaaccttagatattcatgagaccatttcgtgaaaacttctgggtatgtttcttgttttcagaggaaaactaggtaacacttaacaaaatcaaggcaccacttttaaaasatcctatcacatttcagtataactttttcccacatttttatggtaatttaaataataccaagaaagagatatactttttaaatattatataaaatattttcatattattcggcacaataatctttgcaataataatttaaaataccaagaattaactgttaggctttgggttttagtatcaaaatgttaagtcaattattttctcctgaaagctaaatgagcacaaaaccacttagccctacatcatacctcttatatcagcaaacacagtgcactacctgtcaagtttgagcattgcaaccgctgaagtgtaaattctgtattacttcagggtcattgatagaa

SEQ ID NO: 488641 - DNA, 621 bp, Homo sapiens
tgtttacccaataccagtactcccattgtatctaggaagtaactagcttgcttgtgattttacaggctcatagtggaagggactttccttgtctcagatgagactatggactaaccttagatattcatgagaccatttcgtgaaaacttctgggtatgtttcttgttttcagaggaaaactaggtaacacttaacaaaatcaaggcaccacttttaaaacatcctatcacatttcagtataactttttcscacatttttatggtaatttaaataataccaagaaagagatatactttttaaatattatataaaatattttcatattattcggcacaataatctttgcaataataatttaaaataccaagaattaactgttaggctttgggttttagtatcaaaatgttaagtcaattattttctcctgaaagctaaatgagcacaaaaccacttagccctacatcatacctcttatatcagcaaacacagtgcactacctgtcaagtttgagcattgcaaccgctgaagtgtaaattctgtattacttcagggtcattgatagaaagcaataaaacgtatttcaagaaagatttattcagcacttcctgggaaaatgtttt

SEQ ID NO: 488642 - DNA, 621 bp, Homo sapiens
tgtttacccaataccagtactcccattgtatctaggaagtaactagcttgcttgtgattttacaggctcatagtggaagggactttccttgtctcagatgagactatggactaaccttagatattcatgagaccatttcgtgaaaacttctgggtatgtttcttgttttcagaggaaaactaggtaacacttaacaaaatcaaggcaccacttttaaaacatcctatcacatttcagtataactttttcccacatttttatggtaatttaaataataccaagaaagagatatactttttaaatattatataaaatattttcatattattcggcacaataatctttgcaataataatttaaaataccaagaattaactgttaggctttgggttttagtatcaaaatgttaagtcaattattttctcctgaaagctaaatgagcacaaaaccacttagccctacatcatacctcttatatcagcaaacacagtgcaytacctgtcaagtttgagcattgcaaccgctgaagtgtaaattctgtattacttcagggtcattgatagaaagcaataaaacgtatttcaagaaagatttattcagcacttcctgggaaaatgtttt

SEQ ID NO: 488643 - DNA, 598 bp, Homo sapiens
ctctaggtcattggtggccattgagccataactagtctatatttgttttgggttttgtttcatgtgtctgactcaactaaatttttaaataatttgtagtaaccaactttgcaaattctgggtttgtctttaaatgtcagatctggcaacgctgccttgacatttctgcctagaaactattggctctaggcagtcagtgyctgtctgcttcagactgttgactgaaatccccattcgttttcatgccctatctggcccttgctggcatatgagtttgcaacctttggtgatttgcagaaattgtctatgttagaaaatcattaatatctagattcaaacatatttctaaataaagctttaaattattatggtaactttaaatgtatttattctaatttttttcattaaattgctcttcatcatataaatatataatttttatacaactggatgagtttggcagaagaataccaacttttcatattctttgtggcattaaactttaacttatacacatggaaataaataatccttaaaatgacttatgaccacataaatgccttagcacatgtggttcatatttggagatttctcatat

SEQ ID NO: 488644 - DNA, 625 bp, Homo sapiens
aacacaagcaatgcaaatccacccaaagaaataatgaacatctgtaaatatttacctaacaacataggtaaatataagtcagtattcgtttatttttagtttgtaamtcctttttttcctatatagtttaaaacacaactgtttagggctgtgtatggtggctcacacatttaatcctagcactttgaggggtcaaagcagaaggattgcttgggcccaggattttgaggtcagactgggcaacatagactccatctctacaaatttttttttaattaaccaggcatagtggcatgtgcctgtggtctcagctactcaagagactgaggcaggaggatcacttgaacccaggagacagactgagactgcagtgagccatgttcacatcactgcaccccagccagggcaacagagcgagatcccatctcaaaaagtcaatcaatcaatcaataaaacacaacaactgtataaaacaatacttataaatcttcactgatgtgctcacaatgtataaagatgtgatttgtaacaacaacaaatgggatagagttttataagagcaaaaattgtgactactattgaaaataagttggcattaatttgaacttgtttgttataaattaag

SEQ ID NO: 488645 - DNA, 554 bp, Homo sapiens
tgaaatgagaaggaacacaagcaatgcaaatccacccaaagaaataatgaacatctgtaaatatttacctaacaacataggtaaatataagtcagtattcgtttatttttagtttgtaactcctttttttyctatatagtttaaaacacaactgtttagggctgtgtatggtggctcacacatttaatcctagcactttgaggggtcaaagcagaaggattgcttgggcccaggattttgaggtcagactgggcaacatagactccatctctacaaatttttttttaattaaccaggcatagtggcatgtgcctgtggtctcagctactcaagagactgaggcaggaggatcacttgaacccaggagacagactgagactgcagtgagccatgttcacatcactgcaccccagccagggcaacagagcgagatcccatctcaaaaagtcaatcaatcaatcaataaaacacaacaactgtataaaacaatacttataaatcttcactgatgtgctcacaatgtataaagatgtgatttgtaacaacaacaaatg

SEQ ID NO: 488646 - DNA, 625 bp, Homo sapiens
aacacaagcaatgcaaatccacccaaagaaataatgaacatctgtaaatatttacctaacaacataggtaaatataagtcagtattcgtttatttttagtttgtaactcctttttttcctatatagtttaaaacacaactgtttagggctgtgtatggtggctcacacatttaatcctagcactttgaggggtcaaagcagaaggattgcttgggcccaggattttgaggtcagactgggcaacatagactccatctctacaaatttttttttaattaaccaggcatagtggcatgtgcctgtggtctcagctactcaagagactgaggcaggaggatcacttgaacccaggagacagactgagactgcagtgagccatgttcacatcactgcaccccagccagggcaacagagygagatcccatctcaaaaagtcaatcaatcaatcaataaaacacaacaactgtataaaacaatacttataaatcttcactgatgtgctcacaatgtataaagatgtgatttgtaacaacaacaaatgggatagagttttataagagcaaaaattgtgactactattgaaaataagttggcattaatttgaacttgtttgttataaattaag

SEQ ID NO: 488647 - DNA, 485 bp, Homo sapiens
caaatggtgttgagacaactggatatttacatgcaaaagaatgaaatcaaacccctaccttacaccactatgctacaaacactcaatttgaacactgatccaaagacctaaatctaagaataaaaatgctcaaactcttagaataaaacgctcagctcacatgtcctgtcgacgtttaactagctttgtcaaatatgacacccaaagcacaagcaacaaaagaaaaaatagacaaattgaatttcaaaataacgggcttttggacatcaaggaaactatcaagaaagcataaatgataacctacagaatgggagaaaatatttgcaaacayatatctggtaaaggcctagtatccagaacagaaaaagaattcttccccctcctcgcccggccccggcctccattccctctcagggtcgcttcgacgagcggctaggtgcactgcggcggcagcactttccacggcaggagctggagctgggctc

SEQ ID NO: 488648 - DNA, 485 bp, Homo sapiens
caaatggtgttgagacaactggatatttacatgcaaaagaatgaaatcaaacccctaccttacaccactatgctacaaacactcaatttgaacactgatccaaagacctaaatctaagaataaaaatgctcaaactcttagaataaaacgctcagctcacatgtcctgtcgacgtttaactagctttgtcaaatatgacacccaaagcacaagcaacaaaagaaaaaatagacaaattgaatttcaaaataacgggcttttggacatcaaggaaactatcaagaaagcataaatgataacctacagaatgggagaaaatatttgcaaacacatatctggtaaaggcctagtatccagaacagaaaaagaattcttccccctcctcgcccggccccggcctccattccctcycagggtcgcttcgacgagcggctaggtgcactgcggcggcagcactttccacggcaggagctggagctgggctc

SEQ ID NO: 488649 - DNA, 635 bp, Homo sapiens
cagctgtgatttttttttttaatgaactggtccctatcacaagcattcctgacagaggttgggccaatctgatggctgatagaagacttctgggctttttcttaattcaaaactgaagtctctgcctgcctactaaactctcattttctgttagaggattactgctaccgctacctcatttgcagagtggaggtgactaagataccatgagcctgagccgagtatctttgcagaggtaatcacctccccagttgccctgtggtgactcagaagagtgctcacatttagctgggcatggtggctcatgccggtagtcccaggagkctgaggagggaggatccctaagccccagagatggaggttgctgtgagccgtgataatgccactacgtgatcataatcataattctgattatgtggatgtgaattacacgaatggtaattacactggtaattacactgcactccagcctgggtgacagagtgagactccgtctcaaaaataaataaataaataaataaataaataaataaataaataaataaaaataaaaataaaaatgctccttcatccctcccctgcctcccattgccaccagaatctggacactgcatgtttccaatagaaaactattt

SEQ ID NO: 488650 - DNA, 559 bp, Homo sapiens
agggataagcttcaaaaagtacagttctgctcttaagcacttcctccctacaggacccagcccagagacataggcggaggtaatgctgctgctaggtgctttgagccattttgtgctccctcctacctgcccctccttttgccccaaattctagtccyacctgctttgtcatctactacctgcctatggtagttccctctctggtcttcagtgtcctcattggtaaaatgaacgtaatatatatatcccttctgtaatcccatatattcatgcagtgatgtaaatgatgggaaagggctttgaacaatgtggtaagttaaagaggctggggcactgactttctcccactttcccaagtcccacttcagaactgctctcctagggcccaacctcataactcttttctagccctttgataaacatttgcctactgaggggcaaaactacatgacatcccaagaacagagactaatactgtagcccatttcttctctttatttcccatgatttttttttttttttaaggagtctcattctgtcgcctaggctggagtgcagt

SEQ ID NO: 488651 - DNA, 621 bp, Homo sapiens
accaagtgtaatcgtgccccatctgtgaacacctgggcttctcaccttcttcacagtgccaccaggtgtgagatagtaccatccctgggtcacagacaaagtgmgacaggaaaggccagaagttcacaaggtatgctatgaacatacaagatgacggtaagactacaaatcctacctcggggagcatcgctcagctcttcttagcttgcaggtttggacaccatgtctcagctacccttgactaaggctgagagaccaggatgggcatctgcccagaaggctccgggggcttctaacacaaggtagaaactgccaagtagaccacttttatgcaataaaccttcagcaggctggtggagaatgggagtaacctttcttgaaggtctatcttgaagataatcatccaggccttatgttgggcattttgtcattttaccatctttaactcttaccacagcctcttttcctgatgaagacagttagggccaaagaagtttaaataacttactcaggtcactcagacaggaaatggcaaaatcagaactggaacgagctgcttaactccaacttctctttctacttcgtattaactcttaggagtctttgaagaagaagaaagga

SEQ ID NO: 488652 - DNA, 621 bp, Homo sapiens
accaagtgtaatcgtgccccatctgtgaacacctgggcttctcaccttcttcacagtgccaccaggtgtgagatagtaccatccctgggtcacagacaaagtgagacaggaaaggccagaagttcacaaggtatgctatgaacatacaagatgacggtaagactacaaatcctacctcggggagcatcgctcagctcttcttagcttrcaggtttggacaccatgtctcagctacccttgactaaggctgagagaccaggatgggcatctgcccagaaggctccgggggcttctaacacaaggtagaaactgccaagtagaccacttttatgcaataaaccttcagcaggctggtggagaatgggagtaacctttcttgaaggtctatcttgaagataatcatccaggccttatgttgggcattttgtcattttaccatctttaactcttaccacagcctcttttcctgatgaagacagttagggccaaagaagtttaaataacttactcaggtcactcagacaggaaatggcaaaatcagaactggaacgagctgcttaactccaacttctctttctacttcgtattaactcttaggagtctttgaagaagaagaaagga

SEQ ID NO: 488653 - DNA, 540 bp, Homo sapiens
actttgtttaatagtttataagagcaagagaaaggctcaggagtgttagctgactgtcagcttaacataagccaactgggttaaggctgccaaaatgctaatgtgacctgaggtcatgtgatggaaatagagmgtccagaaggaacgagataatcatccaaatgtccttgtgctggtcagacaacatcaaggaagttgtgctcagttcttggcctgcactttacaaatgacagatctacaaaaaggttaataagagggacaaaattctggaaatcatgtcatctgaacgatggtcaaagtactagagatatttagtctggaaaagaggagaccagtctggtatagatttggagtggaaagtgggtggtatggagcatgccacagccctcagctatttgaagagtgttcatttggaagaggaatcagatatgttctgcagtatttcaaaggatgggagaaactttatgactggaaattgtaaggaagggaaattgtggtcactatatgttaaagtatactcattatagatgtatctgctag

SEQ ID NO: 488654 - DNA, 544 bp, Homo sapiens
ttggagcagctttcctggcaacattatttagagtgtcaacacattactctctttcgtttactatgattttttttcttcataacccttataactaaaggacatttatgaatttactttttattgtctatcaaattcactagaatgtgagatacatgagataactcttatgtaactctagctcagtaatgttgttgaataaagatatgtatcaatccagcaatataaccttcttgccttacaagtttggacattgagaacctgagaggtaaggttgcttgttaggttggtggctgagctgcagctcctctgctatcctctggagtctcagtccagattaaatttcactacatgacattgcaataaggccctgaaaattctactagttccactccctgcccactatacatgcagagcttgctgcrtgtttttatttaacatctttaacaataatgcaagctggttggcactttccaggatttccctaaggggagaggaggagcagaacacctctgctggtttctcctttgaaacggagactttgcaa

SEQ ID NO: 488655 - DNA, 514 bp, Homo sapiens
aaagtaaaaatgtggggcccactgttcaaaaattgttaaaaattccraacgaatcattaaatcaaaccatagtccttttgggtgcaggatcctggaagctcgccctggacaaagcagacatactgagatagaagtcactgttaagaccccctcatactctccacttaattttttacctatttgggtgatcacacacataatttcatgatgtcttattactagtgagatgttcacagcagtgccagtaaacttagaatccattgaggagcaacaatagctgttaataaggaactgcaaacctttctacatgttttataaattagataataatcacttaattattgagtttaatggcactttggttctgatgatttaaaactggttttaatgtttaaccaccaaactgttgaactttttcatggttctgattattcctccacctgaaatcagttaatcaatatgaaaatcaactgtaataccggatggccaaggggcagaggtgcaataatggaaa

SEQ ID NO: 488656 - DNA, 631 bp, Homo sapiens
ttactgaaagtcgaagtttaagaggatatttactaaaaaaacgtctctgaaatattgacatatgcagcacatttcattaaaaagctagctacaaacaatgaagatatagtgtctggttgaaactatgttcttctacttggaatactttatcttttcctcttcacctagctaaattatactcatctgagttctcggttgcctcagagaagcctttttgaactcttggacttggtttagtacccaagtacctgctttcattacaccctgtaatactccaataatgaaactcaatgaacttgttgttatttgtttaatgtattttaccctgataaatcaaaaacatgaagccagaagcacatcattctttttctctcttcagttctaacacaatgctascctcaccatctagtgatagattcttaattgtatatgtaaaggagggaagaaaggaagaaaaggagggatgttattctctattagttttgttgcatgggaaccccagagaatatcctggcattactttgagacctatggggattccagtgtattggaagagtaggagtgttgctggaaatgaggatgcgtaatgctccttcaggaagccaacaccagagagaagaaatgatgcctg

SEQ ID NO: 488657 - DNA, 631 bp, Homo sapiens
ttactgaaagtcgaagtttaagaggatatttactaaaaaaacgtctctgaaatattgacatatgcagcacatttcattaaaaagctagctacaaacaatgaagatatagtgtctggttgaaactatgttcttctacttggaatactttatcttttcctcttcacctagctaaattatactcatctgagttctcggttgcctcagagaagcctttttgaactcttggacttggtttagtacccaagtacctgctttcattacaccctgtaatactccaataatgaaactcaatgaacttgttgttatttgtttaatgtattttaccctgataaatcaaaaacatgaagccagaagcacatcattctttttctctcttcagttctaacacaatgctaccctcaccatctagtgatagattmttaattgtatatgtaaaggagggaagaaaggaagaaaaggagggatgttattctctattagttttgttgcatgggaaccccagagaatatcctggcattactttgagacctatggggattccagtgtattggaagagtaggagtgttgctggaaatgaggatgcgtaatgctccttcaggaagccaacaccagagagaagaaatgatgcctg

SEQ ID NO: 488658 - DNA, 631 bp, Homo sapiens
ttactgaaagtcgaagtttaagaggatatttactaaaaaaacgtctctgaaatattgacatatgcagcacatttcattaaaaagctagctacaaacaatgaagatatagtgtctggttgaaactatgttcttctacttggaatactttatcttttcctcttcacctagctaaattatactcatctgagttctcggttgcctcagagaagcctttttgaactcttggacttggtttagtacccaagtacctgctttcattacaccctgtaatactccaataatgaaactcaatgaacttgttgttatttgtttaatgtattttaccctgataaatcaaaaacatgaagccagaagcacatcattctttttctctcttcagttctaacacaatgctaccctcaccatctagtgatagattcttaattgtatatgtaaaggagggaagaaaggaagaaaaggagggatgttattctctattagttttgytgcatgggaaccccagagaatatcctggcattactttgagacctatggggattccagtgtattggaagagtaggagtgttgctggaaatgaggatgcgtaatgctccttcaggaagccaacaccagagagaagaaatgatgcctg

SEQ ID NO: 488659 - DNA, 483 bp, Homo sapiens
ttccaataccccactaaatatctagaataggttctttgctatgcaagatctcaggttcagaaagaataaactttaaaaaatgacagtgggagcagagcatcttctttgaaggtttcagattttggaggtcagtactttctactgaagtctgaaggaggctcaagggattgtggacaggaaaaatcagtcttgtgaaatctactcaatacttaaagtatttatcttgtaaatctactyatcccctctgttttaatctattttggctgctaaagcaaaatacctttgactgagtaatttataaacaacagaaatgtatttcttacagttcaagagactgggaagtgcaagatcaaggtgccagcagatgccaggtctggtgaggacccatccctcatagatggtgccttttgtgtcttcagatggcagaaaaaacaaggcagctttctttaacctcttttataagggcattaatcccatccatga

SEQ ID NO: 488660 - DNA, 398 bp, Homo sapiens
catgctctgcacacctcttacctctcatcatgcagagtccctgctgcctggagtacaaaatgttcaagacttcctcctcaacacacatgagcaactccaaagtgaaagagagttaatacccatgcaacaaacatggagactaggaaacagtagataaattgttttccttgccatctccataaacttccctaggatgcagcaattcacatgccctttcaggagacagtgccatgagactgtctgtacaccaagtagatgcaggcttggtaacacctacttatactggcttcttccttcrtcaccctttttcccttactcctgtttccctgggattgcattcctttatcatgtccttttatttaaaacaggtgttacataagcttttgcctcagtccatt

SEQ ID NO: 488661 - DNA, 637 bp, Homo sapiens
ttagcttacctgcagaagaaagaggggtggcgaagagaaagagaagcacacagccaaccaaatatggctccaggcagggctggaaccagaagatttctgacaagcaacagagaaacacactgcgatggtcagttctagttgtcaggttgactgtgctagtgcccacagttactccctccaacactaagctaggcattgctgtgaaggcatttgttagacgtgattaagtccataattgactttaagtaaagggaaattatccttgataatctgggtgggcctgattcaatacgtggaaaagctttcagagctgagctaaggcttctctgaagaaattccatctggggacaacagctttagctgtgccctagagctccagcttgctcttcctgacagcctaccctgggaatgttaggcttgcctagaccgcccccataaatcaagtaagccaagtccttgcaatgtatctctttataggtctctcctactggttctgtttctcctgttgaagcctractgatacactaaaatccagcagcctcactatcggtatttataaacaaaaggcaaattagctagcagaagagcaataccccccataacagaatatgttaatgtctctaagtgaaatattaag

SEQ ID NO: 488662 - DNA, 606 bp, Homo sapiens
gaatgatcttaaccatgtatcatgaactctatttctccttcctttctctcattttatctaaggtgcagagtctaggcttttctgctatttctaagagtatttcttactaaaagtgtcagttctgctgagaaatataacaacataacatggttaaagtagcatcattgactcacaaaacatttgttgttcaccrcaagaaatcttcattggacgatatccattggatcctgccttgctagtaaggctgatgggtgcaggtcataaggatttaggataatctcttactgtgtgcttgttgaaattgctctgatagctgatttgttatttggagaatagcagtatctttttggcaagaatattttctgcacagacaggaagggaaagactatgtagtgtgccgtgagttgatcttcaggcatcagtactgaccttcttaaatgggatatgaaagtcataggtggtttactgcatctagactcatttgatttctcagcaccatatgtctgttaacatattgatttataattaaagaagcatatgaatagaactcttatttctgtgaaaggatacatgtgtttgcatgtaaacacttccaccaaattttag

SEQ ID NO: 488663 - DNA, 476 bp, Homo sapiens
agagagagatgggggagagagggagagagaaagaaggaaggagatgaagaaagaatgctgaacaataacaataacaataacaacaacatacaakagaaagttgatttcataggatggctcatgtgagattcccaatgcatcttttgtacctcttctctaggggaaacttgagaatattacactctcagtgttcaaaaggcagaaacatgccagtcagaaagccccatgtaatatcctcagtaaacaattaaccaaaccaaaatttcaagaatggttacaaagagcatcaatgtgtagcaggggtattttctcttggaggacatttaaacaacaccacactccaatgcaccatttccaaaaccatagtcttctttcaacagcattggcatatatgtattgaatgacactgagtagatgaacgaatgaataaatgaggttgtcacatgtcctgtccctgggattcttctttggtgact

SEQ ID NO: 488664 - DNA, 388 bp, Homo sapiens
gcctgggcaacatagcaagacctcatctctacaaaaatatttttaaattagctgggcatggtggcacacacttgtagttctagctacttgggaggctgggagtatcccttgtacccaggagttggaggctgtggtgagctatgatcacgccactccactccagcctgagcaacagagcaagaccctgtctctacaaaaacaaagaaaataaagtcataaatacttaagtaaaggcaaatccttgcatactctacatactttttttagaaattagacgattttaactgakgcataggaaatatctaatctcatggcttcaaataatggaattaaatttctgtctcaagtgagagatattttccccataattacacaggtatagtacaca

SEQ ID NO: 488665 - DNA, 585 bp, Homo sapiens
ccagataaaagcaataaacacatcacatcttgtagtcctatctcttctgcaattagtgtctctgtctcacatttacgttgtctcaattagtgtcttatctttaatttggagaatgttctaggttatagccttatgatttcaaagcattttctacctggaagtgaccctagaattcaactcaaatcacctcgtctatcagtaagaaaactaaagaccgtggatggaatataatttattcaaggtcatattactaatggaagtttgcaastagaaactaaaactctcatgcatatctaccgtatatcacaccattcaaatattagttgtaaataaaatttggcaagttaacaacttgaaactggaaatgttaatgattctttacctttaaagagcttactcaattgagacagctattctgctgagttaccacagcactgaagaagcatagttggagtctgggggaatctaagcattgacatctgtaacagtggcatttcttttttttttttttttctgtagactagaaaaaaattttttttttttatactttaagttttagggtacatgtgcaccttgtgcaggcta

SEQ ID NO: 488666 - DNA, 632 bp, Homo sapiens
caattttttttttaatttttacaatggatctgaggtgaaacttaggtaatgagtatttttaaaaaggtcccctaatgattccaaaggtgcagccaaggttgagaaccagggctccactgctccagggattggaagcttttaaagaaactatattatctaatatttcgtaagcagagtaaaagtaaacaaggatgtggcatactagtaacacaaaagtgatttatacaaaaaagacgctattcattgtaaatgtttgtgttagcttttcttttttttttttttttaacaaatagcctttattcatttgggttgtgaattatcaaataaagtttatcttctcctacagattttcactgtatggaagtttgttcatgccttaaatacatttttaaacatatatttagaaactaaacacacagaatacattggtttttataaatcgtaattaataaattgaaaattctctgtgggaaatcacaaggcatgaatattatatatctaattatgaaatgcaaacttattaagagacaaacatttmattaaaaagttaatagaacataagaaatatatttaggcagctggttaatgtagagttaaataatttcaatgtgacagcatttccttgctgtgtt

SEQ ID NO: 488667 - DNA, 515 bp, Homo sapiens
cagttatttttctaaaatgttttgctgatattactttacaaacttctggtagctataattgctgtggataagtcagcttttagctgaactgtcattcctttgtagatagtctttaacttattctgaggtttttctttatcaggaagttctgaaatttcactataatacatctattttttaacatcatatttgaatttaatttttgatctgggagtttcagtttttaattcttgaatattcttaatcattgcctcttcaccattccttccgtttttttttttttttttctgamcctctcactaaacacacctgaggtcactctcaaatctgtttttcttgttccttgtttgctctttattttcattatctttccaagttctgggtgaattccccactactaattgtctctttgtctgagtttatttttaagtttgattgcattttttatttcaatgactatatttcaactttgaaagcatttaattaattctttttcatatctatttggttgtttc

SEQ ID NO: 488668 - DNA, 486 bp, Homo sapiens
tgagggaataggaatggctccctctccaggggtagagtggtggccacatttatcctggccttggcagggaccccagcagtgtgcaaaggctggctggcgtgccacagggaggggagtgctgagcacacaccttctggccctgggtcccattgatgggtggaaggggaggatagaaggctgacaggtgagaagtccttggaactgcctgagggccagggagggaagccctgccccacaaggctggattgtctgcaagcctggcttagagctccctggggagtcaataaagcgcagagtccagcccagctctgcactgccgtagggacctgtatagaggatgacaaaccctccccctgcaaccttcagcaggcatcttctgattcatcttcctggcttgcctgggaccagaaatgggacctccatttctgattgagtgcaygaatgcccaaggccacaggaccacagaatgagtcgaaaccaggagga

SEQ ID NO: 488669 - DNA, 517 bp, Homo sapiens
aacagaactcccaggacttcatggatgagatttttcaggagctcgaggtaggtcaggtccacatttcgggtgggatggaagaaacggctcctcttcagggatagggactacaacccagtagagtgactcttgcctaagtttgccccactaaatgtatcagagctgcggttgagcaaatgcagggccaggcctcacctgcgaccttgttcacagaacttcagcttggagcaggaagaggaggacgtgccagaccaggaacagagcagcagcatcgagaccccatcagaggaggyggcctctccccacagctgaggggctggggctaggggtgggtggagcccttttaaaatacccttcccttcaacaactctccagctctgaatggagaaactctctaggccatcccctcttctacctcctgcaacccacccatcctattagcctcccacattcaaggcccgtgatacagggatgaggtcagcaccagcaaactctggactggtggaagaattcccca

SEQ ID NO: 488670 - DNA, 517 bp, Homo sapiens
aacagaactcccaggacttcatggatgagatttttcaggagctcgaggtaggtcaggtccacatttcgggtgggatggaagaaacggctcctcttcagggatagggactacaacccagtagagtgactcttgcctaagtttgccccactaaatgtatcagagctgcggttgagcaaatgcagggccaggcctcacctgcgaccttgttcacagaacttcagcttggagcaggaagaggaggacgtgccagaccaggaacagagcagcagcatcgagaccccatcagaggaggtggcctctccccacagctgaggggctggggctaggggtgggtggagcccttttaaaatacccttcccttcaacaactctccagctctgaatggagaaactctctaggccatcccctcttctacctcctgcaacccacccatcctattagcctcccacattcwaggcccgtgatacagggatgaggtcagcaccagcaaactctggactggtggaagaattcccca

SEQ ID NO: 488671 - DNA, 574 bp, Homo sapiens
ggtcccaggaccacactttgcagattattactctgagaagagcactaactctgacgttggattccttctgttcctcattagtgaatttatttgggggagattattcaatctggtagatccgcatttacttagctgtgaagtggaggttaatgcaacctgcctgagactgtgagaatgagaaactctaattgaaataccaggcccagcgtgcctggatgcttgaaaaatgctgactcccatggtccgtccttccctcactcttctcagctataaagtgagaagcgaaattcagtatcttttaagattcctctcaggtgtaaaatgctgwgattctaaaagtttaattttgtagttccagagacaatgccaaacacctgtgtgtgcttagtgctttgtaaagagtggtaataacagtgacaccacataggccgtagttttgtagttccagagacaatgccaaacacctgtgtgtacttagtgctttgtaaagagtgaataacagtgacaccacataggccatagttttgtagttccagagacaatgccaaacacctatgtgtacttagtgctttgt

SEQ ID NO: 488672 - DNA, 623 bp, Homo sapiens
caacatttctaaaataatgaatagatgtgaaacaaaggccaacaaaaggttaaactgtggctaattcagtcccctgaacaccgggaggaaggaaggctgagtgggcccaggggactgaagaagggtccatttcagaagccaaacttgatcagggatttgaaagaacacgaggcaggagtgggagaagctgggcagcccaggtggggatgagcagggacaatgagaggcacrggcttaaggggtgagaccctgagtgtccctggggtagcacaggagccccggtagtgggaagcctgcttggcccagtggggagagtgcaagtcaaagagggaagtaaagaaaagtctcccagggggagtggtgaggcagtgaggctatttccaggattgctctgtgtactagtcagggttctctagagggacagaactaataggatagatttatgtataaaggggagtttattaaggagaattgactcacacgatcacaagatgaggtcccacagcaggtcatctgcaagctgaggagcacggaagccacgggagaaagatggaggccaaaagactaagccagtctagtctttccatgttcttctgcctgcttttattccagccatgctggca

SEQ ID NO: 488673 - DNA, 623 bp, Homo sapiens
caacatttctaaaataatgaatagatgtgaaacaaaggccaacaaaaggttaaactgtggctaattcagtcccctgaacaccgggaggaaggaaggctgagtgggcccaggggactgaagaagggtccatttcagaagccaaacttgatcagggatttgaaagaacacgaggcaggagtgggagaagctgggcagcccaggtggggatgagcagggacaatgagaggcacgggcttaaggggtgagaccctgagtgtccctggggtagcacaggagccccggtagtgggaagcctgcttggcccagtggggagagtgcaagtcaaagagggaagtaaagaaaagtctcccagggggagtggtgaggcagtgaggctatttccaggattgctctgtgtactagtcagggttctctagagggacagaactaataggatagatttatgtataaaggggagtttattaaggagaattgactcacacgatcacaagatgaggtcccacagcaggtcatctgcaagctgaggagcacggaagccacgggagaaagatggaggycaaaagactaagccagtctagtctttccatgttcttctgcctgcttttattccagccatgctggca

SEQ ID NO: 488674 - DNA, 581 bp, Homo sapiens
tttggtcgcttatgccatcctggaggcttcctggtcctggggtgaaggggtgacttctttaccctaatggtcttcgtaggcaggtctcaggatgtccactccaaagttcgtggtcttttttctagagaataataatttttaaaatccattgaactggccgggcgcggtggctcacgcctgtaatcccagcactttgggaggcygaggcgggcggatcacgaggtcaggagatcgagaccacggtgaaaccccctctctactaaaaatacaaaaaattagccgggcgcagtggcgggcgcctgtagtcccagctactcgggaggctgaggcaggagaatggcgtgaacccggaaggcggagcttgcagtgagcggagatcgcgccacagcactcccgcctgggcgacagaacgagactccgtctcaaaaaaaaaaaaaaaaaaaaaaaaaaatccattgaacaaacatcctgcgctgcctcctgcaggatcaaggctggggtaacagaggagtgaggtaaggccccagggaactatccccagtggatccctgctgccctgcggtgagagggggtctagctcc

SEQ ID NO: 488675 - DNA, 463 bp, Homo sapiens
agctgtatctgaacactacccctgaactttccagtaatgggagtcaataaattcctttttttttttttttttttgagacaaggtctcactctgtcacccagcctggagtgcagcgcatgatctctgctcactacaacctccctctcccaggttcaagcgattctcatgcctcagcctccccagtagctgggattacaggcaggcatgaacatgcctggctgatttttgtatttttagtagagaagtagtttcactgttggccaggctggtctcaaactcctgacctcaagtgatctgcccgtttcagcctcccaaagttctaggactacaggtatgagccactgcacastgcacccagcccctttatttgttcaagccagtttgtgttgggttttctgccacttgtaactaaacatgtgctgattcattttatctacctatgtaggacctgaggaggcatcca

SEQ ID NO: 488676 - DNA, 579 bp, Homo sapiens
ctgggccactgggcttgttttggttcctcttcctgatccatgtcttggaaactgctttttggcagtaagtgagggtaattttaaggctcatcttgtttgtktttcttcttctgggattatgattctgttgttccatatccggatgcagttgtctgatgtattttgttaaattttctagttgtttatggtgggtggccaattcctatgttaattaatccttcatgggctaaagaagaagttcttcccagaattttaattgttttgattgggagaggagtttagggtgtctaatccactgtactgctggaaagggaagtgttagcccttccatgttatcttcgttcttaggcagctctctcagtggtcattttcagcactaggcttatatacaacctaattaacaagcccataaaaatgtgcctcttctttattagtttttggaaaagcctcagcattgactccactcatgtagttgcccgcccctgagcaaccactctggtcaggggttgaatatgttggttggcgaggcctgcatcagggagcggagtccatcttatcagcatctcatgaccacatgag

SEQ ID NO: 488677 - DNA, 612 bp, Homo sapiens
gctggcactcctctgaaggcagatttctagggtgagaacagaatttcccaggccattttctttgcccttctgtatggttgctgtcaagtttactgctttttcaaaccctgttagcttttgctttgttactataggaacaagagctggtagtctgggggaaatatatgtgcatgtgagtgctggggagggggtgtagtggctgtggtggctgtggactgaagggagtgaggacagcagaagatgttcaccgctgaagtctctctgggggccctgccactttggccagygctctcttcagagagtttttgactttgcatggtacactcttggggaacaggcatccctttgtagatctgcagcactctcctggcacccatccagtccttcagtggaacatctggaaagcctcggcccctccccatgccaaagccactgagccctggagacagagatcaatgacctcttctttgctgctccttaacccgtgtcccagacaagtgtttttctgggaaccagtgaataacgcagatctttgatgccagcgcttgtgtgctgttgcagtaacactttcacttttgatgatagggtgggggcagaggaagggcctcggta

SEQ ID NO: 488678 - DNA, 612 bp, Homo sapiens
gctggcactcctctgaaggcagatttctagggtgagaacagaatttcccaggccattttctttgcccttctgtatggttgctgtcaagtttactgctttttcaaaccctgttagcttttgctttgttactataggaacaagagctggtagtctgggggaaatatatgtgcatgtgagtgctggggagggggtgtagtggctgtggtggctgtggactgaagggagtgaggacagcagaagatgttcaccgctgaagtctctctgggggccctgccactttggccagtgctctcttcagagagtttttgactttgcatggtacactcttggggaacaggcatccctttgtagatctgcagcactctyctggcacccatccagtccttcagtggaacatctggaaagcctcggcccctccccatgccaaagccactgagccctggagacagagatcaatgacctcttctttgctgctccttaacccgtgtcccagacaagtgtttttctgggaaccagtgaataacgcagatctttgatgccagcgcttgtgtgctgttgcagtaacactttcacttttgatgatagggtgggggcagaggaagggcctcggta

SEQ ID NO: 488679 - DNA, 640 bp, Homo sapiens
tgaacacataaatgtcatcaatgattccgtctctacctgggtaaacttcagaacttaagcattagttgtgagcatttggccacgtggtagggagaatgaaaaggcgcccaggtgtctcttgagaaaggaaggaagtttttttcaggcggagtgggttggatgaggcacatgtttctagactrctctccattttattttctcacttctggccactgtcggttgtagaggtgccccttcagtacacacacagctacggtaacagtacctctccatccacagtgacttatatggacttaagggagtttcagtcggggaagaaagtgggactttttcattaaaacaagactctgctatacaatgaggggaggcctaactgcctctccgcaccctgatgtcatctggctggtccctggatggtggggatacatggtacagccacccaaggcatggcagccatgtggtgatttaaaaaggaattaactgttaggacaccaggaagtgctcaattaattcttcttcaatttggttagaggaaaaaaatgcttttctgagtttatgcaaaatgatcatgttttattcatttggtagaagtcactctaatggcatgcagggtagatgatgtcagcttttccatctcagc

SEQ ID NO: 488680 - DNA, 419 bp, Homo sapiens
caggctatcttcagcggtgatgcgctttcaaccctcctcccctacccacatgacccgggtatggagcgtgggttggtatcrtgatagcatgctggaatctaacatgaattatcctaacttggtagacccagatgcagcggctttcctgctccccgcaactctgcctgacacattgctggagctagggagggaaagccgctagctgattgctaagacctaggtgaagaatctcaaccacctggcctactgggcatcttctggtcatttggatcaccgctggtgtgctggtgctgagtccaggaggctgcactgctcacagggcataggcagctctgcttggggcaagacattgccaaggtgcagagaacaggtttctggaggcaggaagtcaaaggcaattgggttaattaaacccctgt

SEQ ID NO: 488681 - DNA, 611 bp, Homo sapiens
gggtgtgagttgcacgatagaaaggataacctgggagcaccttacatgggagtaggctagggttcaaaccctaacttctctggttattagctcagggcctttgggtgaggttcttggtatctccaagccttggttacttcacacttcctaaacaagtttgttatgatcattaaatgaagtgttatctgttggatagcccagctcagtgtctcacagcaggggctcagtaaacactagattctttccttaactatttcctacctattggaggtaggcgggyccatggtgaacagggaggaaagatggttccaagggtgggagagaacctagccaaggttagggggctagagctgcaggcctggcagggggcggtgagcagtccaggatgtgctggacagagtcccacgctggtcctgctgtgcagcaaaccgtacaacttgaaggcctggcaagcagagcgtgccgtggcaagtttgctgagtgtcttgggtgtgtaggaggagaatgggagactggggaatggaaaacagggcaagaagggatgctgatcacaaagtgaaaaatgggaaccactactcacgggctttttcaatggagaggtggactgattg

SEQ ID NO: 488682 - DNA, 434 bp, Homo sapiens
gtaaaatctcatgtgctggctgtggaaggggcaggtggagcctttcsttccccagcaagggtggggactgtgtaatgtaggctttagctttctcttgtctagtctgtggcacagctttaactttttttcccaaaattgtaactcatttatttttagttaaactctggtcattgtaccaaacaattttatcaacaatacatatttaagattcagcctctattcaactagcattttgcaaggactgtggaggagaacagggccagaacagaaaagggttcggacaataaatgcaattggaggaggaaaaaataataaccacataaaccatttttcggtttctatagttactttaaaacccgatgattcaaattcaacccaaatctctgaagctttatggttgtatatagtaaaccaatctgtccaccagctggaaa

SEQ ID NO: 488683 - DNA, 633 bp, Homo sapiens
caaaacatgtgatctctaaattacttggctagagaaaccacaggaaagccagcgtaggcagtggtatttgccttctgccctctggcctctcttatttgctgcctttccactgaagtgtgtttatgccttgtcttggggttgaatttggggaacttcctcctgcacccctcttccagtgtgaactggcctccaagggagggccacggcacattctgtgctgtttggctcacatttagagaacaccaataggatcaggggcggggaaggccaccaggagacaaaggcctctgaagaggacatcccaacagatcgtggatcattgtcatgaattccccccaaccttttcttggaaaatctaggccttctttggctctagggctggggctagagaaaaacacaggaaataacctacaggcatgtaccatggcatgtgtggagtcccttctgctgagtgaaagcagaaggaaataaacatcagaacctccccaaaggggaaaatacatgtgcaggacatyctcatggctcaggcgaacactagtgccagtgttcactaggtgtggaaaagggtgcgtgagtgggtgaaggcagacactgggacagtgggagaggaggaggcttgagacctgagaactg

SEQ ID NO: 488684 - DNA, 657 bp, Homo sapiens
tcagccaactgcctgaggctcacagggtagggtctgaatttcttcctacaaggaagaaatgccaagtgcggtcaatagtatrtatgactttggcctgaaattgccatttggagaccagctttggaggtagagcagagtccagggacatctctagtttctgtcaaccagccaggtgtgtttatcacctcagctgtgccctcagccctgtcttaggtgctgcggtggatatagaagtctaagacacaaagacacccgtgaagcaatgtgtgcaggtttgtgattaagtgctgacttgtgcagcacagactttgtggtataggagggcagagcagggaaccatccctcaagttcagggggttgggaaggctccctggggagggggctgggatcaccttggagggtggctttctaggagcagagggaaggagggaggaaactcgagccagggagagcatggaaagcaaaggtgaggtggttggagtgatcttgccttgtaataggaatgtggagaaaccacactggccagagtggaatgttcttgggcgcagcaggaagaaaggttgttattggaagttttgaggagagaggtgtacattaatcgacatttaacatgagtttgttgtgtccctgggctccttggagatattgagaggtgga

SEQ ID NO: 488685 - DNA, 626 bp, Homo sapiens
ttcacctaaaaggggctccagcagtgcttgggtggttggactaaatgaatttgtaaactcatcacagacgttttagaaaacaaatgatggatctcctcctacttgaaggttctgagcacttttcctaaagtgctaggcagatgtccagtcctcagaaaatgctaaataactttattaatagtgcagatgacgggttttagaatttcaaagttaagctgatttctgaagaggtttagcagcagtgggaataatcttctatgggggctaaaaatctacatcagcttcccagattttggtctctccatcttgggagtggagaataagaattctcatttctttggacattactgagtacctgtatttaagataataaaatattrcagtggctctggtctccctgcttccatctccccttatttcattttctaaacaatcttgcctaagtggttttaaatgaaaatctcgtcaaatcacttcctagtgtaaaatccttcagcatttccccatctgcaaactataaatcacaattcttttatcagaacacaaaccctctgtcatctggcttctctggttctttccaagtcaactccagcttatctttgcctcgcatttcatactccagccac

SEQ ID NO: 488686 - DNA, 400 bp, Homo sapiens
ctgggaagccggtggtttccctcttctctccccttctccacggcaagctgcagttccctcacctcctgtttgtgccaagcarccccccactcctgcagcatgagggagcacctcattacctaatactttttaggcaagtgaaagctttaaaaagtcactaaagagcattagagaacactttttcaaatgtcagcctatataatcccatcatcctagtggagcgccgttcttacgttatcttcagcctgcaaatttgcttgacattggggtgtattattgttcattcttttttcacaatattacaacacatttctccaggtttctgtggtctttcttcaccctcttaaagttgctgtcgttgtaatgtgattcatcagaccattggcctaatagtagacag

SEQ ID NO: 488687 - DNA, 581 bp, Homo sapiens
cagctttgaaatgaatagagtcaaattaattggttgccatattgccctattggattgatgtcaacacagtttagaacgattggtttcattgctcgtcatttctgtaaaaagttgggaaataagactcttaggaaggactgtaaccaccgtcataacagtgttcctttgagaaaattagattggacccatcaccattttaactgaaaatagtttcccaggatgaaaacaactagtcaatttgagagatttgtaaatcaaattgcatcttaaatgcattaggagacgggcttactgttcaaatgtattccgtggtgaatcctgtgaaaggagttaagggtgctcttttacgaaaakaacctgcatcctgtgtcctatgatgcccaggatgatgtttctggattggatttttgtaggtaagtttgtagcaagtaagggctactgaatagatttggtttttggttgtcatatttttgttcttgcttatgaaaatagtagaacattctacacattgtgaaagtatgaagcgaaacaaaaacttgcctatgatggcagcaccgaatggtgattgccatacttctgca

SEQ ID NO: 488688 - DNA, 581 bp, Homo sapiens
cagctttgaaatgaatagagtcaaattaattggttgccatattgccctattggattgatgtcaacacagtttagaacgattggtttcattgctcgtcatttctgtaaaaagttgggaaataagactcttaggaaggactgtaaccaccgtcataacagtgttcctttgagaaaattagattggacccatcaccattttaactgaaaatagtttcccaggatgaaaacaactagtcaatttgagagatttgtaaatcaaattgcatcttaaatgcattaggagacgggcttactgttcaaatgtattccgtggtgaatcctgtgaaaggagttaagggtgctcttttacgaaaataacctgcatcctgtgtcctrtgatgcccaggatgatgtttctggattggatttttgtaggtaagtttgtagcaagtaagggctactgaatagatttggtttttggttgtcatatttttgttcttgcttatgaaaatagtagaacattctacacattgtgaaagtatgaagcgaaacaaaaacttgcctatgatggcagcaccgaatggtgattgccatacttctgca

SEQ ID NO: 488689 - DNA, 581 bp, Homo sapiens
cagctttgaaatgaatagagtcaaattaattggttgccatattgccctattggattgatgtcaacacagtttagaacgattggtttcattgctcgtcatttctgtaaaaagttgggaaataagactcttaggaaggactgtaaccaccgtcataacagtgttcctttgagaaaattagattggacccatcaccattttaactgaaaatagtttcccaggatgaaaacaactagtcaatttgagagatttgtaaatcaaattgcatcttaaatgcattaggagacgggcttactgttcaaatgtattccgtggtgaatcctgtgaaaggagttaagggtgctcttttacgaaaataacctgcatcctgtgtcctatgatgcccaggatgatgtttctggattggatttttgtaggtaagtttgtagcaagtaagggctactgaatagatttggtttttggttgtcatatttttgttcttgcttatgaaaatagtagaacattctacacattgtgaaagtatgaagcgraacaaaaacttgcctatgatggcagcaccgaatggtgattgccatacttctgca

SEQ ID NO: 488690 - DNA, 478 bp, Homo sapiens
aagcagacagttcctcacgtgccagggcccctcacagcgattttgccgcatgtgttggagtccctttgagattgagttggaaggaaacccaactaaaaccgcctaaaaccagagcctggaacccacggctctgaagtcacagggaccccccsaccccaactcccagtgaaaatctgggtgggcgtttcccagagggaagcctgcctgtgtcaccccccaagcccggccaaagagctgaatgtccacgccctgtgcctcagcctccccccatgacagtgacgacactgctgtctgtgcctccagcctggtgcctggccctgccctcactccccaggccccttgggcaccgtctgctgcgggcgcacccagggctgtccctgtggggcactgctgtatggataaagcttttcgcaccccctcagaaaggagcatgggggtggtagccccctcatcatcccagccttggaatgtgccccca

SEQ ID NO: 488691 - DNA, 576 bp, Homo sapiens
ctgcaggctctgcctgccctgtgtgtgtcctgaggcaagagggggctctctggaaggggtgtgggcagcacagccttcccaggaagcacatgggtgaggactgccccctgtgcccacacagcacctgaccactgatgtcatggggcccctctccagacctgggtatgtttggaagcagattgagttaatgaaaaaaaaaaaatctgactactcttctacagacgtcaccaagaagggacagccttarcccagcattttctgtgttgcatttgtagaggggctccccagcctgctgccgccagctcagaacttgatgatctgggtttttctgcaggcagaggggaggggctgcctgcccttgggccaagccaggcctggtgctgcggcactgggtcaggtgcaggcacaccagagcggtggggaagccattccctctcaggcagtggctcacatgcctgtgcctcctgggagcgggtcgtctcctctgggctgtctcccaatcccctgccctcctggacctgcaggtgccccctctcagaaggaatgacaccatggacagccagcccggccttgtgg

SEQ ID NO: 488692 - DNA, 199 bp, Homo sapiens
cggcatgtgcagaggggtgccacgtggaagacgtcgttgcayatgtgtgatgggcgcacgcccacgcctgaggagctgccgccctgctacgagggcacggactggtcgggctgcacgctacaggagttcatggactgcccgtacaacctggccaacaaccgccaggtgcgcatgctggccgacctgagcctggtgggct

SEQ ID NO: 488693 - DNA, 542 bp, Homo sapiens
gcgctgcctgggtgaggggacgtccactgagccagcaaygctgagggggacaccttggtggaaagggccctgcctcccggccgaccctgtggccttcttgtggcacatgacacaagcagaaccaatcagatcactgcccaggatttcttatttaagatttttatttttttcagatggagtcttggtctgcccccaggctggagtgctgtggcatgatcttggctctctgcagcctccaccacctgggttcaagcaattctcgtgcctcagcctcccaagtagctgggattacaggcgcactaccaagcccaggtaattttttttttttttttggtatttttagtagagataaagtttggctatgttggccaggctggtcttgaacccctgacctcaggtgatccacccaccttggcctcccaaagtgctgggattacaggcgtaagccaccgcgcctggtccgggagtttagattcttgttttgaatcttttcctcttctctaatggaaacatttcttgccgtacatttgcctctcaacact

SEQ ID NO: 488694 - DNA, 542 bp, Homo sapiens
gcgctgcctgggtgaggggacgtccactgagccagcaatgctgagggggacaccttggtggaaagggccctgcctcccggccgaccctgtggccttcttgtggcacatgacacaagcagaaccaatcagatcactgcccaggatttcttatttaagatttttatttttttcagatggagtcttkgtctgcccccaggctggagtgctgtggcatgatcttggctctctgcagcctccaccacctgggttcaagcaattctcgtgcctcagcctcccaagtagctgggattacaggcgcactaccaagcccaggtaattttttttttttttttggtatttttagtagagataaagtttggctatgttggccaggctggtcttgaacccctgacctcaggtgatccacccaccttggcctcccaaagtgctgggattacaggcgtaagccaccgcgcctggtccgggagtttagattcttgttttgaatcttttcctcttctctaatggaaacatttcttgccgtacatttgcctctcaacact

SEQ ID NO: 488695 - DNA, 626 bp, Homo sapiens
caagaagactcagaaagttaggggaaagcttaaacrttagctactctacctcctacaaatgggagaatatgagtttcatggtgcttattgcttgcccagtggatccattggaaatagaatccaattatcttgactcatctcagagctctttgaaattacaatgcattgcaaaatcatcttaaatgaaataaccaccttctccctttcagaaaaacaaaagcaatgtgggaagtgtccatattcagcaagacattatagggagcacccatgaaaccaaagttttgtcagaaagagttgccttttatgaacctccccactgcttcccctctctcaggctgggctccccagaagaggactctgacagagtcagatgcatgtgcaaccccagtgtcaaagaaagtgcttcaggaaacccaaagagaatggggcaagcaggatggggaagggagagaactcaagcaagagtatgattcaggcaaagtctagagaaaggaaaccagcctgatcccacaggggacatctggagtgaaagttacacttcagagttccgtcctcacgacttgagcaagaggattagcgtttcataccccactgtcttgagcaaaggcctgcctgcagtagcttaa

SEQ ID NO: 488696 - DNA, 146 bp, Homo sapiens
tcaattaataacttctacagcatgttatcatttgcctacaattctcattataaagaaaagcaattgcctaccatgaacaccgttggtttaaaagtcttgaargcttgtatccacatattccatcatgttaaccttggtggtaaatg

SEQ ID NO: 488697 - DNA, 519 bp, Homo sapiens
acctgacctgcttcctgcagtttttaatgtcacacaaccattatgactgtattagctgcaaattatatagcctcagcctagcttctcaaaggacccagtcttattccttgctgactaggagtcagaagccagaagattgtgcaatcttctccttgtgttaccttctggtcagtgtcaggttcttacacaaacaacagaggtcctctctcttttagtctcccctctacttcctttttctatccctttctccccagggtctctggctcattttacctccactctttttatttgcaccagttattcctgtttgctcttcaaacttttctcagtggagcatgctgaggtattcttaactagaatgacatgttttcattgatgtcactgcacctgccaccatcatggcaggctgtaccttcaaggactktcctccgcatagcactccctgacaaaacatatccaccaaagtccctttggaaccagtcataggaaacttctaactttgggaaaattccagcacca

SEQ ID NO: 488698 - DNA, 548 bp, Homo sapiens
gtaaaattgggagagctgcaagtggcctaattccaacttcccatcctcattcaactcccatggataaggtccgccaaccaaactcccagccttatcaaaggccccagacacagttcctgctggtcctgagcaccaggtctcagttccctgccagcccatggaatatgtcaaacatgacaatcacatctttgtgtgggagccaggggtcacctcactgtcttgacactgcacagccyctggtggttcactctgttcccaaatgcaaattctgtgtagccctgcatggcgtgcagtgtctcctcccccaagctgtgagtacctgtgactagtgtatacatatatgtccactgccaggtccctttctttggccatccccataaccatagggcaggaatcccctcagccccctcaccgacagggtggatgacaattgattaaaacaggatgtagcatagttagggtgaggctgaaggtagttccacacatagaggcaaagaatttcaaagccagagagctgatctcaccctgtagataagaaaacagaccta

SEQ ID NO: 488699 - DNA, 548 bp, Homo sapiens
gtaaaattgggagagctgcaagtggcctaattccaacttcccatcctcattcaactcccatggataaggtccgccaaccaaactcccagccttatcaaaggccccagacacagttcctgctggtcctgagcaccaggtctcagttccctgccagcccatggaatatgtcaaacatgacaatcacatctttgtgtgggagccaggggtcacctcactgtcttgacactgcacagcctctggtggttcactctgttcccaaatgcaaattctgtgtagccctgcatggcgtgcagtgtctcctcccccaagctgtgagtacctgtgactagtgtatacatatatgtccactgccaggtccctttctttggccatccccataaccatagggcaggaatcccctcagccccctcaccgacagggtggatgrcaattgattaaaacaggatgtagcatagttagggtgaggctgaaggtagttccacacatagaggcaaagaatttcaaagccagagagctgatctcaccctgtagataagaaaacagaccta

SEQ ID NO: 488700 - DNA, 565 bp, Homo sapiens
tggtggaagctacaatgactttsgcaattacaacagtcttcaaattttggacccatgaagggaggattggaggcagaacctctggcccctatggtggtggagaccaatacttagccaaaccatgaaaccaaggtggctatggctgttccagtagcagcagtagctatggcagtggcagaagcttagcaggataggagagccagagaagtgacagggaagctacaagttacaacagatttgtgaacccagcaaaacacagtggtggcatggcctagctgctacaaagaagacatgttttagacaagtactcatgtgtatgggcaaaaagctcgaggactgtatttgtgactaattgtataacaggttattttagtttctgttctgtggaaagtgtaaagcattccaacaaaggattttgaaatgtagatttttttttgcacccatgctattgattgctaaatgtaatagtctgatcgtgatgctgaataaatgtctttaaaaaaaatgaaaagaagtcgctgggccataggtttatattgatagaaagaaagctgaggaagctact

SEQ ID NO: 488701 - DNA, 621 bp, Homo sapiens
attatgatagatagatagatagatagatagatagatagatagatgatagatatgaggtatctatttattatattccctccctcccttcctcccttcttcctttcctcttttcctctctcccmtcccttccttcttcccttccttgtagtgcctgagcctccaattgttttccctcattgccagtgaagtgccttcctgatacttgacactttaaaagtttggttgaaaaccttacttcttaatgtaataaaaactagaactgggctgggcggcttatgcttgtaatcccagggaatcagaaggctgatatgggaggcttgcttgagcctaggaattggaagctgcagcaagctatgatcatgccactgcacttcagcctgggtgatagaatgagaccccatctcttaaaatacacacacacacgcacaggctgtaactatttcttctagtatgtgatcactttggtagtagtataaatgcaatactatagatatattatgggggtaaatagatttatgcaggcttgctggggctaaccactatttttgaacaaaagtgtgattttgtcggttaaaaaaactggagttggtagtagaggaaagccagttataatctgcggaa

SEQ ID NO: 488702 - DNA, 449 bp, Homo sapiens
tttatgatggatatgatataaaaaaaaacctactccagaatttaaatttacacaacttaaactacataatttagaatcagtatactcaacaatctctaagaagcagcagccattcttaaattagcacttaaaatgtagtggccatttttcttcagaataattctcatcaacatctttagctcaaaaggaactcacatattttcgttttgtttttatccagccacttataaccatcctcatgttctctcagatctcacatggtcatccagtgtagccaaagaaatgtcctggctccaaatgcaatctggcagttgctattgattaccctgggcaatttggggttactgtgatttgttcctcaaaagactgtcacacattattatgccacattctaagttagacttgagatcctttctctgtrggaacaaaaagaagaacgttggagctct

SEQ ID NO: 488703 - DNA, 605 bp, Homo sapiens
aaaactttaaattattgccactgcataaaagcaaatagagaatgagggcagggtgacaaactgctttttttcccacagcaggagttgtagaattcgttggcactttatgctttagttttcaaataaagggactatttttttagtttgaatttaaaaataatacagataacaaatacacataacaacatggattaatctcacaagcataaaattgagagaagctagacacgaaagagattccatttataaaatgtacagaaacagaaaatagtagctactggtcgtgtgtgtgtggtggggggrggggggggttggaggaggggagatgtctggtgactggaagatctgggtgctggttattgggtgtttactttgtgaaaattcatcaaactgtggacatttatgacctatgcattctctttatgtagattaaatgtaataaaacattccccccaaatgatacagatactacacttacacattaccatgtcagtattcactgagatgtgtatgactacatgtatttgactctacagaaaaataatatacagacatgtttattcacttggtactttttaaattgtctagaacagactgagagtgac

SEQ ID NO: 488704 - DNA, 605 bp, Homo sapiens
aaaactttaaattattgccactgcataaaagcaaatagagaatgagggcagggtgacaaactgctttttttcccacagcaggagttgtagaattcgttggcactttatgctttagttttcaaataaagggactatttttttagtttgaatttaaaaataatacagataacaaatacacataacaacatggattaatctcacaagcataaaattgagagaagctagacacgaaagagattccatttataaaatgtacagaaacagaaaatagtagctactggtcgtgtgtgtgtggtggggggaggggggggttggaggaggggagatgtctggtgactggaagatctgggtgctggttattgggtgtttactttgtgaaaattcatcaaactgtggacatttatgacctatgcattctctttatgtagattaaatgtaataaaacattccccccaaatgatacagatactacacttayacattaccatgtcagtattcactgagatgtgtatgactacatgtatttgactctacagaaaaataatatacagacatgtttattcacttggtactttttaaattgtctagaacagactgagagtgac

SEQ ID NO: 488705 - DNA, 556 bp, Homo sapiens
cttcacttactcacctgctgctcacctcctgctgtgcagtttagttcctaacaggccacggactagtttcaggagttggggacccctggcttaagcaacagraatgtgtggtctcacagttctggaggcccaaaatctaatattaaggtgtcagcaggattggttctttctgagggctgagagagaatctgttcatgcctttctcataacttgtggtttgctggcaatctttggtgttctttcacttgtagaatcatcaccccaatctctgccttcatgttcaatggcattctccccatgttcatgtctgtctctgtgtccaaatttgctcttttaataagaataccagtcatattgggttagagtctaccctaatgactttatttgacttgattacctctgtgaagaccctatttccaaataaggtcacatgcacaagtactggatgttaagacttcaacatcttttgtggggacacaattctaggagttgtttacaaattaatgtagggatatggggtttggacttataaatgtggtgatctcaacaagtccca

SEQ ID NO: 488706 - DNA, 588 bp, Homo sapiens
caatagaggcccattcatctttaggaggctatagtcatcacatttattcagtagcaaatatggattgttaggctaaacagaccataatttagaacggcagtctcttaattgtgccattggtattcatcactgtaataaaattgtctaattgaaaaagctatattgacaaaccaacaagcagtacattgatttagtagcagttttgaattattaagtctgcaatgttttattccatagaacgtttatatttttcattagataggtcttctcttaaaaggggctgaggggttattttggaaractcttcagactgaagtaaggattgcttcaagtatgggaagatttgtggattctgaaaagccatttggttttctgtatgtactggatgtgcgtatgtgtgtgtgtgtgtatttgtgtagactaatttccctagatgatctgagccaaaaatgaaaatttaaagtttgttctactagtcctgtgaactgaggtcaccaattgggaaagaaaggatgaggagtcaatgtacaagcccacctacctggttgcactgacccatgcagaaagaacagccactgtggtagtgag

SEQ ID NO: 488707 - DNA, 676 bp, Homo sapiens
ctggcagcatttttgggtggtctttgtacctccgaatagtggacacttcagtatctggttcgggtctgcatccccaagtgttagagcagggccacagtgtgtgcattctacaaatgtttgttaaaggtgtatttttttttttcctttagataaagagagttgtatgcattggcaaacagygtattgctaacacacaaaacaaccagtgagacagacttctttgcaatgaatgagcttctggaaaaaaaaaatgtggattttaaacatctgtctcttatttaaaggaccttatggtcttcctttaggagagtttccccttaatttgcttgtaattccaaatcattcacatctctgaattacttgaagcagattacatctactgcagggcccaccccttctcctcgacaaaagttgactacttgttaactgtgttaacacagttaatttgttaacagttaacagttaacagttaacatagttaacacagttaacaagaccagcagcctatccagcagcctatcctgctggtctgttggggaggaagagttgatgttttcagaagccaagaaactaacctatctcctgagatttaaacacacagacattagcttcttttaaaaattctgctgctcagaccagaggcccttgtggtattttctgcagtttttgtccacat

SEQ ID NO: 488708 - DNA, 512 bp, Homo sapiens
tgtttgctgagagcttgtctatgtgtcaggcactgttctgggcaatgagaatacggtgaaccaaaaacactcccctccacctcacacacctgacttggtcccaaggagacagaaaacaaacagacatacataccataaaatgtcaggttgtaacagtgctggcaacaaagataaagccagggatgggagtgagctgcttgctacacattttcaccagaggtggatgctggacaattaaaagcccccctcgtcccacccagtgctctcttgtacctttctctcctgaagtktaagaaggaacagggagaggaggctggaagaattctgtgtagctgtagcttcattttatgataaaggccgtgtctgatacccacttgggagccctcccttatatagctggagggtcaagaagttgaattaaactacccttgtagtaactcttaggttctgccctcttggtcacagagctcactgacaatagatttttaaaaattgtattgataacttatccc

SEQ ID NO: 488709 - DNA, 402 bp, Homo sapiens
gctagatagatcttaccaaatatctccgaaatattttccattttcatcttcattatccctgcttcaatctatcctttccccttctcttgaatgaatgcattggcctgctggcttcctccagtcatgtcctcttccrgtacattttatcatataactatttgttcattcattcattcatccatccgttcattctaggagagttgactttatctttgtgccaaacacactcgagaaatgccacaagactgtgggttattaattataaagaagatatccaggaagtcagccctcttggttgaaaggaattggagggatccaaggtggagttccaaagaaagatggagttaaggtgggccttgaagtgtgcatagataatatggaaaatgatgtgagtcagccatc

SEQ ID NO: 488710 - DNA, 402 bp, Homo sapiens
gctagatagatcttaccaaatatctccgaaatattttccattttcatcttcattatccctgcttcaatctatcctttccccttctcttgaatgaatgcattggcctgctggcttcctccagtcatgtcctcttccggtacattttatcatataactatttgttcattcattcattcatccatccgttcattctaggagagttgactttatctttgtgccaaacacactcgagaaatgccacaagactgtgggttattaattataaagaagatatccaggaagtcagccctcttggttgaaaggaattggagggatccaaggtggagttccaaagaaagatgragttaaggtgggccttgaagtgtgcatagataatatggaaaatgatgtgagtcagccatc

SEQ ID NO: 488711 - DNA, 375 bp, Homo sapiens
tctgcttagtaggtcctttctacaggtgctcaccaggatctgcatatggggtcaccttcaccttcagaagcccaatttaaatctcaccagagcaacagagggaggtcatagcatgactttgtggtagccaaggtctggaggtcactccttccagggaaagattcctggacttggagacaaaggcctgacttgagtcttaccttcctgcagtcttgggaaagtttcttggcataagactcaaatgagatcatcaacacaggaagagaagggcactaacatttttagagtgtctacctgtaccgggcaccataatggacttttacataaatgttgtctgtctyattcagtattcacaaccaccctacgaagtagata

SEQ ID NO: 488712 - DNA, 469 bp, Homo sapiens
agctgcattaaaattaagaaattttgttcactaaaaagcataatagaatgaaaaaaggacatatactggaaatrgcatttataacatatattagcaacaaaggaacaatattcagaacataaataattcctacccatcaataaaacaaacaaccctaccaaaaatgacaaaataaataaataagtactttacagaggaagaaacttgcactggcataaacatgagaagatgctctactttattaataatagactaaatcccaaacatgtttttttgttgttgacaaccacaagaatgacaaattttcacacatgacaatcccaaacattggtgaggaggtgcagtaaagaggatttatgcactgttgttgggaatgtaaattgaaacaatttttgtgaataacccagtacatttggatatgcatatgccatacaaccaatcaattcattttctaggcattccctaaatt

SEQ ID NO: 488713 - DNA, 628 bp, Homo sapiens
tgtgttacacaaattaacagagttcaaaacacgcaacagttttgtctcttttctgcccataatcagacaaaatcaaagcctccctgatgaatttgctcaaccattttctctttttagatctaggtattagttgtatctttgaaagtgattgatagtcctctacataacaaaaygatctcttcccctcctcactcagaacattctcagttaagtttactccgatgcccaggaggcttctgaggtgttatcaccttctccccacacttggggaagcagctaacacaagtgggacatactacctgggtatactaatcactcatctgcacaggtcaaggataaggttcatgtctgaattgacttagaatgacaggccttagttacttggatatcctatttgaatcttgaaaataaacagtgtcacccaaagatcagttgaaggtggatcatcttgttttaatgtttaagtaaaaatggttcaagtccccaccgagcaggatagtggaaaaaccagcaacaagtaacctcctccctgagcctcccaatatccctagggattctccggggcttatagtctttttggtcacttttgttcttactatctctttcctttgaatccttgctttcacaa

SEQ ID NO: 488714 - DNA, 560 bp, Homo sapiens
tgcttcagaatggcctctctcctwgccctggccactgtccagcgaactgaatggaaagacccttccaaaactgaccaggtcccttactctgaaaactctgctatggaggttctgagacgtctctgagcatgtccaccgcacaggtctggacacagctaaagagtctgtggtcgtgttcatgacggatctgcttaagacattttccagagtgcatttccttgaaatgcactcattgctgcaggatgctaaccagcctccctaccaccaattcccatggcttcaattcatcctggatccaaatgacaggataatctgcctcaaacatctatcttattacaaccctcatgtgctccaaaccctacagaaactccctattgctgcctgcatccaatccaccttttttagtctagcattcaaggccctcatcaattattctgtccctggtggaacatctccagccttatcttgaacctctctatgacatggcccctctgctctagattaaaaagttggtggactgtctgcatttcctggcttccattcttggttcatcttccaga

SEQ ID NO: 488715 - DNA, 560 bp, Homo sapiens
tgcttcagaatggcctctctcctagccctggccactgtccagcgaactgaatggaaagacccttccaaaactgaccaggtcccttactctgaaaactctgctatggaggttctgagacktctctgagcatgtccaccgcacaggtctggacacagctaaagagtctgtggtcgtgttcatgacggatctgcttaagacattttccagagtgcatttccttgaaatgcactcattgctgcaggatgctaaccagcctccctaccaccaattcccatggcttcaattcatcctggatccaaatgacaggataatctgcctcaaacatctatcttattacaaccctcatgtgctccaaaccctacagaaactccctattgctgcctgcatccaatccaccttttttagtctagcattcaaggccctcatcaattattctgtccctggtggaacatctccagccttatcttgaacctctctatgacatggcccctctgctctagattaaaaagttggtggactgtctgcatttcctggcttccattcttggttcatcttccaga

SEQ ID NO: 488716 - DNA, 560 bp, Homo sapiens
tgcttcagaatggcctctctcctagccctggccactgtccagcgaactgaatggaaagacccttccaaaactgaccaggtcccttactctgaaaactctgctatggaggttctgagacgtctctgagcatgtccaccgcacaggtctggacacagctaaagagtctgtggtcgtrttcatgacggatctgcttaagacattttccagagtgcatttccttgaaatgcactcattgctgcaggatgctaaccagcctccctaccaccaattcccatggcttcaattcatcctggatccaaatgacaggataatctgcctcaaacatctatcttattacaaccctcatgtgctccaaaccctacagaaactccctattgctgcctgcatccaatccaccttttttagtctagcattcaaggccctcatcaattattctgtccctggtggaacatctccagccttatcttgaacctctctatgacatggcccctctgctctagattaaaaagttggtggactgtctgcatttcctggcttccattcttggttcatcttccaga

SEQ ID NO: 488717 - DNA, 651 bp, Homo sapiens
caagaaaacctcatagctccctaggaggtgtggatgattatctcctgtacgtccttggcccacagccacagaactctcaagtgacaggcagaatttgaactcaagtctttaaactcagagttctttctgaatggtagaagaagccatgtgctaaaccctagaaactcttctcatcattctggcaccctgggattttttccaatctccttttcggatggtgtcaaacctttgttggctcaagctgacrtatttccatctttctttctttttttttttccttttcaaaaatataggtctgtgatcctagcatggagagaaaggttgtgtctttccaagtcctagtcaatcaggtgtattcattgtatgcagttttgttttatcacaccttttgcttccgatattccagatttaaccttatagtaatatgtgcttcatgctcttagaccagacaggtacatctgatgagctccaccttgattttcagattggagctaaattaggcattaaaatgtggtcacatacataagagcacctgcatttagtcatcttcccgttttcaaatgtgagcctaaagtcttggctcttatctgtatttaaaactgacattgttaaatgcataaacacatctgaattatttatatttaggcttat

SEQ ID NO: 488718 - DNA, 586 bp, Homo sapiens
agcttcacaggtgtagacacagaacttagatcatacctttagtgatgttcaagcgggaggtaacaccttacctgaatggctggtcgctaacctgtatggggtcatctccatggatccctgcatatagaaaccaacccttggagactgctccaaccaggttctctcagtaaccagactgcctgaggctgtttttaaactataaaacccataaagtgaaatttattgcactttgctgtatttcactagagttagagggctctgataaaatttactgcttagatgtaaaactctattggtaagaaaatgaactgttttctcaggcactcctgttgggccattttgatccttgtcctgaatccccagaccttgctagaaggctttcctcatttcagcataattgaggacaggtaaatataacaactccagcttttcagacttgtggccaagtctgacagggctaacctgacctgcacccagaggccccaactgattctgctactgctaacattyaccttgaaagactgcacagtttgccatgctttctcttctaaagagtggagttgcaaatggtggtaagaagcctggc

SEQ ID NO: 488719 - DNA, 626 bp, Homo sapiens
tggcacaagtgtaggctatggtttgtttacacctccacttattatagttcacaatgtacaggaaaacctttaggccgaacttaaaatacataaggaggcaactttaggctaaacttgatttaacaaggaggtagttgaagttaaatgaggtcataaggatgggaccctaacccaacaggactaatgtccttataagaaaaggaagaaacatggggtatgtgccctacacagagaaaaggtcatgcgaggacacagcaagaaggcagtcatctgcaaaccaggaagtgaggcctcaccaaaaaccaatgtggctgtcaccttgatcttggacttctaacctccagaactgtaagaaaataaatgtctattgtttaatccaccagtctctgatattctcttatggcagcccaagtagactaatacagaacatatattttaaataaaattaagattatyccacagattccattttgaatccttcctttttcactcattaaaatttttccaaaaagttaaatattcttggcaagctgatgtttgaaatgaatgcatgatatttcatcataaggatatgtccttgtgatactgtaaaatatatatttggtctttgtttttgtttcctgaca

SEQ ID NO: 488720 - DNA, 609 bp, Homo sapiens
ggcctaggaagtggtgctttttgtttttgtttttttttttgagagatggagtctctgtcccccaggctggggtgcagtggtgcgatcttggctcactgcaacctccgtctcccaggtttaagcaattctcctgctgtagtctagctacagctgtgcatcaccaygcccagctaatttttgtatttttttagtagagatggggtttcatttttgtatttttttagcagagatggggtttagtagagatggggtttagtagagatggggttttagtagagatggggtttcactattggccaagctggtctcgaactcctgacctcaggtgatctgcccgccttggcctcccaaagtgctgggattacaggtgtgagccactgtgcctggacagtggtgctttttaaataagaacccctggacaaatgtgaaatactgttatttctcatctttaaaagagcaaacatgatgcatgcacagagtcttcaaggaaattaaaaaacactgactttcacaaccacaggcagaatactctggatgaagggtccagcttggactcttatctgattgtacacttttcatgaataacattaaacatgaataggaaaaggc

SEQ ID NO: 488721 - DNA, 453 bp, Homo sapiens
tgcatcaccacgcccagctaatttttgtatttttttagtagagatggggtttcatttttgtatttttttagcagagatggggtttagtagagatggggtttagtagagatggggttttagtagagatggggtttcactattggccaagctggtctcgaactcctgacctcaggtgatctgcccgccttggcctcccaaagtgctgggattacaggtgtgagccactgtgcctggmcagtggtgctttttaaataagaacccctggacaaatgtgaaatactgttatttctcatctttaaaagagcaaacatgatgcatgcacagagtcttcaaggaaattaaaaaacactgactttcacaaccacaggcagaatactctggatgaagggtccagcttggactcttatctgattgtacacttttcatgaataacattaaacatgaataggaaaa

SEQ ID NO: 488722 - DNA, 453 bp, Homo sapiens
tgcatcaccacgcccagctaatttttgtatttttttagtagagatggggtttcatttttgtatttttttagcagagatggggtttagtagagatggggtttagtagagatggggttttagtagagatggggtttcactattggccaagctggtctcgaactcctgacctcaggtgatctgcccgccttggcctcccaaagtgctgggattacaggtgtgagccactgtgcctggacagtggtgctttttaaataagaacccctggacaartgtgaaatactgttatttctcatctttaaaagagcaaacatgatgcatgcacagagtcttcaaggaaattaaaaaacactgactttcacaaccacaggcagaatactctggatgaagggtccagcttggactcttatctgattgtacacttttcatgaataacattaaacatgaataggaaaa

SEQ ID NO: 488723 - DNA, 352 bp, Homo sapiens
taccaaacaacccatttgaaattctcttttcattcactgttgcaaatgcttaaagcagccagacaatttatggagrctccagagaagtctggcttcatttgagttttggacaaagacctgggaagatcttttttttttcacatttttctgtcattctcacatgcttataaccaaaaccactcttaaacgaatatgtgtttttccttgctagtaagggagaaagtgaagaggcattcctgctttgcatgtactttctgtgtcctcctcagtattttccatcctcttgttgaacagaatagattgcctccagataacatttgtttcattctgtgattttaatagcaatgaagca

SEQ ID NO: 488724 - DNA, 599 bp, Homo sapiens
atcatctgagagagcaaacaatgcttttattcttgcatcataaaaaaaacaaaagtgagatctctccttgaacattgtgatctaatcctgctttgttgtatttcacttcctgtagagtggacagtcttatctgactatcaaacgttagggtcacaatgttgaaattccatattcacttttatctcccacctctctaacaatctgcttgatgcagtcagtatcaagactgccttatctgccctctaaaatatttttctgttaatcaccaggtaattcaattgagacagtgattgygtcttaaaaataactgaatgtatacagtttcctttttgatgtactaattccctagtggcaaattttatctttttgtatatatctctctgtgaccttttagaaattaccagcagctttaaaaacatcattttaacatattttgaacataaatcatctaaaccaacacaataataaaatatgtattattcccttattttaaacttaaaaaaagttttccacacatatgaataagatatagtaaggaatggttctttttaaaaagttggggtgtttgaaaacaggaatattatttgttcttaataggc

SEQ ID NO: 488725 - DNA, 508 bp, Homo sapiens
ctttccaattattgcagttgctgatttggtatgatctacaacaggagttggaaaatattttctctacagtcccacatagtaaatagyttatgcttcatgggtcatgttgcaaccactcaactccattgttacagcctgaaagcaaccataggcaacacatgaacaagcaagcatggctgttctccaaagaatgcttatttccaaaaacaggtggcttgccaggtttggctcagaggccatggtctgtctacaccttatctaaaataacaacattgtactattttagatgtgttgagaagtttcctcaaaccttgagattcttgctccctaagttggagtggttttatgtggccagaccatctgacttggggaagaaagcaaatatcttgaatcgtacatcttatgtcttccagttagtgttaactatgattactaatcattgtcaaatgaagagagtataaaaaaaacaatttaacatgtgccagaactgtgctgtcggctttattta

SEQ ID NO: 488726 - DNA, 508 bp, Homo sapiens
ctttccaattattgcagttgctgatttggtatgatctacaacaggagttggaaaatattttctctacagtcccacatagtaaatagtttatgcttcatgggtcatgttgcaaccactcaactccattgttacagcctgaaagcaaccataggcaacacatgaacaagcaagcatggctgttctccaaagaatgcttatttccaaaaacaggtggcttgccaggtttggctcagaggccatggtctgtctacaccttatctaaaataacaacattgtactattttagatgtgttgagaartttcctcaaaccttgagattcttgctccctaagttggagtggttttatgtggccagaccatctgacttggggaagaaagcaaatatcttgaatcgtacatcttatgtcttccagttagtgttaactatgattactaatcattgtcaaatgaagagagtataaaaaaaacaatttaacatgtgccagaactgtgctgtcggctttattta

SEQ ID NO: 488727 - DNA, 508 bp, Homo sapiens
ctttccaattattgcagttgctgatttggtatgatctacaacaggagttggaaaatattttctctacagtcccacatagtaaatagtttatgcttcatgggtcatgttgcaaccactcaactccattgttacagcctgaaagcaaccataggcaacacatgaacaagcaagcatggctgttctccaaagaatgcttatttccaaaaacaggtggcttgccaggtttggctcagaggccatggtctgtctacaccttatctaaaataacaacattgtactattttagatgtgttgagaagtttcctcaaaccttgagattcttgmtccctaagttggagtggttttatgtggccagaccatctgacttggggaagaaagcaaatatcttgaatcgtacatcttatgtcttccagttagtgttaactatgattactaatcattgtcaaatgaagagagtataaaaaaaacaatttaacatgtgccagaactgtgctgtcggctttattta

SEQ ID NO: 488728 - DNA, 508 bp, Homo sapiens
ctttccaattattgcagttgctgatttggtatgatctacaacaggagttggaaaatattttctctacagtcccacatagtaaatagtttatgcttcatgggtcatgttgcaaccactcaactccattgttacagcctgaaagcaaccataggcaacacatgaacaagcaagcatggctgttctccaaagaatgcttatttccaaaaacaggtggcttgccaggtttggctcagaggccatggtctgtctacaccttatctaaaataacaacattgtactattttagatgtgttgagaagtttcctcaaaccttgagattcttgctccctaagttggagtggttttatgtggccagaccatctgacttggggaagaaagcaaatatcttgaatcgtacatcttatgtcttccagttagtgttaactatgattactaatcattgtcaaatgaagagagtataaaaawaacaatttaacatgtgccagaactgtgctgtcggctttattta

SEQ ID NO: 488729 - DNA, 410 bp, Homo sapiens
tcactaaacaataaaccttatttttgcttatcagtttgagacattatcgttaatttcctactttgagaagtgagtatctgttttggttatttttaaacggttggtacaaaaccgtttccacatarcacaagttcaccaatttggcctaaaagccttcagagagtagcttcagagagaatgtgttttctctaatcagagaaaacaagaattatgttgtgtgagtgtcaagttgccattttattgtcccactgaaatgctttcccccacctaggaatccttttaaattttcttaactttaattgcctttttccccccacaaagaagtcaatttaaattaaacagaatccatcactgtgataattttttaatgagtaaagataatgtactctacagaaattgaaatgaggtgt

SEQ ID NO: 488730 - DNA, 509 bp, Homo sapiens
ctggtttagcaaacctgaggcattcataattcagaagaatctgaaagttgtctggtatcttgcatgttcaataaaaggatcacttttatgctcaacaattttttatggctgcaatactgctatgagcaaagggacacatatattaataatgttcagttgcatcagtcagggtcccagcaggaagcacttggctctctcaaaaggtattaactagagaacatttaatgaagaaacaatttcaatagacatgggcaggcttcagggaacgaacaaagcatggtgaagcacccaggaattagcaacaattgggagctgttactgtcccarggcccggaaaaacaagagaagggaatggcgttagagaaatatgatgaaaatgggtgctctagagaggggctgcctatctggagctgttgccatcccaactgtagccatagaagaatgcagccactacccgatccctaaagggagcagcagagacaaggaggaataaattctggaacatctgt

SEQ ID NO: 488731 - DNA, 382 bp, Homo sapiens
ggggaggaatatgtcatcaagaaaaaaagctgagataaaatccgcaaatcatttaaatgatttagaatggcaaaagataactaactgaaaaacagagaaaacagcaacagttcataattctacctggcagcctaaggcagcctgaaatttgtgtctgacaagctgtcacagaggctgatactcttgggaacgccttattaggagtttactatgaaatgattatatgctccagttaaacagtctgcatgtgtccgcagactgcgatggcgatggcgggtgcacactcaggagccaggcatgctgggaacgggaaagccaaagtttctgttgacaacagcaaaagcrccaggactgaccaggagaggctggttgagatttggca

SEQ ID NO: 488732 - DNA, 657 bp, Homo sapiens
tctgtcttcttcatattatgggacatttctctgacagttaataataccagtcaaggatagaggcagatgtataaattgtgtagtaaagggatagaggagtacatgtttagctctgcacttagcagctttgtcagacttttattttctggagatacagtgtcaatttccttgggataggctggaaaaggaaaaatagcaagtttaggagagagatgaataacctgtattagagtagcaattatatgtctgtttggcactgagaacctggcagaggttaagaatctgtgggattttcaaattgtgctaactacatgacaaactgccaaagcaaatctcaagtcartgtaaacagggcagtttgtccttttatcaatgtacagatttctacaggactcacgagtgcagtggcgtgagctgactttacattgggcaaagagtatgcttcaagagtttcatgtgagacagccatgtcataaccagtcattatgtttctatgggaatttcatttacagaagccagcataaaatagaggtaggtctgggttgttcaagacaatatctaagcagtcttcttgtggctttgagaccattcctatagtcacaagtcaatcccatggaatggagtgggacctctccatcaccatggtggagtgttaga

SEQ ID NO: 488733 - DNA, 559 bp, Homo sapiens
acctatttaccacaattcgtattacctgatacaacatgtccagctgacaacagaaaattacaaggcataccaaaggcaaacagaaaaaaaaatagaaaaggaaagcattctgaatagacaagcaatcatcaagatcagaatagaaaaacacagatcttgtatttatcagaaaagatatttaaaatgattgtgctcaatgtattaagagatctaatggaaaacttgttttttcttattaagatatctaatggaatatttatttttcttacattaatgtcagcagagagagaagacctataaggaaaaaaaatcaaaagaaaatcctgaaatcaaaactactgaaatggaaattaagaatgctcttaataggcttgctatggtttgaatatgtgytccctttaaaatcagctttgaaatttaagtaccagtgcaacagtatttaagaggtgggccattagtgggtgatgactccatgagggccccatgctcatgaatgagattagtaaccaggaagggctgaagagatgttgctgggtcctttctgccctttcacccttaa

SEQ ID NO: 488734 - DNA, 425 bp, Homo sapiens
ctgcttcacaggaccacatcctaaatcacagtgttagcctcttgctggtmgaaagtcttcaggcaaacaaaagttctcttatcaggcatgacgttccaagggcttagacattacctaccaaaagttgaggacaaaaaacatctcattatggtcaaattaaattatttactacatattttgtaatatatatattaaatttacttatcacacttatatttcacagtgtacacgttacgacaaattattaggtactaagcaaaccactactccggttaaaaaatagaacattgccagcacactagacaccccattgtcaccctctaaagagcacccttgctcttctccccaaagaacccgtggcctatatgattaaagaaaactttaaagctacgtttgcatatttgtttcttctggaaatccaatca

SEQ ID NO: 488735 - DNA, 425 bp, Homo sapiens
ctgcttcacaggaccacatcctaaatcacagtgttagcctcttgctggtcgaaagtcttcaggcaaacaaaagttctcttatcaggcatgacgttccaagggcttagacattacctaccaaaagttgaggacaaaaaacatctcattatkgtcaaattaaattatttactacatattttgtaatatatatattaaatttacttatcacacttatatttcacagtgtacacgttacgacaaattattaggtactaagcaaaccactactccggttaaaaaatagaacattgccagcacactagacaccccattgtcaccctctaaagagcacccttgctcttctccccaaagaacccgtggcctatatgattaaagaaaactttaaagctacgtttgcatatttgtttcttctggaaatccaatca

SEQ ID NO: 488736 - DNA, 591 bp, Homo sapiens
agctaaattcgttgaagaataatatcacaactcaatatttgagacaaaaagctgaattttttttattgctatgcaaaggaaagaagaccttgtaaggcacactgcctgagcaaagcatagagaagatctcaaataaagatttgagaaatgtgttccttatctatgcttcctcacccaacagctcacaggataatgacctcagaaatctatttgtcatcctgcatataccccttttcctcacctctcactctcagagaatgactttcataaatacttcactgaaaaaatagaaacaatccaacaggaattttcctatttttctaccataataaatacaacatgcactcatctgctcaatatttcctgtttctttttctgttccaattattatgtttaaaagtcataacttgacttttgacaaatgttataaagttactttttcataggatcttttytttcttttctatttatttatttatttgagacagtcttgctctgtcacccaggctggagtgtagtggtgttatattggcccactgcaacctctacctcccgggatcaagagattctctcgcctcagcctcttgagca

SEQ ID NO: 488737 - DNA, 648 bp, Homo sapiens
tagtttcttattagcccaagccacaagtgctcaataggtactgaatagtagctaccatttttagacatcacaggtacaggatattttcagcaccacagaaagtactattggactgtgatattctagaaagcatctccttcactagaactagcataatgaaagacttatatttaacaagaatatcttcattatccactatgagataaatgccgtgaatttaaatttcatttctgtgatcaacttcaaagtcacagtttgcttgcattttacattcttcaagcatttgatgtgaaaacaaaaatatataaataaaacattcctaaattgttacttcagaatatcyttatttcaaaagttggtattttatccttgaaaataacatggtaaaaaaatgaagaggatgagcacagatcatttttagcactacatttttcattttctttctaaactggctttgcttaagacagaaatacggtgctgttctaatgtcaagcaaatccccatttaaacacactggcttgagcattgataggtagacgtgtctaaagtacctgattatttctgtataaagtctgtgaaataagtattggtctggtattgtaatcatctcctcacgattagagttcagagtgtctaaaataagttttt

SEQ ID NO: 488738 - DNA, 648 bp, Homo sapiens
tagtttcttattagcccaagccacaagtgctcaataggtactgaatagtagctaccatttttagacatcacaggtacaggatattttcagcaccacagaaagtactattggactgtgatattctagaaagcatctccttcactagaactagcataatgaaagacttatatttaacaagaatatcttcattatccactatgagataaatgccgtgaatttaaatttcatttctgtgatcaacttcaaagtcacagtttgcttgcattttacattcttcaagcatttgatgtgaaaacaaaaatatataaataaaacattcctaaattgttacttcagaatatctttatttcaaaagttggtattttatccttgaaaataacatggtaaaaaaatgaagaggatgagcacagatcatttttagcactacatttttcattttctttctaaactggctttgcttaagacagaaatacggtgctgttctaatgtcaagcaaatccccatttaaacacactggcttgagcattgataggtagacrtgtctaaagtacctgattatttctgtataaagtctgtgaaataagtattggtctggtattgtaatcatctcctcacgattagagttcagagtgtctaaaataagttttt

SEQ ID NO: 488739 - DNA, 577 bp, Homo sapiens
gagacgtatattttggcttctctatttccacctcctggaagggggcagccctccctcagttagatagctagataactagcagctagagggcaaaatccttttagtggtagagcagactattcacataagttacggacaagtaagtagcccattcagttataggttaatcaggaagaattcttcacctgagcagatggaaacatttttaggccctagttccctttatagctccaggtataactcagactgaaaagctgttagatatagtgtaactagaactaagctatgtagctgggcaaattctctatgcctctgtcatattgggagtgctgatgcgacaaatatktggtggagagaaaggaaagagatcagtcaaggtagtcaagcagtaagacattttgcttccagagttataagaaatgttattgatcaggatgaaaggcagattagacaaggattaagtatgaagggatagaagttgaaggcaagaaatgagcaatgaatattgcttttcacccattgttggattttacaatggcctctggctaagtccaaaaaacagtggtccagttacaca

SEQ ID NO: 488740 - DNA, 506 bp, Homo sapiens
gataactagcagctagagggcaaaatccttttagtggtagagcagactattcacataagttacggacaagtaagtagcccattcagttataggttaatcaggaagaattcttcacctgagcagatggaaacatttttaggccctagttccctttatagctccaggtataactcagactgaaaagctgttagatatagtgtaactagaactaagctatgtagctgggcaaattctctatgcctctgtcatattgggagtgctgatgcgacaaatatgtggtggagagaaaggaaagagatcagtcaaggtagtcaagcagtaagacattttgcttccagagttataagaaatgttattgatcaggatgaaaggcagattagacaaggattaagtatgaagggatagaagttgaaggcaagaaatgagcaatgaatattgcttttcacccattgttggattttacaatggccyctggctaagtccaaaaaacagtggtccagttacac

SEQ ID NO: 488741 - DNA, 559 bp, Homo sapiens
cctgtacctgaggccgcccaagagagcatgcataacagttgctcttattaagagctagtactgaaaatttgacccattcaatccaggcgtttacatccccatatccagtctcaatttctaaagtctgcttcaagtcagttatyttaattatatttactctcttagggtcattgtctggtggattaaaggaagtagagggaccgggagttataataatcctgggtgggcttgggatggagttggtgactagcctaagagctaaccatgctacaggatcctttcctgagatatctgttcctaatctataccttcaaggttcctggtctatagtagctgggttgtttatggtaattaacatatgattgcattttaaattactacagttatgtagtatagggcccttatacaaatatattttgttctttaagggtttgtttttggaagaatgacttacccagcctcaaaattgggtggtccaccagacctcattccagctagaacaggtctttccccaatagtgacaaatttcaggacatagatatttgtttgcttgtgacag

SEQ ID NO: 488742 - DNA, 559 bp, Homo sapiens
cctgtacctgaggccgcccaagagagcatgcataacagttgctcttattaagagctagtactgaaaatttgacccattcaatccaggcgtttacatccccatatccagtctcaatttctaaagtctgcttcaagtcagttattttaattatatttactctcttagggtcattgtctggtggrttaaaggaagtagagggaccgggagttataataatcctgggtgggcttgggatggagttggtgactagcctaagagctaaccatgctacaggatcctttcctgagatatctgttcctaatctataccttcaaggttcctggtctatagtagctgggttgtttatggtaattaacatatgattgcattttaaattactacagttatgtagtatagggcccttatacaaatatattttgttctttaagggtttgtttttggaagaatgacttacccagcctcaaaattgggtggtccaccagacctcattccagctagaacaggtctttccccaatagtgacaaatttcaggacatagatatttgtttgcttgtgacag

SEQ ID NO: 488743 - DNA, 559 bp, Homo sapiens
cctgtacctgaggccgcccaagagagcatgcataacagttgctcttattaagagctagtactgaaaatttgacccattcaatccaggcgtttacatccccatatccagtctcaatttctaaagtctgcttcaagtcagttattttaattatatttactctcttagggtcattgtctggtggattaaaggaagtagagggaccgggagttataataatcctgggtgggcttgggatggagttggtgactagcctaagagctaaccatgctacrggatcctttcctgagatatctgttcctaatctataccttcaaggttcctggtctatagtagctgggttgtttatggtaattaacatatgattgcattttaaattactacagttatgtagtatagggcccttatacaaatatattttgttctttaagggtttgtttttggaagaatgacttacccagcctcaaaattgggtggtccaccagacctcattccagctagaacaggtctttccccaatagtgacaaatttcaggacatagatatttgtttgcttgtgacag

SEQ ID NO: 488744 - DNA, 561 bp, Homo sapiens
ctcccccagcccagccaggctctgggaaacagaactttcatagatcccacttaaggcattttggctgatatctccccaacacaggccctctctacttcagggatggcaaactgacatcgtcatttgtctgtattgggttttaaaggtttttgaactgattaccagcatttaaaaatccaatttcctgctcttcctcttgcttcagycatgtaagacatgccttcatcctttttgccttatgtcatgatttctgttgattgatttttaaatattgatccaaccttccatctgcaaagaccagctcagtcggggagaccctaacccagcggcactagaggaattaaagacacacacacagaaatatagaggtgtgaagtgggaaatcagggccctcacagccttcagagctgagagccctgaacaaagatttgcccacatatttattaacagcaagctagtcattagcattgtttctatagatattaaattaactaaaagtatcccttatgggaaacgaagggatgggccaaattaaagtaataggttgggctagttaactgc

SEQ ID NO: 488745 - DNA, 424 bp, Homo sapiens
acatccctttctcacttgcatcctccagttctctggctctgtctctcctcagtggccatgctccaccctttccctgcacctccttgttgcttgagcctctagatccttttctcagccctgccagcmtctctgcatcctctcacttcctcttgtactctttcttccttttacattatctctctccccagtctcaccttctgtgtctctctttgatctctgtctttcccagtctctctcttgctcattttctttttctatctctctctgtcaacccctgttttctttctcccttagttagtttcttcctctttttgtctctgggcacctggctcctcccatctgtctgcaaagacagacagctctgccgaaatgacaaaggttcagcagcagcttttattaacagctttctcacactgtccacttt

SEQ ID NO: 488746 - DNA, 599 bp, Homo sapiens
tgcagaggaaaggctggggctgcctttctcagagcttggctataaggatccgactgagattttctcttattataataatgactctcrgttgtataaggaaatacagtttacagataatttttatatctcttattgtatttgaaacttagaacttcatttgatgggtgaagaaacaggctcaaagataccgtgtcgcttggttaaggtaacacaaaactgggatttataggtttctcaactctaaaaaagactacacaaatagaaggacttaattttattgggcttataataatttgctgggaagagaggctgggctgtttctcacagctatatgtgtgttagaagacaagtagtggaagagtcaggctgtagactgcttgtaaaccaagcatgagttttttactttctttgctgtgtgaggtatagtctgctacctgctcaatattagttcatctattctgtagtaatgaaaattttaactgaatgcaaggcagcccagctcaggactgtgtttccaagcctctgttgcagctaggtgttaccatttgactatgttctggccagtgccagtgatgtttacaacttttgcattgcctttc

SEQ ID NO: 488747 - DNA, 587 bp, Homo sapiens
gcatgtttccagaggttttgtaggagtggggaagatctgaaaacagcaatgaggagcaaagagggtcccactcaacctccacaccatgtagtatgtagcacgtggggaagaaatggccatctcttaagaggactgcaggggagaaggtgggctcagggactcagccaactttttcatctgcaaaatcctctatatactagacctcttttctgaacaattctttgctcttcctgctctaacaaaaacttagctgtcccagaatagtgaggcatagtttagttagaacaacataattaagggtatattcaaagaagttggggagatacaggattttgctgatgacagactgtaaaggacccactggaaaggttggaaggattggggagaagtgggtgattaggccacattctggaatgcagtatgggtttaagagattgcataatgggagaggtgatctaggagacttgggtgtctggtgggttataatcatgtagaggctagtcctgatggtcttttggatgtaattgaataattatttctaactgygccttccccttgggactggtcactttgacaatttctggtgg

SEQ ID NO: 488748 - DNA, 549 bp, Homo sapiens
tggccacctgcctccccccaaaaacttcaactttacccttcatcctggagccaattgattcctaagtaaggaccactttaaggacccctaatttagcatgttatttggcttgatatcacttcatatgtgttcttaacctcaaatcccaggtctgataactaggctttggaaaagcactttactttgaacctcagtatcacctgaatgggcacctgtcattctctttcatcacatctgccaagtgctgtgtttcatattcttggccaggccttctcccttctttttacctctcaggcctgtcctactccagtaagcacactgtgattctggtacttgcccacctcctggccagtgcacygcagcttatgggcctggacacccctacttctccatcagtagccccagttttgggctccatattgaaaatactcactgagaaaagcacgctttataagaactcaggagaacttgtggcttctgttgcaaaggctatttttaaccctcgctattatagtttttaaatgtgctatctgattaattttgtaagct

SEQ ID NO: 488749 - DNA, 516 bp, Homo sapiens
attatcacaattgtgtagaaatttattgcttagtctatttttttgacataatgaccattattctatgaagttttgacagtaattttaccacaaaatgtgatttattattggtatgcattgcaggcacaaggcaggtattatacgattgtaataagtcattatttagctctgaattctccactcataatttttagaagacttttagctatccaaagcagaatctggaatattttattttattactgacaatataatttttctgctaatttttagaagataatytcctgctgttcttctagaagcataaatcagaaacagaagacataaatcaaatgcctccagggaattgacagttagttttaatatatagggaaaatatgtaacatagcaaggtgtgatggtgttggtggccaactgaagaatacaagctcaactaaatgcaaattcattttgtaaaattaattttagtcaatttaacaaaacttgtttaatacctgaatctaggatcagttccaa

SEQ ID NO: 488750 - DNA, 604 bp, Homo sapiens
aaagcagatcagtttaaatcactctaatatcctgtgcaaaatcttttttaaaatagcttaaaaactgcagccatatggttctatattaaaaattatatgtgaagattaatatttataaaattagttatttcttactttttttaatttgctataatgtagaggtgaaagtaaagtaccagtaaaacaaatgtaagattgacaaggaatatctttgaagaaatgtttaagagtatggaaattagatggtataagtaaatcagaacgatctttttttataaaacaagataaatttgggcttttaaaattactatttcaaaagaggtaaatrtaaccagaattcaattcctggccaatctatgtactgcagatatctgaaaactggagcacagaacggattcttactcagtaaccaagaacatatggtactagatcaagaagagctgaagaattttttttttctgtatcttcaattactcagttaagaacaaactgtagaagaataagaggggaaatagagacaattagtgaaggccttacatttctctaggtagtaatgtgaaaatcttagaactaaaaggtaagagaggaggtgttgagaagtaaa

SEQ ID NO: 488751 - DNA, 651 bp, Homo sapiens
aaacaaccaaaaagtcatctcttaaataatacacacgaatagtttttctaatggttatgtaaaatgttcaacaaactgtttcacttctaaatgtaacatattataagtcaacagagtaacagctaactaggcacttgataggatcttgctgttttctcctcatgrcatttgctctaaattagctctgaatgccgtatgttattaaatttcttaagaaaatatggttaatatgctgtggacaaaaatataaagtatatgaaaatatttacttgatcaaaacaaatgacagcaacactattccttgggctaatttaataaatgctaaatgcattcgtgtgttgtatgcatacagtcctaagagaagcctttcattcatcttgtgtcctactcaattctgagaataaaattatcattgacttcaatgagattttatgtttaccaagtatattgaccaaataggaccatacactaaaactttttctgcatagtttttaacttaaaatatgttatgttcataaaaatgattcataacttataaaattattatgagaaatttgttatgagtagtaaaaagtttgcatggaaattttgttataaaatttaagtttttaaaattctattagcaatacaatatcttagctgaaagcacaa

SEQ ID NO: 488752 - DNA, 651 bp, Homo sapiens
aaacaaccaaaaagtcatctcttaaataatacacacgaatagtttttctaatggttatgtaaaatgttcaacaaactgtttcacttctaaatgtaacatattataagtcaacagagtaacagctaactaggcacttgataggatcttgctgttttctcctcatggcatttgctctaaattagctctgaatgccgtatgttattaaatttcttaagaaaatatggttaatatgctgtggacaaaaatataaagtatatgaaaatatttacttgatcaaaacaaatgacagcaacactattccttgggctaatttaataaatgctaaatgcattcrtgtgttgtatgcatacagtcctaagagaagcctttcattcatcttgtgtcctactcaattctgagaataaaattatcattgacttcaatgagattttatgtttaccaagtatattgaccaaataggaccatacactaaaactttttctgcatagtttttaacttaaaatatgttatgttcataaaaatgattcataacttataaaattattatgagaaatttgttatgagtagtaaaaagtttgcatggaaattttgttataaaatttaagtttttaaaattctattagcaatacaatatcttagctgaaagcacaa

SEQ ID NO: 488753 - DNA, 651 bp, Homo sapiens
aaacaaccaaaaagtcatctcttaaataatacacacgaatagtttttctaatggttatgtaaaatgttcaacaaactgtttcacttctaaatgtaacatattataagtcaacagagtaacagctaactaggcacttgataggatcttgctgttttctcctcatggcatttgctctaaattagctctgaatgccgtatgttattaaatttcttaagaaaatatggttaatatgctgtggacaaaaatataaagtatatgaaaatatttacttgatcaaaacaaatgacagcaacactattccttgggctaatttaataaatgctaaatgcattcgtgtgttgtatgcatacagtcctaagagaagcctttcattcatcttgtgtcctactcaattctgagaataaaattatcattgacttcaatgagattttatgtttaccaagtatattgaccaaataggaccatacactaaaactttttctgcatartttttaacttaaaatatgttatgttcataaaaatgattcataacttataaaattattatgagaaatttgttatgagtagtaaaaagtttgcatggaaattttgttataaaatttaagtttttaaaattctattagcaatacaatatcttagctgaaagcacaa

SEQ ID NO: 488754 - DNA, 499 bp, Homo sapiens
tttgtttttcttctgcttttcatgggccagtatcaactaaagattgtcagtttttaagaccttacttaaggatgcaatgattagtaaagaaaattcaacaatcttatgtttacctgataaatatcttatgagtgtatgctccagggtacaacaggggtgaaaggttaatytgtcattttgttttctttttttcttttttctttttttaattgagacaagatcttgttgtgttgcccaggctggtcttgaactcctgggctcaagaaatcctcctgccttggcctcccaaagtgctaggattaaaagcataagccaccattcagactaattctgctctcatgtaagtgtactatcagactcacagtttgaaatctgtagactggcaccgccttctatctactttagccaagcccaggtatcaaatgtggtcaatggtatactctatatccagtaacctcaagaattagaatatttttagttaaagggacaagtttaaaaa

SEQ ID NO: 488755 - DNA, 499 bp, Homo sapiens
tttgtttttcttctgcttttcatgggccagtatcaactaaagattgtcagtttttaagaccttacttaaggatgcaatgattagtaaagaaaattcaacaatcttatgtttacctgataaatatcttatgagtgtatgctccagggtacaacaggggtgaaaggttaatttgtcattttgttttctttttttcttttttctttttttaattgagacaagatcttgttgtgttgcccaggctggtcttgaactcctgggctcaagaaatcctcctgccttggcctcccaaartgctaggattaaaagcataagccaccattcagactaattctgctctcatgtaagtgtactatcagactcacagtttgaaatctgtagactggcaccgccttctatctactttagccaagcccaggtatcaaatgtggtcaatggtatactctatatccagtaacctcaagaattagaatatttttagttaaagggacaagtttaaaaa

SEQ ID NO: 488756 - DNA, 611 bp, Homo sapiens
tttgtttttcttctgcttttcatgggccagtatcaactaaagattgtcagtttttaagaccttacttaaggatgcaatgattagtaaagaaaattcaacaatcttatgtttacctgataaatatcttatgagtgtatgctccagggtacaacaggggtgaaaggttaatttgtcattttgttttctttttttcttttttctttttttaattgagacaagatcttgttgtgttgcccaggctggtcttgaactcctgggctcaagaaatcctcctgccttggcctcccaaagtgctaggattaaaagcataagccaccattcagactaattctgctctcatgtaagtgtactatcagactcacagtttgaaatctgtagactggcaccgccttctrtctactttagccaagcccaggtatcaaatgtggtcaatggtatactctatatccagtaacctcaagaattagaatatttttagttaaagggacaagtttaaaaagatggctgactcacatattacttaaggtctgtaagcctaatgtcattaaaaatatgttttttgcttcctactttcatctgttttagcttaattttcagtcatttgaagatgt

SEQ ID NO: 488757 - DNA, 641 bp, Homo sapiens
aaacttaagtagcttacaatttttgacaaattggtgctgccaaaattataatagttaataacaaggaaaacctcaataatgtgaattgtgtcaaatctggttgttaatttattttaaaatcctgattatgttatgagaagccatatgagaagccaaacatacattcaactggagaaaatgccagtagccaatatcacctttggaggctagctatttctcaccacattcagcaagctatcatagcatgaattgctgaaattagataattctaactgaaaattaggattaaagataaccctatgctatagttcaggcataggtaatctactcctcaatttatttcttatggaaatcttataaatatattaaataaccttattttgtttaattatttcaaagtactatatggatgagagatatattgtacaggtttatatggaatagttaacactttwaaaaaatagtgactattctaacattttttaattatattgctcactaatcttaattgccaccatttcaaaagacagttccaaagtgcatcttgaacaaacagaaaagcaattagcctaaattaattgctttgctgatgtgatttgcagtaggtatgcttggtggttttgaaactcctgccagtgctt

SEQ ID NO: 488758 - DNA, 636 bp, Homo sapiens
tttgtggtttccgatgagagattaatacaaattttaggctgggcgcggtgcctcacgtctgtaatcccagtactttgggaggttgaggtgggcagatcacgaggtctggagtttaagaccagcctgagcaacatggtgaaactccgtctctactaaaaatacaaaaattagccgggcgtggtggcacgtgcctgtaatcccagctactcaggaggctgaggcaggagaatcactggaacccaggaggtggaggttgtagtgagacgagatcgcaccactgcactccagcctgggtgacagagcaagactccgtctcaaaaaaaaagaaaaattttagttgtgggctctacaattaacccccaagtagctaggaggggtaaaactctctgaactttgaacaatgagcaacattttgactagcagatccctggaatgcttagtaagaatttattttgatttctgatgaacttacaagtgtgccttcctaatttctctagctcctagtccataaactgattttctgtaaacgcctaaaatgccatcagagttcagatataaattagtcctagaataaattatgatttagaacaaaaaataaaartaagaattccttaaggaatccatcttgcaataaac

SEQ ID NO: 488759 - DNA, 598 bp, Homo sapiens
actacatgggtcagggtcaaaagagtctgcaccactgtcctagacaataagctcctcaatgtgcaaaataatctcatttttctcccaccagttttctccttaccaagtccatagtcccctgcattttcagaattatctttctaaaacattaacttgacattgtcactcctctgcttaaatttattcaatagttgtttatcacctaaaacacacacctcaggcaaccatatgtgaaatctcaagatatggtccctctctctctctcaactcagtccccaaactttacacaaagttctaccaataccaaactcttatagtgtcccaaggacaccttgctgctcagtgcccttstgcttttgcacatgtgcctctcttggcctagagttatctgccattgacttgagttgtattttaaaagtatcaatcccagtattgtgtagagtaggggtccccagcccccaggccatggaccagtaccagtctgtggcctgttacgaaccaggctgcacagtgggaggtgagtggtaggggagcaagcattattgcctgagctctgcctccagtaagatgatcagtggcattagattttcataagagc

SEQ ID NO: 488760 - DNA, 582 bp, Homo sapiens
atccaaaagaaggctagaacaaaaaatatagacctttgtaattttgataaatatagcaaatttcccttcatgtgtattgtataaatttatactaccaccagcagttatcaggttttttaatctttgacaatattataggtgaaaaacagtatctcattacttgaatttatgtttctctaattgtgaataggattcagtatctgctcagtttccagaatcattagtatttccatttctgtgaaccagtgtttataatcgttgacgatttttttctattatattcttaaatatggacttatctactggtagaaggtctttctatataagcaaagtatttttaacctctgttgtgagttgcaaatatttatttcagtttgttatattttgacttgatcagaatgaactttatcaaatatttttattttataaaattctaacttatcacacatttcttcttgactactgagttttgtgttagacytagatctttcccatctcatgactataaaaaataattccccagagttttctaaggcatttttatggttttacattttatgctcaaacctttaatcaattgag

SEQ ID NO: 488761 - DNA, 574 bp, Homo sapiens
tattaattttttaatatgctgctgaatgccgtttgctagtttttaatttgggattttacatcagtattcataaatgaaactgatagtccaaacttttgttcaatctttgctggattttgaaatcagtgctagtttcattctaaaatgttttgcaaacttacctgtgtttgtgtgcgcacgtgtgtgtgtgtgtgtgtgtgtgtgtaagaacagtttaaattgtattacagttctctcacccttaaagatttcatagaattcccctgtgactccaycaagcctagtgattcttaggaggaaattgttttatccatttatttttcctatcataaatggtaagatgacatttttatctctccaggtcaattctggtcatttatatttttctataaagttatacattgcatctggattctcacatttatttctataaatgtgaacacaaagtcttgtgaattcctttttttctgtatatgaggctcttttactattgtaattttacaattacaatatatgttttcttgcttttttcttatttaagtaagctagattctctttaaatttttttccccac

SEQ ID NO: 488762 - DNA, 545 bp, Homo sapiens
ccgtttgctagtttttaatttgggattttacatcagtattcataaatgaaactgatagtccaaacttttgttcaatctttgctggattttgaaatcagtgctagtttcattctaaaatgttttgcaaacttacctgtgtttgtgtgcgcacgtgtgtgtgtgtgtgtgtgtgtgtgtaagaacagtttaaattgtattacagttctctcacccttaaagatttcatagaattcccctgtgactccaccaagcctagtgattcttaggaggaaattgttttatccatttatttttccyatcataaatggtaagatgacatttttatctctccaggtcaattctggtcatttatatttttctataaagttatacattgcatctggattctcacatttatttctataaatgtgaacacaaagtcttgtgaattcctttttttctgtatatgaggctcttttactattgtaattttacaattacaatatatgttttcttgcttttttcttatttaagtaagctagattctctttaaatttttttcccca

SEQ ID NO: 488763 - DNA, 493 bp, Homo sapiens
aacatagcaggcacgacctgggttttgatctgaaaagcatcacacaggcttgtggcccagaaatgtctgtctaatcttcctgacayttcatgcttctgtggctttcctttggctctggaagaattgggaactgtgagacagcccacccgaagggctaagtccctgagagggaaccccttaatctgttagccctctgccattttgggacagatttcttatcaaccctggcagctagccgagataatcaaggcaggtaaggaggcagtgcctggataatggaatgggagagggttaatgagatctgataggacatcgggaggggggcatgtggatgctgtttcacatgccagaggccaggtctgctggtctgcttacttcctttatccttctgattagagctggaatggtccctgccctccccaccaaaaccataagtgccctccccacaacttgccccattacttagactcaacactctctaagaatccaaaca

SEQ ID NO: 488764 - DNA, 621 bp, Homo sapiens
tttaagaagtcattctgttggcaacatctattaaaaagtacaaaagtatataaatgtayaggcatcttgacccaccgatctgacactggggaatttattttatagatatatcagtacagtgaaaatgttatattcaatattatttttgcagcattgtaatagcaaaatgacccaagaatagctatgacaggttaaataagcaacagcatatccactcagtggaatactatgaagctttaaaaagtgaggcggctttgtattgatatgaacatatttccatgatatattaaataagaagaatgagatagaaaacagtgtataagaatgataactttggggtaagggtaggagaatataaatactgaatatgtattaatagttacttatataaaagactagaaagacacattaaaaatgaataatggggttttgttggtagagggtactgtatgaattaagaacagggtaagaagaatattgttaactttgcatatttaaaaaagattttttgaactaagtaaattttattatcacataaaaagattgaatttaagtaacctttctttttgttggtataagtagggtttattggttatgagaaaattatcttcaatgagcctt

SEQ ID NO: 488765 - DNA, 655 bp, Homo sapiens
ctgctgcttcattgaggtagtttctgccattagaagtggcttccatcatcacctcttggctgttgccagtgaatggtggctctggtcatccactcctgccaacatcagttttagtgccctcttagtttctgctgctyctataacaatatccatgtatctcagtcctcagtgccatctctggagagtagcttaacaaagctacaatgttttagtgcaggatcttaaagatagcatcaaggaaacaactctacccattcccttacatcccctttgttctttgagaacaaagggctataggacccaataattatatatacctgtgtgtatattacttttgaatttacaaagttcatttaaaatgtattagcccgtctaattctcagactaaccctgcaagtgatactattataatccccagtttacagatgagaaaatcgaggctcaaaaagcttaagcggctttcctaagattttatactaaagtaagaatgaggaataaagctaatcttagagtgttcatttcaccgcataattaccaaggctattatcagtcttttaactgactctataggcaaaacagtatttccttgttttagtttacgctgctttgagtatctatgaggctcttttccagttctttcttacctgttgcctat

SEQ ID NO: 488766 - DNA, 587 bp, Homo sapiens
aaaatgtactgtcaattatgtagtcacggtaattctgagcttaccatttctttttggttaatttagtaaatgtataagcgtattataaaaagtattatgatgcaaagttataatttatgacaagccagaagattctatcaaattggatataatggtttgacacccttcccttcccctcctaaaatagtactgcattgtaatttaacagtattattttctatagttattcttgagggtcttctgagttgaaaggcatagaatgaaacatgttcttgtttttggtcctgtcatttttggattacagtaattgttttaattctgaaatgctataaaaatataaatgarcaagacattgcctattatttaaaattaaactcattatttaactgagaggtaattttatggtaggcatcatttcccaaagttggaaagaggttgagattcctcttcacaggtttctgtaatcacctctttacaaataagccttccccaagcccagccttcgttgtgctaatggtgaataaaactttatttcacttcatataaatatttttctggctatctgaattatcattctgcaagatggc

SEQ ID NO: 488767 - DNA, 597 bp, Homo sapiens
ccaaatttttatcagtgtccaattttgctacattagtataaatgccaaataaaatgatatatggaatacctatytgtacaatttaaagtttctttagatagtctaaataaatgatggatggataggtagtaaggagtattcttatttaacttctaatcttctggcttaaactttcttctctgaaatttttgctcatatagacgtgtgtgtgtgtgtttgtatatatatatcaatgtacttctttcttactacatcctttgcacacatttttctcattgtttcaaatgtcattgtaaaaatggaacaaatctttactcattcctcaagtctcagctcaaattcctcttctgtgaagcagacagaatcccatgggtagatttagaacattttctctgatattcttattacattttgtacccatatcattaaaagtattataatataattgattgattaaaaacacaaactgtgggaattgagttcaaattcaaatgcagctacttattaactatgtgactttgggcaagtatcttaaatattttgtgcctcagcattctcagcagcaaaatgtgagaaatcatagcatggatctcctta

SEQ ID NO: 488768 - DNA, 597 bp, Homo sapiens
ccaaatttttatcagtgtccaattttgctacattagtataaatgccaaataaaatgatatatggaatacctatttgtacaatttaaagtttctttagatagtctaaataaatgatggatggataggtagtaaggagtattcttatttaacttctaatcttctggcttaaactttcttctctgaaatttttgctcatatagacgtgtgtgtgtgtgtttgtatatatatatcaatgtacttctttcttactacatccyttgcacacatttttctcattgtttcaaatgtcattgtaaaaatggaacaaatctttactcattcctcaagtctcagctcaaattcctcttctgtgaagcagacagaatcccatgggtagatttagaacattttctctgatattcttattacattttgtacccatatcattaaaagtattataatataattgattgattaaaaacacaaactgtgggaattgagttcaaattcaaatgcagctacttattaactatgtgactttgggcaagtatcttaaatattttgtgcctcagcattctcagcagcaaaatgtgagaaatcatagcatggatctcctta

SEQ ID NO: 488769 - DNA, 625 bp, Homo sapiens
tgttctctgttatcatctcttgcagcctgcaggtggggtccactcaggagtggctctccagggtgagagggaaacagagacaggctgccgctgaaccagattctgcccttgctgctgctgctgctgctgtgcagaattttgacttttgcctgctttgtccctgggctctcagcagtttggctgactggctacttaccgttgcttgacactgcaaccttctgccccygccttcctgtttttctttaagtcttgacagtctgcagattgcggaaggtccctggatgcctctggcctgcttctttctcaggacccgtggcttctgtctttctctaatttatgagacttcctattcagctactatcgggaacctgtatcgattcatgtgcttttcccgcaagctatatcctcagtgcctgttcatgcagcactgtcttcccgtttccacccataacctagaacagttacactttgagtgacagaaacaacaatgaaaaccaagccttgtagcaattttgcattgccacgagttggagttcaattatcatgcagttactgtatcattagggcttgttttccttgatgagaactttgtgagatggtgactaaactcattatttagaataac

SEQ ID NO: 488770 - DNA, 625 bp, Homo sapiens
tgttctctgttatcatctcttgcagcctgcaggtggggtccactcaggagtggctctccagggtgagagggaaacagagacaggctgccgctgaaccagattctgcccttgctgctgctgctgctgctgtgcagaattttgacttttgcctgctttgtccctgggctctcagcagtttggctgactggctacttaccgttgcttgacactgcaaccttctgcccctgccttcctgtttttctttaagtcttgacagtctgcagattgyggaaggtccctggatgcctctggcctgcttctttctcaggacccgtggcttctgtctttctctaatttatgagacttcctattcagctactatcgggaacctgtatcgattcatgtgcttttcccgcaagctatatcctcagtgcctgttcatgcagcactgtcttcccgtttccacccataacctagaacagttacactttgagtgacagaaacaacaatgaaaaccaagccttgtagcaattttgcattgccacgagttggagttcaattatcatgcagttactgtatcattagggcttgttttccttgatgagaactttgtgagatggtgactaaactcattatttagaataac

SEQ ID NO: 488771 - DNA, 625 bp, Homo sapiens
tgttctctgttatcatctcttgcagcctgcaggtggggtccactcaggagtggctctccagggtgagagggaaacagagacaggctgccgctgaaccagattctgcccttgctgctgctgctgctgctgtgcagaattttgacttttgcctgctttgtccctgggctctcagcagtttggctgactggctacttaccgttgcttgacactgcaaccttctgcccctgccttcctgtttttctttaagtcttgacagtctgcagattgcggaaggtccctggatgcctctggcctgcttctttytcaggacccgtggcttctgtctttctctaatttatgagacttcctattcagctactatcgggaacctgtatcgattcatgtgcttttcccgcaagctatatcctcagtgcctgttcatgcagcactgtcttcccgtttccacccataacctagaacagttacactttgagtgacagaaacaacaatgaaaaccaagccttgtagcaattttgcattgccacgagttggagttcaattatcatgcagttactgtatcattagggcttgttttccttgatgagaactttgtgagatggtgactaaactcattatttagaataac

SEQ ID NO: 488772 - DNA, 542 bp, Homo sapiens
ctgttctctgttatcatctcttgcagcctgcaggtggggtccactcaggagtggctctccagggtgagagggaaacagagacaggctgccgctgaaccagattctgcccttgctgctgctgctgctgctgtgcagaattttgacttttgcctgctttgtccctgggctctcagcagtttggctgactggctacttaccgttgcttgacactgcaaccttctgcccctgccttcctgtttttctttaagtcttgacagtctgcagattgcggaaggtccctggatgcctctggcctgcttctttctcaggacccgtggcttctgtctttctctaatttatgagacttcctattcagctactatcgggaacctgtatsgattcatgtgcttttcccgcaagctatatcctcagtgcctgttcatgcagcactgtcttcccgtttccacccataacctagaacagttacactttgagtgacagaaacaacaatgaaaaccaagccttgtagcaattttgcattgccacgagttggagttcaatta

SEQ ID NO: 488773 - DNA, 470 bp, Homo sapiens
tgtgtgcaactaagtgcatacttcagaactctaggcaactattaatttttgtgttttacattttatagcagatgttaattaggaaaatttttaactgagtcaaaaaatgttaattgaattatcatgggattacatcrgtaagtgctgatttcaccattatgctatgtaaagttgcatccatgagtaaattattcagagaattttaatgaattttccactattccacaggactttttctccctagtttctccttgtgtagttgaccaaatagaaaaatttaagctgtaacaagattatctggaaatctattaaaaattagatagaaaagttgttaatttactcttctcatggtgcattatatattttgggcatatacaatcttaggtgagtacaaaatttattatccaaaaaactgaaatttatattcaagctcagtagacatgaagcaattatagttaatattctaaaca

SEQ ID NO: 488774 - DNA, 470 bp, Homo sapiens
tgtgtgcaactaagtgcatacttcagaactctaggcaactattaatttttgtgttttacattttatagcagatgttaattaggaaaatttttaactgagtcaaaaaatgttaattgaattatcatgggattacatcggtaagtgctgatttcaccattatgctatgtaaagttgcrtccatgagtaaattattcagagaattttaatgaattttccactattccacaggactttttctccctagtttctccttgtgtagttgaccaaatagaaaaatttaagctgtaacaagattatctggaaatctattaaaaattagatagaaaagttgttaatttactcttctcatggtgcattatatattttgggcatatacaatcttaggtgagtacaaaatttattatccaaaaaactgaaatttatattcaagctcagtagacatgaagcaattatagttaatattctaaaca

SEQ ID NO: 488775 - DNA, 660 bp, Homo sapiens
ctggcttttttctttctgcatatgtggatgtttacacctgcctgcccatgcaacyagctcctcgtggcatggcgtggccattgtctcactatgatgaggagtcactgagacattttctgtctccaaatattctcatcagttaacagttaaagagagctgaagagctgactaaatctcaactactgaggccaaagaaatgtatgacttatctatcaataaaggaccctaagaggtggaatcaggcttacatctatgtaaactcactgagaaagccgtgttgtcattgctgttcttggtctgtgcctgcttttattcagcatgccacttggtaatggaaacttgaagaaatgatactacaaataagtgatattgaggatgacagtctgttcatttttaaagggcaaaatggcaaaaaggatgcatttgtcctttcagacctcttctcacaatggacagcagggggcagtgctaatatagggagagtttagcatcaggtaaacaagtggtatcggccttcaaaagtcagatgccttcgtgagccacatagcctttcacatttgaaatactctaactcacttttcctcccaagtgtcatttattcatccttcacggcccaggtcaaatagcttagactctgagaagccatatggaatccccctg

SEQ ID NO: 488776 - DNA, 516 bp, Homo sapiens
aaggactttaggcagtttaaaaaatatatcaaagttaattgctaccatggcctatcatcccaagcaaaacagataactgaaaacactgctaaatactttcctcatcatggaggaaataataagctacatttttaaatgaattatttccactgataggaytttttttagtgggcattcaagtagaaaattcaaggtcagaggtaaagtgagatcgcacattcatttcttgccctcaacagcttttacccccaagcactacctagtcaactgctaggtatcccgaaaatcaagttagagtcttcaccctctacaaattaacatataaacaatatttccatcagctgaccttcatgtgagccataattatatatctatatatgttaaatacatatttatgccaacataaacaaatataaggaatacagaactataaatattatattagatattcaatcttaactatgtattgggatgaggaaataaggtgagcattattttaccgctggcatttaatta

SEQ ID NO: 488777 - DNA, 628 bp, Homo sapiens
gaaataataagctacatttttaaatgaattatttccactgataggactttttttagtgggcattcaagtagaaaattcaaggtcagaggtaaagtgagatcgcacattcatttcttgccctcaacagcttttacccccaagcactacctagtcaactgctaggtatcccgaaaatcaagttagagtcttcaccctctacarattaacatataaacaatatttccatcagctgaccttcatgtgagccataattatatatctatatatgttaaatacatatttatgccaacataaacaaatataaggaatacagaactataaatattatattagatattcaatcttaactatgtattgggatgaggaaataaggtgagcattattttaccgctggcatttaattagtatttcaggtttcactgtgtgcatatgaacatgcatatgtgcacacacacatatgtatgaatatttaattttatatagcagaggaggacaaagcatggggtctgttgaagaattgtgttctccaaatagtgttttacattgcggcctatccagctctaatgagggctgagacatggttaacagcaatttggggtagcattttcagctctctttagagagccac

SEQ ID NO: 488778 - DNA, 339 bp, Homo sapiens
aagatgcaaagataacctcaatatatactgtccctgtaattatggagctcacaattgagcagagaagcttattattgctaaacacatagctaagtgaaaccattcctaaaataagccaagatgatagcttttacccctgtaccttaaatatgagaaatatttacttcatgaaggcctacaacaggctgcctgtgaagtacatgagaacagttctcacagtttgcagtggcatgtagatagatgctgataaaayagatatatattgggtatactgcacaataaagcctacagttcaatctgtgaaacagatataagcaacccagcaagatatccagcagt

SEQ ID NO: 488779 - DNA, 642 bp, Homo sapiens
aggcatgagagaacatggaatcgataggatgtagtaggaggctggtgttgctggaacatgaaatctgatgggaggagagaagaggagaaagatttgaagtggagaggtggcaagggcagtccgtggaggtctgtgagcatcctgctgaggagttgtcaccttcagtccacagatgagaggggtcatagaagaacatgttaaactacaacacctagctgtggtcccagctactggggaggctaaggtgggaggatcgtttcatcctgggaggttgaggctgcaatgagctgtgattgcgtcacagctaggtagtccggaggaggaggtgatggtgctggtgctgttctccttctctcccccttccttcattttaaattggccttgttgaatgtattgtaaaattacgagtttagttccttgttttaatcagcgattcttgtgaacatcataggtcctccttggctatttgtccaaagtgygaagtcactcttctgcacatgaccctgtggcccaggcccacagaggtaactggagaaagaagtcagagcctctaaaccaagaaggatctcttatcataattgaaggcagtgggtcttgaactgtgttagttggtggcccctgatccgtgatcttaaactgcag

SEQ ID NO: 488780 - DNA, 607 bp, Homo sapiens
  misc_feature (1)...(607): n = A,T,C or G
nnnnnnnnnnnnnnnnnnnnnnntgaaggagagtcatgcaccgcagcgcccactacaggcctggaacaccttggcaaggagtttgggttttacagcttcrcatgtggggaaaacgaggctcaggaggttaatgagtctcctgaagtcgcctagtaggctgggagcagagacagggcttagccccttgctttctaaatcggtattccttccattactccgcatcctttcctggagtcattatgtaaaattctgcttcacaatctgatgctctgagcttcccagggccaggccacttccataaatgccttgctagtagttgtttctaaggaactgtcttgatctgcccctctgtgagacctcagtagggctggagatgcacatgtgtgtacatcaatgcacttgtgcacacacaaatgcactcatgtgtgcacacaggggcatgcaaagcatgtaaactcacatatgcgtgcacacacacttcaatatctgtgcattccctccacttctgtatctctggtaaagcaaattctccagccttctcccgcaagtgggtgattcattacaccccccagcagtcatcaagggaggtgcggccacacttcgaaga

SEQ ID NO: 488781 - DNA, 590 bp, Homo sapiens
  misc_feature (1)...(590): n = A,T,C or G
nnnnnnnnnnnnnnnnnnnntgaaggagagtcatgcaccgcagcgcccactacaggcctggaacaccttggcaaggagtttgggttttacagcttcgcatgtggggaaaacgaggctcaggrggttaatgagtctcctgaagtcgcctagtaggctgggagcagagacagggcttagccccttgctttctaaatcggtattccttccattactccgcatcctttcctggagtcattatgtaaaattctgcttcacaatctgatgctctgagcttcccagggccaggccacttccataaatgccttgctagtagttgtttctaaggaactgtcttgatctgcccctctgtgagacctcagtagggctggagatgcacatgtgtgtacatcaatgcacttgtgcacacacaaatgcactcatgtgtgcacacaggggcatgcaaagcatgtaaactcacatatgcgtgcacacacacttcaatatctgtgcattccctccacttctgtatctctggtaaagcaaattctccagccttctcccgcaagtgggtgattcattacaccccccagcagtcatcaagggaggtgcgg

SEQ ID NO: 488782 - DNA, 607 bp, Homo sapiens
  misc_feature (1)...(607): n = A,T,C or G
nnnnnnnnnnnnnnnnnnnnnnntgaaggagagtcatgcaccgcagcgcccactacaggcctggaacaccttggcaaggagtttgggttttacagcttcgcatgtggggaaaacgaggctcaggaggttaatgagtctcctgaagtcgcctagtaggctgggagcagagacagggcttagycccttgctttctaaatcggtattccttccattactccgcatcctttcctggagtcattatgtaaaattctgcttcacaatctgatgctctgagcttcccagggccaggccacttccataaatgccttgctagtagttgtttctaaggaactgtcttgatctgcccctctgtgagacctcagtagggctggagatgcacatgtgtgtacatcaatgcacttgtgcacacacaaatgcactcatgtgtgcacacaggggcatgcaaagcatgtaaactcacatatgcgtgcacacacacttcaatatctgtgcattccctccacttctgtatctctggtaaagcaaattctccagccttctcccgcaagtgggtgattcattacaccccccagcagtcatcaagggaggtgcggccacacttcgaaga

SEQ ID NO: 488783 - DNA, 612 bp, Homo sapiens
  misc_feature (1)...(612): n = A,T,C or G
nnnnnnnnnnnnnntgaaggagagtcatgcaccgcagcgcccactacaggcctggaacaccttggcaaggagtttgggttttacagcttcgcatgtggggaaaacgaggctcaggaggttaatgagtctcctgaagtcgcctagtaggctgggagcagagacagggcttagccccttgctttctaaatcggtattccttccattactccgcatcctttcctggagtcattatgtaaaattctgcttcacaatctgatgctctgagcttcccagggccaggccacttccataaatgccttgctagtagttgtttctaaggaactgtcttgatctgccyctctgtgagacctcagtagggctggagatgcacatgtgtgtacatcaatgcacttgtgcacacacaaatgcactcatgtgtgcacacaggggcatgcaaagcatgtaaactcacatatgcgtgcacacacacttcaatatctgtgcattccctccacttctgtatctctggtaaagcaaattctccagccttctcccgcaagtgggtgattcattacaccccccagcagtcatcaagggaggtgcggccacacttcgaagaaatcacctaaagac

SEQ ID NO: 488784 - DNA, 607 bp, Homo sapiens
  misc_feature (1)...(607): n = A,T,C or G
nnnnnnnnnnnnnnnnnnnnnnntgaaggagagtcatgcaccgcagcgcccactacaggcctggaacaccttggcaaggagtttgggttttacagcttcgcatgtggggaaaacgaggctcaggaggttaatgagtctcctgaagtcgcctagtaggctgggagcagagacagggcttagccccttgctttctaaatcggtattccttccattactccgcatcctttcctggagtcattatgtaaaattctgcttcacaatctgatgctctgagcttcccagggccaggccacttccataaatgccttgctagtagttgtttctaaggaactgtcttgatctgcccctctgtgagacctcagtagggctggagatgcacatgtgtgtacatcaatgcacttgtgcacacacaaatgcactcatgtgtgcacacaggggcatgcaaagcatgtaaactcacataygcgtgcacacacacttcaatatctgtgcattccctccacttctgtatctctggtaaagcaaattctccagccttctcccgcaagtgggtgattcattacaccccccagcagtcatcaagggaggtgcggccacacttcgaaga

SEQ ID NO: 488785 - DNA, 658 bp, Homo sapiens
aaactcacatatgcgtgcacacacacttcaatatctgtgcattccctccacttctgtatctctggtaaagcaaattctccagccttctcccgcaagtgggtgattcattacaccccccagcagtcatcaagggaggtgcggccacacttcgaagaaatcacctaaagacgggtaacctggcatgtgtgatttcttctyagcagataacatcttccaggggcctgaggcactcagatgagatgtcaccttctccaaagaaaaaacgcattttgcacacgtttcggattttagtttaccagcactggccaatgaatgactttggattctaataacactctcatcttcatacactctgagggcagccagtcaaagcaagcctggtgccttgcagggcctggaaacagaccagacaagatttaaatgacctctcagaatatcagaaaaggccctgctagacctcacccccactttccagtgcattgtgaatctttacacttaccctttaagttatgtttcaaagaaagcacacacatgcttagggtcaatttcacagtcttgccaatgctcttaatgaggtgagtggataatgaaggcagttcatgcagtcaatgccccctcgacttcaaagccaagaactagacctagctgctccatctac

SEQ ID NO: 488786 - DNA, 658 bp, Homo sapiens
aaactcacatatgcgtgcacacacacttcaatatctgtgcattccctccacttctgtatctctggtaaagcaaattctccagccttctcccgcaagtgggtgattcattacaccccccagcagtcatcaagggaggtgcggccacacttcgaagaaatcacctaaagacgggtaacctggcatgtgtgatttcttcttagcagataacatcttccaggggcctgaggcactcagatgagatgtcaccttctccaaagaaaaaacgcattttgcacacgtttcggattttagtttaccagcactggccaatgaatgactttggattctaataacactctcatcttcatacactctgagggcagccagtcaaagcaagcctggtgccttgcagggcctggaaacagaccagacaagatttaaatgacctctcagaatatcagaaaaggccctgctagacctcacccccactttccagtgcattgtgaatctttacacttaccctttaagttatgtttcaaagaaagcacacacatgcttagggtcaatttcacagtcttgccaatgctcttaatgaggtgagtggataatgaaggcagttcatgcagtcaatgccccctcgacttcaaagccaagaactrgacctagctgctccatctac

SEQ ID NO: 488787 - DNA, 621 bp, Homo sapiens
cagcattgctccattagcccccaaactggtctcactgcttctgccctgtgcccctataagggcagagcagccacaatgacccctctgaaacatagatcagatcatgatacacctttcgaccctccaatggctccctatcattgttaaagccaaagtccttgacaatcacccacaagaacataagtgctctgctccccagccccctcacctctctgccctcagctttactgctctcccttgcatgccctctggaccttacaatgttatatttaatgccagggaccatgccyattttcttcacctgtgcatgtttagaacctagcatcatacctgacgtctgtaggcactcagtaaatacgggctgacggaagcactctgtctctgtctctctctgtccctctccctccctccacccaccagattaagcactcctctagaccacaagcctggcctcattccccttttcagccctgttcactccccagagcctgacacatggtggatcatacaagcaacaggctgttccagtggtactcttcccgcctcaatttaaacaccatgcctggacaaggccaacagaatcccaaaggggatatggggaaaagcccacaccaacacagg

SEQ ID NO: 488788 - DNA, 621 bp, Homo sapiens
cagcattgctccattagcccccaaactggtctcactgcttctgccctgtgcccctataagggcagagcagccacaatgacccctctgaaacatagatcagatcatgatacacctttcgaccctccaatggctccctatcattgttaaagccaaagtccttgacaatcacccacaagaacataagtgctctgctccccagccccctcacctctctgccctcagctttactgctctcccttgcatgccctctggaccttacaatgttatatttaatgccagggaccatgcccattttcttcacctgtgcatgtttagaacctagcatcatacctgacgtctgtaggcactcagtaaatacgggctgacggaagcactctgtctctgtctctctctgtccctctccctccctccacccaccagattaagcactcctctagaccacaagcctggcctcattccccttttcagccctgttcactccccagagcctgacacatggtggatcatacaagcaacaggctgttccagtggtactcttccygcctcaatttaaacaccatgcctggacaaggccaacagaatcccaaaggggatatggggaaaagcccacaccaacacagg

SEQ ID NO: 488789 - DNA, 528 bp, Homo sapiens
cacagctggggaagcagaggtacagagctgagcaaggccagagtgggaagccaggtcctcccaccctgggtctagcatcctttccacaacagtaaactccctggtcacgacagaactgaccggttcttcaggccatattgactgaatcccagctcagcaatcttttccatcaatacaggtcctctgcagtcatttcctgattaacagtggatccatttagttgaattgtggtcagactggttgtgtctgtggacatagaaataccgatgacctgatttcccccaggagtctttcagcttcgggacaggacatggcagaagttgagtgacaatgtgagtcctrctcccatctgagccctcagggacatagtaagtgggcttctcttggaggagaagagaggaaaatgatgacaagatgagcctttaacagatgcaaagtcctggataaaggttcagagagttgagtggagctgagcaggatcaggacccctcttctggctcttttaaatggataaactctgacgttagt

SEQ ID NO: 488790 - DNA, 642 bp, Homo sapiens
taaactcagaagtaaaggggaatatccttagagaggcagaaccgctatgacracacccatgcactcaggtttctccacatagactatcaaaatatactgccacagtctgctcatgactcttgcagacctttcatgtcagtgagaatgcttggggctgcaagcaaaagaaccttcaactaaaaatggcataaacaatcagtggtataacctcataggacaaggaacttggggaaagaaggctcctgtgttaattcgccagttcacaatcttgtctgagccctgagacttcacctttccactgtgacatcttcagcaggtgggccatggccgccttcatagttttgacacggctgtcagagccgtccttgcacaacctgtccaaaagcaaagagaggagaattactatcttattttttggaaaaccaggaataccttcacagaagcatccaagcagaattcccttcatgtctcctcctctggggctgtgtcacatggtcctacctactcaagacccagcaagggaaaataaattaccatgagtaccacggaaggagagtcaccccttccaaagttggggttaacacttgagcacaatcaagccccgtccacaaggaataagcaggacgatggaccactacagtg

SEQ ID NO: 488791 - DNA, 642 bp, Homo sapiens
taaactcagaagtaaaggggaatatccttagagaggcagaaccgctatgacaacacccatgcactmaggtttctccacatagactatcaaaatatactgccacagtctgctcatgactcttgcagacctttcatgtcagtgagaatgcttggggctgcaagcaaaagaaccttcaactaaaaatggcataaacaatcagtggtataacctcataggacaaggaacttggggaaagaaggctcctgtgttaattcgccagttcacaatcttgtctgagccctgagacttcacctttccactgtgacatcttcagcaggtgggccatggccgccttcatagttttgacacggctgtcagagccgtccttgcacaacctgtccaaaagcaaagagaggagaattactatcttattttttggaaaaccaggaataccttcacagaagcatccaagcagaattcccttcatgtctcctcctctggggctgtgtcacatggtcctacctactcaagacccagcaagggaaaataaattaccatgagtaccacggaaggagagtcaccccttccaaagttggggttaacacttgagcacaatcaagccccgtccacaaggaataagcaggacgatggaccactacagtg

SEQ ID NO: 488792 - DNA, 631 bp, Homo sapiens
caggaagggtcatgagggagaagtccatgactcacgctctgggatattgctccaggacattccagggcctttgggacaggctgacaagatcatgaatgtcatctagggagaaattgagttaaaggctagaggataattggcttgggataaaatctgactgcagaagtcacccctgcagatgccattgccccttggtggagataagcctgggaaacaggaaatgcctctcagactggagtcacagccgcaccatgagattataatagcaccatttgctgagtaccaattgggtgctctgtgctattctaggtgctcacgaaagcaccactggatcaacagagccacagtccctgttttcataaggatatgtcagtcaggaatatgctcccaggctgatatcagaaaactggctgaaattaaacaaacaggggtttaatgtttgcacatggggagaggcctagargtgtggaactgctagtgtgggtttggctgttcgaccatgacatcatagatccaagtgccttctagttgttttctctgccatccttacatattgacacatgcttgttgcctcatggttgcaagatggctgctgccagcccagcaattacatccattaccatggcatttc

SEQ ID NO: 488793 - DNA, 542 bp, Homo sapiens
tgcaatcccctgcaaggctgcccccgtgatcagccacctcacgcggcaggggcgtgggacaggtaggccctctacgccgtatcatcagcccctgtccctctctgtcttcattttgaccttcttggttatttaatttttgtttctctccctctccttttcatgcctatttttgcccttaatatggagtgctcctctatatcaggaccgtggaattggtttctgtgatggggttccccaagtaccaaaaaagagatcataaagttactmagaagaggcaaatgtgtgattctagaatgtagggctttatgggaaaaaagaacgagggtggctgaagtccttgagtgcaaagataaatgccttcatatataaattaaattacattaaaaataatcttaaaatatatacatttctatataactaaaatgtgactattttaaaattcatgtatatatattaataaaaattattaagacaataaagatagactacaggtaacaaagtgtgaataggatttgctgtacctgaaaattgcaagaaaaata

SEQ ID NO: 488794 - DNA, 217 bp, Homo sapiens
tgatgaaatatccttccctcattggggtgaggtttatttagcaccctgggggcaggscccactagttgaacttgactgctcagggctgtggtgtggctctagttggtgaagcattcctccctgtctatgttttgcaggctaagagacaagatggactgggcagaggggagaagggcagtggagagacccaggcagaaggataggctcagggcgggac

SEQ ID NO: 488795 - DNA, 593 bp, Homo sapiens
ttggggcctctcccattttctaagtgaaatgactaattagtcctgaagcaggagatttctatctgctcataatggcatcatgatttattcatgtgaggctggaccacttacagggactggtcccatgtttcctctggctttgatgtgatatgaggccaactgtagttttccagaatgaataatttctcaaatccagcttgctttctcagtcaccgctgccaggaaacctataactctgttcacttaatagcaccctccttcccaggtctgcaatcattttagaaggaatgcattcttatctggcgctcagttccttctctggcaatgtgagggttaggctagatggtatctcagggcctttctagcccttaggtttttctacttttaaagttcttkccccttctcctcatgttttcttaaggtatttgcttccataggactgaatgcaaggtaatcagagacatagctgttgaaagcttctctcctggtttcacttttctgcccaattactaagtcttaaaggcacgtagtgtagtttaagctgttagttcctggcctcttaagactgcccacattcacttaatgtcttgtga

SEQ ID NO: 488796 - DNA, 465 bp, Homo sapiens
gctgccaggccttcccctggcaggcaccaaggatgagttgtctgacacatgaggcagggtgagaagggaagagaatggggccacctgacaggagacctgtctggtcctgcatctgtcactgcccgggagaataggtgatgtgggcaagttcctttcctttgctaggcctcagtttccccatttataaagtgaggtgacggtaagaaattccttttatttccatggttccatgaggtttgccaagttttattgtatactgggggatctctgacgtctttcttggttgtttctgccctgctttggtgaagtgggaatggagttgggggagttccttgcttctcttgagcgtctaatataggtgacgatgttgtacgaccttagctggtggttgccaagggctgacatatactgtrtagaccaggacatgatataaggagaaaaaagtcatttttgctccctggctgg

SEQ ID NO: 488797 - DNA, 549 bp, Homo sapiens
ctgggctgaagtgatcctcccacctcagcctcccgagtagctggagctacaggcacaccaccacacccggctaccattaataatttaaaataacataagctggagcaaattcccttccttctattgctttttccctttccacttcccaaatttgctatacatttttttcattgtcaagattaataacatgamgttttgatgtgtgcctataaactagtctatcctttatgctcataggttgcttctaaaaaattaaaaaccaataaatgacttattttatgattttatatatacagtataatattctctctagaaccaaatacacgttgggtctcaaatttttgtagatatgcatctccttcagggcctgttgaagatcacatttctcagccccagaagttctgaatcaattttaaggggcccagtgattctagtacattctgaagagatgttattggttatataaagaaagaaggaaatgtaatttcatgctattaaactttggcaacttgtctaagagtcctccaaatgtcagcccctgttttcttt

SEQ ID NO: 488798 - DNA, 477 bp, Homo sapiens
gctggggggtggggtccatctgtatttgtcccartgtccaaaaggctgaagggtgtgtgtgtgctcacactggtagaggtcctctaggtgcatcttacacactccatctcatctcagccccaccatagcttcattaggagctaccggaagtgcgtttctcccactttactgatgaagaaagagccatgcccaagaacacacatgcggagtggcagggcagggctttgaacctggtggtaggactctgaatctaaggcccttttgaggagccccatggtgacttagggatggaaattccaggggttggaggggtcctcatttgcttcctctaaacagcctcttgttttgaaataagacaaatgaacttggcttaagttctgttttcccttccttcctcccttcaccccctcactctcattccttttttcctcagggattttttggcagagggcagagagaggaacccattcccaagtc

SEQ ID NO: 488799 - DNA, 540 bp, Homo sapiens
ataaccatttggttgtttccaatttttagttattactaatagtattgcagtgaccattctaacgtggatcatttgggaaaacatctgcatgcatttctcttagatatgtccaaagaaattgctgaacagttttccaaagtggtggtcccagtgtatacccctcccagcagtgtttgagagctctagttgccgcacatactcaccaacactagacattgtcttacgttcattttccatggaaggaatgtgaaactcaaaagttatcctgtgctcagctaagacaatgtgccagtaagtgacagagctgggatttaaacccagrtctgtgtgatgactatggaatctattctctccctctgggttagacataaacataagccagaatatgatcaactcgaaccctaaaaaggtatgaagagcactctgggagaacttgaagaggtggagaattgtcatctgtttttgggagggcaaggatcatggagccgcacagagacggtagcatttggctgggtcttgtgggaagtgggtagttatgcc

SEQ ID NO: 488800 - DNA, 540 bp, Homo sapiens
ataaccatttggttgtttccaatttttagttattactaatagtattgcagtgaccattctaacgtggatcatttgggaaaacatctgcatgcatttctcttagatatgtccaaagaaattgctgaacagttttccaaagtggtggtcccagtgtatacccctcccagcagtgtttgagagctctagttgccgcacatactcaccaacactagacattgtcttacgttcattttccatggaaggaatgtgaaactcaaaagttatcctgtgctcagctaagacaatgtgccagtaagtgacagagctgggatttaaacccaggtctgtgtgatgactrtggaatctattctctccctctgggttagacataaacataagccagaatatgatcaactcgaaccctaaaaaggtatgaagagcactctgggagaacttgaagaggtggagaattgtcatctgtttttgggagggcaaggatcatggagccgcacagagacggtagcatttggctgggtcttgtgggaagtgggtagttatgcc

SEQ ID NO: 488801 - DNA, 518 bp, Homo sapiens
agcagccttaaagagcaataaaagttaccatagatamagaaggacattacctaagaaaaaggagtcaattctccaagaagacatgacaatcctgcatgtgtgtatgcacctaacaacagagcatagaaatatgtttaatttacacttatcttcttatgagccatgttgcgtaacttttcacatgtttaagatcaacttccaattattttcctatgaaatctctctgtgtatctttttaattttttcaatatattgttggtctatttcccctaaatttgtaagaactatttgtatattagagatagcacccctttgtctatgatataagttgcaaacctattttcccactctttcatttgttttctgactgtggtggtagtcttttcttgccatgcaaaaaattttgttttgtttgtctttgatgtagttgaattgaccagtcttttaaaattgtgtcattattagatgagcgactttctttccagctcacctgagaatgtgttttcctgttgagctac

SEQ ID NO: 488802 - DNA, 518 bp, Homo sapiens
agcagccttaaagagcaataaaagttaccatagataaagaaggacattacctaagaaaaaggagtcaattctccaagaagacatgacaatcctgcatgtgtgtatgcacctaacaacagagcatagaaatatgtttaatttacacttatcttcttatgagccatgttgcgtaacttttcacatgtttaagatcaacttccaattattttcctatgaaatctctctgtgtatctttttaattttttcaatatattgttggtctatttcccctaaatttgtaagaactatttgtatattasagatagcacccctttgtctatgatataagttgcaaacctattttcccactctttcatttgttttctgactgtggtggtagtcttttcttgccatgcaaaaaattttgttttgtttgtctttgatgtagttgaattgaccagtcttttaaaattgtgtcattattagatgagcgactttctttccagctcacctgagaatgtgttttcctgttgagctac

SEQ ID NO: 488803 - DNA, 518 bp, Homo sapiens
agcagccttaaagagcaataaaagttaccatagataaagaaggacattacctaagaaaaaggagtcaattctccaagaagacatgacaatcctgcatgtgtgtatgcacctaacaacagagcatagaaatatgtttaatttacacttatcttcttatgagccatgttgcgtaacttttcacatgtttaagatcaacttccaattattttcctatgaaatctctctgtgtatctttttaattttttcaatatattgttggtctatttcccctaaatttgtaagaactatttgtatattagagatagcacccctttgtctatgatataagttgcaaacctattttccyactctttcatttgttttctgactgtggtggtagtcttttcttgccatgcaaaaaattttgttttgtttgtctttgatgtagttgaattgaccagtcttttaaaattgtgtcattattagatgagcgactttctttccagctcacctgagaatgtgttttcctgttgagctac

SEQ ID NO: 488804 - DNA, 294 bp, Homo sapiens
tggcaaccccggataccgtcctcccgcctcgcacccatcagcgcggaccccgggggcgacgcagtggcgatgtcgggctgtgggcccagcggtggcactaggcggagaagcaccactcaaccccatccctgggctgcagagggcccagcgcggggggctccgagcgtcgggagcctgtggaagagaagagcgcgcgggcgacagttaaacaggccctggggcagggcgcgcctcgcgctccagggagccccgccctcccgcggcacctycgcagcaaccgccgcctgcaccggg

SEQ ID NO: 488805 - DNA, 620 bp, Homo sapiens
gctgtggcaaccccggataccgtcctcccgcctcgcacccatcagcgcggaccccgggggcgacgcagtggcgatgtcgggctgtgggcccagcggtggcactaggcggagaagcaccactcaaccccatccctgggctgcagagggcccagcgcggggggctccgagcgtcgggagcctgtggaagagaagagcgcgcgggcgacagttaaacaggccctggggcagggcgcgcctcgcgctccagggagccccgccctcccgcggcacctccgcagcaaccgccgcctgcacygggcgcgcgagagctgctagggcggtttctctgcctcgggcctgttgggcagggccggctaaggtgcgcgtgctcgctggttctaacccttctgttgggcgtttctgcggagaggcgggaggcgctgagagtctgcgcggaggtccgtgcacagactgctttgcctgttgttgctcttcggaggcggcgatccccgaaggcgagctgaaatacggctgcaggctacaatttgcagccgacgattaaggaagacgacgagcgggagaggtggcccaccctcatggagcgcttgtgctcggatggcttcgcatttccccattactac

SEQ ID NO: 488806 - DNA, 620 bp, Homo sapiens
gctgtggcaaccccggataccgtcctcccgcctcgcacccatcagcgcggaccccgggggcgacgcagtggcgatgtcgggctgtgggcccagcggtggcactaggcggagaagcaccactcaaccccatccctgggctgcagagggcccagcgcggggggctccgagcgtcgggagcctgtggaagagaagagcgcgcgggcgacagttaaacaggccctggggcagggcgcgcctcgcgctccagggagccccgccctcccgcggcacctccgcagcaaccgccgcctgcaccgggcgcgcgagagctgctagggcggtttctctgcctcgggcctgttgggcagggccggctaaggtgcgcgtgctcgctggttctaacccttctgttgggcgtttctgcggagaggcgggaggcgctgagagtctgygcggaggtccgtgcacagactgctttgcctgttgttgctcttcggaggcggcgatccccgaaggcgagctgaaatacggctgcaggctacaatttgcagccgacgattaaggaagacgacgagcgggagaggtggcccaccctcatggagcgcttgtgctcggatggcttcgcatttccccattactac

SEQ ID NO: 488807 - DNA, 620 bp, Homo sapiens
gctgtggcaaccccggataccgtcctcccgcctcgcacccatcagcgcggaccccgggggcgacgcagtggcgatgtcgggctgtgggcccagcggtggcactaggcggagaagcaccactcaaccccatccctgggctgcagagggcccagcgcggggggctccgagcgtcgggagcctgtggaagagaagagcgcgcgggcgacagttaaacaggccctggggcagggcgcgcctcgcgctccagggagccccgccctcccgcggcacctccgcagcaaccgccgcctgcaccgggcgcgcgagagctgctagggcggtttctctgcctcgggcctgttgggcagggccggctaaggtgcgcgtgctcgctggttctaacccttctgttgggcgtttctgcggagaggcgggaggcgctgagagtctgcgcggaggtccgtgsacagactgctttgcctgttgttgctcttcggaggcggcgatccccgaaggcgagctgaaatacggctgcaggctacaatttgcagccgacgattaaggaagacgacgagcgggagaggtggcccaccctcatggagcgcttgtgctcggatggcttcgcatttccccattactac

SEQ ID NO: 488808 - DNA, 620 bp, Homo sapiens
gctgtggcaaccccggataccgtcctcccgcctcgcacccatcagcgcggaccccgggggcgacgcagtggcgatgtcgggctgtgggcccagcggtggcactaggcggagaagcaccactcaaccccatccctgggctgcagagggcccagcgcggggggctccgagcgtcgggagcctgtggaagagaagagcgcgcgggcgacagttaaacaggccctggggcagggcgcgcctcgcgctccagggagccccgccctcccgcggcacctccgcagcaaccgccgcctgcaccgggcgcgcgagagctgctagggcggtttctctgcctcgggcctgttgggcagggccggctaaggtgcgcgtgctcgctggttctaacccttctgttgggcgtttctgcggagaggcgggaggcgctgagagtctgcgcggaggtccgtgcacagactgctttgcctgttgttgctcttcggaggcggcgatccccgaaggcgagctgaaatacggctgcaggctacaatttgcagccgacsattaaggaagacgacgagcgggagaggtggcccaccctcatggagcgcttgtgctcggatggcttcgcatttccccattactac

SEQ ID NO: 488809 - DNA, 478 bp, Homo sapiens
cctcaggatcctgcctctgaagagtcctttccttcctgtggaatctggagcctggtcctccttctccaaggcagcacctgccaggttcctcactggcagcaagcagccttgctaacagccttgctaatccrttaattacctgcttctagcagaagagctgttaattgaaaactccaccccctcctttaattgcctgcctgcctctggctgtctaggcttccctgggttccctccaggcccgcagcccttggttctctgcctttgggctcctgacttcttcctggtcaataagggtgtctgtggctgtctctgcagtgctcattactggggttgccaggtgagaatccggggctacactccctagcctgcagctaacagcctctctcctgcctggcccactgtgggaggaaggaaagcatttaatgcaatttgccccagaaattaagggggagataacaggccagtgggaggattccac

SEQ ID NO: 488810 - DNA, 478 bp, Homo sapiens
cctcaggatcctgcctctgaagagtcctttccttcctgtggaatctggagcctggtcctccttctccaaggcagcacctgccaggttcctcactggcagcaagcagccttgctaacagccttgctaatccaytaattacctgcttctagcagaagagctgttaattgaaaactccaccccctcctttaattgcctgcctgcctctggctgtctaggcttccctgggttccctccaggcccgcagcccttggttctctgcctttgggctcctgacttcttcctggtcaataagggtgtctgtggctgtctctgcagtgctcattactggggttgccaggtgagaatccggggctacactccctagcctgcagctaacagcctctctcctgcctggcccactgtgggaggaaggaaagcatttaatgcaatttgccccagaaattaagggggagataacaggccagtgggaggattccac

SEQ ID NO: 488811 - DNA, 478 bp, Homo sapiens
cctcaggatcctgcctctgaagagtcctttccttcctgtggaatctggagcctggtcctccttctccaaggcagcacctgccaggttcctcactggcagcaagcagccttgctaacagccttgctaatccattaattacctgcttctagcagaagagctgttaattgaaaactccaccccctcctttaattgcctgcctgcctctggctgtctaggcttccctgggttcyctccaggcccgcagcccttggttctctgcctttgggctcctgacttcttcctggtcaataagggtgtctgtggctgtctctgcagtgctcattactggggttgccaggtgagaatccggggctacactccctagcctgcagctaacagcctctctcctgcctggcccactgtgggaggaaggaaagcatttaatgcaatttgccccagaaattaagggggagataacaggccagtgggaggattccac

SEQ ID NO: 488812 - DNA, 478 bp, Homo sapiens
cctcaggatcctgcctctgaagagtcctttccttcctgtggaatctggagcctggtcctccttctccaaggcagcacctgccaggttcctcactggcagcaagcagccttgctaacagccttgctaatccattaattacctgcttctagcagaagagctgttaattgaaaactccaccccctcctttaattgcctgcctgcctctggctgtctaggcttccctgggttccctccaggcccrcagcccttggttctctgcctttgggctcctgacttcttcctggtcaataagggtgtctgtggctgtctctgcagtgctcattactggggttgccaggtgagaatccggggctacactccctagcctgcagctaacagcctctctcctgcctggcccactgtgggaggaaggaaagcatttaatgcaatttgccccagaaattaagggggagataacaggccagtgggaggattccac

SEQ ID NO: 488813 - DNA, 470 bp, Homo sapiens
ctgctcagggcctgcgcgtggcactccacagagcacaaggccagctctactcctccaggctgctgcaaagtgctgccagtgcagggcctctccctggggactcaggaaaggccagaatctatgaggctgttgctctggccctgctgcctgcatcgctgatccatcctcagcctgaacctcaagggctgcagctcagacacagctctgctgctgcttcctaggaacagagtgaggactcaaagggaggtgctgggagcaaccaaggacatcagtgccttcttctcaaccagacaccctgggctctgagccctaatggttctccctcccactgtggcctaagtgtcttcacattcaaggctctggcagtcaagaggattacatctcaacatgagatttggagggaccatccaaactatatcacacggtaagacatgatgyatgtttatacactttattggacaattcgttta

SEQ ID NO: 488814 - DNA, 406 bp, Homo sapiens
ggaactactgggtgcaggagataatgctagaattgggataaacttcatttactaattactcttctttgttactgttaggtatcagacttacacgttttgttgattttagttatagaarttagataaacttgaatatgaatacattggcttcattgatcaaagagctgactcttggataaaataggtatttaatgaatattctttagagaatagcatgatactcctaacaagactattttagaaacaaaaataatgttgaattcaacaactgactcctaaaatggtaattttcaatgaatattggagtgatttccaagtgtaaaagcttattaatatccaatacttgtagcagttttatttagtagaattatgtcaaaattgataattgatgatgctttttattgag

SEQ ID NO: 488815 - DNA, 406 bp, Homo sapiens
ggaactactgggtgcaggagataatgctagaattgggataaacttcatttactaattactcttctttgttactgttaggtatcagacttacacgttttgttgattttagttatagaaattagataaacttgaatatgaatacattggcttcattgatcaaagagctgactcttggataaaataggtatttaatgaatattytttagagaatagcatgatactcctaacaagactattttagaaacaaaaataatgttgaattcaacaactgactcctaaaatggtaattttcaatgaatattggagtgatttccaagtgtaaaagcttattaatatccaatacttgtagcagttttatttagtagaattatgtcaaaattgataattgatgatgctttttattgag

SEQ ID NO: 488816 - DNA, 406 bp, Homo sapiens
ggaactactgggtgcaggagataatgctagaattgggataaacttcatttactaattactcttctttgttactgttaggtatcagacttacacgttttgttgattttagttatagaaattagataaacttgaatatgaatacattggcttcattgatcaaagagctgactcttggataaaataggtatttaatgaatattctttagagaatagcatgataytcctaacaagactattttagaaacaaaaataatgttgaattcaacaactgactcctaaaatggtaattttcaatgaatattggagtgatttccaagtgtaaaagcttattaatatccaatacttgtagcagttttatttagtagaattatgtcaaaattgataattgatgatgctttttattgag

SEQ ID NO: 488817 - DNA, 603 bp, Homo sapiens
gcagggtctgcaaaatatctcaagcactgatctttggttttacagtagtgatgttatctccaggagcaatgtggggaggttcagactcttggagccagaggctgcatgactcctaaactgtaatttctaaacttgtagctaatttgtcagtcctgcaaaggcagactggtccccaggcaagaagggggtcttttcagaaaagggctgttattaattttgttttaaagtcaaaccatgaactgaatttcttcttaaagttagtttggcctatgcccaggaatgaacaaggacagcttaaaggttagaagcaagatggagttgcttaggtctaatttctttcactgtcataatttcttcagttrtaattttgcaaaggtggtttcaataagaagaaagacaggtggatgaacctgaaataccgctcctagtccctcacttctgagcagagtgtgctgtggatccagacactggtgtgttccctgggaaggggcaaagaggtgctgagattaccagcaggctccctgaggcctgggctggagagatgtcaaggactgcaaaattgtgggcaaatggcaggacttcagctatgggtgccatcgtgat

SEQ ID NO: 488818 - DNA, 655 bp, Homo sapiens
tgtggattccctggagtgttcatctttaccccaaccactgcaacagagcctgtcacactgctggttgtacagggtatctctttagcctcacaggcatcctggatcagaaggcattgcagggagggttttgcagaaaagcaaggtgtgaaactgggggattagctgacatgttgcctgcaggaacaggtgtgcagtccccacttgcaggaagactaaatggtccatggcaagagcaaatgaagtgtcattttcaagaaaaccagacagagagctggcaagtactctgggctgagtaatatcgaataacaccacctccttttccttatagtggttcttccatcagcctgattccagagactgcccaggaattagcacctctggacaattcctctagttcagaatcctctactcttctctttcttttccaatttcattcagtttccttctcatattttctcttttctgctctactgaactattattattattaktagtagtagtagtagtaaccctattacaactcacgtgaatggttatgaagaggaggctgttatctcataataaaacacacataacgtagcaacaaaacaaagcaaaactacacagagccaagagaaacataaaatcactgtttccctttacacaaggaaaagga

SEQ ID NO: 488819 - DNA, 607 bp, Homo sapiens
cctccctcccacttcactcctcaagtgggacaaaatgctaatctagtgttaactatatggcccacacttactttcaatcatgagcaccataactgttcaatcaaatgaaattaaggctggaatcatcatccacttgttaattacagtgtgaaatatctcaatcactttgtttttagaggtggcatgagaattgtgaaaaacagacaagggcgtttgttatgcagtgtgtgaagtagtccattaagccatggaaacgtcttccaagcaactgtattcaccctgactcccctcataattccatctcctagttgttcaaagaagaagatgcttgaaaaattatcatgcatagagtcacatgaaatctctaaatacacaacctttacttagttttcatggagrcttaaatcgcagaatagctttatattttaaaatattcctatttatatttaattttttattattgttagagactgtgtctttctctgtcactcaggctggagtacagtggcaagattatagttcactgtaaccttgaacccttgggttgaagtgatcccgtgtctcagcctcctgagtagttaggactacaggtgcacaacaccatgcc

SEQ ID NO: 488820 - DNA, 624 bp, Homo sapiens
ttgctaatagcccaggctagtgcagcaaagagcgatatgtgagtggcagcatctatagaacccatgagacagactttatattttggacagagcgctggacagggaggtgtgcttttcagattggttactgacactatctattttgtcagaaacagcctctgtctggttttccggtcagtgatttctaggttaaaattatagttttggttttgtaaggcaggagaaagatcttagactccaatgagtggtgagacacagcaagcccatggsgggcagaacaaggcctcaaggttcagagctcatttggtggtaaagtttgaagaaatggcaggccaggagacatgcccaaggggatttattaaaatcccatttcctggagcaatattttcaggggaggtcatgtcagctgagagggtgagactatgaaccctcccccaggacaggcctcactgttggcgcagagacagtaaggctgggcattggtgggtctcttttaagcagctcttcttatacctcttttctcacattcctgctgtgctcctcttttatcatgaaacacagcatgaggggaatatatgaaatctgaggacctggacttaagaactcagctagaaccattccaaa

SEQ ID NO: 488821 - DNA, 624 bp, Homo sapiens
ttgctaatagcccaggctagtgcagcaaagagcgatatgtgagtggcagcatctatagaacccatgagacagactttatattttggacagagcgctggacagggaggtgtgcttttcagattggttactgacactatctattttgtcagaaacagcctctgtctggttttccggtcagtgatttctaggttaaaattatagttttggttttgtaaggcaggagaaagatcttagactccaatgagtggtgagacacagcaagcccatggcgggcagaacaaggcctcaaggttcagagctcatttggtggtaaagtttgaagaaatggcrggccaggagacatgcccaaggggatttattaaaatcccatttcctggagcaatattttcaggggaggtcatgtcagctgagagggtgagactatgaaccctcccccaggacaggcctcactgttggcgcagagacagtaaggctgggcattggtgggtctcttttaagcagctcttcttatacctcttttctcacattcctgctgtgctcctcttttatcatgaaacacagcatgaggggaatatatgaaatctgaggacctggacttaagaactcagctagaaccattccaaa

SEQ ID NO: 488822 - DNA, 569 bp, Homo sapiens
  misc_feature (1)...(569): n = A,T,C or G
actaaaactagagaaactagattgaagatacaggaaaactgattttgacttatcatgaggaagatctctatamtagtaaaaactacctttatatgaaagagagtggcccgagtaaggagctgtntcattcctggntaggcaaatgcttaacaattatttgatgagatattatgaaataatttaagcctcaaatattgtggtggattattttactattgaattccctttttactctgatagtctatgcttacacgaaatttgaggtgattatataaaattttggggggttttcaggagagatcatgaagaactaggaagtattatttcctctggtaccttttcacaagctgaagtgctctaggatctaatgaacccagtattaaagactcttacagatattttaattgttttaatcagagcctattctaaggtttgtatgctgaagacatacaaacttgagatatctttgatgttagaattatgcttgcaatttgtattagctgttatttcagaataatctggttgaaacctcctagattcaattgtgactgtgcttaaaacatgccatg

SEQ ID NO: 488823 - DNA, 569 bp, Homo sapiens
  misc_feature (1)...(569): n = A,T,C or G
actaaaactagagaaactagattgaagatacaggaaaactgattttgacttatcatgaggaagatctctataatagtaaaaactacctttatatgaaagagagtggcccgagtaaggagctgtntcattcctggntaggcaaatgcttaacaattatttgatgagatattatgaaataatttaagcctcaaatattgtggtggattattttactattgaattccctttttactctgatagtytatgcttacacgaaatttgaggtgattatataaaattttggggggttttcaggagagatcatgaagaactaggaagtattatttcctctggtaccttttcacaagctgaagtgctctaggatctaatgaacccagtattaaagactcttacagatattttaattgttttaatcagagcctattctaaggtttgtatgctgaagacatacaaacttgagatatctttgatgttagaattatgcttgcaatttgtattagctgttatttcagaataatctggttgaaacctcctagattcaattgtgactgtgcttaaaacatgccatg

SEQ ID NO: 488824 - DNA, 657 bp, Homo sapiens
agctgattataaaaccaccttctaaaaaggaccaaaacaagataacaattgtttatggatgacaaaatggtttagggtagccatagttaaggacacaattgacaaggaaatctgttacctctgtggcacacaataatttagcataattataattattactgataatgaatactaagatatatcagacttacaggagtttcacatgattttggaacacataccaacaacatatttatacaaatatagcacaragaaagccaaaccccatttcctgtttggctatgcttcttgtatgatttttggcaccaaataaaccaaattttacttttatattagtgtattattatgtaaaactcaattttttttctcagtatctatttcagtggttataccttgtcttcaagtatctactttggtagactaaacatagtggcattcatgtacctacataaaactgacctttctggtaaaatggaaactgaattccctatcattttgtccctgccatgcccctaccacaagatatgctctttctccgtcgtttctcatcttaaaaatgaggactcccatctattttgttgcttatgccagaaatatggttatagtccttgaaaccatcttcttcatcaattaccactgcaatatatcttaccaagt

SEQ ID NO: 488825 - DNA, 657 bp, Homo sapiens
agctgattataaaaccaccttctaaaaaggaccaaaacaagataacaattgtttatggatgacaaaatggtttagggtagccatagttaaggacacaattgacaaggaaatctgttacctctgtggcacacaataatttagcataattataattattactgataatgaatactaagatatatcagacttacaggagtttcacatgattttggaacacataccaacaacatatttatacaaatatagcacaaagaaagccaaaccccatttcctgtttggctatgcttcttgtatgatttttggcaccaaataaaccaaattttacttttatattagtgtattattatgtaaaactcaattttttttctcagtatctatttcagtggttataccttgtcttcaagtatctactttggtagactaaacatagtggcattcatgtacctacataaaactgacctttctggtaaaatggaaactgaattccctatcattttgtccctgccatgcccctaccacaagatatgctctttctccgtcrtttctcatcttaaaaatgaggactcccatctattttgttgcttatgccagaaatatggttatagtccttgaaaccatcttcttcatcaattaccactgcaatatatcttaccaagt

SEQ ID NO: 488826 - DNA, 499 bp, Homo sapiens
cagatcgcttgagctcaggagtttgagaccagcctggcaacatggtgaaacaccacctctacaaaaaagtacaaaaatcagccaggcatggtggcatgagcacctgtagtcccagccactgagggttgcggmggggagctgagatgggaggatcctgggaggttgaggttacagtgcccatgcactccagcctgggtgacagaatgagaccctgtctcaaaaaaaataataataataaaaagaaggaaagaaaaggaaaaaagaaagtctgctcgaactggttgcgaccagcaaggagatgtgtgggctcacagaagtgaaagtacagggatgcctgcctcaggggctgatgcaggacagaaatataaaacagccactccccatactggagctgcctagctggaaaggggcaggttgagattgctctcaggtggcctgactgcaaaagctgcatgttagccaccactcagacacgtgctagggtctggaggatggaggc

SEQ ID NO: 488827 - DNA, 499 bp, Homo sapiens
cagatcgcttgagctcaggagtttgagaccagcctggcaacatggtgaaacaccacctctacaaaaaagtacaaaaatcagccaggcatggtggcatgagcacctgtagtcccagccactgagggttgcggaggggagctgagatgggaggatcctgggaggttgaggttacagtgcccatgcactccagcctgggtgacagaatgagaccctgtctcaaaaaaaataataataataaaaagaaggaaagaaaaggaaaaaagaaagtctgctcgaactggttgcgaccagcaaggagatgtgtgggctcacagaagtgaaagtacagggatgcctgcctcaggggctgatgcaggacagaaatataaaacagccactccccatactggagctgcctagctggaaaggggcaggttgagattgctctcaggtggcctgactgcaaaagctgcatgttagccaccactcagacacgygctagggtctggaggatggaggc

SEQ ID NO: 488828 - DNA, 440 bp, Homo sapiens
agctgcatatgcctacccttccttctgttaggcatctactcagcaaaggtaaagtgtgtagcactacacatctgttctcttcattaccaggtggcatttccagatcattcctggcatctgggagcctatctcatttttgtacacttctccaagtcttcccctttccctattcttgtcttctaatggatccatcaggttcttsttccaaatttctttgtagcgtgctggcttcagcagcacatataccaaatttccttgtagagaggagttgccttgtgggggagagggggcacaccctagcatttgaactcctttcttattggggggaatctctcattgtgtgactcagtggaagactaagcccagtctcccacttacaggggtgaaagagttctggacactctccactgctgacatctattggtacatgatggaccaag

SEQ ID NO: 488829 - DNA, 451 bp, Homo sapiens
gatggtttggagaaaaggtgtaaactgtcagtgtaaacaagagcagggcatttatgagtaggtgagaatggtgaagaggaaaatagcagggatgaaaaagtttgtgaggtgcagtccaagaaggagggggtgaygccaggaaggagggggtgactgcataaagccttgttgtaaagagtagagtaaggaagaagagacctaatcctgtgaggctggaagggcatattttccttggtctaagaaccatttgtcttgagtggggagggattgataggtggaaacttcagtgggagagtaagtaggagtgactgatgagaaggagaaaaactggctgtgagggacagaaataggaatactggctgcttatttagctgtcttatcagcataattgttaccttgagcagtggggtctgaggtcctttgatggcctttgcagggaatgactccagct

SEQ ID NO: 488830 - DNA, 334 bp, Homo sapiens
ctaatactaatatataacataggaattagtacacttatttaaaaatgtagaaattccagacctcagtttcaatattctgccaaaatttgccccttggtaagtgttgggctggcattttgtgctgccagcaygactcagcatgctttttctctccacaatatcgccacttaattgtgttcttcatagccccgaacttcgtaaatctttcctttattctgatcagttattttgacgcttgaaaggggttacctaatgttgttttgacattcttaatgtgtttgatctttgcagaatatgaaagggatttcaggcaatttagctaccatctaaaatg

SEQ ID NO: 488831 - DNA, 590 bp, Homo sapiens
atgaaagcttcattttctcatgtattataccagtggcttcaccttttagttttttttctctaagttcaaagactattattttggatcttttccctaagaagttctgattccacagaattatgccattgaccctgactctgtcactatcatacactggtgtttcatttgtgaatttcatctatttaacattgacccctaaagccaaaagtagcaatagatctgctccatggaacctctaaagmgtgcttacaactctctctaataaaagcatttctatacttttgttattaggctatggatatgatttccctctatttcataatataattgtcaattatcctaaccaatcaaagggattttagaccagctaaataaaacaatgtgtgcctcaagtgggtcagggttcatggcatcaagacacatgctatctaatccttatcaagggcttactttattctaaacactcttcgaagggttttacgtgaatataaaacatcatttcctcaaaacatcttcttttccttcataacgacccaatatcttggacacaattattatccacattttacatatgagaaaactgtggtatt

SEQ ID NO: 488832 - DNA, 548 bp, Homo sapiens
gattgagaagatcttcctaggttgtaaaactggaaagaggctgggagaaaatttacatctcaaaggagcaagggaaatctacaattgaagggtttctaaactaaatgctctaagaaaagtgatgtcagaggcttgcagtcttatttaacatttagaagggcttagggggctatgaaggccatcttgttcaccattaaagttacttactaagagcctgaggyttggaggtgttacttttgcttgctctagtctcccagctattacatgatggagtagagacgtgaccataattctaatatgttccatagcttgtgattttaccaatacacttcaggcttacaaaagtcctccatgggaggagaatgctggcccatataggagggattgtcagagaatgggtcccaaagctcttctagatacttttggagaaacaaagttctctctaaagttctgttcatttaaaactattgtaagccacatgttctatggctttcaacaactggaatatttcaccaacttaaaaacagatgacattttaaggcaggaag

SEQ ID NO: 488833 - DNA, 455 bp, Homo sapiens
tgtttttatgagactagcttaaacttggtacaaaaccgaacaataactaaatgacaaaggaaaacccacggatcatttaacttttgaataygaatgcaacaatccagcaatatatgacaaaagaaaagatcaaagtgggtttagcccaggaatgcaggaatagtgttactttgaaaaatctggtaatgtatttcacattagcagatcaaagcacggggataaactatgtgatcgctctaagagatacagagaaagcatataataaaattcaacattctttcatggtgactaaaaaaaaaaagtagcaggccagactcagtggatcatgcctgtaatcctagcattttgggaggccaaggtgggcagatggcttgagttcaagagttcaagaccagtctgggcaacatggtgaaaccctgtctctataaaaaatacaaaaaagtggccaggtttgg

SEQ ID NO: 488834 - DNA, 455 bp, Homo sapiens
tgtttttatgagactagcttaaacttggtacaaaaccgaacaataactaaatgacaaaggaaaacccacggatcatttaacttttgaatacgaatgcaacaatccagcaatatatgacaaaagaaaagatcaaagtgggtttagcccaggaatgcaggaatagtgttactttgaaaaatctggtaatgtatttcacattagcagatcaaagcacggggataaactatgtgatcgctctaagagatacagagaaagcatataataaaattcaacattctttcatggtgactaaaaaaaaaaagtagcaggccagactcagtggatcatgcctgtaatcctagcattttgggaggccaaggtgggcagatsgcttgagttcaagagttcaagaccagtctgggcaacatggtgaaaccctgtctctataaaaaatacaaaaaagtggccaggtttgg

SEQ ID NO: 488835 - DNA, 455 bp, Homo sapiens
tgtttttatgagactagcttaaacttggtacaaaaccgaacaataactaaatgacaaaggaaaacccacggatcatttaacttttgaatacgaatgcaacaatccagcaatatatgacaaaagaaaagatcaaagtgggtttagcccaggaatgcaggaatagtgttactttgaaaaatctggtaatgtatttcacattagcagatcaaagcacggggataaactatgtgatcgctctaagagatacagagaaagcatataataaaattcaacattctttcatggtgactaaaaaaaaaaagtagcaggccagactcagtggatcatgcctgtaatcctagcattttgggaggccaaggtgggcagatggcttgarttcaagagttcaagaccagtctgggcaacatggtgaaaccctgtctctataaaaaatacaaaaaagtggccaggtttgg

SEQ ID NO: 488836 - DNA, 625 bp, Homo sapiens
atatctcttctatcttaaaaattaaagtatcctacccaccacgagttaattttttttaacaaaaacatctaaaataaccctcgacaaagccaaagtatattaaaccacaaaatgaaaaagtggtaagtaaaagtctcaccagctaaaaagcacttcgagtaccaacagccttccccggctcgctgttaaccgtcaaaccgtcaaagcatttgtggaggaacctggggcaaagttccgcgccgggttctccagctgtgggttcatcagcttagcccaccactcccacgtaacaccagtttggggaaatgcaaacacgccacatgtgcccacatgtgcatgttttgatcatgtttaaccacttttaaccgccgtaggtacgtaatcagctcccgcggcaaaggtttaagaaaaaaaaaaaaaaagccttgtgcatgcatcttacccccacttaaaccaccaccaccagatgaaccgaggcgaattaaaccattttgaacgttaacgccgctgcacaaagcggtatgaaagggttctctgcctttctgaaacgccgggcaaaagtccctcrgcaagtttcaaaactaatgaccgtacagcgctgcacaaataacaaaagcttaatacc

SEQ ID NO: 488837 - DNA, 557 bp, Homo sapiens
tcgcctcaaaacccaggcggtgggtggcagtgtttcaactgctcagtccagccaaacatcgagagtagcctgcgcactcccagaaaggccacctgcttccgacacgtgcctttgctacccatcaaggcgaggcatgctaaggccctaaagagctcgaccaggcattctgcgggcagaagttccacaagttcctgcacgcgcacatcccccatttcatgttagtggagtatgcccaagttcagttttcctgcttccacaaaggagaaagaacctaccatcactctttcatggggcacgagaataagcacatggtttttactgagcgcctatcrttttgctatctatggtctaacgatacacttgtgaaggaagaattattattaaaatgacccacagagatttaataagttgcccaaaagcttatgttaagtgttgagctggctagagacgagccagatccgtctaaatcccaagggttaaacagtatgaaaaagcacacaggtgcttctgctggttatacccgcctccacgagaaacgctacaggttttcaaggtga

SEQ ID NO: 488838 - DNA, 654 bp, Homo sapiens
ctggtaggtctctttgagtagcagatacaagcatgcaacccacctgttcttttggcctctttagtcaaagtgaccaacacagccatggagttttaatggagcccctggtaacagcaggttttagaagccattcaataagctgcagcacaggcactttctttataacactgaaagcctactagcccgatggaattacaagttttctcaatacccatatgtgataattgaagtttataacaacagaaaattgtcactagtgtgcaacaacctctcagattttagacacgtaagttgcctgaggcagacagccccagatgtaaccctattaaatggtaactccttgcttgctattgagcaatagttaagaatgattcttttatagctggaatgtcatatgtgacaygcaacatgaacttccctttcttacctgacagctcataaaaaccgccggtaaaataagacaggctcaacagaactcagttatcaaatggaatcagtacattcaggatttgtcccagccaggacctcaagggactaataggctccgtgaaaaggtgactagcttatcataagggactgagaaacctgtagaaggtgttgtggctcctcctgtgactatctggggcctaagatttacagacatgaatcatgatg

SEQ ID NO: 488839 - DNA, 618 bp, Homo sapiens
tgttggtgccatgcatcttgtacagcctgcagaactgtgagccaaataaacctcttttctttataagttacccactcttagatatgtcttcatagcaacacaagtagactaaggcatcaagttttaccacttaagattaaggtggtgagtaccaaatctttctattaaacaggtatatatttttccctttataattaataaataatctgtagagtgatactgtgagatcaagtgaatatccttttccgcagcacaattcattatccagctttagaatccattgaggatcctgaatcttttatcctattgacgatttttaaatggtgattttcaggttcctccgtttcttctagcacactttgtagattcttagcaaacttctaaaaatgatttcttctcagtagacgttggactttgttgcttgayctcccatattttcctattttccatttctgtatcttttttgtatgggttttaaagatattttattatttacttttgaatgatttgtttttattccaactttatattttcattttctatgaatacttttttcacttaatatttctttcatattattctattcttgtatcatgtggagtagcttctcatatcctt

SEQ ID NO: 488840 - DNA, 638 bp, Homo sapiens
aaaatacacaacatagaatttaccatctraaccatatataagtgtacagttcagtggcatgaagtacattcacattgttatggtaccgtcaccaccatccagccagagaactcttcttcttgcaaaacagaaacccagtacctatcaaacaataactctgtacccccctttcccccggcctatggcatctaccattctactttctgtctctgaatttgactattctaaatacttcatataagcagaatcatatgttgtttgtgcttttgtgaccctgatttaacttagcataacgtcctcaagattcatccatgttagcatgtattggaatttcctccttttttaaggccgaatgataagtatgtcatatatggataaatattttgtttatcaatttattcatcattggacacttgggctgcttctaccttttggcaattgcaagtgacactgctacaaacatgggtatacaactatctgagtccctgctttcagttttttatatatacatgtggtaatgtctgtttttaatctttgattgtcatagtgttttcgataatgactgaaccattttatcagcatatttttgagcacctactatgaatatcaaaaacagacaaaaataagtctttgttttc

SEQ ID NO: 488841 - DNA, 632 bp, Homo sapiens
gttgaatttaagaggccttctttcatttaatatactyggtgtctctcacctgtatgacctctcttatgtatagaaagggatgctctttgagagaatgctttcccacattcattacattcaaagggtttctcaccagtatgacttctcatatgtataataagtaatgagcactgagaaaaggctttcccacatttattacattcatagggtttctcccctgtgtgacttctcacatgaagagtgagggatgagattcgagagaaggctttaccacattcattacatttgaatggtttctctccagtatgaattttttcatgctcaagaagattttgtctctgactgaaagctttcccacattgattacaatgataaggtttctctccagtatgaattttctcatgttcagtgaggtttgatttctgactaaaggcttttccacatactgtacatgcatagggtttctcacccgtatgaattctctggtgtcgaatgaggtttgacatctgaataaaagctttcccacattcactgcattcataaggtttctctccggtgtgaattttctgatgtgtaatgagattttctttcctgctgaaggcttttccacattccttacattcatagggttt

SEQ ID NO: 488842 - DNA, 520 bp, Homo sapiens
tatgttcaaattctttgagttcttttatgttatcaaaatgcttcttttaaaaataccattctattttaggttaaaaatacatttttttacatctttgaaggactaattagagttttgagaagtttgcttctatgacttatattttctctgttctttccttgattattttggcctttgtatttcatgttagaaactgattagaagctgtgtgtgtgtgtgtgtgtgtgcatatgcacatgcttgtgggggttgagggggtttctctggtggtagttctcactataggataatctggctgggttattttgttgcagaagccctcaacagtcagtatctgtatgtcttctctcttggcttggttggtttccccagaaaggaactcttwtttcttcctggaaagatacggaatataagccagacagtgttttctcagttgacttggtaaaatagtaggagattttccttttcattatgtaggttttcactgaacctccaactgtcagcaagctaactccactgc

SEQ ID NO: 488843 - DNA, 612 bp, Homo sapiens
tttttaaaaatgtattggatatatgtagttttaaaaaatttcattgacaatgagccttgaagctaaaatgaaaaaatacttcagttatcttaagagaatgattttaggaagtaaatattaagatataatttctgttggcaattaacaattctgctgcaaagtacacataattcacttgttccmtttaaataatccattatagctagtcatggaaacagaactttattctgctaagaatctctgaatgcaatgtaactattcttggaatcttgaactaaaacaggggaaaaaataatatcagactgctgaagttgaataacagttactgaaagggactctaatagatttttgggaaccctactaatgctataactgcttttcagttgacaacacagtttttttttctaagcccagagccaattgaatagcaagtcttcctttggatgtatgttcatgtaaaatgctgataataattattacaaatgtaagctacaactatatatcttgtttatgccagttaccatgtctaacattacacatgatcatatgaaatacagcagattacaaggtagctttgtacacttatcattttattaatagcagagcctgcag

SEQ ID NO: 488844 - DNA, 632 bp, Homo sapiens
aagatatccatgttgaggggcctctgtcacgataaatctaagagaaatgtgtaagctgtctctgtcctccactttcaatattttgcttgtgatcatgaaccccaagtggccagtggctagagtgygaagtgtagaggcccccttattcactgcgatttgggggacactgttgtcaacagccaagacctggatcttcatcacttggggtctccttgtttcaaacaccgtatcaggaaaaacatagaagtctgtatgggtgccatcagtcactgtgaaggagaagctatcttcacttgactcagtgccatcatgtttgtagctgattaagttttcattcaagtcttgcttggtaaaaaccatgacaggtctggtattgttgaataggagatggccatgaataggcacctgggtgatagtgaatttcaggagcttgtcaggagtatctctgtcttcgacagtgagctcaaaaggagtaatcagcttgttttcactttcactgacaaccagcttgtggatggtgaccactggctttttattgtccacatcgctaatggagatacggaatgtccgaaagacagggttacgtccatcggtgacttgaaactcaaaactgtccattttcacttcatcat

SEQ ID NO: 488845 - DNA, 561 bp, Homo sapiens
aggctggaatggagaagtaaggttgaagatcaacaggtcagagggagactcagcatcctcggctgccagcatgtctggggtcagggccgtcagtacaaactggtccacctccatcatcatcatggccacgaaactgggcttgggtgcagtgttctcggcccctcctcggatcctcaccagaacctggaagtgctcgcgtttcaaagcagggctgcccacaggagcccctcgtgaacgcagctccaccaccatgggtatccagtccctgtttggtgagcgactggcggctgtgtggcgatagcgcacgcctagttcctggaaagctttgcagtccatcaggagagtctccggggcgcctccctctctggctcctccagggacctgcgggtagtggaggagttctccatagcgaggcagcgcgcccaagccggacaggatgcccacgcggcactcctctgtctcgggctggaaggcgaactccaggctccgcgcgtccagggcattgctggtccccagcagytcttccacgaccagaggcaagttccgagtcacaacctccag

SEQ ID NO: 488846 - DNA, 568 bp, Homo sapiens
ctgttttattttagctaatgcagcatttcaagcaattaaatccatattcctctgtggctatttattttcacgaagtagttctcagtgtattgtcatgaaagaattctttgagacttgcaaagttaaaacagtatgtggaaattcttttttcttctaaaatagccacatctgcttcttcaagttgtcttccctgtgttgatgtctcataaggatgtcaagttgtaatctctaggagttgggttcagtgggaataaaagagatttattcttaagggactatagaataaatattatggtaagtcacaacctagcagaaggaaaaggatctatttcttttgacagcaaaataatccaaagtatataggtaacatggagatcttaactgttagaaaattaaaagttatttcctggttgtaaaattgcacactatatgaataaaagatttgatgtatctgattgttactcccttttcttccttgtggttatatrttgtgtattttattccatcattcaacacatatttattgagctgctactacatgtcagaaatgaagaagatgggtacaact

SEQ ID NO: 488847 - DNA, 531 bp, Homo sapiens
gatggatgaaacacttatccacaagctcagacatccgtacagtcacagtgtgtgtttgggcatgtagataagaactcatgattgaagcttagatttgaaaagcttcatgagagagagaacatagtaatgactatcatttaagaaacactatatgtccaacattgttccagaatttcatgcmcattaacaatctgcaacaatcctgtaaggtagatctgacaattaagctcctttacaaggaggcttaaggagactaccttgtcaaagacacaaagcaatgcagtagtgaagctgggattgaaactcagagctggtacacaccacattgtacaacacactgtggaggtatcatagcccctactgcagtatcgtgcaaactggtaacttacaatgggcattcagagctgggaagtttacttccacttggggatcagaggaacatgaaaacctattcaatatgatcacaaaacagaaagggactgtggcagaacttggtagacactagggaagctgaaccactactagtagcag

SEQ ID NO: 488848 - DNA, 531 bp, Homo sapiens
gatggatgaaacacttatccacaagctcagacatccgtacagtcacagtgtgtgtttgggcatgtagataagaactcatgattgaagcttagatttgaaaagcttcatgagagagagaacatagtaatgactatcatttaagaaacactatatgtccaacattgttccagaatttcatgcacattaacaatctgcaacaatcctgtaaggtagatctgacaattaagctcctttacaaggaggcttaaggagactacctygtcaaagacacaaagcaatgcagtagtgaagctgggattgaaactcagagctggtacacaccacattgtacaacacactgtggaggtatcatagcccctactgcagtatcgtgcaaactggtaacttacaatgggcattcagagctgggaagtttacttccacttggggatcagaggaacatgaaaacctattcaatatgatcacaaaacagaaagggactgtggcagaacttggtagacactagggaagctgaaccactactagtagcag

SEQ ID NO: 488849 - DNA, 531 bp, Homo sapiens
gatggatgaaacacttatccacaagctcagacatccgtacagtcacagtgtgtgtttgggcatgtagataagaactcatgattgaagcttagatttgaaaagcttcatgagagagagaacatagtaatgactatcatttaagaaacactatatgtccaacattgttccagaatttcatgcacattaacaatctgcaacaatcctgtaaggtagatctgacaattaagctcctttacaaggaggcttaaggagactaccttgtcaaagacacaaagcaatgcagtagtgaagctgggattgaaactcagagctggtacacaccacattgtacaacacactgtggaggtatcatagcccctactgcagtatcgtgcaaactgktaacttacaatgggcattcagagctgggaagtttacttccacttggggatcagaggaacatgaaaacctattcaatatgatcacaaaacagaaagggactgtggcagaacttggtagacactagggaagctgaaccactactagtagcag

SEQ ID NO: 488850 - DNA, 489 bp, Homo sapiens
cccatttcaaaaccttagaccagcctaacaaagaattcctggatttccaaggtgctcaggagatgcaagatgaagaaatgagctagtgaggctccttgacaataacacagttttccccagatggaaagagtgtctaagtccagatgactaatgaagagtaaagatcttggctaatcaccagaggacttttttctcccttcagtggccctggttgctgtggagattttagagttttccacacagcccacgmctgacctctcatctccccacggtgctcagacggcccagggaaatcctggaggggacctgccaagggctgtggccgaggaagcagatctccctccttatcggcggagtaggtcaacttccccccattctttccaagaggaaaacgtaccaggcagccaggctcatcagagctgcctgacaaaggccaactggtgaagaggtgaagcagaaatggcccagcggcctgagtatcagctaccc

SEQ ID NO: 488851 - DNA, 489 bp, Homo sapiens
cccatttcaaaaccttagaccagcctaacaaagaattcctggatttccaaggtgctcaggagatgcaagatgaagaaatgagctagtgaggctccttgacaataacacagttttccccagatggaaagagtgtctaagtccagatgactaatgaagagtaaagatcttggctaatcaccagaggacttttttctcccttcagtggccctggttgctgtggagattttagagttttccacacagcccacgcctgacctctcatctccccacggtgctcagacggcccagggaaatcctggaggggacctgccaagggctgtggccgaggaagcagatctccctccttatcggcggagtaggtcaacttccccccattctttccaagaggaaaacgtaccaggcagccaggctcatcagagctgcctgacaaaggccaactggtgaagaggtgaagcagaaatggcccagcrgcctgagtatcagctaccc

SEQ ID NO: 488852 - DNA, 511 bp, Homo sapiens
ctgcctgctccctgttgctggcacaccgccccctttcccgggacccgcaattccccctcgaccaccagggggcgctgcgtgctcactaggccacagctgcaacccaagttgcggggggcggggggcggggcactgtcccctcaactccaggctttcaaacagggacagagatctcctttctgagcggtccctgctctttctgtttccagaacagttatctgggctgaagctggcctttgtggtgacaggctgagccaataggctggaytccggtggggctgaccctttggggttagggccgggctaagcataggtggcctctacattatgtgatgggagtggtcctggaaagggtcctcccccgcgccctgttccagggtcgctgtgtccagaaccccaccattcttccatcaggttcacgattgcccttttcaggaccccaaatgggaggaacaggggagctgggacaagatagctgccctggccatagcagagctgaccctgacatccc

SEQ ID NO: 488853 - DNA, 523 bp, Homo sapiens
tgttctcattcataggtgcaaactgaacaatgaggacgcatggacacaggaaggggaacatcacacaccagggcctgttgtggggtggggggaaggggaagggatagcattaggggatatacctaatgttaaatgacgagttaatgggtgcagcacaccaacatggcatatgtatacatatgtaacaaacctgcatgttgtgcacatgtaccctaaaacttaaagtataattaaaaaaaaaaaaagaaaaatgtgttattcctttgtctcgaaagtcccctgcttttcagctttygctttggttgtctcttgtcagctctttaatgctattgttcccttgggtttcatctggactctttttccctgggcaatctcatccacaccatctgggaacattgcctttggctggacaggtaaatctttgtctctagcagacttctctcctgtgatctccagagccaggaacccactagacttccttaaaattcattcagccagcagactttctggcccagagcagcag

SEQ ID NO: 488854 - DNA, 551 bp, Homo sapiens
agcgttttgttgagcatgacagcctgcagcaggaatatatgtgtgyctatttgtgtggacaaaaatatttacacttagggtttggagctattcaagaggaaatgtcacagaagcagctaaaccaaggactgagcaccctctggattctgaatctcaagatgggggcagggctgtgcttgaaggccctgctgagtcatctgttagggccttggttcaataaagcactgagcaagttgagaaaccagcattgtgtcctgtggggccctgggcaagaccccagactagccaatggcgggattggggtaggagacagggtcagcaaaggcaggaagagttgctggagaggtgccctcatgctcttgtcccttcttctcccaatgtcttccatctcttgggtgacactcctgccaggactttggattcaacccctccttcccctcacctggcctcccaagcacttctaggcttgcccttcctaaactcggcaccaaaaggcaagagtgacctcatcactcaaggatcatcagtggctccccattgtcctcaggata

SEQ ID NO: 488855 - DNA, 567 bp, Homo sapiens
acccgcctcagcctcccaaagtgatgggattacaggcataagccaccgcgcccggcccatctcctttaatttttatcataaatctgtgagacaggaaccatctattgttatcttcgtcatagactgagaaaacagagccaggcaggaaagggataaatcccacctccccagcatcctccagcacggggtaaatcccggggcacttgctgccaaccctgaagctgcatgggagctcctgttccccaaccctttgtgtctccctttctctgcccagcctggcctcaaggacaagccccttcgaagcagtaggaggtkgagggaaccatttaacgaagtccttggggctcagcagtgtctctccacttgccctaccctggaggcccaggagcagcctggttttgcatcaggagcaagggttccgtttctgtgggctggagaggggctggtttctgtcaggagcaacagatgcgctcagccacaagggtgtgtccccagacaactcacacttcacttggaggtgaatctcgctctgagccctgtgattggccacggagagctggcagcgca

SEQ ID NO: 488856 - DNA, 512 bp, Homo sapiens
taagaaagaaattatcttctcagcatgttttttttttttaactcaaatttatttctttcactgaggagctctcccagaagtgaagatcttgaaaggaagcagagctcaacggcaaactcacaaggctcacagggcgcctgcgtttccctctcactcctttcaagtggaatgtagttttcaagaaatgggsaaaaaatacgaatgctggagaagccttttataaacaagccatttaaacttcagagacaattagccccctgcccattttaaacttgtgggtttcatagcctcggctttcttgataatttactttggaaattcccaggcctgttaggctggcctgggtgagttccgccttcacatgtgtggctgcttggagacgtccagctgccatggtcagtttgacgaagtacacataagcttttggcaccacatatttgcaatatcatggacggtcaaggaggcgcctgttataaaaatacacagtgaaacacaactgaaggactgctctt

SEQ ID NO: 488857 - DNA, 444 bp, Homo sapiens
tgataacaaattctcatgttttgtttgtctaaaaatatcaatactttgttcttgaaatatatttttgttgcatttggagttataggttgacacttattttcttttaatacttttaagatagcaatcctttgtttcttggtwtccactgcttcttttgagatctcagctcttagtctgtttcaccttcaaaagcaatctgtcttttttttttttcttttgcttcttgggtgtggatttctttttctttatcattcttaaattttttgtagatccttgaatttttaccttgatgccttaacatcagttcttaaaagttgtctcaaaggttacctctgctccattgtctttcttctcctccaggaacacccactgcaatgtattatgcctattcaatgaatcctctatatctcttacccttaccactgtactttccatccatttttc

SEQ ID NO: 488858 - DNA, 444 bp, Homo sapiens
tgataacaaattctcatgttttgtttgtctaaaaatatcaatactttgttcttgaaatatatttttgttgcatttggagttataggttgacacttattttcttttaatacttttaagatagcaatcctttgtttcttggtttccactgcttcttttgagatctcagctcttagtctgtttcaccttcaaaagcaatctgtcttttttttttttcttttgcttcttgggtgtggatttctttttctttatcattcttaaattttttgtagatccktgaatttttaccttgatgccttaacatcagttcttaaaagttgtctcaaaggttacctctgctccattgtctttcttctcctccaggaacacccactgcaatgtattatgcctattcaatgaatcctctatatctcttacccttaccactgtactttccatccatttttc

SEQ ID NO: 488859 - DNA, 623 bp, Homo sapiens
cacctatctgatctgcatgccttataactccatataagtgctataaagtttcaagtttctggtctattaagataaacccttatatctcaaattggaacctcagccttgagatatggcttttcatgttagcagctatatccatgcattccatcccttatgcaaatttgtcacaaagctttgcgaggcttggtgcttctgatgttgccgctttccttagctgcaggcagtcatcacgctctgttaagatggtggcaaagcagtgaagtttctgtgactcccctgaatrgcaaccagttccatttttcctctaaactcaggaggcatctggttcatgacctgattcctcacaccttaatcgtgaagatggtgctgatcacagtagcacacacccatagtcccagccaccgaggagactgagatgggagaatcccttgaggccaggaatttgaggctgtagtgcactatgagcctctgaatagccactgcactccaacctgggcaacataacaagactcttctcttaaaaaagagaaaaaaagaagatggtaagttgggcttttttatcaaacaaaacttgtgttcattgggctaacaaatacatagagtgtctactactagccaga

SEQ ID NO: 488860 - DNA, 623 bp, Homo sapiens
cacctatctgatctgcatgccttataactccatataagtgctataaagtttcaagtttctggtctattaagataaacccttatatctcaaattggaacctcagccttgagatatggcttttcatgttagcagctatatccatgcattccatcccttatgcaaatttgtcacaaagctttgcgaggcttggtgcttctgatgttgccgctttccttagctgcaggcagtcatcacgctctgttaagatggtggcaaagcagtgaagtttctgtgactcccctgaatagcaaccagttccatttttcytctaaactcaggaggcatctggttcatgacctgattcctcacaccttaatcgtgaagatggtgctgatcacagtagcacacacccatagtcccagccaccgaggagactgagatgggagaatcccttgaggccaggaatttgaggctgtagtgcactatgagcctctgaatagccactgcactccaacctgggcaacataacaagactcttctcttaaaaaagagaaaaaaagaagatggtaagttgggcttttttatcaaacaaaacttgtgttcattgggctaacaaatacatagagtgtctactactagccaga

SEQ ID NO: 488861 - DNA, 557 bp, Homo sapiens
tcaagaggcaagataaggcatttgcaattggcagtgtttcaaaggactccagatttctccaaagaacctagatttcccaggtatgtttcctcacatgtcctttcatctggcatcatcggtggtagaaattccatgtcaccctggcactgatttccttttgactttactattacacactcacattcaggactgcatgtaaagcaatgggttattatgaaaaatatagggcccaaytctttcaagagttccttgaagaatatgaattagaattaagaaggtggagaagctagcagaataggaaatggacaatattggcaaaagaaatttgtaatgcacagtataatacggcaggagattggaaagcagagagatcagattagaagcattagaaagaagattagaaagtgagctttgcctcagacagacttgtgttgtgttcctggttctgtcatctattactatctatgcatctttggcaagtaaatcttcttcagcctcagtgtctcatctgtaaaatagggatattaatacctacatcattgtgagaacaaaatacc

SEQ ID NO: 488862 - DNA, 633 bp, Homo sapiens
gaattggcctaggctttatgggctcatacctgactgaagtaggttgggtgaaaatctatacccatgaaggggttgttggcttcctagactctagcaagtggggatttgggcaagataagagtagaatcaaaagatgatcaccacctttactttctatccttctatccaaatagacggtgaaaggggttcaggaatgatccctgattccatgggtggtcaagtggtctttctcctcctcactggcttgagtgcatccttgagggctgcaatgatcccaactacacagcttctctctcagctctggaagcagcccttgctgggatggggaattaagattcatgatccattgaagaagcagggaggcttggaaagagtgcaccccagaatccttccccaggctcagcattcttcccacccactytgggcaagggagttttgatccacccccggagatgagaaaggctcccactcacttgtttccaagggtgggggtggggtgggcaggggagggaatcccacactgggactgtgactaagactaaatacagatcagggctcaatctgtgtctccagggtgagtacacacagtgctgagtgccaagatggtgcagaaagagcactgtgggcccacag

SEQ ID NO: 488863 - DNA, 441 bp, Homo sapiens
ttgcggtctggtttctccagtggatccctggaggggccaattaacacaacccagaaatgggtgggagttaaccatgaaayagacctggcttataagtacagaaagaagccaccagctaaatctttttctctctacccccaaccccaaagaagtgttccaaggcatggttcttctgttagtcctgtttataaaactttccatgtgcccaagcaacaggctgcatttttattttatttctttttgagacagggtctcactatgttgcccaggctggaatgcagtggtgtgatcatggctcactgcagcctcaaactcctgggatcaaatgatcctcccacctcagcctccagcctccaaagtagctgggactacaggcaagcaccaccatgccctgctaattttttttattattattttagagatggagatctcactatgttg

SEQ ID NO: 488864 - DNA, 582 bp, Homo sapiens
tggtaacggtgtgcatttggtttcttctttttttttaacctctcctacatcagcttataaacctggaattctgactcctctagggtggggcggtactaagaggctgaggagtaggaaagctcttctttggtacttttgtaaaatggctcttcactctctgagcctagtaagtgtttcaagcattcttaatcttttgattttttcaggcaagaatcagacgccaatttactgcatcctgccctctccccattccccatacctgcaatcctttgaaacctctctccctcttaacttgagatgaaggggaaataccccacaccacgcaaactattctctccaaataactcttcctctcaaatcctatcccttctgcaccccctgacccttaaaccccttgtggttttaaggggttcamgagaaattcaacccattcaaagacacttaatgaaatatttgaacagtggcctcttcatattttctcttcatattacagccaaaagggagacagtcctatttgtatatttggttaaagtatttttccactatctgctctcttatcttggccttccttttccttcattc

SEQ ID NO: 488865 - DNA, 530 bp, Homo sapiens
tcttagagggagagaatggctgggaactggggaagtgaggcttcctcagagactaagcagccacgaggctgcagctcccctggaacaggcagacttgcacaaactccagtgaattagaagtgtaaattgaggagttcgacttggcttgcacagtacaataaagatctgcaaacactcagctccgtattgaacytgaggcagggtgattaattcattattcgcttcccagcttggaagcaaaagcttgtatacccaggggccagcatggatcagcagagtcataaatcacgccacttacaagtctagcaatgagaaaatccactggctggaggggggatgctcttcaggcagcaacagcggccagaggaccggccagtcaaggcgggccagtctgctctctggagacagaccgattggccaggcatttcgccttccagccaagacggccagcctctcggccacccggcttggcgtttcctggccagaccacaaggaaataaactccactccacccaagaggaatgctcctg

SEQ ID NO: 488866 - DNA, 390 bp, Homo sapiens
gccccagggtaaagccttggcagatgccaagtgggagaaggaggtggtgttccctcggggagagggggaaaygctacacagagcaacatgggattcatctgcagaagagaggtcaattgcttaccctactggaaccaaaaagtctcttggcaaagggagttctgagctgataaacacaggctcagtcttccagaatccacactgcaggctgagaactggaaagacagtagggagacttattgctttctgggtgttttgcccagaatctcccttctggtaaagcactagggtgggtagtaggactcactctttgatctttggcaagtccctcctactctctgggcctcggtttcccttctatataatgaaggagttgaatcagctcaccct

SEQ ID NO: 488867 - DNA, 526 bp, Homo sapiens
tccctccattttaaaaattccatcatccagccaggcacggtggctcacacctgtaatcctagcactttgggaggccgaggcgggaggattacctgaggtcaggagttcgagacaagcctggccaacatggcaaaaccctgtctctactaaaaatacaaaaattagctgggcatggtggcacacacctgtagtcccagctactcaggtggctgaggcaggagaatctcttgaacctaggagatggaggttgcagtgagctgagattgagccattgcactccagcctggggaacaagagcgaaactatctcaaaaaaaaaaaaaaaaaagcaaaacaaaaacaaaaaaaaamccattaaattaaaaataaataaataaataaacaaaaattccatcatccattcaagattcctgctctgtccctacctctgccaaaagtctgttcagactattccagcacatactggtctcttcatccttttgtttcttttctgactccatcagtaccactatttcagttgtacttga

SEQ ID NO: 488868 - DNA, 472 bp, Homo sapiens
ccctacatcatctgctaccctgaaggatctggaggtaagaggctctgggcagaggtgcagtgaccctgcaggccagccctccaacctcctcctccaggtgsgacggggtgcccctctgccagctgagacagtccacacacaccccagccctaatgattgctctctctacctctccccccactcctcctccacctcctcctctctgcatgcgcctcagagcccgtgccaagaactagcagtagtcccagactcgaggtccgtaaaagtcagtcaactgaagaacaccatcaaatctttggtaagagtccactggggtcccctgattccacgctgccaatcctgggctctagtttccccttggggccctgaagaaaggggacggcggcccctggtgccaagggcgaatagggagctggggcgcccaggcctcacctggagggaccccggagcatgcagcatggctctttttttg

SEQ ID NO: 488869 - DNA, 589 bp, Homo sapiens
cgtttctattaagtattcatttttatacagaccaaaagttctttagaaaatgtcttcatrtataatataaatttgatttttagatgtgagaaaagcaacaatcataatcgttgcctaaatccacaaaataagtagatattctataatatgtatttcagtaatcacaatgtattggattcaggcagagatgagagacactctgattttagcagaaaaagactgtgttaaattacctctttgccttttctcactctgttcctaggatagcaatataataaatagtaactttagaactgggatacactgagaaaatgtcctaatttaaatctcaatagatgattacacaggtagtgtttacacacacacacacacacacacacacacacacaatgacaggagtttttaaagatattagtatctcggaatttttgaattctgaaaactgtccaagcttttatcattaaatcacttgttatgaaacccattttagaaacacgctttcctatttttaatagcctatgatagtcatacagaatgagttaatcaaaattgattggtcaattgctaattgcaaattctttgaccgtag

SEQ ID NO: 488870 - DNA, 589 bp, Homo sapiens
cgtttctattaagtattcatttttatacagaccaaaagttctttagaaaatgtcttcatgtataatataaatttgatttttagatgtgagaaaagcaacaatcataatcgttgcctaaatccacaaaataagtagatattctataatatgtatttcagtaatcacaatgtattggattcaggcagagatgagagacactctgattttagcagaaaaagactgtgttaaattacctctttgccttttctcactctgttcctaggatagcaatataataaatagtaactttagaackgggatacactgagaaaatgtcctaatttaaatctcaatagatgattacacaggtagtgtttacacacacacacacacacacacacacacacacaatgacaggagtttttaaagatattagtatctcggaatttttgaattctgaaaactgtccaagcttttatcattaaatcacttgttatgaaacccattttagaaacacgctttcctatttttaatagcctatgatagtcatacagaatgagttaatcaaaattgattggtcaattgctaattgcaaattctttgaccgtag

SEQ ID NO: 488871 - DNA, 589 bp, Homo sapiens
cgtttctattaagtattcatttttatacagaccaaaagttctttagaaaatgtcttcatgtataatataaatttgatttttagatgtgagaaaagcaacaatcataatcgttgcctaaatccacaaaataagtagatattctataatatgtatttcagtaatcacaatgtattggattcaggcagagatgagagacactctgattttagcagaaaaagactgtgttaaattacctctttgccttttctcactctgttcctaggatagcaatataataaatagtaactttagaactgggatacactgagaaaatgtyctaatttaaatctcaatagatgattacacaggtagtgtttacacacacacacacacacacacacacacacacaatgacaggagtttttaaagatattagtatctcggaatttttgaattctgaaaactgtccaagcttttatcattaaatcacttgttatgaaacccattttagaaacacgctttcctatttttaatagcctatgatagtcatacagaatgagttaatcaaaattgattggtcaattgctaattgcaaattctttgaccgtag

SEQ ID NO: 488872 - DNA, 589 bp, Homo sapiens
cgtttctattaagtattcatttttatacagaccaaaagttctttagaaaatgtcttcatgtataatataaatttgatttttagatgtgagaaaagcaacaatcataatcgttgcctaaatccacaaaataagtagatattctataatatgtatttcagtaatcacaatgtattggattcaggcagagatgagagacactctgattttagcagaaaaagactgtgttaaattacctctttgccttttctcactctgttcctaggatagcaatataataaatagtaactttagaactgggatacactgagaaaatgtcctaatttaaatctcaatagatgattacacaggtagtgtttacacacacacacacacacacacacacacacamaatgacaggagtttttaaagatattagtatctcggaatttttgaattctgaaaactgtccaagcttttatcattaaatcacttgttatgaaacccattttagaaacacgctttcctatttttaatagcctatgatagtcatacagaatgagttaatcaaaattgattggtcaattgctaattgcaaattctttgaccgtag

SEQ ID NO: 488873 - DNA, 581 bp, Homo sapiens
agctgctccatggaatctgcccaagacttttgctgcgttcagttgaacacacaggaggaagctcttcaggccccagccagccgaccgcacaaagatgcgttctcatacccaggggagctggtctcgccactcgacccgcgccctggatagctatagttagtgtgagcgccaccacccgccgcggcgtgatcaagagcgctccgrgccaagcagtctcccgtgggagtgcgggagtgcgtgcgtgtggcggaaatcccgccttccggcgcccgctgttggccttggccgcagccagggcgctccaagtaggaagataagcgggattgctggaagcgggagagtcgggaggagcggcgaagggctcctcttccccattggctgcgcccacggagcagcctcgttgcgattggccgtacgcggggggcggcagtcccgcgtcggcccgcccctcgggccgcgagaggcgccgggatcgcgggcgccggctgagccagcggctcttgggaggctgcgtccgcgcgccggcgaggcgaggcggccgggccctgcgcgtcaggtcctggcctggggcacctgggcgg

SEQ ID NO: 488874 - DNA, 581 bp, Homo sapiens
agctgctccatggaatctgcccaagacttttgctgcgttcagttgaacacacaggaggaagctcttcaggccccagccagccgaccgcacaaagatgcgttctcatacccaggggagctggtctcgccactcgacccgcgccctggatagctatagttagtgtgagcgccaccacccgccgcggcgtgatcaagagcgctccgagccaascagtctcccgtgggagtgcgggagtgcgtgcgtgtggcggaaatcccgccttccggcgcccgctgttggccttggccgcagccagggcgctccaagtaggaagataagcgggattgctggaagcgggagagtcgggaggagcggcgaagggctcctcttccccattggctgcgcccacggagcagcctcgttgcgattggccgtacgcggggggcggcagtcccgcgtcggcccgcccctcgggccgcgagaggcgccgggatcgcgggcgccggctgagccagcggctcttgggaggctgcgtccgcgcgccggcgaggcgaggcggccgggccctgcgcgtcaggtcctggcctggggcacctgggcgg

SEQ ID NO: 488875 - DNA, 581 bp, Homo sapiens
agctgctccatggaatctgcccaagacttttgctgcgttcagttgaacacacaggaggaagctcttcaggccccagccagccgaccgcacaaagatgcgttctcatacccaggggagctggtctcgccactcgacccgcgccctggatagctatagttagtgtgagcgccaccacccgccgcggcgtgatcaagagcgctccgagccaagcagtctcccgtgggagtgcgggagtgcgtgcgtgyggcggaaatcccgccttccggcgcccgctgttggccttggccgcagccagggcgctccaagtaggaagataagcgggattgctggaagcgggagagtcgggaggagcggcgaagggctcctcttccccattggctgcgcccacggagcagcctcgttgcgattggccgtacgcggggggcggcagtcccgcgtcggcccgcccctcgggccgcgagaggcgccgggatcgcgggcgccggctgagccagcggctcttgggaggctgcgtccgcgcgccggcgaggcgaggcggccgggccctgcgcgtcaggtcctggcctggggcacctgggcgg

SEQ ID NO: 488876 - DNA, 581 bp, Homo sapiens
agctgctccatggaatctgcccaagacttttgctgcgttcagttgaacacacaggaggaagctcttcaggccccagccagccgaccgcacaaagatgcgttctcatacccaggggagctggtctcgccactcgacccgcgccctggatagctatagttagtgtgagcgccaccacccgccgcggcgtgatcaagagcgctccgagccaagcagtctcccgtgggagtgcgggagtgcgtgcgtgtggcggaaatcccgccttccggcgcccgctgttggccttggccgcagccagggcgctccaagtaggaagataagcgggattgctggaagcgggagagtcgggaggagcggcgaagggctcctcttccccattggctgcgcccacggagcagcctcgttgcgattggccgtacgcggggggcggcagtcccgcgtcggcccgcccctcgggccgcgagaggcgccgggatcgcgggcgccggctgagccagcggctcttgggaggctgcgtccgcgcgccggcgrggcgaggcggccgggccctgcgcgtcaggtcctggcctggggcacctgggcgg

SEQ ID NO: 488877 - DNA, 601 bp, Homo sapiens
ctgccacctggatgtcaccactcagacaatcaaacaagacacatcctcagtggaggccctgagcgcgatctggcctccccctcatggctctgggccgaggttcctgcaggacaaagcagcagcaggacagatggccgagcagacagagctcagagctggccatggcgggtgtgactctgccagtgccctgggcagtagagacaggagggggccgaggaagctgcatgaagtggtgcttggtttctgcgcccacactgccaggaggcccccagagccagggtggtgccaggggacccagctcccaggcccacagaagggactgcctgggatatcgccaaggcatcgaggaccccacctccccagggcctctgacttctcagagctgcgcctggcccctgcaggagcggggcagaccagtggggggcagggccaggacgagacagccccagcgggtggcaagcaggaaaggcctccagaggcccacgcgggtcttctgatccagagcagcactggcccgggcggtgggcggtgctcaaacaccagtgaagggcccaggaaagcgcagggctggggasctggatgtttaggagggctggatctg

SEQ ID NO: 488878 - DNA, 534 bp, Homo sapiens
attcctctggacattgactgcttagggcttgggcatgagctgcctcttcacctgagcctgagccacaggtaccctctgcacctaccacgctgatgcactgggccagggagagcgccgtctggatggagatgagctgtgaggagctggtggctgggcggatcaggttgttgtaacaggttttgttcagaaggtcgtccatcagtttctgctcggcatgggccatgcggcagtcccctgggtaaacacacagacatgctgggcccttgtgcasctgtctcccactgcagctgacagctatgaagcaggagctgagagggccagggagcacagacaccctgagagctggctgaagcagtgaaggtgctggccggcctggctttccctggggacttcaaatgacattcacgacagagctcagctacctcctccccatgccatacctcttcctcctcctcctccctccgtcaatgaacagcatcccacgctctacacatctgatacaaaactgggtgtctcttcctgactcctcccttg

SEQ ID NO: 488879 - DNA, 550 bp, Homo sapiens
ctcggcatgggccatgcggcagtcccctgggtaaacacacagacatgctgggcccttgtgcagctgtctcccactgcagctgacagctatgaagcaggagctgagagggccagggagcacagacaccctgagagctggctgaagcagtgaaggtgctggccggcctggctttccctggggacttcaaatgacattcacgacagagctcagctacctcctccccatgccatacctcttcctcctcctcctccctccgtcaatgaacagcatcccacgctctacacatctgatacaaaactgggtgtctcttcctgactcctcccttggttcacccaagtggccaccaagtcctgtctgtcctcccatctccacggctacagccatgtccctgcctccccygccctgcccaccttctgttctctccacctgcactctgcccctgccatccatgtgccatacagtggcagactgatctttctacagcaaactggacgagggcccttccctacccacagctctcagagctggaggtggagttgaagctcatgtt

SEQ ID NO: 488880 - DNA, 550 bp, Homo sapiens
ctcggcatgggccatgcggcagtcccctgggtaaacacacagacatgctgggcccttgtgcagctgtctcccactgcagctgacagctatgaagcaggagctgagagggccagggagcacagacaccctgagagctggctgaagcagtgaaggtgctggccggcctggctttccctggggacttcaaatgacattcacgacagagctcagctacctcctccccatgccatacctcttcctcctcctcctccctccgtcaatgaacagcatcccacgctctacacatctgatacaaaactgggtgtctcttcctgactcctcccttggttcacccaagtggccaccaagtcctgtctgtcctcccatctccacggctacagccatgtccctgcctcccccgccctgcccaccttctrttctctccacctgcactctgcccctgccatccatgtgccatacagtggcagactgatctttctacagcaaactggacgagggcccttccctacccacagctctcagagctggaggtggagttgaagctcatgtt

SEQ ID NO: 488881 - DNA, 486 bp, Homo sapiens
gctggaccccacatctctgaagtcccactgggttggtgygagcgggctcccgagtacagggctgctctgcaggctgtggggctcatgcgccagctctgagcccacctgatgtgctcacgttgctcacctttgggcctgtcctgcctctcaggcattcggctgaccctgagggcctctccctcatcttgaccaccagctacgggctctgatttagaggttcccagaaccttagaccatttggccggccccccatttctcacctgaggaaactgagaccagagagggatagcaactttctcaaggacccccagcaattcagaggcagaaccaagtctaggagcctcttctcgatagaggttccccctgtcccctgagccttcgttagtgcctcattaacttccctgtaaggaaactgccccgctgaggctggaaatggtgctgtccagagtggtgtgtgccagtgactgtgcttgtgtttgtacttgt

SEQ ID NO: 488882 - DNA, 486 bp, Homo sapiens
gctggaccccacatctctgaagtcccactgggttggtgtgagcgggctcccgagtacagggctgctctgcaggctgtggggctcatgcgccagctctgagcccacctgatgtgctcacgttgctcacctttgggcctgtcctgcctctcaggcattcggctgaccctgagggcctctccctcatcttgaccaccagctacgggctctgatttagaggttcccagaaccttagaccatttggccggccccccatttctcacctgaggaaactgagaccagagagggatagcaactttctcaaggacccccagcaattcagaggcagaaccargtctaggagcctcttctcgatagaggttccccctgtcccctgagccttcgttagtgcctcattaacttccctgtaaggaaactgccccgctgaggctggaaatggtgctgtccagagtggtgtgtgccagtgactgtgcttgtgtttgtacttgt

SEQ ID NO: 488883 - DNA, 486 bp, Homo sapiens
ttaattttctaagatagtattttttgtctttaaaacaatttctgcatgttttgttttttttcactttaaattttatgttttctcagtttttgttttatcacatttgctatatttttctgtatcatgggttatttgttaaagaatgaacttgtgtatgtttataaattgttactgtttttgtttataatttattgccttctaacttaatatgtaattagcattccttttaattttgcttgtatgctttgcygtaccattttgaaattcttgagttaaatgcttaactattttttatcaagtttaaatattaaattaaatatgtcccatcagtttagtcattttaatattctcactcatcagacattttttgggaacaccatatgccttttcatgcagtcagtttcaagaaaatgaaaattactttttatatgtttatactcaaagcttggctagagataagtctccccttccttaagttggggagaa

SEQ ID NO: 488884 - DNA, 368 bp, Homo sapiens
gaaatttgtgctgtgacaagaggaaccagaaatggggtggcaatgcttaggggactgggtcataagatcaaaggccagtcttgcagtaatgacagttactggatggaccgtgacatcactacattccactcttcctggtgagggggagggaccacatcagcatgatgtccgagtcaccgctccatgataggggarggaaaaacagagctgggacccaggtccttggagacaccagtgcacacagcctagggaggtccaccttgaggcagcaggagggaagggaagagtcagcagcagggagccccaggattcaccagcctaaagtcacccagggatgactggtgagggtggggtctggggctgtggga

SEQ ID NO: 488885 - DNA, 368 bp, Homo sapiens
gaaatttgtgctgtgacaagaggaaccagaaatggggtggcaatgcttaggggactgggtcataagatcaaaggccagtcttgcagtaatgacagttactggatggaccgtgacatcactacattccactcttcctggtgagggggagggaccacatcagcatgatgtccgagtcaccgctccatgataggggagggaaaaacagagctgggacccaggtccttggagacrccagtgcacacagcctagggaggtccaccttgaggcagcaggagggaagggaagagtcagcagcagggagccccaggattcaccagcctaaagtcacccagggatgactggtgagggtggggtctggggctgtggga

SEQ ID NO: 488886 - DNA, 519 bp, Homo sapiens
acccagggatgactggtgagggtggggtctggggctgtgggacccaggtccttggagatgtgagcccaaaaagccctgggaggtcaagcttggggtggcaggagatgrgggcccagtaaaggagcggggagccccaggattcacctgcccaaagtcaccctggggtgattggtgagggcagagactgggctgcttgctgaaggggtggggctgactgacaaaactttggtgggggtagcccagaggcaccggtgtgggggtcccagtccggtgaacctcgggagtggtatggactctggcagcagtcttgtcgttggagaggatctatggctgggttgggggtccgtgacctggtgtgtttttacctttctcttggctgctgccaatttactttgtcgagtttcttctgccatcgcagggtggggagggaggcgggcttggggccacatcagcaaaatcccaccaagcactgatcaacacctccagtcacctaccaggtagctgtgcgactgagccaga

SEQ ID NO: 488887 - DNA, 596 bp, Homo sapiens
ttggagttacctgagaaattatgacacccttttccaaacaggccaagctgctttgcaaacacgatttccataattttaacaatggtgaggccaggcacggtggctcatacctgtaattccttccagcactttgggaagcctaggcaggaggatcacttaagccaggagttcaataccagcctgggcaacatggcaaaaactcatctctacaaaaaatacamatattagccaggcgtggtggcacacacctatagtctcagctactcagaggttgaggtgggaaaattgcttcagctcaggagctcgaggctgcagtgaacggtgatcacgccactgcactccagcctgggtgacagagcaagaccctgtctcaaaaacaaacaaaacaaaacacaaaccaagggtgagagagatgttagatgtttttgtccttgttacagatgtaaatgctcagttggaaagagggaagtatttagagtgaaaaactttcggtggaacacacacaaaaataggaagatcaggtataactgttccaaaaaaaagagtatggcagtatagaagaaaaggtctccatgaaaatgcagaagaacaatttc

SEQ ID NO: 488888 - DNA, 534 bp, Homo sapiens
ctataaattagatccagtttattgaaggtgttctacagttctcctagatttttgccgattacttgttctctcactatgaaagrtattgtgtgtgttatatgtgtctaacaattcattgtctagttagagttgctattataccacttcaagtggatggagagcctcactgccatccattaatgtgcattaatcattttgagagtgaaaagattttttaaaatgtttttactcttttaggtatggccaagtgagatggggctagtgaaatgggtgggagaattggaagctgatagtgtgtgagctagacacccatgaatgcttttccactgggcagttagagggatgataggtaataatataaggcagctccatcacacaagctggtgactcctgtgcgacagaccaagagctgcatttggagattcatttccgattgttgcgtttcctcttagagcattgcttggtcatcgtgttctgagtggtccattggcctccatgtcccttttggggtggatatttgctcagtgacttttg

SEQ ID NO: 488889 - DNA, 534 bp, Homo sapiens
ctataaattagatccagtttattgaaggtgttctacagttctcctagatttttgccgattacttgttctctcactatgaaaggtattgtgtgtgttatatgtgtctaacaattcattgtctagttagagttgctattataccacttcaagtggatggagagcctcactgccatccattaatgtgcattaatcattttgagagtgaaaagattttttaaaatgtttttactyttttaggtatggccaagtgagatggggctagtgaaatgggtgggagaattggaagctgatagtgtgtgagctagacacccatgaatgcttttccactgggcagttagagggatgataggtaataatataaggcagctccatcacacaagctggtgactcctgtgcgacagaccaagagctgcatttggagattcatttccgattgttgcgtttcctcttagagcattgcttggtcatcgtgttctgagtggtccattggcctccatgtcccttttggggtggatatttgctcagtgacttttg

SEQ ID NO: 488890 - DNA, 534 bp, Homo sapiens
ctataaattagatccagtttattgaaggtgttctacagttctcctagatttttgccgattacttgttctctcactatgaaaggtattgtgtgtgttatatgtgtctaacaattcattgtctagttagagttgctattataccacttcaagtggatggagagcctcactgccatccattaatgtgcattaatcattttgagagtgaaaagattttttaaaatgtttttactcttttaggtatggccaagtgagatggggctagtgaaatgggtgggagaattggaagctgatagtgtgtgagctagacacccatgaatgcttttccactgggcagttagagggatgataggtaataatataaggcagctccatcacacaagctggtgactcctgtgcgacagaccaagarctgcatttggagattcatttccgattgttgcgtttcctcttagagcattgcttggtcatcgtgttctgagtggtccattggcctccatgtcccttttggggtggatatttgctcagtgacttttg

SEQ ID NO: 488891 - DNA, 487 bp, Homo sapiens
tggggatctcccatatttgccaaagtaatcccacaaaaacaattaacatttgactttgaaaattaagacaaaaaatacaatgatgaatattttcttgtaaaagcaaagacagtaaaaatattcagatttaaaataagcctgagaaaaagcatgatttccttgagcttacctaagtaaacttatttacaagtgactgtatcaataattagcaaaagtaaaagtcattatgaaatcctccaaatctttcaaagtactatcttacattcaagcattgagtttgcccataaaattatttaagctcaaccttttcctcaatctccaaaactctggcgtgtaactacacaaacacttcaataggggacagaatctccttttatcattcattctaccaaacatcaacttcataagaattagaatcaagtgtaataagaatgaactatatagaatcattgrtataaatttataggtgttcagacataacctttag

SEQ ID NO: 488892 - DNA, 627 bp, Homo sapiens
gggagatcattctgagcagggcagggaacaaggctgtgttggtctccagtgtccccagggcccagcccagtctctagcacagagtacacgctccataaacatttgctgaaggattggatgacttttaggggaaattgcctgtttccaacattaaccttttgcagaagagatggtgaataggtcaactgagcaccaagaaggtatttataatgctttccataaattgattgtgggagatgtaatatatccaactacaacccatcctcatggatgtgaaaaggggaaataacaaacacctaaaaatttaacgtgctttaaattttttttttttttttttttttttttttttttttttttttttttttggagacagagtcttgctctgtcacccaagctggagtgcagtggcgcgatctcggctcactgcaagctccgcctcccgggttcacgccattctctggcctcagccttcagagtagctgggattacaggcgcccsccaccacgcctggctaattttttgtatttttagtagagacagggtttcaccatgttagccaggatgatctccatctcctgacctcgtgatccgccgctttaaaatttttaaataaagtaacatgagtta

SEQ ID NO: 488893 - DNA, 366 bp, Homo sapiens
attgaaatcatgcattagacaacctacctcagttcaccattagtccaccaggtggcagtattatcttgaaaaaccacaagaagcctgctttctccccagctcttcccctgaattggtgttttagagtcatcagagttggcacagaataaacccaagatatttggttattactgtgttgacaaagtagctttgaaagttcaattatagttattaatagawaccagaaatgtggaaataaaatctaaccaaggttctatttcttttttaaattggtatatactctttgtacatatttatgggtggcgtgtggtattttgttgcacccatagaatgtttaatgatcaggtcagggaatttttttttttt

SEQ ID NO: 488894 - DNA, 621 bp, Homo sapiens
agaatgaacgcagacaatgctaggcccacttcacttgtcctctgctctccaggcctgtcctcatctggtttagttctaaaggggatgatggaaccctggcattccaattagatgcatggtttcccccctggaagagccctgagagactagggcagttcctgggcagatttctgatttggattgggtttgatgctgatatgacctttaaattgcccccaaaatgtctcttctcagtcagtaataaaaataggtgtgagcagaatgtgtagccagcagwgaattttaaaattataactagaatccttgattcctggctttgggtagtaagatcagatccctatccatcaatagcagttgtaataacaccgttagccactccaagcttggtcctcaatcaaacaaggaaatcagagccactggggctagagagagaaaaacacaacaggcacagcctcaaccactggcctcagacggcctttaataaatgacacaggctggtattccatcaaaataatcaccttccatcagaataaccacctcccccaactctctcagtggacaggctacaggaagaaatggtaggtttataaaaaagaaaaaactgtgaagggcagaaaagcc

SEQ ID NO: 488895 - DNA, 449 bp, Homo sapiens
gggtaacacagtgaaaccgcatctctactaaaactacaaaaaattagccaggcayggtggcacgtgcctgtagccccagctactcgggaggctgaggcaggagaacggtgtgaacccgggaggtggggcttgcagtgagccaagatcgtgccactgcactccagcctgggcgacagagcgagactccgtctcaaaaaagaaagaaagaaagaaggaaagaaagaaagaaagaaagaaaggaaggaaggaaggaagaaagaacaggacttcaaacagagcatacttagttatgggtcccctccccacacagaaaaactccctggacatcaatgacttcatccattcggactggcagataggccacatttcctgacaccctgtctcttcaccttaaaagggttagctttccaccacaccagcaaagaccctcaggacacacgattcatatt

SEQ ID NO: 488896 - DNA, 574 bp, Homo sapiens
ggggctcctgcgggagcgcacccggagatccgagcctgccagaggcaggcggcgggcgcagagcggagaaagaggggcttctctccctagacgctgaacgatctaggatccgtccccgtcccccacctcgggacagaaaggacagtttgtctagktttggagagaaaaaaccactgcataggccgtgcccaaaagccgctggccaagtcccccaagcgactgtcttctgcgccccgatgtctctgtcctcagcgccccccccccacacccggcacccctgctgtgcgtttcgatactgggcgtgctggcgccacaatctccgctcttgcctcgtcttcctggaaatggcacagagttctttgggaaacccttgctctgaggatcagcgagttggatggccaggaggaggactttctgtgccagccgggagcaaccggctccgcggtcctgacactcgcccctccatttctcaaccccgtaggccagcaccgccccggcttttcccaggcgctcacgcgccgcggtggccctcaggggcttttgtcaccctgccagtgggggctctcgctctagc

SEQ ID NO: 488897 - DNA, 500 bp, Homo sapiens
ttccgcttggtatacaaataactttgtaattgtccctaatttgttttaatgaattggtggacattaaggttgtttttaatttgtccctattctgtagacggagctgggaataattaattggaaacaaatttgaaggtgccgggtgcagtggctcaagcctataatcccagcactttgggaggccgaggtgggcagatcacctgaggtcaggagttygagaccaacctggccaacatggcaaaaccccatttctactaaaaatacaaagattagctgggcgtggtggtgggtacctgtaatcccagctactcgggaggctgaggcaggagaatggcttgaacctggaaagtggaggttgcagcgagcctagatcgtgccactgcactctagcctgtgtgacagagtgagactccatctcaaggaaaaaaaaaaaaaagagagaacgaaaacccacgaactagaggaaactcgaattgtggaaaaaataaagtgttcataaa

SEQ ID NO: 488898 - DNA, 604 bp, Homo sapiens
gcagacaagagaagagagcttgtgcagggaaactctcctttataaaaccatcagatctcatgagacttactatcatgagaagagcatgggaaaggcccgccctcatgatttaattacctcccaccgggtccctcccacaacatgtgggaattgtggaagctacaattgaagataaggtttgggtggggacacagccaaaccatatcaccaggtgactgtgatgtgcagccaaagccgggaacccctgttctaatcgggatcatggtttaatgaaggatgagctggtgtttggaaaaagcagactcccttcaaaggctccatgtaactttgaggctaagaattcaactgagttaatgcttagggttcrggtcacagtcagaagagctctggacataaagaatggggccctggagcttggatgagggaagcctgggaggaggctgtcacctctggtgtctagctgcagccctgtctatggaaggctcatacttgacattagtgttggttctcaagactgctgatcttgttaccagcctgggttgggggcatttgtcatactttcaggttcattttccagtcggtcatgggatactggtcagcctgc

SEQ ID NO: 488899 - DNA, 628 bp, Homo sapiens
taatttgagtaccccctcagtatttcaagttgacacaattcttactactaaaagtattgctttatcaatttcaagccagctaagatagacttctttaaaaacagatcaatttttgtttctaaaaatatatcctaatatcagggtattattctaccacagagaattcacattgattgtctatccatttaaaacaatatagttatagtcttttcacagtatttcaaagacttggataagctggcggtgtaaacatttcctcgtgggaactttataaaatgaaaagaaaataaatgattgatgcatactcaaactaattgaagtggtactgagtcaaccagatgttttcacctgaatcatgcccacagatgctattgcttcattatcccttaatctagggattacctccattggctaactcgatgacmtgtgagggtttcaaataagattgcctctcccttgtaacatacatcataaagagagcttgtttagaggcagcctacctccgccctgaacatgttttcaaggaagtgatcagggctgtttgtttttcttgctgttggatgtggtcttcagtgaagtcacaggaatggaatgagagtggccacagttgacaatggagctatttcca

SEQ ID NO: 488900 - DNA, 628 bp, Homo sapiens
taatttgagtaccccctcagtatttcaagttgacacaattcttactactaaaagtattgctttatcaatttcaagccagctaagatagacttctttaaaaacagatcaatttttgtttctaaaaatatatcctaatatcagggtattattctaccacagagaattcacattgattgtctatccatttaaaacaatatagttatagtcttttcacagtatttcaaagacttggataagctggcggtgtaaacatttcctcgtgggaactttataaaatgaaaagaaaataaatgattgatgcatactcaaactaattgaagtggtactgagtcaaccagatgttttcacctgaatcatgcccacagatgctattgcttcattatcccttaatctagggattacctccattggctaactcgatgacctgtgagggtttcaaataagattgcctctcccttgtaacatacatcataaagagagcttgtttagagrcagcctacctccgccctgaacatgttttcaaggaagtgatcagggctgtttgtttttcttgctgttggatgtggtcttcagtgaagtcacaggaatggaatgagagtggccacagttgacaatggagctatttcca

SEQ ID NO: 488901 - DNA, 619 bp, Homo sapiens
tactcattagttatgcgattggaatcagaagctgatgaacacaagttcaccctttgtcattgaagctctaaggtccttctgaagtggcctgggatctttctctaaacaattaatatttccattgactcagcagttatgatctccttaagtagaaaaataagaggaaaaaatatagtaacccatctgtgtaagaaatttataatcttaagatcaattctgtaatcaagtgtacaagtttaatgacaaaataattaagtgtcctattgcatattcagtcaacaaaatccctttgaccgtagagtcctcaaaatctcaaattttcaactctccctcaataatgcaatatatttaaaagccactttgctctattaggattctaaagaagctactgaaaaacaccaaaagctactgataaacttgtttctgtagttttaggcacaaacgtctaaaggattaaaataaagcattattgagaatcctaattatctatgtacctgctttggtaagaaatacttcaatatgacatatttacttyatattctcattcaaaatgacactattatattaataggtacttaaccaataattgaaaccattattcacagttgaataggcgtag

SEQ ID NO: 488902 - DNA, 567 bp, Homo sapiens
tgtgatggctattgccacatggacatacagacccagggtggtctcactttccaacttttaaagataagctgaattcttgaattttgatttgaaatttctccatatttaaatattgggtccagtttgtcccaagaactcccagtttgtgactcctgcccaaggtttttctggttctcctcagacctctctggccattccttcttctcttcctgcacagattggtaagccagagcttcatttttaacatacttatgccacatgattttcgtaagcaatctcattcagtctcatggttttaaaccctggcttccacgttgactcctaaatctcagtccccaatactaacctcatctaataatttsagactcatttatccaactacttgctacatatctccatggaaatctccctcagacatctcaaagtcaccatgacccaaactaatctcatgagctttccagaactttcttctaactgaaacctgttcctcttgtgtgtttctgctccctgtttccctgcaagctaatgacatgaccattttccctgtagtcaaaccatacatctaag

SEQ ID NO: 488903 - DNA, 613 bp, Homo sapiens
acatggtgaataggaccaaaaccctgcctacaatctactgatcactttgctcagagcacccttcctgcctgacacccaacacttgttggtctaaaaaactccttttagttttcaaaaccaagttcaggagttacctcctctgtgaagccttgttcttattcctctactccctccacagtgagtaacttcctcctctttactgcttatagactttgcacataccttaactgttaaccatagatgaacatattagaattatttgttttctgacagagtcttattgggagggaaaccaattgttctaaaacagggagaaaaatgtacgtttaattcctatctttggtaagcttcttcttaggcagtagaaaagtttaaaggcattttacttgtatttgtgttatcattttgaaaaatctaactctaaactccataattctttaagcaaacctgattaatccgtacacgccatacacaaacacacacatgaaaattatatacatatacrtatacatatatatgtatatgtatagtttttccctttctctccattaaccacttccctccctcctacaccctaattggttgacctataaaactcaagcctcatgctaat

SEQ ID NO: 488904 - DNA, 613 bp, Homo sapiens
tcatcaggttatattcacatgatagaaaaatggagaaacacatacataatagctagatagatagatagatagataaatagatgatagaatgggtggatagatgatgaatgaatggatggagggaaggatggatgcagggatgcggatggatgaatggatggatgggtggtcagacagacagaatataggtaatagatatcctgggacatgacactagttcttctttcccaactacagtataattttattatttgagagtttattccatatagttcgcaatatttctcccgttctattttgttctaaataaatatttgataataagttacactttatagactatttctgcattggcaaatattaagacacaagcttccaggtgccgttagacaaggatactgacaaaggtttctgagaaaattaaagacgtgcatcttctctgaaatcaaacccaacttattagggaaaatgatgctaatattaaattygtctttgtaagtttgatcattaaatattgtcattgtcagtaaggaggtgtgttaaaaacaatttaggaaaatttctcttatgttcataatgtagtattctaattccttttcagttgcagatttgt

SEQ ID NO: 488905 - DNA, 610 bp, Homo sapiens
tgtttctattgaagtaagtctayccctgtctaataaagaggttagaagaaataaatctcagtcacatatactgtagtcccccataaccataggaatcctcacttgcaatttttgtgctactctaaaatatgacattgtaaattcagtgtatgaaagtataaacatttacttgaatgtggctgtgttttgctttgcacatgaaatgagctcatctgctatggaggcacgacgggagtctctttcatatttagagaaaattccagaggccaaatcacaactccatcaaattttaatcacaaatacttcttataaaaggaaaaaagtttgcaactatgtgaatgaactaattctctaatgccttgttcctcaaagagtggttcctagaccagcatcattggtatcccttgagagcttgttagaaatgcagacttgctgggcatgatggcatgcacctgtaatccttgctacttgagatgctgagacaggaggatctcttgagaccagaagttcgagaccagcctgggtcaaacagtcaaacagtgagaccctgtcagaaggaagatcagaaggaagaaaaggaaaaaaaaagaaatgtagacttttaggtact

SEQ ID NO: 488906 - DNA, 652 bp, Homo sapiens
tgtttctattgaagtaagtctacccctgtctaataaagaggttagaagaaataaatctcagtcacatatactgtagtcccccataaccataggaatcctcacttgcaatttttgtgctactctaaaatatgacattgtaaattcagtgtatgaaagtataaacatttacttgaatgtggctgtgttttgctttgcacatgaaatgagctcatctgctatggaggcacgacgggagtctctttcatatttagagaaaattccagaggccaaatcacaactccatcaaattttaatcacaaatacttcttataaaaggaaaaaagtttgcaactatgtgaatgaactaattctctaatgccttgttcctcaaagagtggttcctagaccagcatcattggtatcccttgagagcttgttagaaatgcagacttgctgggcatgatggcatgcacctgtaatccttgctacttgagakgctgagacaggaggatctcttgagaccagaagttcgagaccagcctgggtcaaacagtcaaacagtgagaccctgtcagaaggaagatcagaaggaagaaaaggaaaaaaaaagaaatgtagacttttaggtactatccagacctactgcatctgaatttgcattttaagatgatca

SEQ ID NO: 488907 - DNA, 546 bp, Homo sapiens
ttttttgtttactgagtttaaggctcacatggaacagccaagcagagaatgagggcttggaattcaggtgagagatctgggcttgaatacacatttaagaattatcaacttacagatagaaagtaaagtcatggcaatggattggagtgtttagaaagagtgtatggaggattgtaagatcagaaaggatgggcagaaccttaggaagcaccaaaacagaaaataaataaggtgatagagccttaaaaagagacagagagactggctggaaaaatatggaaaaagtccaggaggatgtggtgctacccaaggatccagaagttttaaatgaaaaagactctccagtgacaaacggtccagagatcactaacaaaatatcacccaaaagcattygttggacttagacacaatgtgatcactggtgatcttggaaagggcaagtacttctgaagtcaccagcgtatgaactatctccaattcaacaagatatggatatttatagagtatttgtaccaccaccacacacacaaaatggttgtttccttt

SEQ ID NO: 488908 - DNA, 594 bp, Homo sapiens
ccaggattttaaaacattgtttgaaaaaattttcagactccctcctgaagctatataaaataagtaaatgtgtaaaattgagatgagcatttggttttagtgttagaacataagtgctactctcagaagccagatctgaggagctgtgactgtgatttttaagaatggacttacatttattcattttgtcatttaattaatattttttaatcatcgkattaggattacaaagatgaataagacatttcctgcatttaaggggtttgaaatcagttctatttaaaaatacttggccacgcaaaagtcatttacttttatatgaaactgttggtgtgttaattctttatcctcatttaacaaccaacatttgcaggagctaagctatcccactgtgttgccatgtactggctttaagtgatatacataagaagaagaaaaatgaattcaaatgtaatctgttaagaaaaacaaagcacctcatgatttcagtgcaaaatataggagttaagtaaatatgcaatggatttccatactcagaaagtacgggttatataaattatattgaaaataatttctttaattgtgcacatttat

SEQ ID NO: 488909 - DNA, 594 bp, Homo sapiens
ccaggattttaaaacattgtttgaaaaaattttcagactccctcctgaagctatataaaataagtaaatgtgtaaaattgagatgagcatttggttttagtgttagaacataagtgctactctcagaagccagatctgaggagctgtgactgtgatttttaagaatggacttacatttattcattttgtcatttaattaatattttttaatcatcggattaggattacaaagatgaataagacatttcctgcatttaaggggtttgaaatcagttctatttaaaaatacttggccacgcaaaagtcatttacttttatatgaaactgttggtgtgttaattctttatcctcatttaacaaccaacatttgcaggagctaagctatcccactgtgttgccatgtactggctttaagtgatatacataagaagaagaaaaatgaattcaaatgtaatctgttaagaaaaacaaagcacctcatgatttcagtgcaaaatataggagttaagtaaatatgcaatggatttccayactcagaaagtacgggttatataaattatattgaaaataatttctttaattgtgcacatttat

SEQ ID NO: 488910 - DNA, 470 bp, Homo sapiens
actttttatttaagacttacttttgttttaatttttaccaaatattctatggttaggagctggggggaagcacttttccttatcacctcagtttgtcagatgtcaaccatctctaaaagatggcatttagaaagatatcattgattcatttattgattcactcagcaaattatgtgagtgctaggtgtgttaatattttttgttcccagaaatgcaaagattttttctcttggttcaaaataaccagtaggcacatatataaacatactaaaaataaattatgtcacatttccttgagatttacaatagaaagaaaaaaaacaaagaagaacaaaattatttcartagtaaaactctgatcctgatccttcctataaactgtttttggaaagaacactctaattcccttggaattgttcacatttcccataatttgatgcaacagcttttctcttcagggtgattctctc

SEQ ID NO: 488911 - DNA, 321 bp, Homo sapiens
tgttagcttctctctaaatctcatcaagttctacaccttgccattgctgcctttctcacaacaatcattctgcttgcacaggatcaatttcaycttaggacagaatcaccaaatctgagtaattattgaacattgtggtcactaatagttgaccctagaacacagagagttttaaaagtacaccagaggaagctattttataatgcaacagaagtgccgctcacttaacttggataattgaggagataactttcataatgccctaaagattgatatccatgttttgtttcaccccccaattaaatgtatgtaactatttgt

SEQ ID NO: 488912 - DNA, 457 bp, Homo sapiens
ctgttgtcttcaaggacattagagtccaggatgggaaagaaaccagtagrcaactgcaacacaacatgataaaggctctaacaggagctaagcaaggaatcctacataccaccaagggagcaactagaccaggcttacggggtacaaggaggctcctcacgtatggtacaagaagccttctcatctacactgagacctgaaagacaagagccagcccagaaaacaaaggaagggccttccaggatgagggaactgcaagtacagtggcaaaagaaggcatgacatgttcaggcaatcatgagtggcttggcatatgaaggttatgtggaggggagcctgtgtcgggggcagggagctagtgagaaaggaggctggagagcaaaatattattgattattgatgttatctagatgttctcaaatgagcaaaaggtgatccaagacaataacgagaaaga

SEQ ID NO: 488913 - DNA, 579 bp, Homo sapiens
tgcaaaagaaatgttctagaatattttccctgaggaggaaagattctagaatatttttcctgagacttgtgacagtcggaggtgcctgatagagtgaatcagacactgttcttgtgtttgcttttgctccctctgcccttttttctattatctttcagcttaatagactaaagaggggaaagaggcagagcaggtgacacctgctyctgagccaggagggcctcaggggtcccttgggagtgtctgcggatgggattctatatacccttccagtgtggcagcaaccagctctggatttgaaaagttcacctggactccacagaggggtggggcagcggttgttgtcatatttgctttttctgggagaggtaactgtttcctgctgcacggttatcatgttgagggttgggaagcagggcatgttgacgataagaatttaatgaatgcatatgagaagaggagattcaagccactgagcagtgtattgccctaggcgacttcacgtttcaggatggtgagatatttaagggagtatatttcagatcatcatggaagaaaagatgtgcaagaagcactggg

SEQ ID NO: 488914 - DNA, 575 bp, Homo sapiens
tgtcagagtggggattccatcctttccagcttgatgcttttctctgacctacctggagcgttaggaactaggcccacctcatgggtctgtgacatgcccgggagcacaggctccatattcaggagggtgccatgctgggtttartgctcttctgttgccatcttgaaattcttatttttttttttttttgagacagggtctgactctgtcactcaggctggagtgcagtggcgtgatcacggctcactgcagcctcaaacccctgtggtcaagggagcacagctcagccttccaagtagctggtactatagctgcacaccaccatgacatgctaatgttttccgggtttttgtttgtttgtttgttgggtagtgtctgtgtgtgtgtgtgtttgtagagacagggtctcactttgttgcccaggcaggtttaataatttttgaacaaggggccctgtattttcattttgtactgggcctatagattatgtaaccagtcttggttagagtgagctatgggaccttcccacagccaggctgcaaaaagaggcaggagcccctggggtgcaggtgcag

SEQ ID NO: 488915 - DNA, 681 bp, Homo sapiens
tcagcccacaggagaaaggtcagagctgggtggcatttatactaatcctttaaggtaggtataaccattcatgcattacagggctaaccccaggtccactgggctgggctggatctcctttactagagaggagagagatcagggcatcccagtcaaggagtgggtaaaggtgtgggtaaggaaagggtgagggcacaagccagccctgctgggtgctgggatggtccataggtgactgaatgcgaggctggccaggcaaggtcagagtaacacctgaccacaagcaggacacttggatttgtgggtatcagagtatcaaaacaacctcagcttattaaatgtgatggtgacacaatataaatgtcacattggagaagcactgcagacagttgtggggcagggagggggagagagggcagaygggatggaaggaaaacagtgagagctggttccccctttcctgatgtgtgaggaggactcagtctcccatcatgaggaaagtgtatttcctagaggtcaagggcaagcctcctctgtgactgcctcccccaagccatgctttatgacacaagcctgtcccctggccatggcttcttgaaccaggcgtggtagcaccacgaaaacacagccacccactgtttctccctcctaaaaatctgggagtgggactcaaaccctcca

SEQ ID NO: 488916 - DNA, 550 bp, Homo sapiens
cgaaaacacagccacccactgtttctccctcctaaaaatctgggagtgggactcaaaccctccagcccatggactgccagcactggcctcaaaaagacacagraattcagggggcaggagtcactttctggcacagcagagaaaccaggtctgcaaagaggctgacaggaaagccataagtgcttgtgggtgacagagactgccttggttgctaagaactctcttcttccctgcccgaagccctcaggaggcctgattattctgctgcgccttgagatccatgagctaattctctatcttcacacacaaacacacacacacacacacacacaccctcctttatgtaggctagcttgagtgggtttccttaatttgcaagcacagtaacctcaaaggagacaaaatatttcaaaataagacatgagattagctggacaaacgtggctctaggctgctagctgtgataacccgaagatgggaggtgggcacccccaactgccataggatcaatgggatagggacactgaggagagcagtgaggctgctttta

SEQ ID NO: 488917 - DNA, 550 bp, Homo sapiens
cgaaaacacagccacccactgtttctccctcctaaaaatctgggagtgggactcaaaccctccagcccatggactgccagcactggcctcaaaaagacacagaaattcagggggcaggagtcactttctggcacagcagagaaaccaggtctgcaaagaggctgacaggaaagccataagtgcttgtgggtgacagagactgccttggttgctaagaactctcttcttccctgcccgaagccctcaggaggcctgattattctgctgcgccttgagatccatgagctaattctctatcttcacacacamacacacacacacacacacacacaccctcctttatgtaggctagcttgagtgggtttccttaatttgcaagcacagtaacctcaaaggagacaaaatatttcaaaataagacatgagattagctggacaaacgtggctctaggctgctagctgtgataacccgaagatgggaggtgggcacccccaactgccataggatcaatgggatagggacactgaggagagcagtgaggctgctttta

SEQ ID NO: 488918 - DNA, 541 bp, Homo sapiens
gagggtactacaaataccagcattctcctgtgaaaacaggatctagccgaaattcacaatcacagacacactcacctacccagtccctcctccccaaatcaggtggtttgccatttgaaaattacragagaagaaagaaagaaagaaaggaaacaaggagaaaagaaatggaaaggaaaggaaaaaaactgcttgccattataatatttacaagagaactttcccatgggtctcaagtttttctgcaatttagttttatgattttttttagttgattaaagctaatcttgctcccttttaacattccttttttaaatttgaggatcctatcccatattagccatgctctgggggaaaaaaatgtagctcattaagagtggaaatctatagcagctgccagtctttctgcttttgttgttgcccaactgagaatttattccacataccagagagggctggctttataatccccatcccaaaccatcgcatcttcctccaggtacatcccaccagcttgggtctttaagccataagggctgac

SEQ ID NO: 488919 - DNA, 541 bp, Homo sapiens
gagggtactacaaataccagcattctcctgtgaaaacaggatctagccgaaattcacaatcacagacacactcacctacccagtccctcctccccaaatcaggtggtttgccatttgaaaattacaagagaagaaagaaagaaagaaaggaaacaaggagaaaagaaatggaaaggaaaggaaaaaaactgcttgccattataatatttacaagagaactttcccatgggtctcaagtttttctgcaatttagttttatgattttttttagttgattaaagctaatcttgctcccttttaacattccttttttaaatttgaggatcctatcccatattagccatgctctgggggaaaaaaatgtagctcattaagagtggaaatctatagcagctgccagtctttctgcttttgttgttgcccaactgagaatttattccayataccagagagggctggctttataatccccatcccaaaccatcgcatcttcctccaggtacatcccaccagcttgggtctttaagccataagggctgac

SEQ ID NO: 488920 - DNA, 538 bp, Homo sapiens
gctgacctgagcacctgtgaggtcggtaggagtccccagtggagagcactacaagtgtccacgtcgacratgggtgcttccggcagtcttcttgctcaccttttttccacagggagaagtaactcctggttttgaactgaccccaccttggggatggggtagcagaagcaaggcgcttcccttctctatgcgtccatcctgagcttctgtggtctacagggcttctgttactcctttgatgcacttcagccctgtttagttattttcatcaaaatccagcagtttattctttgctttggctgtctttgcagggtggcgggggacaagcactaagggcttcttctagccagccatcttgttgacatcactctcccactgtccttgctaatcctttttcctagaaaggcttccttttcctagtggatggtgaaagaagttctacactgagtgctggggctcctgagctgccctttctctcctttcctgggtttccttcaacacaaagctcccattgtaacaggtaagcaggtagagtaag

SEQ ID NO: 488921 - DNA, 538 bp, Homo sapiens
gctgacctgagcacctgtgaggtcggtaggagtccccagtggagagcactacaagtgtccacgtcgacaatgggtgcttccggcagtcttcttgctcaccttttttccacagggagaagtaactcctggttttgaactgaccccaccttggggatggggtagcagaagcaaggcgcttcccttctctatgcgtccatcctgagcttctgtggtctacagggcttctgttactcctttgatgcacttcagccctgtttagttattttcatcaaaatccagcagtttattctttgctttggctgtctttgcagggtggcgggggacaagcactaagggcttcttctagccagccatcttgttgacatcactctcccactgtccttgctaatcctttttcctrgaaaggcttccttttcctagtggatggtgaaagaagttctacactgagtgctggggctcctgagctgccctttctctcctttcctgggtttccttcaacacaaagctcccattgtaacaggtaagcaggtagagtaag

SEQ ID NO: 488922 - DNA, 550 bp, Homo sapiens
ctggattcagccaacggtgagtactggcaagaaataagaaagcaagagagtactggggtatcattatcccaaatttcaccctttccagctcaccatgggtgtctatactcctctatcaaatcctttttccatgtagccatcttccctgagttctggaaaccctagttttcctctcttcaggtcataagtatggccagctctggggtatgccaccattgccttttggtctatctgaacaccactgcatgttggtttcacttaaccccgagtatacatttgaaaatatttccttaattaaactttccttgatcaccccacttgaatatgcaytgttgtacccacaaagcaaaagacacagatgagggtgatgacaaggacacatcttccagagagacatgcagccggtggtcagctttggtactgccatctttttttgtgcttaatgatttatgtctgcctttctatttcccatataaatgggaatataggaaagtgaacactatttccaaattgtgaccacatgccactaaaagaaatatgtctagcaaag

SEQ ID NO: 488923 - DNA, 561 bp, Homo sapiens
ccatctttttttgtgcttaatgatttatgtctgcctttctatttcccatataaatgggaatataggaaagtsaacactatttccaaattgtgaccacatgccactaaaagaaatatgtctagcaaagctcaaactttaagatttgctccttctgttttcctagtggtgaggaaaggtcacaaaactcaaagtgccaatttagataaaagttctttcagggagacccaaaggaatctccaagttttacttacttacttacttacttacttacttatttatttgagacagactctcactctgtcacccaggctgcagtgcaatggctcaatctcagctcactgcaacgtctgctgcccaggttcaagcaattctcctgcctcagtttcccaagtagctgggattacaggcgtgcgctaccacgcccagctaatttttgtatttttagtagagacggggtttcaccatgttggccaggctggtctcgaactcctggcctcaagcgatgcacctgcctcagtctcccaaagtgctaggattacaggcatgagccaccacacccag

SEQ ID NO: 488924 - DNA, 573 bp, Homo sapiens
tggaacctccaagtattatttaattaacttgttgccctttactatgttttctatacacatcgacatcaaaatccttctctatcagacatagtcatgtcaggatcaggtacaagatctactgcaagaaattaatgaaatggatrtttgaatctcaaatcagtgaatgattcaatttttaaatgttattaacaatcaattcaaggatagatccatcacagtattgctttcagtcacttgcattccaaaatgcagccagccaagtgggatttggatgtattctgctatcttatcaattcaccattgagagatctggtgattattgtcagttgaccgatttaactccccctaaattggggaatagtttattgaaatctgattacacacatgtgagtgtttgacatcacccattataactgtcactgttagaaggtggttgcggattgcttaagaatcctgtcaaagattccaactcagtaccatcctctcaaaagcctctccctcccaatcactgaaaaatcagtattcctggtatacctggtacttgtcctttggcaggaaacacacaaaacaatt

SEQ ID NO: 488925 - DNA, 569 bp, Homo sapiens
ccaatcatatttcttagagattttttttttaaactacaggattaaccaatatttctgtgtgctaaattttgttcactagactcacttgatcctccactaaggaagacttttcagttaaattacaaaaaggcagaccactcctgtgaatggcagttctgctcctagccccgttatgagtatagggatcctctggccatcggcacttaaatgtccctgtcttgtttcagatgccctccaccgtatgggatgagagaagaaagccggcatttagagaaaggaaaactgtagggtctagttctgaccacccattatttaatctcaagaagcagttgtcaaatgtccctagttcagagagagtgcagggctcatgaggaatgaaacccatcagagtggtaaaaacaccatgggggagttaaggcaagagagaagcacagccttacaggggcttgaamgacccctggccacaaactctgcccattaacttagtgcccagtagagctcatcccagatttttggtagtcctccttgccttctcacatgaacttattttaaactggggcaggaccttg

SEQ ID NO: 488926 - DNA, 569 bp, Homo sapiens
ccaatcatatttcttagagattttttttttaaactacaggattaaccaatatttctgtgtgctaaattttgttcactagactcacttgatcctccactaaggaagacttttcagttaaattacaaaaaggcagaccactcctgtgaatggcagttctgctcctagccccgttatgagtatagggatcctctggccatcggcacttaaatgtccctgtcttgtttcagatgccctccaccgtatgggatgagagaagaaagccggcatttagagaaaggaaaactgtagggtctagttctgaccacccattatttaatctcaagaagcagttgtcaaatgtccctagttcagagagagtgcagggctcatgaggaatgaaacccatcagagtggtaaaaacaccatgggggagttaaggcaagagagaagcacagccttacaggggcttgaaagacccctggccacaarctctgcccattaacttagtgcccagtagagctcatcccagatttttggtagtcctccttgccttctcacatgaacttattttaaactggggcaggaccttg

SEQ ID NO: 488927 - DNA, 619 bp, Homo sapiens
tgtgacttattagagagcatagattaggtggtttrtcttaatgaagtattggtaaatgagagtaattatataaggaacaagattttattggaatacatagcttgttttgacttatttttaaaaagagttattattttaatgcttatttaaaaccacatctgagttacctgtaacattcatcgtaccaagtactcctgtaatctcagcactttggaaggccgaggtgggaggatcgcttgagcccgggagttctagaccagcctaggcaatgtagggacttgtctctacaaaaacaaacaaacaaacaaaaccccaaaacaaatagtagttatttgattacctattcgtctcctttactattttgtgcagtcttcaaagggagatcttactagtctttgcttaataaataatggttgaacttctgagggagagaaagaaagagaaggggagaggggcagagagagagtgaaagagcaggagagtgagcacggaaaggaggagagagagtgagtgagcacagaacagagacagagagggagagaaaacccaggtaagtcactgatcttttctgcttcatgtaaacttgaatttccattatataactggcatatgtagtgta

SEQ ID NO: 488928 - DNA, 619 bp, Homo sapiens
tgtgacttattagagagcatagattaggtggtttatcttaatgaagtattggtaaatgagagtaattatataaggaacaagattttattggaatacatagcttgttttgacttatttttwaaaagagttattattttaatgcttatttaaaaccacatctgagttacctgtaacattcatcgtaccaagtactcctgtaatctcagcactttggaaggccgaggtgggaggatcgcttgagcccgggagttctagaccagcctaggcaatgtagggacttgtctctacaaaaacaaacaaacaaacaaaaccccaaaacaaatagtagttatttgattacctattcgtctcctttactattttgtgcagtcttcaaagggagatcttactagtctttgcttaataaataatggttgaacttctgagggagagaaagaaagagaaggggagaggggcagagagagagtgaaagagcaggagagtgagcacggaaaggaggagagagagtgagtgagcacagaacagagacagagagggagagaaaacccaggtaagtcactgatcttttctgcttcatgtaaacttgaatttccattatataactggcatatgtagtgta

SEQ ID NO: 488929 - DNA, 454 bp, Homo sapiens
gggctggtgacccaagggcccaaggagactacaacagtcactcttggtcagaggataggtgatgaattttcagtaactattcgtgtcaagctttaagcttgaagtttccccccmacagccctgagctgtaattaccctctgtttactccagattttgtaaaggtcttttatacacacaaccttggattggtggtgcttgggaaaggaaacgggggaggctttgctcatgcttaaggagaaagggctggagacgagctctgagcacaaactcaaagcaagagggaacaggagcttgcatctttacctcttgggaacaactgtgggacaatgaggtgagtcattttagttgggtattgaagcagagggtgactgtcccagaaggctgaggaatgcaaataaacaaattgaaataaaccctcaggatgatttgcttattaattaggtttctaggaag

SEQ ID NO: 488930 - DNA, 454 bp, Homo sapiens
gggctggtgacccaagggcccaaggagactacaacagtcactcttggtcagaggataggtgatgaattttcagtaactattcgtgtcaagctttaagcttgaagtttccccccaacagccctgagctgtaattaccctctgtttactccagattttgtaaaggtcttttatacacacaaccttggattggtggtgcttgggaaaggaaacgggggaggctttgctcatgcttaaggagaaagggctggagacgagctctgagcacaaactcaaagcaagagggaacaggagcttgcatctytacctcttgggaacaactgtgggacaatgaggtgagtcattttagttgggtattgaagcagagggtgactgtcccagaaggctgaggaatgcaaataaacaaattgaaataaaccctcaggatgatttgcttattaattaggtttctaggaag

SEQ ID NO: 488931 - DNA, 466 bp, Homo sapiens
catctctcacacagacgcctctccctctgatctcctacagtccatcagtggattatccctgcccccatagctggagagctgctctgcctggtggctttctatggccctgcatggtgaggctctggcttggtctcccaccagattgccacccagcctcacccttctgctttctgtttcttgtatttgccaaacttgttcctacttcaaggtccctctgcctggaccactctgtccccagagcttcacatggctttaaggtctccattcaaatgcccccttctgggagaaggccacctacagttactggcttrcccatcttcctgccatggtgttgtcacagcacatatcactgactggaatgatcccatttgaacagcctctcctcatttatcctgcctgcctctcttccctccttcttccacccctgccaccaaaatgtaagttctgccagaggagggtcctcacc

SEQ ID NO: 488932 - DNA, 466 bp, Homo sapiens
catctctcacacagacgcctctccctctgatctcctacagtccatcagtggattatccctgcccccatagctggagagctgctctgcctggtggctttctatggccctgcatggtgaggctctggcttggtctcccaccagattgccacccagcctcacccttctgctttctgtttcttgtatttgccaaacttgttcctacttcaaggtccctctgcctggaccactctgtccccagagcttcacatggctttaaggtctccattcaaatgcccccttctgggagaaggccacctacagttactggcttacccatcttcctgccatggtgttgtcacagcacatatcactgactggaatgatcccatttgaacagcctctcctcatttatcctgyctgcctctcttccctccttcttccacccctgccaccaaaatgtaagttctgccagaggagggtcctcacc

SEQ ID NO: 488933 - DNA, 619 bp, Homo sapiens
ttctgtttctggaccttgcacttgtttttccctttgcctagaatgtaccaatcagtgaggcttctctaactgccctatctgaggcagcactcccactattctctatccccttaccctatttatagttcttcataccacttactacctgaaattacattatatattaatttcattgtccttattctattttgcaccagcaggtaggattccatctgtctcttatctctgaaccttaggacagatcttgcacatttttgtgcacaatagatacctggtgaagtgatctggggcagcactgtcatccctactaggttattagttccataagggcagaatatgggtgctttgagattccatttttcctaaatgggcacaatatttcccattctacatgttagttttaaactcataccacttccgtacccttgaagttgggtggaattttacagactcaaccaggatggcataagtgatgccaaaggatttttgaagcgagctcttcttccttgttctctagggatgcttgctcttggatcccacctgtcacattatgaggaagcccaaaccatcctagacagagactatatrgagaggccccacatagggttccagccgacag

SEQ ID NO: 488934 - DNA, 534 bp, Homo sapiens
cccagggctgtctgaacacgaagcctggactcccaactgcatttgcatttgcctcttcctctgctagcagtcaccttagttggtcccaagtgttagcactgggctatgcaatgtcaaaggcccagatagaggaaatttgggagtggcatgcctggcagcaatggagaggaaatgtgagagaaagtggggcgagtggaagagggcagggtgtgaagcccagggagagcagtggtcttcagaacgcctggtattttgctgagcactggagaacctacagtgtttttgcatctctgttatagtggctgcctcctccttagagcacccactgcatccrgtatttgtttttgtgcctgctggacaaatatttgttttcacatctccttctctgaccagggatcatctttttgaggccaggaatgacggcatgccaggacctggcccaaggagatgtctcacctttgatgccaagaattaaaataatggttgctgcccattcactgaattcctatgactgccagacactgagataaagtt

SEQ ID NO: 488935 - DNA, 588 bp, Homo sapiens
aattttaaattagttaccagtatttactaacaaaggaaaacaacccatgtatataaaacacatacacccgcacacaaacaccctttattggttgccagataatgatttgtctgaagtgtgttgtctgagttggtgtgcgaatttcgtattataaaagcaaatgacaatagcattccaacagggacctaggccaaagtcaagaggaaagaatatccaaacgtagcattagcattccagaagtcaaatgactattattatgtcagtggggcaaaagcctatgcccattgagctgtttgtacatgacgcagtcatattgcactaacagacatttcactaataatgaaaaccagtaggaggctgagcgtaaagctggatgttatgactcgcgactgtagattacctgaatccagtaaatttactgtctcccacatctattgttctttttacaatattgttccacctctgcctcaaacaatacaatggaaaaggcgttatggatggcayatgtacaaagagtcaaacacctgccctatatttccaactttcaccttgcttcgcaaattatagcacaatgttacagcaacagca

SEQ ID NO: 488936 - DNA, 585 bp, Homo sapiens
cagctgttaacccaggctttaattgtttctgaattaatatcccagatgtttctcatttaatcctcccaaacacctgtgagatcgaaaattcaggtattatgcacattcttttcaaataggaactaaggtcagaaaggatcacgcaaagacaagaaaatatagcactgtggccagatgtgtagaccctgctcagtcaccttggggaggctgcttcagttctgcmagcctcagcttcgcaatctgtaaaatggggtgaatggtagtccctacctcattaggttgctgggagaatttaatgggatgtcataagtaaagggcttatcacagtacctggaatgcagaaactacagcattgagcgttacctgtttttactattagattaagcaatttgcccagggccacggtggaaatgcacacagaaaagataaaaagagagatgccactgcttaaggccaatgacccttcctttaacaacacagcatctccaaagatgtgaatctttgaaaatgctccaagctcttgacctgttactcataaaataagaaaatgatttcattggagatggaacaaaggtgggcaaagga

SEQ ID NO: 488937 - DNA, 585 bp, Homo sapiens
cagctgttaacccaggctttaattgtttctgaattaatatcccagatgtttctcatttaatcctcccaaacacctgtgagatcgaaaattcaggtattatgcacattcttttcaaataggaactaaggtcagaaaggatcacgcaaagacaagaaaatatagcactgtggccagatgtgtagaccctgctcagtcaccttggggaggctgcttcagttctgccagcctcrgcttcgcaatctgtaaaatggggtgaatggtagtccctacctcattaggttgctgggagaatttaatgggatgtcataagtaaagggcttatcacagtacctggaatgcagaaactacagcattgagcgttacctgtttttactattagattaagcaatttgcccagggccacggtggaaatgcacacagaaaagataaaaagagagatgccactgcttaaggccaatgacccttcctttaacaacacagcatctccaaagatgtgaatctttgaaaatgctccaagctcttgacctgttactcataaaataagaaaatgatttcattggagatggaacaaaggtgggcaaagga

SEQ ID NO: 488938 - DNA, 585 bp, Homo sapiens
cagctgttaacccaggctttaattgtttctgaattaatatcccagatgtttctcatttaatcctcccaaacacctgtgagatcgaaaattcaggtattatgcacattcttttcaaataggaactaaggtcagaaaggatcacgcaaagacaagaaaatatagcactgtggccagatgtgtagaccctgctcagtcaccttggggaggctgcttcagttctgccagcctcagcttcgcaatctgtaaaatggggtgaatggtagtccctacctcattaggttgctgggagaatttaatgggatgtcataagtaaagggcttatcacagtacctggaatgcagaaactacagcattgagygttacctgtttttactattagattaagcaatttgcccagggccacggtggaaatgcacacagaaaagataaaaagagagatgccactgcttaaggccaatgacccttcctttaacaacacagcatctccaaagatgtgaatctttgaaaatgctccaagctcttgacctgttactcataaaataagaaaatgatttcattggagatggaacaaaggtgggcaaagga

SEQ ID NO: 488939 - DNA, 623 bp, Homo sapiens
gataagtgaatacacctattcagttatttaaaagtccaccgattttcacattgatgaaaagtcataattataaaaatggcttaaagcaccaaccttttactttgctgactctgtcctgtggaaagagatatcaactttatatattaaggctgccctctcaataaatagttgataatgtaaaaaacagattgtgcattccaagatgtgcgtgtttggtaagtgctccatgaggcgtccaaggtaaatgtcaattctgttccagcgttactggcagagacacacattacctgtatttccgttgtgtatttatcatcatgattctggaaaatgtaactggaacccttcattccygtgaacattggttccccgaatgcaggtctaaatagaatgaaaaacccagctcctatccaattctccctgaggaggatgaaatgagaatcagccagtttaatgcctttgattgtgattgttagaggtgtggagactgagtttaacagcctaggttcccggacctactagaatgcttctcactgaatcccaaaatacagcggtaatgaaactatgcctccccaaaagaaccaaacaaagtccattcttcggggaaaatgaagcaagataaaggc

SEQ ID NO: 488940 - DNA, 597 bp, Homo sapiens
gaagagagggaggaaggagtatcctggctgttctgtattcattacattgtagagtcaaatgagaatccagtgatgataataggcctgtgggtggtggatcaagagtatctgcctccttaaggaacagcctgggaaacctttgctgtgaggaaattrtattaataaatgggtgacaaatacagaacagtttccagcctttagccgtgctgacttgctggtggaattgagcaaggcatgctgttctccaaaacgcacattcaggaagctcggcttcccccagtgcctaagggcagggttgtgctggtaaatgtgtaatcaccagctttcagagggaagggaaggccgtggtttgtaacattcgccgatttctgagatgtaaatactcctaccatgcctgattcagagctatctacatgaagtcactaaagcttctagcacagcattatatacacaaaatagatgtaaataatccccaaagcatagagaagagtaaaatgtaaaaaataactaggaggagatgagtttcaagtatttactccctttggatgtgaaggtgatctggctgtgacatgtgtcacctcattgatcaccagggtt

SEQ ID NO: 488941 - DNA, 597 bp, Homo sapiens
gaagagagggaggaaggagtatcctggctgttctgtattcattacattgtagagtcaaatgagaatccagtgatgataataggcctgtgggtggtggatcaagagtatctgcctccttaaggaacagcctgggaaacctttgctgtgaggaaattatattaataaatgggtgacaaatacagaacagtttccagcctttagccgtgctgacttgctggtggaattgagcaaggcatgctgttctccaaaacgcacattcaggaagctsggcttcccccagtgcctaagggcagggttgtgctggtaaatgtgtaatcaccagctttcagagggaagggaaggccgtggtttgtaacattcgccgatttctgagatgtaaatactcctaccatgcctgattcagagctatctacatgaagtcactaaagcttctagcacagcattatatacacaaaatagatgtaaataatccccaaagcatagagaagagtaaaatgtaaaaaataactaggaggagatgagtttcaagtatttactccctttggatgtgaaggtgatctggctgtgacatgtgtcacctcattgatcaccagggtt

SEQ ID NO: 488942 - DNA, 560 bp, Homo sapiens
tccttcagcaaatcagacaacataccagaaattaacttggcatagtgtttatcttcggtcaggctccctagaagtagagcaggagaggggatttgtcacttactaagggagtgatctcaggggaaatggcatggggggggaaagtaggctagggaaaaagaaattaggcaaggatgtagtttaggtgacatgtggccacagtgtgatcctgcagggagctctagaaccacactrtatcacagaacttgagccaccttaaacaagggagctgggcttttttgcttctgcaccatctgtttattagctttgtgctgctccaggatagaggttgactgttacccctaggcacttccaggtaaagttgctctaatctctgaagggcaacagaaaaggtttcaggtgtgagctattaacagcaacacctctagcagttgggggatgggcacactgaatggtaaaaggggtccttcctagatctgctatctaggtggggcaccagcagtgtctgctacagtggctaagagaaatctctggatcctaacataacaactgggaatcca

SEQ ID NO: 488943 - DNA, 536 bp, Homo sapiens
agctgctgctcgaaaatacaccccctagagaggccaaataaaatgccacagaaatacagggccaggggctcctaatacctcccagcccctgctaaagaatcacaaagctctaagtagccagactgaaggaaccaaggccagagattacaggcaacacaggagacagggcaatcttcagtgcttccagcaccaggaagctgcaatgcctcccaccttaggtggcaatttccttctgaaatagtgcagctccttttaaaattatatcttgcttctttcttctcctacctcccccaaagaacttctgcatgtaatcgttacaaggaagctgctcactaagaatctttgcacagataatttatcccgcatttcttttttttttttttttktttgtttggttgggtttttttgctttttttgcttttttgttttttttagacggagttttcactcttgttgcccaggctggagtgcaatggcgccatctcggctcgctgcaacccccgcctcccgggttcaagcgatcctcctgcctcagc

SEQ ID NO: 488944 - DNA, 661 bp, Homo sapiens
tggggttggtggagaatgacttccctgggagatgcaaacacacatccacgggccacacttggctaaagttgrggaggtttagtctgagacagttctatcttccccacgcgggcttgggtgcagttccgcggcttaggtagggggagaaaccaagatgtttatgcttaaaggaaattggttgagttttagcccaagaaacttaggcaagatgtgctttctgtcagggaaatgactgttcagggaagctcaatatccccggatccccactgtctctctggtaacagcacactgattgtgtctggggcagccagccttctctcctccctcactatgagtgcaccaactgctgcagacttaggcgcataactcaaccctggccagtcagggcacagtagctcctggctctgtgattggttcaggatgctcacaaaacccacgccaagaagtcaggtccaatttgccaatctggggatcatcgcttggatttcaaaagagatgcgctccactcctccttctctccctcacttccccttgctagacttgggtctgtgaaagccccaagctgtcatgagccatcttggttacacaaggaaagagcctgagaatggagccagcacagagaagtcaagctgagagatagagagagaccaagttctgcatt

SEQ ID NO: 488945 - DNA, 610 bp, Homo sapiens
ctcagttgcaacgtaaacaaaatttgtgctctgtgagggaaaagaaatrtgacttttataaaaagtcttatcactttaaaaaatgctgacatccctgaagatagattgctggggctctcttctctccttgcttctcctctttctccctccccacccttctcttttttcttgttaattttttattcttaacatggagaaaaaaacttgcctctcttaggcagtatttgcagtcatgatatttttatattgtagtatcatttaagttgggtcataacctactacggcttatgaagataatttagtgagctgtaccagtattttgaaaaatgaaatagacccgaatacaacagactgtaatagaaaatattggaacacattctatttaaaaaattagtcaaatttggaagaaagaagttaaaaagttgggcagtatatctttctatatcacccatgggcattactggctcatatggcccattattgttacaaccaagaattattcagggaaatgaacttagtttgactcactactaataaagaatccaagatttagtaaaaatgcatgttaaattatacatttttattaagtatagatgcaaattatttctgt

SEQ ID NO: 488946 - DNA, 585 bp, Homo sapiens
cacacattgtactcaccaagcaacctgccatcaaccacccatgccatccctctaagtccccactacccatcaacccacaccctgcttctatgtgtatatattatttagcttctacttatgagtgatattatgtggtatttatctttcttatctctgattctgactctgacacaatgaccaaagtctgagtagtaccttagccattttttttttggagaaaagtttaaatcttttacctaatgcttgcattatttccaccttcttcctccaaccctctgagatgctgacaccactatcattaaataacttttgtataggtctcttaaaagggaagtaggccaggtgcggtggctcacgcctgtaatcctagcactttgggaggccaaggtgggcggactgcttgagtcaaggagtttaagaccagcctgggcaacatggtgaaactttgtctctacaaaacgtaaaaaaaattagccaggtgtgatgacaggtgcctgtggcagctactcaggaggctgagatggaagatcacctgagcccaaggagttgaggttgcsgtgaaccatgattgtgctactgcactcc

SEQ ID NO: 488947 - DNA, 480 bp, Homo sapiens
atctctttagttgttttttcctccttctttgtcttactcttctcatttcttcctcctctcccaaataaacgacatgtactcaagtctgtctaattttagtataaccctatcaaagacaccaactgtctttcgggcactgttgggattcagtggtgagcaagacagacaaaatccctgtgcttgtgatgcttccattctagtggaggagacagacaatttaaaaaatacacagcaggcatggaaggtgcacacatgttttcaagaaaagtagagtagggggagggtctgtggaggactgggcacccgcatgaacgtatgcaaascactgctgggggatgccctgttaggctgtctgctgtgtagaccttgctatgtatgtacattatggagaaatggttttgcttttcagtccaaatagagaaaaaggaagttgtatgggagttcgcactgtttggagattgttttgtatttcatcaaatg

SEQ ID NO: 488948 - DNA, 534 bp, Homo sapiens
tgtgatcctaggcaagatcactcccaaccttttccccctccatccctcttcccctcgctaaccattcttttcctgctagctgtcctggaatcccttgggcttgcaggaactccacccaggccatatccctctacagctattcctgctgtttgtgtcctcagctctgccaattaaggytgctcagaagcttcctttttgttgacccactggaatttaaaagctgaagagagcaatggctatcactctggctcagcccacaccctaccctacctccactcccattttacaaataataaacttgcccaagatcacacaatgaattagtgacggaacctgcagctttctctggaattaactccttgccaggctgagacatgaagaattgcctggtagtccctgcattcgctgatacctctggacctttggcttaggagatctgacctgccctgacccgcaattactaacatctccatgtggccagcagccagagggtggacaagattcactctcccaagatttgcttcaccaaaacca

SEQ ID NO: 488949 - DNA, 620 bp, Homo sapiens
aatcataagaacagccataaaaatagttcttcaaccacttcgtttgccaaggaaacaattcaattctcctcagatgattttgccagtcgccgaggtttgtgtgtgtggccacccacagtgtccatcctttccagttccttggttctctctcactaaagccatgaagccccctgaaaatgtcacctctgctggcagaaagtagttttccatctgctgtgcacacctctaggttttggaccagtgtctactgtcttctggtgccttccgtcctcagtatgggagcctgggccacactactgccattttgttctcacctgacagggtctcaacagcaycctgcagggcctggatgccatgggaacctctctgataagcagttattgccaaagagaccagttgccccagccaagtgactatgctgccacccctcagagtggaagtcctttttctgctcacaggtttccagaaacaccattggcctatgaaggtcactttgtagtctgaaatctctgcatttaccttataaatagaaaatgatagattcagtcacatgggtagtccattcttcacaccgagtggcaacctttaggctcaacaaggtagggataatacagaagggc

SEQ ID NO: 488950 - DNA, 239 bp, Homo sapiens
ccttctcagattgctacaaaggaccgccagraatcatgttgcttgtttcctaccgagagaggtcatccccatcaggctagcgctagagaagagggtcagcatcgggagcctgggaacaagggcagaagtgagggatggggaggcagcattcttacctttccgggcctgctggatgtatcttgccagcagggcgcccaggtgcgctcgggactcgccatccgttctctgcgataccctca

SEQ ID NO: 488951 - DNA, 565 bp, Homo sapiens
taccaggttgccctggggagcgaagaaaagggagtcaaagatgccaggagtcggcagctcaggaagtcaagacaaaagagaagggaacacaggcaggccgaggtgggaggcggtggggtgagggagaggccgcatggtgtgcgcagagtctgccatttccaaacaccccttggaaataacttctcatgtgtcgatctcagccagggaggcttgaaagggatttataaatgaacaatttcaaatccactcaaaaggaaaaaaaaggtgcacactgccaatacatgtttaaagagttcccagacacccacatcaaggcttatcccagttttaagggttcacgggtacaatagcaacatacttaatttggatctattaaatataaatagaaaatattctaaattcaagaaaaaaagaaataagaatgactataaygaaagagggtatcacatatccgttctctcactaggtgctaagatgcatctagagcggtgttctcaactagggacaattttgcgccccgtaccccactcccccagggacatttggtaatgtctggagacacgtt

SEQ ID NO: 488952 - DNA, 624 bp, Homo sapiens
tgcagtgtgcacactctgctgctgtcctgggactagagatggggcaaacatgacccaccattgccattaataaacgtaatttattaccaatgcctttgaaacataattttaggctcaataagtagcatcattaaaactgtaagaaggtatcattaaaactgatattayttacatgtacaaataaatcatgctcaaacttcccccatatattctctctcaagcaataaaaaaattgatggatacaattctattgttgaacaaatatcaactctgatatcttggctctcttcaatgtttcagggctacaggtggtcactgtttgctatctgaaatatcattttgtttatcttttataaagccacattgcaattacattagaaattaatgtcaaatgaattggtaatcaattcttgagtgcctcctcatctggggaggcggtggagtactgggggaagtaccctgaagtcattaaaggtggaaaattctcccctttgtggttttcctcactttgtggtgtcagtgtctgtgtgcttgcttgcttctcgaactgatccccaaggcagaggccatgccatatttgtctttaaatacttagtagctaacccactgttaacacatagcaag

SEQ ID NO: 488953 - DNA, 625 bp, Homo sapiens
ctggtaccccatttttcaagcacagcaggcttggtccttacctgatttctcatcctcagcatcataaacagtccatgagttcctagctttccagagctcactcaatcccttaaactaatttttgcctgaagaagggatataagaatatgccctcaggtgttcttggcygtatttggccaagtgtgaaaggcaaattggaaaatttagctaacagtgagtagggagagggagaaggagaatctccagggctgaaaattagggagaggctccagggctaaaaatttagactccggggagaggctccagggctgaaaatttagctaacagtgagtacagagagggagaggtgcctggtcccagaaatattcttccttagatgcacttacttgggcttggccccaaatctcaggcccagagaaaggacagatgcaggcagggaaactgtgtagtcaggagaatgcagaggtcactaccagaaaaatttcctgaacaggttcatgttggggtgattagtaatgcaacgatagatatttaaataaaagaagaaagggagggagggaggaaaggagaaagagggatggaattaggaggctacaataagagcctaggtaagagacaatgagga

SEQ ID NO: 488954 - DNA, 625 bp, Homo sapiens
ctggtaccccatttttcaagcacagcaggcttggtccttacctgatttctcatcctcagcatcataaacagtccatgagttcctagctttccagagctcactcaatcccttaaactaatttttgcctgaagaagggatataagaatatgccctcaggtgttcttggctrtatttggccaagtgtgaaaggcaaattggaaaatttagctaacagtgagtagggagagggagaaggagaatctccagggctgaaaattagggagaggctccagggctaaaaatttagactccggggagaggctccagggctgaaaatttagctaacagtgagtacagagagggagaggtgcctggtcccagaaatattcttccttagatgcacttacttgggcttggccccaaatctcaggcccagagaaaggacagatgcaggcagggaaactgtgtagtcaggagaatgcagaggtcactaccagaaaaatttcctgaacaggttcatgttggggtgattagtaatgcaacgatagatatttaaataaaagaagaaagggagggagggaggaaaggagaaagagggatggaattaggaggctacaataagagcctaggtaagagacaatgagga

SEQ ID NO: 488955 - DNA, 612 bp, Homo sapiens
tctctctagttggactctggtgagccttctgcctggagtaggtatgcttggtaagtggcactgagtgcccatgctcctcgggggcccatgatgcctgggactgactgaaaaactgggtggttgggatccttctgctgcagccagtgaggagggagccctgacacggcccctactccctggatgcccctcagactgcactatatagagcagggtggctgctgctcgggcctcccagggaaaatacgtaggaagcccactgcttcccatggcccagtgctttcacagtgaggagaaggggacacagaagaggctgggacactccggtggggcccagaggttccacagggatttgcaggatgattggaactctgcccgtctggccgcccataatacaatttgtacacacctgctcatgcattttcttcccttctaatggcgytttccttcccgcatccctgggaagtgctggggacaacagaagctttcttctctctaaaggccatcatagaacctagtccttaaaagaaccctcacatgagcccagagacattggaaaatgcaaccgtacttggcatgttgctatggggaaattgagggtgcaatatacaccca

SEQ ID NO: 488956 - DNA, 498 bp, Homo sapiens
tctatcaagttttgcttactataatggggcttgacttctgtaaatcattcagaatacaattttcattttcttcaagaaaacctaggagggttggctatagatgtactgagaaaatatgttacttattggatcatattaagttagataaaatatattttttacattaatttttgtctttttttactttttaatgtggctacyagaaaatttaaaattacacatgtgatcaacattatatttctattggacagtgttgcccagtgttgtaaatgtgctcatagttcactgagaacacttaataagtgtgaaccatgggcaaatttacaatgtatatgaaggcttctgtttacataagaccactaccaattgcaaagccactcagatttggctgttgttctttcctagagcattactcaagcaaaaaattaacttaaaaagaagcatgtgaactaaattgcaaacatttaagaaccttcaatgttagtaaatgaaagaaag

SEQ ID NO: 488957 - DNA, 498 bp, Homo sapiens
tctatcaagttttgcttactataatggggcttgacttctgtaaatcattcagaatacaattttcattttcttcaagaaaacctaggagggttggctatagatgtactgagaaaatatgttacttattggatcatattaagttagataaaatatattttttacattaatttttgtctttttttactttttaatgtggctactagaaaatttaaaattacacatgtgatcaacattatatttctattggacagtgttgcccagtgttgtaaatgtgctcatagttcactgagaacacttaataagtgtgaaccatgggcaaatttacaatgtatatgaaggcttctgtttacataagaccactaccaattgcaaagccacycagatttggctgttgttctttcctagagcattactcaagcaaaaaattaacttaaaaagaagcatgtgaactaaattgcaaacatttaagaaccttcaatgttagtaaatgaaagaaag

SEQ ID NO: 488958 - DNA, 584 bp, Homo sapiens
ttagcatagccatagtctgaaaacataagtggatataaataataaatgattaatcactattacattataatatatgatgtgaccaatgacactacatatttcatatgttgtcccttattaacaatgcataatacaacacactgtgcaaaattgcaataaactcagtgcattatcctgacatttcttttatttcctgtcttcttagatgcttcatgtctctcattttctctaaataagcatgggccttcactataccackgaagagatttgctctgcaattaaaaacaaaacaaacaaaccacacaatagttcagacttttgtgaccatatatataattaattctataaatcatttattgatgaaaacctgtcttgatcactggaatattgggaataataagacaaaatagctgtcctcatgaaattgattgtctaaattcttttgtatgtgatatgtagaagtaaatatgatgatacaagaaatatgtcagaggattttaacctagtctatgaagttagagaaggctttataataaaatggcattaagctcatattataaaggtaagtggattttattgaagtg

SEQ ID NO: 488959 - DNA, 549 bp, Homo sapiens
tttatttgtcttctgaaagattattttcaacagccaagtaaataacttatcaattgttacactgtttatagatgtaaacttctaccattggtatattatctttgtttttgtcaaaaatataaaaaaagattaaagtaatgatgcaagtatattctgacagaaaagagccttatctcttaatttagtcatgaaattctttgttccataatcaaattcatttttatgtacacaaaattacaacaagagctttaaagatgaatccccatcgtcagtcccacaacattattcccagtgttttgtatcatgaaaccaacaatccagcaaataaaattcccaatgcttttttccgcttctayttatcattattttctgctgtgaatctttatatatttctctcatctatgtgtgctacttaagtcattctaatgtatattgagtgtttctatttattataaatatgcttttcagatatatattatccatgcccctttgatttttttcaaatcaactttcatttttgagtagcttataggtaatattttcttcatt

SEQ ID NO: 488960 - DNA, 250 bp, Homo sapiens
ttttgtcttaatataagggtattaaagccaaatagatgctaatgtcctgtacaaaggtgaagtctacctggattataaacctaaatttgaaagataaagaaatatacttaacagaraaaaatagaatttctttagtaatttataggcaggaaaaaactttctaatttttttcaaatgcacaaaagaagaaatgtaatattgtgatctgtgacaaagtggtactcaggggggtgagtggaagggggtgggt

SEQ ID NO: 488961 - DNA, 677 bp, Homo sapiens
atttttgtcattttaacctgactcattataatattaataaacacgacatcaactttttacatgttttagtaagtaaagttctaagaagagcttggactgtaagctaatgactacaatgcaatataaacacagaaatgacattgagttaattatagagttaaagtaaacccgcagctacattgattttctattcggaagaaatagtgaatactttggcaaagttcctggtactattttaaatatatgaatacaagttagagaaagcaatcccgtagaggttttattttatctttatacccaccgaatttgtaaggagattgcttgatgagraaagattccactccactgagtaaaaagtgtgaaatatgttgcaaaacagaatgtgtatttttattaacaattaacattaattttctcaatcagatgcactaaaatctaccaacagtactattgtccctggagactattataaaatatcagtatgttaattcattttaatttcatatgcataatatgcttattattgtttatgattgattaaaggacattgttacagaggtaaacttcaactctttcgtttagaactcaaagtgaacaatatcatctgtgaattatttacatatgtaattcacaaggattttcataaaaagtgtccttttaaaaaaagtagcatacag

SEQ ID NO: 488962 - DNA, 605 bp, Homo sapiens
tttttctgttatatttgaagcgagttaattaaatcatgtttgtagaaatgcttcatgcagttcgtcccacaaagtcgatgtaagataaatgacaatttctgccatttctttatagcatagaggtaattccattaaataaagatcagaaacttaatactgtagtcaaattgtgatgtagcaaatattgactttttaaactacatatggcaattcattgtcattgttattagtataaacaagtctggacaatgtagttccagagaaacaggttcatagaacacatatattaactgtttttggatcccattctgtttctctgttctgttccaccaagaaatcaagaagcttgtgaatttgctgcctgttgtaggagcaatgaagatactcatttactgaytctcaagtctaaaataggaagggagaaagtatcaagaaatacaaatctgaggaatttgggtttacagagtgatagaaagacacagggctgatagctcctgtatcccaagcatcaggaattcttggagaaagagaagagaggtcacaggtaacaccatgattagggatttagtatgagaaatgaaagaaacacaatgtaattttatagc

SEQ ID NO: 488963 - DNA, 682 bp, Homo sapiens
tgtgtgaccttgtgctcgatggctaacactatgtgaaatgataggatagtaccagacgatctttaagatccattccaggttaaaagactgtaattccgaccatcatataatgttataattcagtccttaaaagacagccaagacctaatagtggccttcaggctgagtaattgctaactttgtgctgtaacaaatgtaacttttatattaagtagttctaaaaggtatcgatcaaagggtaaaagaaaatgaataggttgcattgccaaaaataaactgtgggtggataagaaaccaggtatcttccttaaatgcaatatgacaataaagaaaggtcaatttcttcatgggttacacaacaggaaatctagagacaatagttctttgtgcaactcagtacttgaattagaaaattcaatataaytcttaagggttataaatgatttgattagtaaaaggtaacaaataaaatgggcattttctttcatactacagagttcttctatatatattgataatgccttttgactaaaagatatatatgtctatgtgtgtataataaatctatatatatatatatatacacacacacacacttaagtatatgcatggtatgcaaatgtatacactatatagataaatatagagaatggcaattaaacaatttccacaataattacta

SEQ ID NO: 488964 - DNA, 594 bp, Homo sapiens
aaaagtttgaacatttatagtaggttcccttcttcccatccttagagggaagaaaatatgtgggaaagctgccacttaaaaacatgcacacggctgggcgtggtgggtcacacctgtaatcccagcactttgggaggccgaggtgggcagatcacgaagtcaggagatcgagaccatcctggccaacatgatgaaaccccgtctctactaaaaatacaaaaattagctgggcgtggcagtgcgtgcctatagtcccagctagtcaggaggctgaggcaggagaatcgcttgaacccgggaggcagaggctacagtgagccgagattgtgcgactgtactccagcctggcgacagaacgagactcygtctcaaaaaaagaaaaaagaaaaaacatgcacacatgtacacatacacatacacaaaactcaaaaagctataaatgtctatccctttgtcactctacagtatacacagccagtatgccataattaaagaatggctgttcacatatataataataaagggctactacacttgttgtgttattgctatttactgcattccgtgtgaagtccctcaaacattttctcactt

SEQ ID NO: 488965 - DNA, 545 bp, Homo sapiens
gggtttcaataaatgaaggcagttcagggagcactctgcctgaaggctgatggtctcggggagcatcttgcctatgttgtgggtgttccagagagcccagtggatgggtgtggaaggtgggggagagtgaaagattggccagaagggggaaattcttttctctaggggaatgaatgggctggagagcctgatgatgttaggggagcaggagcagatgcacatgcctgtatgcaccctggcaataagagatgaggtgtgttggtgttaatcccacatgttcccagtggaaggtggtgaaacctcacctcacagatttcagctkcaacctgtgtctgtggcagggcagaaaccccttttcttcctgcccctgaaggtacagcagtggcagtaagtgggtagctctccataggccaagtcttcctgtggtccagagtaagaagaccaatcttcaggaaggcagtaaaaggtcaagggcagaggtcatgagatagtgggagtggagaagagagggtagggcttagagatatgttgggggccaaactgcc

SEQ ID NO: 488966 - DNA, 574 bp, Homo sapiens
aggggctcttatgatcatccctgtgtgagagatgccagacacatcaatcactcaaatcacagctctgcccattccaagccactggctcggggatcaagggcggctttctccttcccagctctctcagataaagctgggatttactatttgtgccgggtagaatgcaggaggatgtaatgggtgagcagagatcgtgtggtgaagcagtgcaggctcgtgattcagagcaagccacatacgctagcaccgagggcacatggctgggccatgggattatcccaaagttctcagaatataaggaatttgtgttcttgcaaattatctgtcaaatgcctccccttacttccccatcacattcaagagtgcttgttaacatgagggattggggagacaggtttgaaaaatctcaagctcaaagaacttgatggggtatgaaggaatttgcccaaaacacaaccggaatttaatcctgtggcctttagggagaatctrcgttcatcaagggatggagccatcatgagaggcccagggccctgcctggtggcaccaccaggaaggcaggctcatgtctgca

SEQ ID NO: 488967 - DNA, 574 bp, Homo sapiens
aggggctcttatgatcatccctgtgtgagagatgccagacacatcaatcactcaaatcacagctctgcccattccaagccactggctcggggatcaagggcggctttctccttcccagctctctcagataaagctgggatttactatttgtgccgggtagaatgcaggaggatgtaatgggtgagcagagatcgtgtggtgaagcagtgcaggctcgtgattcagagcaagccacatacgctagcaccgagggcacatggctgggccatgggattatcccaaagttctcagaatataaggaatttgtgttcttgcaaattatctgtcaaatgcctccccttacttccccatcacattcaagagtgcttgttaacatgagggattggggagacaggtttgaaaaatctcaagctcaaagaacttgatggggtatgaaggaatttgcccaaaacacaaccggaatttaatcctgtggcctttagggagaatctgcgttcatcaagggatggagccatcatgagaggcccagggccytgcctggtggcaccaccaggaaggcaggctcatgtctgca

SEQ ID NO: 488968 - DNA, 592 bp, Homo sapiens
gtgggagaattgcttgaactggggaggcagaggttgatgcaggagaatcacttgaactggggaggcagatgttgcagcgagccgagatcgctccattgcactccagtctgggtgacagagcaagactccatctcaaaaaaamaaaaacaaaaaaaacccagaaacctcattgaaaaatcatatcatatccatgaaactttcttaatggagtgcatatgggtgttttttttgcattcaggaaataaactaatagaaagaaatgatagtcaaacacaaccacaagaacactgcctttcatgttcctgttagggacaggctcttaggagtcaagaactagattgtagaatccaagcccctgggttcatacctataatattaccaaataatgactttaacaaatttttactgaatgcttaaatgtgtaaacccccctgccactatggagcaagagttatgtaaaactttctccttacaacatagtagttagaccttagttccaataagacttatattaaaggtagacttctagaatcccatatttttcttaataactacaatttttaagtcatgatgcctcagcctcacatctgtg

SEQ ID NO: 488969 - DNA, 486 bp, Homo sapiens
caaatttattttctggcattaggcaaactagtaaatcacaatccctgccctatatgtacagaaggatttctctgatgacctcggttgagatccatcaaggggaattttctctcatcaactgtttaacaacaattactgagcaccaatgatagtccagagatgacttaaaaattcaacgctgatgttctgaacatgtaccatgagctggagacagactatcaatgaagtcctgtttaccatggcggtctgtttcaacaacagtaaccggcatatagtaggagttattggtcattatttgttgaatgaattaataaatggatgattactgaggcagtcctcaccattaagagatggacagyccacagagagttctgtgatacaattattataacacgatgtgaatctttatatggaaggtatgcaaaggaaatgcagagtgttaagtccacaaatctacagagatcttgtgtgtgttaattttggtgg

SEQ ID NO: 488970 - DNA, 672 bp, Homo sapiens
atcttttttcaaaaaagatgccacagcaggaatcaagttaggcttttgaagccacccctctggcccacacacaagaagtcccctccttgtccaggagaagctctgaagggagtggaagtgcaggggcaacccaacgccacagaaatgtggacaaacactgcccaagtcgtatcctcaggggagtagggctctggggaaaatacctctgctctacgtaggtccatgccctgggaattctgtgaacatccctgctgcctcagtgctgtgaattctacatcaagggggcagaagaagcaggcagcctcagtgtttaggtttcaataatgttagggatgagggagagctcaccaacctggaaaacgtacctgccgccataccttgcccatctaatcytggcttccaggtgacttcctgggtattcatccaaaatgctcctcttcagagtcctaacaaacctattctcattgccaccattgccctagaggcactcctttcttggagagggaaagccagttgattgatagaacattgtataagatggggaataggagagaatagcttccatccctctctgtacccaccttctccccagaactcatggctcttgagaaattagagcaaattagtgagtgaccacagtgttttcctccacatcattctgctgtctttagt

SEQ ID NO: 488971 - DNA, 624 bp, Homo sapiens
gagcaactgtgtgtgtgtgtgtrtgtgtgtgtgtataagttgaaacactgaataattccccagagattaatttctgaatttagctgacacgttgtatacagtaattcccctttatctatggttttgctttccatggtttcaagtctactgtggattgaaaatacgaagatatgttgagatagagaaagtgtaaacattcatgtaacttttattacagcatattgttatagttgttctattattgttgttagtcttactgtactttatgtataaattaaactttattataagtatatatgtgtaggaaaaaacgtagtgtatgtgtagcgtttgttactatctgctttcaagcatccactggggtcatggaatgtatcaccctcacataaggcggggactgctgtactccttaaggcatttttctttgaggctagtctagtaagacataatatcatatttccgttaatatctaactgcatttcttggtcaagatcttgccttgatgttctctaaaagaaaggcgcacagtcttaggggcaaaacttgttttgcagtttttatgaaatcagtcatgttcagagtgagaatatagatgtgggaaaggatgcaacgttcatgtgctcc

SEQ ID NO: 488972 - DNA, 631 bp, Homo sapiens
ctgctccctgaattggaaatgcatgatgacacactgactctaagggaacagaaagtgcaatacacgtcccttcccccacacaacacamaccttttctcttcatttcatcaaaacaaagtctgaagttgccattataatgatctactaagagatctgggaaattaatggagaatgaaattaaaaataaacacacaagaaaaggataaaataaaatttaataataaataccactagttctaactttacttaatactgagccggagataaatcttgctggcaaagcctgtggggctcccagcctcaaatgtcctgttataacttatcacttcctatgtggcaggttgagggaaaaacacaacccaagaaaactcaagctgttttggatctggattcaaactaggctaatctagaagcattaatagtacttgctctaaaaattggcctcctctggccctgagatttgttccacaacccatctggaatccctaatcctaatgcaacattggacccaacgacatctgagagtctactctgtgcaatacaccatgttaagcaccaccctctatgttctttccactacactagtggttgtcaaatttcagtgtgcatctgaatctcatggaagccttgt

SEQ ID NO: 488973 - DNA, 533 bp, Homo sapiens
atcatgttaaaaataatctttacccgtttcaaatatctaatagatatctaattatttatacaggcaggcaggcaggcaggcacgcacacacacacacacacacacacacacacacttttcactacagatgaaacaaacaaaaaaagacagagacaaaataatgagcaaagcactatacctaaatacgaagaataaatcagaggaatgagaaaaaaatgacttcaaagttttgaagttcaaagttagaggtctctagtctccttgtatagtgagcgccctctggctatatcaagaaagcaaacactcctctgtactgtttctgcatttaccctagtattttaaaaacatcatcctcaaattctttgtaatacacttaatcataataaaagaggaaataacacaactctccaataattcaaagcacaacagacttgtacctcaatttatcagaaataccaagtgatatraaacacatccatggttgcataatattacaacatctatatttctgaatctctgctgattactgaagt

SEQ ID NO: 488974 - DNA, 622 bp, Homo sapiens
gcactcagaatcccaaactccgccacctctagtcccactcagctggctccaggcaccccaagcatcagctcagccacagscctgagaaactggctctgcaacatacagtctcaaacttccaaacatgagcctgtgtcaattctttggagagaaacccagctctgaatctcagaatccaccgcgtcccctctcctcaatctccttggattatctgaactttcctctgaccttccctcccctcccacccctctgcccaaaatcaggaaaaaaaagagaagagaatggggcaggactcacgatccataggaatttcgatggctccgccaagactgaggaggcagaggaggaaggctgcatggacccagggcggcggtggctgcctggccatcctcggcacctggccctgctccctgctccccagcactcggggtcttgtcacctcgagccgctttaactgggcctcctggacagcactcagctgtggaaagaaacataagagcaagtgagtttttcatgaacttgtggtttgctctagcaatcctacagggctttggaggaccgaagagcccccttggtcacagagtaatgttctagatagagcagagtttcttaacctcaacac

SEQ ID NO: 488975 - DNA, 622 bp, Homo sapiens
gcactcagaatcccaaactccgccacctctagtcccactcagctggctccaggcaccccaagcatcagctcagccacaggcctgagaaactggctctgcaacatacagtctcaaacttccaaacatgagcctgtgtcaattctttggagagaaacccagctctgaatctcagaatccacygcgtcccctctcctcaatctccttggattatctgaactttcctctgaccttccctcccctcccacccctctgcccaaaatcaggaaaaaaaagagaagagaatggggcaggactcacgatccataggaatttcgatggctccgccaagactgaggaggcagaggaggaaggctgcatggacccagggcggcggtggctgcctggccatcctcggcacctggccctgctccctgctccccagcactcggggtcttgtcacctcgagccgctttaactgggcctcctggacagcactcagctgtggaaagaaacataagagcaagtgagtttttcatgaacttgtggtttgctctagcaatcctacagggctttggaggaccgaagagcccccttggtcacagagtaatgttctagatagagcagagtttcttaacctcaacac

SEQ ID NO: 488976 - DNA, 297 bp, Homo sapiens
aagatgggacagaggatgaagaggacagattatttgatgtgagcatatagggccctcagctccccaggctgggctcactcagcatggaaggcaggcacatggtttgcaacccctgccatccattctgaggaaatttccatccaagtcaaaggaaggartgaatccaccatctttctgagtatgagagttctagtactgagctcaaagaacccaacatagagtgacagcagagatgccctgcctgaaggtacccctacatcagcaaggcttacagttcccctgtcctgatgaccagga

SEQ ID NO: 488977 - DNA, 413 bp, Homo sapiens
ctgcattaaagataaagatcttgaggagtttagcaaaagaaaaaaagataaggttatagagcagtcatagatgcaagtgatcaatttctacttagagtgtgggaagaatttaaaagtggctttcaagaagatatggtgcaggcaatacacttctccttttataatttttcaagagacttagctgycttagtttatttgaactgctataacaaaaatgccataaaatgggtggcttataagcaacagaaacttatttctcacaacctagaggctgggaattccaagatcaaggtgccagcagatgttgtctgctgagagacatcttccaattcatagatgtcatcttctatgtcctcacatgttggaaagggtcatttagctttctgtgtcccttttataagggcactaatctc

SEQ ID NO: 488978 - DNA, 652 bp, Homo sapiens
ctgacatccaaaatataaacactatttttttctcttctaaattctttagacctatcctactatcctaaaaaaaagggatgctttattgctgctttctgtgtaaaatgaaatgtcacctttgaatagaggttcaacttgtcatttagttataaaaggtaaccartgacaatctagtcattgctatcataccataaggagtctaatttaataatggtggacttgagaaagtgggaattattctatgcactaggaatttgaacacagtacaaccattataacaatgcaaagtttatatggattgtgtttcagaatatgatgtatctggatattgaaaaatcatttttccatcagttttattcactgtgtagctaaggaatttcaattacatccagttaacccagaatagtgggcatcaaggaaaattcaagatatagtttttgacagattatgattaggtagaggtaaagaaaacaatatcacgaggttagtgtttcacaaattgggttacataaaacaatggtgtccctggagatactaaaaatgataagtaataaaattagttgatataaatgtatcaatttaaatcaaatccctcttgaagcatcacaattcatagagaaatcaatgagaaatcctggaatgaaggtatttt

SEQ ID NO: 488979 - DNA, 533 bp, Homo sapiens
tcatttaatgttttagcaacaaggccactrcgctccagtcttttctactattcaatataaaatgattagatgaacaccaaaactgataaaaatgctgtatcttgcttaagtgaaagatggagaggaaatacatacaaataagaagtatagaatatcacttggtggttttgcctaatagaaaaagttacaaaggataatagatggttgtgataaaatcagccctggagatcgtagaggaataaacgctgtccaaaggaaattaaactgcagatctgcctacattcagtaaaagggcttcccctaagaaccacccctcccatgtcaagtgaaacttacctgttttatcaaattgtcagtttctgttaagtgacataaataataaaaaacacttagaacagtgcctgaccctctagttgttcactattgctattactgtttttgtataatcagtcagttcttgagaactaaatgtaccaaatatcagcaattttatgtagctccacctcattattaatactttgagtttgttagca

SEQ ID NO: 488980 - DNA, 643 bp, Homo sapiens
cattattgtacatctcggcttcttatccatagggttgttagtttcagactaaatacatctcttttagatactacagacaacttctgtggcctctaatttacagtgtttttttgaaaccaaaatatacttcccatgttctcatcctgtgaaccarccaaataatcttattgtaaaaaggaagcgaagattgactaggcttgcttctggtcaacgtagtttggcttcccatctgtttttaaattttgcagatgaaatcaggctcacttgtctattttcagaatttattcattgactatgcaaacatattcaatttttgaacctcttcttaggctggggatacaagatgattatttgacagccctacttaattggctcacagattagtaggagggagaaatgtggccaaaggattgacatgaggcacacagtggactctgtagatacactctagaggaagtcagaggcagtgaaggagggctgcctggaagaagtgacctttcatccgagtcttgaaggaagagtgagaaaaggagcaatttaagcatgggaaccagcttaggaagaggcccagaggagtgtgaatgcatgctactttcaggaaatctcagagagtttggggtgactgaaaggttggcatagtata

SEQ ID NO: 488981 - DNA, 556 bp, Homo sapiens
atggcacaacaggctttggagttaaatagacatggattccgatcctggctctacgatttactagctctgtatgcctaccacgtctctctgagcctcaatgtcatcatcaataatatggagatagtaaatcatagctacatttaaaggctgtgaatgttaacttatatactgcttatgatcactttgtgtattgatgacaaatatggtaatgctyttccctaatctgttgcatttgcagtttcaatggatgaaagagaagtttctagtctttatacttgtgatccctctcactttccaaggatactgcaaaatgaagtattactatatttcattcttcaaaatagcacttcaatatgtctccctctgatttttaagcctaattttttatacaaagattttttatttcatattttttgttgcagtggggtctggatttatagatctacctgtgccattcataattgagcagccattaaaagtgttcttccatactgatcttcatatattttttacttgttttatcctaacatttctatacttcaaaaaaaatgagcaa

SEQ ID NO: 488982 - DNA, 506 bp, Homo sapiens
tttccttttcctgttattttttcattcctgctcttaaattctctcattttttatgtttcactttcaatcacttgtcaccttccatctgtcttcacttctttcttttttgaactttaatcgtcctttcttactccttcttttaccttaccttctgccctgtaccttgttaaagggcaatcctagatatcatcagcgtgcattttgttagagatgtccactcgtttttgaagttatgcactgaaattattcctacttcattttgttttgctaaatcggaaattgatgcttctgtaaaatttttaatgtataagttaataatagaatggatagaatataactcttaaaatgtgccacatggtacaatgctatagtatggagaaaactgatagcgttttttttttttaattatttgattgaagttacttaaattaatatacagttaagtgcttgttctcaagataatrgtctaaaaagcaatatggttagtgttactgagagtaaaagtt

SEQ ID NO: 488983 - DNA, 632 bp, Homo sapiens
gctgctgtctaatccctgaatctctggcaatgtatggggtaaatattcaagtcaggtagcatcattcttgaagaccatggttatcagtttgctattatattttgtatatattattagttattagtttaaagccagcagtataatcaatttaaagctatgggtctagttgctaatctgaaaaagtataataaatacactatagtttacaaagagtagaaacagaaaatagtttttattgtacttttttcaaattaaaaagtggacctattaaatktaaaggtaatttacctcaaaacatatggagcatattactttaaaatgtaattggccagacgcagtggctcacacctgtaatcccagcactttgggaggccgaggcaggcagatcacgaggtcaggagatcgcgatcatcctggctaacacggtgaaaccccgtctctactaaaaatacaaaaaaattagccaggtgtggtggcgggcacctgtagtcccagctactcgggaggctgaggcaggagaatggcatgaacccaggagtcagagcttgcagtaagccaagatcacgccactgcactccagcctgggcaacagagcgaaactgtgtcccaaaaaaaaaaaagtaattaacata

SEQ ID NO: 488984 - DNA, 583 bp, Homo sapiens
tttgtaatgcgtgtcaaaaccctggaaatacttctttgactcagcatttctgcttttgggaatgcatcaaagcaaataatgatcctagagcatctagtttattaacaagggctcataatgcaccaagtgttctgttttgctaagaggtttatgtaaacatctcatgttgtccttaagactacagaataggaccccggtttgacgatgagaaaaactgaggcaagaggaagcttagcaatttgcccaggcccacagagtaaataaatggcacaggtgggattcaagtccaaattttcyaactccagcactggggctcttcaccactcctctacagtgcataaaggttttatagtctggttcattacaactcacaatagaaatacgaagcaatctagatgccagaaacaagagagtaattaaatgatcttaggttcattcccacaatgacgccatggcagccattaaaaacaatactgcaggacaaaggaatggcacgccttacatcactttctctgagtctgctcctaaccttgcctaaaagggaagtagggaaaagagataggaaacaacaattacctttgca

SEQ ID NO: 488985 - DNA, 588 bp, Homo sapiens
gtcacttggaccattacaagtcccctttgtctttgattaagtactataatcataaatctttttaagtccccctttcaatgcatggaaatatacagttgtctcttagtaaccacaggggatttattccagaacccccatgaataccaaaatccccagatgctcaaktcttatacttataaaaaagtataatatttgcacataacttatacacatcctcccttatattttaaatcatctctagattacttatacagtcccccaaagtcttaactcatttcagcattaacttcaaagtccaaatccaaagtgtcatctgacacaagacaggtgtcttctacctatacgcctgaaaaacctgtacaatgggggtacaggctttgggtaagtattcccattccaaatgggagaaattagacaaaacaaaggggccacaggccctaagcaagtccaaaacctgactgggcagtcattaaatcttaaagctccaaaatctcctttgactctatgtctcacatccagggaatgctgatgcaagggatgggatcccatggctttgtgcagcttcacccctgtggctctgcacggttc

SEQ ID NO: 488986 - DNA, 660 bp, Homo sapiens
ctgtagactgcccatccttcttcaacaaatcttgactaatgaatttagttttcagagcacttttctaaaatcttttggcctaagaatgatttggctgtacatgttgatatatccaccactgggataatatgtccaaagacctttttacaatgggcaaggaaatacacatttaatttaaataaataatgtccattgaaagtgttggaccttcccagctttgttaaattatgtaagagccgtgtgtctaaatctatatatctaatctattgcaaaatacctacgtctgttttgaccgtgtcaaattggactgtgctttggcatgatggaggtgaagcccacattcttctcctccccaaaagacctggtgcatctgagtcttctgacacataatgctgaccttggatggggagaggttttctgctatcctctataaggcatcaagtacacggaaamctactgctgctaacagatgcttgtcttgtaaaaacaaagatgagcttagataaaatatttgagaaataaaaaattgagaaatgaagcctaacaaaatcagcctcaagggctttttggatatccctgatgctatgcagcttggtttcattgcttcacacactgtgagtttctggtgggtccatttcaggatcctaataaggtcatgat

SEQ ID NO: 488987 - DNA, 625 bp, Homo sapiens
tttgttattattaccaatttacagataaaaaacaaaggtaagaaaaaaacgtcaagatttgataactggttagtggtagaggtgaggtttgaattggtgttaccgtctccagcatcagttcttttaaaaaagctctacttgtctactagaacccagtacactctctagaggcagtggtagctgctagtattctttttawtttttgctgttaacaactatttgttcccaactatcttcaatttctttttttagtggaggaggaagggagagaagtcatggatttttatatctgtgttaacaatatgtagtcaaataattcaatcgttatacacttcccttctctctttcccctaagcttacattagttagtaactaaactgattttgattaaatcttcctggtgattagttaagaaatttcctgatgagaagttttcacacagaaagctaaaggcagcagacatgaatgctagaatagtaatactatgatctggaggatttaccattaaatcaagtggggaaatacttttaggaatagaaatcatctgctccattttactgcactaaataaaagatgctccaacataggtgctataccaattcattattgattatgccatttctct

SEQ ID NO: 488988 - DNA, 625 bp, Homo sapiens
tttgttattattaccaatttacagataaaaaacaaaggtaagaaaaaaacgtcaagatttgataactggttagtggtagaggtgaggtttgaattggtgttaccgtctccagcatcagttcttttaaaaaagctctacttgtctactagaacccagtacactctctagaggcagtggtagctgctagtattctttttaatttttgctgttaacaactatttgttcccaactatcttcaatttctttttytagtggaggaggaagggagagaagtcatggatttttatatctgtgttaacaatatgtagtcaaataattcaatcgttatacacttcccttctctctttcccctaagcttacattagttagtaactaaactgattttgattaaatcttcctggtgattagttaagaaatttcctgatgagaagttttcacacagaaagctaaaggcagcagacatgaatgctagaatagtaatactatgatctggaggatttaccattaaatcaagtggggaaatacttttaggaatagaaatcatctgctccattttactgcactaaataaaagatgctccaacataggtgctataccaattcattattgattatgccatttctct

SEQ ID NO: 488989 - DNA, 458 bp, Homo sapiens
ctttaaacaagatgcaagtaatgtgctatagagagtaggatccctataagtttatccaggtggttttaatggaatgtagctgtatgctgcatttakgcattggagcaagatgtatgggttattttatagagaaaaatatgaattaagatctctagtggttaagccatttgtaactgttttaccttaatgtcttctctgtaatagaagttagttccatggcggtatatatggtgtaaataaagtaaaaacaagttagatgggctgaaatgttgtcttttttctatttcattaacacatgtactgttatacatacatatatacatatgcatatatatgtgtatataaacatatttttgaggcacatttttcttcatttaagactttagagaggttttctaaaacttaataaagaaatgttcttataaggagaagaaaattaatcccttacacattttctc

SEQ ID NO: 488990 - DNA, 651 bp, Homo sapiens
ttcctgggaaccaatcactctggccagaggtggttgttctctgaatggcaaggcctgggtcatatactcacccactggatcccctaaagaggatgctaggcagacaaagaaaggggacagagaggaagagagtaggagaattatacaggaatacatgtgcttatagagaatggcacaagatgattggctaggctattagtggagaaaagtaaccagattatgaattcatgtagctaaggattctgcacattaccataaaagacataattaatggatgtacatagggtgtgacaatagyaaatttatattttagtaaggtcactctggcagcaacatgaagagattggatggatagatataaatagatagggatggagatataaataaggaagttttaatattttattcctgaattccactgtataatgtcttgtatcctccattccactgcctgggtttgacagtcagagtctagatatgaaatatgaaacaataagagcttaaagaggggtagaaacattacattacctaagggattggatgtgagccaacgtgaacaaagaattaaaaggaattggcatctaactaaagagggtgagagaaaaaaagagacatgtaaacggtgactgagagttatgatacttggagaaa

SEQ ID NO: 488991 - DNA, 622 bp, Homo sapiens
ttagccaacaacaaacatgtatcttatctctgtcctatcctcaacatccagcacaatgcctgccatatagcagatgctcaatacatagcaatattaaaataaaatcattaattcttcaagttctgttctaaagtgaatgctccacttatatgaatgcgtgataacacatgcatctgaaatatcataagcagaatctgtgaagcagcatgtattttttatttttttattttttttgagatggagtctcgcgctgtcgcccaggctggagtgcagtggcacgatctcggctcgctgcgacyttccgccccccgggttcaagtgattctcctgcctcagccacctgaatagctgggattacaggtgctcgccaccacacccggctaatttttgtatttttagcagagacagggcttcaccacgttggccaggctggtctagaattcctaacctcaggtgatccgcccacctcagcctctcaaagtgctgggattaaaggcatgggctaccatgcccagctgacattttcaacatatcaaatttttcaccactatttcttaaatgcagctatggaaatataaaacacattaatgcaatcttctggctaacttcataatttcataaa

SEQ ID NO: 488992 - DNA, 524 bp, Homo sapiens
ggtctattagctagaaaagctgaatgactgccatacaagctttcacaamgtgagaaaggagacatccaatggcttatgctgggcaccatcaatatttttttttttagaacgtgtacccacattaagatgagctgaagagttcaagtactgtttccctattattgaagaaaattgcaaatatgggtaaaaattcttgcaagaggcaatcctggaaaaacaaatgtaatgctcattaagcaaggaatttttatctttcttttcaaagcatattgtcaacatgtatgaaaaaacccaagaggacatatttgctaaaaataacacaacattgcaaaagcacttagaaaatcaagtaatttattaaaagaaatttaagatgctttggaaatatctttaatatttgagcataatgctgtaataagaacagatatggcaaaagaaagaatattgagccacaaatgctgggtagttgactagtctgagtagatgtgacatttctgctcaatctttctccccaaatggagtaa

SEQ ID NO: 488993 - DNA, 494 bp, Homo sapiens
tgtacttatcacccttctctgcataatcccaggccccaggaaccgatctgtcctgtcagtctacttgcaggtgtagaagagtcccgaccagcaatttcttcaagtgggaagggccaggccacacatggccagttctttccccaaacccaccaataagagaagtggttgctcctccactaggggcaaggcargaggtgaggagtgttaccccagtggagggccccctatttggaaacacagggaaaggggaataagtgatccatcctcctcaacaagggccatgccgggaaagtaaagggcacaatgagggattataggagggtactttttttaggatcgagatgttaggaaggctcctttgagtgagatatataaaatgagccctaagcaatttggctccagaatccaacttatctggggggactaggtcatgcaggctttgacgttaagaagttgagttttttcctaagagcaatggcacaattttgaagaat

SEQ ID NO: 488994 - DNA, 658 bp, Homo sapiens
gactttccattttaaaaggcaattttgtccaaagtagtctgcagactgaatccattcctgtgacattttagtatttttcaatgtgttaaagaaatctaatttggaactaatatgaatttgtcttctgtaatttttttctctgcatctctctgaattttattcagtatttggtaaagtaacatttactgaaattgaatttacagcttccttttgtatcaagaaacacctttcacattggcatgtgggtgacagccatttcccatgtcaaatgggtaccataatctaccctgatacatttttttctcctagagtttaaaaagcaactggaatatcaccgaactgaactaaacacagaaatactgaaaaatattttgtccacactaagaaattgaaggagtatggtttttatatgttgcctggcttttatagaaatttgtgataggaaaacagcaatgatattaaaatatattataaagtaaaatagcatttataaattgcctgagttaaatatatatatgtatgtatgtgtgtgtatrtatatatgtgtgtgtctgtgtgtgttttttatatatatatatatatatatatatatatatgtatatatgtatatatagtatatcattcttgatactactcctgccaacatcaaagcttcaga

SEQ ID NO: 488995 - DNA, 619 bp, Homo sapiens
tccccatcctaagcagtgtacagctaagtgattcattaatgagcataaaatcaaaacatcatctacctccactaaaataactgctcttacatttgctaaaattttgcatgatttgatcacacataatcctgctaaaatctctacctctgaggatctcataaagtactaaagatggaactgatctcagcattgatgagtttgacttcacaggagaatgcaaggcttcctgggaacttacttcattgaatgcttgcttcagcagtttctgatggacatctcagctggatctscacagctgtgaagatcttgtttcttatgcaatatgaatttgacttctctgaaaggcacaagaaactaagcctgtgtttatctagataatgaatgttcaagtaattaaagaagtaaattatcatgactctgagggcgtaaatgcaatgtaaatgacatgagcagtagggtaggacccagaagacctagcttctttattctaccacaaagtagccaaacaacattagagaaatttcttgaatgtttccagaggcaagtgtcccaaaagggatatagaaaatacaataaatattatagaatttttgaaaaaagagaattcatatctggctca

SEQ ID NO: 488996 - DNA, 550 bp, Homo sapiens
tgataataaatctgatttttcttcataattattacttgcacatcagaattacaatttttgttttgaagaccactttttagttcaagaaattgcatgatctctcatggattatgggtagctttgattatccttgagttaarataggtaatccaaaatgtttaccacagattttaagattattttgaatttaacattataaatcataacagtatctaccatacacatttgaaagctatctgttaaaaggtcatcatgttgtacaacacacattcacacatgaacatctgtatatataaaggctctttgtcaagacaatgggttcaaaggtcttttgcaactaagagagctcctcacctctaggtcctcacttgacagtttgggtgtgtgcatttaaacaacaagaatctcagagaatctaaaataatgtctctcatctacttttctctagaagcagtttggaaatcggtgaacataggttgggttgtgaacaagacagaggtgctatgccacttaggctgttggagtatgagatgtcagatgccctgaacat

SEQ ID NO: 488997 - DNA, 647 bp, Homo sapiens
gggaagccccttataaaaccatcagatctcatgaaaactcactcgttatcacgagaccagcacgggaaaaactgcacccatgattccgttatctccacctggtcctatccttgacatgtggggattattacaattcaaggtgacatagccaaaccatatcactatgtattatcttataggcttttaaatcactcattctaacttgttttttcctctgtttatatagaagtatcttgttcaaaaaaattcatgaattattagttaataagttttcacaagttgcagagtggcaaaatatatctgctacagatagtggaagatatttacaaaactgtatctattaaaaagttttktgctataaatttcaggtaaaatatggcagtatcaaatcagaaaactcttctagactatcgcttctaatctaccaacatttctttatgagctgtcagccaagaatactgtcaaaagaatacaggtaggaattggtcctcactctcccctacacagacacagttaaagcaaaagtttgaatagtaatttctctttctggtaaagcaaagcaactatttacataaaaaaagtatttgagaccataataatcaacttgaagagagtgtattggaagataatatgatataaacttcaaa

SEQ ID NO: 488998 - DNA, 550 bp, Homo sapiens
tgtgtctaatgctagcctggggaaagatctgcttcgaagcacatgtggttgttggtaacactcacttccttgtcagactgagaacctcactttctttcttctccagagatcacccttagttacttgccctgtggccatttgtataagccagctcacaacaacatggcagtttgctttgtcaaagccacaaagggagtctttcagcaagagaggcattacagtgctatgttgcgttaccactaaagtgacaaccatcattgctatggactgaatgtttttgtcctcctcaaattcgtgtgttgaaattccaacccctagtgtggctatttttggagacagagcatttcagaatatagttaatgttaaataaggkcaaaagagtggaacctaatgcaataggattaatgtttttgtaagaacagataccagaaagtgctctctcccacccttgcatgttctttttctcttttctctccctttctcccacccctgccatcctaccccaagtgcatgagctggtataagaccatgtgaggatatagtaaaaagt

SEQ ID NO: 488999 - DNA, 550 bp, Homo sapiens
tgtgtctaatgctagcctggggaaagatctgcttcgaagcacatgtggttgttggtaacactcacttccttgtcagactgagaacctcactttctttcttctccagagatcacccttagttacttgccctgtggccatttgtataagccagctcacaacaacatggcagtttgctttgtcaaagccacaaagggagtctttcagcaagagaggcattacagtgctatgttgcgttaccactaaagtgacaaccatcattgctatggactgaatgtttttgtcctcctcaaattcgtgtgttgaaattccaacccctagtgtggctatttttggagacagagcatttcagaatatagttaatgttaaataaggtcaaaagagtggaamctaatgcaataggattaatgtttttgtaagaacagataccagaaagtgctctctcccacccttgcatgttctttttctcttttctctccctttctcccacccctgccatcctaccccaagtgcatgagctggtataagaccatgtgaggatatagtaaaaagt

SEQ ID NO: 489000 - DNA, 435 bp, Homo sapiens
tggaagagcaattctactattttcccgagaggcaagagaaccaaacgtgtatgaatagccctaatgattgctatacacataatcaaggaagtcctttctgataaagagacatttgaacagaaacctcgagagagtgaggagttagctggtagatagaagatgggactcatttctctggcttcccatcccaaacagcttagggtcatccttgacgctttctctgcctttcacaacccacgtacaacccatcagcaaatcccattggctagacctttataatggtcccgatttgaccactgctcactgcctcctcctcctcctctggtccaagcctcatcatctccctctgcgtgattgcagtagcctcctaacttctggctgcttctgcctgtaccccctgctggstctctccccaccacagccaggggatccttt

SEQ ID NO: 489001 - DNA, 630 bp, Homo sapiens
tatggctggctatatccaactacctaatggacatctattttgaatgtctccaagaaattccaacgaacatgcacyctttagctgctcttcctccaacacaccccagttggatgaatgtctgtcttcttcggctggggctaccataacaaaataccacagatttggtggcctgaaggccgagatcacggtgcccccatggtcgggttccggtgaaggctttcttcctggcttgaaggaggctaccttcttgctgtcttcacatggcagagagagaggaagccagttctctggtctttttataatggtcctaatctcatcatgaagcccccatcttcaagacctcatctaaacctaattatcttccaaagatcaccctatccaaatgttatcccattgagggttagaccttcagtaaataaatgtgggggtcaaaggacacaatttggtccacagcatttccctgtgaaagccatatatcttcctctcattttcctcccaacctcattacacacacaattcattgacttcgttttcacgaaatgatcaaatacggaaatgaatctgacagaccccacatttttatctttcagttatctgaaatttcaccatttggaaattagtttggattaa

SEQ ID NO: 489002 - DNA, 618 bp, Homo sapiens
agcacgcttgctcagatctataatcctagcactttgagaggccgaggtgggtggatcgcttgagatcaggagtccgagaccagcttgagcaacatggtgaaaccccatctctaccaaaaaaaaaaaaaaaaaaaaattagccaggcgtgcttgtgtgcacttrtagacccagttacttgggaggcttagtgaggttacaagaagtgcttaagcctgggaggcagagtctgtagtgaacagatatggtgccaccgcactgcagcctgggcaacagagtgagactctgtctcaaaaaaaaaaaaaaaagaaaaatggctgagcttaaggaaggccgcaaagaaactgaattatgtacccactctgtttgaaggtacttgctgagcagttactgattttgtgaaacagacttaaattcaaatctgaaaatttctgattagaagcaagattctccaagcctgtcagaatgagagacgatcaaattgagcaacaatgggtggctggaggtctcatatcttaaagggaatgagagatcaatacctggcctgggtaatttacagtcccctgcagatggacgccttcaggctggtccagcggtttgatgctctccagaaaagtgat

SEQ ID NO: 489003 - DNA, 618 bp, Homo sapiens
agcacgcttgctcagatctataatcctagcactttgagaggccgaggtgggtggatcgcttgagatcaggagtccgagaccagcttgagcaacatggtgaaaccccatctctaccaaaaaaaaaaaaaaaaaaaaattagccaggcgtgcttgtgtgcacttatagacccagttacttgggaggcttagtgaggttacaagaagtgcttaagcctgggaggcagagtctgtagtgaacagatatggtgccaccgcactgcagcctgggcaacagagtgagactctgtctcaaaaaaaaaaaaaaaagaaaaatggctgagcttaaggaaggccgcaaagaaactgaattatgtacccactctgtttgaaggtacttgctgagcagttactgattttgtgaaacagacttaaattcaaatctgaaaatttctgattagaagcaagattctccaagcckgtcagaatgagagacgatcaaattgagcaacaatgggtggctggaggtctcatatcttaaagggaatgagagatcaatacctggcctgggtaatttacagtcccctgcagatggacgccttcaggctggtccagcggtttgatgctctccagaaaagtgat

SEQ ID NO: 489004 - DNA, 618 bp, Homo sapiens
agcacgcttgctcagatctataatcctagcactttgagaggccgaggtgggtggatcgcttgagatcaggagtccgagaccagcttgagcaacatggtgaaaccccatctctaccaaaaaaaaaaaaaaaaaaaaattagccaggcgtgcttgtgtgcacttatagacccagttacttgggaggcttagtgaggttacaagaagtgcttaagcctgggaggcagagtctgtagtgaacagatatggtgccaccgcactgcagcctgggcaacagagtgagactctgtctcaaaaaaaaaaaaaaaagaaaaatggctgagcttaaggaaggccgcaaagaaactgaattatgtacccactctgtttgaaggtacttgctgagcagttactgattttgtgaaacagacttaaattcaaatctgaaaatttctgattagaagcaagattctccaagcctgtcagaatgagagacgatcaaattgagcaacaatgggtggctggaggtctcatatcttaaagggaatgagagatcawtacctggcctgggtaatttacagtcccctgcagatggacgccttcaggctggtccagcggtttgatgctctccagaaaagtgat

SEQ ID NO: 489005 - DNA, 580 bp, Homo sapiens
cagtcatttttcacctcgatgaccctagctgcctcctgcttctcaccctgttcttacctccctgcaatccattctttgctgagaggccacagagacaaaagctgccactctgtaattaaaatagtccgatggcttctgcatccctcgtcttgaactacacagccatactggggccctacagccttctccaacacctgtcctcctcactcccggtgcctcaggtatttctctttcttgcaaaggtgcagccttaggacccgggcactgccttttctgtgccaggtgcattaagtagattctgtttagcacctttcgaaaattaaaaaatattaatgtaaaaatttgaaaatggtgatcaaastttatttctaatcaagcctgtggttgcatctcagggtgactccacagtcttctcccactaaaaaaatcactttgactctttcaaactttaacatcagtcattcttagcactcacaggtttctccacatctttccaaatgtcctcctagagggcagcaccacagccctcaattttacagatgaatcactttttggtatctgtcctcaatcagcagattat

SEQ ID NO: 489006 - DNA, 652 bp, Homo sapiens
tccactgaatgttcgaagatcttttattcatatacctgaaaatatagacctttgattaacattctatggagatgtgcctgagataccaggccatttgccacattgtttccagggtggactcaattttgaaagaaaactgtgcaaagacttaacattatttatcaataccctcaaacacaagaggatattgtttgtaccatttttatgtgccatttttattgtgagttcacatatatacctaatctaagaaagatttacattacccacacgcctgcagaaactacttcattctaattaaatagaaaccaaataaataagtggaggcctgaaaaccattctttgcagaacctgctgagtctgcagcaaaatgtgaaggactagtacattagaaaaatgtatcattgtctcagccaaggagagasaagggttaatcatcattcctagaactctggagtggaacaaaagcttgcagtctgacaccaaaataacatcacaatgaaaagtaaaattgcttctaagtctaaattgcttcatttgaaaattgtagtgatactgagaacaattatgtcacttaaacttttacagttttgtttttataaatcagttataaaactatcatgtggtttaaatgcaattatttaataagggcatt

SEQ ID NO: 489007 - DNA, 584 bp, Homo sapiens
  misc_feature (1)...(584): n = A,T,C or G
nnnnnnnnnnnnaagggaagaggcctggtatggggagcatttggggcaagaccccaaagattctcctgctctcatcatctgcttgctatttacgtaaaatttcaacctgcttgatggttgccttcctttttctgtattgccttttggaaaagcaagaaacttagtgctgggaaactcctgaatgaactgtaaaattcaatcaactcctgatttttcaaaatgcagattgcctgatttgctctctctcargtatcaggctttgttctcagtttatattctgatgtcagccagcttccctgatccatctctcctcttggaggtggaacacttaatctaaggttagaccaggagctgccaggaagttaaaatgtataaaaaaaaaaataggatatgacaggatgtccccctgattccctttcacccattctcatcctgacctctgtgagatggggtcatttagttttatgatgtgaattcaggaaagcccatcatgatatgaatcctgtgagatgtgagtcctatgagagcccatcagtgttggtaagaaagctccatctcataaatccttcactcagtaatttgaa

SEQ ID NO: 489008 - DNA, 514 bp, Homo sapiens
cagctggaggccattatcctaactgaaaaccaaatactgcatgttctcacttgtaagtgggagcaaaacattgagtacacatggacataaagatgggaacaatagacaatagggacttcttgaggggggagagagggatggggcaagggctgaaacactgcctaagggtactatgctcgatacctggctaacgagatcaatcacaccccaaacctcagcatcgtgcaatatacccgtgtraaaaatctgcacatgtatgccctgaatctaaaataaaagttggaattattttttgaaaacctacttttgtgtgttgcattattatttttacctattgatggattcaatgttctaatattttgtgaggattttgtgtctatatttatgagaagctaactttagcaagccatttactatttctgagtttcaggttcctctgttctaaagttaattttgttgcccctaattatgttacagagtaattgtagagacaaaatagggaccagctaaatga

SEQ ID NO: 489009 - DNA, 641 bp, Homo sapiens
caggatatctttcccatttattcttcatgagagttcaaatatctaaatttatgargataatggcattccactcttatatagctttatttactctggggatagtagcaaagggttggatttttgtaaagaatccattttccttagttttttttttcctactaacacctaactatcccgaatagagtgaaattataacttcatgccacattcccacctgagctacccttcaggtattcttccaggcactttgaaatagaagtagaaacttctcagggtcttcctccatcatcccatacaataaggcaaataaacagagatcacatatattctactttataattcagagattgctgacctttgtatttcacctaaggtcaagaacctgaaaaatatcataaaatgaactctcttccactattcatgccacatcaaaatctgagttctgctattaccagacgtaacattaaaataaccacacatgtgcacagaaaacaagagatttctgacactgtagaaaggaatgggacatctcaaacaaagaaatgaacagagatttttcttgtctcctatactgcaaactgcaattatttatttgctgttacaaatcctaaagactgcctacttacagctaaaataaaccc

SEQ ID NO: 489010 - DNA, 641 bp, Homo sapiens
caggatatctttcccatttattcttcatgagagttcaaatatctaaatttatgaggataatggcattccactcttatatagctttatttactctggggatagtagcaaagggttggatttttgtaaagaatccattttccttagttttttttttcctactaacacctaactatcccgaatagagtgaaattataacttcatgccacattcccacctgagctacccttcaggtattcttccaggcactttgaaatagaagtagaaacttctcagggtcttcctccatcatcccatacaataaggcaaataaacagagatcacatatattctactttataattcagagattgctgacctttgtatttcacctaaggtcaagaacctgaaaaatatcataaaatgaactctcttccactattcatgccacatcaaaatctgagttctgctattaccagaygtaacattaaaataaccacacatgtgcacagaaaacaagagatttctgacactgtagaaaggaatgggacatctcaaacaaagaaatgaacagagatttttcttgtctcctatactgcaaactgcaattatttatttgctgttacaaatcctaaagactgcctacttacagctaaaataaaccc

SEQ ID NO: 489011 - DNA, 522 bp, Homo sapiens
acatctatattgatatctgtatctatagctaagcttccaagtcattaagaatgtagaattcacgggtcttttttggattgaaaaagaagaagggtgaataacttgaagcaaggagggaatataagataccaaattagcagggcaatataatctgggtaagattttatagacttaaaatggtcctttgagaaatatcccagggtacagaaagggtcactgagtgcttcttgggattgggctatcccatagggtagtctaatatgttctgatagccctatgtaatccatatttgcatcattattctactgaataccaaatgccttaaaattctaatcaygccatggcatcctaggagtctgagtgctatgctttgctgtctgcgttgcagatgtgatttaactctgattaccttgatttgtcagtgaatttaggcccagtagcatttaagatagtaactgtctgcggatatctgactgagtattagagagtattgtccctgatggcaatagctcagtaatttga

SEQ ID NO: 489012 - DNA, 299 bp, Homo sapiens
tacttacttctaacagcaacttgtgtattagttacagtaacataagctgcttaagagataaatgccaaaatctcagcagcttaacatagtgacatatacgattaacctcatttgtataatattttcctcaatttcttaaaaactctaagtcaggaaacctatatttgttctagtattgtaagtagttagcaaccagctatataacttggtcgaagtcatttccctttytctcgtcttaaatttcatgtggaataaatgctctagaagatcccttcaactctataatatggttaacttaa

SEQ ID NO: 489013 - DNA, 521 bp, Homo sapiens
aaaatattttgtgtttctcaaatgtggtttaaatcttwaaagaaaagaaagagagaaaagaaaggaattgtaatgtttttgacaattgttataaggacaggtttaaataatagtagaaaataatcgtaaagattgtacaattatatcctatattccccacttccatatggatttcgtcttagatattccttcatcactgctatggatgacgaaatgaaccagccttcaacaagacaattatttattgatataaaccataaaatgttaatactttactgtctcatgtggtaaagaatactatgttgaatcaagaaagtaccacttacacacaacattccttccatgttactttgttgtaaaatattaataaaacagcttttgatgtttatcattgctttataataatgaatgtgtaaatgatatttccatttaaacaattagagcttggaaaataatgaatccctactgataaacctcccaaacctgttccctttttagttgtcctctgatgaaaacatggc

SEQ ID NO: 489014 - DNA, 521 bp, Homo sapiens
aaaatattttgtgtttctcaaatgtggtttaaatctttaaagaaaagaaagagagaaaagaaaggaattgtaatgtttttgacaattgttataaggacaggtttaaataatagtagaaaataatcgtaaagattgtacaattatatcctatattccccacttccatayggatttcgtcttagatattccttcatcactgctatggatgacgaaatgaaccagccttcaacaagacaattatttattgatataaaccataaaatgttaatactttactgtctcatgtggtaaagaatactatgttgaatcaagaaagtaccacttacacacaacattccttccatgttactttgttgtaaaatattaataaaacagcttttgatgtttatcattgctttataataatgaatgtgtaaatgatatttccatttaaacaattagagcttggaaaataatgaatccctactgataaacctcccaaacctgttccctttttagttgtcctctgatgaaaacatggc

SEQ ID NO: 489015 - DNA, 521 bp, Homo sapiens
aaaatattttgtgtttctcaaatgtggtttaaatctttaaagaaaagaaagagagaaaagaaaggaattgtaatgtttttgacaattgttataaggacaggtttaaataatagtagaaaataatcgtaaagattgtacaattatatcctatattccccacttccatatggatttcstcttagatattccttcatcactgctatggatgacgaaatgaaccagccttcaacaagacaattatttattgatataaaccataaaatgttaatactttactgtctcatgtggtaaagaatactatgttgaatcaagaaagtaccacttacacacaacattccttccatgttactttgttgtaaaatattaataaaacagcttttgatgtttatcattgctttataataatgaatgtgtaaatgatatttccatttaaacaattagagcttggaaaataatgaatccctactgataaacctcccaaacctgttccctttttagttgtcctctgatgaaaacatggc

SEQ ID NO: 489016 - DNA, 512 bp, Homo sapiens
gttcattaactctctaggagggggttagaaaactatggcagggagcttccattgtcactctgctggtcacatattgtaattagagtctacaccacaggaagtttccagaaagactctcatagtcacattttgagaatacgaatatgccaccatattattgtgttaaaagctggagcttacaatggaaactttttaaagctccagtttagtttaaarctctttgtgatcattcaattaaattagacaaatgtgcattgaccacccactatgagcacttggctaggctccgatcatgagctgtgctatgtttgacttggcttgcaaacaacttagacatattaaatgtgtttccttgcctaccattgaatgaggaaggggaactctccaactttgttgggttttgatattaaacagcacatccctgagagccctgctgcacctgatatatacagagagaacaggaaaaaggataattataatcagacttctactggctgtgcttaagatcaacg

SEQ ID NO: 489017 - DNA, 588 bp, Homo sapiens
gacaataaaatattttaaatcaaggtattacattgtgttttgagaaataatactgttcatacttaatrtaatacagaataatgtaagcataactattttgtgcactgggaaactaaaaaatgtgtgtgacttattttattgcaaaattaattttattgctgtgttctggaaccaagcctgaaatatcttttaggtatgcctacgctggatttgagacatgtatttgtgagttcattagttacagtagctagtattaccctattttagttattaattataataatatggtaatgagatataatggaatttaaaataagctaaagtaggatatcagatatctattcttgttggactttgagtaagaaaaagaggcatagggagaggagttacaagtaggaaagggatgtagagaaggtggggaccatattcatgtattgtgttttggtcaaattgacaattttgatgttgattatcaggcaggctgcaagtagtgaggggttctctaagagccaggttgaagtgaccgcactgtagaagcctacttcaggactcatttgaagctgactcacacagacattaggatcagga

SEQ ID NO: 489018 - DNA, 568 bp, Homo sapiens
ctccagcactgatcattatataacacagtctatcttttatttccttttctttactgcctgtcttctggctaagatataagctcaacaaasacacataactttgtttttgtttttcgtttcattattctcagttcctaacacagcatctgcctgccacataggcaacacaatatttgctgaaagtatatatccatggtcatggaggttggaagagaatcactgaggaattgatcacttggcttacaacctgagaatctgagtaggtgttagtcaagtaaagagaggaagaaataataattatagtattagctgtagtagtaacaattacatataatgcttactatggattaagtggcttacaaatattaactctcaatctttataactgccctgcaaggtaggtaaaattattatttccactttagaaataagaagctggggtacagagggagatttctggggagaggaaatctaggtgtaaggaaatagcaggtataagagctttctggctggaggaaatgcagtgaggacacatgaaaagagggtatgtcaggaactgagttaggga

SEQ ID NO: 489019 - DNA, 509 bp, Homo sapiens
gctggcctttgcagcgggaacaatacacatttccaaaaggacatggttgtcaaatctctggaactgccagttccttggttcaaaattcagattgatatttagttaataaagctaatcaatgttttttatctacccataaggaatayacaaagtatcctagagacaaccgtggcaagagactaaggtaatttccagtttccaagttgtaaacaagggccactttatttcgtaaaatgtaagaaacatagcttgcattgttttctatacgccagtatgcagtaactcaggcagctactttagagcattattataaacaacctatgttgtcaggatgtaaggaatgctgttccttggaccttgtttaagcagtctgtttcattttgttagtctagaataggcacaggtacacctgtgtgaacgactaaacacataatcgtgtttttgaaactgcctcactcttccaaggggtcaggaactacatcactttttcctttcattattgatgccaa

SEQ ID NO: 489020 - DNA, 591 bp, Homo sapiens
tgtgacatttttctgatcattgattcagttgcctttactattctctccaagcatctcctattgattgctatcacctgttgcccaatcgctacatatgtcttcactgattctctcattctcactatcctctttccctctatctcttgtattttctggaagttgttggaactattaggatggtaaaattcctgcagctcagtgtcaaatttcttgaattgatgagtaattcaattctcattgagtagtctgccgtcttctgccattggtgatgttttcgcagcttggtggtgtgcctttttcaacatcgacttttaaaaacgtgtttttaaaacatatggcattttctcaaaatactgatgtgctcagcagcctttttataatctcaattgtcttttacttgcctcaagttgcttccatcaagtctctgtcggtggttgtgccttctgggcrtcatgaaagtgagatttcctctcctgcttttggttttgaacatgcccttgtaactccacggtgatctgaaagttcaagacctcaaagaagataacttaatgctgcctagcgtgatcactcattttgttcacagggagggaa

SEQ ID NO: 489021 - DNA, 559 bp, Homo sapiens
taaaatactcttaagttgaaaatgacaaggaktgatttcatccatgaatactgatgccaaactcttaatcaaaatattaacaaatactcttccagcagaatatttttattaaaaaatggagaaaaccttatggtcataggcaacagatactggaaaagcatctgataaactctatagccattcctcgttaagaacaatttttgtaatataaatggtggatatttttcattaatataattttttaaaaatccatacacctctaaccaaaagccaagatttcggcttactgcagaaatactagaagtacttgcataatagtaagaaggcaagaaacggatgtctgccatcatcaccattactcggcattgcgcttgaaataccactcagtgcaatcagataagcaagcgtaaaaacaagaatacattatcagaaaggaagagacaaaatgaacactatcttaatatgacacagttgtatactttaaaaattcaagagaaccaaccaaaaactaacagaaaaagagtctgatggttaattataaaatttaaataaaaatcaa

SEQ ID NO: 489022 - DNA, 515 bp, Homo sapiens
agctggaacaccattgacataatgcaagcaaaatgaataaagtcctaactatggcarggggtaagaaaacaggagaagaatggattcctgaggctgagggacaaggaaaaaccctgagtgacttccacactttgtggctcaggagactgagtgggcatgggtgtggtttactggcaagttaactgggagcatcctgaggctgaggtaccttagagcaggggtctctgacccccagggtgcggacctgtactgggtctgtggcctgttatgaactgggctgcacggcaggaggtgagcagcaggcgagcgggcgttaccgcctgagctccacctcctgtcagatcagcagcagctttagattctcataggagcatgaactgcgcatgtgagagaactaggttgtgcactccttttgagaatctaatgcctgaatggtcttccacgaaaccagtccctggtgccaaaaagttagggaccactgccttagagcacctgagtggtctctaaggataccc

SEQ ID NO: 489023 - DNA, 573 bp, Homo sapiens
aaccaaccagccaaccagcaaaaaatccagatgttgttaataaagtgccatagctttgtttcagtagtgaaaagaagtgcaaacactttaatcttccacctgcagtgactagctttgagaccttgagccgacgcttaaccccagagccggtttcctcatcgctcacgtggggctaatayattactaccttgcagcaggcttgaggatgaaatgagaattgcagttttgctttctgtaagaaacaatgtttgtggttctagaaagaacactggcctaaataaggagtgcttggactttaggggattccctaagtctggagtgggggctgaagatttgcatttctaacatgttccccggggatgctgatcacatcacactttgagagccactggtctagaggaaagagaaagaaaggggcataagatgagccgatttacaacactgatggaatttgaagtgagagaaagaggactagaatatattgtaacctgtcctcctgtaagtgtatgtaaacatgtgttttaaaagctgtgtgttatggcgttccttcctttatgggttccaggtggagaa

SEQ ID NO: 489024 - DNA, 608 bp, Homo sapiens
gctgaaacatatttatatatataaaatagtaacctttttatggtgtgtcacatttagttcttcctgtcatttgatggtgtttttattcttgtaatatggaaatatgtattttgcatttaataacctattttttaaatagccactaatttatctcgccatccacaaaagggataaatatgttattctggtttctttgagtattacattgtatagtctagtttctggtagattcatattttatgttctatttttgaacccattgtaatttactgatatggctctagtgacaatagatctaagttaatttgtttcgatataattgaaaaagttatttcattctctattgtactactccagtttgtaataaaataagtcattataatggcttgaatcaataactgaccaatttttgaaacccccattttttttttttttttgagatagtcttctgttgcccagactggaatgyagtggcacaaacacagctcactgcagcctcaccttcctgggcttaagcgatccccttgcctcagtctcctgagtagctgggactacaagcgtgcattaccacactgggctaatttttaaattttttctagagatggggt

SEQ ID NO: 489025 - DNA, 588 bp, Homo sapiens
tgcataaatccaacagaacccatgctgtatctaagaaatcttagtttgtttaaactgaaaactaaagcagccctggagccctcacctgtgaggtatggaaggcataaagaagttggcaacatgtaatatattaatgtttatgcttcagaaatatttacatgagattgaaagaaattccagacaagtcacatcaggatatgtgaacacatttgaaagacacacataaatattgccagcattaaaatgagtaattccagagaaaacaaattaagatggccaatgataatggtctcgtttgacaaacgtatatgacactttcctttatggtttatcgcattttaccttgcagtaagaaaatkgtgtctattttcttggggctagaagaggaggggtcccgggccctgcatggtgtgaggcctcttgtccagagttgcagtgaagtcactgctagtggccatgcaggctgctttgggggaattatatgcccacagtgaaggacaaagggatgcaagaagaaaatgggaaccccaaggaaggtgctcaacctagaggccaaggagagggagaaagcaagcggggaagtgaact

SEQ ID NO: 489026 - DNA, 493 bp, Homo sapiens
tactctgtttaatctatgtattatttatttattcttccattgatttattgaacaaatactttgggattcctactatgtaacagttatgttggtaggagctacacaagtggatcatggaatctggagttgaagacagacattattcaaatgatcacatgacttactatgagctgatctgtgttctgaggaaaaataattgactatgtaaaatataacagaggaaagaggcttagaccrgggtttggggaatgcctgacatgaaacttgacctgagatatgaaaaataaatagatgtcaattggtgataaacggggttgggcccacagttccggtaagaggaagggcatgagtatcattgacttcatgatgcaagctggtgagaatgatcattttatcagagactgtttgctgtgcagagagagagactgcacgtgttaaaagcacattttctggagccagattgcctggattccaatcccagctccaccactca

SEQ ID NO: 489027 - DNA, 577 bp, Homo sapiens
ctgacaagagaaattctcttaataatttgacatcagatttgatttatttttttaaaaagcattttctgattcctttattttatgaagttatattaattattagatgctttttaaatattttccacgtgtatccaaagaacaggtaattaggttgtccattattttgatgatacaattttatcatcacaaatccagatgggtcacaaaataaaattgatcctagtatttaaatattgtcagcaaaaaatacttgaataataattcaataactccaagccccttttttgtaaacattctccaaaattacattggtcgatatcaagtcttttatttgataactgctgtaggtaatagaaaatgaagaaaatactggtgagctaaataaatatttctgttttcattgatcttttaatccagaaaagaagaatgagaaataaaaatagtatcaccagagcactgataaaatgatattataagtgcattgatgctgaattacgtaatagaaaaatttgttargtttgtaggagggggtgtagagggaaatagtagaaaaaaaggttaccgaagggtacttaat

SEQ ID NO: 489028 - DNA, 661 bp, Homo sapiens
gggtggtgacgatcttggcaaatataaacagaatacagatcaaaaagaacaagtgaaaggtcaattgctgtgcaccaagctgcacaaatacaatcagtgtcagggctgaagcttcacggtcagcagaagatacaggtctctgtggcccacattcacggaaaggctaatttgcaattttggggagtaacaaaaaagatactccctactggaacacttgatacaaagaatagggtgcaaactgtgtagcactatgcatctattgtcagtatagcccagagaataagattgcaggctctgaggccagcctgtctggatgggttctctgctttacctgctccgtggccaaggccaagtgaattagcccctcatttccttgttttcctcatcagtaaactaggtatagtaatagtgcctacttgacaagattattgttatgatttagtgattaaaaagattgatgcacttagtacygggaacatagtaaactttcagtttatgttatctaatacttttttccaaaaaaggggatagaaacgtggcatatttccaaaaactgttttaaaataatataggtgcaagagaaaacatggtccttattacatagtttatatatgtttcaaggatgacagactttataatattcttcaagaactgtatataa

SEQ ID NO: 489029 - DNA, 624 bp, Homo sapiens
ttagaaattaaagaaattctcatttttagaaaattctgcttagtctatactagaggttttctcaattatttagatgcataagaatggctgatatttctttaggacctcatacattttattattttaacacaggtatctgataagtctctttttagaatccaaagaattaacgggacacaggagattataacgacactctccccacatataccaactttacaaaaaagggtttaggacaatttcccaggtraaaattcctgaagctgttatttaatattgactgaaactgtagtaaaagctcagttatatttctaagtaaaagaaggcatattaattctctactgctgtgtgacgcagcaccccaaaatttcttagcttaataaaacaagcatatattctcttgcattttctgtattttaggaattggggagcacattttttttctggttggttctcgttcagggtccctcctgggatcgcagtccagttgtcctcaagggctgtagtcatctgacaccggtaaggttcattcccacccttacccatgtaggcagcctacagtttttcaccattggagagagacctcagttccttaacacatgagactcttgactcctcatggca

SEQ ID NO: 489030 - DNA, 363 bp, Homo sapiens
gctgacagaagtctggaatcaatgtcaggccaccrtaaacaaagttgagatagcagaattaccctgttaaagtaaggaaacaatccaaatactttgggagatatgaacttgaaagtgaatttagtgtgtatgaactccctgcctattccctaaatatattctctcaagagggcacagattttcccttcatccaggccttgagaaatatgctggtaaggggagggtcagtatcttggaaagttcctcaaaggcattgagactgttaggagacctcacagtgggaatgagttccctaaataaaactaccatgggaagtgttatgtattgaattatgtcctcccaaaattcatctgttgaagctct

SEQ ID NO: 489031 - DNA, 587 bp, Homo sapiens
tctcttttgttaatatttttcatttgaaattagggcaatatacatttagaaccatcatcctccatttactattgatatgaccttaagcaagccgattatcctctctgaacctcagcttcctcaaacagtaagagcaataatcatgataaggatgttgaaggaattaagtgagataacctgygttaagtaattagcagattgtcttgcaccttggaaacacctcccaaatgataggtgctgccatcggtatcaacaacattgttatcagcaagcctgttaaaaagcacagaataccaggtagcaagattttcatgcctgtgttatgctaaaccaattcttataaatgcaaatctataaacacatatgacactccagggcttctaaagaactttttataactatagatatgagcataatgtaagtacatagcatcacttactgtaaatctgtacatttgatatgtactcacaaaattatttataaagaaccagggagtagtgcagcttagaaagcttaaagatgacctagattgtatacctcaaaaattctaaattggccaaaatggccttaaggagcactgaatgaga

SEQ ID NO: 489032 - DNA, 367 bp, Homo sapiens
aatgtcagctcatcttgactagataatttttcttctatatggaagtcatagatgacatacccaagcctaaataggtttatcatgaatatccattatgggtatctagatttaaagacaagattgattattacaaaatagtagttctccctacaataggaagtttataaaagctatgatgatttggtatctcctaattgtaaatatatcacattattgttaaatttgtaatggaatcattaaaaggagscttctggtggaaactggcttagggatcatagaccagcagtgacctattagcattttctgtaataatggagaagtcttgtatcatctctgctgtcccatatggtagccactagccacgtgt

SEQ ID NO: 489033 - DNA, 539 bp, Homo sapiens
ttttcctcccctacccccttatcctagactaatggcagcccaaagcccagaagtggatatcatgtggagatagagagagtwcaaggagaagccctctatttctggcttcaaggagtgtgaaggagtctcttaatgctcagagggactagggaaatctattgttttccttctttcttttcttcattcccctgtcctccaggaaatagaagaggagagaatacttcttaattcattttatgagaccatcattaccgatactaaaagtagatggagaaagtataaaaaacaatatacatggatattcctcaagaagagacataaaaatcctcaaaaaatgtagcaaatcaaatccatcagcatacagaactaatgatgtaccacaactaaaacaggggttgtcctaggactataagccttgatcaatcaatgtaaaaatattaacagtttacaacaataacaaagatactatcaattgatgcagaaaacatttttgaaaaattcaatatccatttataataactctaggcaaactattggta

SEQ ID NO: 489034 - DNA, 590 bp, Homo sapiens
cagttagctgtgatcacataattacccttcagcctgtgtgacagatacagaccctgtctcaaaaaataataacaaaataaaatgttttaggaaactcgtgggctttcaaaaattttatccactgctctaaattagtctttttcatttttcagtttcccgttttattgctatttatgtaagttaattagcagaagaaaaaatcagtttttaaatatattattcttaatttatcatgatggcaatgtaaaactaaccaacaagattttgtcagaaaatggaaaactttaaaaaacatttctaatatttatttaaaataattttcaaaggtaaatgtaaacatagttctgttgaaatttcctgaaaggmaaaactgttattaaaaagtgttgcaattttcatgaatagactgttttgatgagtgttttcctgtctgtattagaatataaattataaagaaatataggcttttaaattactttaattgaatttttatctatttaaatttaaattaatcaacatgcagttactgaatatttactgtattctaagtttcagtcttgatgctgagaaataataacccaggcttccag

SEQ ID NO: 489035 - DNA, 508 bp, Homo sapiens
tagggaataaaaatgtgtgtgcttcccagttacttattgtgttgcttaattaagaaatctctttagaaacacagacgggagcatgaacttctcagccacttcctgcctggcttctgggtggttctgtgttgcattactggaggtctgggtgtggaattttgagaatctcttgatccttttcagtttaattctgaaacagggttcttccttccttccagattacagtgtggacactcacacacagtaagggacaaagaaagtgtatccccttccaaagatccgcccaccaggccccggacccrtaatcaaagcctgatactgggacaatggacccagcggccgggccagccctcccctagttatcaccccagagctgtggctgggctctctttgttccgaaacggagctgatggagcaggacgctgtcgccaggcactgcggggagggggttatcagcccctggcccgcgtcccaccccagaggtgaagtcttcgccccagacaggccc

SEQ ID NO: 489036 - DNA, 720 bp, Homo sapiens
tgcctgcaggtctggttgttaaggctgaggtatgagtgttgccttgacatcctctctgactgagtgcgagcctgtggagtcgtgtttgctctgacatccaatgctcctgtgtgtgctgcagatcaggaatcttggtaaatacatcctctatctcctcaccccgctccggttaagcagatttgtagggctttctccratgatttgtgaattatcatgtaccgaaagtagagagtggaaggactcagttttctattactatgtataaaagcattcttataatagatatttaacaaattctgttgcaccttgtgttttctccaagtatatagaaaaattacattttctcaatattcacttgatggttattattgggaataagatggaataaaagacatactacctgttctcaaaagggctaagtaggacaactaagagaatgaagagaaaaaaaaaaagccaaatggaggtgtgaggaatgcaaaaggagattttaattctgacaagaattagataagagttcagggaggagatagttgcactgagggcttattttgtttaaaagaactacataagaaaggcacaaaagaagaaaaagattctagatattttctagttataaaaagaatagtatgacaggaagtaaaaggaggaaatataaaatggttttataattcctgtcagtacatagctcatataataaatgttggaatgcatgtgtta

SEQ ID NO: 489037 - DNA, 454 bp, Homo sapiens
tgccaagccacagggagtttaattgggttatagtaacatgaaatcaatgcatttctagtcagactcaaattccatttcatgcccrggattctcctattacctctacatctaatagtaggctaaagctgctggtattttttaaatattggttgaattttttttcaaaaaaaaggtcaatattttagcaaataagaaatgacagtaactgaaagtaagctgtcatcatttgccaactcctaacgaaataagggactatattttaacataaattacaatttccattacaaatttccagtgtgggggggaaaaatagaggaatagatatagcagaacatgcttagaagcatgtgtaaatgcatatcctactgaacagaagggacaatccacaaaatctaacttccaacgaagaatccactgcaatatttgctgttttttttattttaacactttttct

SEQ ID NO: 489038 - DNA, 605 bp, Homo sapiens
cataaacaaaagaaatgtatttggctcacagttctggaggcttggaagtctaagagcagggtgctggcatttggcatttctgcatcatgccatggcagaaggtggaagaacaagagagtgagagagaacaagagtaagcaagagggggccaaactcacttttataacaaacccactcaccagacaactaacccactcctgaaataatattaattgattccagaaggcagaaccctcatgacycagtcacttgttaagacccacctcccaacactgttgcactagggactaagtttctcgcacatgaactttgggggacacattcaaaccatagcaaatgcaaaagcagcaattctccacactttaaaactgatcattaatattttaataggcataaacaatataatttttgcataattaaatcttcttaaatgttattttctaaattttctggcagataagatttctgttttatttgtatattttactattcaattaacaatctgtctgggataaaatgtataagctgcgtttggacaatttgcagtgttttgccaatttgcatagatactaaccatttcatttaaatattcaaataaatgcaac

SEQ ID NO: 489039 - DNA, 605 bp, Homo sapiens
cataaacaaaagaaatgtatttggctcacagttctggaggcttggaagtctaagagcagggtgctggcatttggcatttctgcatcatgccatggcagaaggtggaagaacaagagagtgagagagaacaagagtaagcaagagggggccaaactcacttttataacaaacccactcaccagacaactaacccactcctgaaataatattaattgattccagaaggcagaaccctcatgactcagtcacttgttaagacccacctcccaacactgttgcactagggactaagtttctcgcacatgaactttgggggacacattcaaaccatagcaaatgcaaaagcagcaattctccacactttaaaactgatcattaatattttaataggcataaacaatataatttttgcataattaaatcttcttaaatgttattttctaaattttctggcagataagatttctgttttatttgtatattttactattcaattmacaatctgtctgggataaaatgtataagctgcgtttggacaatttgcagtgttttgccaatttgcatagatactaaccatttcatttaaatattcaaataaatgcaac

SEQ ID NO: 489040 - DNA, 619 bp, Homo sapiens
ttgggtaacctactacattgctctaattcgggcattgaccactttgactgcagtatgggggctatattggaagacacaaggctgaagaaactatttaaaagttccataacaccgcagaactttgtagtattttttcctcttctgtatgtacagcactatatcagtggctggcatgttagtagrcatataataaatacctattaaataaaaatgtatcacactgttgtaatctttaagtaataagtttgttgctattgaaagaaaacaaaataacttatgtaaaaggtgtttggtaagtagaatcatcagggcaagtttatcaaatcatttttggctaagtctggagaggaaactagatgagtagatggtgttcaggttgctgacttaggctgggtgggaagtgggaaggtagtattactcattgagataggctatttagggagagtatccttttgcttttttctaagtgtcctcagaagttaatgagaaatcatcacttaggtatgaattccatacattaatgtgtgttttgactaaaaacgttaccttcagaaagctaggtgcactcattctctttcacataggttagctgttacttctcttttaaaagaatattccc

SEQ ID NO: 489041 - DNA, 619 bp, Homo sapiens
ttgggtaacctactacattgctctaattcgggcattgaccactttgactgcagtatgggggctatattggaagacacaaggctgaagaaactatttaaaagttccataacaccgcagaactttgtagtattttttcctcttctgtatgtacagcactatatcagtggctggcatgttagtagacatataataaatacctattaaataaaaatgtatcacactgttgtaatctttaagtaataagtttgttgctattgaaagaaaacaaaataacttatgtaaaaggtgtttggtaagtagaatcatcagggcaagtttatcaaatcatttttggctaagtctggagaggaaactagatgagtagatggtgttcaggttgctgacttaggctgggtgggaagtgggaaggtagtattactsattgagataggctatttagggagagtatccttttgcttttttctaagtgtcctcagaagttaatgagaaatcatcacttaggtatgaattccatacattaatgtgtgttttgactaaaaacgttaccttcagaaagctaggtgcactcattctctttcacataggttagctgttacttctcttttaaaagaatattccc

SEQ ID NO: 489042 - DNA, 623 bp, Homo sapiens
ctgttgcacaattgtatttatgatatgttaaaatatgcatacgaataaagtttaagatggaatatatcaaaatgatagtagtaggttagtagactttacagatgattactccctacactctgtcctttyccacaatttttgcaaaaattactttaaaacctgcattttaagattctgtaagtctaatattacatgattaactgacttgctgtcctttgtcatttagaaagaacagggcttaggaaaggaggaggcacagagtataagtcacagtccaaagtttggggcaatacctggggagtattgggactggaggaggaagcgctgggctgagaaaggccggtgggtgtgacagtggacatgactctcctgccttccctgcagttttgcctgagcgcatgtctttgttatgctcaccaactcatcagctaggagcagggcttggaatctctgaaagttccttagtctctctcttggacatcccaggcatttccccactggggagtactgtggattcattttcacaccaagaaaatcaacaaatgcagcttgctggggatgactgtccagcctggcatgctaaggaatttggtaaccaagggaatcaataacaatttgtttgg

SEQ ID NO: 489043 - DNA, 623 bp, Homo sapiens
ctgttgcacaattgtatttatgatatgttaaaatatgcatacgaataaagtttaagatggaatatatcaaaatgatagtagtaggttagtagactttacagatgattactccctacactctgtccttttccacaatttttgcaaaaattactttaaaacctgcattttaagattctgtaagtctaatattacatgattaactgacttgctgtcctttgtcatttagaaagaacagggcttaggaaaggaggaggcacagagtataagtcacagtccaaagtttggggcaatacctggggagtattgggactggaggaggaagcgctgggctgagaaaggccggtgggtgtgacagyggacatgactctcctgccttccctgcagttttgcctgagcgcatgtctttgttatgctcaccaactcatcagctaggagcagggcttggaatctctgaaagttccttagtctctctcttggacatcccaggcatttccccactggggagtactgtggattcattttcacaccaagaaaatcaacaaatgcagcttgctggggatgactgtccagcctggcatgctaaggaatttggtaaccaagggaatcaataacaatttgtttgg

SEQ ID NO: 489044 - DNA, 291 bp, Homo sapiens
ggctgaaggtcccaccaaatccacgyacaatggggtgcattggttcagatactgttaccacagaaaagaatggatgtgggtcaggcagaacccaataggatgcctaccacagggaacagagcaatggctggcagactagagaagtcagtggttataggtgtggtggcggagcatctcctggtccagctagctagctcctgtcctctaatatctggaaggaaaaaactgcaagaagaagccacaggctttgttaccaatcttccaggctggggtgagacccgggaagtagac

SEQ ID NO: 489045 - DNA, 629 bp, Homo sapiens
aactgctattatttgctctggtttataaatgaagaatgaagaggttaagtaacttgtccaaagccccaaggctgttctctattttgagagcagttgcaaatagggtggagttgaagcatctgtgggtgatatagtttggctctgtatccccacccaaagctcacctccaattgtaatccccaggtatggaggagggacctggagggaggtgattggatcatggggttggtttcctccatgctgttctcacgataagtgagtcagttctcacgagatctgatggctttaaaaacggcagtgttccctactctctctcttccctgtcaccatgtaagacataccttgcttcacctttgccttcagccatgattgtaagtttgccgaggcgtccctagccatgcggaactgtgagtcaattaaacctcttttgtttatcaattatccagtctcaggtggtagtctttatagcactgtgaaaactgactagtgatcaaaggtatggagtaaggttgtcaggttagtgcagggactaggttttatctgaaccctcgaactctcaagtcaccgctgtcctctatttgtggctgacttcttagctctrtgatggaccatacagtctgatctctaca

SEQ ID NO: 489046 - DNA, 637 bp, Homo sapiens
gagacttgtaaatttggaatattcggacaagggaggagagacatctccaaaatagtgaaaagttaaattgttggctgtttctaaaggaartctgctattactacattcaagaattgctatggaagcgttataggttataggacctcacagtgttggtgtgaaagtacttcacaatgttgatgtgaagaatacatgagccaacacatggacaaggtctagccttgtgcagaaatacagtaagtgttcaaagtgtctccccccgccccccccccccccttttttttttaactactagtaattacagagaccaaatccacaattctcaactggtgggaaggagcctgtaggatctattctcatgcttcccctttctctcaatttacacgaacattctggactctcccagctcagtttcagtcctatccacacagctttcccttactattccagtctgtggtgagttctttttcctttaaaatacatttcttatttattctaagctcatgcaatcatgatcatttctgagctcttgttggtgtatgttagtgttcccaaaatgaagacttagatagctcttgagactgtgaacagatcctactttggtattctcaacaatttaagcctgcaaaatggagtg

SEQ ID NO: 489047 - DNA, 356 bp, Homo sapiens
caccacagctttctccttccacttcaggctgtctgtgaatgtcagatggatcctctctctcaccttcaaatggactttttccaggtggctgagagatatggtctcagtgttagagttttaacttctrataaattctgtccctagagaggaactagataatatctctttctctctccctcaatccctccctttctttcaccctgaaaaatcatcttactagtccagctcaagtcttaagccagttttgccagaggtggggcacagtccaagccaagttcctccacctctttagaatattcaggagtggtagcatgtgaaaacatggcagcttccatgggttcagagggggtggttaa

SEQ ID NO: 489048 - DNA, 356 bp, Homo sapiens
caccacagctttctccttccacttcaggctgtctgtgaatgtcagatggatcctctctctcaccttcaaatggactttttccaggtggctgagagatatggtctcagtgttagagttttaacttctaataaattctgtccctagagaggaactagataatatctctttctctctccctcaatccctccctttctttcaccctgaaaaatcatcttactagtccasctcaagtcttaagccagttttgccagaggtggggcacagtccaagccaagttcctccacctctttagaatattcaggagtggtagcatgtgaaaacatggcagcttccatgggttcagagggggtggttaa

SEQ ID NO: 489049 - DNA, 609 bp, Homo sapiens
ctctactccatgataatttgcccacctgaaaaagtgtccaaagatctggactcaaagaacataccccaagacatatgaaatggcaaaacatggtgtaaaagtaggtaataaaatggtcttcgcttgctgtggggattagttctaggtacagtgcagttcatctagggagagtgaccattcattccagctcctctggatcaggggctggcaatttttattgttgytgtaaagggccagtgaataaatatttctggctttgcagcccatacagtgtctgtcataattactcaattctgccattgtagcatgaaaagccatagactatatgtaaataaatagacttggctgtggtttactacaaatttataaaacaggcagcaggtcagctttggcccatactttgtggacccttgttctagagcccagggtggtccaggcagttctcttctagctacaaaccatctcattactgagcagagcccccaggtctgagtcagcttgagagctgagctaggaatctaggcccactcctagacagctctagggtaagccagcttttcagcccatcttgtggaagctgggatgctttcctcgcagactgagccagaa

SEQ ID NO: 489050 - DNA, 554 bp, Homo sapiens
ggaaagatgaaaaaatgatgtttttgctcctgcttggcattggcagaacatatttatgtcttactgacattaatgtctattggccaaattacatgtcagttcatttaatccctgggcaccaaaccctgcaatgctttcctgtcacactcagggtaaaaaccaagttccccattccccctgattgcatctctggctgtttttcctcactcactccattctagtctcacagacctccttcttttcctcaaatatatcactgtttcttstgcctcaggacctttgaacatgagctctctgcaaagcttcattttacgtttgaagaaactagggccttgaaaagacaaatttctaaatgacacacaataattagggtcagagttgagtagagaacccaggcccccttggtgcttaaaaaaataactgtgtttattgtacctcttaaattttttgtttgtttgtttgtttttcctgaaaagttgcagacaaagtttggacatagggaatcagctttaccctgacacttggaaaagctttctttatatgtcttaaattat

SEQ ID NO: 489051 - DNA, 636 bp, Homo sapiens
ctgatttttttaggacacaaatattcctgtacattccaagttatgctcctaggagaccataaagagtgctgcaaacagcatgctcttgaatagatgaaaatttgttcgagtctttccctamaaggctgaaagccacatctaactaaaggtggtctgtgctctgctaacttcagccctgcgaacatcaggattgggtggaggtggtcgtattatcttggttttaaggcttctttagtgtcctgtggcgccattttgctgactcaagtcttggaccagggacgggtgggagctggtgatgcttggtgctggtgagttaatgattgtcccccaccccacctccacaaccataaaaccttcagagcattcacatcacaggaccggagaacgaaatgcaatagtttcaagtacccgcattcaaggggcaatttcatccatgtctatgccaaggactacttcccttttccctcccaaataatccctcccaacacaaagaaacaaacaaaaaagagctaggcaatggaatgaaatgacacccagtagtgctgtaggaattatgagaatgaatccagtcagtctaatcctcgaacacttccaagaacaaaggggggaagagttctgtggggcattccaccttca

SEQ ID NO: 489052 - DNA, 518 bp, Homo sapiens
tttttaggacacaaatattcctgtacattccaagttatgctcctaggagaccataaagagtgctgcaaacagcatgctcttgaatagatgaaaatttgttcgagtctttccctacaaggctgaaagccacatctaactaaaggtggtctgtgctctgytaacttcagccctgcgaacatcaggattgggtggaggtggtcgtattatcttggttttaaggcttctttagtgtcctgtggcgccattttgctgactcaagtcttggaccagggacgggtgggagctggtgatgcttggtgctggtgagttaatgattgtcccccaccccacctccacaaccataaaaccttcagagcattcacatcacaggaccggagaacgaaatgcaatagtttcaagtacccgcattcaaggggcaatttcatccatgtctatgccaaggactacttcccttttccctcccaaataatccctcccaacacaaagaaacaaacaaaaaagagctaggcaatggaatg

SEQ ID NO: 489053 - DNA, 585 bp, Homo sapiens
ggaagcagcaactctacaaagaattctcgatgtacttgtgaccgatattttatccacatattcagccatttatccaataagcatttcttgaattctattgcacactggcctaggtgctggatgtacagttagacacatctatgtcctcaaaaaaaagaagtccacagggacttacgtggacaagtgaagcaggtagttacagtgcagagtgacaagtgccaaacaaagcacatctacacttgggtgccctgaaaatgcagaggactctgaaaccacttctatttaaaattatcttccctgaaagggtttgatgtgtagtggcttacagacggctgcccattctgtgctatcctcccatctacagggggaccgttgagtcctggctggcactcagacttgtttgggccaatccagtgtggatgaagggatcctgtgtgatttgagactgggcctcatgggatctgcaacttctgttttcgtgtgcttgggactctttctcttggaaatcaacagccaagtaagaagtcyaccctgccggaggaaaggccgcatagagggaggcctgaaccagtgtttgatgtccca

SEQ ID NO: 489054 - DNA, 553 bp, Homo sapiens
gaaccagttcatgtcagcaaagaacaaatgcaaaaatgccagtcaggaacaacatacagtatcttaaaagcaataggaataaccttctgtgattaacatttgtccygcattctttgagcccatggttttcccttccctacttggctgcagactttcgacaaccatttttcatactcaaagttgactgtaatcttcaccaactttaacctcaggagtttgcattgcttttatgacagacacagttctccaactgctattacagtcgtgtgtgaaactgtgctaataacccctcagtttgggggtttgtattataacttcaactgataactgcttgagagcagggtttatgttaaactctccatttttgtttgtttggttttttgtcttgtagcttgaataggtaacagcttaccctactgtttagctggcaactgggcttccttttggtttttgaagcacgtttgctcttggagcctcttggcacaaagctagagggttgttggcagagatacatgttgcccatgaggcccagagatataagcttcatctaaag

SEQ ID NO: 489055 - DNA, 553 bp, Homo sapiens
gaaccagttcatgtcagcaaagaacaaatgcaaaaatgccagtcaggaacaacatacagtatcttaaaagcaataggaataaccttctgtgattaacatttgtcccgcattctttgagcccatggttttcccttccctacttggctgcagactttcgacaaccatttttcatactcaaagttgactgtaatcttcaccaactttaacctcaggagtttgcattgcttttatgacagayacagttctccaactgctattacagtcgtgtgtgaaactgtgctaataacccctcagtttgggggtttgtattataacttcaactgataactgcttgagagcagggtttatgttaaactctccatttttgtttgtttggttttttgtcttgtagcttgaataggtaacagcttaccctactgtttagctggcaactgggcttccttttggtttttgaagcacgtttgctcttggagcctcttggcacaaagctagagggttgttggcagagatacatgttgcccatgaggcccagagatataagcttcatctaaag

SEQ ID NO: 489056 - DNA, 553 bp, Homo sapiens
gaaccagttcatgtcagcaaagaacaaatgcaaaaatgccagtcaggaacaacatacagtatcttaaaagcaataggaataaccttctgtgattaacatttgtcccgcattctttgagcccatggttttcccttccctacttggctgcagactttcgacaaccatttttcatactcaaagttgactgtaatcttcaccaactttaacctcaggagtttgcattgcttttatgacagacacagttctccaactgctattacagtcgtgtgtgaaactgtgctaataacccctcagtttgggggtttgtattataacttcaactrataactgcttgagagcagggtttatgttaaactctccatttttgtttgtttggttttttgtcttgtagcttgaataggtaacagcttaccctactgtttagctggcaactgggcttccttttggtttttgaagcacgtttgctcttggagcctcttggcacaaagctagagggttgttggcagagatacatgttgcccatgaggcccagagatataagcttcatctaaag

SEQ ID NO: 489057 - DNA, 551 bp, Homo sapiens
gtgcttggacacaaaattctagaactaggttctgcaggattctgtctactttctgtgagtatgtgactgctctttttttttaaccccttgttattttttggctgaggctgtcctccattaatagatttaatacctgtttatttccactgctattaaaaaatttttctgaaggctgccaaaggatgtttttaccgtgttcccagcaatgaatagtcctgtctttttctgccgatataagcaagcctgtgattgactgccaagacttaaaattcccgggttgaatcaagtacactaaagcagtgtttttcaaactatgggtcccaacacataagtgggttgtgaaatcaatttagtgggtagcaagcagtgccttttaaaaaatgaaatraagtagactggaaagcgtcagttcactgcgtttcttaagagttaggattgttttgtgaaacttttgtttgatttacaaacacacaccatttgtatgcttggtcgttatgtaaaatgtatttcttactgtgggctgtggtcatcaattggaaagccactgcacc

SEQ ID NO: 489058 - DNA, 592 bp, Homo sapiens
caacagaatgaaggacaaaaaccatatgatttattttatcataattgcaagattctaatattatatatcataaattattgaataagtctcctgttttggaacatttaggctgtttctaacttttcttatattataaaccatgctttagtaaatattttgcctatataactttgcacacgtttccacatatttcttaaaagtgtaattgttggatcaaaaaacagacttgattttatgaaactgtatacataatgtaaaatgttcttaaccacacagaatcctccttgtagtgcrtgagagggatgctcctgccaagctgagtattactatgttctcaaaatctatgccagttaaatagttacaaatagtgcttcattgttgttctccaatatgcaagttttcttactgataatatttaatatgttttcatatttattaagcacttatgtttcttctttagtgaattgcctgtttgtccttatttcattttttctattgggatgaataatcattacttttactgatttttaagaattcttgataatgaggatttacctgtgctgtgcaattccaaatctcattctcaagttag

SEQ ID NO: 489059 - DNA, 647 bp, Homo sapiens
tccgtctcaaaaaagaaaaaaaaaaaaaaagaagagctgtctcagaagtcaatttatcccattacagtttggcttctgtatctttggttaaacagagaaaatcagacaaaagattccatttaatgtcttaaatgtagttatatttcacacttgataataagcacaggagattattgtatcaagacattcaccttttagtagctacatattcattctactattcaaatggttaggcacaataatgataaatacagtaagcaaaccctggagtcattttgaacatttactctatacttggtatggtgctaagataatgaaagtaaattcaatcatttcaacttcaaggtagccatraaaatgagtattattattaacaacaccaatagttaacatttgtggacttcttaccttaaagcagacaatatactaaacacactgggtgattacatcacttgatcttcacaagtagctttttgtatcagtattaaaaaggctattcttattcctgaggataacagctattatttatttcatgtctatgtgactcttgcacttaatttctgctatgtctaatcttcattacgaatctgcaaggtagatatcattatttcctattttaaggatgataaagtttagttttagagagg

SEQ ID NO: 489060 - DNA, 514 bp, Homo sapiens
ctgcatcaccacctctttgtgcccccgctgcttctaacaattatatctgactagcttgcgacccacgctggttttccatttcccacaccactccttcctcttaccaaacccattctgtttgttccttacccaaagctagtgtgggtagaccagcatcatgttcagtcattcatccatgaattcatgaatatttttggggcacaagtcataattagtacctacagcaggcctcagaccctcaaggaccacattgacccaagccttgaagatctaaatgagacataaatgtcagtgaaaaagagtatgctgtttccaaatgcctacctatgctgtgaacagtccagctcaggtggagccactttagtgaccaaggtgtgcagtgggggtgggtgtacaggcaaattgtgcttcytgttttaagatagtgttaagtatgtgactcccatatgtgaccctgtgagaacctggctattaaatgtcctgacgtttttcttgctcactgctaagccagcag

SEQ ID NO: 489061 - DNA, 577 bp, Homo sapiens
tttttactcaaggtaaaacaggattttcctgatgcccctgagtttcttaaggtaggagtttgtcccattcttctcttcttccccagaacatacacaaggcctggtatggagtctgagccctttcttctaggaaggaaactgcagaaaataggcagcatgtcttggtcacagcaagtgcaattgaagaagtagtagaattctgcctgaagaaatatttcaatatcagactgaagaagtttgtcccaacttctgtaaaagtctgtgaaagtcaagagcctcaatgcaaattttagtgtatcaagaaagatgcttcctcctgcaaatcatggaaattttagcaaaacttgaaccttataatttcatataagaagaagcctgaaggtaggaaatttccagggttggttaatgtagtggatcagtgacattaacaaggactcagacatcttgcatcatttcacatgaaattctcagtggactggcttatactccatggtagacaggaagatgtgctacccagatcccccttctrtgaaggtcttgatgcccagctttgagaagtaaggtcaataggcagtct

SEQ ID NO: 489062 - DNA, 604 bp, Homo sapiens
ctggcggcaacgtctgcctctcagggttcaagctattcttstgcctcagcctcctgagtagctgggattacaagcaccaggcatgacatccggctaatttttgtatttttagcagacatgggggtttcgccatgttggccaggctggtctgaaactcctgacctcaagtgattcacccaccttctgctcccaaagtgctggaattacaggcatgagtcactgtggcctggccaaaaatgtcattttaatgaaatattttactcaccatcaaaagaaaagttgggctactttcaactttttaaacactgattctctcaaaattattctttattactttttaataatatattatacctgatatctaggtaatattaaaatgttttacatatatcatagtttcagactatttctttaaaaaaatacaagagggatattatacacacttcctgccacactgccctgcccatccaccccagtactacttcccaaattctataactgcagacactgatattcaggggtaatggagcacagtagaagaaccgtatttaagcagaatatgtacacaagctgaatgctagatgtggcatagtttaccttacag

SEQ ID NO: 489063 - DNA, 604 bp, Homo sapiens
ctggcggcaacgtctgcctctcagggttcaagctattcttcygcctcagcctcctgagtagctgggattacaagcaccaggcatgacatccggctaatttttgtatttttagcagacatgggggtttcgccatgttggccaggctggtctgaaactcctgacctcaagtgattcacccaccttctgctcccaaagtgctggaattacaggcatgagtcactgtggcctggccaaaaatgtcattttaatgaaatattttactcaccatcaaaagaaaagttgggctactttcaactttttaaacactgattctctcaaaattattctttattactttttaataatatattatacctgatatctaggtaatattaaaatgttttacatatatcatagtttcagactatttctttaaaaaaatacaagagggatattatacacacttcctgccacactgccctgcccatccaccccagtactacttcccaaattctataactgcagacactgatattcaggggtaatggagcacagtagaagaaccgtatttaagcagaatatgtacacaagctgaatgctagatgtggcatagtttaccttacag

SEQ ID NO: 489064 - DNA, 530 bp, Homo sapiens
aggtaagatgatatgtaatagcataaagactagtccaagggtgtatttcatatttatgacaataatatgttagtattaattagtattatcggaggagtagaacctttacatttaattttaaaatcatcacatgaatataccagggtctgtattagtttctatcacggtaatacaatttaccaacaatttggtggcttaaaacaacacaaatttattattttacagtgctggagattagaactctgaaatgggtctcactaagctaaaatcaagattttggcagggctgcctttcttctgcaggctctaggggaaaatccatttccttgctttgcctttcctagcttctagaatctscctgaattcctcatttcatggcccccttctgtctctaaagccagcagtggctggtccagttttccttaggctgcgtcactctggcactgaccttctgcctcattctactacatttgatccttgtgattacgctgggccctctggggtagtccaggataatttctttatattaag

SEQ ID NO: 489065 - DNA, 620 bp, Homo sapiens
tgaaggtaagaaataagttatgagggcaacaggaagataacacagcaagagggcaatttaggatcttaaatatttaaaagtatatgatttgaaaaatcatacaagatgtttttaatcctaagttcatgtctaccagaagcaagtatttctaagcatattgttctattcttcttctccagatgaattatttttatgattaactaagtatattcatatatttattccttaaacaaatrtggtttagggatctacaatacagatcaaagctataaatgtgataaaccaaatataattctcctagataattcatatacaagggagggacaaaatttaagaaactacatactaagaagaataacagctaatgtttgtgggtatttacaatatgtcaggcaagtaggcactattttattatccccattttaagaataagaaaactgtgtctaagagaaagtaactgtttccaaatttgtaaattctattttaaaaattggcacataaactctaatctttcacctgtactttcaactgctgtgctactatatatttatgtaaaagatttttattatcagagaacaatcaagcattatgtgtgtttagataatagagagaaatttgca

SEQ ID NO: 489066 - DNA, 609 bp, Homo sapiens
aatttatccacttagatgtcaagagctctactcaagtaggatagagtcattgtcataagtctaagatttttttatttttcttcccaatttttcagagtaagtatggacattgtttccccttcagaaaaagacttaggtgatatttcrtttgttgactaattttttttcttcttatgactatatgtaacatacaggcatagctatataaattttgccacaggcattctttttaggcaacaactcagtaatatacatatgaaatgccagaggattgcatttaggcatgtgggagaagaaaataaggaggacttttgcaataaaatcttaacagtatgaaattttaaggaattcaagcacaaaataaaataaagttaggttcatgaccaatcccaaaatcgaggtggctgaaatagacttaatgaaagtagggtagtgttagattccactagacctgtctgtgctgtccaataacgtagatcaccacacatcaatgtttcaatttatattagttaaattaaactaaataaaaatgcaattcctcaattacactagccaagatttcacatgctcaataaccacatgtgcctagtggttaagatattggacagc

SEQ ID NO: 489067 - DNA, 609 bp, Homo sapiens
aatttatccacttagatgtcaagagctctactcaagtaggatagagtcattgtcataagtctaagatttttttatttttcttcccaatttttcagagtaagtatggacattgtttccccttcagaaaaagacttaggtgatatttcatttgttgactaattttttttcttcttatgactatatgtaacatacaggcatarctatataaattttgccacaggcattctttttaggcaacaactcagtaatatacatatgaaatgccagaggattgcatttaggcatgtgggagaagaaaataaggaggacttttgcaataaaatcttaacagtatgaaattttaaggaattcaagcacaaaataaaataaagttaggttcatgaccaatcccaaaatcgaggtggctgaaatagacttaatgaaagtagggtagtgttagattccactagacctgtctgtgctgtccaataacgtagatcaccacacatcaatgtttcaatttatattagttaaattaaactaaataaaaatgcaattcctcaattacactagccaagatttcacatgctcaataaccacatgtgcctagtggttaagatattggacagc

SEQ ID NO: 489068 - DNA, 609 bp, Homo sapiens
aatttatccacttagatgtcaagagctctactcaagtaggatagagtcattgtcataagtctaagatttttttatttttcttcccaatttttcagagtaagtatggacattgtttccccttcagaaaaagacttaggtgatatttcatttgttgactaattttttttcttcttatgactatatgtaacatacaggcatagctatataaattttgccacaggcattctttttaggcaacaactcagtaatatacatatgaaatgccagaggattgcatttaggcatgtgggagaagaaaataaggaggacttttgcaataaaatcttaacagtatgaaattttaaggaattcaagcrcaaaataaaataaagttaggttcatgaccaatcccaaaatcgaggtggctgaaatagacttaatgaaagtagggtagtgttagattccactagacctgtctgtgctgtccaataacgtagatcaccacacatcaatgtttcaatttatattagttaaattaaactaaataaaaatgcaattcctcaattacactagccaagatttcacatgctcaataaccacatgtgcctagtggttaagatattggacagc

SEQ ID NO: 489069 - DNA, 560 bp, Homo sapiens
aaaataatacctaccatttgagtgcttacagtgaagaggctttgcatttattatcctttcacctaagagccataaatggtggcacaattattctaactctggaggaccagtgatatgagaatagctaattatacctaaggtcacagaaatggaagaagtaattctaggtttggatatcaggtttatttagttctgaagctgtagttaaaaagcacagaaatttattacatatccttyattttccttagacagaaagtaataaggttataactgaagagcattggtgaaacactttccttacatgtaatacatatattaagtaactatagaaagaggtcaatgaaaatcagcacttttgaaatcaactctatatttgtgctcatagatgtcaagtgggtgattacaaaaaagtaactgatttagatttcctgatattaggaactctgttatacttattggaagataaaatcacagggaagtacagaatttttctggcatccttttgtaacaaaaccttccagtactcgttcatgaaaacaggagaaattgatttatttcta

SEQ ID NO: 489070 - DNA, 623 bp, Homo sapiens
ggtttaagtctatcactaaatgtataatgattattccatagcaccagatggagtatcatttggacttaagaatggaaagaaagaagacttcaatagatctataaatctagccttagaataaagcatctcataattcatctgaycattttgcactgtcatctgatcattttacactgatagtagcctattgatacaattttattcagtgagttaggatgaaaataccatttgtatttctttagtatgggtaggtcctagtattcaggataaatgaatggcatttttcatagctgtatatgtaagtcaattaagtgccaagtcatatatattcaaaatatgctgatgctgatgcagaaaaggaagaagtagaggagcaggaggaggaggaggagcaggaagtagaggaggaagaatatggagagaagaagaaaactctttttctctgtaagacactgatgaccctaattcttttcagctatgaagagaaaaaagtatctagtaatgagaacatagttttgaggaatgctattattttcctattatttgaacacagtgatgctccacttacacttgaaaagaggaagatatgtgcagatgaaccttcactttatgccagatacttt

SEQ ID NO: 489071 - DNA, 628 bp, Homo sapiens
gctaggagcaaaaaagaagggtggggactatgagtattaaatgcccccagtggcctactctgcagagaacccagtagccttcaccactgaggttctcaacatcttctgccatcaccatgcaacctccacagctttcatcattaaggaccctgaagtgatcaccatcatagaacccagaagacccctccaaagaggaccccagcagctttgctactgaggaaaccaacaactagtacagctactgcagaccctgttgcaacttttgccactgagggccccatagttttttgccttcatggaatacacctgcctgacccaccacttcccccacccatttctcctgtgagacctgtcccagccagtgcaccaagggcactctgaccccagaacccaatggagccactaaacacccataagctggcctcagcccccaccaccacatgcacactgccagccctgacccctggagccaygcacatgcacacagtcaaccccaacccctaccatcagccccaactgccatgtggacacagaccactggctcttgcccccacctacccaagcacactttccactggacccagaggtgcctctgaggaccccaacagccttcacaaccactgcagac

SEQ ID NO: 489072 - DNA, 421 bp, Homo sapiens
acttttcctgctcccaaggaaaggctcctaaatataggctaagattttatgcgtgcatttccataagccatccactctgaaaatgggccgttttccaccaatgggcatcaaattcccgtgggatgattgcagttaacaataatatatagcatcacatagctggatggaagctattgagctttcccaacacaaagaaatggtaaatgtttgagatgatggatatgccrattaccctgatctgattactatacattatgtgcgtcaaaacgtcattatataccccatgaatatgtacaattattgtcaatttaaaaagtcctttgccatttagtttataaaaaatggttgcaaatactgctcacttccacaagagaccactattgcttcactttttccaaagatgccttttaaaaaagcagtt

SEQ ID NO: 489073 - DNA, 535 bp, Homo sapiens
ctgagaacagcccaacccagattgcaaccccrgcagcctgagatgggggtgccgtggggtgagggctctggagaagcaatcaggactgaccagtccttagactgggaatctgcccaagtaacagaaatagcccatttctgcattttagccacttggagcagttggtctctatctgtcatgaccatcttccctgttagcatccatcttgcaccgtgctttttaatcttttttttttattgactgccctctgggagccttttttatagtttttttttccccctaatcccttctaatctcccaccaaattaaaagataattttcttagagactgagtctcactgtactgctcaggttggccttggactcccaggctcaagtgatcctctcgtctcagcctctcaagtagctggaactacttgtgtgcaccactgcaccatccccttgccaggcagggtgtcaccgcaggtgggggtgtgcatgcaactttctgggagagtgggcttctgacatttgaggacaaggggccactgtacac

SEQ ID NO: 489074 - DNA, 608 bp, Homo sapiens
caaccccggcagcctgagatgggggtgccgtggggtgagggctctggagaagcaatcaggactgaccagtccttagactgggaatctgcccaagtaacagaaatagcccatttctgcattttagccacttggagcagttggtctctatctgtcatgaccatcttccctgttagcatccatcttgcaccgtgctttttaatcttttttttttattgactgccctctgggagccttttttatagtttttttttccccctaatcccttctaatctcccaccaaattaaaagataawtttcttagagactgagtctcactgtactgctcaggttggccttggactcccaggctcaagtgatcctctcgtctcagcctctcaagtagctggaactacttgtgtgcaccactgcaccatccccttgccaggcagggtgtcaccgcaggtgggggtgtgcatgcaactttctgggagagtgggcttctgacatttgaggacaaggggccactgtacaccattagtgaccaacactcctggtgggcagtgtggggatggggaagcgtgggtgccctaccaggaaaggagatctgggtgaggctcagagcctcccag

SEQ ID NO: 489075 - DNA, 586 bp, Homo sapiens
tgcgtgcccagatgcgcgacctggcacggggcatgttcgtctttggctacgacaactacatggctcacgccttcccccaggacgagctcaaccccatccactgccgcggccgtgggcccgaccgcggggacccgtgagtagcccccgccgcccggggccgcgcgcccacgcgcttccttccgccctccgcgccggggtgcagccctctgtcctccggggcccccgagggcgccagggccgttagggtcccgggcagcgctcccgcgccctgtcccgtgtgagtccctgtgaagacccccgagcttgagggtgcggggtgggccggtggccttcctctcctgattctcccggaatctccaaacttcagaactgctgtccagctcagtgtcttacgcgtgaggatactgaggtccaggaccagaagggacagtggcagtgccaagggctggcttggagggctttccacttccatccgascccttcctccggatgagcataaactctaaatgaaatctccatcatgccccccgtgtaaacgcagcctcagaacaagcctttacctcgcacccccacctctatcacattg

SEQ ID NO: 489076 - DNA, 592 bp, Homo sapiens
gtcacatgaagggccaagtgctggagagaaactcctgtgacctggctttaccaccattcctgcctttcctgagacccagtgtttttctttttctgggttcttctgtatatgcaccctttcaatatycacaccttaacgtacgccaacaagtacatgtcaccattatcaccactaataagtgtaaccagagaccatagtccttcctgacaggcagaaagaagataagagaagtcatgcgataactacagtacaagctggagagctgtgatcttacaccttcagtctggatatggtttgaagcttgctggggcctgacgcagccacaagaattgtgagccatgagggctgcatttttaccactgtatctcctagttcagtgcctgtctggtgatcagtaagtgctgggtgatcaatagcttggtgatcaataagtcctggctgatcaatagcttggtgatcaataagtgctggctgatcaaatagcttggtgatcagtaagtgctggctgatcaataggttggtgatccataagtattggctgatcaatagcttggtgatcaatagtactggttgatcaaatagcttggtgatc

SEQ ID NO: 489077 - DNA, 592 bp, Homo sapiens
gtcacatgaagggccaagtgctggagagaaactcctgtgacctggctttaccaccattcctgcctttcctgagacccagtgtttttctttttctgggttcttctgtatatgcaccctttcaatattcacaccttaacgtacgccaacaagtacatgtcaccattatcaccactaataagtgtaaccagagaccatagtccttcctgacaggcagaaagaagayaagagaagtcatgcgataactacagtacaagctggagagctgtgatcttacaccttcagtctggatatggtttgaagcttgctggggcctgacgcagccacaagaattgtgagccatgagggctgcatttttaccactgtatctcctagttcagtgcctgtctggtgatcagtaagtgctgggtgatcaatagcttggtgatcaataagtcctggctgatcaatagcttggtgatcaataagtgctggctgatcaaatagcttggtgatcagtaagtgctggctgatcaataggttggtgatccataagtattggctgatcaatagcttggtgatcaatagtactggttgatcaaatagcttggtgatc

SEQ ID NO: 489078 - DNA, 622 bp, Homo sapiens
tcggggttactgctgacgcttctgtcaggtggttgaagattacgttggaagatggcaggtccctttgccacagcttcaggttcttcagactgtactttgttgttttacaacagccagtgcatcattcccagatgaatgtgagcacgtacaacatgttttgagtagccttgctgtgagtttcttcgagttgctgctgttctttggaagaggtgagttttatgaagagcccttaaaggatattcttggatcattccaggaataccagaatcacctccgcagatatggaaatgtgaatctggaactggtgactcgaatcattagagatggcggcccatgggaagatccagtgttgcaagctgtccttaaagctcagccagcatctcaggagataggtacttyaggagattcgaaatcaaaccaacatttgtaataagcaaatacactttcatttactaactagagcagtaatagtgatttttcttcattttataatactgaataatggagtgatgtattctcaagtgaaaagtgtttgtttttctaacctggcccacagtgatttctgacaccaggtttggtacatttatttatcataatagaaattctgagtggtaacacatct

SEQ ID NO: 489079 - DNA, 610 bp, Homo sapiens
aagtttgattaaacttttactgcattaaaattatgaattactattcatcaaaacatactataaaaggagtcagaagtcaagccgcacagagggtatcagagctcagaaagggaaggaggaccattcacgtgtgaggatgggtgccatgggataccaaagcccaagtgagagaggagggacgggattctacccctaccttgaccttccttccagatgatggctggaatttgaggaaaccaagataagcagaatcccaccctaaatcttatcaagtgccacactcactgaagtatgatcttgaagaaactaaaatacacagcatcccaccttaaatcttactcaagggagttaatcctatcgcccatatgtgcataagaccagaagaatggctaatctccacccyttgcctccttacaatactaaactccccacccagggaggagcttattcaccattttgttatcatgccatgtgtgtactaccatgatttctcactgcgcctgcacaccttgtgctccaccctgcacatgtaatgacattcaagtatctcatgcttatttatgtcatcatggttcttaaaacaacaaaaagacctgtcctcagggagcca

SEQ ID NO: 489080 - DNA, 545 bp, Homo sapiens
tgtgaaggagccagaggcatgtgggcagccaatggcccctgagaaggctcaaaactttctggatgttctttctgaagtcgtcttcagagccagtttagtcaggcaggactactactctgattccctataatcagatactttttcttccaaatagtcctctagttggatcattaatcaattcaccagactactgatgacaattatctctatccaaaaattaaagtctacacttaaaaaattaggatttgctgccactgggttcatttgaaacaaagcagcaggttctaaatgcaaacctttaagaggaatccctgaaagtgtttttaattgatggcaagatcaatggactaaagtagaaattcttaaggcagttatgttgaagaagataatgttcacttagatttttaygttttgggtattaattaatatgagctttattataatatttgaaattacttcctagagtaatttagtaacttgatattttataataataacattttgaaacatttcaagaatatgccctagatatatggaaaataagt

SEQ ID NO: 489081 - DNA, 545 bp, Homo sapiens
tgtgaaggagccagaggcatgtgggcagccaatggcccctgagaaggctcaaaactttctggatgttctttctgaagtcgtcttcagagccagtttagtcaggcaggactactactctgattccctataatcagatactttttcttccaaatagtcctctagttggatcattaatcaattcaccagactactgatgacaattatctctatccaaaaattaaagtctacacttaaaaaattaggatttgctgccactgggttcatttgaaacaaagcagcaggttctaaatgcaaacctttaagaggaatccctgaaagtgtttttaattgatggcaagatcaatggactaaagtagaaattcttaaggcagttatgttgaagaagataatgttcacttagatttttatgttttgggtattaattaatatgagctttattataatattygaaattacttcctagagtaatttagtaacttgatattttataataataacattttgaaacatttcaagaatatgccctagatatatggaaaataagt

SEQ ID NO: 489082 - DNA, 583 bp, Homo sapiens
gagcttgcggggatagggaggctgaggcagtgggagctccaggcctgggtgctcatctcttccccaccctccccggattctgtgcgcaggcgctgtggctcggcctcgggagacgagctgtgagcaacgttgcgcgtctcagtttgcttagtttgggcttttttacagctcggctttctgatgtcttccatcattttcatcccctacactttataatctgttgcgatgcggccagggtgctctgcttgaacctccgctgcaccttgtcacatgtaggttccctttagttacttgcgctttgagatgacgttacmcttcagggacctcaagcacacaagcattctaaggctcaaggagaggtctggctaccaaatgctaatttaattctcaggtcgacaatggtttatgcctgcagtactactgctgggcaaaggacatagaaaatgcgaaaaggagagggccaagaaaagcaacaggagatgcaggaggacaataaggaacgatggaaaactcacagcagatgccctcaagaacttttgtagtgaccacggtgttaataagcagccttccctgatcttattcg

SEQ ID NO: 489083 - DNA, 504 bp, Homo sapiens
aattattatgctaagacaacaggcatacattgggactttctcagacaaactgagatgtgtgatatgtggccacccttcttacacttcagtaatttctacaaaaacaggaggacagatcaacaacccggtagaaaaatggataaaggatatgaacaaatgatgatgatggcaataagagtaaccgcttacatggtgcttattatgttctaggcactgttcttgatatttctgcatacgaattattttatctttacaacaaccctatgaggaaactgaggtayaaatgaagaaactaaagtaagaacatttaagtagttcatacaaagaaatataaattgttcttaaatatatcaaaatatactcacctcattcatagtaaaagaaataaaaaactgtgctctgatgacatttttcatctatgagatttacaaagatctaaaaattgagaatatacattttctattgcctttggatggcaatttggcagtaactatcaaaagtata

SEQ ID NO: 489084 - DNA, 435 bp, Homo sapiens
ttcctttcctaactcatccacacatatattattttgagcttcagttattctttaaccatcagactgtatcratggtatatagctttaacttattaagaatcaagccctttgttttttattaatttcattctatttgtgaccatgtaattaataagccacagatatttataattctaatccaaagtgctatttcatttattttccacatttttagggaaagttatactggcaaaaacttttagaggttagaaaggcagttgaacgtagcaggtatgatttataagaatgctacaggcatacctcagagatattgcaggtttggttccagactaccacaataaagcaagccatacatttttttcccagtgcatatacaaggtatctttgcactatactgtaatctattcagtgtgtaattgcatcatgtctttaaaa

SEQ ID NO: 489085 - DNA, 626 bp, Homo sapiens
tctctaaatatcaaattagcccggtgtggtggcgcatgcctgtaatcccagctactttagagacggaggcaggagaaccgcttgaacccaggaggcggaggttgcggtgagccgagatcacaccattgcactccagcctgggcaacaagagcgaaactccatctcaaaaaaaagaaaaaaaaagaagaagaaatcaaaagggaaattagaaaatacttagaaatgaatgaaaataacacaacatacaaaaacttatgagctgtagtgaaaacagtgatcaaagtgaaatktatagttgtaaataactacattaaaaagagggaaaggctgggagcagtggctcacacatgtaatcccagcactttgggaggctgaggagggtggatcactttaactccagagttcaagaccatcaagttttacacttacaaatgattaaagtaataaacattacgcatgttttacctcaataaaaagcccctcaccaccaccaaaaacgaaaagaatggtcaaaaaccagtaaactggattggcaaggaaaagaactctagaaggatcctcaagttttccggtctggataggagatgagatgaacttgagatcattaaaaggtactttcacatcag

SEQ ID NO: 489086 - DNA, 626 bp, Homo sapiens
tctctaaatatcaaattagcccggtgtggtggcgcatgcctgtaatcccagctactttagagacggaggcaggagaaccgcttgaacccaggaggcggaggttgcggtgagccgagatcacaccattgcactccagcctgggcaacaagagcgaaactccatctcaaaaaaaagaaaaaaaaagaagaagaaatcaaaagggaaattagaaaatacttagaaatgaatgaaaataacacaacatacaaaaacttatgagctgtagtgaaaacagtgatcaaagtgaaatgtatagttgtaaataactacattaaaaagagggaaaggctgggagcagtggctcacacatgtaatcccagcactttgggaggctgaggaggktggatcactttaactccagagttcaagaccatcaagttttacacttacaaatgattaaagtaataaacattacgcatgttttacctcaataaaaagcccctcaccaccaccaaaaacgaaaagaatggtcaaaaaccagtaaactggattggcaaggaaaagaactctagaaggatcctcaagttttccggtctggataggagatgagatgaacttgagatcattaaaaggtactttcacatcag

SEQ ID NO: 489087 - DNA, 614 bp, Homo sapiens
ccccatttcttccctggctcccactgttttccatgccagaaatagccagcatcattcctcaagcaaagcttctcttcctttctctaagtagctacaccccactgtgtgtgaatgagttggttctatcarcaggaccacagtacttagggcgaagattctaaccagccccattagcagcagctactagcttggacagaactcaccaaatcatttcatctgtgctgggtgttccacctgcaggtcatagaatattcagaacagtagactcaaaataaagcccatcggagcagaacaccccagggtctggagagaaacagctcagatcactggcgaaagaaaagcttcacccacacatgtgctttcaccatgtccaaggaacagaggcctgaggaagcccttggggatctggagaagatatacccagatggcctggggagttgctttacatgacagttaggagatgggaatcagttcagaatagagagaaatgtctacttcatttcatcaggagttgcagtgcagaaaatggtttgtaacaagaaatggaaagaacaaaggcattccttaaatagttcttctcagtttaagagctgatatgaacaaagctattatgg

SEQ ID NO: 489088 - DNA, 602 bp, Homo sapiens
gcacctcacttatcagaaaattaaaacagcccaagaatttgtgttcstcggccattctagtctggttcacggttctttatagatcactgctaatgtccaagccaatgggctaggctttgtaggggaggccaagatgtaggaaatacattctgcttccctaagagttcacagactccttggggaggtaagtttcatatatgacgtaattagtaaataacaaaaagacccgtgtgattaaaacattaaaacgtgaagccattgaggttcagggaaacaaatatttcactatctccactatactccattaccaaggcataaaagtagattagaatttcttgaaatattttcagcgacaaatgaaataataaaaattctcttttcctagcctataagcagaaaagtcaaataatcatatcatgttggtacctcatcattctgtttacttgatggagcaaaaaaaatatcaacaaagccacaatttctctatgaatccgagtatgtttggttcccactttgctttctttattaactcagaatgctttttttaaaagaaagaatgttatacacctgttgtattttagccctttaaatgtatctgacaa

SEQ ID NO: 489089 - DNA, 362 bp, Homo sapiens
agggtctccaggcttgtataggtttctttcggcacatgctgagctggaatgtgtttggtctcttctgtaatttcacttgcaaacatctgatttcacatttctttttttctaaacaracacaaaaataatccccaaatttgacatgcccagaacttccaaacatcctcaagtctgtgagctattcttacaaacaacataagtgacttccacattttccaccaacgcagctgtagcacttttaatgtttacaatcctgtgtcaccctgggtctgagatgttcttccaattaaactctggttacacttctctttccaagtgcgaaagaatccaattaaagttaatgaaagcaatcagtctgcaag

SEQ ID NO: 489090 - DNA, 543 bp, Homo sapiens
tggcttttttttccctttttatctgggttggctttattcccagattccaaatgaaagagacagcattttacytgaccaccccattccaactgttaaacactgtgccttcaggctccgatgctctaatggtcgattaaagttgataagtctgtccaatttccatttttgaacattcagcttgctgaaattgtaatattgtgaaaatctgaagtcttcaggacctgactgagaatctctctggatgtcaacacataataataaacaagggggagaaaagtattgccaacaggacttcacatttgtagagctcgggttagctatgtggcctagccaagtttgcgtagagtcgaaatggatgatggctcaggtagtctatcaatcaggatgtggaatggagccactcacagtgtggtttacatctgtagaaggcaaacatcctcaaaaactcattgacccactgaatagcatatgcatttccttcctcacctgccttaccaagccatcagtccttcttgctcttattagagatccttccttaatctg

SEQ ID NO: 489091 - DNA, 543 bp, Homo sapiens
tggcttttttttccctttttatctgggttggctttattcccagattccaaatgaaagagacagcattttacttgaccaccccattccaactgttaaacactgtgccttcargctccgatgctctaatggtcgattaaagttgataagtctgtccaatttccatttttgaacattcagcttgctgaaattgtaatattgtgaaaatctgaagtcttcaggacctgactgagaatctctctggatgtcaacacataataataaacaagggggagaaaagtattgccaacaggacttcacatttgtagagctcgggttagctatgtggcctagccaagtttgcgtagagtcgaaatggatgatggctcaggtagtctatcaatcaggatgtggaatggagccactcacagtgtggtttacatctgtagaaggcaaacatcctcaaaaactcattgacccactgaatagcatatgcatttccttcctcacctgccttaccaagccatcagtccttcttgctcttattagagatccttccttaatctg

SEQ ID NO: 489092 - DNA, 652 bp, Homo sapiens
ctacaccttaagtatatgcaggttattgtgtgtcaattactcctcaataaagctgtattttttaaaagggaataggatggaagccatactaaacatytacactcaacagtcattaatcttttctgggcaaaggataagactttcctctagccctttccccactctaagagccttctcctctttcatcttgggttcacatttttcagctctctcagatcacaccttctccaattattttcagcctaccagcaaacacttctataacacacactccaggcttaacttcttcctctacatcttgttgcataggttcccaacacataacatgtatttcttttcattccttgtagctctccaaccctggaatcctgcttgcatctgcatttgggctggagccagaacttgaactggaggagtggctgggaaagaaaaatcaaatgtgtttgaggggaatcattggaaaaatgattcaatcattttggtccttggggagaatgtagagctcattcttctcacagaaagccatttagactttcttgaagatccttttcctttgagagctagtttatggtcaacatctgaaacatggctattctatccatatcaccaacagtactatttctcgaagccccgccatgttctagctcagtct

SEQ ID NO: 489093 - DNA, 652 bp, Homo sapiens
ctacaccttaagtatatgcaggttattgtgtgtcaattactcctcaataaagctgtattttttaaaagggaataggatggaagccatactaaacatctacactcaacagtcattaatcttttctgggcaaaggataagactttcctctagccctttccccactctaagagccttctcctctttcatcttgggttcacatttttcagctctctcagatcacaccttctccaattattttcarcctaccagcaaacacttctataacacacactccaggcttaacttcttcctctacatcttgttgcataggttcccaacacataacatgtatttcttttcattccttgtagctctccaaccctggaatcctgcttgcatctgcatttgggctggagccagaacttgaactggaggagtggctgggaaagaaaaatcaaatgtgtttgaggggaatcattggaaaaatgattcaatcattttggtccttggggagaatgtagagctcattcttctcacagaaagccatttagactttcttgaagatccttttcctttgagagctagtttatggtcaacatctgaaacatggctattctatccatatcaccaacagtactatttctcgaagccccgccatgttctagctcagtct

SEQ ID NO: 489094 - DNA, 633 bp, Homo sapiens
cactcatctggtggagataatgtatatatcctttgaatttggactmagaaatgtcccagtgatgttttgccactcatcagagaccactttattttcagagaggagtgtcctaatgcttgtgccatatctttcaaactacacatacgtccacttaaaggatgattcacaaaacatgtgcacgtacatatgtgagcctctttgtcccccagtaagtaggctgttgagcaatggcaaactttctcagcattggctaggactaatatactacctagcagaagcactacagagaatttgcagggcagcattaaagttactgactagggtaaggttaattaacacttttcttagaaatgtcaagtgattagtaagaacagcaataaattggggtcactgggagttctttctgcaatcagcatactgagtagcccataatattgtttataataatctgtgtcagcctgcaattgtctatatatttatagaatattccagtgaagtttacagattcaaattttaattcaaacactgacctttctttggttggttaatttacttgaagcatttgttagacattacacagagggctttacatgtatgttttcatgtaataactcaataaatatttaaatataa

SEQ ID NO: 489095 - DNA, 465 bp, Homo sapiens
gtggaaatctctgattctggagcctccagatcaaggtaaagcttttggtggcaccacagactttcctgggtgcaaccaggaatggggcctaagtcttccctatacacaggctcccaaactctatccttctcacagattgaggggaaatacgccatctctctcatggcccatgctgtttttccattgcattatccaattctacatatacaataggcttctgcatgakttcagacttgcacagataggcagaatgaataacattcatcagcttctcactcacaccatgaaaaaaaaaacatgaaatagaaaaaaacacagatctgacaacctccatgaaacagaagagaaaaaatacaggaagcacaacacttatagctctaacttggcatggttctctacagcagaaaagtaaaacctaattaatatgtcaggaaatgatcacattgcaagggctaatattatttc

SEQ ID NO: 489096 - DNA, 621 bp, Homo sapiens
cactctatgtccacgtatcactttctttcttatttaaaaaaaacttgtattttaggtctagggatatatgagcaggtttgctatataggtaaactygcatcatgggtagggggtattgttgtacagattatttcgttacccaggtagtaagcctggtacccaatagttattttttctgatcctctccctcctcccattcttcaccctcaactaggccactttctttatatctggaattcttcttgggatcataggaagattaaactcattcattcatctacacattcattcaaaattattattgagtgcccactgtgccagggactattctaggagctcaaaatttgttagtaaacaaagccccctcaccaacccatcctggtgcttacattgtgggacccaagacaagagtacaaatgaatacaatttaccctatgcctagatatttaaaagccattcatcaagttaacaaatgactgaataaaatgcattttctcttcctaccctaaaaaatatgcctttatgactttcaagttcaagtttagaattctcaaaccccatggaatttcccactagaacataagggtctaatgaggagagccagtcttcagtccctggctc

SEQ ID NO: 489097 - DNA, 621 bp, Homo sapiens
cactctatgtccacgtatcactttctttcttatttaaaaaaaacttgtattttaggtctagggatatatgagcaggtttgctatataggtaaactcgcatcatgggtagggggtattgttgtacagattatttcgttacccaggtagtaagcctggtacccaatagttattttttctgatcctctccctcctcccattcttcaccctcaactaggccactttctttatatctggaattcttcttgggatcataggaagaytaaactcattcattcatctacacattcattcaaaattattattgagtgcccactgtgccagggactattctaggagctcaaaatttgttagtaaacaaagccccctcaccaacccatcctggtgcttacattgtgggacccaagacaagagtacaaatgaatacaatttaccctatgcctagatatttaaaagccattcatcaagttaacaaatgactgaataaaatgcattttctcttcctaccctaaaaaatatgcctttatgactttcaagttcaagtttagaattctcaaaccccatggaatttcccactagaacataagggtctaatgaggagagccagtcttcagtccctggctc

SEQ ID NO: 489098 - DNA, 621 bp, Homo sapiens
cactctatgtccacgtatcactttctttcttatttaaaaaaaacttgtattttaggtctagggatatatgagcaggtttgctatataggtaaactcgcatcatgggtagggggtattgttgtacagattatttcgttacccaggtagtaagcctggtacccaatagttattttttctgatcctctccctcctcccattcttcaccctcaactaggccactttctttatatctggaattcttcttgggatcataggaagattaaactcattcattcatctacacattcattcaaaattattattgagtgcccactgtgccagggactattctaggagctcaaaatttgttagtaaacaaagccccctcaccaacccatcctggtgcttacattgtgggacccaagacaagagtacaaatgaatacaatttaccctatgcctagatatttaaaagccattcatcaagttaacaaatgactgaataaaatgcattttctcttcctaccctaaaaaatatgcctttatgactttcaagttcaagtttagaattctcaaaccccatrgaatttcccactagaacataagggtctaatgaggagagccagtcttcagtccctggctc

SEQ ID NO: 489099 - DNA, 531 bp, Homo sapiens
ttaagtctgctcaagaaatcccaaaattagcactaaaggcaagcaagctgttactattcctaataatcgctacagactaattgctgcaaaaaaaaagttaaaatgtaacatccaaataaaagtatcagtaaacgatattaaaaagacaatttttaaacaagtrtgagagcataatgagcatttttttttctacagagacagggtcttgttattttgcccaggctggtcttctattcctgagctcaaatgatgctcccaccttggcctcccaaagtactgggattacaggtgtgaaccactgcactcagccaaataataagcacatttttaaaggtaccatcagtttctactatttgtgagcatacactgcctctaggagcattggtacatttctagggaacctttataaaggaaccttcatatagtaaatttctgattttagaaatttatctaaaagaaaatttggagatgcagaaaacattttatacatgaatactctttcaaaataatatgaaataataataatagtgt

SEQ ID NO: 489100 - DNA, 574 bp, Homo sapiens
ttgcagctctcccagggtggctacgacttgacttttcttttttaatagaaaacgtttggttttaaagtttacatacacacaaaaacagcgattatgaaaacaataatctgaggataagcggccagagacagattttcaagtcatgggcgaatttggggagcgcggaaatgtaaatgtttattagcgtgactagatggactgcaaaacgattaagactgttttctggaaacaccattgtcgcataattgcaacaaaatccccaaagcaakgcgggggatggggtataaatcacgaggggaagaaaagaaacctctagcttttttttgaaaccaaatgaaaaaggacttgattaagaaggccttttcttgcaaaggcatctttctgggttccaaaaacttggggaaaaatcagtcccagaaatgtggaaagtgctaatagaagctgaagctgcagtctagcagcaacagtttctccggagccgcagaccccagaagccataacgaaaaattactccggttaaaacaagcaaatgcgttgccgcgcttgcgacttaccccgagtatagacgtggcca

SEQ ID NO: 489101 - DNA, 484 bp, Homo sapiens
ctggctcacctggggggatgcgaagggtctgagggaagaggcaagccctgcctggggagccctgtctgaggggggctcaccaacyacttggggcaggaggagccatggctttatccaggagtcctgcctgagggtggagacagaggtcaccctggagtctgaggaggattcacagccagccataggagacccagttctgtcctgggagccccatttgagtgggaagggaacattcatggcctgggagtcctgtctgagaaaagagacatgtctccaccctggggtccctgctggaggggaaaggtggccccatcctggggtctgaggagggaggggagacacggcttcatcctggaatcatgcctgaggatggggatacagcctgcttggggaattctatctgagatggaaaccccaatctgaaaagggagattcagccctgttctagaagcccacagggtgtcccctcacctgagcatggaag

SEQ ID NO: 489102 - DNA, 484 bp, Homo sapiens
ctggctcacctggggggatgcgaagggtctgagggaagaggcaagccctgcctggggagccctgtctgaggggggctcaccaaccacttggggcaggaggagccatggctttatccaggagtcctgcctgagggtggagacagaggtcaccctggagtctgaggaggattcacagccagccatrggagacccagttctgtcctgggagccccatttgagtgggaagggaacattcatggcctgggagtcctgtctgagaaaagagacatgtctccaccctggggtccctgctggaggggaaaggtggccccatcctggggtctgaggagggaggggagacacggcttcatcctggaatcatgcctgaggatggggatacagcctgcttggggaattctatctgagatggaaaccccaatctgaaaagggagattcagccctgttctagaagcccacagggtgtcccctcacctgagcatggaag

SEQ ID NO: 489103 - DNA, 484 bp, Homo sapiens
ctggctcacctggggggatgcgaagggtctgagggaagaggcaagccctgcctggggagccctgtctgaggggggctcaccaaccacttggggcaggaggagccatggctttatccaggagtcctgcctgagggtggagacagaggtcaccctggagtctgaggaggattcacagccagccataggagacccagttctgtcctgggagccccatttgagtgggaagggaacattcrtggcctgggagtcctgtctgagaaaagagacatgtctccaccctggggtccctgctggaggggaaaggtggccccatcctggggtctgaggagggaggggagacacggcttcatcctggaatcatgcctgaggatggggatacagcctgcttggggaattctatctgagatggaaaccccaatctgaaaagggagattcagccctgttctagaagcccacagggtgtcccctcacctgagcatggaag

SEQ ID NO: 489104 - DNA, 316 bp, Homo sapiens
aattcaaacagaatattttaaatgaaaaaagagttttttccagcagtttcatattgtctttgtaataaatatctgaaacatttttgaaacacttaatcattgcctttatatatgtgatggacactggagattcttcaagctagaaccccaaaagccccccaaacctaagatacattgcctttgcagcatcttctttcttttctccctctcctgttcatccatttccgttcccttcctttgggtcatttgcatcaccaagctttctyatctctttgctcctcccctcagaagttttctagcctttctgctcaaggga

SEQ ID NO: 489105 - DNA, 513 bp, Homo sapiens
atacaccatgtgggctcttaactgactgtaggcaataaacaaagaacaacaaaaaaaattgtataatttcaagtgctgtgcagaacttaaactagggaaaagtaatggagagagactgggtgatgtgtttatgctgagtggtgaggggaactgctgtggggaggtcctggggctgtaatctgaacagcagggagccacccatgccaggctgggacaaacaactggtcaaagaacttcgcawggaataagttgaagtgcttgaagaaggaaaagaacatcagtgtgactggagtactgctgtgcagagggatgtaggagaggacatcctagcatgcacactgcactgagaatctggactcatgcttaagcctcttctctcacatcaactaggcttggatcctgggtaagtcacttctccactcaggatggcctccatttcctcatgcactaaacacagtggcaattactaaaggatcttcctttcaggtctgacggcatagacttttgtgactc

SEQ ID NO: 489106 - DNA, 616 bp, Homo sapiens
agctcatctccctgtccctgcagctcagagggcagagaggtgcattccctagaaccagtcagcattcagagctgtttggcatcaccactgcctcatactgctattcttcatcctcttcrgactgtatccactctgactcagtggtcatccccaaaactttgcatgaagcaaaaggaactcttcattcagacagagagagagttggagagggaaccaggtgagcatacctcatggcctgaagaacgttatccaagagaaaaagtttattcttagaattgttatgtaggcaacaattcactgatctctgcctccaagtggcttaaaattcactgacaagatatagaaaagtgaaatgtaagattgagagaatgatttgaaaataattgcttttgttttagtatttgcaggcccatatgcaataatcctttcatttttcccttggtttatccttcagtctcagactgtcctgatgggtagctttttaaatatagggtagcaagtccactaacatttctcccagttaccaaggagaccttattggccttaatacattaccaccactaagtcagaagtcttacataattaagtgttgtcatctgtttcacttcgtacttta

SEQ ID NO: 489107 - DNA, 616 bp, Homo sapiens
agctcatctccctgtccctgcagctcagagggcagagaggtgcattccctagaaccagtcagcattcagagctgtttggcatcaccactgcctcatactgctattcttcatcctcttcagactgtatccactctgactcagtggtcatccccaaaactttgcatgaagcaaaaggaactcttcattcagacagagagagagttggagagggaaccaggtgagcatacctcatggcctgaagaacgttatccaagagaaaargtttattcttagaattgttatgtaggcaacaattcactgatctctgcctccaagtggcttaaaattcactgacaagatatagaaaagtgaaatgtaagattgagagaatgatttgaaaataattgcttttgttttagtatttgcaggcccatatgcaataatcctttcatttttcccttggtttatccttcagtctcagactgtcctgatgggtagctttttaaatatagggtagcaagtccactaacatttctcccagttaccaaggagaccttattggccttaatacattaccaccactaagtcagaagtcttacataattaagtgttgtcatctgtttcacttcgtacttta

SEQ ID NO: 489108 - DNA, 308 bp, Homo sapiens
atggggcttttgttttcatttttgattctggtaagtttgaacattcaggaaggtaattttttaaaaaactaccagaaaaggcaacttatttttctttgttaggatgaatctagtttctacagaagagatgcaatttgaaaaaatagtattaatgaattcagaaaactgtccacagaaaaacyggcataaacacactcaaagaagtcagaatctcaaggaagtgtccagtgaaattgcttatattactaatttgtggggaaaaaagataaggttaaattaagtagaagttgatatgatttaggaattaa

SEQ ID NO: 489109 - DNA, 561 bp, Homo sapiens
tgctgtacaggatttaaatagttacaatttcatgagattgcatttaaaaccaggaaggagatctaaagcctttaacataagaaagctgctccttattagaaaggaaattggtcccaacccatgttgtgttttgcacacacctaggtagcctctctggccagtagagatggtagaacttagataaagtgaatttgttcccctgctgatcagaaaaaaaaaaaaaccatggaatttcacactgaaaacacatcatggggcttttgttttcatttttgattctggtaagtttgaacattcaggaaggtaattttttaaaaaactaccagaaaaggcaacttatttttctttgttaggatgaatctagtttctacagaagagatgcaatttgaaaaaatagtattaatgaattcagaaaactgtccacagaaaaactggcataaacacactcaaagaagtcagaatctcaaggaagtgtccagtgaaattgcttatattactaatttgtggggaaaaaagataargttaaattaagtagaagttgatatgatttaggaattaatg

SEQ ID NO: 489110 - DNA, 402 bp, Homo sapiens
gtattttcttatttatcattttattttgacatttaagctttaatccatcttgatatttatcaatatatcttgatacatagaatgacatagacatcttgtggaggggtkttattgctttttgagatggcagcctcactatgctgcccaggctggcctcaaactcctggcctcaagcaaacctcccaccccagcctcccaagtagctgagactctaggcatgcaccaccctccaagcttgtaaataatccaagtagctttcagtagttccaaagctatttactcaataatcaatctttcctaaaaattttaaaatagactatatggattaattggctaattttatgaagaacactcaccatggacccatacctcatgctgtatactaaaataaattccagatag

SEQ ID NO: 489111 - DNA, 630 bp, Homo sapiens
tgcgcacagtgagtggggtcggagggggtgggcacgaacgtcgagggagaaaaaggggctctcccaggggccatggccctaggagcggcccctgcgtcctttccccggggacaccagccttgtctgtcggggtgcggggggcagtgagttccccaccgcctcggaatcccggctgctgcccacctggggcctgstccgggagaggatgcacacggaccggccaaggggccagataggtcccagggacagggccgcgaggagcctatacgtggaaagaatggattgccacgtttggaaatagagaaaggacgttgaaagggagcctttgatagagggccctgtgccgtctgggaccggaggtccgtcagaatctgatcagaagtctgatgagagtactcactgtaggcagtcttatacacaaggtggaactagtcttaaggaccttcataccagattgaattcggatagtgatggaaagaatagtcctccagaattaaggtttgtcacaggaatgaaagtattgcattacttaataaattcagtgtatacagtaagtggccagtaagttgacatggggaaaagagtatgatcacttcaatagcagcaacaggggattgaataagatttcgc

SEQ ID NO: 489112 - DNA, 693 bp, Homo sapiens
tggactgatgtcaacaaacatgggttcaaatttctgtcctgatacttgttgggtgccaacagcactcaattatatactgtatcttatttaatcttcaaaactattctatgtgatgggtgatatttttttctcattttacagatgagaaaactgaggctaagaaatgtaaacaggctttttgctcagtggagttattttgagcaaaaagcttatttacatttctgagtctcagtttccccaacaagtagctgttattttgataacccaggaataccatggtgtgtataaggaagaggcgagaaatgaaatcataatgaaaggaggaagtaaagctgtagaaccttaaatattgascaaaggagtttaaaatgtggggaaactataagttgtgttttaaaaaaatttcaaataaataggttcttgtttatcgatttaatcttctaattatgtgtgagagtggcattagccttctaaaattatgtttcagacacactatgatatttattaacttcatttataaatatttagtttaggaatatttccagtataaagcaaagtacagaaaaaataatatatttgacactgggaaccattcccccttccccatgctaatatttataaccaccttgatgttttagaagatgaactcgagagagtggtgcagaatgaaatgtagaatcccagaacagggag

SEQ ID NO: 489113 - DNA, 693 bp, Homo sapiens
tggactgatgtcaacaaacatgggttcaaatttctgtcctgatacttgttgggtgccaacagcactcaattatatactgtatcttatttaatcttcaaaactattctatgtgatgggtgatatttttttctcattttacagatgagaaaactgaggctaagaaatgtaaacaggctttttgctcagtggagttattttgagcaaaaagcttatttacatttctgagtctcagtttccccaacaagtagctgttattttgataacccaggaataccatggtgtgtataaggaagaggcgagaaatgaaatcataatgaaaggaggaagtaaagctgtagaaccttaaatattgagcaaaggagtttaaaatgtggggaaactataagttgtkttttaaaaaaatttcaaataaataggttcttgtttatcgatttaatcttctaattatgtgtgagagtggcattagccttctaaaattatgtttcagacacactatgatatttattaacttcatttataaatatttagtttaggaatatttccagtataaagcaaagtacagaaaaaataatatatttgacactgggaaccattcccccttccccatgctaatatttataaccaccttgatgttttagaagatgaactcgagagagtggtgcagaatgaaatgtagaatcccagaacagggag

SEQ ID NO: 489114 - DNA, 507 bp, Homo sapiens
gtcaatagatagaagactataatcaccatgatctaactggtgtcactgcttcgacccttgcttacccacagctattctcaacacagcattggagtgaatctttaaaatatgcaaattataatatcttggcacaaaacgtatctctctcaaagcaaaggctaatgtcctcctaatcacctaagtgctatgatctgtgatttccctgtcagcatcsgacctcaaactctacttctgccccactggcttctttgccattcagcaaaccatccaggcatgcccccatttgattctatgcagctatggtgcctctccctgtaatgctctttcccctccatctacatggcttactctctcacctctttcaagcttcaaatctttgctcaaatattaccttctcactggagacttatttaactatttaaaattacactctcctccctttttagaacattctctattctctttacatccttattttgtaagtagcagaattgccatctcatagac

SEQ ID NO: 489115 - DNA, 507 bp, Homo sapiens
gtcaatagatagaagactataatcaccatgatctaactggtgtcactgcttcgacccttgcttacccacagctattctcaacacagcattggagtgaatctttaaaatatgcaaattataatatcttggcacaaaacgtatctctctcaaagcaaaggctaatgtcctcctaatcacctaagtgctatgatctgtgatttccctgtcagcatccgacctcaaactctacttctgccccactggcttctttgccattcagcaaaccatccaggcatgcccccatttgattctatgcagctatggtgcctctccctgtaatgctctttcccctccatctacatggctyactctctcacctctttcaagcttcaaatctttgctcaaatattaccttctcactggagacttatttaactatttaaaattacactctcctccctttttagaacattctctattctctttacatccttattttgtaagtagcagaattgccatctcatagac

SEQ ID NO: 489116 - DNA, 440 bp, Homo sapiens
cgaattatcttcttggagagacatctgagaaggctgaaggcatatagaacacaaagctttctttaaatgagaacaataaaaacctactcttctagggaatggtattcaaacattcctagtattgaattaaggaaattaacatatgcataaaaatattaaaacacagttttcacatatttcctaagaagaactttgactggcttgaacagtgttcccccataagtcatatctacccaaaacctgtgaatataattttatttgaaaccttatttagaatcttatttggaccctagtctttgcagacataatcaagttatgatcagatcatactggatgaaggtacttcctaagtccaatatgactggttctttataagaaaagagaaatktgaaaacaggcacacagacataataggaatatggtcatgtgaagatgaaggc

SEQ ID NO: 489117 - DNA, 647 bp, Homo sapiens
ttctattaatttgtacagtttccaatgttccttctgttattgattttagctttattccattgtggtcagaaaaaatacttgatataattttgatttttaaaaaatttgttcatacttgctttgtgaactaacatgatctatgctggataatgtgctatggctcttggaaaaaaaaaagattgttccgtagctgttggatggaatgttctgtgtctgttatgtttatttttatcttgagtgcattttaacgccagtgcttctttgttgattttctttcttgataataygttcattgctgaatgtagggtgttgacgtcccctactacagatatatttggcaaatattaatattaaagattagcaaatattaaatattagcaactattaatagacctaaagggagaggttgaattgcactctgtcctggcctgcagggtttctgttgagaaatctgctggaagccgtattgggaatctgttgaatgtgatatgtttattttctcttgctgctttgagcatttgttgtttgtctttgatttttgctaatttgactgtgatgtgccttgaggattttctctttgggttgaatttgattggtaatctcttgagcttcctgtacctggatggtattgccttcttccagattcg

SEQ ID NO: 489118 - DNA, 650 bp, Homo sapiens
ttggaggaaatcctgataaaaaataatactattgataataactaacttattataatccttgctccatgctggacacaattcttaagcttcatatatattaaaccctttaatcctcrgagttctatgaggtaggtactgttttcctgttttacaaatgagaaaactggcattcagtttcttaagaatgctaaacaataggcctttattcataggcaattagagatgcaaaattatccttaaaaaggaaggtgacatgactctgtttaacttctacagaaatataaattccaggagtatggaggatagattgaaggaattttattggtgcatggaaacccattagtaggctgttaaggatagtctagatttaaatgataaaggatggggaaaagaatgatggaaagagcagaaatctttagacatatattacatgctatcatgaaggtttggtgactggctggatgtaggtggtgggaagcaaaggaaagatgattttcaggtttcttgcctgggagattttataaacagtgtgtttgtttagctacattctaaattttgggtatttagcctctcagactggcctcatgccctattagtcttaattacagtgttcgcctgggtaagcagttcgctgccaggagccaccatag

SEQ ID NO: 489119 - DNA, 372 bp, Homo sapiens
cacatttttgcgagagaggaatttgccaacatgcagctttggtaattacaaatgattccatttgctaatgaaagacaagagcagggaaaaaaataaaatttattttctgtatccaagagccaaccctctgggcaaaaggcagggagaggggcaggttccagaactctgggtccaagagggaaggagagagggtgagtatgaacaacaatagggagaaggagtggagagacaggtgagggagtgcatccaagggyagaagagttaataaactaaggtagccaagccagagacagaatgaaaaataacaggagagtgagaggatgaggagtgcagttagacccaaagcaggaaggattgggtgcccaggggatc

SEQ ID NO: 489120 - DNA, 600 bp, Homo sapiens
tagcattcattaaaatgagaaaagtatctactctgcttctcagacctactctaaccagcctcaattctcgtcatttacttaattgcttctttcctgatttgctattaattcccaatctatctctcatcaccctaccacttttctaaggtctttgtccctacttccaccctccagacacctgcccgaatggcaggagtgataacatcaagcctacagcagtaggtggattgctatgatgagaacaacagggcattcatttaagagggactccaagccattttgttccacaaatacatttgcaatattcacaaaatcagcttggtgcagtggctcacacctgtaatcccagcactttaggaggctgargcaggtgtatcacttgaggtcaggagttcgacaccagcctgaccaacatggtgaaaccccgtctctactaaaaacacaaaattagctgggcatgctggtgcatgcctgtaatcccagctactcggaggctgaggcaggagaatcgcttgaacctgggaggcagaggttgcagtgaaccattgcactccagcctggccaacaagagtgaaactctgtctcaaaaaaacaaaaaaa

SEQ ID NO: 489121 - DNA, 521 bp, Homo sapiens
ctgcaagcaatgatgtgaagcaaaagaaataagagcatacatacagtatgattccattaaagaaatgtcaaaagtgggcaaaactgtattatttaaggatatacttatggggagtaaaactgaagaaaaggaagaatatgataaggatgaaagttagtgctgggtgcagtgactcacgcctgtaatcccagcactttgggaggccaagatgggtggatcgcttgaggtcaggrgttcgagaccagcctggccaacatggtgaaacctcgtctttactaaaaatacaaaaattagccaggcgtgatggcaggtgcctgcagtctcagctactcaagatattgagacaggggaatcacttgaacttgggaggcagaggttgcagtgagccgagatcgcaccattgcacttcagcctgggtgatagagtgaaactccatctcaaaaaaaaaaaaaaagataaaaaataaaagatattttctagagttatgaggtcaatattttgaaatatttagaggaaaaatt

SEQ ID NO: 489122 - DNA, 521 bp, Homo sapiens
ctgcaagcaatgatgtgaagcaaaagaaataagagcatacatacagtatgattccattaaagaaatgtcaaaagtgggcaaaactgtattatttaaggatatacttatggggagtaaaactgaagaaaaggaagaatatgataaggatgaaagttagtgctgggtgcagtgactcacgcctgtaatcccagcactttgggaggccaagatgggtggatcgcttgaggtcaggagttcgagaccagcctggccaacatggtgaaacctcgtctytactaaaaatacaaaaattagccaggcgtgatggcaggtgcctgcagtctcagctactcaagatattgagacaggggaatcacttgaacttgggaggcagaggttgcagtgagccgagatcgcaccattgcacttcagcctgggtgatagagtgaaactccatctcaaaaaaaaaaaaaaagataaaaaataaaagatattttctagagttatgaggtcaatattttgaaatatttagaggaaaaatt

SEQ ID NO: 489123 - DNA, 479 bp, Homo sapiens
ctgagggtgtcgggctagcttcgggccgggcgtgcaggagtctcggcttggagccccgcctggctggagtcgactggggccagacccgactgcttcgtccggtgcctcgggcattcccgaagcmaatcggcaagcgcagggtgaagtttaaaggggaagttgagctctagagtcagccggagatacctgtggagacgggcaacccgccgtagcaagcggcgtctctgctggaacggaaatattttatatttgcgtttttataaatcacacaggcagtggggaaacgggctaagaaatgtgttcacttgtacacatttctattgtcatgactccacatatctcttaaatctaagagatttaatcaaatctgcgttgacattcacaatcacagctctccgcgaggctctgtaggcactggagagaattttggaagctggagttccgtgttagtttattgtactactcaaccccggacggtt

SEQ ID NO: 489124 - DNA, 506 bp, Homo sapiens
tttgataaaacataaaaatacagaacattttaaaggatgaggtttttgtttttgtttttgtttttgagatggagtctcacactgtcacccaggctggagtgcagtggcgccatcttggctcactgcaatctctgcctcccgggttcaagcaatgctcctrcctcaacctctcaagtagctggcattataggtgcccaccaccacacccggctaatttttgtatttttagtagaggcggaatttctccatgttggccaggctggtctcgaactcctggccccaagtggtccgcccgcctcagcctcccaaagtgctgggattacaggcatgagccaccactcctggctaaggatgagatttttaaatatataaatatttctaatgttttcttccaacatcctccctttggaggctgttgttttaagaaacccccactaggccaaatggccacagtcactgatctaacaacttgaaaatgggaaagctccaagatagtagcttctaac

SEQ ID NO: 489125 - DNA, 506 bp, Homo sapiens
tttgataaaacataaaaatacagaacattttaaaggatgaggtttttgtttttgtttttgtttttgagatggagtctcacactgtcacccaggctggagtgcagtggcgccatcttggctcactgcaatctctgcctcccgggttcaagcaatgctcctacctcaacctctcaagtagctggcattataggtgcccaccaccacacccggctaatttttgtatttttagtagaggcggaatttctccatgttggccaggctggtctcgaactcctggccccaagtgrtccgcccgcctcagcctcccaaagtgctgggattacaggcatgagccaccactcctggctaaggatgagatttttaaatatataaatatttctaatgttttcttccaacatcctccctttggaggctgttgttttaagaaacccccactaggccaaatggccacagtcactgatctaacaacttgaaaatgggaaagctccaagatagtagcttctaac

SEQ ID NO: 489126 - DNA, 641 bp, Homo sapiens
tgtatgaagagccatcattcatctacctattcacttggcttctattacgctacagaccaaatgtaaaattgttaaatgcctagaaatgatactgtaatctgacattctttgttctactatttccaacaraggttaaaaatttagaactcaatgtatcctaatcatcctcaaatcctcagagtaaactaatctaggcttaactgcacatatcaatagggatgaattactactattcagtgcataaatgcagttagtaaagaagcatatacacaaacaactgatgtgttagagatgatgatgaatttgccaagaacatcagaaactcttcctggaagaaatgacccttatacaaactgcatcttgagagtctggtagaagctgctcaagtaatgcaacagcaggcaaataaactattacgaagaaaggcacactgatgtaaaccagtagggaatgttggggaactaaaagtagtccagtattgacagagtgaaaaatgtgaagtggaatgcaatatgagaaaaaagacttaggaagaaactagatctttccaattttataaataatcttaaattactgagactaagtagattggtcaagcacacaaagctagtgaatggcagaactaggatttgcaacaaatt

SEQ ID NO: 489127 - DNA, 641 bp, Homo sapiens
tgtatgaagagccatcattcatctacctattcacttggcttctattacgctacagaccaaatgtaaaattgttaaatgcctagaaatgatactgtaatctgacattctttgttctactatttccaacagaggttaaaaatttagaactcaatgtatcctaatcatcctcaaatcctcagagtaaactaatctaggcttaactgcacatatcaatagggatgaattactactattcagtgcataaatgcagttagtaaagaagcatatacacaaacaactgatgtgttagagatgatgatgaatttgccaagaacatcagaaactcttcctggaagaaatgacccttatacaaactgcatcttgagagtctggtagaagctgctcaagtaatgcaacagcaggcaaataaactattacgaagaaaggcacactgatgtaaaccagtagggaatgttggggaactaaaagtagtccagtattgacagagtgaaaaatgtgaagtggaatrcaatatgagaaaaaagacttaggaagaaactagatctttccaattttataaataatcttaaattactgagactaagtagattggtcaagcacacaaagctagtgaatggcagaactaggatttgcaacaaatt

SEQ ID NO: 489128 - DNA, 576 bp, Homo sapiens
ggctccagtttgtactccaaggtacaaagaagctgaactggttcttcctgtctttgccactagagaaaatgatgatgacggctctcatggactgagcatttactactccatgccaggttctcatttaagtactttacatgtatcatctcatttaatccycaaaacagcatcaggagctaggtactattattatcctccgtttacagatgagggtcttgctgtgctgagaggttcagtcacttgccccaagccatacagctactaaaagatggaattaagtttccttcccaggttgtttgaatccaaagctcaaactcttaagcactattccatattgcctctttaaaaaatcagtaatttggctgggtgcaacagcacatgcctgtaatcccagaactttgggaggccaagacaggaggattgcttgagcccaggagttcaaggctacagtgagctatgactgcaccactgcactccagcctgggtgacagagtgagaccctgtctctacaaaaaaaaaaaagaaagtaatttatattaatggttaattgattttgacaacaaagcacaggaaatt

SEQ ID NO: 489129 - DNA, 576 bp, Homo sapiens
ggctccagtttgtactccaaggtacaaagaagctgaactggttcttcctgtctttgccactagagaaaatgatgatgacggctctcatggactgagcatttactactccatgccaggttctcatttaagtactttacatgtatcatctcatttaatccccaaaacagcatcaggagctaggtactattattatcctccgtttacagatgagggtcttgctgtgctgagaggttcagtcacttgccccaagccatrcagctactaaaagatggaattaagtttccttcccaggttgtttgaatccaaagctcaaactcttaagcactattccatattgcctctttaaaaaatcagtaatttggctgggtgcaacagcacatgcctgtaatcccagaactttgggaggccaagacaggaggattgcttgagcccaggagttcaaggctacagtgagctatgactgcaccactgcactccagcctgggtgacagagtgagaccctgtctctacaaaaaaaaaaaagaaagtaatttatattaatggttaattgattttgacaacaaagcacaggaaatt

SEQ ID NO: 489130 - DNA, 610 bp, Homo sapiens
attgcttgaccccagtagatcgaggctgcagtagaccaagactgaggctcagtaagctgtgatcacaccactgcactccagcctggacgacagagcaagaccctgtctcaaaaagaaaaaatattccccatatctcagtggttcaaagcagcaatggactttctctctctctctttttttttttttttgtttgtttgtttccttgagatggagtctcactctgtcacacaggctgaagtgcagtggcacgatctcagctcactgcaacctccacctcccaggtttaagcgattctcctgactcagcytcctgagtagctgggactatagacctgcaccaccacacctggctaatttttgtatttttattagagacagggtttagccatgttggccaggctggtcttgaactcctggcctcaagtgatccacccactcggcctcccaaagtgcagggattacagatgtgagccactgcggctggctgacaatagactttcttatgccatatgtctatcttgggtctgcaggagtctcttctttccattgtcttcagtcagtgacacgagttgatggtctttccactatgtggaatatctctttaactttgg

SEQ ID NO: 489131 - DNA, 571 bp, Homo sapiens
atctcctctgtcaaaacagaaaccaatattttcaggtcaagwtccagaatctggcagatgtaatgcacagacatcacatcacaagctaaagagcatttacagttgtcctgccttctatgtgtagggaaaggtcagagagaggcctcagtgggcatggagaatgccagaactgggcctacagtggacaagggctcagcacttcatcaccacaaaaaaagatcatttggtttttccccatccactcaagccaagccacagagaaccacaggaagtaagactgacgagtttccccactgctaactgacagtatttgagaagttgtgctgcccaagttagaaagccccatgatggcactctaaactaacactcaacctgtgaaagcaaatatgttataataccttacttgcaggcttggggaagagaatatttttccagacgggagatgaaacggaaatggggccactggtaagaaatgcacttgtgggaaaatatgattgtatgagttatctacggctgtgtgacaatctcctgcaccccacctccccccaaaaaaccctgttatcagtttaaa

SEQ ID NO: 489132 - DNA, 546 bp, Homo sapiens
ttctgtgcatacgatactgagaagcaattcgtgtattggttgggtgatggatggcactcttgtcatgggtcccaatgcaagctgcaagccagtgcctgcattggaatcatctgggagcactttttaaagcactggtttccctggacccttccctggacattctgattaagtcaaggatgatgcccaggtttgggaactactggattagatgatctctaagatcaagtccaaccttaacagtgttcctcaaacttacctgatcataggtattacccagggaatttattaaaaatacagatttttttaggccccacttccagcttcatgaatcagaacatccagggatgggyctgaaaatctgtgtatttatttatttatttacttaagagacagagtcttgccaggctggagtacagtggcaccatcatacctcactgcagccttgaattcctgggcccaggcgatcctcccatcctgtcttcctaaataactgggattacaggcatgtgtcaccacacctggctaatttttaaaattttgttgttg

SEQ ID NO: 489133 - DNA, 595 bp, Homo sapiens
acaccattgattcctaggagagatgctgacaaaaggaaaatctctgtttctttaatttccaatatgtttctgaatacacacaagtacatgtttccacacaaaagcattttctttactaaggcagtcctctctttcagactgcatttatcaacccttttaagaaagtattattacatattatggaatgttttgggatattaacggtattgacatattattgctgatttttagaaaccaatttccagagactatcaataaaaagttaagcatacattgaaactaatttctgaattagtggaaataagttagaatctactctaagtctagattaggtgaatgaaataaaatgctagtgggagttagggggattatgtaagagagtggtaggaggagggggatgtgttgtaacatagagagcgcacaccttgtatcaagtggaaagctgctcctttgatttagccagcttttgctgcatggggagtaaggacacatcattgccagatctgatcttttaaagataagkcaaaaacattcttatgtcatttcctgacatttaaaatattggcaagtaattaatttttgaaccacacctgct

SEQ ID NO: 489134 - DNA, 601 bp, Homo sapiens
ctgcctccctcatctcatgtgttgccatcatccacacagtgcctcacgttacatatstatcccattcatttggcttcatcttcactatcacacatgtccctgagccagtggttctcaaagtgtcatcaacattgcccaatgacttctgataaaaagcaaatattgaggcttcccgcacctctagttcttctgaatcaggttatctgagagcagggcccggtaatatgtgctgttacaagccctccagatggctctgaggcacactgaagtttgagaaccacctcacttagctcccctattctagctagacacctgcaaaagaatcataattggtctttctgctgctacttttgccccctccattatcttcccagcagccaaagtaattttattcctaaatctgatgcagccactccctcacttccttgcttagtacttcttagtggcttttaaatgcactcagaataaaatgtttaaaatgtatcatgacatacaaggggttgcatgagtatggctcttacctattgctccaacatctcctcttacccttcctctcattttccttgctgattaaatcatcatcacatcagccatctgacct

SEQ ID NO: 489135 - DNA, 446 bp, Homo sapiens
tgcctccctcatctcatgtgttgccatcatccacacagtgcctcacgttacatatgtatcccattcatttggcttcatcttcactatcacacatgtccctgagccagtggttctcaaagtgtcatcaacattgcccaatgacttctgataaaaagcaaatattgaggcttcccgcacctctagttcttctgaatcaggttatctgagagcagggcccggtaatatgtgctgttacaagccctccagatggctctgaggcacactgaagtttgagaaccacctcacttagctcccctattctagctagacacctgcaaaagaatcataattggtctttctgctgctacttttgccccctccattatcttcccagcagccaaagtaattttattcctaaatctgatgcagccactccctcacttscttgcttagtacttcttagtggc

SEQ ID NO: 489136 - DNA, 601 bp, Homo sapiens
ctgcctccctcatctcatgtgttgccatcatccacacagtgcctcacgttacatatgtatcccattcatttggcttcatcttcactatcacacatgtccctgagccagtggttctcaaagtgtcatcaacattgcccaatgacttctgataaaaagcaaatattgaggcttcccgcacctctagttcttctgaatcaggttatctgagagcagggcccggtaatatgtgctgttacaagccctccagatggctctgaggcacactgaagtttgagaaccacctcacttagctcccctattctagctagacacctgcaaaagaatcataattggtctttctgctgctacttttgccccctccattatcttcccagcagccaaagtaattttattcctaaatctgatgcagccactccctcacttccttgcttagtacttcttagtggcttttaaatgcactcagaataaaatgtttaaaatgtatcatgacatacaaggggttgcaygagtatggctcttacctattgctccaacatctcctcttacccttcctctcattttccttgctgattaaatcatcatcacatcagccatctgacct

SEQ ID NO: 489137 - DNA, 601 bp, Homo sapiens
ctgcctccctcatctcatgtgttgccatcatccacacagtgcctcacgttacatatgtatcccattcatttggcttcatcttcactatcacacatgtccctgagccagtggttctcaaagtgtcatcaacattgcccaatgacttctgataaaaagcaaatattgaggcttcccgcacctctagttcttctgaatcaggttatctgagagcagggcccggtaatatgtgctgttacaagccctccagatggctctgaggcacactgaagtttgagaaccacctcacttagctcccctattctagctagacacctgcaaaagaatcataattggtctttctgctgctacttttgccccctccattatcttcccagcagccaaagtaattttattcctaaatctgatgcagccactccctcacttccttgcttagtacttcttagtggcttttaaatgcactcagaataaaatgtttaaaatgtatcatgacatacaaggggttgcatgagtatggctcttacctaytgctccaacatctcctcttacccttcctctcattttccttgctgattaaatcatcatcacatcagccatctgacct

SEQ ID NO: 489138 - DNA, 545 bp, Homo sapiens
tacgccagaaatgggggtgtcatgattgctctcatttccccatatctcacccatgaccaaattacagagattctgattcccaaatgcttagcacagttgtctccttctctccatctccacaaccactgcccttctccaagtyattatcctatctcacctggactgctgtatggcctcctcactggtctcacaatgtctatcctggcacctctttaacacgattttcatacagtagtcaacttaccactaaattgcaaactaggccatgccactcccctgattgaaacccctcacctgttccccacttcatttacttggaaatcagaacctcagcatagtctacgaggctcagtgtaatctgactcccttcagtcacatcttagagccgtattccttctcattatatttaatgttctgtgaccttttttttttaaacaaatttcaagcatattctaatttcctctttcttctatttgaaaaagtctcattctggctaactactactctcaaattctagcttaaatgttatattattagagacttct

SEQ ID NO: 489139 - DNA, 614 bp, Homo sapiens
tgatcatattcaccgatgccagactgatttacgttatgattgggaacaaagtaaggtactcccattattacttctactcaatattgtattaggaagtcctcatcagtgcaataaagcaagacaaaatgcactgaaataagaaakcactgtgtcagatgatgtgatcatctatataaaaattctaagaaatctacaaatgagctactataagtaataaacattgaaaatttataatattcaaggtctacatacagagttaattctatttcagtaatggtagcgttaacaatcgaaaaagaattacgatgatactatttttacaatgacatgacaacatgaaaaacttagggttgaatttaacaaaaatatatacacaatctatataatgaaaataagaaaacaagagagaaatcaaagatttaaataaacagagaggtatatgatgttgatgaatttaaagtctccaatattaagatgtccattttctccatattggtatagagattggatgcaattgaaataaaactgctgcttctctcatttgggtgtgtactaaagaattcacagatgagacaggatgagagcatttttatcacaatacagacaaaattcta

SEQ ID NO: 489140 - DNA, 626 bp, Homo sapiens
caatactgatggcactttgatgttggacatctaaccttcagaactgggagaaaataaatttctgggtttaagtcacccagtcggaggtattctgttatggcagccctagctgatcagtgtactaggtaagaccactgatttgtataaatcagatttgacaatcaaactctttgtgttcattcgccttcgcagagttgagaaataatactgtagagtgattgatggcttaaagcaatgctcttttggccaggatatatattagaaacatgttgggagactttgaaacacatccataccaagattctctcagaagggttatcattttattggtcagtgatggtgcccgggcattggtatgtttccaaccttcctatgtggtttttatgtgcacccagggctgagaaacagtgggggaaattatgctttgaaagatacttctggccaccctagaggcagcaatagtagataatgtgcttgtaaataaatatagkgtacacaccttggcatctgtgcttctccagacctgacaggtgataaataagaagcaaagtttctcctcccttcagtcctcaacatgcacacatttctagagcatctgactttatcttggatgggaagccaagcag

SEQ ID NO: 489141 - DNA, 634 bp, Homo sapiens
taagagcataagagcataacataagagcactgaacgtaacaatgatcaatgcagagaagatgtggtcaaagctgagagaccaatacatttcttagttctctattcctgtcaattcattttaaagaacaaatggctaatatattacagtttattgaattttgggattttcacatttttccttaaagtrggaacacttgtcaattcaaatatatgcagatgttgctaatttccttttgtgtcttgtggaaaacaacataatgggcttctgaaacatttatcacatgcagcccaaaagatcctacaaagtctctgattcaatccatttgcccaggatagtcttccagcaaaagatgctgcttcagtgttctaagtgcagcaagctgagcacctttagggaaacacaagcacaaatcatctccttcttctcctccaatctgatcaattgcattgaaatgttttatgcaaagcagatttttggttttaagcctggaaagtaaaattagtagtttctcaacaaccacttgtagttccaaaacaagtagttcctcaacaactacttgttaaactcctactgtaagcctgatactggcctagggctggggatgtgaagatggggatccacagatatgtgagc

SEQ ID NO: 489142 - DNA, 618 bp, Homo sapiens
attgtttaatgaggcagtcatatgtggttcaactacaaagaaaaacattgaaattattacagtaaaagtaggatattctaaaaaaaattagattatttctggtggtacaagagaggagacagacatatggtggacagaaacagagtgttggggcatctatccttctgctagtattcttgattgggtggtaatgttataactatttttaaaccctacatagttgtktcatgcccttttatatttctataatataacctatggcagtggtttaaatttggctcttaaaaaatgtccatgtcctaaccccctaaacttgtgaattatttggaaaatatattaatattgtattgcaataagttacatcacaaataaaattaatttagggatctcttgacaggatgatcctggattattcgtgagggctgtaaatccaatgacaagagtccttataagatacatacagaagagagacacacaggagaaggcgagaaggagatgtgaagaagaacacagatggggtattgcagccacaagcctaggaatgcttggaaccagcagaacctggaagaaacaggaaaggctactccgcctagagccttcagagggcagtggcaccag

SEQ ID NO: 489143 - DNA, 580 bp, Homo sapiens
gccatggctcacgcctgtaatcmcagcactttgggaggctgaagaaggcagattagttgagatcaggagttcaagaccagcctggccaatatgttgaaaccctgtctgtactaaaaatacaaaaattagccaggcgtggtggtgtgtgcctgtggtcccagctactcagggggctgaggcaggagaatcacttgatccaggaggcagaggttgtagtgagccaagattgtgctactgcactccagccttggtaaaagagtgagattccatctcaaaaaaaaaaaaaaaaaaaagtattcagccctttctatgccacattttaaatactcaactgataaatcactagttggtttgctgtatgagcatggtaaaaatgtacaacataacatctaccatgtggtaggaacgtagtaaatcagtaaggaaaaaattactgatatgagtcttggctatgaggctgagatggcacagctcctattacccttttgaattagggaaagttggcagttgaacataggccatggcattatctcttaccagtgggaattaaatattgatttcattttcacttcattgagtc

SEQ ID NO: 489144 - DNA, 580 bp, Homo sapiens
gccatggctcacgcctgtaatcccagcactttgggaggctgaagaaggcagattagttgagatcaggagttcaagaccagcctggccaatatgttgaaaccctgtctgtactaaaaatacaaaaattagccaggcgtggtggtgtgtgcctgtggtcccagctactcagggggctgaggcaggagaatcacttgatccaggaggcagaggttgtagtgagccaagattgtgctactgcactccagccttggtaaaagagtgagattccatctcaaaaaaaaaaaaaaaaaaaagtattcagccctttctatgccacattttaaatactcaactgataaatcactrgttggtttgctgtatgagcatggtaaaaatgtacaacataacatctaccatgtggtaggaacgtagtaaatcagtaaggaaaaaattactgatatgagtcttggctatgaggctgagatggcacagctcctattacccttttgaattagggaaagttggcagttgaacataggccatggcattatctcttaccagtgggaattaaatattgatttcattttcacttcattgagtc

SEQ ID NO: 489145 - DNA, 500 bp, Homo sapiens
accagaagctatcacaaagattccttcaacaaaccttaactgaaacctatcatgtgtcagtaattaggctacatactggagatgtattaattcactgcaataattatttgatgactaataggagcttggcactattctagacaataagacgctcataataaaaggctctcgaactttaccacaaaatatttttgaaagattcttgcaaaaatattcagtttccagacttcaacaccccaytgacaatattagacagatcaaggcagaaaactaacaaaaaagttcttaagtttgacacttgactaattagacctaatagatatctacacaacatactactcaacaattacagaatatgcattcttcccacttgcacatgaacatactctaagattgaccatgtgcaatgtcattaagcaagtctcaataaatttaaaaaaactaaatcataccaagcatattctcagatcacagtggaataaaaatagaaatcaatacca

SEQ ID NO: 489146 - DNA, 402 bp, Homo sapiens
gttccgtttgttacaagcaaccaggaagcctggtttcaaggattaattagggacataggggagaggaaataggcaatttcactaaggaaaaaaatttttctgtatatcaattgccccttctccttttctgatctttttgttgaaaggcacaatgtgagacaaatgatgatagtaccttatcatggagtcatgggagaatataagaatgcggtaagttggagaaaaaggaaaagaaacgtgaatgtctctgttagttccgcctgctgtaataaaataccatagactaaatacaatagaaatttcttgarcaacagaaatttctttttcctagatctgaaggctgagaagtctaagatcaaggtgctggccaattcatacaggagtcctctttctttcttgagg

SEQ ID NO: 489147 - DNA, 381 bp, Homo sapiens
tactggcctcaaataattctcccacctcagcctcccaaagtgctgagattacaggcatgagccactgttcccagccctraatggtcatttttaattttaggcaatagctcctgaggaaaaagactggacatatgctgctgatatgataccaagacatcctgttcttcatgttcttacacctatttagacaagcactaatgcctttgtggtctcattgagaaatctccaggacagctttattaaaaggtagtttaccatagttttgaaactagattgagaaaatcaaaatgaatccttaaaacaatccctggggctcccaggtgttcagtcactttggcatgagatggtgcatgtctgggtatgaccatcttgggcaaaacg

SEQ ID NO: 489148 - DNA, 570 bp, Homo sapiens
aaaatataagccttggccccgcttgtcacgtactcagagaaaatgagttgtggctgccttctctaccatggctttctaaagtgctactaaagaaamattgttactgggttgaccctaagactgtcttttctaggcttgactcacttgggtgaatgcacctcttcctagaggaattatagtgaaagttcactatgaagtggcttatcagattggatcttacttagttcctctttatcttcaggggatacatatatctgcagaggatgtatacatacatacaatacatcttattagttcctccttatctgcagaggatacattccaagaccccagtagacgccagatagtacccatcctatgtagccccgttagattccatgtcagggattggcaaatgtctactatgttttttcaaactgtatgtgaatacctaagatgaagtttaatttataaattaggtgcagagattaataacaactaatcataaaatagaacaattctgacaaaatactgtaacaaaagttacataaatgtggtctctcttttgttctctctctctctcaaaatatc

SEQ ID NO: 489149 - DNA, 570 bp, Homo sapiens
aaaatataagccttggccccgcttgtcacgtactcagagaaaatgagttgtggctgccttctctaccatggctttctaaagtgctactaaagaaacattgttactgggttgaccctaagactgtcttttctaggcttgactcacttgggtgaatgcacctcttcctagaggaattatagtgaaagttcactatgaagtggcttatcagattggatcttacttagttcctctttatcttcaggggatacatatatctgcagaggatgtatacatacatacaatacatcttattagttcctccttatctgcagaggatacattccaagaccccagtagacgccagatagtrcccatcctatgtagccccgttagattccatgtcagggattggcaaatgtctactatgttttttcaaactgtatgtgaatacctaagatgaagtttaatttataaattaggtgcagagattaataacaactaatcataaaatagaacaattctgacaaaatactgtaacaaaagttacataaatgtggtctctcttttgttctctctctctctcaaaatatc

SEQ ID NO: 489150 - DNA, 656 bp, Homo sapiens
tgaaaatataagccttggccccgcttgtcacgtactcagagaaaatgagttgtggctgccttctctaccatggctttctaaagtgctactaaagaaacattgttactgggttgaccctaagactgtcttttctaggcttgactcacttgggtgaatgcacctcttcctagaggaattatagtgaaagttcactatgaagtggcttatcagattggatcttacttagttcctctttatcttcaggggatacatatatctgcagaggatgtatacatacatacaatacatcttattagttcctccttatctgcagaggatacattccaagaccccagtagacgccagatagtacccatcctatgtagccccgttagattccatgtcagggattggcaaatgtctactatgttttttcaaactgtatgtgaatacctaagatgaagtttaatttataaattaggtgcagagattaataacaactaatcataaaatagaacaattmtgacaaaatactgtaacaaaagttacataaatgtggtctctcttttgttctctctctctctcaaaatatcttattagactgtactcaccctcttctccctgtgatttgttgatatgataactgagatcgttactaagtgatgaatgggtgggta

SEQ ID NO: 489151 - DNA, 540 bp, Homo sapiens
ttctctctctctctcaaaatatcttattagactgtactcaccctcttctccctgtgatttgttgatatgataactgagatmgttactaagtgatgaatgggtgggtagcatacctggtgtggcacattggacaaaggaatgattcacatcctgggtgggatgaagcagtacagcccaagattttgccataatattcagaatatgtgcaacttaaaacttattatttctgaaattttccatgggtcattgaaactttgaaaagtgaaaccacagataaggagaaacaactgtcatatggagcagagagttccaaacttctgcctcttctagtcttcgcttgccaatgcagatggacttaggaatgcctatttcatcaaatgaagatggtgctggactcatagcaagaactcaagaaatgcatggtaaataaaaatatcttgagctgactctaataggacattgataccttcccaaagtttttatgaatgctgaacctcttatttcatcttccttaattttcttgcaggaaatgccgtaaga

SEQ ID NO: 489152 - DNA, 629 bp, Homo sapiens
gcttcactctcctggatttatctgaattctatgaagtttcctggcccacagtggctttcatgtcacaatatgaaataacctttaggcttacctaagttttgttcaggaagtccctatacccactggaatgagcattgttttattcataaagatacctcttcacagcactttgtaattacgatttgtaattatgcaaaaatgagactcgattaaagtctatttattttcccaactaatrtgtgtatgcttcatgagagcacagcctccatcctctttgtccactattgtaattcaatatctgggaagaaatgcaattgaattgctggattaaatggataaatgatggtgtcaaggaaagaacagactgacctctcctttagaagtgatttttctatactcaaaatttgagttaaagtgtaattagaaatgatgaaaggatccataattacttttgtgagtctcatcagttttctggtcatttaatgcatatctatgtatataatgaatgtttgcagcttaaatgtccttgatattttcttaaaggaagaaagggaattaaatatggagcactcagttactaggtggaggacaaatgaacacaattagcacattatgagacgggagaaaaa

SEQ ID NO: 489153 - DNA, 517 bp, Homo sapiens
gcttcactctcctggatttatctgaattctatgaagtttcctggcccacagtggctttcatgtcacaatatgaaataacctttaggcttacctaagttttgttcaggaagtccctatacccactggaatgagcattgttttattcataaagatacctcttcacagcactttgtaattacgatttgtaattatgcaaaaatgagactcgattaaagtctatttattttcccaactaatatgtgtatgctycatgagagcacagcctccatcctctttgtccactattgtaattcaatatctgggaagaaatgcaattgaattgctggattaaatggataaatgatggtgtcaaggaaagaacagactgacctctcctttagaagtgatttttctatactcaaaatttgagttaaagtgtaattagaaatgatgaaaggatccataattacttttgtgagtctcatcagttttctggtcatttaatgcatatctatgtatataatgaatgtttgcagct

SEQ ID NO: 489154 - DNA, 629 bp, Homo sapiens
gcttcactctcctggatttatctgaattctatgaagtttcctggcccacagtggctttcatgtcacaatatgaaataacctttaggcttacctaagttttgttcaggaagtccctatacccactggaatgagcattgttttattcataaagatacctcttcacagcactttgtaattacgatttgtaattatgcaaaaatgagactcgattaaagtctatttattttcccaactaatatgtgtatgcttcatgagagcacagcctccatcctctttgtccactattgtaattcaatatctgggaagaaatgcaattgaattgctggattaaatggataaatgatggtgtcaaggaaagaacagactgacctctcctttagaagtgatttttctatactcaaaatttgagttaaagtgtaattagaaatgatgaaaggatccataattacttttgtgagtctcatcagttttctggtcatttaatgcatatctatgtatataatgaatgtttgcagyttaaatgtccttgatattttcttaaaggaagaaagggaattaaatatggagcactcagttactaggtggaggacaaatgaacacaattagcacattatgagacgggagaaaaa

SEQ ID NO: 489155 - DNA, 523 bp, Homo sapiens
gcatgagcaattacccagtgagtaccttgcccatatcacaagaagtgataaaacagagcccagcgctcagtgggaaagatttccacctaagacagcaagaacatacggtttttcaacaggtcagtgggtccccagatttccctccagttggcatgagaaagactaagcctgtaaattcacggttcctgaaatgtgctgttagcatgaggttcagtgagcagaagaaagaaaaatccctataaggaagtcataatcaccacagagaaacaaggacagccaagttcatgtttcaagctgggagatagaagggtcattattggagcttttaaaaacacctctggtagaaattcaaaaaaatccactcacattgataaagttatcttattgaacttgctcttcaggaagagcaggaasattggatcatgattaaggacaaagacagtgtcacttataaccggtccttataacatgcaatttcaaagggtctttgataccatgctttagaacagaaattgacatggac

SEQ ID NO: 489156 - DNA, 626 bp, Homo sapiens
taaactcagagtaaaagccttcctgagccgaggctagacctctgaggaagagatatgttccaactgctgctattacttctgaagaggcactttctggggctctgaaaaaattggtaaactgaaacagttactgctcctagggcaaggggatgttcttgggagaatatcagcaaggacagcaaacaaacaggaaaaggagatatattcttccattctcttgcctttatatgtttctctagtacctcccaatagcagaacctagcaggatcccacttgaaggaacttggaaaacgtagcttrctgatctctatcacagcatcaaagcaaatttattgcagagaaatgtggctaaagatcaagattattagtaaatcaattttcttaactaatttttaatctgtattgatttcttgtaacataaatatctgtgattatagagacctcagtattttctttgtcttctgtaggagcatttcaatcttttttgaagttctacctccctttcacttctagttcacaccatgtgagagcaattgacctaatcatcatgggcagtggttatgatatgtctcaacttgtccattaaccatatggttcatttggtaatatgctcatgatttaaccta

SEQ ID NO: 489157 - DNA, 537 bp, Homo sapiens
ggcattttacaaaagaagaaacacagatggcaatgaacatataaaaggaggctccacttcacagataattaagaacttaatattacaaatccagtaatttaaaaatatgagtgcatactcttcaatattcctcccattgaaagctatctatattcctactcttccatctggctggtttctgattgatgcaatagaatatgacaaaagygatgctatgtattttctaggctaggtaataaaatgccaggaagttttcactttgtttactgataatactagctttcagagcctttagccttcatgtaagaagtcagagtaaacctgagagtaccatgctgtgaggaattccacacaaaggaaagaacactcaaaggcactctggccaactcccaactgtgcctaacatttgtgttatttcagcacagatgccttacatgtgtgtgaagaaatgttcacatgattctagccccaaggtgttcaattcatggtagactcattgagtcttttcagctgagttttgtggagcagagataagac

SEQ ID NO: 489158 - DNA, 644 bp, Homo sapiens
tgtagtggtacacatctgtagtcttctcagctactccagaggctgatgtgagaggataatttgagccaggaattctagtccaatatgggcaacatagaaagaccctgtctctaaaaggaaaaaacaaaaacaaaaacaaaaaaatcccactattttttaaatagagactgctgtggcttgaatattgttcccctccaaaacttatgttgaamtatgacagtattgagaggtggggcttttaagagacgattgggctctgccttcatgaatagattaatccattcattgattaatggtttattatgagagtggcattactggctttatcagaggagaaagagagacctgagatagaacgcttattcctgtcgccatgtgataccctgtgtcagctcagaacactgcagagtccccaccagtaggaaagccctcaccaggccctcaccacttgaccttgggcttctcagccttcaaaactgtaagaaataaatttactttctttataaactacctagtttcaagtattctgttataagcaacagaaaacaggttaagagaaaggccctgtattttccttgttgaaattatttataattattttataatttatgtagttattgttttgggggttcaaaatgattatt

SEQ ID NO: 489159 - DNA, 522 bp, Homo sapiens
gtcatgtctgagtcacttgtgttttatactgacctgatattttaaaaactgatattcctgttaaccagcaactttaatttcaatccaacaggatttgttttcttctcaaagtgcgagtaacttaaaaggtgcatctctgctgcctggcaagctccccacgtcggtttccctgtttgatgatgaagatgaagaggtaaacattgttattgtaacactagataatttagattaggagaaaacggttgttgatgtaactttctacccagaggctcatatactagcaaaaggtggtagggaagcagtcaggctacctgaagtttatataacaaaaatatttctgtttttatttcagtgacttcttccttatattttcctagctgtgcaatggagaagacattagattcttgaygcagttctttttttttttttttccgagttggagactttctctgtcacccaggctggagtgcagtgatgcgatcttggctcactgtaaccgggttcaggtgattctcctgcctc

SEQ ID NO: 489160 - DNA, 511 bp, Homo sapiens
gcataggcacacatacacacatacacccgcctactccaaactcatgtctgagtactctattcttcctaaatraaagacaaaagctttggtggtatttttttaagtgtaatttagggatttaagatggggcaagaaaaatatctgaaaggccctcccctccatgctgtgcccttataaatgatagaacagatagagaaattaaattactgactatacaattgggcttgaagtcataaaggggagtgcttgggatcacagaaataaacaaggaagttcttaagaagccatgggagaagccaaggcccaggtaacctgagtctgcacccacctgggaatgctgcagaatcctgagactcaggtggagaattggaaaccagaaatctagtgtgcattgaagaagtgccagatgtctgaggaagcccactgctatgaaagagaaataacaaatagagcaaatgaaaaatcttctctacaaccaaaggtcaattaaagcaagtacatttaatacctt

SEQ ID NO: 489161 - DNA, 560 bp, Homo sapiens
aatactgaacacttgataaatgttagctattattaaaggagagactgatatttaaatgattacaatacaatgtaataccttaggataaatacatcaaaaacaacttttttccttmtttattttacagctttattactgatttccctctaaaaagagacccaaataaatgtggagcgactcattatagagtaaggaatcacaaagtaccatagtcacgtaacaaaagcaaaaaaaaaaaaaaagcaattgttttacctttcaactgctgatgttatgtacaatctatcacaagaagcatagctgtgcattcatgagctgattgtattaacctctagaattttagaaacgagcacatctaagcatgtggatactctcttaccttacaaagtaaaagcaagcattttctattttaaaatttttatatctgtgtaaaacgaagaattcctggaggtcaaataagaaaaatataccaaactcaaaacactattaagtcatgaaacgaagactctgaggtagaagtcaagcaatataatccacaatttcaggtattcccagcaacc

SEQ ID NO: 489162 - DNA, 560 bp, Homo sapiens
aatactgaacacttgataaatgttagctattattaaaggagagactgatatttaaatgattacaatacaatgtaataccttaggataaatacatcaaaaacaacttttttccttatttattttacagctttattactgatttccctctaaaaagagacccaaataaatgtggagcgactcattatagagtaaggaatcacaaagtaccatagtcacgtaacaaaagcaaaaaaaaaaaaaaagcaattgttttacctttcaactgctgatgttatgtacaatctatcacaagaagcatagctgtgcattcatgagctgattgtattaacctctagaattttagaaacgakcacatctaagcatgtggatactctcttaccttacaaagtaaaagcaagcattttctattttaaaatttttatatctgtgtaaaacgaagaattcctggaggtcaaataagaaaaatataccaaactcaaaacactattaagtcatgaaacgaagactctgaggtagaagtcaagcaatataatccacaatttcaggtattcccagcaacc

SEQ ID NO: 489163 - DNA, 560 bp, Homo sapiens
aatactgaacacttgataaatgttagctattattaaaggagagactgatatttaaatgattacaatacaatgtaataccttaggataaatacatcaaaaacaacttttttccttatttattttacagctttattactgatttccctctaaaaagagacccaaataaatgtggagcgactcattatagagtaaggaatcacaaagtaccatagtcacgtaacaaaagcaaaaaaaaaaaaaaagcaattgttttacctttcaactgctgatgttatgtacaatctatcacaagaagcatagctgtgcattcatgagctgattgtattaacctctagaattttagaaacgagcacatctaagcatgtggatactctcttaccttacaaagtaaaagcaagcattttctattttaaaatttttatatctgtgtaaaacgaagaattcctggaggtcaaataagaaaaatataccaaactcaaarcactattaagtcatgaaacgaagactctgaggtagaagtcaagcaatataatccacaatttcaggtattcccagcaacc

SEQ ID NO: 489164 - DNA, 544 bp, Homo sapiens
ctgtttacctggttagaccctctggacaccagcatatggtttcasttgttgattggggtcattctgttctgataaattatattcaggggatatatatgtctgcttgcaatattctcaactaaagtttatgatggccgaacttacaatatggaatcaactgtaaacagattactgagcttaaatctatgtgtgatttctgtctatttactgtttcttctaggtggtaggaatacataggtaaattagatagagcctctcccttggcaaatagtataattccagcatacaaaggaagtaagtatggctggagcagagtggagacttaagagatgaggatggagaggaagcttaggtaacagacctgtgtttctcatagggtgtcccaactttctgaatatcagcattcatttgtggaaaaaggattattaaagtaagcgatctcccgagattgttagatataaagtaataaaattttcagaatcacaaaattattaaaaaagcccaagatttagaatagttaagagaatgccatgtagtcaacttg

SEQ ID NO: 489165 - DNA, 544 bp, Homo sapiens
ctgtttacctggttagaccctctggacaccagcatatggtttcagttgttgattggggtcattctgttctgataaattatattcaggggatatatatgtctgcttgcaataytctcaactaaagtttatgatggccgaacttacaatatggaatcaactgtaaacagattactgagcttaaatctatgtgtgatttctgtctatttactgtttcttctaggtggtaggaatacataggtaaattagatagagcctctcccttggcaaatagtataattccagcatacaaaggaagtaagtatggctggagcagagtggagacttaagagatgaggatggagaggaagcttaggtaacagacctgtgtttctcatagggtgtcccaactttctgaatatcagcattcatttgtggaaaaaggattattaaagtaagcgatctcccgagattgttagatataaagtaataaaattttcagaatcacaaaattattaaaaaagcccaagatttagaatagttaagagaatgccatgtagtcaacttg

SEQ ID NO: 489166 - DNA, 544 bp, Homo sapiens
ctgtttacctggttagaccctctggacaccagcatatggtttcagttgttgattggggtcattctgttctgataaattatattcaggggatatatatgtctgcttgcaatattctcaactaaagtttatgatggcygaacttacaatatggaatcaactgtaaacagattactgagcttaaatctatgtgtgatttctgtctatttactgtttcttctaggtggtaggaatacataggtaaattagatagagcctctcccttggcaaatagtataattccagcatacaaaggaagtaagtatggctggagcagagtggagacttaagagatgaggatggagaggaagcttaggtaacagacctgtgtttctcatagggtgtcccaactttctgaatatcagcattcatttgtggaaaaaggattattaaagtaagcgatctcccgagattgttagatataaagtaataaaattttcagaatcacaaaattattaaaaaagcccaagatttagaatagttaagagaatgccatgtagtcaacttg

SEQ ID NO: 489167 - DNA, 600 bp, Homo sapiens
ctgtttacctggttagaccctctggacaccagcatatggtttcagttgttgattggggtcattctgttctgataaattatattcaggggatatatatgtctgcttgcaatattctcaactaaagtttatgatggccgaacttacaatatggaatcaactgtaaacagattactgagcttaaatctatgtgtgatttctgtctatttactgtttcttctaggtggtaggaatacataggtaaattagatagagcctctcccttggcaaatagtataattccagcatacaaaggaagtaagtatggctggagcagagtggagacttaagagatgaggatggagaggaagcttaggtaacagacctgtgtttctcatagggtgtcccaactttctgaatatcagcattcatttgtggaaaaaggattattaaagtaagcgatctccygagattgttagatataaagtaataaaattttcagaatcacaaaattattaaaaaagcccaagatttagaatagttaagagaatgccatgtagtcaacttgtgcagcatgtttgtgcattttttaatagctcaagttaaatgccacttcctgtcttt

SEQ ID NO: 489168 - DNA, 544 bp, Homo sapiens
ctgtttacctggttagaccctctggacaccagcatatggtttcagttgttgattggggtcattctgttctgataaattatattcaggggatatatatgtctgcttgcaatattctcaactaaagtttatgatggccgaacttacaatatggaatcaactgtaaacagattactgagcttaaatctatgtgtgatttctgtctatttactgtttcttctaggtggtaggaatacataggtaaattagatagagcctctcccttggcaaatagtataattccagcatacaaaggaagtaagtatggctggagcagagtggagacttaagagatgaggatggagaggaagcttaggtaacagacctgtgtttctcatagggtgtcccaactttctgaatatcagcattcatttgtggaaaaaggattattaaagtaagcgatctcccgagattgttagatataaagtaataaaattttcagaatcacaaaattattwaaaaagcccaagatttagaatagttaagagaatgccatgtagtcaacttg

SEQ ID NO: 489169 - DNA, 502 bp, Homo sapiens
tcctgaatcagttaacctgttagtggtcataaaccactgcttttttaattctatatttcttattagttggtatcttctgaataaagagtttcctcgtcctctgcttccctaatttttagtgttgctttgggatcatgaattcattcttcagtgtagatgataatccattaccatcattcctcttcttccttttttttctgagacagggtcttgctctattgcccaggctggagtatagtggtgcaatcacagctcactgcagcctcaaccccctgggctcaagcgattctccagcctcagcctaccaagtagctgggactatatgtgcacaccaccatgcctagctaatttttgtatttttttgtagagactgggtttgaccatgttggccagaccatcatagtttttggtgctcagattgacckgcatttggccagtgtgtgtgtccccagcagtttttaagcccttttgactgcttgacctttcactgctgtcctgtaca

SEQ ID NO: 489170 - DNA, 502 bp, Homo sapiens
tcctgaatcagttaacctgttagtggtcataaaccactgcttttttaattctatatttcttattagttggtatcttctgaataaagagtttcctcgtcctctgcttccctaatttttagtgttgctttgggatcatgaattcattcttcagtgtagatgataatccattaccatcattcctcttcttccttttttttctgagacagggtcttgctctattgcccaggctggagtatagtggtgcaatcacagctcactgcagcctcaaccccctgggctcaagcgattctccagcctcagcctaccaagtagctgggactatatgtgcacaccaccatgcctagctaatttttgtatttttttgtagagactgggtttgaccatgttggccagaccatcatagtttttggtgctcagattgacctrcatttggccagtgtgtgtgtccccagcagtttttaagcccttttgactgcttgacctttcactgctgtcctgtaca

SEQ ID NO: 489171 - DNA, 357 bp, Homo sapiens
ccatcctcctcctcaccgtcctggcgctgggaccgtcgcctctgctgcaccagytgcttgtccagctcccggagctgcttcaaaaagccccggttcgggaggacgcagcggttcttggccacttgctggatggcgtccaccagggtcatgtccttgtggatcatcaggtaggccaggaccagggtggctgaccggctgcggcccatgacgcagtgaaccaggatcttacctgcagatggagcagggaggagaaaacccacactgaggggcaggtgttgggggcacaggtagggcccactcccatcctgactgtcaccctctcgcccacagaaagtgactcagcactgtgccccacag

SEQ ID NO: 489172 - DNA, 573 bp, Homo sapiens
tctgagtccctgatgaccctgcagtggccgtgccagccccagcccacctccctctgcacttatatgtgagagagaaataaacctctatcttgcctaagactttgtttaggttttctgtaatgtgaaggyaagcccagccctaactaattgagttctcacagaacgactacaaattccaaagcccatggctaggaggtggcgcagggcgtggcctggggaggggctgctgcctgctcccaagcgagcctgggcctgggcacttactcatcgccaatgtagagcttgggccagacctcgttgacgtgggtgtactggggactgcccttccagaagagccgctccagctcaaaggctccaggggtgcagtagtcctcctcctccccttcctcctccatcttcggcgacagcctcttggcagatgagtaggcattcttgaggcttgtcttcacttctccagatgtcattttagagccaagggattttctctcctttctgcagctggttatgagagagaagcaggatgggggttagcaggggacactgaggcagggaataggctttacaaaaagaggt

SEQ ID NO: 489173 - DNA, 649 bp, Homo sapiens
aagtttttccaaaagaaattggtaggaaaatggaaaggcaagccacaaactgggagaaaatattcacaacacttatatcttatgtgttatatacatacatacaaaggacctgtatccagtatatgtaaggaactcttacaactgaataagacaaacaacccaattaaacaatgggtgttacaggttgtgttcctcaggaagcagctacggataaagctcaggtatgggatatttagtaagggatgcccttggtattaaggcttttgagaaggagggcaacaaagcagcactggatggagggagatgttgagcagtgatgcggcccaggaacagccttggatgacttcacagattgctctgaagctggactggaccttcggaatttccctgagttgggccctgatggtgcctttttatttctgcrtcactcagtaatgtgggcctgtatcactggatatggcccatgctaggaaggatatatcttggccagtgtgattctctgcagcttgaggcaatccctggagggagtgatagctgaatactgatttcccatagcattcttagctgagacaataggtttttcactgaaagaggatctgacaatatattgcagtgaccattgtaatgggcaaaagattctaacagaaac

SEQ ID NO: 489174 - DNA, 638 bp, Homo sapiens
ccccagggccattgcatgggagacaaggagatccttccagagcacagtttgctggatgtattcatctttagacttattcatgagccttccttcttgggattagtttaaaatattcaggcatgttgttgggaaaatgtgatcaacaggttaggtgcctttgtgaaatttcaaagaaaggaattaagaatttggagatttttggtatcattttcagacatcttaaatataacttacctgtrgtagatttgtatagaatcaaattgccatttactcagacctttttctgactggaatccattttactttattataagggatttttttaaacacagtttatatgtagtctgattgagaacagtgaatcataataatcctgtgacccatttacatgcgttactgtaaaagtttcatttcgtacaagtgacaatttttaaaagttaattagacttggctacacggaggttagcaaaaagtgctttgaattatcaataattcagcagggcagacatttctgtataatgcagtggttttatagagtattgtgagatagttatccttaaaataaatggttgtgagcatacatcagcatggcggggttcgcttgaatgtagcgtgaagtgataacatctatgctttct

SEQ ID NO: 489175 - DNA, 655 bp, Homo sapiens
atatggatattatatatgcttayataatactatacatatttatgattaagcttttattttataccagcattggtaattcagtgtggagatgtctgcattataggtaaattccatgtagagaattctaagctttcaagctgagtacaaccccatctttaaaaattaatagcaaaaaataagtaaaaattaagctttttctgttaatcttcaaattttttccccagactacccaaacttttttctccaaagtcttgttttaaaattcatgactatttctctagttatagtaatctctaaaaaaaaaaaacaaaaacaaaaatcgacagaacaccatagctaattcttgtttgggaagtcttgagatatactggctaggagcaaactcaagagccagccatagcccagttcctctgccttgagttagttacttgatcattctgagcccctgtttcctcattagaaaattagagataatggcagcaccatcctcttgggttttatgggaatgaaatgtgagggcacaagtaaacaccctggcacaaggtctgcagaactatggtaagtgtactacaaatgtcagcagtgttatggtttagcatgtttgatattgttatccttgattgctgcacgtaatttaaaatcttatcatcactta

SEQ ID NO: 489176 - DNA, 655 bp, Homo sapiens
atatggatattatatatgcttatataatactatacatatttatgattaagcttttattttataycagcattggtaattcagtgtggagatgtctgcattataggtaaattccatgtagagaattctaagctttcaagctgagtacaaccccatctttaaaaattaatagcaaaaaataagtaaaaattaagctttttctgttaatcttcaaattttttccccagactacccaaacttttttctccaaagtcttgttttaaaattcatgactatttctctagttatagtaatctctaaaaaaaaaaaacaaaaacaaaaatcgacagaacaccatagctaattcttgtttgggaagtcttgagatatactggctaggagcaaactcaagagccagccatagcccagttcctctgccttgagttagttacttgatcattctgagcccctgtttcctcattagaaaattagagataatggcagcaccatcctcttgggttttatgggaatgaaatgtgagggcacaagtaaacaccctggcacaaggtctgcagaactatggtaagtgtactacaaatgtcagcagtgttatggtttagcatgtttgatattgttatccttgattgctgcacgtaatttaaaatcttatcatcactta

SEQ ID NO: 489177 - DNA, 598 bp, Homo sapiens
ctacagacttacgtctatagtttttagagaccagataaacttgccattaatattaattaatggcaagttcgtcagttaagttaaatatcagttaattgtacattcaggcatttctaaaattagtatgtttgtggaataatcataaaaatgtgtcagcagtttcaatttttggctttctttattcagtattaaaatattgggcagtccttcatggaacaaggctgtaactataggaagcagaagtgattgaatgaattaggcattcacttcggggaatyccctttgctggctcttcatatgttgagggtttcaccttagcttttgtgaggtccgtgtgctatttaaaaactgagtctataattaatcagcgctgctagaagatggtgcaaatggcccagttttgtgcctccaggttatgaatttggctcttgtcttcagtgtggtttgcagcgtccttctacatgtccccttttttagaaatgatactcccctccacccctgccccccacacacatatacagccaaccggatttaaggaaagcaggaactacaataaacttttgaggaaagatgctttagggtatgatttagtacctta

SEQ ID NO: 489178 - DNA, 597 bp, Homo sapiens
atgaccctttgaggccgcacagctaagagggttacagatgagtggtaagcaatctcctgaagacacaacatgctgggattaaggataagagattgtttctattstgtatgctatagaggaactgactttggctcccaaaacctcccttaatcaggtacgtcaaaaaagtaaaaagagcaggccagtgttttggggtgtatttttaaaggggttttgattggcatatcaggttctgtagctataagatacagaaaccaacttggtgtatggaagattgtttaagtgccctcaatcattcctcttcctgcatcctcactcatttgcattgtggcattgtagctacttccatcaagaggccatgcacatctgcttcacttcttgcatctgggctggcctcctgacttgatttggtgaatagaatatagctgaagtaactctgtttcagtccagactgaggctttaagaggcctcacacatttccactttttcacttggaaccctgtcactgacatctgaataggcccaggccaacctgctagatgacaacagacacatggtctaggactcttcccacttctgtcaccctgcaggttgccc

SEQ ID NO: 489179 - DNA, 571 bp, Homo sapiens
tcctgttttgttttgtttctgctttacatttctctggaacacttagggttaatatatcacgaccaagtttttggctaagatagttttatatctcttcctctgcagtctttgcaaccagtgatctggctgtttaaggaggtttgacactttttaatgttgattttggtttctggtagccaagaagcagatagattgtttgtttatttttcaaaggtgagtcatgtccaggtgtgtatgagcaattacacccatctwgtaacttgaaccttcctagggagactgaagatcaaattgagaaatgactatatttttctttaaccattcctataaaatgcctcatccatattacaactaagcccaactgataatggagagaaagttatagaaacagaggcttctgacacagcaacatttataacaacagcactggacagagtaacattggcagcagaatatgttgagttactgattgcagtttagagaaaagcatttagctctggctcttgtaacttactataattcagtgctcctgtccagtgttactctgtgtgtctcgacatttaccaaacac

SEQ ID NO: 489180 - DNA, 565 bp, Homo sapiens
ctgatatgctatgaaactttctatagactatttcataytaatattaatttacaaacctgcttcagtgaacatcagaaatagactatgaggtaatactgagaaacagatgaatctgcagttacttatctatggagtatattagagattcttaaatgttgccattataaagaagaaaagagttctcagcaattatttcagttaaaagggaaagaggagtggttctcaagatttgggagaaatatctgaaattaaacatttgcttcagggacacaaggtcctgttgatcataagtcaataacttattacacagtctttaattagctgatcactgttacacccacctgtgaacattaagtgagaatgatatgaaaattatttcaaagcaaacataaaataaaaagttaaatggtaaaataatcttgagactagagactgcatatatattataggcatctctgtatcctcagctctgtcacaatgccagacatattaggtgggtaacaggtgctagctcttaaatttaaaatggattttaattgttcaatgaaataaacaataaacccta

SEQ ID NO: 489181 - DNA, 565 bp, Homo sapiens
ctgatatgctatgaaactttctatagactatttcatattaatattaatttacaaacctgcttcagtgaacatcagaaatagactatgaggtaatactgagaaacagatgaatctgcagttacttatctatggagtatattagagattcttaaatgttgccattataaagaagaaaagagttctcagcaattatttcagttaaaagggaaagaggagtggttctcaagatttgggagaaatatctgaaattaaacatttgcttcagggacacaaggtcctgttgatcataagtcaataacttattacacagtctttaattagctgatcactgttacacccacctgtgaacattaagtgagaatgatmtgaaaattatttcaaagcaaacataaaataaaaagttaaatggtaaaataatcttgagactagagactgcatatatattataggcatctctgtatcctcagctctgtcacaatgccagacatattaggtgggtaacaggtgctagctcttaaatttaaaatggattttaattgttcaatgaaataaacaataaacccta

SEQ ID NO: 489182 - DNA, 622 bp, Homo sapiens
ttttctcattttgaagtgatcytctgaaccaaggttaagtaagtatgtaaaactcattttgtgctcaaaataagtaaatgatctcttaccctactgtaaaacgcagcatgttaagtaaatagttttgcttaaaattttcaatcaaccaggcgactacatgaaaccattcttttccttgcatgtgtttacatactatttttgacaattatatgatggttttggatgtatattcaaacggctatgtttttgtgagtgaattttgaaaaactccttgactccttcttttctcagtgcagttatttttattctcccctcccttgccatcccccgctgcccccatctcccttaaccaatctttatacttcctcactatttatttcacttgtggcttattttatattccatttatgcattgcttataaatatcttcctcaatatcagaaacactttctggtacacatacctttcttttcatccttatattctagtcaattaacaacaaatatgtatctcggatatcatagaaagatccacaaacatagatggcatacgtcctgttcttcaggagcatttagctcacccaggggaacaaaagatgtaataattatacaaagaaaaaagt

SEQ ID NO: 489183 - DNA, 622 bp, Homo sapiens
ttttctcattttgaagtgatcttctgaaccaaggttaagtaagtatgtaaaactcattttgtgctcaaaataagtaaatgatctcttaccctactgtaaaacgcagcatgttaagtaaatagttttgcttaaaattttcaatcaaccaggygactacatgaaaccattcttttccttgcatgtgtttacatactatttttgacaattatatgatggttttggatgtatattcaaacggctatgtttttgtgagtgaattttgaaaaactccttgactccttcttttctcagtgcagttatttttattctcccctcccttgccatcccccgctgcccccatctcccttaaccaatctttatacttcctcactatttatttcacttgtggcttattttatattccatttatgcattgcttataaatatcttcctcaatatcagaaacactttctggtacacatacctttcttttcatccttatattctagtcaattaacaacaaatatgtatctcggatatcatagaaagatccacaaacatagatggcatacgtcctgttcttcaggagcatttagctcacccaggggaacaaaagatgtaataattatacaaagaaaaaagt

SEQ ID NO: 489184 - DNA, 622 bp, Homo sapiens
ttttctcattttgaagtgatcttctgaaccaaggttaagtaagtatgtaaaactcattttgtgctcaaaataagtaaatgatctcttaccctactgtaaaacgcagcatgttaagtaaatagttttgcttaaaattttcaatcaaccaggcgactacatgaaaccattcttttccttgcatgtgtttacatactatttttgacaattatatgatggttttggatgtatattcaaayggctatgtttttgtgagtgaattttgaaaaactccttgactccttcttttctcagtgcagttatttttattctcccctcccttgccatcccccgctgcccccatctcccttaaccaatctttatacttcctcactatttatttcacttgtggcttattttatattccatttatgcattgcttataaatatcttcctcaatatcagaaacactttctggtacacatacctttcttttcatccttatattctagtcaattaacaacaaatatgtatctcggatatcatagaaagatccacaaacatagatggcatacgtcctgttcttcaggagcatttagctcacccaggggaacaaaagatgtaataattatacaaagaaaaaagt

SEQ ID NO: 489185 - DNA, 622 bp, Homo sapiens
ttttctcattttgaagtgatcttctgaaccaaggttaagtaagtatgtaaaactcattttgtgctcaaaataagtaaatgatctcttaccctactgtaaaacgcagcatgttaagtaaatagttttgcttaaaattttcaatcaaccaggcgactacatgaaaccattcttttccttgcatgtgtttacatactatttttgacaattatatgatggttttggatgtatattcaaacggctatgtttttgtgagtgaattttgaaaaactccttgactccttcttttctcagtgcagttatttttattctcccctcccttgccatcccccrctgcccccatctcccttaaccaatctttatacttcctcactatttatttcacttgtggcttattttatattccatttatgcattgcttataaatatcttcctcaatatcagaaacactttctggtacacatacctttcttttcatccttatattctagtcaattaacaacaaatatgtatctcggatatcatagaaagatccacaaacatagatggcatacgtcctgttcttcaggagcatttagctcacccaggggaacaaaagatgtaataattatacaaagaaaaaagt

SEQ ID NO: 489186 - DNA, 622 bp, Homo sapiens
ctaatcatttccctgaatcctgcaaagccctggccccaagtcctcaagacaccctcaagtaggtaatcacatttgtctcttccatatttaacctggagcagagggtcctgatagagagctctgattaggaatgatcattgttctggctaaggtagggtctaggttgatttatttaaaagygccttggtgaggtaaacataattaatcttctctgtcctcaaaataaagggctattttcttttttagagatgtcctgtgttctcaaagagaatgacaaaataaattaatcattttccattactccacacacagcacttggatgttgaaagaccatgtgaacagctaatcctcctatatggatgaatttcttgtgacaggcagatcagatctaaacagaaatccggcaaggtattttatttttaccattgtggcattgagatttatttcaaaaataagtgagatcaactatgcctatatttttaaagtttactttcataattaatccttttttgaacacttagaaacactcttctggctcttgtagcaaagtgtttccctgacgactgctgccaaagcagacggaagcagagactatcaggtatatcttaaaaccttcaaaaat

SEQ ID NO: 489187 - DNA, 535 bp, Homo sapiens
tcagactgccattttctccttgaggctggaagtgtggggagaaggggataatgtagttgagaatccattactggccccaccttggacagagagacaggcaggtaaagggtacacatgtgcctggatggtgctgctactggactcttgtttacattaatgtgtcaacagtgtgctccaaggttctattaggtgttaacaggtgtctyaagaaaaaaatgtttcttaatgagatcagtttgtaagaattctgggtgaacacgttaattagtttattcttttaatgcgttgaatgttttttttttttttgaaaaataatagaatcccttcagaattcttaatatgatatggtgttctgtatattttcaagaggagaggtatatagtgtttctcaaatttatttgcacatgaaatgcctgtgggacataatatctctgaaggccgatgttccttgaaagactgtgtgaaatattgaactatatgatctctgaaagttcttgaattctccattatcatcagaatacctggcccttccaag

SEQ ID NO: 489188 - DNA, 535 bp, Homo sapiens
tcagactgccattttctccttgaggctggaagtgtggggagaaggggataatgtagttgagaatccattactggccccaccttggacagagagacaggcaggtaaagggtacacatgtgcctggatggtgctgctactggactcttgtttacattaatgtgtcaacagtgtgctccaaggttctattaggtgttaacaggtgtctcaagaaaaaaatgtttcttaatgagatcagtttgtaagaaytctgggtgaacacgttaattagtttattcttttaatgcgttgaatgttttttttttttttgaaaaataatagaatcccttcagaattcttaatatgatatggtgttctgtatattttcaagaggagaggtatatagtgtttctcaaatttatttgcacatgaaatgcctgtgggacataatatctctgaaggccgatgttccttgaaagactgtgtgaaatattgaactatatgatctctgaaagttcttgaattctccattatcatcagaatacctggcccttccaag

SEQ ID NO: 489189 - DNA, 609 bp, Homo sapiens
tgtgatgcaccagcagcatttccagattttgtactgcattaaggatttattttctctttattgcctagcagagaattaattggaaggtccatctaagcttcccacacatcctcagaatgaagtcaaagcagtctccaatgctcaatgccaattaaaaaaaaaaaaaaraaagaaaaacagtaagtgggtaggtggtcagtttatcaactctggaaaagcttgtctttgaggattcacactgctaaagccagacaaacgcatcagcaaaattaatggcataaggaaaatgtgagtatgagattggcaattgattcactgagttcgttcattcagccagtatttactgagcccgtatgatgtgctacctattttttcacacacacagaaaacaggagaaaatgaagactcagccctcagagagcttataaccattttaaggagataaactatgaacaagtatacagataaaataatttcagacactggagagtgctgtcaaggaaataaaacaaggtaatgggaggggatgccttccaggggtggtggtcaactttaaatgaggaccagagagggtctctgaggaggtgacatttgaaatgcacccatcac

SEQ ID NO: 489190 - DNA, 601 bp, Homo sapiens
atttattttaccttctcattaattagaccctcaagcctcttaatgttgttttaacactaatttgttgagttctttctggcaccaaactaccccaaactccatgaagaactgaatcatcaatgtattatttataggggcttctttcgtgtgttcgtttaaaatgtagttatctaattaatttattaatttatattgtcaataactattcccagaaggttttttttttttcagatctactagagaacttaaagctttttcttttccaggaatggccaaaatatccagaaggrcaatatcaagtaataattaaagttataagctcttggtttgaattcttgctccactagttatgtgaccttgagcaaattacttaacttctctgtgccttacttttgccatttgtgaagtggaaactaaatagcctttatgtcccagtaacaatgcaaagtttattcattgccgattagaaggggcacactgttcaagatgctcattaattcattcactcattttatgtaatgactcatttatcaatcctttgttgagtctcaaccactgtcctaggtaatgctgatacaatcttatgttttgaagctcgcca

SEQ ID NO: 489191 - DNA, 555 bp, Homo sapiens
aggcagggttatagacagtaaagcaggtcagcatcctataacttgatgactcaatcatcctaacattatgccatctgggcgctgatactgttcagctctcccttttcttatgaaaagtttgactcaggtcaaatagggtgtctttttttgtttccttagaattttgttttctcttccttttagggattagttcttttagtcccacctttgagataaattttataatttcaaattttgaattctgatctaaaccctcaactgttctttctcccacagtaaagaagttaaagcaatcgtagcaaaaaatgtagagagtatttctttccccatccccaactttactgagatataattgacgaataatatcatatgtattcagggagtacaacataaygtttgatgtatatatacattgtaaaatgattaccacaatcaagctaattaacatatccatcacctcacatagctaccgtgtgtgtgtgtttgtgtgtgttaagaatatttcaggttcactcttagcacattttaagtatacaatacattatcattaactgt

SEQ ID NO: 489192 - DNA, 628 bp, Homo sapiens
tccctcattcatagctgcacagacaccacactctctcttttgcaaccttctactctctccacccccacggagacaggcaacttatcaggtgagtcccagtgctgtacttggagaaatattcattcaccttgytttcacccttctttgctgtggtcttgcttgggagctagtgggggtggggtgggaatagctgacaacaggaatcaggttttcagcctgaagttgattgaactgttataaagtagcctgtgtggtaatggtcagggaaaagtagccgaacataagaaggcagaaaatataattaacaacctgtggccatttgtgttgaatttggcagctttatgtttgtccacatatctagtggaaaaagcagctatctctaaaactacacatctactattgctatcagaaaggaagcaatatgtaagataaggctaagttcatttataatttacccaagtgtaaatgacagtaacttggattccccgtgtatgcaaatgttatttcatctttaggtagcagagatgggcttgttcacacaatacaggtacgatgggttttactccaaacaaccctccttacatggctattgagggaagagatctatggctctgaaaatgatactcag

SEQ ID NO: 489193 - DNA, 423 bp, Homo sapiens
ctgttagccggctgcctctaaaagggcgatgtctgcagctaaggtaggagcttgctgtggtaaactgttctaaagaaaggagcttcttaatttgtttactatgcactccactctgatggtaaggagagtaggacacacagaaatggagactggtcttgcttgggagctagtgggggtggggtgggaatagctgacaacaggaatcaggttttcagcctgaagttgattgaactgttataaagtagcctgtgtggtaatggtcagggaaaagtagccraatataagaaggcagaaaatataattaacaacccgtggccatttgtgttggttttggcagctttatgtttgcaggaacagccctccagggaacatgagcgtgaaccatactagggggttcctgcccttgtattttgaagactgata

SEQ ID NO: 489194 - DNA, 557 bp, Homo sapiens
ctgctttctaaccactttctttatgcctgccttcttgagattcagggagttgaataattcatagtgttggttgacagatcaaatgataagatttatatatctttggccttggtgatgaattaattagattggtttctccrtctttggctcctctagatgcgttgtttttcttctttaaaattcactggtgagtggtgggtctggagattaacttgttcttgagagaccaccataggatgattataatatcctagtgtcaatttcttcaggactttcaacatggatcactgggtggtgtggagtaggggcagctatatcatagagaggagagataagatcatcagaacaaaaaacaagacgcacacacacacacaaaaacttgccgatactggctgcgggatgaaattttacagtaagaacttgattgctttcacctcagattttgaatctaaaagagaaatgtatttcattttacattttagtaaatgaacttatcagcccaaagaagtttgctttactagaactctgggtgaccagggagggaagcaaatctctga

SEQ ID NO: 489195 - DNA, 365 bp, Homo sapiens
ctgtcagatcagatagagtcacaggaaggaacttkctttgggttggaattggaaaggggaagaagtccaggtagatggattgtcaaatagacatacaaataggcacattacataggactaagatcaggctttgagttcagatgtgtatgttttactggttcaatgaaagtaacagcttgtcaagtagcataatcgtagaaagtattcactttctcacctgtaaaatgggacagttataggacctgcatcataggaaataatgtctgcacagtttcttagggcagcttcaataaagctgattaagggcatgtacctttcactggaaagtgcacagcctgtataatcagccggtgttgctgagaggc

SEQ ID NO: 489196 - DNA, 365 bp, Homo sapiens
ctgtcagatcagatagagtcacaggaaggaactttctttgggttggaattggaaaggggaagaagtccaggtagatggattgtcaaatagacatacaaataggcacattacataggactaagatcaggctttgagttcagatgtgtatgttttactggttcartgaaagtaacagcttgtcaagtagcataatcgtagaaagtattcactttctcacctgtaaaatgggacagttataggacctgcatcataggaaataatgtctgcacagtttcttagggcagcttcaataaagctgattaagggcatgtacctttcactggaaagtgcacagcctgtataatcagccggtgttgctgagaggc

SEQ ID NO: 489197 - DNA, 626 bp, Homo sapiens
ctgatatgtaagtgccatattgcttccaacaggttcactgagttccttccatgaatataaaataaatattccacgaaatgttggtaaaaagagaaagatgaaatattactgtattttagtagatattttagaactgctgcaagattttgttagggtttrcggtgttatgtcccagcacatttcccccgtaattagtcttatcctccttcttactctcatagcacagctatcacgggaagcaagtgcgtatcatacactatcattcaggctttcaggtgaatggcataacatagtgactgaaaaaacctacccactgccatccatgaagagtgagcgtctacacccatcttgactggaaccatgagcatatgcacccagaggttctcttagatcaacaagggtgtaacacacatggtagatgatttgcccagagatgcctagatgcctgacttctagtcctgtggcctctcccttgaaataattattccagcaaagatgtacattcctaattagtcatattgcaacaagggaatagcctttaagatatgagaatcaaattcacttggaatttggggtggtaaaggcctttcgacttcctcttctcctaaaaaattagcccaaaatta

SEQ ID NO: 489198 - DNA, 643 bp, Homo sapiens
tgtttcccaggtctctagcctgatggtctttgaacttcaactgyaaattttggggcttgccagtatccataattatatgaaccaattccttaaaatagatctctcttaatatatacacatgtcctatagttctgtttctctttaaaaggcatagaaagcttaagaatactttgaagctgttggatgactcctgagccttttttgcttcttgtagctatttaatgtggattagaactacacattcagaattaaattgatatagaggttcttactggtctatttgacatttttacttgtcgcagttttaggaattacttaatcttaagtgtaataatattaggttatcttaacttttttattctgtgtatttatttgattatttttattttattattttctacagttttgatagaagagaaagtagacatgtgtacctatttgcacaacttgattcaatcttccacatttcctaataacagatcgtaaattaatttatcatcattgtttaggtcataattttttcttgataagacgttctttccagtaatgtcacagcataaattgtttttctctagagatagcaaaagttatatgatgtcaaatattgaattatttctgaagatatttttattttttttcaagt

SEQ ID NO: 489199 - DNA, 586 bp, Homo sapiens
ttttctattttaaaaacatacaaaaacatattcttcacaaaatacattccaaaatcatatgcatactacctttctttactgttattaaggagaatctattcttccagtcctctccattaatggggataattaagagtctgcagtgatcccaggagaacagacaatgcacaaatatcaaataactgaactagagaaattaaatgcaaagactagtacttggttaccctggcaacttaattgaatatttcacattactcttgggtcagtcaaaaactatacaaaatgtatttccatgtattttctacagaatatttttgagaataatctcaagatatagagttttccaacgcttacctacattcttaagtgttttctttgttgagttcataagaaatatacatataaagagaattgaacaagttgtagtggataacwatttaagattttgaaatatattttcagaatttcaaggtacataggcccaaagcatttatattttcagtcacattatgcatatcaaaaatacatattttaagaataagacgtttgtatgtaaaagatgattcgtaaccctaggcacacaacc

SEQ ID NO: 489200 - DNA, 641 bp, Homo sapiens
atcatgatgaggcagaagcaatatatactatggaactgctttctgatttaccaaatatttattttatattaaatacatttgattgtttttgtctttaattatttgaaaattgatcttttacttaccgtgtgactttgtacagattccttaatccttgcagggcctcaatttattcttctgtaaataggaggtagaacacttaaccgaaaggtttttcactaggaatagtgagtttttacatggaaagtacgtagcccagagcctggcacgtgtgacatacagcaaatggtagctctactctaatatatatatctattaaaccaagtaaaatgtacaattagcaaaagcctatccatattttttaactagtctgaatacatggaattttaaaaaaattctcgccatggtttatgaagagaagagtaaatgcatagggattccattatctctttcctataatttataaaaggtctgtacatttttcaagtgaaaccaagactgatactgagctgtgccyggctccctgggagcttgctgtgatgtgctcctttgcagttaaagtccagccttgaccgccacatggctcccacgctgtttccagagatagaaatcagatacccatagcatcaggcagagagtgg

SEQ ID NO: 489201 - DNA, 355 bp, Homo sapiens
attgaaatttgaagattatcttgatgacaaatatgctctaactatctatggtarccctggaccaatgattttctaattgttgcctttagaccccctgtaagcagaatcacctgagggttcttgagaacatatacgtttctgggccctatttcagctatagggaatcagaatccccaaggataggaccaataaattagcatgttaaacaagtcttccagaacattcttactcaaagggaagtttgagaaatattgccctgggttaaatatttttcataaagtaaatatatatttcagttttaacatttccctattaaaaagaagttgttgcaaaaaactgtcattgaattattttc

SEQ ID NO: 489202 - DNA, 433 bp, Homo sapiens
tagaaaagaaggaaaggaaattatccttccccaattcattccttatcattcctggagacttcccttgagttcacgggagtagaaattatttctcccaaagtagtccttggttccgcaactgcatacgaatgaatcataatcaaggtcccttcctcaagcaagaaaaatgaactaggccctcagctccagctcctttgagcatgaaagcaagcactcctttaaataactggttaaacagtggaacatcttctaggtgggttctggcttgattaaagtagccttcagtgtttctcaaaaaattcyggtttcttctcaaatgcagttctattgctttccctgagctatgggaagagtataaataataataataagaagaaacaaaataaaataaaatgctgttctaatctttgaaaaccaaatttcacccttaatt

SEQ ID NO: 489203 - DNA, 601 bp, Homo sapiens
aggggccatttccattttgcttatttttatgtttgtgctacatatcatcccacaaacagtgttacatgaataaatgaatgaatattgtgacaaaagcactatataaagcattttagcaatcccaagaaaaattagatatggcttattctctagaagcttataatttattgaagtggagaaaacccaaaaatatacaagtcggtggcagtacaagacaatgaactgacccataggattttagaacaaaagactctggaaatgatrtagatcaaccctaattcatcacagcagcatgaagtgaatatcacacaatgatggcgagagtcatatgaggagatacctggataccaagtacttgaagatgttcggaagttggaaaatgctgctgtgtccgtgactgtcaaggaaaggttatggaagaaatcaagttgaattgagttttgagggatttatcctctaatgaacatttattatctattatataataatagcaagaagactctgtccttgtccaagcagggcaagaggttggcaaactgtgctttccaggccagatgcggtcacctgtgtttataaagcgctgtatgggaacatggccgcg

SEQ ID NO: 489204 - DNA, 601 bp, Homo sapiens
aggggccatttccattttgcttatttttatgtttgtgctacatatcatcccacaaacagtgttacatgaataaatgaatgaatattgtgacaaaagcactatataaagcattttagcaatcccaagaaaaattagatatggcttattctctagaagcttataatttattgaagtggagaaaacccaaaaatatacaagtcggtggcagtacaagacaatgaactgacccataggattttagaacaaaagactctggaaatgatgtagatcaaccctaattcatcacagcagcatgaagtgaatatcacacaatgatggcragagtcatatgaggagatacctggataccaagtacttgaagatgttcggaagttggaaaatgctgctgtgtccgtgactgtcaaggaaaggttatggaagaaatcaagttgaattgagttttgagggatttatcctctaatgaacatttattatctattatataataatagcaagaagactctgtccttgtccaagcagggcaagaggttggcaaactgtgctttccaggccagatgcggtcacctgtgtttataaagcgctgtatgggaacatggccgcg

SEQ ID NO: 489205 - DNA, 638 bp, Homo sapiens
taggtatacaacagacattttgctaaagttcccatatatctgatctgataataggggtagcaagtgctccagtacctcttccctttcctccttaatctttcctcggctgaaatgaaggagaggattctttccaggaccaacacggtggccaagtgagaagtgagagttacggccctgaataaaagtgaaatccgagccctttcagccagaaggacagaggagtgaagacgccagttcccggaayagacatttgtatatacgctaccaacaattaatttttccaaagacctcaaaacaagataaaacaaaacagctagagatgcctgtagtatggggaacgggactcctgaattggaagtgtttaattgtacctctagttagcaggaagtttaggcaaatgattttcaatgcatatcacaggcacatacaaaaaatatgcaaaccaggcaggactccagccaacttaatttcaggtgctttccagccattattttcccttctgcagattcatctcacacccagatctttagaaatggctggcagagactgcatgccactctataattctttgggagtctgctggttccttaacctcgggtgcatcccaggctcggaatgtcagggatgtacaagcatgc

SEQ ID NO: 489206 - DNA, 570 bp, Homo sapiens
agtacctcttccctttcctccttaatctttcctcggctgaaatgaaggagaggattctttccaggaccaacacggtggccaagtgagaagtgagagttacggccctgaataaaagtgaaatccgagccctttcagccagaaggacagaggagtgaagacgccagttcccggaacagacatttgtrtatacgctaccaacaattaatttttccaaagacctcaaaacaagataaaacaaaacagctagagatgcctgtagtatggggaacgggactcctgaattggaagtgtttaattgtacctctagttagcaggaagtttaggcaaatgattttcaatgcatatcacaggcacatacaaaaaatatgcaaaccaggcaggactccagccaacttaatttcaggtgctttccagccattattttcccttctgcagattcatctcacacccagatctttagaaatggctggcagagactgcatgccactctataattctttgggagtctgctggttccttaacctcgggtgcatcccaggctcggaatgtcagggatgtacaagcatgcca

SEQ ID NO: 489207 - DNA, 609 bp, Homo sapiens
ctggggtacaggattctttaagcctccccaggtggttctaaggtgcagacagagttgggaactactcatctagaaaagaagacaataatgaccagagttccaataaagcttcacaacacttctcagaaatcgacaygcatggcaccaacagattccattacattgttgcccatcatccatgatggttttgtaagctgtagaattgtcctcagttctagaaactgtgtgtgtttctgagtgtctaagaactcttgtacatggactaaattagatgatgtggactgggggaccaaccacaccccctgggatatgagaaaccaagagttgcatcaagcactgcctgcacctgcatctgctagcattgtccaaggttttctagggtgccatgatggcatcttcatctactccttttttttcatatccagttcattaagtcctgcctgttgaactttaaaaacatatccagaatatgacctcttctcattaatctcatcatgaccttctagaaactgctaccattgggtctttcaggataatagtaatactatttgtattttttgcttcagtgctcgcatcgacagcacaaagccctcaaggttattctaaacc

SEQ ID NO: 489208 - DNA, 518 bp, Homo sapiens
tttttcattttgtagaaatagggtcttgctacattgcccagactcatcttcaactcctgggctcaagcgatccttcctcctcggcctcccaaagcactgggattacaggcgtgagccagcccaccgggcctaataatatttttaatagacaaatcataattgtatatgtttatgaggcacaatgtgatgttttgctrtatgtatgcattgtagaatgattaaactattaacatatccatcatctcatttacttatcatttttggtgataagacgtttgaaatttaatctcttacctattttgaaatatgcaataaatttttattaactatagtcaccttgctgcataagagatcttaaaaacttattcctcctgtctagctgaaacttcataccctttggataacacctccctgtttcttccctccactactcaacaaggcaacattcttgaaatgagatttttttgttgagctttgcaaaggtggaagcagtctggatccctgtcaaggcggaaaca

SEQ ID NO: 489209 - DNA, 424 bp, Homo sapiens
aacgatctttgcttggccaggcgtggtggctcatgcctgtaatcccaacactttgggaggccaaggtgggcagatcatttgaggtcaggagttcgagaccagactgaccaatatggtgaaaccctgtctctagtaaaaatatgaaaattagctgggcatggtggcaggcacctgtaattccagctactccagaggctgaggcaggagaatcacttgaatccgggaggtggaggctgcagtgagycgagatcctgtcactgcactccagcctgggcaacagagcgagattccatctcaaaaaaaaaaaaaaaaaaaaaaaaaggctttgctttagggcagctccgagtttaaactgtggatcccgcttctcatcatgaatttggcccaatctctcacctttctaaatctcagtgtgttccaatca

SEQ ID NO: 489210 - DNA, 614 bp, Homo sapiens
gctggttattgaacagaattggtgtaaaaatcttacttttagtgcagtaatctttcctctatttcataacacctattaatttttggaaaaaaaataaaatatcatactcttaagcaatatgtaagttaaatgtaacttccctttatacaatgttttgtttcttttgctatcmttaacctatgtaaccttggtagaatatacatgctaattatttgcgctatgcttgcagtttttagaaatgctattgtgaataaatgaatatttttatttaactgtttcagcataagaaaggattttcctaaaccctgaaataacttgttggcaagcaagaaaggagactggggtattcttgcttgtctagtaaagttgaaaagattgacttgatattttgaacagttactggactttctgttgtggccatatttaagagcttgtaaaagtatttttggtctgcttaaaattttaatggataatcaaagacacttcagaaactttggagacatttggatatcactttacaatctgccccaagtttgtagttcttaatccattaaaagacagagctgcttgtaaatccacaggtatagataaggagtcactgtttactgagtcca

SEQ ID NO: 489211 - DNA, 622 bp, Homo sapiens
aatgaaagaaattgtatctactctgcaaggttagctgctgtgagaattaaaagatgtaatttaaggagcaaacttggtataatcaaagtgcacacacagtagatcgtctataaatggttactagtactactagtagtaatagtattaatagcactttgttactgtaaaaagaccagcaataggaagtttaagaactgcaactttgagtcacattgatttaggtctagagaaacacacacagcacataggggaatgtgtcagtcatttagtttatttcttcattcattcactgcatagatacaaactcaaaataatgtttgtcttaggacatttttaacttacatgggaaaatagctcccaaagcagcatattaaaacatacttttttttttctgttgacattctaataaagtcagtaaaatagaaatacagtatttggcttttactgtttctgtaattagttaaatgctatattacctcrctaaaaaccatgtaagaaagattcaagtattctgctacatttcaaatattattactactcctttaagaaaattcgtaataattaagctaatgattaatcactggtaatcaatgagatatatatagccaatttatacacaaaa

SEQ ID NO: 489212 - DNA, 622 bp, Homo sapiens
aatgaaagaaattgtatctactctgcaaggttagctgctgtgagaattaaaagatgtaatttaaggagcaaacttggtataatcaaagtgcacacacagtagatcgtctataaatggttactagtactactagtagtaatagtattaatagcactttgttactgtaaaaagaccagcaataggaagtttaagaactgcaactttgagtcacattgatttaggtctagagaaacacacacagcacataggggaatgtgtcagtcatttagtttatttcttcattcattcactgcatagatacaaactcaaaataatgtttgtcttaggacatttttaacttacatgggaaaatagctcccaaagcagcatattaaaacatacttttttttttctgttgacattctaataaagtcagtaaaatagaaatacagtatttggcttttactgtttctgtaattagttaaatgctatattacctcgctaaaaaccatgtaagaaagattcaagtattctgctacatttcaaayattattactactcctttaagaaaattcgtaataattaagctaatgattaatcactggtaatcaatgagatatatatagccaatttatacacaaaa

SEQ ID NO: 489213 - DNA, 622 bp, Homo sapiens
aatgaaagaaattgtatctactctgcaaggttagctgctgtgagaattaaaagatgtaatttaaggagcaaacttggtataatcaaagtgcacacacagtagatcgtctataaatggttactagtactactagtagtaatagtattaatagcactttgttactgtaaaaagaccagcaataggaagtttaagaactgcaactttgagtcacattgatttaggtctagagaaacacacacagcacataggggaatgtgtcagtcatttagtttatttcttcattcattcactgcatagatacaaactcaaaataatgtttgtcttaggacatttttaacttacatgggaaaatagctcccaaagcagcatattaaaacatacttttttttttctgttgacattctaataaagtcagtaaaatagaaatacagtatttggcttttactgtttctgtaattagttaaatgctatattacctcgctaaaaaccatgtaagaaagattcaagtattctgctacatttcaaatattattactactcctttaagaaaattcgtaatarttaagctaatgattaatcactggtaatcaatgagatatatatagccaatttatacacaaaa

SEQ ID NO: 489214 - DNA, 534 bp, Homo sapiens
ctatcatcccctcttgagagaaaaagagaagatttgtctctcaaatgtatcayaagttggaaatgtaaactggaatttggaatgtatgtgcaagtaagcctacaagttttcattcccctttgaagcaaaagcacatagctctagggagatatatctttatatctctgaaattgctgtctattcaattatgctttaactttcaaagcatatcctttaacccactttccagttttctttgcctagaataccctagcatagggaaatatgaaaatattttctctatacttctacatgattgaggaaacgctttcttgtagagatggcatttgaacctagaaggttggatacctatgaatttaccaaacaaaaggtaaacccattcctggcagagggaacagaagcacaacggtttggcagtaggaaagaacatggcagaattcacatcaattgtttaatagctgttatttctgggaaatggaatgttaggatgaagtggaagtttaaggatatcttttcaattttgctctacttgaa

SEQ ID NO: 489215 - DNA, 491 bp, Homo sapiens
ttctgcaaaggacatgatttcattcttttgtttggcttggtggtattccatggggcacatgtaccatattctttttaatccattccactgttgatgagcacctaggttgattccatgtctttgctattgtgaatagcactgtgatgaacatatgattgcatctatctttttcrtagaacaatttattttcctttggatataaacttaatagtaatgggattgctgagtggaatggtagctctctgttaagttcttccagaaatctccaaactgcttcctacagtggtttaactaatttacattcctaccaacaatgcataagcattctagcgaggaatttttatttgcattactacttatgtcaaatagctttggctgcttgaaattcatcttatttattgaagagagaaaatggagtagatgaattcaatcaagagtttattttaaaccttgtgttaaggtttaagcactttcacagttttgggggtgct

SEQ ID NO: 489216 - DNA, 649 bp, Homo sapiens
gctgacatcaagttgtcagcagggatatgttccctgcagagactctagggaaaaacatgctgcttgccacttttattatagcttctgatggctgctggagttccctgcattgcagccaaattactccaccctctgcctctgtggtcacactgacttcttttctgcgcctatggaatcctcccctgcctctctcgtaaggacactcatgattgaatttagggccacctggataataaaagctaatctccctatctcaaagtccttaacagaatcacgtcttcaaagaccatttttccatataagtaacatttataggtkgcagagattagggtgtgatatctttggggccattactcagcctactacggtcatatttaattttaagtggctgctggaaattcaagaggatgtatttggtaaacaaatagatattggggtctggaggtatgaaacaggaagcaagatcacctgctgaaagaaaacagtgctggggaaatggaattcttggcatcataaatttctgaattagctgttggggagaatagagcagagagctgactagctggtaagcagtgtattaaatggtgtaggtggagaataacaaatatggtactgtcaataatctgaagacttgcgttaatagttgcca

SEQ ID NO: 489217 - DNA, 619 bp, Homo sapiens
gttccctgcagagactctagggaaaaacatgctgcttgccacttttattatagcttctgatggctgctggagttccctgcattgcagccaaattactccaccctctgcctctgtggtcacactgacttcttttctgcgcctatggaatcctcccctgcctctctcgtaaggacactcatgattgaatttagggccacctggataataaaagctaatctccctatctcaaagtccttaacagaatcacgtcttcaaagaccatttttccatataagtaacatttataggtggcagagattagggtgtgatatctttggggccattactcagcctactacggtcatatttaattttaagtggctgctggaaattcaagaggatgtatttggtaaacaaatagatattggggtctggaggtatgaaacaggaagcaagatcacctgctgaaagaaaacagtgctggggaaatggaattcttggcatcataaatttctgaattagctrttggggagaatagagcagagagctgactagctggtaagcagtgtattaaatggtgtaggtggagaataacaaatatggtactgtcaataatctgaagacttgcgttaatagttgc

SEQ ID NO: 489218 - DNA, 622 bp, Homo sapiens
ctgctggggattcaagcaaatcccctacagggtgataatcctcgagacatttgtgttttctggcatagagtctcatacatctgggaaagctggacgcctcttgtttatttcttaggtgtgggcacgaagatcactaaagaggtccatggaagtttcttttaaatgccaaacttcataaatctcagtaccacattcacttccactctgcgtcaggttctcgctgagcagtgctctttattcatgtggttgcccttgatatgctgggaaatttcagaatagattcggtaaagtagaaggctctccactggccctggagtgcaktatgggaaaattatagcctgggtgaaatttcaccttcagcagccccaagtgggatttctgaagatttttgaaattatcaggatttgtttgtgtgtgccttgcaagtatttcttggacttatctacaaaaagatacaggtttgtgacaacataataatgtctctagtaaccacattttaaaacatggtgtagatagatgttgtttgtatgacccccagagagactccaaaagtgaactcgagaagcaaaagtgagtctttccacatagacccaactggaagctctgagaatagtgttgttga

SEQ ID NO: 489219 - DNA, 663 bp, Homo sapiens
ctcaggcaatgtacttgtgctttcaggatctcctcaaactcagtctcatatagaccacttcctcttgagggtagaatgctgctgggcacacccagcctaatggtgtgtgaatctaaataaattagacagtcacttgctgtccacagtaagaagttcagtctaccagggctaccaaccatgtcttaaccccaaaatacaaaaatggagttctattatttaaccttccagtgtagttagatgcagccagcccactccatgatccttgtatacctagtgccacatcaaagtagtctatcacagatgccacttactctcccaaagatgatccttgacataactattttaccactttgagttatggaatatgatgtcccacccattaatgctaactctttaacccagactgagtcagagagctgattctaaattccaattgyctttatggtctgttgcctgcaaacttttttggagggggttctaattattgcaggaaacaggatatcaggtagaataatcataaagaatttttttttacagaatttcggcaagaatcagggaaactattttggttacttcacaggcaggattgatgcagattaatccactgtttgtttagtggaaacctcgaagctgccacctcctcctcagtacttgtgatagtgg

SEQ ID NO: 489220 - DNA, 595 bp, Homo sapiens
tcaactacccaagagcctaatccctgaccatttaggattagtcagtagacaccgaaggtaagacttctctccagggaatttgagttttatttaaaactcctggggagtccaaaaagtagattcatgatgcaatgataaacagggttcgtattttgtatgggagtttcaaccaccacctccccaaatcaggcttttgagtggccccttactgatgactccaatttttatgctactggatttttaacttgccagagccacttctaatcttagcatctgagataattcagaatgcactgtatgattgcaggtgctattgaatgctgctattctattgcatattatttatayaccgaattatctgttgtggtaatttattaaaatattatgtattttacggtatgtaattctgtaatccattgtatatgattgattgtactgactactctatagcattgtttggaaaaagcaagcctgtgataaaagtgggcagattgagtagggtccagaggagcactgcagcggaagtcagaacagaaatgcgtcagcatcacccagccactgtgctttcctgaactataattacattaatgaatta

SEQ ID NO: 489221 - DNA, 595 bp, Homo sapiens
tcaactacccaagagcctaatccctgaccatttaggattagtcagtagacaccgaaggtaagacttctctccagggaatttgagttttatttaaaactcctggggagtccaaaaagtagattcatgatgcaatgataaacagggttcgtattttgtatgggagtttcaaccaccacctccccaaatcaggcttttgagtggccccttactgatgactccaatttttatgctactggatttttaacttgccagagccacttctaatcttagcatctgagataattcagaatgcactgtatgattgcaggtgctattgaatgctgctattctattgcatattatttatacaccgaattatctrttgtggtaatttattaaaatattatgtattttacggtatgtaattctgtaatccattgtatatgattgattgtactgactactctatagcattgtttggaaaaagcaagcctgtgataaaagtgggcagattgagtagggtccagaggagcactgcagcggaagtcagaacagaaatgcgtcagcatcacccagccactgtgctttcctgaactataattacattaatgaatta

SEQ ID NO: 489222 - DNA, 595 bp, Homo sapiens
tcaactacccaagagcctaatccctgaccatttaggattagtcagtagacaccgaaggtaagacttctctccagggaatttgagttttatttaaaactcctggggagtccaaaaagtagattcatgatgcaatgataaacagggttcgtattttgtatgggagtttcaaccaccacctccccaaatcaggcttttgagtggccccttactgatgactccaatttttatgctactggatttttaacttgccagagccacttctaatcttagcatctgagataattcagaatgcactgtatgattgcaggtgctattgaatgctgctattctattgcatattatttatacaccgaattatctgttgtggtaatttattaaaatattatgtattttacggtatgtaattctgtaatccattgtatatgattgattgtactgactactctatagcattgtttggaaaaagcaagcctgtgataaaagtgggcagattgagtagggtccagaggagcactgcagcggaagtcagaacagaartgcgtcagcatcacccagccactgtgctttcctgaactataattacattaatgaatta

SEQ ID NO: 489223 - DNA, 602 bp, Homo sapiens
cttgtagtctttttaacactgcaatggtttccatactactagaggtaatttattactatctcatgccttcaagataatgatttccagaaatgctctctgtacccaggcaggataaatggtgaccatctcctggacttttatatgtacacagttacggttctccagtaataggtataattgatggttaacttctatataagacttgaattcctctctaatttttttatgctggctacctttacccacatcaattatgacaggccaactggaaacattccgcagaggcggttcataagaattgggtgtctgcagtgatggttcagagtactcagagtttctgctaatgctggtggatttacagacatgaatatyaagctaaagaatctaaccttacacacaatggcaccgataaaggtgaaggatttttctaggattaaaaagtcccacaaaaacgtattatccatatttcacatgttgtaaagttaaggtaatagacgtagttgaagaacatcgagattcctgggaaattagaaaagactgctttttgcacacactgttttttcgtacatggcattgtttttgtaattagtacctgagtatca

SEQ ID NO: 489224 - DNA, 602 bp, Homo sapiens
cttgtagtctttttaacactgcaatggtttccatactactagaggtaatttattactatctcatgccttcaagataatgatttccagaaatgctctctgtacccaggcaggataaatggtgaccatctcctggacttttatatgtacacagttacggttctccagtaataggtataattgatggttaacttctatataagacttgaattcctctctaatttttttatgctggctacctttacccacatcaattatgacaggccaactggaaacattccgcagaggcggttcataagaattgggtgtctgcagtgatggttcagagtactcagagtttctgctaatgctggtggatttacagacatgaatatcaagctaaagaatctaaccttacacamaatggcaccgataaaggtgaaggatttttctaggattaaaaagtcccacaaaaacgtattatccatatttcacatgttgtaaagttaaggtaatagacgtagttgaagaacatcgagattcctgggaaattagaaaagactgctttttgcacacactgttttttcgtacatggcattgtttttgtaattagtacctgagtatca

SEQ ID NO: 489225 - DNA, 602 bp, Homo sapiens
cttgtagtctttttaacactgcaatggtttccatactactagaggtaatttattactatctcatgccttcaagataatgatttccagaaatgctctctgtacccaggcaggataaatggtgaccatctcctggacttttatatgtacacagttacggttctccagtaataggtataattgatggttaacttctatataagacttgaattcctctctaatttttttatgctggctacctttacccacatcaattatgacaggccaactggaaacattccgcagaggcggttcataagaattgggtgtctgcagtgatggttcagagtactcagagtttctgctaatgctggtggatttacagacatgaatatcaagctaaagaatctaaccttacacacaatggcaccgataaaggtgaaggatttttctaggattaaaaagtcccacaaaaacgtattatccatatttcacatgttgtaaagttaaggtaatagacgtagttgaagaacatcgagattcctgggaaattagaaaagactgctttttgcacacactgttttttcgtacrtggcattgtttttgtaattagtacctgagtatca

SEQ ID NO: 489226 - DNA, 538 bp, Homo sapiens
cgtcaagcttcttctctcctctgcttatgaagctgctccaatttgcagaagggtcacctggtgactgtttcrggacctgaagtgaatgagctgaggaattaactgtgtgtcactctcagttgcctacagtggcattaccactgcgggagcaccagtcatgtctccccaccccatgggaatttacagcactcaggcccatctgcaggacggcagaggtatttgcgggtacaacaggcccagaacatacttgggaaggcagggatgagtcagttagatttcccactaggttttcaaactgtagctcttttttcatccacggggtgaaccttgtctgattggcactcgatgttgtatgaccctggagcaggtctgcacaggaaaagggaggaaaacctgtgcgttctctctcctgttcctgcacgctctcttccatgctattggcagttgacatcaacaggtcccatctacatcccggctcaggggaagtgggctccctctccgtgttgccaggtggctctgaccgagaggacaagcccca

SEQ ID NO: 489227 - DNA, 528 bp, Homo sapiens
gagtttgtttgggtgagatcagcaggagggatcacaaaaggagaattctgctcccccactctccctcctctgctcatctgtccggaacaactcatgccttctgtgcctcttcccatatgttacaagcatgtttggtctaactggtttctctctaaattaatgcagggctcctcttttaaaaagtcttccttatataatgtagaacctggcaggctcaaagaaaaattagctacccacagccccacagatgaataaaaatctgggccttgtttactctttctgcaaacaagcatcarttagaaaaagtcaaaaagggttgtgctttgccttctaacttgagaacatctatgaggaatctacaagttcttcttgtgagtgtggctaagagttgagatgttgtgacaaggccgcattgatgtctacgagcctgtctggaccattttttcaggaataggaggaaactttattttactgattgttttgattttgtttcaaagaacaaaacatttgaagaaactgcttggtatg

SEQ ID NO: 489228 - DNA, 641 bp, Homo sapiens
ttgcgacaagctggccatgattataaaggcatggccttcagcaccctgtctgatctgttttgggtctgtttcactccgttgcatccaaatttggcagcctttcctggtcccttcaccttcttcaggggcttcacagattcatatgtttatcctggaagcctgtctccaacactactctcatccctttctaactaactcctgtatagaagaccttcaggtcctcagttggtcttcactcaccaaataggtaaggtaaacttggtcagtgcattcatagctttaattaccacacaaataaatattygtgtagttaattgttaaatttatgtcccttccaccagaacgtataaattccacacaggcacagacctgacatcttatttaaaattcaatcagaaaaaaactagataagttgaagttaaacaaaactaaaagctttcatgcatcaaaagacagtatcaacagttaaaagcaatcatagaaagagagaaaatatttgcaaatcacacacctgataagggattagtgtctagaatatataaagaacccctacaattcaacaacaacaaaaaaagaagctggtaagctggtttaaaaaaaacgggcaaaacgtcaatgatagactggacaaaaaagtgtgt

SEQ ID NO: 489229 - DNA, 531 bp, Homo sapiens
ggctgaaagaaaggagacataatttcaaaattagtcaaagaagctggtagcagtagaaccaaaaataaggatttttttttttaatctggtaggcacaaatcttctatcccctgggtagttagattatccagagagtagagcagaaaccacagtcatttctgagtcttggagcctacttgttcccagcccatcagaacaggcagagtggcaagtgggcctgtctcctttgtgtgtctgctaaacatgcccttctagtttaaaaaaggataaatgagagaatgctgaagttatgaaaagtcagtcactyacttaacatgaaccattacctagggattctcatagatcctcataattataaatgtgtgataagttaaaaaaaaagaatgaatgcataaggttgaacgttgtaattaattatgatgtaattaattgtgaagcacagatcactacctctttcatgtcaactccaatattctgtggtgattcccctgccccgcagatagactggcagcaagagggcacacatattta

SEQ ID NO: 489230 - DNA, 488 bp, Homo sapiens
atgccagccagtttgcaatgtgttttacatgagctcttatttaaaacacaacagacttatgatgttgattcaagcaatatgctacaagacactaacatatagactaacataataataaaataaacaaaaattttattctaatcattatgacacaagacctgatagaaaactataaattcaacttaaacccgagtaagagaagaagcataaccaaatgtgaactgttgaataatgatatgctttaggatatatacaaaatgaaaataaatggaaacataaaaaacagtcttgkttatggaaactctatacagttttctagggtcttgaacttacattcgttttcaagagaaaacaaggcctgagccatcgcacccggcctaataatcttattttctaacagatattaatgtgtttatagtcacgacagaactagcactttgaaaactaccctagtaaatataggctgtatgtttatcatatatctgggg

SEQ ID NO: 489231 - DNA, 648 bp, Homo sapiens
  misc_feature (1)...(648): n = A,T,C or G
nnnnnnnnnnnnnnnnnnnnnnnnnnnnnnnnnnnnnnntgctccagggcactaaataatgtcacattcttcaaagcataatgccgttagagtttataaagcactttcacctgkgttatctcattcgatcttggcaaaagctcagtgcaaaaagtagaagtggtgcataatcattgttttgtaatgatatagatgctcctgttatgagctcatgcggtaaatatgtgagaggcagaggtaggtctagaacatctgtctcttaactatttgttcagaattgttctcacagtggcataaaggagtaaagagcctcaattaagggatatgtgatctttgtgttatagacattttttaaatttaaatgtatccaattcaactggacacatggtagctctatatattataggttatagtagaaaggagagaatagttaacaagattctaacctgtatggtatgtccgatatttgacaacagaagacaatttcatcatacttatgccaagctaccacataactcctttaagtcagaaaatggtagtagttcttgggctgttgtatccagtcttatattgtcatggcagaattttgtcccttattgcttgaaaattacccccttccctacccccagtacctactttgctatttat

SEQ ID NO: 489232 - DNA, 588 bp, Homo sapiens
agtagtaggcacccactgttcactggtgacatgctgacagtgcatccctgcctaaacacaactcgcttgccctctcacagcttatattttaaaggttgtaaaatcttgtttttgtcatatctggcaatagtattttgtaaattattttttacatgattttttaaaaatgtactcatcaaaatgagctggcacatataagctcattatatttttacgattttagcaaaaacactgtyttttgcctacaacatgatagtttgtgttttttggaaaaaaaaaaaaaacaacaacaactctattatggtcttcatagtgtttctaatttctaaaatcattttggcctgtagacacttttaaaaaaaagatgctctctaaatatgaggaacataagattgtgtaactgttttcataagtgaaaaacttacacttaccattgtcatctgagaggaaataatggtttaattagtttttagataaaaagatttttgcaatcagactgtgtttgtaatggcatttataaaacaatttccccctacagtagcattgtaattaagactttcaatgaatcagaggagaagagtgcatttt

SEQ ID NO: 489233 - DNA, 628 bp, Homo sapiens
gccagctgggagaaaaaaatgtgaggaccttgttcatatgacatccgtgtataccatccattcccagggtaaaaatcaggttctggaaaatcatctatttaaaaaaaacccactataatacgtttaataattaataataataaacacaaattaataataatcaatagcaagtatcaatagaacattaacagtagcatattcaagttagtggtttagagcgacaaactccaggttctgcatagatctccatgacatgagaaatcttatcagaaagcaagtaagtcaaaatgctatcattgtagattaactttaacttcattaaaaaaataaaacatttgcaaacgtcacccttctgattcacttgtacttctgttctagagaagtggtttgtaagcagggccacttacatgtactccctaagcatatgcagggactaatcatagagtaccctatcaggacagttttaataaaacaattgctagatcctcaaactcygttagtattatgacctaaaattagtctaagatgctcctgtggttgaaattctccttttccactttcactcttaccactctcccattttacaaaataaggcacaattctcacctattctatatcttactaaagt

SEQ ID NO: 489234 - DNA, 615 bp, Homo sapiens
aacacatatttttatatgaacattctaagttatttatagcagtgactggcatttcaagagtaagtgattcattttacgtacagtgcctcaagattaaaatgttcacactgaacacctagaatgtttatgaaaattaatcttattaaagtagaacacagatgaaacagatgaatgcagctatggaatcatgtttaatttaaaaaactcacacatagcacagattacattatcaaaggaaggactaaactgacatttttatagctcttggcagatttaacaaatttctsttttgccacataccgatagaagtaggcatatttcttgacatcattaaatctgttttaaaaatagagacataatttgtaaagcgagataaccagttaaataacagaattataacaaatactggcttttcagtatttttttctagaattcttatgatatgcaaggattgctcagctatttaacaataattaaatctctttactcaagcactcttaatgcagcgatctcaggctttattttgaagtattggttaaaatgaactattgcacacccaaggaaataaaacttagtggagtatttggcttgaatgaaagctcacaattccaaaag

SEQ ID NO: 489235 - DNA, 615 bp, Homo sapiens
aacacatatttttatatgaacattctaagttatttatagcagtgactggcatttcaagagtaagtgattcattttacgtacagtgcctcaagattaaaatgttcacactgaacacctagaatgtttatgaaaattaatcttattaaagtagaacacagatgaaacagatgaatgcagctatggaatcatgtttaatttaaaaaactcacacatagcacagattacattatcaaaggaaggactaaactgacatttttatagctcttggcagatttaacaaatttctgttttgccacataccratagaagtaggcatatttcttgacatcattaaatctgttttaaaaatagagacataatttgtaaagcgagataaccagttaaataacagaattataacaaatactggcttttcagtatttttttctagaattcttatgatatgcaaggattgctcagctatttaacaataattaaatctctttactcaagcactcttaatgcagcgatctcaggctttattttgaagtattggttaaaatgaactattgcacacccaaggaaataaaacttagtggagtatttggcttgaatgaaagctcacaattccaaaag

SEQ ID NO: 489236 - DNA, 615 bp, Homo sapiens
aacacatatttttatatgaacattctaagttatttatagcagtgactggcatttcaagagtaagtgattcattttacgtacagtgcctcaagattaaaatgttcacactgaacacctagaatgtttatgaaaattaatcttattaaagtagaacacagatgaaacagatgaatgcagctatggaatcatgtttaatttaaaaaactcacacatagcacagattacattatcaaaggaaggactaaactgacatttttatagctcttggcagatttaacaaatttctgttttgccacataccgatagaagtaggcatatttcttgacatcattaaatctgttttaaaaatagagacataatttgtaaagcragataaccagttaaataacagaattataacaaatactggcttttcagtatttttttctagaattcttatgatatgcaaggattgctcagctatttaacaataattaaatctctttactcaagcactcttaatgcagcgatctcaggctttattttgaagtattggttaaaatgaactattgcacacccaaggaaataaaacttagtggagtatttggcttgaatgaaagctcacaattccaaaag

SEQ ID NO: 489237 - DNA, 458 bp, Homo sapiens
ccagctgctttcacaaacactatctgtcctcagttgattgtgagttcaagctcatttataaattagtcattccattcaattacttaaaatgagaccattgaagaagactaaaagcttaaaaacaaagtttcattgatgaatttcaaagttcaattcatcaggtgggaaatatatgagaaaagtcaaatgatttcattttcgtctatgtttgttcctagatcttactaaaggagtataagtggtgaaatatatcactgtgtttattatttactgtctctgcactttagctatggttattgtggctcgatcttggaagatttgctacacacaagaaattgagattctatgtttgattaataacattccactggctatttgtgaatgcaaacacrtacaacacactatgaaacacactttccttccctaaggctaacattgtgctaacaactcagcaagta

SEQ ID NO: 489238 - DNA, 685 bp, Homo sapiens
ctgcagcatgcaaagcgtgaattgaagaaaaacaataaaaagttgaaatggtgatttatcacagataaggctaggtgtggaggccagaaggactcttaagcagcacacaaagaaccccattttctgacaacgtaagtcagaaaaaacccgcgtccttgaacggaattataagggcattagaacgccactgaagattgaattatttaacctgccaagtcggttatgccaaggtcaggaccatttttggttaggagtagaactctgagaccagggatggggatatctgggttgatgcactcaagaccatgagattcatcagaactctctggggtacttcccttatgtctcacttttccctgtcaaaaactaatgtcacttttgcttgaaaacaaaaagcattacatactgctctagataaaaccctacttcttcttctagcttccggacttataatgtgggagttaygttccaagactcagatggagaagttctgggcctgttaagggagaaaagagactgtatcctgaaggtgctgcaagacctagttagtatgttctggtgggggccaggaaagaatgtatgggactgggtctagaaagtggtaaaccaggagtgaaacataaagttggttaaatgggagattgttgatatgggaacattatctcaggacataaatttagcatcc

SEQ ID NO: 489239 - DNA, 595 bp, Homo sapiens
gtcaaaatttccttccttttagtggctgtataatattacattgtatgtgtatatgtcatttgttcatgaagggacacttgggtttcttcatttccaccttttggctattatgagtaatacttccaggaccatgggtgtacatcaccatatcaatgcatctaattatgtctgagtttctctggctcctcaagcccatttcatctgctgctccatggtggtcagtmgggggaaaggacagtgtgggtatcaggcactgagatgaccccttcctagctggattactttgggcagttctttcattcctctgggtctccatttcttcgtctgtaaaacggaggtactcgttttacagatttccttccttatagagaataaaggagaataaaataaaaaagaatgtaggagaataaaatgagtttatttatgtaaagcacttggtacagcattgacacagagcacaccttgtagaaatgaagctactgttattaatataacactccgggcacactgtacataattttaatgactgtgacctgttgtggacgtgagagagtggaggaacagagaggctgggtgacttgcccagggacacaca

SEQ ID NO: 489240 - DNA, 595 bp, Homo sapiens
gtcaaaatttccttccttttagtggctgtataatattacattgtatgtgtatatgtcatttgttcatgaagggacacttgggtttcttcatttccaccttttggctattatgagtaatacttccaggaccatgggtgtacatcaccatatcaatgcatctaattatgtctgagtttctctggctcctcaagcccatttcatctgctgctccatggtggtcagtcgggggaaaggacagtgkgggtatcaggcactgagatgaccccttcctagctggattactttgggcagttctttcattcctctgggtctccatttcttcgtctgtaaaacggaggtactcgttttacagatttccttccttatagagaataaaggagaataaaataaaaaagaatgtaggagaataaaatgagtttatttatgtaaagcacttggtacagcattgacacagagcacaccttgtagaaatgaagctactgttattaatataacactccgggcacactgtacataattttaatgactgtgacctgttgtggacgtgagagagtggaggaacagagaggctgggtgacttgcccagggacacaca

SEQ ID NO: 489241 - DNA, 649 bp, Homo sapiens
atgtcttattgatcccagcctgcatgctggccctacagcatgcagcctcagatgagagagagaagaaatcagtttggatcctagagtgcagaactgtttccaggtttactggattatctttttttttttctctttctgttaaactgagaaagaactaccccctgtcctaactctgaacatgggccatatggccatagcagcacttcctggggtaggcagctatgatattcaacaagtcaggtgtgactcctttcccagatcagatagcttagggacctcacagtcaaccagatggtatgcagtcatgtcacagggcagtagtgggtagttgatgctgatgagctaccttttgtatttactatcatctggtttgagtgtrtgtgtgtgtgtgtgtgtgtgtgtgtgtgtgtatgtgtgtgtgttttctgaatgccaaagcctccatacccaggacttcttgccatcatcaattcagaaagaatttcttgagctcccacttagtgttgtccctgcactccgtggaatacctagaattacaagacaagggcctagcttgcaaggagtcaccacgaaataattagaacttcaaggccaaagggatagatcagtgagggatggaatagagggcagaccaggtgagcttgcattt

SEQ ID NO: 489242 - DNA, 649 bp, Homo sapiens
atgtcttattgatcccagcctgcatgctggccctacagcatgcagcctcagatgagagagagaagaaatcagtttggatcctagagtgcagaactgtttccaggtttactggattatctttttttttttctctttctgttaaactgagaaagaactaccccctgtcctaactctgaacatgggccatatggccatagcagcacttcctggggtaggcagctatgatattcaacaagtcaggtgtgactcctttcccagatcagatagcttagggacctcacagtcaaccagatggtatgcagtcatgtcacagggcagtagtgggtagttgatgctgatgagctaccttttgtatttactatcatctggtttgagtgtgtgtgtgtgtgtgtgtgtgtgtgtgtgtgtgtatgtgtgtgtgttttctgaatgccaaagcctccatacccaggacttcttgccatcatcaattcagaaagaatttcttgagctcccacttagtgttgtccctgcactccgtggaatacctagaattacaagacaagggcctagcttgcaaggagtcaccaygaaataattagaacttcaaggccaaagggatagatcagtgagggatggaatagagggcagaccaggtgagcttgcattt

SEQ ID NO: 489243 - DNA, 649 bp, Homo sapiens
atgtcttattgatcccagcctgcatgctggccctacagcatgcagcctcagatgagagagagaagaaatcagtttggatcctagagtgcagaactgtttccaggtttactggattatctttttttttttctctttctgttaaactgagaaagaactaccccctgtcctaactctgaacatgggccatatggccatagcagcacttcctggggtaggcagctatgatattcaacaagtcaggtgtgactcctttcccagatcagatagcttagggacctcacagtcaaccagatggtatgcagtcatgtcacagggcagtagtgggtagttgatgctgatgagctaccttttgtatttactatcatctggtttgagtgtgtgtgtgtgtgtgtgtgtgtgtgtgtgtgtgtatgtgtgtgtgttttctgaatgccaaagcctccatacccaggacttcttgccatcatcaattcagaaagaatttcttgagctcccacttagtgttgtccctgcactccgtggaatacctagaattacaagacaagggcctagcttgcaaggagtcaccacgaaataattagaacttcaaggccaaagggatagatcagtgagggatggaatagagrgcagaccaggtgagcttgcattt

SEQ ID NO: 489244 - DNA, 621 bp, Homo sapiens
gtgaaccaattcactgtacatgcactaacttctcaggggacagactccccagaccccttggtggtcagtccatatcttttctctgactaacacctactcaaggagtagacagtgtacctagygagtaattgaggagtgtttttgtttgtttgtttttttgagacggagttttgctggtatttcccaggctggagtgcaatggctcaatcttggctcgttgcaacctccagctcccgggttcaagtgattgtcctgcctcagcctccagagtagctgggattacaggcatgcaccaccacacctggctaatttttgcattattagtagaggaggtttctccatgttggttagcctggtatcgaactcctgacctcaggtgatccacccgccttggcctcccagagtgttgggattacaggcatgagccaccaggcccagtttgaagggactttattaaagaaagtatgggcagatttagcggaaccgaaaaggtgtggtgagccgcaggaactggcccagtgggaagtcttcatttcacataagcctataggggcaaccagaggagcaggcagtggttctcttggagctttggctgtgggaaggagctgcctgagaggcagc

SEQ ID NO: 489245 - DNA, 621 bp, Homo sapiens
gtgaaccaattcactgtacatgcactaacttctcaggggacagactccccagaccccttggtggtcagtccatatcttttctctgactaacacctactcaaggagtagacagtgtacctagtgagtaattgaggagtgtttttgtttgtttgtttttttgagacggagttttgctggtatttcccaggctggagtgcaatggctcaatcttggctcgttgcaacctccagctcccgggttcaagtgaytgtcctgcctcagcctccagagtagctgggattacaggcatgcaccaccacacctggctaatttttgcattattagtagaggaggtttctccatgttggttagcctggtatcgaactcctgacctcaggtgatccacccgccttggcctcccagagtgttgggattacaggcatgagccaccaggcccagtttgaagggactttattaaagaaagtatgggcagatttagcggaaccgaaaaggtgtggtgagccgcaggaactggcccagtgggaagtcttcatttcacataagcctataggggcaaccagaggagcaggcagtggttctcttggagctttggctgtgggaaggagctgcctgagaggcagc

SEQ ID NO: 489246 - DNA, 520 bp, Homo sapiens
gcatcttccacaacatttggtattgttagctttttgcacctgttttgtttttaattttagctattctgataggtgtgtagcaatatctcattgacatttcaatttgcattttcctaatgttaggacacggaacgctttttcaagtgcttccttgtcatctgtatagcgtattcgctgatatgtcggttcaaatcttttgtttattttaaacattgggctatttgtatttgtgttattgaatttggagagttctttatatattctggatacaaatctatcacatatgcagtttataaatattttctcaacagatagttactttaatacaatttgtcctcctctttggatttcaaataccattcccacttctcaccattaggctgrcagagttagaggaacatgaatactttagtcttgattttctagaagacagaaactgagacacagatatacttttaaaaacctgctgcttcttgtatcacagagaattggagccaggtatgggacttgatcactgaga

SEQ ID NO: 489247 - DNA, 318 bp, Homo sapiens
ccactttgcagggctggcatttcagtgcactgttagtcctcagccgtgcaaatgttccaaatcacagagaaggacatttaatctgttcagtgatctgtggaaccgcttaggaactggaaaaggaattacagggatgagtcatyctctgtcagcaggtgaactgtaatggagtttttattactattttatttatgtgtttgtccaaaaaaatggaaataatgcaccagagccccctgatggctgtttcttcactgggctctgcctgtgggtgtgtgtgagatgtgtgtgtgtgtgtgcattggtgtcacagatctcacg

SEQ ID NO: 489248 - DNA, 652 bp, Homo sapiens
ctgaaagaggcattttttggyaggcaggaggacctccccaggacttctggggcagccctgctggaggctgcctcctccaaggtcagcgagctggtcaaaagggagacagagcaagcacacctgtgccctgggcccatcctaccacttcattctcagcccagtcccataggctcaccttcccagggtggtgtgctccttccatccccttattctctcatttaccttttgtttcagtctgcaaatattgaccaggccctactatgcgactggagactgcctacgtgcattgaaagttccagagacccagcaataacttagggattgatatagcttgactgtttgtccccctcatatctcatgttgaattgtaatccccagtgttggaaggggggcctagtgggaggtgattggatcatgggggtggatcccttctgacttggtgctatcctcatgatagtgagtacttgcgagatctggttgctagaaagtgtgtggtacctcccgctttctgctttgtctctctctgtctctcactcctgttcttgccatgtgatacccctgctaccttctcaccttctgccatcagtaaaatctccctgaggcctccccaaaaaccgagctgatgctggtcccatgcttcatgtatagactg

SEQ ID NO: 489249 - DNA, 652 bp, Homo sapiens
ctgaaagaggcattttttggcaggcaggaggacctccccaggacttctggggcagccctgctggaggctgcctcctccaaggtcagcgagctggtcaaaagggagacagagcaagcacacctgtgccctgggcccatcctaccacttcattctcagcccagtcccataggctcaccttcccagggtggtgtgctccttccatccccttattctctcatttaccttttgtttcagtctgcaaatattgaccaggccctactatgcgactggagactgcctacgtgcattgaaagttccagagacccagcaataacttagggattgatatagcttgactgtttgtccccctcmtatctcatgttgaattgtaatccccagtgttggaaggggggcctagtgggaggtgattggatcatgggggtggatcccttctgacttggtgctatcctcatgatagtgagtacttgcgagatctggttgctagaaagtgtgtggtacctcccgctttctgctttgtctctctctgtctctcactcctgttcttgccatgtgatacccctgctaccttctcaccttctgccatcagtaaaatctccctgaggcctccccaaaaaccgagctgatgctggtcccatgcttcatgtatagactg

SEQ ID NO: 489250 - DNA, 652 bp, Homo sapiens
ctgaaagaggcattttttggcaggcaggaggacctccccaggacttctggggcagccctgctggaggctgcctcctccaaggtcagcgagctggtcaaaagggagacagagcaagcacacctgtgccctgggcccatcctaccacttcattctcagcccagtcccataggctcaccttcccagggtggtgtgctccttccatccccttattctctcatttaccttttgtttcagtctgcaaatattgaccaggccctactatgcgactggagactgcctacgtgcattgaaagttccagagacccagcaataacttagggattgatatagcttgactgtttgtccccctcatatctcatgttgaattgtaatccccagtgttggaaggggggcctagtgggaggtgattggatcatgggggtggatcccttctgacttggtgctatcctcatgatagtgagtacttgcgagatctggttgctagaaagtgtgtggyacctcccgctttctgctttgtctctctctgtctctcactcctgttcttgccatgtgatacccctgctaccttctcaccttctgccatcagtaaaatctccctgaggcctccccaaaaaccgagctgatgctggtcccatgcttcatgtatagactg

SEQ ID NO: 489251 - DNA, 694 bp, Homo sapiens
tcttattgaatattaaggtccactataatgagaatgatcaagtaatccattgtccataatacacgtttgagagtgaaaaggggactagtaataattatgcttggacaagtgagagctcagcaaaccaagcaaactggtacataaggtcaccttatttttaataaccatatttacatttcaaagccacagtatcagtgactcctgactgttgattttatcaccgatacaggaaaaagtgacataattaaaaacagaaaaaaataggcctatgtgcaattttgagaaaaatgtaaaattcctaattcaataattgatagaaccaataaaatgctgcaccggtttttcctgtctgaagctcatttctcatattttgcatggctgactaaagcactctaatcaattatgttttcttagcatattgtctcatcctaaacaaacttccttaagaaatcatttataggagccaaaattgactaatattttcccatgtttacattctgcatagaatgcattagagttagatatttttgttatttatttaatcactgctagtcactcccctgctcaaatgtaagcycctgagagcagtattttctgccttcctaactgttgttccccaattttttgaccagtgtttcaaaaagaggatgtacacaataaatatgtcttgaatgaatagatgcctgaatcaaca

SEQ ID NO: 489252 - DNA, 499 bp, Homo sapiens
tttccatgctaaactgcttgggctccacagattcaagctctgccactgcctacttcttgggcagttccccctgtgaactcaaatctcaatgggggttgtgtgcattcctgcagttagaaccctggtgacccatgttgagagtgggctgctgtgcatttatttcacacaccccttccttaggagtcattcaggaacgggaacaagtcctggtactcagcaaacccatgtggggtttccggcttccttccccttcggcctcaatgccygtgttgtctgtctatctgctcagtaaattctctctgaagatctatccagagtatgccagtctactcaatattctggtctctcttggtgggagaagttcttcatgcctgcttgacaatttctttaacagatatgggatatgataattttttcttatttgtgttcatttccataagaattgtttttatagaaatttgatcatttgggctgtgttgttagataaataggcacataa

SEQ ID NO: 489253 - DNA, 499 bp, Homo sapiens
tttccatgctaaactgcttgggctccacagattcaagctctgccactgcctacttcttgggcagttccccctgtgaactcaaatctcaatgggggttgtgtgcattcctgcagttagaaccctggtgacccatgttgagagtgggctgctgtgcatttatttcacacaccccttccttaggagtcattcaggaacgggaacaagtcctggtactcagcaaacccatgtggggtttccggcttccttccccttcggcctcaatgcccgtgttgtctgtctatctgctcagtaaattctctctgaagatctatccagagtatgccagtctactcaatattctggtctctcttggtgggagaagttcttcatgcctgcttgacaatttctttaacagatatgggatatgataattttttcttatttgtgttcatttccataagaattgtttttatagaaayttgatcatttgggctgtgttgttagataaataggcacataa

SEQ ID NO: 489254 - DNA, 459 bp, Homo sapiens
aactgtttcaagaaggagaaagaagaatttgacagtaccttgagacatgtgcctagaaattggcacactgtcgtttctaccgtattttagagaagagtacagagacctcatcccttgatttttttttttttttttttgagacagagtctccctctgttgcccaggctggagtagagtggcatgatcttggctcactgcaacctccacctctgaggttcaagtgattctcctgcctcagcctcccaagtagctgtgattacaggtgcatgccaccacacccggctaaattttgtattttttgtagagacagggtttggccatgttggccagtctggtctcggactcatgacctcaggagatccgcccacctcggcctcccaaagtgctagaattataggcgtgagccactgcrcccagccagacctcatctcttaaagagagaaatgcaatgaatttgta

SEQ ID NO: 489255 - DNA, 540 bp, Homo sapiens
cagagatgataccccttctgatcactactgtcctcacagagtaatacagttatctttcttggaatgtagcaacgtgtaaccaatagaattsctgtaacatgcactggtcttgtgtgggaaatgttgtaatcctgctaaaatttatctgtctctgcctatataagtgaaaccttaacttctttattttggaacactgacccaatttgaggttggtgcttcacaggtgatcaccctcaagctttgcccttcaataaactctaaacttaatcatattttctgaatcttattatttaaggttaacatacttattttttgttttcatttttaccttcacagatatttatggttttatagctggtcctttttgggttgccaatttattttcttactgcatttcattaggctggattactaaggtttgttttaaggctttctataggaataagtttttaaattccttgtgagtagctaaaaagaaagcttttattaaagtgtaacattttcaaatatatccacgaatcaaccttattagtcattgta

SEQ ID NO: 489256 - DNA, 560 bp, Homo sapiens
taagtgaaacatggtatttgttaaaacctcagcaatttagtacttcctatccaagaatagtagaggattgattaagtatgccagagaactcgctggctagtgaggaaaatgcatgaagctattgagaccccatatttacagacatgcgctcatgaggctatgaatgtatacatttatactgagtcatataaaaatactcaaagtctacagtgcatatgtgttcgtcctggtgcccggaattctgtggacagagaagtgctctgttctctgcagagcctgtcactaactcactgtttgagtgtcagcaggctgctgcggcctcaaacwgtggtgtcaaaggataaaactagttatcagcaagatgcttggagggtctcagagaataatcttctttctctctaatattattgcacaaacatcggatgtgcatgatattatttgttaatattccacgtaattttaaggattgtgggcgcatgcagacacacacaccctacccacatacataggcaaattgaaaatgagccaggatgcttatatgcatggcatttcaataacct

SEQ ID NO: 489257 - DNA, 560 bp, Homo sapiens
taagtgaaacatggtatttgttaaaacctcagcaatttagtacttcctatccaagaatagtagaggattgattaagtatgccagagaactcgctggctagtgaggaaaatgcatgaagctattgagaccccatatttacagacatgcgctcatgaggctatgaatgtatacatttatactgagtcatataaaaatactcaaagtctacagtgcatatgtgttcgtcctggtgcccggaattctgtggacagagaagtgctctgttctctgcagagcctgtcactaactcactgtttgagtgtcagcaggctgctgcggcctcaaactgtggtgtcaaaggataaaactagttatcagcaagatgcttggagggtctcagagaataatcttctttctctctaatattattgcacaaacatcggatgtgcatgatattatttgttaatattccacgtaattttaaggattgtgggcgcrtgcagacacacacaccctacccacatacataggcaaattgaaaatgagccaggatgcttatatgcatggcatttcaataacct

SEQ ID NO: 489258 - DNA, 632 bp, Homo sapiens
atgtattacaggcaaattagaaatgttggcactacaaaggacctgtagaaatcatctatttactgagactttcattttagaaatgagagctttgagtactgaaattgtcagaacagaataagctattttaaattactgtatatttggttttaagtgaaacacaaatgtcttttacattcttttaagagttggaagggaggttaaattttttagaataataacatattctaatttttttccagtgcatctgggggaggtgttgtagccattgacaacaaaatagaacaagcaatggtaagtaaaagtttacagtctcccatttcatagattgttgaagatatggcacacttagcttttgtcagttttagaaaaacaaataagttatttaaaccaaagatgaccaaatcatgttttttgataatgagatttagttgaagatgctagaacgttgagaacttttagtctagaaatactatttaagtagatatttcttccatttgaatatctcacatttcatgcattatcattgataagggccattggtgagggggcatacatatttaaagacaatatgttccccagatatttcagcattgaaaatactttagagygaaaaagagtattaaagcaaa

SEQ ID NO: 489259 - DNA, 526 bp, Homo sapiens
ttctatttcctttggtatctgtgtcttgattcttcacgcagaccaattttgttatcatcttaatggtctttcccataaggaacccactaagaggtttcagtgttgggacattagcttaagaacctaggtagtcagcacgagaacctaggtctgtgggactctcctattaatgactcctcttacctaccattctccagccagcgttgtctcctgttcttctcmcctccccctattccatcctgccccgagtagtctattcgtgctaaagcattcactgagaaaaactgtaaagggagagtcccttctcagaaacaccagcttcttttaaaatggaacttttgaagacctccctgttctgttctctggagagagtgaacaagtagagacttggcaatagctgtggaaacaccgccagcctcttgcttccagcaaccttgagttccaaacctgtgagtcttagttttatattcactgacttcagcttcctgaacccatcccagttcagcattaggtaatggctgtgatg

SEQ ID NO: 489260 - DNA, 582 bp, Homo sapiens
gacagatataactcaatgtgtctcaatataagtgtcataaaataaaaggcctgcttgtttaaaacaggctctgatgaagaaggcactttaactgtgccatccggtaaaagagattaagtggaatcctgtttgtgagaggaaaaataataataccaataatgctgttctgcttaggccttaatacgatgacaacagcacgtcaacttctctttcagcatgaaaacatgctacagaaataggtaagaaaagtaaycatcgggattagaagcctaagcctatggaaaggaaaaaaataataatgtcagatgtagaaggaagaataggactgtgggtactgacactgttctttttccctccatgttcaggctaaagagtagtcttcattggaagtcacctttgaaaacagaacgtcacttttgtttagcactgcaatactcttcaccactctccacttgggttctccctgttttgcacactgtaagaaaatgaattaaccaattaattagccccctgtggctgagttcttaaactctagaaggggtacagagagatcctacctaccctatggatggcagaaatggc

SEQ ID NO: 489261 - DNA, 506 bp, Homo sapiens
gggtgaaatagtgactaaaatctctgaaaaattaccatgaagcaacatcccatgtgctgctatctcaggtaaaagaataaagttttcctaaattgatgttttttgcttttttaaattgcagttatcatttcctttattagttaacatggatcacaatttcctttttgtgttatcaaatattgttgaaggcttccatccactccctgcacacattattgaacgatgctccactgttgtactattcttcatttcaaaaagagctgggatgaaaacaccctaatgctcatactgtaagaatttctgaggatacaccctccctaagggatactgaaaagaaagggaagttgtttgttgttctaattttttttttttttttaagagagagaaggtctcactctggcgcccaggctagagtatgttagagtgatcatagcccactgcaatctcaaactcstgggctcaagtgatcctcctgccaaagcctccagagtagctaggactacagg

SEQ ID NO: 489262 - DNA, 559 bp, Homo sapiens
actttgacatttagggtggggttgggaggctgagtgtaagccagggctcctgaatctgattgtcttcttggccagctagtgcctctttttacgcttccattgagtacctggaggagcaaattagaagagagcacagagttgtgtaccttttgacctcttgcattttgggagatgttttattgtgtgtatgaatttgggtcagaggacacctgcagcctccaaaatggtgtcaccctgtgtgaaatgcccaattccagatctgtcccccttacaatcaggcttgtccacctcatgtgtttctggagattgtgctgatgrgtgctttagcccgagctggtctgtgatttcaaacgagtgatgcgtggtttctgggcattggagtgtcttcaattctggaaccttgaactgactgagaacatctgacattctgtaggtgtaactaaggaccctagagctggcgctgttctatgctaattctgcggtgttcccggaatatggtggggaaatcatctctgttctgctgagtctgtttgctagctggtctgtgaaatgtgccttt

SEQ ID NO: 489263 - DNA, 581 bp, Homo sapiens
ctggagtgaacagggagaggctgagggaggtcaggagggcaggacacccacctcctgaatcttcaggaccccttgctctcccttayccaacaggcttgaacctgaataggggcattcctgaccccatggcacttcccctgccccccacctgcctagagccatgggcagtgggcaaagctggaagaaaccctcgtgcacagcttcctcaaagctgtacttatcctatgccatggctgtcctggccacaccttctgggggactctgccacctgtgtgcacacctaggggaccaggtgcacacggtctgtcctccagctcctctcctgcctgcctcctggcaccttaagtggaggtggtgggagctgggaccagtgcagcacccttgccagccatggtgggggaggacagccagtgtctcttcatggagatcctgcagcaggtggtggcatgccccagggtcccgtctctgtctacctacctgggtttgggaaactggagtcagaacctttagtgattgcgatctaggaaggacggtagtgtttgcaaaccacgtgagcacaggagtgagcaaggtccaacccc

SEQ ID NO: 489264 - DNA, 609 bp, Homo sapiens
gagaggctgagggaggtcaggagggcaggacacccacctcctgaatcttcaggaccccttgctctcccttatccaacaggcttgaacctgaataggggcattcctgaccccatggcacttcccctgccccccacctgcctagagccatgggcagtgggcaaagctggaagaaaccctcgtgcacagcttcctcaaagctgtacttatcctatgccatggctgtcctggccacaccttctgggggactctgccacctgtgtgcacacctaggggaccaggtgcacacggtctgtcctccagctcctctcctgcctgcctcctggcaccttaagtggaggtggtgggagctgggaccagtgcagcacccttgccagccatggtgggggaggacagccagtgtctcttcatggagatcctgcagcaggtggtggcatgccccagggtcccgtctctgtctmcctacctgggtttgggaaactggagtcagaacctttagtgattgcgatctaggaaggacggtagtgtttgcaaaccacgtgagcacaggagtgagcaaggtccaaccccgcccctgttccctgggccgtgaggctttgggccctgtggctc

SEQ ID NO: 489265 - DNA, 621 bp, Homo sapiens
gttactgggtggcctgcactgggttctaaaaagatttggttttgggccaggcgcggtggctcacacctgtaatcccagcactttgggaggccgaggcgggcatatcatgaggtcaggagtttgagaccagcctggccagcatagtgaaaccccgtckctactaaaaatacaaaaattagccgggcatggtggtgggcacctgtagtcccagctactcgggaggctgaggcaggagaatcgcttgaaactggaaggctgaggttgcagtgagctgagatcacgccactgcactccagcctgggcgaaagagcgaaactctgtttgagaaaaaaaaaaaaaagatttggttttaaagtcaatgttgacaaacttgcagatttcatgtaaaaacctggggctctgcctctctcgagaaattggaagctctggctctttgtggtcccttcaagacaggcaggtgtccccggggctccccataaatcgctgtcctaacccctgccctccctcctgccagctccctgtctggcctgggcagcgtctgagttgaggacttgggaacaggacaagttacggagccacgttgctttgctgggtctgagccggggtgtgacgtagtccctg

SEQ ID NO: 489266 - DNA, 621 bp, Homo sapiens
gttactgggtggcctgcactgggttctaaaaagatttggttttgggccaggcgcggtggctcacacctgtaatcccagcactttgggaggccgaggcgggcatatcatgaggtcaggagtttgagaccagcctggccagcatagtgaaaccccgtctctactaaaaatacaaaaattagccgggcatggtggygggcacctgtagtcccagctactcgggaggctgaggcaggagaatcgcttgaaactggaaggctgaggttgcagtgagctgagatcacgccactgcactccagcctgggcgaaagagcgaaactctgtttgagaaaaaaaaaaaaaagatttggttttaaagtcaatgttgacaaacttgcagatttcatgtaaaaacctggggctctgcctctctcgagaaattggaagctctggctctttgtggtcccttcaagacaggcaggtgtccccggggctccccataaatcgctgtcctaacccctgccctccctcctgccagctccctgtctggcctgggcagcgtctgagttgaggacttgggaacaggacaagttacggagccacgttgctttgctgggtctgagccggggtgtgacgtagtccctg

SEQ ID NO: 489267 - DNA, 516 bp, Homo sapiens
gactgcaggcttgctaccacacctggctttaaaaaattctttgcaaggctaggtgcagtggctcacatctgtaatcccagcattttgggaggccgaggcaggcagatcacttgaggtcaggagttcgagaccagcctggccaacatggtgaaaccctgtctctactaaaaatataaaaattagccgggcatggtagtacatgcctgtaattccagctactcgggaggttgaggcaggagaatcgcttgaacccgggaggcggaggttgcagtgagctgagattgtgccactacactccagcctgggcaacagagcgagactctgtctcaaaaaacatttttttatttttgtaaagacaaggtcttgctacgttgtccaggttggtcttgacctccggggttcaagcagtcctctcgccctggcctctcaaagtgctgggattacaggcgtgagccactgcacccagccacacmccccatcttgagactgccccctgagtggctctggttagctggg

SEQ ID NO: 489268 - DNA, 454 bp, Homo sapiens
atattagctatgggaccctgggctagacgtctggcctcactgagtctcagcctccttgacttctcccataaactgcttttcctctgcttcaccctctcggtaacttgtaatattattctctgagctgcccaagcaaaaattctgggagttatgaaagattcactccccatggtggactgatggccaaaacagcctaaatctctcaccttctctgtacccacacccttggcccaacaagaggtggagkccatttccccactccttgaatctgggctggccatgggactgcctttggccaatagcatgtggctaagtgacagtgttccgctctttctgtgttttcgggttttggctcactcctttgcacctctgcatttccatgagagcatgccctagctagcctcctggaggatgagacatggagcagtgctgagtccacctggcacctcaggct

SEQ ID NO: 489269 - DNA, 555 bp, Homo sapiens
ctgaaaagtcacttcctcctgaaagttctcctggaccctactcacacaagcatgcacacacacacacacacacgcgcgcgcrcacacacacacacacacacacacacacccttttaaaggtgctctgctctgaggtcccttcccctgagccacagttcccttccccactggctgctgagctgtggaagggcagaaatgagatccttcaggctcacccttgtacctctcacctctaacacaggcccgacacaaagtaggcattaatagacaggtatttattaaaggaatgaacattgccataaagagtttagcgcaactccaggcacttgactggcatatgataaattcatatctactgagagacagcacagtgcagtgcttaagtgcccctcgcaggagcaatcctgcctgggtttgaactccacctgagcctctattagctgtatgaccctgggtaggtcacttaacctctctaaacctcagattcctcatctataaatgagaatcctgataataacaacctgacatagttgtgagaattaaagaagttgatgt

SEQ ID NO: 489270 - DNA, 554 bp, Homo sapiens
tgaaaagtcacttcctcctgaaagttctcctggaccctactcacacaagcatgcacacacacacacacacacgcgcgcgcgcacacacacacacacacacacacacacccttttaaaggtgctctgctctgaggtcccttccyctgagccacagttcccttccccactggctgctgagctgtggaagggcagaaatgagatccttcaggctcacccttgtacctctcacctctaacacaggcccgacacaaagtaggcattaatagacaggtatttattaaaggaatgaacattgccataaagagtttagcgcaactccaggcacttgactggcatatgataaattcatatctactgagagacagcacagtgcagtgcttaagtgcccctcgcaggagcaatcctgcctgggtttgaactccacctgagcctctattagctgtatgaccctgggtaggtcacttaacctctctaaacctcagattcctcatctataaatgagaatcctgataataacaacctgacatagttgtgagaattaaagaagttgatgt

SEQ ID NO: 489271 - DNA, 688 bp, Homo sapiens
gtcacttcctcctgaaagttctcctggaccctactcacacaagcatgcacacacacacacacacacgcgcgcgcgcacacacacacacacacacacacacacccttttaaaggtgctctgctctgaggtcccttcccctgagccacagttcccttccccactggctgctgagctgtggaagggcagaaatgagatccttcaggctcacccttgtacctctcacctctaacacaggcccgacacaaagtaggcattaatagacaggtatttattaaaggaatgaacattgccataaagagtttagcrcaactccaggcacttgactggcatatgataaattcatatctactgagagacagcacagtgcagtgcttaagtgcccctcgcaggagcaatcctgcctgggtttgaactccacctgagcctctattagctgtatgaccctgggtaggtcacttaacctctctaaacctcagattcctcatctataaatgagaatcctgataataacaacctgacatagttgtgagaattaaagaagttgatgtgggcacagtgctcaacgcctgtgtttgagaggcagaggtggaaggattgcttgaagccaagagttggagaccagcctgggcaacagagcgagaccccatctctacaaaaataaaaattttaaaaaaattagctgggcatg

SEQ ID NO: 489272 - DNA, 590 bp, Homo sapiens
cagccactcctaccaggaaaggagtctcctttgcccagtggtttcagagtaaaacacaacagcagcaacacagttgagcatcatgggactcctttgagtctggtgctcaattttgaacccatgaccctgtcttgtgacaccaagtatgcttagtatgcttcttaccaaggcctgggccacaccctcactgctggagcctgccatccaaaacaagacctgaggctgagaaagatgtagttcctcaagaaggtgcggatgctgtgctcacaagtgggaagggaagcgctgtttttatagtacacacagtcaatgtccactagggcaggtatcagccagcccagcttcyacacttcactaccctttattctttccccatactttacggtatctgacatcaacaagcacattgaaaaagtggagacatgggtgttatgaggctcatgttatgtgtagaagatttggacctctgtctgcagatgccctgggttctggggctctgcctggaacacagggctcctgagacgctggcagcatcctggtggatgagtccagaatttggattttgcaggggtctcagatcctcagcagca

SEQ ID NO: 489273 - DNA, 550 bp, Homo sapiens
tgcctcctgtgattgtgccatttatctaaagctgcggccctcctgcctcctctcacgtcatcttgggcatttgtttcccagagctgctataagaaattaccacaaactaggtggcttaaaacaacagaggttcactatcttgcagttctggaggccagaatctgcaatcaaggtattgacagcattctggtccctctgaagccactaggggagaagcctttcccaccccctgtcagcttccggtggctgccagcaaccccttgcattctttggattatagccgcatcactccaatctttgcctctgtcttcaggtggctgtcttctcccttgggtcacagtctctgtatcttttcycttcttagaaggacactagtcatattggattaagagtccacctcactcaagcatgagatgaaacttcagcatctgcaatggccgtgtttttaaatcagatcacaccctgaggttctgggaaggacttgaatctggggaggacgctatcccaaccagtacacggtgtgttattgtttgttttgtagaatgtaacg

SEQ ID NO: 489274 - DNA, 550 bp, Homo sapiens
tgcctcctgtgattgtgccatttatctaaagctgcggccctcctgcctcctctcacgtcatcttgggcatttgtttcccagagctgctataagaaattaccacaaactaggtggcttaaaacaacagaggttcactatcttgcagttctggaggccagaatctgcaatcaaggtattgacagcattctggtccctctgaagccactaggggagaagcctttcccaccccctgtcagcttccggtggctgccagcaaccccttgcattctttggattatagccgcatcactccaatctttgcctctgtcttcaggtggctgtcttctcccttgggtcacagtctctgtatcttttctcttcttagaaggacactagtcatattggattaagagtccacctcactcaagcatgagatgaaacttcagcatctgcaatggccgtgtttttaaatcagatyacaccctgaggttctgggaaggacttgaatctggggaggacgctatcccaaccagtacacggtgtgttattgtttgttttgtagaatgtaacg

SEQ ID NO: 489275 - DNA, 590 bp, Homo sapiens
tggggactggagcaaactagagtgtgtccaggtagaagggcagcagctatgaaatctgggtatttgttctcataaagaagtcttgtatttcttagccttccaattttttaaacaaaccctaaggcctagatttttaaatgaaatcacctaagtagcaagtgttagcaagcaattcaatcaaaaagsggggggaaaggccactatggaggccaaaccaaaaaaaaaaaaagagcctgtgatcagaggcaatcactgattcacaaccgctggtgcactgcaatctgtcagtttgtctttaagaatctgaaatttccaaacagtgtaaatgagaacaagacagaactctggtgcatagactcatgcaggtaagctgaacaaaaacaacaaagtcaagaaacagttccagacatccagagttaggcctaagcagaccagaacacctttttcctctccctcaacctagtcattagcagggataatggatccttgaccccagttgtatttttgcccaaatcttccccaatatttgtgggaagtgtgaagattcagggggaggtaaagttgggcagcctgatcgcccctttccttca

SEQ ID NO: 489276 - DNA, 590 bp, Homo sapiens
tggggactggagcaaactagagtgtgtccaggtagaagggcagcagctatgaaatctgggtatttgttctcataaagaagtcttgtatttcttagccttccaattttttaaacaaaccctaaggcctagatttttaaatgaaatcacctaagtagcaagtgttagcaagcaattcaatcaaaaaggggggggaaaggccactatggaggccaaaccaaaaaaaaaaaaagagcctgtgatcagaggcaaycactgattcacaaccgctggtgcactgcaatctgtcagtttgtctttaagaatctgaaatttccaaacagtgtaaatgagaacaagacagaactctggtgcatagactcatgcaggtaagctgaacaaaaacaacaaagtcaagaaacagttccagacatccagagttaggcctaagcagaccagaacacctttttcctctccctcaacctagtcattagcagggataatggatccttgaccccagttgtatttttgcccaaatcttccccaatatttgtgggaagtgtgaagattcagggggaggtaaagttgggcagcctgatcgcccctttccttca

SEQ ID NO: 489277 - DNA, 517 bp, Homo sapiens
gcaccgcagcccggggacttagggcctgggagggaaggatagaagatgagccggggctgggagtccgagggctgccgcggctcccctcgacggggacgtgtgagcaccgtgaggctgggcgaggagggggcaggaagcgggcctggtgactcccctcttgtgaagtgcgaggcgcagcccccagaacctggcgggccgcgggccctgggcacacgtcgggcagccgttcccggtgcgcatccggcgcacgcgcgccaagcgtgtgcgatggacagacaccctctccgaacactccccgctccctgggctgcattgagarggcctgcagtcagtctccaaagcgctttgtgcgctgggaatgttgaaagaaggcaagatgatggagaagcttctgcgtgaagcgcgttcgtgcgcgcgactttcccaaatctacttctgtgcacctgcttttcttccctgtgcgagtgtgtcactctgacccatttaatctgttggattaaaaatccctggaaaaggt

SEQ ID NO: 489278 - DNA, 449 bp, Homo sapiens
gctgccctcggaccctcgagttcagcccacagccgggctccactggacctgtcgagttgggggaccagcgccacgttgggacgcggctgcctgggacgctgagtctcgacgtggcgcgcagatggcccggacagaccagggctgttctcaattggaaagtagggtagccaggaggccgcttctgctcgargcctggggagcctggagggatctaatatgcgaggttcttgggtgcacgtctcggtctggaggttcatcccctgggctgtgggcgccccccccccccacccgccggcgtgactgagtccctaagagccgcctggcccttccctgtcctctttctcgccgcccgcagtccgacgcagacaggtcgatagctggttaatgcagaaggagcatctccgaggctcattattgttttttcttttccttctgaaaaaagctaaatt

SEQ ID NO: 489279 - DNA, 624 bp, Homo sapiens
atttacaaaatagaagtagtgagaaaggaagaagtgaagggaacggaccggagagcaaaagccctcgtgagaaagggaaagagaaggggagaggagaaaggagagtttcatagcgtccagggcagtgcaggagcccgaagcagcggaagcgatcctggggggaagaggagtgcggagaggggaggggagaggaagggcgaggagggggagtgaaaactagaggagggcgaaggaagcgaggcgcgacactgctggggagaggagggcagtgaggagcgaggagcgggcagaggcagctccggcggccgagaggagggagcgcggcgcagagaggaggggcttgcgccccgtagaaatgtcaatcagagcccggagccccgggaatctccgccaatctgttcggacctgacctggctcctcgccgccgccctcgccgccgccgtcgccgccgcggagcagatcaataggcgaacgcggagcacagcgcagcgcgggcggcagcgcggccccaagcccggcccagcccccgatgcgcgccggagcccgcgggcggcgctgagctgggcggcccgggggtcggsccccctctccgtccgtgccccgcgggccaccatgtccttcccc

SEQ ID NO: 489280 - DNA, 537 bp, Homo sapiens
ggtaagagcccgcggagccagggaaggaggggttggcgctggggcgcagggcgagctgagcgcgcgggggccggactagaggggtgcaggccaggaggggggaggcagcgatggctggggctcacycgcgctccctccgcgcgtgtcccttccttctccatgtgcgtacagggcgcgcagtatgagctgaaggacagccccggggtgcagcatccggccgcggctgccgcgtttccgcacccgcaccccgccttctacccgtatggccagtaccagttcggggacccgtcccgtcccaagaacgccaccagggagagcaccagcacgctgaaggcctggctcaacgagcaccgcaagaacccctaccccaccaagggcgagaagatcatgctggccatcatcaccaagatgaccctcacccaggtgtccacctggttcgccaacgcgcgccggcgcctcaagaaggagaataagatgacttgggcgcctcgcagccgcactgacgaggagggaaacgcttatgggagcgagcgcgag

SEQ ID NO: 489281 - DNA, 516 bp, Homo sapiens
acagactcctcctgcctggatggtgggtgcaccctagtcaagcctgaggcccgcagsagcctggctggcccacaggctggcagtggactggtctggccacccgaggcccctgctgtgcccctagaatccacagctccacaaactgagcagaagtgcttgtctcccttcctcacacctctggaataagaggcccaggctccacatagcggggttttctgggtttggtacattatttatcactggagcatggaagctggaggctccatgtgaaccagccccactgatttctctccaccgccccactttgcttgatgctgggacgctgaggaaaagtgtctgaagccagatggcgtccacctcagtgctggtgaggcccatggagcgggagagctggcctggactgttgggtgtccgggggcctctgtttctatttcttagagtggctttaaagttttctttgtccatatttttgtttgccccttccttcctcccttcctgtctttagggtgaatggct

SEQ ID NO: 489282 - DNA, 614 bp, Homo sapiens
ttatttgaagagtaagggtgcccttttattctattttaaatgctaaataccactagatttaatttctagttggaatagccttactaatttttaaccaagtaagatttttgttattattcaaatgtaggcgatttggtttaatcccattcttagtcccatgggagttgaggttttgttgtcttctgttgtcattaggccagtcaaaatactaaatatttcacttgcataatctttttttttttctttttttgagatgggagttttgctcttgtcagccaggctggagtgcaatagcccagtctcggctcactgcaacctctgcctcctggttcaagcaattctcctgcctcagcctctcagcctcctgagtagctggaattacaggtgtgcaccaccacgcttggctaatttttttgtattattagtaragactgagtttcaccatgttggccaggctggtcttgaactcttgacctcaggtgatctgcccgcctcggcctcccaaagtgctgggattgcaggcatgagccacagcgcacagctcacttgcataatctttttacctgctatcaattattggtaactttacatttaattgcctagtcagcctgctc

SEQ ID NO: 489283 - DNA, 639 bp, Homo sapiens
tggtggctcacgtctgtaatacagcactttgggaggccgaggtgggcagatcatgaggtcagattgagaccatcatggctaacacagtgaaacctcgtgtctaatacaaatgcaaaagattacctgggtgtggtggcatgygcctgtagtcccagctacttgggaggctgaggcaggagaatcgcttgaaccttggaggcagaggttgcagtgagccgagatcacaccacagcactccagcctgggtggcagagcaagactccaagaaagagaaaggaagaaagagaaagaaaaaaagaaaagaaaagaaagagggagggaggaagggagggaaggagggaaggaaggaaggaaggaaggaaggaagaaaggaaataaagtcaaacctcaagactcctgcaatttctccatgttatgcacattaaaatgaattttgtatgccttttctcctattagtctgccttttgtcaggtgatttttcagtgaaaattcagagggcaaaagcaccattttctcttggcccgcagagttttggtgctatcagcagagtaaccaatactgctctgctcttctggaagccacagttaaaggaatacaggacttgactagcaggcaaaggtacgaaattcttagcaatcc

SEQ ID NO: 489284 - DNA, 638 bp, Homo sapiens
aaggctcaccccaggtgttcagaaggtttcccatttggcccaataataaasctaccaaagacatgtccagtccaacatacttctgcattccgaccttaccagctttgtcaaaggccaggtgattcagaaagtggactccggagactcaaaagtggctgatggagttattttccagtagatcactatcctcattgcttggcttataggaacctgttgctcaacacttttgtccatccttcttttgtagctataacagtgcagatgacaactggcttcaggaaagaggatgtctacaattgctttttcttcctatgtgatttttttttttcagaggagttcatcttccttccaggaaacacactaaaggactttgaagaaggctgttacctgctttgtaaatgtgaggagaacattctagttacagataaaggaaatatcatttagaatttttaataggactctttacactttcgtggaatgttatcagataatttgcaaatacttcttgagcaaagaagagaactactttacttagaaatagtacttggctgcagttagaaaatacatgtcagcttctcaatcaaggtgcctctcagtgttacgatgtattatcttctgatgtgcagaaaaatgcctta

SEQ ID NO: 489285 - DNA, 585 bp, Homo sapiens
ccaggtgttcagaaggtttcccatttggcccaataataaagctaccaaagacatgtccagtccaacatacttctgcattccgaccttaccagctttgtcaaagrccaggtgattcagaaagtggactccggagactcaaaagtggctgatggagttattttccagtagatcactatcctcattgcttggcttataggaacctgttgctcaacacttttgtccatccttcttttgtagctataacagtgcagatgacaactggcttcaggaaagaggatgtctacaattgctttttcttcctatgtgatttttttttttcagaggagttcatcttccttccaggaaacacactaaaggactttgaagaaggctgttacctgctttgtaaatgtgaggagaacattctagttacagataaaggaaatatcatttagaatttttaataggactctttacactttcgtggaatgttatcagataatttgcaaatacttcttgagcaaagaagagaactactttacttagaaatagtacttggctgcagttagaaaatacatgtcagcttctcaatcaaggtgcctctca

SEQ ID NO: 489286 - DNA, 549 bp, Homo sapiens
cactgaaacctagtcaaatcaccatttttattccttcaaggatatcgttgataattcaagaaaaataagcaaaaaacaatcaaacttgctagataaaagactgaaaataactttctattcactctataaaacaggataatccaaaactgtcatgagactacacagmcaaatactttagaaaacaaaaagtattatggaagtgtttcaataagttaattaattaaaaatatgctattcttttggactgtgtgatatttgtaatcttttcagtttgtaatctgctatgatttcttcattcattttaaataaaagattttggtcatgcaaatttgcattcataatttgtattattaaagaaggcttcactcatattgtaaaagattccttttataaaaggagaaatacacctcttctaggatatcttccaaaaatgcaaaaattaggctctttcaagtttttgaggatgaatattaactcaggcaactgaagttgaaccagaaatgcagagacagtaaacacgaggagaaaggtaaattcatgccgcatgtt

SEQ ID NO: 489287 - DNA, 627 bp, Homo sapiens
tgtcttttataggatgagagttgctttggattcaagtgaatacagacaaagtgcatttaaagcagtgggtcaccatcactgtaaataaaaataccacttttatcaaatgatttcacaacttctctcacacagatgtctaatgagtaatcaaagaacagcaaagctgggtgtggtggcgtgcacctgtaatcccagctactcgggaggctgaggtgggaggatctcttgagccaggagtttgagtccagcctgggcaacatagtgagactcattttttttwaaaaaaagaaagaacaatagtttgaagttaggttctctggtgttttgtgtgggtgattaaggctggatcctgaacttctctgagtagcactcagagagatagatgttcacattcctcatttgctcttttgtccaacttcttccccagtctcctcacagttggccctgcgcacaccttccttacccccaatggtgtatcagaagcaatgctcacgtatttctaggtgatgtcatagattgcttttttagatggaaaaacagggtaagtttttgacttctcagatgactgacaagattaaatctggactaaaaagagaactttcttttgtgaaaacaggctataattgt

SEQ ID NO: 489288 - DNA, 357 bp, Homo sapiens
gggtgggtcagggctgtacctctgcattccagctctacccccacccccaggttcagcaggacaaggtgaggacagctattttcttgtcccccaaactaaaatatactggaaaatcagcaagcctctttttagccattttatatcttcaatccccctcccccaatccttgtttaatattgtaatcagaaacaattttataatggtaagggcctgcctatgaggtgtacctcgagggttcctgaaatcccagttctgtctcggagctctgtagagccttctggaacctccaccccagaaggaaaagcaccagagtcactaacccccmaccccaccccagtgctggttgctacttcctga

SEQ ID NO: 489289 - DNA, 661 bp, Homo sapiens
ctgggctcttgcagcccatttctgtgggtacctggaactaggatgaacttgcctgcaccagtgtagacaagagctacagcagagaaagccttcayctcctcctatataaactgaggtatttaagtgggtggccccaagagtttcacatagtcaaaagtttctgctggacttggtttccccattggtgacccactgtgctttgaaactctgggaaaatgctttctgctccctagaggtccttcagaacagagagagatgtaaaggattttgtagatgatggcttggaatagagaatgttttagagcactgggcgctgaatctaggattcaggagcaggactaggatgtgttggatccttgaggtcttcattgggaggtggcaagaaatcactgccctggattaggtgaggatgtgtcatgagggaactggatgcctcaaggggaaaagggaagactttgaagtccctcttactgaccctggaggctacagatcctactccaaggtccgctgggaccctggagagctattaccttgaggaccactgaatgcagatgcctgttttgttctgtgatgcttctgcttggggctgcaatgctagtgcgggccaccaggcggcagcaccctcttgtgtccctggtacccagtgaggtttgctggagca

SEQ ID NO: 489290 - DNA, 508 bp, Homo sapiens
tgtgcaaatgcattcaggagcacttttatcacccaaatatagctattggggaaccggtgggctaaaatagtggcaacattttctagactccaattttcccattggtaatttgcaggatgacgagtcataatttcacggtaatcctgcacattcccggagaaagagaggacgtggcggctgcgrctcttccttcacccactccccggagatgtcccgccgctccagtcccgccttggtcgccgccagcaggagcaactccgtgctacgcggcccatcggctccggggatggcgaacagccacaggctctgaggcggcgcctggcgacggattgggagcatcgtgcaccgccgctgctgctggtttcatggttctgtcctgagagcaggacaaggcatctccaattccaacgtgaggcagcaggagcagcagccgccgcgaccgcaaagacccgagctgtttggaggtggagggtagggagtcctgaggttgggactgctgcaggacgcc

SEQ ID NO: 489291 - DNA, 515 bp, Homo sapiens
ttgttttctctaaaataaacctatcttgactggcaagccaacttccgtgtctctttcctctttaattcttacaaacatgtcaaaatttgtttatatgtcaaataaattttatgtgacattatgttatcaatatataatgatattataagttacatttaaatcctatttacattcagacaattttattagaaagtgtctgtctaccaccctatatttttgggggttccactatttgcacagccagcacacctgggaaaacacagactcacccagcacaggctcttccctgaatctttctcttcctcagggcatcacttcatcagtcaaccaagtcatttgacagtggagaccgagtactccctaacacaaaaggtctcattcctgcatgcttttctcagaagtcggggaaacaagaaggtgtttttcggggacactagctgggaaatacactaagccttctacagttygagggctctaaccagcagatacagacttctcagtaggaatggataagg

SEQ ID NO: 489292 - DNA, 652 bp, Homo sapiens
aacaccatgttctgtcagatacaggacttctcattgatccagagcctcatcacwcacacaagaccagaggctttcacaggcatgcactgctatgcaccctcccacacaagctcagccctgagcatctgactctgaaggcgactaatgaacatgtgccctagtactctaatttatggggattttgttttctcttaatgatcgtttccagagttttagggtctttcctgagtccacctaccacacacagatagactgggagatttggacagaagcttcgatcctcactctaagccctggcctgtcccatcagcttctctagaagtacaatattctaattacccctgagggacaacatgtcagggcaactttctgtgccaataatttaataaaactgagaatagaaacaggcaaaaatttctgctgagggctgcatctaaggatctacttgccagacttatatctccattttacacaaatattggcaaatgtaattttatctctagatgaaaaatcaaagaagcaaccgcagttcacagaggaaggagaaaatggaatcaatgttctatagaatccagcttacctcagccatggaagtcttctcagaaaaaaaagcaattgttctctatcatcagaaacaactgttgcctcagac

SEQ ID NO: 489293 - DNA, 556 bp, Homo sapiens
tgatgactccctggaatgaaatacgtctgtaagaaagtgtgcatgagagacagatgtggggtggataggtatggaatgaatctgtcaggcactctgccaccatgggaggcaacaccgtctatgaaatgggtgggggcatattcagcaactgattttgagcatcagtggtgagaagaagagcaatgtgcaggtgccattatgaggcaggaaagaatattccctgcagaagagcccagaagcctaargaaaaagagtgagggcagtagcagatttggtgtccctgttttagaaaagaaagtcctgggcctgcctgggcacctggatcttagttccagttgcagggtctttgtataccactgaaactctgtggcttgtatctgcttcctcttgttttggggataccaccaaatccaggaggttcacctccataaactcttggacagagggagcagatccatgaggaaatactgaagttttgcctggaaaaggccaacaattttctaaagaacacaacattgagataggccaaccagacaatagaggaagaaaggaatgg

SEQ ID NO: 489294 - DNA, 543 bp, Homo sapiens
gtctgtatttacattctatgaaaactatttagttacacaaaattctctgactcaaatttatttcccttaaaagtctgttatgattttgataacatagaaagacttctctaattttattatatgtttatttagcagctgttcttttgagagcttagtgattatataatttgttatttattatttattttgtaagttttcttcataggacagttctgattgcatccacccttccatttattttttctgtaacatgctgaccttctttagctattttctccattttctttttagcactatcaatatacgtttcccatttmcacttgtattgtttattcaaatcttctgtttgtaaccctgctatcattttgtctttacatataatcttgagctttcactatccttatgattttctgcttttatttaaaacaaagattaagtcattttctttttgattcctactgttgatcatttccagagttatgtttttcccattgagtccatcgtgccttcagaatgacttgctgatctcatttctgcagcatt

SEQ ID NO: 489295 - DNA, 672 bp, Homo sapiens
aactacttcttttactttcgacattttaaatgagtgaaatttaataaaacagtagccagttgacacacacaatatttttcccagtccttacaaatgtggtgtaayatgagtatcaatataaaagtcaaatggcaacacactaagtttaaatcacatgcttttcttttgaagataagactttcaatgtacttaaattcaaggctgaaaatgttgataattctgaaagtaagattaatagattaagtgatggcgagacaagaagtctatcagaccacaagttaggatatgacaattagatgccattttccttagcaacttcacttttaacgctactatgaaatgaataaaatagtgtgcttccatatttaatattatagttggaaaataatttacaataaatggaagctataccagcagtgtccacagttaccattatcacttcatagaagagatttttcccatcaaaattttagcatgctttaccaaatatttattttgtagtgagtatggaatgactaatgacaaaaagattttgaaaatgtcttattctttctctcatacaataagatgttctatacaaaaaggaaagtaaaaaatttgagaagacgacaatgtgaaatacctgatagacctcaatcatctgtttaagagcatgtttagtgcattttgtgc

SEQ ID NO: 489296 - DNA, 601 bp, Homo sapiens
aactacttcttttactttcgacattttaaatgagtgaaatttaataaaacagtagccagttgacacacacaatatttttcccagtccttacaaatgtggtgtaacatgagtatcaatataaaagtmaaatggcaacacactaagtttaaatcacatgcttttcttttgaagataagactttcaatgtacttaaattcaaggctgaaaatgttgataattctgaaagtaagattaatagattaagtgatggcgagacaagaagtctatcagaccacaagttaggatatgacaattagatgccattttccttagcaacttcacttttaacgctactatgaaatgaataaaatagtgtgcttccatatttaatattatagttggaaaataatttacaataaatggaagctataccagcagtgtccacagttaccattatcacttcatagaagagatttttcccatcaaaattttagcatgctttaccaaatatttattttgtagtgagtatggaatgactaatgacaaaaagattttgaaaatgtcttattctttctctcatacaataagatgttctatacaaaaaggaaagtaaaaaatttga

SEQ ID NO: 489297 - DNA, 564 bp, Homo sapiens
gtgtaacatgagtatcaatataaaagtcaaatggcaacacactaagtttaaatcacatgcttttcttttgaagataagactttcaatgtacttaaattcaaggctgaaaatgttgataattctgaaagtaagattaatagattaagtgatggcgagacaagaagtctatcagaccacaagttaggatatgayaattagatgccattttccttagcaacttcacttttaacgctactatgaaatgaataaaatagtgtgcttccatatttaatattatagttggaaaataatttacaataaatggaagctataccagcagtgtccacagttaccattatcacttcatagaagagatttttcccatcaaaattttagcatgctttaccaaatatttattttgtagtgagtatggaatgactaatgacaaaaagattttgaaaatgtcttattctttctctcatacaataagatgttctatacaaaaaggaaagtaaaaaatttgagaagacgacaatgtgaaatacctgatagacctcaatcatctgtttaagagcatgtttagtg

SEQ ID NO: 489298 - DNA, 520 bp, Homo sapiens
ctttttagtttctccaaaataatgcatagaaagtaarttttccagctgggtatcctgagacatttgacaatcttatgctaacttggatgtgaaagtatgctgatgcaggtgttgcaatcttgccaatgcaccttaatatagcagtttcttgcttgaaactatatataaatcaacttgcataaagcggcttagggtaatttcactgacagatgttgaaagtactaagaaaccatagtacttgcacagtttagtactggtgcaagaaaaaaaaatttgactaagataatgaaatagaaggcacaaaaatgtatgttgtgtgtgagagagagataatagaaaatggtttataacaaatagggaaagactgtgccacatagaaagtactgttgagaaaaatagcaactctttctacagagaagagtacagctatgttaccaatttattccaaataatgttgcacttgacatgtattaatgccacgaagatgcaagaaataataagcataagatgatagaaaaca

SEQ ID NO: 489299 - DNA, 520 bp, Homo sapiens
ctttttagtttctccaaaataatgcatagaaagtaaattttccagctgggtatcctgagacatttgacaatcttatgctaacttggatgtgaaagtatgctgatgcaggtgttgcaatcttgccaatgcaccttaatatagcagtttcttgcttgaaactatatataaatcaacttgcataaagyggcttagggtaatttcactgacagatgttgaaagtactaagaaaccatagtacttgcacagtttagtactggtgcaagaaaaaaaaatttgactaagataatgaaatagaaggcacaaaaatgtatgttgtgtgtgagagagagataatagaaaatggtttataacaaatagggaaagactgtgccacatagaaagtactgttgagaaaaatagcaactctttctacagagaagagtacagctatgttaccaatttattccaaataatgttgcacttgacatgtattaatgccacgaagatgcaagaaataataagcataagatgatagaaaaca

SEQ ID NO: 489300 - DNA, 520 bp, Homo sapiens
ctttttagtttctccaaaataatgcatagaaagtaaattttccagctgggtatcctgagacatttgacaatcttatgctaacttggatgtgaaagtatgctgatgcaggtgttgcaatcttgccaatgcaccttaatatagcagtttcttgcttgaaactatatataaatcaacttgcataaagcggcttagggtaatttcactgacagatgttgaaagtactaagaaaccatagtacttgcacagtttagtactggtgcaagaamaaaaaatttgactaagataatgaaatagaaggcacaaaaatgtatgttgtgtgtgagagagagataatagaaaatggtttataacaaatagggaaagactgtgccacatagaaagtactgttgagaaaaatagcaactctttctacagagaagagtacagctatgttaccaatttattccaaataatgttgcacttgacatgtattaatgccacgaagatgcaagaaataataagcataagatgatagaaaaca

SEQ ID NO: 489301 - DNA, 627 bp, Homo sapiens
atgcactatgaataattctgtcttaacaacccaagtttaataagaacaaataattcttttttttcatattgagaattgaaagaatgttctttggtctaacattctaaaagtggttttctatattgaacaagagagaatgatattaaaactgagtaatggattgatgcacttctttttctatggtggtcacmttttcaaaaacaattgttctctggtaatctcttaaaactacaatatttctatcaggtaaagttatacctttattaaccatcataatctggctcttgtttatattatacttgtacttcctgctataatgtcaaatatttgaaaacatggctgagatataagtgatatttaatctttttctattagaaattattttaattatgcagataaaggtaaaagttttaaagtaacagtatactcacatacaccttcaataaaattgttaaaagtaaacataatgtttaatttttttcagtgaattccaagattaaaatagctgctggaatcataaaaagtaaataaagccatgcatttaattgcctccaatccactgtataacatcaactcaatacataaattagctatatttagcattatttccaccaacaaattttgatg

SEQ ID NO: 489302 - DNA, 627 bp, Homo sapiens
atgcactatgaataattctgtcttaacaacccaagtttaataagaacaaataattcttttttttcatattgagaattgaaagaatgttctttggtctaacattctaaaagtggttttctatattgaacaagagagaatgatattaaaactgagtaatggattgatgcacttctttttctatggtggtcaccttttcaaaaacaattgttctctggtaatctcttaaaactacaatatttctatcaggtaaagttatacctttattaaccatcataatctggctcttgtttatattatacttgtacttcctgctataatgtcaaatatttgaaaacatggctgagatataagtratatttaatctttttctattagaaattattttaattatgcagataaaggtaaaagttttaaagtaacagtatactcacatacaccttcaataaaattgttaaaagtaaacataatgtttaatttttttcagtgaattccaagattaaaatagctgctggaatcataaaaagtaaataaagccatgcatttaattgcctccaatccactgtataacatcaactcaatacataaattagctatatttagcattatttccaccaacaaattttgatg

SEQ ID NO: 489303 - DNA, 627 bp, Homo sapiens
atgcactatgaataattctgtcttaacaacccaagtttaataagaacaaataattcttttttttcatattgagaattgaaagaatgttctttggtctaacattctaaaagtggttttctatattgaacaagagagaatgatattaaaactgagtaatggattgatgcacttctttttctatggtggtcaccttttcaaaaacaattgttctctggtaatctcttaaaactacaatatttctatcaggtaaagttatacctttattaaccatcataatctggctcttgtttatattatacttgtacttcctgctataatgtcaaatatttgaaaacatggctgagatataagtgatatttaatctttttctattagaaattattttaattatgcagataaaggtaaaagttttaaagtaacagtatactcacatacaccttcaataaaattgttaaaagtaaacataatgtttaatttttttcagtgaattccaagattaaaatagytgctggaatcataaaaagtaaataaagccatgcatttaattgcctccaatccactgtataacatcaactcaatacataaattagctatatttagcattatttccaccaacaaattttgatg

SEQ ID NO: 489304 - DNA, 473 bp, Homo sapiens
taggacccatgtgaagataatccttttctctaccacttctgtttaataatcaaatatgttactgtgaaagcccagctatrtttttatagtatcctctctgtagtgacacattctgaagtcctatggaattatgacaatgagtgtctatttagactgaattacggtatgcaagagaactgacacttgacagatttgctatttgaaataccactttattaagtttatgataatccacttttatcttttaagacctatcaatctctttcagaatacaaataggtagattaaatgatggtattataggcataaccactctaaaacttttaaatcttggatgtgattctaacattatgattgccccagggtagggcagtaagcctgcttacttgtttgatagggaagataatttctaagcacatattcttggctctttataccaaaagtttctttatgccaaggatcatggaaccaat

SEQ ID NO: 489305 - DNA, 473 bp, Homo sapiens
taggacccatgtgaagataatccttttctctaccacttctgtttaataatcaaatatgttactgtgaaagcccagctatatttttatagtatcctctctgtagtgacacattctgaagtcctatggaattatgacaatgagtgtctatytagactgaattacggtatgcaagagaactgacacttgacagatttgctatttgaaataccactttattaagtttatgataatccacttttatcttttaagacctatcaatctctttcagaatacaaataggtagattaaatgatggtattataggcataaccactctaaaacttttaaatcttggatgtgattctaacattatgattgccccagggtagggcagtaagcctgcttacttgtttgatagggaagataatttctaagcacatattcttggctctttataccaaaagtttctttatgccaaggatcatggaaccaat

SEQ ID NO: 489306 - DNA, 473 bp, Homo sapiens
taggacccatgtgaagataatccttttctctaccacttctgtttaataatcaaatatgttactgtgaaagcccagctatatttttatagtatcctctctgtagtgacacattctgaagtcctatggaattatgacaatgagtgtctatttagactgaattacggtatgcaagagaactgacacttgacagatttgctatttgaaataccactttattaagtttatgataatccacttttatcytttaagacctatcaatctctttcagaatacaaataggtagattaaatgatggtattataggcataaccactctaaaacttttaaatcttggatgtgattctaacattatgattgccccagggtagggcagtaagcctgcttacttgtttgatagggaagataatttctaagcacatattcttggctctttataccaaaagtttctttatgccaaggatcatggaaccaat

SEQ ID NO: 489307 - DNA, 473 bp, Homo sapiens
taggacccatgtgaagataatccttttctctaccacttctgtttaataatcaaatatgttactgtgaaagcccagctatatttttatagtatcctctctgtagtgacacattctgaagtcctatggaattatgacaatgagtgtctatttagactgaattacggtatgcaagagaactgacacttgacagatttgctatttgaaataccactttattaagtttatgataatccacttttatcttttaagacctatcaatctctttcagaatacaaataggtagatwaaatgatggtattataggcataaccactctaaaacttttaaatcttggatgtgattctaacattatgattgccccagggtagggcagtaagcctgcttacttgtttgatagggaagataatttctaagcacatattcttggctctttataccaaaagtttctttatgccaaggatcatggaaccaat

SEQ ID NO: 489308 - DNA, 540 bp, Homo sapiens
acatttaagagatcaattgagttttagttacgatttctctcccttgtacyccttgatctatcctgtgattatcagttctgaaatgcttaatagaaatagacatacacattaactgtcaagattcttacatttgtgcctcgatgtatagcatgaggattaatattgtagcaaaaaacaaaaggaaaccataagatcttccttaatctgccaaaatagtaaatcttagcacttgcatttctgggaaacaatgtagatattggtgctactatgaaaacttaaaagaagcaggtgatagtgattcataccacattcatactcaacatacctttttgaacaatgaaaaagagagatgtatcttgcataatgagggtgaattattgtaaacttaaataggtgatgacttcaattgcagttgttgtgccagatagagtttcattgctggaacaaataaatacattatttagcacatatatacaactgctaaatagaaaaacatttttttctatagctgtaagtaaacatcatgaggacaatttcttt

SEQ ID NO: 489309 - DNA, 651 bp, Homo sapiens
aacagacagtagttcttgccttattggaactcactagccactaataattcagatatttaaaaatgagcaacattgcatgtaattatgtaatgacatagtgctttaaagaagagactggtaacataaagaacataattagtcgcttctctggaagatgggagtcaaggctttttcctgaagatattatctaggcagcaatctgtgtgataaatagtcattagagtcatggagtaggtgtggaggagtataacgggcagagatcaacatggtggggacacttgtgttaacaaaaagagaataatagcttcccttaatcaggaaaatgaaagaaagtaattaaagagagagcttagtaagtagttaccaagagagttgtgcaaaatgagacctgagaagtgggcaggaggcagatcatataaaggctcacagcttccttagttgtttttgcattttcttacaaatccaccataaatttattaaaagactttaagcaattgggtgctgaggatcaagtaaaaacatgaagtcattcattagcctattggttagtaagtagatttaaagagattagcagataaagaaaaaaaaaaaaatcccaaamccaacccaaacaaaaacctgttaaaaggcttcttacaaggcattaatcaa

SEQ ID NO: 489310 - DNA, 631 bp, Homo sapiens
agctcatatctttacagagcaccttattgactgagaagatattcctaaatatattacaactgtgttatttagatattttctttgcagttcaatttcaaattaacttttttctttagcagtttgaaaagggtgatcgtaagggattgttagcagatgttcccatttaaaaatcaaccatcaaaaattagacatatattttattctaaaacttttttgtactacctagaaaacatatgttaattaatttcatgtaaaaatataaaatcacatgttttatatcccattcctattaatggttttattactttaatacttacatgtctgaaaaaaaaaccttattttacttgggaagctatctgaaatgatatgcatacataaaggcatggtttagctcagtcacttaacatctcatcatttatttcttcagagtttatcactcctgtatattttagcactggtcctttagtgcagaaaaatttttcttcatgactatttggtctagaatcaaaccatctcctcatattatttgtgtttggttacaatgcagtttaaacagtgtgctcaactactagtagcttagttacagyttgtccatctgtaattcaatattcccagtaaaatttattagaaa

SEQ ID NO: 489311 - DNA, 357 bp, Homo sapiens
tttgaccaattttatttaaggaaaaaaaaaaatcatgcattatggctcctggacgtgagatctgcaaataaatcctgcttggatcagcggaaccaacaggcgaaaaaaatgttgactattcatcgtcgcatttaataagttgcattaatgtatatttcaaggcgagagagagagagattatacatgtggtgcgtagatgccgatgaaaagaaagaggtggatggggaacgggatgcactataagcgggatgggtaggtaaagtgagacgtagaagcatttcgaaccgagggtaaataacccaagtggaatagctgttgaggatttaggarctacaatcccccctccctttccttttg

SEQ ID NO: 489312 - DNA, 603 bp, Homo sapiens
ccctgttcccaggccaggctcccacgcccggatggacaaaaggctcacaggccacactggtcccggagccgctgtgaaacgcaatggagggggacagtctcctcgccgcgctctggtgcgtgtgtgcgcgcgcgcgtgtgtgaaacacgtgcactcggtgcgggcctccggccgcagacgtcacctgaggaagttcacccccggggttcccaggccctgaacccgccatcccctccatgtcgcctcagccgcccccacctgctacccaaatcccgggrcacgcccggacaggtgtgcagcctctaactggaaagctcccgggaaaagagccacgccaggaaaggaggcggctggaggagggggtagggatagagaagagagatggtacttccagagctcagacgtccctatcttccgagaaattgtcatcacactcaatctttacaccctgatctacggtatccaaaaagcagacattgattcgcggaaaaatcgagttctcgaaaatacagggatttgacgcggactcctgagacctgcgcaggcgttgcttaggttcaaaagtatgattttaattttcttaatgaaggcgcgctctagagc

SEQ ID NO: 489313 - DNA, 603 bp, Homo sapiens
ccctgttcccaggccaggctcccacgcccggatggacaaaaggctcacaggccacactggtcccggagccgctgtgaaacgcaatggagggggacagtctcctcgccgcgctctggtgcgtgtgtgcgcgcgcgcgtgtgtgaaacacgtgcactcggtgcgggcctccggccgcagacgtcacctgaggaagttcacccccggggttcccaggccctgaacccgccatcccctccatgtcgcctcagccgcccccacctgctacccaaatcccgggacacgcccggacaggtgtgcagcctctaactggaaagctcccgggaaaagagccacgccaggaaaggaggcggckggaggagggggtagggatagagaagagagatggtacttccagagctcagacgtccctatcttccgagaaattgtcatcacactcaatctttacaccctgatctacggtatccaaaaagcagacattgattcgcggaaaaatcgagttctcgaaaatacagggatttgacgcggactcctgagacctgcgcaggcgttgcttaggttcaaaagtatgattttaattttcttaatgaaggcgcgctctagagc

SEQ ID NO: 489314 - DNA, 518 bp, Homo sapiens
cagatttcacatctcctatcagaatttcctaaggtggtttaacttaatttttagaaatagaaatgatggcatttctattttctatttccactttcacaatgcagataaagtagcaacactatcaaaaaataacttggctgggcacggaggctcacacctgtaatcccagcactttgggagaccgaggcgggcggatcaccagcctgaccaacgtggagaaaccccgtctctactaaaaatacaaaaaagtattagcygggcatggtggtggatgcctgcaatcccagctactcgggaggctgaggcaggagaatcgcttgaacctgggaggcggaggttgtggtgagccgagatggcgccattgcactccagcctgggcaacaagagtgaaactccatctcaaaataataataataataataacaaaacaacaacaacaacaaaaccttaatttagtacttggtttaactgccacagattctttagagtcaggtaacgtacaaataaacaaaaagcaa

SEQ ID NO: 489315 - DNA, 610 bp, Homo sapiens
ccctctgttacctaatcttgtatataagtrgagatttaaaaagatgtgacccatatttgagaagagtcttctgaggaacaattagataacatagaagagtacttagatattttttaaagaatggtatgattagaacacagtcaatattgtttttcttggcttagttagaaccaattgaaaatagtatcttctatcttcccctgtgggccaattccttcattctggatggctgaggactgcaccattaaccctcatacgctcttggaaaatgagtggcactgcttataaaaaaagatcaaaaaaagaaagaagggaaagaaagaaaagcaaaataaaataactcacagttcatgtctaaatgatcatagattattccattataaacattttaaataaaaacaaacaataactaattatataactcttctgtcttcctcaatagactggaaactccatgagggcagggttgcaactctggtttgctgatgtctctctagcgcttagcattataaatatttgcagacatattaccaatcaaatattcatatcaatataagaaatctctcaacttaaagacatgttacttacatgtgtctcattcttttcaaca

SEQ ID NO: 489316 - DNA, 612 bp, Homo sapiens
aataaattggaaacttacggactaaaagaaartacagacataaaattaaaagtattcttggcaaaaaataagggtacatgctgataatatgtttatagtttacttaaatattaatatgtggcttttttttcctaatttggacaaaaaaatcagagaatattcagaaaaggcttttcttagcttgggtaaacaagttgacctcagcagaaaatagtctaatcatctctgtactatatttgcttctattcatcaactggacaaaagaaagagaaataatggtggacatatttagaatataaacatgtgaaggtatacaccagccatatttttttaatccatttaagcagtaagatttgatagaaagcaatagctatttcttattcctcctgatttgtatattagaaattagtagtatatctttatattcttagaaataaataattctgtatttgcaaaaaaatatttcttacaaggatttaggaagccctgaaaatggctgtctccacaaaaacagaaccttaaaaggacaaatttttaatgcagctaaattcaactggtatgaaccactatggccagcaactgctttgattagttgagcattcattctgacag

SEQ ID NO: 489317 - DNA, 544 bp, Homo sapiens
tgctgctcttttatgtagggtagccagggagagcattttgagaaggtgacatttgatcatagacaagtgtagtcagagccagctaggaaggcaggatggcaaggagcccagagccctactgcagagtgagaggggctcagtggaaggatgggggctggagaagtagctggtgccagaccatcctgggcctgtgggtcatgttaaaggatgtaagtactaacatggtgtctggcacatagtaattaagcacataataaatagtagctatttatttattcatactgggtaaatacagtcataaatcagaatcattccttgtttccattgctctgtcaygtaatgggagttttctacatcaatcctgtcatcctcacatagcgatatcctaacacattttaaacgctcatgatatcactagtatttgtaaatataaatattttgtgatgtgtggttattcagcatcttattttcctgttggtgggtcttaaaagtgattttttaaaagggtatgttaattgaatgaggtgagataggatgcaaaaaa

SEQ ID NO: 489318 - DNA, 544 bp, Homo sapiens
tgctgctcttttatgtagggtagccagggagagcattttgagaaggtgacatttgatcatagacaagtgtagtcagagccagctaggaaggcaggatggcaaggagcccagagccctactgcagagtgagaggggctcagtggaaggatgggggctggagaagtagctggtgccagaccatcctgggcctgtgggtcatgttaaaggatgtaagtactaacatggtgtctggcacatagtaattaagcacataataaatagtagctatttatttattcatactgggtaaatacagtcataaatcagaatcattccttgtttccattgctctgtcatgtaatgggagttttctacatcaatcctgtcatcctcacatagcgatatcctaacacattttaaacgctcatgatatcactagtrtttgtaaatataaatattttgtgatgtgtggttattcagcatcttattttcctgttggtgggtcttaaaagtgattttttaaaagggtatgttaattgaatgaggtgagataggatgcaaaaaa

SEQ ID NO: 489319 - DNA, 614 bp, Homo sapiens
ccatcaaaaggtaaacagaaaaacaatttgtggtatatccatacaaaggaatactactcagcaattaaaagcaatgaactattgacacatacgacatgaattatctcaaataattatgctcactgaaagaagctagacaaaaaatatatatgtaatatgaattcmcgtatatgaaattctagaaattgcacacttaactattatgaccaaaagcagatcagtgattgttggtcatggaggttaggagccatggggaaggattaaccaaggaaaataaggaattttggggggagtgatggttatatttactatcttgattgtggtgatggtttcaagagtgtatatgtttgtctaaatttgtcatgtatgttttatttatgtgcagtttattgcatgccaaccatacctaaataaagcacatttttaaaaggataaatagaaaacacaaattaatacagtagacatgtggaatgggtatccttgtttgcctttccagattcaccatctgtatatacttttctaccctgctgtgtggcctggacaaaatcagagacttccttgctctcttgtttctgaagagtagaagatcagaaagaagaaaagtgaggttgagt

SEQ ID NO: 489320 - DNA, 671 bp, Homo sapiens
taaggaaaacagtatggaatttcctcaaaagattaaaaatatatcttccatatgatcaaacaatctcatttctgggtatatatccaaaagaattgaaatgaggatctcaaagagatatctgcactcccttgttcattgaagcattattcataatcrctaagatacataaacaacctaaatgtccatcagcagataaatggataaagaaaatgtggtatatgcatgtaatggaatattatcctgcctttaaaaagaagtaaattctgcaacatgtgacaccatggataaaccttcaggatattatgctaaggaaccttctgagtagtagaaatgttctaagtctttatctgtttggtagatggctctctgtatctatgtatttgtctatataatgtattatcgtaacgtataatatatgtaaaaatgtatcgggttgtacacttaagcttgatgctctttccttacatatgttatgcctttatttaaaagaatatgaagaagtcataaatttgaaaattaaagaaattgaaccagctatttaaaatttgcttatgcagaaaaacaggttcaggcaaaattctaccaaagaaaaatacacttcaattattatgcaaaacagtagttcttcagtgtattttatgggtctaatatcattttagtacctaaactag

SEQ ID NO: 489321 - DNA, 640 bp, Homo sapiens
attttgaaaaacagttccactttatgacatttagttgcattaaatatttagttctgttgtgttgcattatactgctgtgcgatgaaattaaatgcaaactacaatttgaatgtctgcaaacattggcaagaatctgcagctaaatttaggtrtaagatttgcagtgtctgttgttttttttttttttttcttttcatctttgatgggtaaagtataaaaatgtttaggaatttgacccgctttctttttccctctctattttcaggtttgcagagcatgccaggggactacgtttctcagggtggtcctatgggaatgagtatggcacagccaagttacactcctccccagatgaccccacaccctactcaattaagacatggacccccaatgcattcatatttgccaagccatccccaccacccagccatgatgatgcacggaggaccccctacccaccctggaatgactatgtcagcacagagccccacaatgttaaattctgtagatcccaatgttggcggacaggttatggacattcatgcccaatagtataagggaactcaagggaaaaggaaacacacgcaaaaactattttaagactttctgaactttgaccagatgttgacacttaatatga

SEQ ID NO: 489322 - DNA, 646 bp, Homo sapiens
tgatcagaaaactctaagactaaagactaaaagagtcttttaaaaatagatccaggccagatgtagtggctcacacctataataccagcattttgggaggctgaagcaggagggttgcttgaggccaggagttcaagaccagcctgggaaacacagccagactccatctctacaaaaaatttaaaaattagccaggcatgatggtgtgtgcctatagtcccagctacttgggaggctaagggaggaggatcacttaagcccaggaggtcaaggctgcattgagctatgatcgtgccaccgcacttcagcctgggcaacagagcaagrccttatctaaaataaataaataaataaataaacaaatttattttttaaatttaaataataaataaaaaactaatttattttttaaatttaaataataaattttaaaaataaaatcaaggtaagtgaaacaagccagatacacaaggataaagactatgattccacttgtatggggtccttagagtagtcaattcatagagacagaaaatggaatggtgggtgccaagggctgggagtggggatatagggagttagggtttaatggagacagagtttcagtttgagaagatgaaaaatttctggaggtggatggtggtga

SEQ ID NO: 489323 - DNA, 646 bp, Homo sapiens
tgatcagaaaactctaagactaaagactaaaagagtcttttaaaaatagatccaggccagatgtagtggctcacacctataataccagcattttgggaggctgaagcaggagggttgcttgaggccaggagttcaagaccagcctgggaaacacagccagactccatctctacaaaaaatttaaaaattagccaggcatgatggtgtgtgcctatagtcccagctacttgggaggctaagggaggaggatcacttaagcccaggaggtcaaggctgcattgagctatgatcgtgccaccgcacttcagcctgggcaacagagcaagaccttatctaaaataaataaataaataaataaacaaatttattttttaaatttaaataataaataaaaaacwaatttattttttaaatttaaataataaattttaaaaataaaatcaaggtaagtgaaacaagccagatacacaaggataaagactatgattccacttgtatggggtccttagagtagtcaattcatagagacagaaaatggaatggtgggtgccaagggctgggagtggggatatagggagttagggtttaatggagacagagtttcagtttgagaagatgaaaaatttctggaggtggatggtggtga

SEQ ID NO: 489324 - DNA, 383 bp, Homo sapiens
tgctccttagaaagctctggaaagtggtatgttcgcagtcagaggacccatggacaagcctcacccttccacagccttccagggagccagtgatgtgtgcgactgtcatccgcattttcatgggttatttttgttgcgatgtctaggggccaactctatgcaaaagagagaaaagtatcttgcacaactctggsctgccctgattcaggagaagcacagaaattcttgacaagtttaactctgtttaaaaagaatgtgtggaacttgcaaggcactaaaagtgtgcactgtcccttctcagaaagaactatgaattctctctttcattattatttaaggaactgctattacctaagagactatacttctgctcaaactgaagt

SEQ ID NO: 489325 - DNA, 609 bp, Homo sapiens
tgcaccagccctcgagggggtaattttgttgcccctggcaagtgaaaggattatcctcagtgttgattgtccttttttgtaatcctcctgctgttctgttctgttgtgctgtgcaacattttgctacatagactattttatagcagaaagctagaagaatatttattatgaatattaaagcaatagtgcatcaatgaaaaggcggagacattaggaattgtgtaaatgcttagattcacttttggtggattttttgtactttatttataactaataaaaatgaactgcattgctaactacaccttatgcctgctgggtgtttattttggtgtgtacccagggcatgtcggaggaagcctcgccaggcctctgtctttgtccaagataagaggcrctatcagttatctatctagctctcaccaacttgccttgttctctctcctttttctcttattttcctcttccctttctgcccctctttcacccttttcttccccccccttcttgtctcttatctatttctttcttgtatctctttatctcttaaagaatctgttctatgactgtggaccaatcatctaattgacctatttcctgaactttaggtat

SEQ ID NO: 489326 - DNA, 505 bp, Homo sapiens
tgagcacacagggcaggcacagtgtgcatgcactaaattgaagtatatggattccaaggcaytatgacctacatgcacagtaaacactgaacaacagcacctccattgtcaagacctgatgggaagccatggaacatacagaatgctcttctctattaaattgtttgaccatagcttgagagctgagcaggagaccctagcccatgaccactggtggtgggatttccacctctccctggctagcagtatcagcagaaccccacaaccagcaagtctgggagctatgttccacctgtggataagtgtctattgttggaagctctagagaggcccgttggctttatgcctctagtgttcccaagtcctgtctctcatcattgcctttgatcctgacaccagtccaggaggagcagggtgagcttcaccattcccctggttgcttggatgtactgaggcccaggaaggtaggatgagctgctcaccttcctctctaatagcagtgcat

SEQ ID NO: 489327 - DNA, 505 bp, Homo sapiens
tgagcacacagggcaggcacagtgtgcatgcactaaattgaagtatatggattccaaggcattatgacctacatgcacagtaaacactgaacaacagcacctccattgtcaagacctgatgggaagccatggaacatacagaatgctcttctctattaaattgtttgaccatagcttgagagctgagcaggagaccctagcccatgaccwctggtggtgggatttccacctctccctggctagcagtatcagcagaaccccacaaccagcaagtctgggagctatgttccacctgtggataagtgtctattgttggaagctctagagaggcccgttggctttatgcctctagtgttcccaagtcctgtctctcatcattgcctttgatcctgacaccagtccaggaggagcagggtgagcttcaccattcccctggttgcttggatgtactgaggcccaggaaggtaggatgagctgctcaccttcctctctaatagcagtgcat

SEQ ID NO: 489328 - DNA, 538 bp, Homo sapiens
tttacatgcttaatatacactaaacattgggctaaatgtttgtttgttttttgtttttgagatggagtcttgctttgtcacccaggctggagtgcagtggcaccatctyggctcactgtaacctctgcctcctggttcaagtgattctcctacctcagcctcctgagtagctgggtttataggcacctgccacaacacttggctaatttttgtattttaggtagagaaggggtttcaccatgttggccagtctagtctcaaactcctgacttcaaatgatccacctgccttggcctcccaaagtgccaggattacaggtgtgagccaccgtgccttgcttgggctaaatgtttgaataaactgggataggataacccctgtaacaaacaaccccaaatcctttgtgtattttaatataatacaagttttttttcttttttctttgttttgctaccacatgtcacaggccaatgaggcaagcagaaggtaggtgtgggtggttccatgcagtcattcagagaaccaggcttcttcctag

SEQ ID NO: 489329 - DNA, 511 bp, Homo sapiens
ttttacatgcttaatatacactaaacattgggctaaatgtttgtttgttttttgtttttgagatggagtcttgctttgtcacccaggctggagtgcagtggcaccatctcggctcactgtaacctctgcctcctggttcaagtgattctcctacctcagcctcctgagtagctgggtttataggcacctgccacaacacytggctaatttttgtattttaggtagagaaggggtttcaccatgttggccagtctagtctcaaactcctgacttcaaatgatccacctgccttggcctcccaaagtgccaggattacaggtgtgagccaccgtgccttgcttgggctaaatgtttgaataaactgggataggataacccctgtaacaaacaaccccaaatcctttgtgtattttaatataatacaagttttttttcttttttctttgttttgctaccacatgtcacaggccaatgaggcaagcagaaggtaggtgtgggtggttccatgcag

SEQ ID NO: 489330 - DNA, 538 bp, Homo sapiens
tttacatgcttaatatacactaaacattgggctaaatgtttgtttgttttttgtttttgagatggagtcttgctttgtcacccaggctggagtgcagtggcaccatctcggctcactgtaacctctgcctcctggttcaagtgattctcctacctcagcctcctgagtagctgggtttataggcacctgccacaacacttggctaatttttgtattttaggtagagamggggtttcaccatgttggccagtctagtctcaaactcctgacttcaaatgatccacctgccttggcctcccaaagtgccaggattacaggtgtgagccaccgtgccttgcttgggctaaatgtttgaataaactgggataggataacccctgtaacaaacaaccccaaatcctttgtgtattttaatataatacaagttttttttcttttttctttgttttgctaccacatgtcacaggccaatgaggcaagcagaaggtaggtgtgggtggttccatgcagtcattcagagaaccaggcttcttcctag

SEQ ID NO: 489331 - DNA, 235 bp, Homo sapiens
gcagcactgtgcatgttcttttaaggatatgacttttttagttaaggggaggaaaaagcacaggtagtatgtgtctcccttgtttctaactgtcactgaggcagaggccaccgcaccgctgaggctgatgcyggctgacagtggcagcatattgcttgctggatgtgatgatacaattcagggagaatctctgcagccctcattatctgctgctgtactcgctcgatgccgcctc

SEQ ID NO: 489332 - DNA, 625 bp, Homo sapiens
tgcagaacagagcagcactgtgcatgttcttttaaggatatgacttttttagttaaggggaggaaaaagcacaggtagtatgtgtctcccttgtttctaactgtcactgaggcagaggccaccgcaccgctgaggctgatgccggctgacagtggcagcatattgcttgctggatgtgatgatacaattcagggagaatctctgcagccctcattatctgctgctgtactcgctcgatgccgcctctgctcgcttcagtaggtggggggattattaaatataattctactaattatggcttgatagaaaagttggacaggttcagaatcagtgccccaaaggaagaacaacatgaggtaaagattggagggcttttatggtggtacttgaagataattataggtatagaaaccaattccagagagaaaaaaattcagccaagcccagactgttttcataatacagcatagctcccttttaatgtgaaacattaattgattttccctgaggggtcaaaattcttgcaatgtcagtcttctggactgagcctcaggcctacggcascaagcagcaagtgggaacttaaagaagcctcagggatctgttgcaacttcccaaccttttg

SEQ ID NO: 489333 - DNA, 575 bp, Homo sapiens
ccatattatatgatgttaccaaaatgaccagtctgatacaatctaagccactgctattgtttttcagctttgttcaaagaagcaaaattctactctcttcttttcttatcagaatgcattcgttatccgaaggaagggctttgcgagtcgatttgtcatctaaaataatttttttggttggggattatgaatgactcactttgtagatttgttgactgaattgactaatattctacggtaccttagtgaaggtccacatgaaattatatttatgtgtacagagaagagatagatttaaagcaaaaattcacagttagtgttttgtttcgaatctgtaagaagaatcattattaaatacagcagcatctttgaatgcttcagggaaaacttcattaccttggactcatccttgacccttcctctctcacactccatatacartctgtcaggaaatggcatctgctttcccttcaaagcatgctcagaatgattactttccactgcctccactactcactgctacagtcctcatcgagtcaccactatctgtgacctggcttagtttaatagcctcc

SEQ ID NO: 489334 - DNA, 589 bp, Homo sapiens
gtgtttgaagcctttttatgagggtatgcctaatttatgggttcatagtctactttcagtctatctgagaaacacttgataaagaggatggaggagaacccaaaacctaaattcaagcataatttgttaacctgtatgttatgatttctctttaaaactcatctgacagttttaaaatactttgttttccagtcaaaggaactgaagcactattatactaattaccttaggaaactggagaaaagaaccaaagttctttgaaaagacatttttgcctctttgacaaatatttcaaggcacagtaaaattaaatatctcattgtaaaaagataaagtgcccccwattgggatattactttctgaataatcctgtagatattccagtttgagtaccaaatggtaactcactcttggaggtttgttagaatcgtaaactgccagagtacagttttatgaaggagagaaggacctcagactgaactcgccctattaaacagattaaattctagctgtgaattcaggccaggaccatgcattattgttttactacagaataaacataaatttaccaatgctgtgaagtttgcag

SEQ ID NO: 489335 - DNA, 661 bp, Homo sapiens
attatagtaagaatatttgagtttttaccaggggcattgtttgttctttgtgtatttcagctttttcccaggccctttagccccaactatgttcaattattcagtattagcaacttattttccttttcagtccattagacatatgcacttcctgtctatcactttctcacacaatattccgtcttaagggaaatacataatttgattttatactaaaactattctgaaatgtatcacttttaatacacacaaatttatgtgctgatttatctttattctcagaacaacactatcacaaccagcaatatactacattacctacatattcatatttgaaataactttctttgttcattaacagaatcactgcccattttattccamatatgcttacccaaacaacttttaagttcttagagagtctttgctctctggggcctacctgttttctccagctttcaagtggctggccatttcctcattgcaccagtctagtcttcaacactccaccaaagctggtagattacctgtgcacacgacttttatctcactaccctaaacacagagttcgccttgctacatatcatctgaaagagacatccaaaagtaatctaatccatcattcctcttcccagacacaccaaatcaaaacaactccaga

SEQ ID NO: 489336 - DNA, 594 bp, Homo sapiens
aactcaaggggagaaaaaaaggcctggacaaaaagtaaaccaaagccaaggtktaagagttgtgtgagttctatgtaggaggaagcttcatgaaacagtctgccatcctatagttttaattcagagatgtcccttgaactgtagaagggctcaagagtagctcttactctctcagagcttttgttctcccagttaactgttctcacaagtgataataccacatagataactccttgataaaaatgctgaccatggtgttcatgcttcagaagataatgagagcctatccaagttggtgaaatccaactgttgtctgcaggcatttctgactatattctataatttcctatttgagggatgccctggtttagcctctcctgcaaagacggatttgtaaagaaaagcctcctacaggcctccacccggtaaagcctcaagtcccacaaccctctggcttacttccaacatagcactccttacactaactgtctgttccctgggtatacctctcacacgtacagtgtgcaacttgagggcagggcccctcaggacctagaccaggggttgaaaaaggagtttaaaaaatattataca

SEQ ID NO: 489337 - DNA, 389 bp, Homo sapiens
cctcaagaaaaaaaaacgtaaaaaatgtttctaaagaaaaagaaatttaaaaaaagaaataaatataccaacattttaaaaataaattctattcattacaatttaattcaagacttttcttccttattttaataattaggctatgatattaaaatraaagtgaagaaacttttaaacgcaaaggagaccacttcagtgatgggaaaatctccccttgactgatggccactctgcttcctcgcattgttcctgagcacagaatggcttggaagcccctaaacatggtcctccaagtcagagtttatgctgccaatctgtcatgcaaacgagctgtcatgctttctgtcgctatgtcagaagtcagtgagggggaggctttccagaagccg

SEQ ID NO: 489338 - DNA, 596 bp, Homo sapiens
ctgcttgtatggcccttgaagctcagtgatcaaatgagcacaaaggagataataactaacagctagtttataaggatgaagagaaatttgcatacagtatatacaaagtgcttagtacataactggtgcttgaaaacaggcattatattttcgtgtgtgtgtgcgtggtgtgtatgtgtgtgtgtgtgtggtgtgtatgggtgagaatggataagccccctttttccccttctttctgatccatgggagactcagcgttttgttctgactggtgcaaaaggcaatgaagagtggagaacaacagggcaaattgtccaagcataactctgctgtggttcatagaggaagtaatgagtgggcaggagcacagctaaagactgcgctcccccgacccctgcctggttccagagcctcagggccccgcagcagaggggctgtgaggggaattcagcagggaggttccttttcccttcccagkttcaaagattagagcacattgtgagagatctaccaataaaactgaaaacagcacgctgatgatacttctgtcttgcaaggaggaggtaggcagaaccatcctaggtttttttttctag

SEQ ID NO: 489339 - DNA, 509 bp, Homo sapiens
ccatatttgtgcactacaaagggcctactagagggtatgtgcagaatggagcagagtggagagagaccaagacagggagcccagtgaggaagtgctcgctaagcccaaatagctctagtggacacctgaacaggaaggtaacacgagactggagaggaaggggcagtgtggagagacctttcagagtggaggagtgtggaacctggcaacgactgaatgggcgtgctaatgaccaagtcacctgctcacggtggctctcacagcgagctctagattgtgaaagccacttctgaaagaatcaattcacattccctctccctctctctacagccaacagcagtcccttctaagcagaccgtcacgtcactcctaggccatttcctcctacccaccccaaccgtctacctacccaagagtcttcaagagccatcccasactaaatctgctcctctcttaatatcatgggcatgtcttgccataccttctagatcctataccttgccctccta

SEQ ID NO: 489340 - DNA, 627 bp, Homo sapiens
tgctgctcttttacatgatttactttttgttgttgttagtttccgatacaccaaggcctagcttccctatcacaatctgcctgttcagggaagggacaatcctctttatttatctggcacagttaatttaaaaaaagctgctcaacctttacaatgtgactgtatatttagagataactaattacagaagtctctttgattaatatatttatgtgtgtgatcattattgtagatgttgttttttaaaagcacacagagaaaccaacatgcaaaagaaaggaaaaatattgtctgcttgtttgcttcatgaatgtgatcatttagattatttttygttatcacacttttccccatcgtgccatgttttcagacagacccttttatcatggagagaaaagcaacggcccataaaaagagtgttttgaaagctagcactatgacattaccaagtttttctattattattttttctttcaccacgtgaccttatgttgttcggtaactaagaaggtcttctaatgtttaaaattatactgatgcatgtgtgtgtgtgcgcgcgcgtgtgcatgcacctgcacgtgcacatgtgcacgtagttgtgtttttcaaaatcaaacgtaatatagg

SEQ ID NO: 489341 - DNA, 189 bp, Homo sapiens
agtggaatattatatggtctactgtgatttatccagtgtaatgtaaattactgtagtaagacttgcatctaaagtagttttcatgaaatgggctgtgggtgggtgtgctcccagtgataaatagcaattragtataagacccaaggtctttctaccaccttcagcacaaggtattagaaggatctagaa

SEQ ID NO: 489342 - DNA, 626 bp, Homo sapiens
tccttagataatttaatcctttattattagaaagttgggtttccagttttttgctctgttaaataatattgttatgattatcctcacataaatttatgttccagtcttgttttctgagaaagtttacctaaaagttgttatctctcttatttattgtgtgatattttattagattttatttttgagacagagtctcactctgtcacccaggctggattgcagtggtgcaatcttggctcattgcaaaactcagcctcctgggctcaagtgatcctcccagctcagcctccctagtagcagtsactacaggtgcatgccaccatgcctggctaatttttgtattttttgtagagacagggttttaccatgttatccaggctcgtcttgaactcctgagctcaagcaatctacccacagcctcccaaagtgctgggattacatatgtgagacaccactcctgacctcattttatttttaaaaacctcttcctgtgttttcttaaacccacactaaacccaaaacaatttcttcaaatagcctttagttcttcattacattttctctccaccaattatccccaaagactctcattctgagattgttgagaatcgtttgtaccattggca

SEQ ID NO: 489343 - DNA, 563 bp, Homo sapiens
gtaatcgaggacaatcattgccatatagtactttgatggcctgaccccctgtattaagaacttactgtttactttgaatacattttagaaattttcagtgcctagtaacttctctctgcaaagggaaattaataaacccttccttccacgagaggagtagtttagggtgtgactgggtgagcctgtcttcaccttgattcctgtgcgtaacctgcagctcacccctgctctgtcacagmgtcattttggggtgtggttagttgtttgtctattctgtcctctctgggagactgaactccttctttagcggttggctgggcacactgtggacagggaaacttcctgagcaaaaccagaagtatttctatgacttggtgtttgaaacaaagacagcgctttgttgagaatgaaacatcctctttgggattgagtctgcttttctcaagggttactttgagctcaaatgcttaatcatccttcctccaggtgccagagataatttttccagaaagactttccaggcgtttcttccccaccacccacagtctggatcaaatgcctcc

SEQ ID NO: 489344 - DNA, 637 bp, Homo sapiens
gtacttaaagacagtgaaaatcacagtcagaacgttgttccaacatcttaaagatggtgaaaacaattttaactcaaaggcaaatttaaggtcacaggtagcagccccagtctccactcactgtgaatgagttggragcagatgcatcagttaaagtaattacttttcatgaaaagctttaaaaagaggtagccacatacaacatgctgtctacctcatgagacatcagaatgataatacattttagtttagttctttttgtggactattgtttaaatataaccattgacagtttctttttcttccttttgtaagaaatatttaaaatgaatgaccacttggtggctgatttccgtcagtattattctgtcatttgacacatatcttaaatctctgccccactggcttttgctcagtgttcctgcctgctcagcccccacctgggctgtgggcgtgcctagcagggctgagacagaaccagaacagcttttccactgtctctcaataagaactctctctctagggcccttgcctaccccctgcccttcaaaagggaaagcgaacctgtccagtgggcatgagtggtcatgaattaagcggtgccaagtgctcagctctccaccgggagcaaagttct

SEQ ID NO: 489345 - DNA, 595 bp, Homo sapiens
ttttgctgtttttgaacttgttttgtctgccaagggagcaggtatctttagtggacaaggggtaccagtcataaaagattaagagacaattatggaagagtaaatgttaaatagaatgaattttggtcattagcctaatcccagacctcccccgatcccatccactccctgacttgaaaaacctccgttggatttccctggccacctcctgggcctggttgccagaggcgttttctgacgcaatgcctagcacgccctctggtggctactggmagaagtgcataggtccgtgctgtctttctgagctcacagaagccaagttttagagcttccactagaggtcacaaactggttgctctacaggctgaatgcgacctatagatgtgctatctataaagcatgaatatagggaccaggttcttaatatgttaccagcatttaaaaatctagatattttacgtacaaatccagatttctggcttctttggaaagccaagtctgacaatgacaggcagagacccgcactctccagttacccgtctggcctctgtggtttatgttcagtttctccagcacacaatccctgtagtgggcg

SEQ ID NO: 489346 - DNA, 564 bp, Homo sapiens
gtctcagcatttcaggagagttagcaaggctgccctgcgcgggggtggggtggatctcttctgttactggtgttggagatagaacagtggtcagggacattaattgtggcgatcgattttccttattctcacttatgtatgtagaagagattcaatgaatggtaaagtcattatacccattcccctacagggagtagagagagaccagctttcctcattctgaactctggccctctacagggaagaaagagtccccaaactcaatactaaacaaacccagtggttttcagcaccggacacaagttaaaatctcccactagttctcacactttcctgggtatgcgaygccctgctcctgaaggccttgttaaaacacagatctctggaccccaccctaacagctttggattctgttgtcagggtggggcctgagagtttgcactttaacaggtgccctggtgatgctgatgctgctggtccccgggtccaactttgagaaccaccaccccacccccggtcctcaaagactgatttggttggtttggagtggggtttctttggcag

SEQ ID NO: 489347 - DNA, 518 bp, Homo sapiens
ttcttggagtgagatgcagatttcactcacccgctgtgggtgatgattgacattgctgtggggatgaggtcatccagggagaagaaagggaggagagagagaatgagcacgaggccagggcacaggctgcatttaggaggtgagaggggtgcaggggagctggcacagctgtcagagaggaggaggagaagaagaggagctagtgtcccacaacccaaggccagggcgaggtctgggcaggacgctgcagtgyggtccggtccaggggtcacgctgtcctttagggaggtggaggtcagcaggaagtctggctttcatcccggctcatggccttgggcaagtcactgggcctctgtgcaccttgctgttctctgctgagcaggagaaacccaagcctcccaagtgagataatgttgtcgagcgctgtgatgacccgcttcccattagcagccgccccatgagaagaaagagatatgaccaggagaaaaggccctggtcagaacctggctttagcaggc

SEQ ID NO: 489348 - DNA, 518 bp, Homo sapiens
ttcttggagtgagatgcagatttcactcacccgctgtgggtgatgattgacattgctgtggggatgaggtcatccagggagaagaaagggaggagagagagaatgagcacgaggccagggcacaggctgcatttaggaggtgagaggggtgcaggggagctggcacagctgtcagagaggaggaggagaagaagaggagctagtgtcccacaacccaaggccagggcgaggtctgggcaggacgctgcagtgtggtccggtccaggggtcacgctgtcctttagggaggtggaggtcagcaggaagtctggctttcatcccggctcatggccttgggcaagtcactgggcctctgtgcrccttgctgttctctgctgagcaggagaaacccaagcctcccaagtgagataatgttgtcgagcgctgtgatgacccgcttcccattagcagccgccccatgagaagaaagagatatgaccaggagaaaaggccctggtcagaacctggctttagcaggc

SEQ ID NO: 489349 - DNA, 548 bp, Homo sapiens
ctgcaaggactccattggctggatgttctccaagctggacaccagtgctgacctcttcctggaccagacggagctggccgccatcaacctggacaagtacgaggtctgcatccgtcccttcttcaactcctgtgacacctacaaggatggccgggtctctactgctgagtggtgcttctgcttctggagggagagtgagtgcagcccccctcccaggcccctgcctcacccgtgtgggctctacccgaagttccaggctctcttgggaagtcagagtggctctttcttggctacgtccccaggcccagcactttcccagcttgcccacttcctgcactcccttagggcttcatcccttaaggcccagggaagccaacactttcagctcccttccttggcaggctcccaggcggatccagattttgtgggtcctgaagcttatatacttttggaggtcttctttaagaaagagttaaaaaagaaatcccagcactttgggaggccaaggtgggaggatcrtgtgacccaggagttggcgaccagcccaa

SEQ ID NO: 489350 - DNA, 423 bp, Homo sapiens
tcctgcatctggaaaatgggcagagattttagaatgtcacctctgctagtaagtcaactccatgaaggcagyggtttagtaggagggttttgctcatgactatatgaccaacacctattatatgcatggtacatagtgtgtgcttaacaaatactgtgaataaatgaatgctgaataaagagtctctatattatttctgatgatagaagccaatcaaaaatcaaattcccaagaagaacctatagatccacctcagaaaaaagtgcttgttcctagtgctatttaacatacagctatatcactaattgatgacttaatttattatttcttccctatatagcatccaaagcaatcatgatctctaatagacttgattatgaatattttataggtaagtcattaagttgaggggggaaaaatcag

SEQ ID NO: 489351 - DNA, 597 bp, Homo sapiens
catagtcagtaagagaagatgtcttagtgaggtcagactctcccatgtgtaaactaaattaccgactttttaactgcccattatattctaagattccagattctgggttggttttagacaatccctaatggagcatcattttgaaaatgaagggtccacaattgatttcatttttttgcccaagatttttcgttggtgaacagtttggaatatctgaagggttaaatgtagtatcattacaaagttgaaacagaaccataagtttaatattattttaaggctcaagtgatttaacatgacatcaagcttgagttaacattctacatggttgtggagatattarggtttaaacagatgtcagccattttttttataaaacagaaattgagttatacagatggtgaagactaaggagttcaaagtggctgtgcgtagtataaaaatgtacactaaattaaaaagtaatcatctttatatttcaagtttgaagattctgtttttagtgatgaggataattttcaagccaatcaaacagaaatctatttaccttttacttccatattatacattttttctgctacattttctaattatgta

SEQ ID NO: 489352 - DNA, 570 bp, Homo sapiens
gtttatgtgcagggactcaatgatatataaaatatgtttcaaatcaaggcttactcacttcatacccttactagtctgtgtggctmggtatttaatctatctcagtttcctcaactgtaaaatcattatacacagtatctgcctcataagattgtcaggaggatcaaatgcaaaactgaataccagttgattggcatatagtaaataataaatgttagctgtcattattaccatggtcataaaagtctttagtggaatcatggtaacaggccaaatgtgttttaggaggctcacttgccacaagataagccatttgatggatgttagaaaaattcctagagatgttggttgcccctggaaacagcttctgcttcttctgaataacccatgtggttctagactacaagccctggtgggacaaattgagatccttagccatagatggccatgttcccttgattagctacacaaatgaatccaaaactagactcaagctataatttttactttattacctttcttttgcaattagttctccttctgaggactcctcaactatggtgacaatga

SEQ ID NO: 489353 - DNA, 570 bp, Homo sapiens
gtttatgtgcagggactcaatgatatataaaatatgtttcaaatcaaggcttactcacttcatacccttactagtctgtgtggctaggtatttaatctatctcagtttcctcaactgtaaaatcattatacacagtatstgcctcataagattgtcaggaggatcaaatgcaaaactgaataccagttgattggcatatagtaaataataaatgttagctgtcattattaccatggtcataaaagtctttagtggaatcatggtaacaggccaaatgtgttttaggaggctcacttgccacaagataagccatttgatggatgttagaaaaattcctagagatgttggttgcccctggaaacagcttctgcttcttctgaataacccatgtggttctagactacaagccctggtgggacaaattgagatccttagccatagatggccatgttcccttgattagctacacaaatgaatccaaaactagactcaagctataatttttactttattacctttcttttgcaattagttctccttctgaggactcctcaactatggtgacaatga

SEQ ID NO: 489354 - DNA, 500 bp, Homo sapiens
attcttttgagggggcatcatttatttatatatttcagttccaaagcacaggaaaatatcctgttgacagcatcttcaatcaattgcacagtctacttctttcctagggccaggaagccttgggtaggttacttcttaayccaacttgagcagtagtgggcttactacttcgtgtaacatatcaattttacaaatttaccttgcatgtcagggataaacataggtgtttcacagaatgttatgtatctttccctaagtttctgtaaccactaatagatagcagtaacatcaaatgtcaaaatattaattgcttttttattccccaacatcagactgtgcagttacttagtaattggtgttaaatttatctggtagataaaatgaaaaagatattgatgttatatttcaaggggtgcttacagaaataatgaataacaaaaattaaattaagcaaaatgtacatgcaaacatttaaatcactttcgcaaatagaatttaaa

SEQ ID NO: 489355 - DNA, 500 bp, Homo sapiens
attcttttgagggggcatcatttatttatatatttcagttccaaagcacaggaaaatatcctgttgacagcatcttcaatcaattgcacagtctacttctttcctagggccaggaagccttgggtaggttacttcttaatccaacttgagcagtagtgggcttactacttcgtgtaacatatcaattttacaaatttaccttgcatgtcagggataaacataggtgtttcacagaatgttatstatctttccctaagtttctgtaaccactaatagatagcagtaacatcaaatgtcaaaatattaattgcttttttattccccaacatcagactgtgcagttacttagtaattggtgttaaatttatctggtagataaaatgaaaaagatattgatgttatatttcaaggggtgcttacagaaataatgaataacaaaaattaaattaagcaaaatgtacatgcaaacatttaaatcactttcgcaaatagaatttaaa

SEQ ID NO: 489356 - DNA, 500 bp, Homo sapiens
attcttttgagggggcatcatttatttatatatttcagttccaaagcacaggaaaatatcctgttgacagcatcttcaatcaattgcacagtctacttctttcctagggccaggaagccttgggtaggttacttcttaatccaacttgagcagtagtgggcttactacttcgtgtaacatatcaattttacaaatttaccttgcatgtcagggataaacataggtgtttcacagaatgttatgtatctttccctaagtttctgtaaccactaatagatagcartaacatcaaatgtcaaaatattaattgcttttttattccccaacatcagactgtgcagttacttagtaattggtgttaaatttatctggtagataaaatgaaaaagatattgatgttatatttcaaggggtgcttacagaaataatgaataacaaaaattaaattaagcaaaatgtacatgcaaacatttaaatcactttcgcaaatagaatttaaa

SEQ ID NO: 489357 - DNA, 618 bp, Homo sapiens
ctgtggaggctgaagcaagaggattgcttgagaccaggagttggaggctgcagtgagctcctgcagtgaggacctgccacagctctccagcctgggtgrcccaatgagaccctgtctgtaaaaaatttcttggactagctggaagaatgtaagcaaaagaaaacagccactccaccttttcccatttctgcttcactttaccccatcagcatagtttaaccaaattaaaaactcaatacacccaataacttagggtgtccaaaccaagagtgatagatttgagtatgaaagagagagctgttaataactacaccaagataataggtataaaaagaagtgtcacataaaaactaggaagtatggataccatatccttttctcctaaccatccactattttctcttaggaaagagaatctgggtaatagatacaatgttaacgatgtacctttgataaagattttgactgttcatggagacacccctttgtagtaaaaggggtgcactgtaaaacattaatcttttaggatctcaaattttcatgcagacaatgaagatgctgggatagataatttcaacagtacaactttatgaacatccatgctaggttttctattta

SEQ ID NO: 489358 - DNA, 482 bp, Homo sapiens
aagacacataaaatgtaatgatgaacaaatacatttgatgggttgggagaagaaggaaagacaggaaggcacatggggtcatctggacagtgagatatgggagtgcaaggggtaagaggaaggcagccagacaggacaaggtaggaaaggacacttaccttcttgttacatgtacagtcagtttccagcatgcaaaccgcaggtaaaaccctccagcatttaaacccatgcatcagactctaaaccactgaggtcatatagtaaaacacagtgctctgtaaccctggcactctgcatggttctgagcaccaactagcaccttgacgagtttgctggcacattgaatgggractctgctttcctccttgcaggaaactctccctagagccccttccttttgctctgaggaattgtcccctaggaccaaatagtacacatcagtacctaggaagtccataaagtacttccgatgatattaaaac

SEQ ID NO: 489359 - DNA, 607 bp, Homo sapiens
ctttggggaaatcttggcactaatgctaatctctgtttcccagaaggttcctttagtgtcacacagtggggaaaccattagcagacacactgcgagaagattttgattgctgcaatgcatacatgctacatttcctggggattttttttwaactgccttaattgcactaaattctctaaataattactgaaaaactatattagactcaaaaaagatacataacatggtccttactcaatgtaccttataaggggtagctagaagtagactggtatgatatttattatgatagaatatgaaaggcaccaaacaaccgtatgaacaaagtgctcagagctcggaggttgtgaagaacacagaaaggatgatatttgagctaagccttagtgtgtaagtagcctttcaccaggcagagaatgcagcaaaggcctttctataaagaggtgccaccttcatataaaataataatagcaactgacatttattgagaacttatttgctaggcattgttataagcacctgttatgttttatctcatttaattctcgctctaaaaaactctgtgtaatgggtgctgttataatcctcagtacatagatgaagaaac

SEQ ID NO: 489360 - DNA, 607 bp, Homo sapiens
ctttggggaaatcttggcactaatgctaatctctgtttcccagaaggttcctttagtgtcacacagtggggaaaccattagcagacacactgcgagaagattttgattgctgcaatgcatacatgctacatttcctggggatttttttttaactgccttaattgcactaaattctctaaataattactgaaaaactatattagactcaaaaaagatacataacatggtccttactcaatgtaccttataaggggtagctagaagtagactggtatgatatttattatgatagaatatgaaaggcaccaaacaaccgtatgaacamagtgctcagagctcggaggttgtgaagaacacagaaaggatgatatttgagctaagccttagtgtgtaagtagcctttcaccaggcagagaatgcagcaaaggcctttctataaagaggtgccaccttcatataaaataataatagcaactgacatttattgagaacttatttgctaggcattgttataagcacctgttatgttttatctcatttaattctcgctctaaaaaactctgtgtaatgggtgctgttataatcctcagtacatagatgaagaaac

SEQ ID NO: 489361 - DNA, 448 bp, Homo sapiens
tacttttcagactggacctaaaagccatttataaaaatattgattctggaagaattgaaaatatgaatgaaaatgccagtaacttacagagcctaggaatattattawattcaaagcaactaggaggacctgggggggtttggtggtttgatcagaaagtcttgagtggaaacctgccccttctccccatggtttgggttcttagctctgtttggccacccttgttaatcagatgggaagcacagggctggtcagtcctagaccccctttcctagactgtgtccttactgtgctgaatgagaagaggattttaatatcatttggttttcttgatatttatttacaaattagcatgtgcaagagctcaaagggagtcagtcagggagatccacgtaagcacagtcggctgtctcacactgctgtgcctgtgggatgagaacgccgtggg

SEQ ID NO: 489362 - DNA, 448 bp, Homo sapiens
tacttttcagactggacctaaaagccatttataaaaatattgattctggaagaattgaaaatatgaatgaaaatgccagtaacttacagagcctaggaatattattaaattcaaagcaactaggaggacctgggggggtttggtggtttgatcagaaagtcttgagtggaaacctgccccttctccccatggtttgggttcttagctctgtttggccacccttgttaatcagatgggaagcacagggctggtcagtcctagaccccctttcctagactgtgtccttactgtgctgaatgagaagaggattttaatatcatttggttttcttgatatttatttacaaattagcatgtgcaagagctcaaagggagtcagtcagggagatccacgtaagcacagtcggctgyctcacactgctgtgcctgtgggatgagaacgccgtggg

SEQ ID NO: 489363 - DNA, 531 bp, Homo sapiens
acctcattgtccaaacctagcagtaggtacaggttttgaggagcttaagactcatgattttggaaaaagaaagacaaaaacacaagacaggtacaatagtgaatattgttttaaaataagaaacacactaaatgacaaagggggggccttcttttgacatccaacaggaaacaataaattacaaatttaaaaagcattttctttctgtttttgttttggcctccactgcaatagatccttcgtagatttgaacttcagtatgatcagtaattctgaaaaagtatacaaagtctacctgacatttcggtgtacacaagtgcagttcagattttaggttgccactayattgtttcgagcaacgtcatgtcattatacggtcaatatgttctgaggccccattcactggtttattgatgaacatgtgtaggagtttgtcactgaacacttgtttcttcatgctgtttcagtgagttggaagcaattttgtgtgccattttatttgggattgtcagactttgtcaatttaaaatt

SEQ ID NO: 489364 - DNA, 526 bp, Homo sapiens
acaaaagctggaaaaaatattcatatttaattttgtttttgtttcctccctctactagtttcccaagaatacaataacttttacttttcatgacataggtatcaagcagtagaattttaggagactcctagtatttaagctcaaagacatttgacaggttttaataatgaaaatttgtgttcaaactttaatagtctcataagaagtttaaagagtcaacttcagaattgtagttatgcttcattaatgaaattattaccagcagacactatcttttcaagcacatattttaaagaaaaagcataaatattacaatgctaaagtacaatagcraatatattaagctatggtagagggtacattttttcaaacatcatttctcttgtgtagatgtactttagtccatttaccattaacaaaacattaataataaggtttctaccttattattataattatacaataattgtaatgttgaagttgctaaagtgatttaagttttttcaaaatatttttgcttccattc

SEQ ID NO: 489365 - DNA, 562 bp, Homo sapiens
atcgcctcataagagctggacaaggcgatcctcatttcataaattaaaaaaaaaatttcagaaagatttcatttaacatcagtgagtagtgaaatatggatttgaattggtttgctgtctctgtcttgaccatcattccagtactttccaataatttttcatgtaatygtacacaaagaaagtgaagctatttgtagtcagactgggaaaactggaggggatttgaaataatctatattgggtttggtaaaaaacaaattattatattttctctatgttacgtaattactttaagaataaagtatgagggaaaatagtaaacttttactttttatagaacttataaataaaatcttgtctcactttaaataagagacatgaactcacttctatgaccatacattttatttttgtatcattttaggcctcaaacaaccaaagacaattctgaccagactttttaatgacaattgcttcaaattcttgataatatcatcaattagaaacgttctacaatccagcaggtgaaaaaatttgaattcatttcaataaccatttacaa

SEQ ID NO: 489366 - DNA, 562 bp, Homo sapiens
atcgcctcataagagctggacaaggcgatcctcatttcataaattaaaaaaaaaatttcagaaagatttcatttaacatcagtgagtagtgaaatatggatttgaattggtttgctgtctctgtcttgaccatcattccagtactttccaataatttttcatgtaattgtacacaaagaaagtgaagctatttgtagtcagactgggaaaactggaggggatttgaaataatctatattgggtttggtraaaaacaaattattatattttctctatgttacgtaattactttaagaataaagtatgagggaaaatagtaaacttttactttttatagaacttataaataaaatcttgtctcactttaaataagagacatgaactcacttctatgaccatacattttatttttgtatcattttaggcctcaaacaaccaaagacaattctgaccagactttttaatgacaattgcttcaaattcttgataatatcatcaattagaaacgttctacaatccagcaggtgaaaaaatttgaattcatttcaataaccatttacaa

SEQ ID NO: 489367 - DNA, 510 bp, Homo sapiens
ggttttgaggggcgaataggagtttgtgtgtatcagaataacctgagctctggtcatgcagtgaggtaatatcacaatctagtggaaagaacattggtcaggaaacccttgcttctgtgttgacttatacaagcgtacctcattttatgcatttcactttattgtgctttgcagatattgcattttctgcamattggtttgtgacaaatgaacaagtccctcagtacaatttttccaacaatagatgcctaattcaggtctctgtgtcatattttgataattcttgcaatatatcaaagtttttcattattattgtatctgtgatctttgatattactattgtaagttttgtgagctgccacaagacagtgaacttaattgataaatgttgtgtgtgttctgactgctccactgactgactgaacacttgtctctctctctctctttgggcctccctattttctcagacacaacaatattgacattaggccaattaataactctccaatg

SEQ ID NO: 489368 - DNA, 510 bp, Homo sapiens
ggttttgaggggcgaataggagtttgtgtgtatcagaataacctgagctctggtcatgcagtgaggtaatatcacaatctagtggaaagaacattggtcaggaaacccttgcttctgtgttgacttatacaagcgtacctcattttatgcatttcactttattgtgctttgcagatattgcattttctgcacattggtttgtgacaaatgaacaagtccctcagtacmatttttccaacaatagatgcctaattcaggtctctgtgtcatattttgataattcttgcaatatatcaaagtttttcattattattgtatctgtgatctttgatattactattgtaagttttgtgagctgccacaagacagtgaacttaattgataaatgttgtgtgtgttctgactgctccactgactgactgaacacttgtctctctctctctctttgggcctccctattttctcagacacaacaatattgacattaggccaattaataactctccaatg

SEQ ID NO: 489369 - DNA, 541 bp, Homo sapiens
agaattatgtaactctgaagaaatgaatgaactaatcagtagcagaatgtgaggaaatttcccataagaacaattcccatgaaatatgtgcctcccagtatggaggcactctgccactaaccccaggagagtagatcttgaaaaagttccttttgtttttccttgactgtatgtaagctaaaaagtttgtttagattttagttttagggataaggacatcccaggggactcctggttactgtatcaaaaagaacgtcaacacacctagttacaacagcacagtggttgtaatcagggatggttttgtgccccctcccccaggggagacagttggcaatatctggaaatatttttggttatcataactgggggagagggagcgctattkgcatctagtgggtagaggccagggatatttctaaatattctacaatgcaaaggacagtccccacaagaaagaattctctggtctaaaatgtcaactatgttgtgattgagaaactctgctttacatgaagaacaatgtcataaatgatcaaga

SEQ ID NO: 489370 - DNA, 596 bp, Homo sapiens
acaacaatggcaattatttggtttcatgtgtaacaagctttttgagaaatctgcaactcattggtgtataaaattacatgatttttttttctccaattgttgatttcaactcttacstgtccagtctccttttctggttatttaacactatcttatgcagttttataacattctagacaagctttgatactactacattgggcaatccaacttaaaattttaatctctaatttaaatcaaagtttgatgttcttcttcttgtaagctcaaatgctttcagtgtgttaggatgaggagaagaagagaagtcaactcttgtctcctaaggtggtagccccatcattttacgggctaatactaaacattggtactcctgtgtggtaggcatccctaatctgattctcgtaagtacgtgcatgtagattcttcagaggatcccacggagtctccccatttgcctgatctcttgacacgggagcttccattttatcatcacccctccactcctccatctcctaacacaggaaggggaaccaacacgatggcctgaggcagctgcttccctggtgtttagttgacctattgaagagtcacat

SEQ ID NO: 489371 - DNA, 610 bp, Homo sapiens
gtgctactaaataaagaagcatttttcttatttgtttatggtcataaaaaatggaaaacaaaagaaaataaaaagcagagaacagggcttagatcattttaataaatataccttgtttcttgaagagtattggaaatcatagataaaggggtgctaactcataacaactgagacaactgcttcttaaaactgccttataagaaaacytggtaactgtaatgaagctcttttggtaacccttaaagttgttaatttccatcctgtaagctagacaagacagtccatttcattttcatgtgtgtgaaacaataaagaaagtcttgttcttctgtaattgtaaagcaaacaccggacttggttgagttaatttcagatctgtcaagaattagttaagtgaccctgagcaagtcatttcatttttctgaatttcaattttgttatttgttcaatggtaagcaaattgaattaattaatttgcaatctagctgggagcactcagtgagataatgtatgtgaaatagaaataacacttacaagtataaagtgcagcaccaaacccagaaatattactagagctgtctttcaacatacaaaggtaaaaatatttcag

SEQ ID NO: 489372 - DNA, 422 bp, Homo sapiens
tggtaatttagccagtagttcttttcattctaatagcttctgtttgtaatttaaattatccccatccaaacgttggtttcagatactattcccatctaaacatcattgtttagtccagtctcccaatagagcaagggagaaactcaatgtaaatatttttctgttcacactccctgagtatgtctttccccactgaaatgctgagcttgaccattaatttttttttttttttcgtgatgaaatctaagaatgttttccaaatctcaggtgtaatttccaaaggttgagtaaagactgatcagaacagcacagtggatttaaagggcggtttaccaaatccatgaatgagaaggcargtctatattaagaagagccttctaaaaagacaaacaggatgccaacatttttaaccaagggttcaa

SEQ ID NO: 489373 - DNA, 545 bp, Homo sapiens
gtatgtatgtgtatatataacacacatgcacattacatatgcataaatgttttaatttaataatatttatatgcatcaatatcttaaagatatatacatatcattagctggaagctgcctctatccatatattaaaggtttctccatatgtagtgaactgtaacctaactggatgtgtaaacaacctgtaacctactcttgagccaatgactgagktttagccaatcaaaggtggccaactgttcaaactgggttcaaataagacaaactcagagctgtagccaatccgattatttttgtacctcacttctgttttctgtaagtcactttcccttttccatccataaatcttcttctaccacatggtagcactggaacctctctgaacctattctggttctggaaatttctgattcaggaattcttctttgcttaattaaactctgtgtgtgtgtgtgtgtgtgtgtattatatattatatacacatgtaatatatatatgtatgtgtatatataatatttatttgagagagagagaagtgactt

SEQ ID NO: 489374 - DNA, 677 bp, Homo sapiens
catatggaggtgggggagaccaacaatgttattctccctcacactacatacaaaagtaatttgaggtgcattatacaccaaaacttaaaagttaaagatataaagcatttcaaggatactctgtaggtaaagattagcctaccaacaagtaggacactgaaaaaatatatataaaagacatgataaattagacttcatcaacattagccataccttctcatcaaaagataccactaagaaagtgaaaaggcaagcaagccacagacagagagaaaatagtcacaaaacgtatctgacctccacatcctgtaattagaattattgtggtctggtacactgcacccagtttctgcaggagtactttctgggtgtctctaatgagtaagagagggccccatgggatattcctacagttcccagatgaacagtgggaaagactctacgttgacaaaccccggggacctgaaaactcaggtcctcaaggagggtagaggatacctggaccctgacccagacccctagatgggctgtgccaagagacccagcaagggaagggattccctcctgcctcaggttctcygttcttctgtggttagaagacctgaacccaactccctccccaagcactggagatggggcttttccaagggctagggatcttgctgtcctaaggacag

SEQ ID NO: 489375 - DNA, 652 bp, Homo sapiens
ctggtaattttttgacttaaaatatttgatacttaaaatgccaaacttctacatttctgcagtaacaaggcagttatcatattgaataccatttctttctctccagtaagtagagttaatattagcacatgaactgaaaatattaagtgattataaaaamgtccaaataaattcattaaaatttagcttggcaaaatgttagtttcatgttcttggtagaagtccttttatatttatattcaaatgaaatgaacaatttacaagcaaaggaaatggcatcaaatatttcacaccctgcctcccaaggtgtattgattcatgctttttgctcagatctaggtttctccactcaggaaaagaggagaatgtacccatacttgggaaaacaagtttccgatggcacagctttgatcaaacagcaaaattctatccatctatgtattgccatctgacagtatgacaaatggtcccatgtgcgatattcacactgcattgcagtcaaacctgtaagtcaaaggatatgaaataatagtaactatacattaagcacagaagaaaatgaaacaaacaaaaaggttttaaaccaaccaaaaatatgtcttattttggatgttctatatgttcttacattctctcaggtcttttgtgtcat

SEQ ID NO: 489376 - DNA, 652 bp, Homo sapiens
ctggtaattttttgacttaaaatatttgatacttaaaatgccaaacttctacatttctgcagtaacaaggcagttatcatattgaataccatttctttctctccagtaagtagagttaatattagcacatgaactgaaaatattaagtgattataaaaacgtccaaataaattcattaaaatttagcttggcaaaatgttagtttcatgttcttggtagaagtccttttatatttatattcaaatgaaatgaacaatttacaagcaaaggaaatggcatcaaatatttsacaccctgcctcccaaggtgtattgattcatgctttttgctcagatctaggtttctccactcaggaaaagaggagaatgtacccatacttgggaaaacaagtttccgatggcacagctttgatcaaacagcaaaattctatccatctatgtattgccatctgacagtatgacaaatggtcccatgtgcgatattcacactgcattgcagtcaaacctgtaagtcaaaggatatgaaataatagtaactatacattaagcacagaagaaaatgaaacaaacaaaaaggttttaaaccaaccaaaaatatgtcttattttggatgttctatatgttcttacattctctcaggtcttttgtgtcat

SEQ ID NO: 489377 - DNA, 652 bp, Homo sapiens
ctggtaattttttgacttaaaatatttgatacttaaaatgccaaacttctacatttctgcagtaacaaggcagttatcatattgaataccatttctttctctccagtaagtagagttaatattagcacatgaactgaaaatattaagtgattataaaaacgtccaaataaattcattaaaatttagcttggcaaaatgttagtttcatgttcttggtagaagtccttttatatttatattcaaatgaaatgaacaatttacaagcaaaggaaatggcatcaaatatttcacaccctgcctcccaaggtgtattgattcatgctttttgctcagatctaggtttctccactcaggaaaagaggagaatgtacccatacttgggaaaacaagtttccgatggcacagctttgatcaaacagcaaaattctatccatctatgtattgccatctgacagtatgacaaatggtcccatgtgcgatattcacactgcattgyagtcaaacctgtaagtcaaaggatatgaaataatagtaactatacattaagcacagaagaaaatgaaacaaacaaaaaggttttaaaccaaccaaaaatatgtcttattttggatgttctatatgttcttacattctctcaggtcttttgtgtcat

SEQ ID NO: 489378 - DNA, 652 bp, Homo sapiens
ctggtaattttttgacttaaaatatttgatacttaaaatgccaaacttctacatttctgcagtaacaaggcagttatcatattgaataccatttctttctctccagtaagtagagttaatattagcacatgaactgaaaatattaagtgattataaaaacgtccaaataaattcattaaaatttagcttggcaaaatgttagtttcatgttcttggtagaagtccttttatatttatattcaaatgaaatgaacaatttacaagcaaaggaaatggcatcaaatatttcacaccctgcctcccaaggtgtattgattcatgctttttgctcagatctaggtttctccactcaggaaaagaggagaatgtacccatacttgggaaaacaagtttccgatggcacagctttgatcaaacagcaaaattctatccatctatgtattgccatctgacagtatgacaaatggtcccatgtgcgatattcacactgcattgcagtcaaacctgtaagtcaaaggatatgaaataatagtaactayacattaagcacagaagaaaatgaaacaaacaaaaaggttttaaaccaaccaaaaatatgtcttattttggatgttctatatgttcttacattctctcaggtcttttgtgtcat

SEQ ID NO: 489379 - DNA, 344 bp, Homo sapiens
ctgtacatataagacatcaaatattgaggatactggaacttttaaattaatggcaaagaaagtcaacaaaggaagttcatatgaaatsaaactagtaatatgattacaaaaaaaaaaagtttaaaatttttcttggccccagtcttatcatttctgagccaaatacaattctatcgaaatcacctgaaactgaaatcaccattctaggctggttttcccataaagatggactgctccaaaaagaggaatcaagaaagaatttggctcacagtgaattattcactttgtcttagttaactaaaaataaaatctgactgttaactacagaaatcatttcaaattct

SEQ ID NO: 489380 - DNA, 641 bp, Homo sapiens
ctttcaaagctctctaagagacagaactttgtggaaattttcagagcaggagctcctcctgctctccaagtacatgtgaataactgtcaataccacaaaatattaggaatttttaaacctccgtctcaggctgaaaccaacaatcagggctccctgtccaggttaattgagtccatgtttcaccaaggacagccctacgttgtgtgtgtgcagttctgcagagtagacgcagccagaaacagtctagacttaatgccaccttatgcctgcctatgttccacacatcattctttaggtattcaaaatatttattgagtgcctttccatgtgtcaggcactgttctaatgctggrgacacagagatattgcagttccaatattcacattttataagtgtgttaaagccaaaaggtaggatttggttgggggaaagagataatcagtcaaaagaaaagaaaaaactcttcagcagagtcaaagtaggtacaaaagtcctttgggatataggaagataattgattaaagatatatgtttttaccaagtcaggaaaaaaatagaattaaggaagtgagaactaaagaaccattccaggctggacgtggtgggtcaccctgtaatctcagcactttgggagcccgaa

SEQ ID NO: 489381 - DNA, 481 bp, Homo sapiens
ggtccaatggtcagtttttatagcccttatcttacttgacttctcacagcattcaacactgctgctcattccctcccttcttgatactttcttcactttattcctgggacaccacattcttactttttctcctactttattggttgttcyctttcagtgcccttttgttgattttttttctccctattatcagagaaattatcttcttctcttctcttctcacatatttagtgtattgccagtttccaatttatttcctctctgctccaaagccacccttcattgactgttctgcaataatggaactggactctgtaaacatttctcctgcatagctgatacaatgttcagttttgccaacacagagtgttggaggagggggcttcctttcctggttctggtgtgcttccatatggttcctgccacatggttaccatgtacatgtgagggacatccagcagcacttcatgcaccctggcag

SEQ ID NO: 489382 - DNA, 481 bp, Homo sapiens
ggtccaatggtcagtttttatagcccttatcttacttgacttctcacagcattcaacactgctgctcattccctcccttcttgatactttcttcactttattcctgggacaccacattcttactttttctcctactttattggttgttctctttcagtgcccttttgttgattttttttctccctattaycagagaaattatcttcttctcttctcttctcacatatttagtgtattgccagtttccaatttatttcctctctgctccaaagccacccttcattgactgttctgcaataatggaactggactctgtaaacatttctcctgcatagctgatacaatgttcagttttgccaacacagagtgttggaggagggggcttcctttcctggttctggtgtgcttccatatggttcctgccacatggttaccatgtacatgtgagggacatccagcagcacttcatgcaccctggcag

SEQ ID NO: 489383 - DNA, 481 bp, Homo sapiens
ggtccaatggtcagtttttatagcccttatcttacttgacttctcacagcattcaacactgctgctcattccctcccttcttgatactttcttcactttattcctgggacaccacattcttactttttctcctactttattggttgttctctttcagtgcccttttgttgattttttttctccctattatcagagaaattatcttcttctcttctcttctcacatatttagtgtattgccagtttccaatttatttcctctctgctccaaagccacccttcattgactgttctgcaataatggaactggactctgtaaacatttctcctgcatagctgatacaatgttcagttytgccaacacagagtgttggaggagggggcttcctttcctggttctggtgtgcttccatatggttcctgccacatggttaccatgtacatgtgagggacatccagcagcacttcatgcaccctggcag

SEQ ID NO: 489384 - DNA, 544 bp, Homo sapiens
gttattgaaccatgagatctaaagagaactcagaaatcattttgtcacttacgtaaaatccagttccaattttaaaatatcctgtttataagagctcgactctgagttcacttaactctgaatgaatattttaaacattattttctacagtgcctccaaaaaattaagtgtcttcagaagaataactttcaattaacactaaacaagtaaaagggaactagttaaagatcaatacccatttttcccttactttataattaatggagygattgctttgctttgacaactacaacttactatgaaaaaaaaaacacacacaagcttcagggttggagactaggagaagtgtgtgaaatatacagttctacttacatattcagtattctacagtctcttatttttcctgaggctttgtttgaaagcttctgcctttgctccgttttcacccaatttactgagaacaatgatttcagccttctgaatttgttttgcagggaactgagacatgagcatgttgcagcttttagaaatgtttaaaaaagaa

SEQ ID NO: 489385 - DNA, 541 bp, Homo sapiens
tgtcattcaaactgcaaatgtttaaaaattatataaaattgacaggaaagctctattttgattcatagaatatcacagcctattcagatgcatttctgaattatgtgtacagtacaaccaattccatgtacaattttccttgataggtttcaaatttagttttaaaaagttgttttaccttgacgtcatgttgttccaaaaattgtaaatgtatttattaccttaaataattttatcttcaatgttgatcttkctaacttaatctacaacatccattagtcagatgtttcaccattaatagaacaaatttccaaatttggtttgttttcaataattgggtgaaaaatgcaaacccttatagatattaactaattctagaagttaacttttctatttgaaccatctcagaacatggatataaagctggcacccatttaactgtctgcaaatttctttttaatggagacaacacactaacggctatcgtattactttttgtattgcacaagaaaacttggtataaaaaataagcaaactgaat

SEQ ID NO: 489386 - DNA, 573 bp, Homo sapiens
cagacaggacattcagtccaagaaagagtactgaggccaggcatggtgactcatgcctgcaatctcaacactttgggaggctgaggccagccaatcacctgagcccaggagtttgagaccagcctgggcaacatggtgaaaccccatttctacaaaaaatacaaaaattagccaggcatggtggcacatacctgtagacccagctactcgggaagctgaggtaggagaatcacctgggcccagggaaggttgaggctgcagtgagccatgatcatgccactgcactccaccctgggtgacagagtgagaccctgtctcaaaagaaaaaaaagaaggagtggtgcaaagttctttgtggccacacatctaggtatcattacctaatctaacttatactgaaataaagcagaaatgtttgtttgctagctttccttttctttccttattctatgtaattgtggtaaaatatacataaaataaaatttgctatttcaaccacttctaactgtagagttcagtggcattaagtgtcttcgcattattgtgcagcygtcactaccatccatctccaga

SEQ ID NO: 489387 - DNA, 560 bp, Homo sapiens
taactgccttgagccaggacattggtcttttcaggccttaagactcatactgaaacatcagctctttttctttttagttatttatttttaatttttttaattgacacataattgtacatatgtatggcatacttagtgatattgcaatacatatgtaaggcatagtgatcagatcagggcaattaatataaccatcatggcaaacatttatcttttttttgtgttgggactgagatgggattgtttccttgacctcgaccccctttgtgggcaggaactggagtggctcatttcactcagcctgcagtccatggatggctaactgttagcagctcagtgaagggtcagagtgatagcctcctgcacctgtcctttttgacacctgagttcttgttcggtatccaggaagaatcaggtcacatgaactatttgaagggtagtgtatgtggaggattttactgggtgataaaagtggcwctcagtgggatggggaattggaaagggggtggtatgggaagaagatgatctttccctgaaactgaaccatctgaagttaactg

SEQ ID NO: 489388 - DNA, 499 bp, Homo sapiens
tggtttgggaaagttgcacgcagcaaacgggaacagcttacccactgaaccaccatgcagkaacaggagctacatttggaattcacagtccagaaaaatgtccagcctgcttacaaagcaccggtagaggctcaaaggaaaacagatacaacataatccttttcttttgctaaatgacatcctcatttacatcctcaccatattaattctctttgtttcaacttaactaaagtcaaagacagcttctcaggaagtgttattcacatgtattagacagcctaaaatgacaaaatgttctaattccattcgtggataaaagtcaatttgacaccaacactaagctgttatttttcaaataacaatggtaatgtttaattagaatttaacctggctgcttgctttcatttaacaacgtacagtacgctggtggtttcctgacgaaagcaaagattgacgtccaatgtaaatgctgcatttcaaaaaaagctgcacactacta

SEQ ID NO: 489389 - DNA, 600 bp, Homo sapiens
cattttgtttatttacatctaacagttatagagagaaattttctaaaataccttatttatatgtagataaattatttaccttttcctttctctggaaggaaaattcattgctaagttcaattatcacttcactcttattgccattacagccaaaggtatcctttgctaaatatcaaaaagtactgaaaaggatttactcttattatctcctgttgtcctttctgccactcaacttttaagttgcttccacatactgaagtaataacacaacaaagggctaaagacaaataaaacaaaaacagcaaagaactactgcaaaaacacttggtctgatctcttctcaaatttcagtattctcaagattttaggcatcagggccactttgtactcttaaaaattattgagaaccctccctacagagttttttcttatgtggkttataactatcaatatttaccatattagaaattaagacactttaaattgattaattaatttaaaataataaatcagtatgtgttaatataaataacattttttgcatagccacattttttagaaatacatattgtggagtgtgtcattattttacattttggt

SEQ ID NO: 489390 - DNA, 638 bp, Homo sapiens
ctgccggcaattagacaatcacctgtagtgtcaatatgtatttaaaaaggctttaaatatgacaaataaaaattatgttgacatctttaaccattaacaaaaaggtgaagagaatcccaacttcttccccagacattgtaaaggtaaaacatagaaatttcccatagaaaatgttagaggttttcagggttgagaggagagagagatctcaattataaaatacttggcaactgaagaaacttcaaatattattactataaaagaaatcagaaatatttctaggttgcttacatagaataacatactgaaaattgactaatgattacatctctcattcagatattttaaaattttatttctgtaartgggaagcaaaaggcataaagccttctttaaatttcatattttaaatttagaatcaattatagtttttttattcctacatcattacaatattaacaggttttctaacattagccacaagttcctacatcagtgcagaatatctcaattcagaaggtgaattatggaaattaaataattatatataaatcaaatattttcacttctatttaagacctaatacagaaagcttaaatgttcatattgtaaagaggagttcccagtaatgcaactat

SEQ ID NO: 489391 - DNA, 592 bp, Homo sapiens
accaaacccatatcctgaactagtttttagttttccagcctctgcaatacaggaaggcatattaaaaggaaggtgcaacagatgttaagccaatctatcatatttgccacaacctgttattataattgcacaatttaattacgtatgcctcaaagtaataaataaaagtataaagagttagtttttctgtaacacctaaactgaatgtgaaaggcccagcacagatgtgtttttaaattcactgctatttaattagaggtaggtaaggtaattataaaaagtcagaaaaactataaaaccatagaagattgaaaggagatcaaaatgatctctcagttctcactmttcttcaaagaaatttaaactggaaattataaagaatgagttaaacatacatagtttatgcatgaaagataacagaaaactacaattaatagactcgctcaaagtaaagaccttggcattataccaaataattaaaaaataaatttacatttatattaagtcaaagtcaaatatttttaaagtatgtattttttatgattccttattttactaactctcaatcaacagaccaactactaagttagaa

SEQ ID NO: 489392 - DNA, 592 bp, Homo sapiens
accaaacccatatcctgaactagtttttagttttccagcctctgcaatacaggaaggcatattaaaaggaaggtgcaacagatgttaagccaatctatcatatttgccacaacctgttattataattgcacaatttaattacgtatgcctcaaagtaataaataaaagtataaagagttagtttttctgtaacacctaaactgaatgtgaaaggcccagcacagatgtgtttttaaattcactgctatttaattagaggtaggtaaggtaattataaaaagtcagaaaaactataaaaccatagaagattgaaaggagatcaaaatgatctctcagttctcactattcttcaaagaaatttaaactggaaattataaagaatgagttaaacatayatagtttatgcatgaaagataacagaaaactacaattaatagactcgctcaaagtaaagaccttggcattataccaaataattaaaaaataaatttacatttatattaagtcaaagtcaaatatttttaaagtatgtattttttatgattccttattttactaactctcaatcaacagaccaactactaagttagaa

SEQ ID NO: 489393 - DNA, 659 bp, Homo sapiens
tattggcttttatcctttgaccttacttgtgcttcttaaatcaatcaacagattagcacttccaaaataacttcagctttgatttttttcaaatgagccagcaaacagcctaaaaacttggtaagcctctcaagtatcctatagttgagtgaatagttgctaaaaataacaagtaatttgttataaatatataaaacagaaagcaatgtcatccactattcaattatacaaatagttactgaacattcgttacaggccaggtgcaaggtatgtggtggcaaacataattgttgtcatcacagaactgacagactacgagggagatcagttattctaacttagtgatttcataaacacagkttcattgactatgaggagtttgggtatctatcattaattccatgacagacaaaccaaaatatattgttttagctttgagtgataatgacaaaatagaataaattattatgcttactttaatgtatcttgtgcagcttaaaattactgcccaaccatccccccgacaacataagaaaaaaaacaactaaagaatgataaacaaaatgactagtggtcagtcttctaggtcaaatgtaattacaggtaaaagttacgcatattagtgctgatgaaaaataaattgtgagtataattgagat

SEQ ID NO: 489394 - DNA, 434 bp, Homo sapiens
  misc_feature (1)...(434): n = A,T,C or G
gtctataaaaaataaaaaggtgatcaatctcattagcaatttggtaaatgcaatttaattatgaaataccattatatataactactaacttctaaaaaaattaaagctgtccaatactaaccttggatgaccctgtgaatcaatccaagctctcaacaattattagtaaagtaattattaggagtgtggaaaatggtgcaccaactttagaaaagtttttccaaatgttttcttacrttttttttgttagtttttttgttgttgttgttgtttttaactaacaatcttacttgtatatgtttccaacatttacaaattaaattatcggtattttcataccctatagcccagagttcttttctgaagaagctntcatgtatatgtatcaggggccatgcatgagaatgatttctactgtttataaagactagaag

SEQ ID NO: 489395 - DNA, 304 bp, Homo sapiens
acccactaaaatgagagcataaaagttttataacrgtatgaacagagaataacacagaacaggagaaggggataagattctggaagcaggaaattgtgaggatgtgtggaatctgatgttgtcacctgagctttgcaggcagtacaacaccaggaagcaatatgatttgcttgcccaactcccaaagggtcaaaaattccccatgccacctggaagtggtagggaaagggactaaaaataaacagattgcttgaaagtcccatgactaatcagcaaggcccattccatatgctcctactcatga

SEQ ID NO: 489396 - DNA, 304 bp, Homo sapiens
acccactaaaatgagagcataaaagttttataacggtatgaacagagaataacacagaacaggagaaggggataagattctggaagcaggaaattgtgaggatgtgtggaatctgatgttgtcacctgagctttgcaggcagtacaacaccaggaagcaatatgatttgcttgcccaactcccaaagggtcaaaaattccccatgccacctggaagtggtagggaaagggactaaaaataaacagwttgcttgaaagtcccatgactaatcagcaaggcccattccatatgctcctactcatga

SEQ ID NO: 489397 - DNA, 304 bp, Homo sapiens
acccactaaaatgagagcataaaagttttataacggtatgaacagagaataacacagaacaggagaaggggataagattctggaagcaggaaattgtgaggatgtgtggaatctgatgttgtcacctgagctttgcaggcagtacaacaccaggaagcaatatgatttgcttgcccaactcccaaagggtcaaaaattccccatgccacctggaagtggtagggaaagggactaaaaataaacagattgcttgaaagtcccatgamtaatcagcaaggcccattccatatgctcctactcatga

SEQ ID NO: 489398 - DNA, 511 bp, Homo sapiens
gtgctcgttagccatatgtggcttgtgactaccctaaaggacagcattgcattgaaatgaaacmaagaagattagaaattgttgtcttttatcattatgtttttcccatttcttatgtgcaagtttccttattttatattttccccattgcctagtacactgctaggctcaataaatctgggctgcctttaacttataaaatactaacaaaattaattttgagcagaactggttgctgttagttagacgaatctcaggaaaaaagccaagggtactgttcctcatctgcaaacataaaacaaaccagcaaggacaccactcttattttattctttagtgttaaagccaaccatcataaccaaagatggcatctacaagacaacatttaaacactttaccagcgtcattagtgggctgggtcaacgagactcttccacgagtcatcaaaaccatcttccagtcatgactcttctttatctgaataaatgttcacatgaagaatgtgtatata

SEQ ID NO: 489399 - DNA, 653 bp, Homo sapiens
ctgctggactctggaatacatcttctccctttcccttcagccaggggtggcacttgctacctgcctgtcactagattttagattgcttcaagtcctatgttagcttcaaaacatttccatcacccatgtaacaaatttccttcaacgtggttcccttagatttaaattcaaatttttatttttattttgaggttagagtctgtcctaccatgttgtcatcaagtcccgttcattttgactgatttactctcacatccttattgccagtcccatagcatgagtgcccttccgaagcaggtaaccttcccagcaacaacagggccagtgcctgccccactggcccctgcagaggcccttgatatagcattttcccaagccctgcattcatcatctgttccagagcctaamgtaatcaacacatagctggcattcattgaacactttctttaaagtgccattcactctgttcgcacactaagggcattacagacgtgatctcatctaatccttacagcaacccaaccagcaagttgcttttgctgttgtcttttccagatgcgcagaggttgtagttctgctcccctccccgtcaggtttgtgctttttgctattctctaccaagtcatgcatgtgttcacctctgctcctttgca

SEQ ID NO: 489400 - DNA, 572 bp, Homo sapiens
aaatttttaaagaattgtcaattttatttaattgccaaacccttacaaagaaatcccataacaagttgtaattttatgaggtgtagaattgacagaatatcactttaagtgacttcccagttctgaacaaatagtgacacccacttggaccatgtacctgktgaaaatgtaaaatggactgcggaattgctctgggagccacagtttgccctcattcgaggtgctgaattttctgtaatgttgagttcaggctatctgtctctggagcattaagtggaatttttagaaagggagttcgaaggtggccatgaggcattgcatgctagctggtagtctttaccgaaatgggcacaataaaatcgagcactttggttgtgcatccattcccacagtacctgcttagtgccattttaaaacaaatttaagaatttgcctgatgaagatgtcattgctcatacaaatattccagcctgacaagtgggatgtgattcagagaacagaccctaccctgtcaggaaaggctgtcttaaaaggtcacctgtcaccaaaaagctgatggctttttcctccca

SEQ ID NO: 489401 - DNA, 572 bp, Homo sapiens
aaatttttaaagaattgtcaattttatttaattgccaaacccttacaaagaaatcccataacaagttgtaattttatgaggtgtagaattgacagaatatcactttaagtgacttcccagttctgaacaaatagtgacacccacttggaccatgtacctgttgaaaatgtaaaatggactgcggaattgctctgggagccacagtttgccctcattcgaggtgctgaattttctgtaatgttgagttcaggctatctgtctctggagcattaagtggaatttttagaaagggagttcgaaggtggccatgaggcattgcatgctagctggtagtctttaccgaaatgggcacaataaaatcgagcactttggttgtgcrtccattcccacagtacctgcttagtgccattttaaaacaaatttaagaatttgcctgatgaagatgtcattgctcatacaaatattccagcctgacaagtgggatgtgattcagagaacagaccctaccctgtcaggaaaggctgtcttaaaaggtcacctgtcaccaaaaagctgatggctttttcctccca

SEQ ID NO: 489402 - DNA, 564 bp, Homo sapiens
caattgggttcagcataaaaaataaacaaataaataaataaataaaggacccaaaatatcttattagcctttctccatagcatacagaacagtgccagaacacataagcacacagtgatgattaagaaaatgttttaggccaggcatggtggctcatgcatgtaatcccagcactttgggaggctgaagcaagaggatcacttagcccatgagcttgagaccagcctgggcaacatagtgagatcctgtttytacaaaaaaaaaaaaaaaaaaaattagtcaggcatggtggaatgtgcctgtggtctcagctacttgggagcctaaggcaggaagattgcttgagcccaggaggttgaatctgccataagctgtaatcacaccactgtactccagcctgggtgacagagagagaccctatctctaaaaaaaaaaaaagaaaatgttatatattagttatttacttacaatatttacccatatggacttcaaaaggtattggtagtaacttgcaataaatcacaggatataggaaaatgtaaaaccaagtagaaggaggaggca

SEQ ID NO: 489403 - DNA, 564 bp, Homo sapiens
caattgggttcagcataaaaaataaacaaataaataaataaataaaggacccaaaatatcttattagcctttctccatagcatacagaacagtgccagaacacataagcacacagtgatgattaagaaaatgttttaggccaggcatggtggctcatgcatgtaatcccagcactttgggaggctgaagcaagaggatcacttagcccatgagcttgagaccagcctgggcaacatagtgagatcctgtttttacaaaaaaaaaaaaaaaaaaaattagtcaggcatggtggaatgtgcctgtggtctcagctacttgggagcctaaggcaggaagattgcttgagcccaggaggttgaatctgccataagctgtaatcacaccactgtactccagcctgggtgacagagagagaccctatctctaaaaaaaaaaaaagaaaatgttatatattagttatttacttacaatatttacccatatggacttcaaaaggtattggyagtaacttgcaataaatcacaggatataggaaaatgtaaaaccaagtagaaggaggaggca

SEQ ID NO: 489404 - DNA, 596 bp, Homo sapiens
ctgggtgtggtagtgcacacctgtagtcccagctactcaggaggctaagccagacgatcgcttgagcccaggagttggaggctgcagtgagctatgattgcaccactgcacttcagtctgggcaacagagcaaagtcctgtctctgaaaaaaaagaaaaaaaaaaaaagaggaagataacagatrtatgtgttcttcattttattttattttttttaaaggattcagaaaactgaatgcatggaatttgttttgctttatcacaatgtgaaagtgttgccattccttttcatgtgaagctgctcttattattattattagattactgatgagtttttgcaatgtatcacttttgtatggctcaaggctaaagaggtttttcaatagagcgagtgctaccccgactttgccaaacaatggtaaaatatatcaatttaatcaagagacatcttcctcatatcatttattatcatctacttaagaaggggtaattacgagagtttctgagagttctgagataaggcttgactggatgctgtgtatactttctgagttatcattgcatagaattaacttctcacttcaaaaagaattata

SEQ ID NO: 489405 - DNA, 568 bp, Homo sapiens
gaggagaaccaaagagggtaaatgagacwgtaagtcagaggccaaaacaatgcccaatatgtatattataaactttatggtcaaaatatgtacagaaaggtatcaggagagtatagaagagtatcagaatactaatataaaatcttcagataaaaaaggatggctgtgcatggtggctcacgcctatgcactttgggaggctgaggcgggaggatcacttgaggtcaggagtttgaaaccagcctggccaacacggtgaaaccccgtatctactaaaaataaaaaaataaaaaaattaactgtatgtggtggcacacacctgtagtcccagctactcgggaggctgaggctggagaattgcttgagccccggaggcggaccttgcagtgagctgagatagtgccactgcactccagcttgggtgacagagtgagactccatctcaaaaaaaaaaaaaaaaaaaggatgaaaatgtatcaccaaaatagaaaggaatgagaatattatactgaggtaggctccacttataagaatctaagaatatagagaaaaaaagcaagttgacaga

SEQ ID NO: 489406 - DNA, 427 bp, Homo sapiens
aatcccagctactagggaggctgaggcaggagaattgcttaaatccgggagacagaggttgcagtgagctgagatcacaccactgcactctagcctgggcgacaagagcaaaaatctatctcaaaataaataaataaataaataaataaataaataaataaataaataaatwaagtgtaagttcttctggacatctgatattccttatgatacataaacaatggggtgttctctaaattttgttgtgaataacagtggagagatttagcttacatacatataaatcaatatgcagacactaatccatttgctaataagacaaactatccattgtgaacagtagacaaggtattcatggtctgagcaaaggttaccaaaataaacctaacagaatacttaagaaaaagtggaagactctgcttttaat

SEQ ID NO: 489407 - DNA, 562 bp, Homo sapiens
tcagtcaaaactctcctgctgggttggaaggtaaatgaatacagctccctttctgactttatgagtgcaagtttttccacttgtaactttgcatcctgtccacaatctgatttgaagaatccctaactaagaaccaaataccatatgtcataggacagttgtattttttaggatagtggtattcttggagcttaagaataactaatcgagataaacaggacttccgtgggacagacacacataaaccattcagatcaaygaaaggacgtgcccggagtcagagaaaaccgtagcctaccctgggatgagctttactttgtagagtgtggctgagattttactgagtcacctggagcaatgctctgcattttctggacttttctggaggtggaagtaaggaatggaaagtgactataatgaagccatcaaggtgtccttagcactgttgctgggcacatgctatcactagcttatgggtctgggaaaaccagccaatgaggttcatattaaagcatacctacacctctttacccataattcaagctgtcttacggggtatgaa

SEQ ID NO: 489408 - DNA, 650 bp, Homo sapiens
gtgaagaacacattggcagaagaagatacaagtagtccgtggtcaagagcgcgccaaaaggcacctactggtggaacaacctggagtccggcccgagcagcgtgactccaggggaaaaccatctcccttctggcttccccatctgctgagagcwacttctactcagtaaaacttcgtgctcactcttcaagcccacttgtgatccgattcttctggtacaccaaggcaagaaaccccgggatacagaaagtcctctgtccttgtgacaagctggagggtctaattgagctggttaacataagctgcctatagacggcaaactaaaagagcaccctgcaacacccacccactggggtttcaggagctgtaaatattcacccctagacactgccatggggtcggagccccacaccctgtatgtctgtgtgctcccctagaggtgtgtgcagtggggcactgaagaagcaagccacacccccatcacacttcctgtgaggggaacaagggaatcttccccgtttcattatgagtctgaaaggagagaagaaatgatgctgtgacttttcaaactgtgagagcaacggtgttacttctttttattatagtttgttacacttttcgctatcaaattttaaaagtaacttgatcac

SEQ ID NO: 489409 - DNA, 642 bp, Homo sapiens
agtaacacttctatttattgacatatgtcaggttatgagggcctgacatgctatactgagaaggctctattttattcttgtggacagtggttttaagacttattttctcagtaaggacattcttcaatggaaattgtcttagttaaaatgtaaaactrttgctataggtaataagaagcttaaagtgatggtgattgggaatgcctcataatagctgcacttaatagcaattactctaaaaatggagaatgccttgaaggaatataaatatggagggagaaagaattgcaatatttcaggtaagaaatgaagagagcctggattagggcaatattagtagggatagaaaatatggatacaggttagggagtaagattgcagaatagaagcctataccatttgtgccccctgccctttccttctcaaacaccaaattttaacaaaaagatcccaaaatcatgtgagcactcacagcacctggtttaaatatcatatcactgaatgaggcactagacaaggagaggaaagacagttttgaatcaccaatggcacccctccccatcccctggtagcagccctgacattcgagagtctgggcatttggcagagccctcgccagaggggaatcacccctccaagcag

SEQ ID NO: 489410 - DNA, 579 bp, Homo sapiens
agtttctagctaattgaacaaggtcactcctatgaaaatgagatcttaaacagtttgtctcaccagaaactttcttaaaaatcatgcttaagatccactgtckgaaaatattctaagaatcttcaaaaacaatgcagcctgctgttttttcttttttggatggtaggtgatagcagtagaattttggtagtatataatttttatttatagctctatagtctgtaacagatatcaacttgtaaattatttctgaaggttaaataataatgttcaattgtgcaagtttcctaaatccataaaaactgtaattactttatattttatacttccaatataattttcatgaagggactctctggagaacaatacatttcactggctagaaaagaaaagggataaaaagaaaattatccaattcacatcaaacaaaaattaaagtgaggcaaaaaatattggataacctacaatagtcaaaatacattggacatgtaaaacaataaaaaagtcctgaatgagatgtacctcattttttcaaaaatattctctctgtttttgacgcatagttatgtgacttggtgg

SEQ ID NO: 489411 - DNA, 607 bp, Homo sapiens
tcatgcatgagaaataatacaacatgaactaaggtgtcaaaacaattgtctaactaagaccaatttttaggatctcagwgaattcatgctttagacacactgcaagaatagagccctcaaagccataatcagaacctaagtcttcctctcactgaaaagggagtggaattctattcaaggtttattttagctttccagtgctttcaaagtcaataagctgtactggttttcttgcttttactgtttgaagttgctcactggatcagtaatacatcaagaaaaaaatgcatataaagtacgtccataattgaaaacataatcttagttcttttgtaggggagggtagaaatggcccagaattaactattgtccttattttaattcagagtgtaatacagtaagaataagaactatgctctacaataccagaaatatagtaaatattttatagttaggttattttgcctgaaagcatctagggagctttgtgtctgtagaaagataaaaatgaagatttcacaatcagacttagatttctcttcagcctcttaacacatctacagggccaagtggaagaaacctgatgctgatatacaccagaccaaac

SEQ ID NO: 489412 - DNA, 607 bp, Homo sapiens
tcatgcatgagaaataatacaacatgaactaaggtgtcaaaacaattgtctaactaagaccaatttttaggatctcagagaattcatgctttagacacactgcaagaatagagccctcaaagccataatcagaacctaagtcttcctctcactgaaaagggagtggaattctattcaaggtttattttagctttccagtgctttcaaagtcaataagctgtactggttttcttgcttttactgtttgaagttgctcactggatcagtaatacatcaagaaaaaaatgcatataaagtacgtccataattgaaaacataatcttagttcttttgtaggggagggtagaaatggcccagaattaacyattgtccttattttaattcagagtgtaatacagtaagaataagaactatgctctacaataccagaaatatagtaaatattttatagttaggttattttgcctgaaagcatctagggagctttgtgtctgtagaaagataaaaatgaagatttcacaatcagacttagatttctcttcagcctcttaacacatctacagggccaagtggaagaaacctgatgctgatatacaccagaccaaac

SEQ ID NO: 489413 - DNA, 484 bp, Homo sapiens
ataaactataatgagagtttgtaacaaaattgtgataggtacagttttctcaataaatcaagaagtcattagctgatagaaggaaaagattgaagagggcacataagaaaagcaccacatrtttaaataattcattgaaaagattgggaaagggggtagatattacagtgactagacaaattggagaccacaggtttgtaatggtctttaagtttttgttattattctttggcagattcagctactaggatatgggagcagagaaggtggattgtggcaacagtgtaggatcagaatattgtaggtaataggtgaatagacagatataagagtcaaggatatttgtgagcaagtaatttgggtaaccagccacagggtctagcctggggggaaaaagggagcagaggagggatccaaggactgggagcagccacatggatcaagaaaatgagcaccattagcataaatagtaggagctatttaa

SEQ ID NO: 489414 - DNA, 493 bp, Homo sapiens
gctgacatttgtgctctgtccttcctctctatggccccaagggaaaaggtagagtcagtatttgccatttttgyccatgtcttaactaacaacttaacagtcaccatctaccaatgtatcgttataaatgtccctatagtacccatgaccatttgggatgtcagggatattgaaaacagctcttccctagtaaatctgagacccctttgatgagatcatctttttaacccagtccaattctgagactcactaattttataatacagacattcataacaaaaaaactctcagatcctttacaaattgccccaggcttgtccatgtgttattaaagttgggctgagtaataaatgctataaatgtcttaggagacagcactcatgcccagtgagcatgacatcccataatagacctatttggcttgttaccctggcgcctttctccaccctgatctctggaaaccagagaaaggcaaacattagaatgtcaatcc

SEQ ID NO: 489415 - DNA, 493 bp, Homo sapiens
gctgacatttgtgctctgtccttcctctctatggccccaagggaaaaggtagagtcagtatttgccatttttgcscatgtcttaactaacaacttaacagtcaccatctaccaatgtatcgttataaatgtccctatagtacccatgaccatttgggatgtcagggatattgaaaacagctcttccctagtaaatctgagacccctttgatgagatcatctttttaacccagtccaattctgagactcactaattttataatacagacattcataacaaaaaaactctcagatcctttacaaattgccccaggcttgtccatgtgttattaaagttgggctgagtaataaatgctataaatgtcttaggagacagcactcatgcccagtgagcatgacatcccataatagacctatttggcttgttaccctggcgcctttctccaccctgatctctggaaaccagagaaaggcaaacattagaatgtcaatcc

SEQ ID NO: 489416 - DNA, 635 bp, Homo sapiens
gctgaaatcttgaagtggatgaggtcactctggtacagttcagtgtkcaaaagaagactcttggcagcaatagcctaggaagtatgaacatttaaggatgaccaaagaccaggagccatcacaggtgaccagaagaatacaccgaggggcagaggattaggagcctagtctaaacggatgttggaaagaaatattagaagatgaatatgggaattataatacttaggatagaaaatgaacagagctcctcaatatccttagtgaggggaatgagagggagaaaagggttaagaatgactcccaagcttctcgtttgagtgaccagttggtgaatcagaaggaggaagttaggttctaagataattgtttaagttgctcatgggacatcaaggaaaagacctataggcagtctgagctcaagagagcatctagatagtgggctaacctgggaagtatcaacacaaaggtggtatttaatatcaggggagatgagatggccctggaggggctgttagttaagccccattaatattctcattgaaggaataggcagaggaagaacctagcaaaggagaccttacagtgagagcagggagagctaagtttgtcctccagaagaaagcctccttatccac

SEQ ID NO: 489417 - DNA, 635 bp, Homo sapiens
gctgaaatcttgaagtggatgaggtcactctggtacagttcagtgttcaaaagaagactcttggcagcaatagcctaggaagtatgaacatttaaggatgaccaaagaccaggagccatcacaggtgaccagaagaatacaccgaggggcagaggattaggagcctagtctaaacggatgttggaaagaaatattagaagatgaatwtgggaattataatacttaggatagaaaatgaacagagctcctcaatatccttagtgaggggaatgagagggagaaaagggttaagaatgactcccaagcttctcgtttgagtgaccagttggtgaatcagaaggaggaagttaggttctaagataattgtttaagttgctcatgggacatcaaggaaaagacctataggcagtctgagctcaagagagcatctagatagtgggctaacctgggaagtatcaacacaaaggtggtatttaatatcaggggagatgagatggccctggaggggctgttagttaagccccattaatattctcattgaaggaataggcagaggaagaacctagcaaaggagaccttacagtgagagcagggagagctaagtttgtcctccagaagaaagcctccttatccac

SEQ ID NO: 489418 - DNA, 635 bp, Homo sapiens
gctgaaatcttgaagtggatgaggtcactctggtacagttcagtgttcaaaagaagactcttggcagcaatagcctaggaagtatgaacatttaaggatgaccaaagaccaggagccatcacaggtgaccagaagaatacaccgaggggcagaggattaggagcctagtctaaacggatgttggaaagaaatattagaagatgaatatgggaattataatacttaggatagaaaatgaasagagctcctcaatatccttagtgaggggaatgagagggagaaaagggttaagaatgactcccaagcttctcgtttgagtgaccagttggtgaatcagaaggaggaagttaggttctaagataattgtttaagttgctcatgggacatcaaggaaaagacctataggcagtctgagctcaagagagcatctagatagtgggctaacctgggaagtatcaacacaaaggtggtatttaatatcaggggagatgagatggccctggaggggctgttagttaagccccattaatattctcattgaaggaataggcagaggaagaacctagcaaaggagaccttacagtgagagcagggagagctaagtttgtcctccagaagaaagcctccttatccac

SEQ ID NO: 489419 - DNA, 592 bp, Homo sapiens
ccccaactccaggcagttcagccttcctcaacatctttccacctccccttaggaacattcaaacagcaagaaaaattctaaggaatctagaagtaaatttgcctccctccacaatccacccaaagctttcttgtaaaatagaatgtgtcttgtacatgggcaaagtacagtccacaaayatgagtgtctatttcttgagaatcttctatataactaagccttgttagcctttggctcagggggcctactgtatgtacaaattctgcatccaaaaagcagtgctaagtccattctctagttaccataaacgacttgacaaaatcaacagaatgctgatgagccaatcttctgataatgggagtgaaaagatagaatgtctagatctggaccaaaaccagctcaaccatttgcatggcaatttcaaatatagatagggtctgaaagaaaatttgtattgccgagttatgaagaaatgaatttgcattttgcctgggccactcaataattattctttaaaactaacaaagagcaggcaagatataggacaattgtaggaaggagagcaaatatggaatcaatcttgcagcaagag

SEQ ID NO: 489420 - DNA, 419 bp, Homo sapiens
actaaataaaacatatggttcaggagctcaatatatactgaagctttaactttagtacatcaattttttagcttccctttctaaagtttggtataatctaagaattcaaattcagagtcacttctaatttagttatttctggagaaggagtgagatttggtactctcatttacatttattccaggctgttaggaacctgtgcgttcttcatgctaaatattgctccctgaagagtggggaaaagtcctctaaaacatgcagtatctatcttgatgtaatttgtgataaaacaatgaaaataacaaccagagtgtggaatctaagmctatgtctactgcatcagtttccttctatatcctctattagcataagttgaaggatattttgggaatgatctggtttctggctgtgttaacaca

SEQ ID NO: 489421 - DNA, 598 bp, Homo sapiens
gaaaagcaatcaattttctatatcagaatagcttcaatttcctactcagtctatgtccttgcgttgaaatttaacaatataacatacaaaacctaaawaaaattattgatttgttgtttctattacatggccataagtaaattcaagtggtgcttttttaaaaatttattatcagatagatagtaataagtgcttgtattagtcatgattctccaaagaaatagaaccaataggaaatatagaaatatctacatataaattattaaaattggctcatttaattctgaaggctgagaagtcctaaggtctcccatgtacaagctagagtatcatgcacacctgaggtgtaattcagtctgagtgcaaaggtgatctgatgtctgagggcaggagaagatggatgtcccaactcaagaatagagaagaagttcacctttcctatacccttttgttctatcagggcatcatctgattagataatgtatacccacattagtgagggccatctttttactcagtcctccagttcaaatataggcagataccttttgctaaggccttgttgctgatatagaaatagactatttaatataaaatg

SEQ ID NO: 489422 - DNA, 488 bp, Homo sapiens
tgtagcatttcctgaagatatacatttaatttaatttatttgttgcaattaacattgttatttaktctagtattgctagtttagtttttatttttttctgactgggaaggttttaggagtgtatttattttttctcatttgaacaagtcccaaaatctatagacatggttagtgatatattgtaaaataatttttttgttttagttttaaatataggaattcactgagtgggtcaactaattattctttatgaaggtgtctaaatgaaaatatgactagtacatttaaatattatatatatatttctgcaaagaattctataatctacttgagctcattaacaagttcaaaggtattacagttactttaaggcttattcttcactaggcatagattttccagttcttttttcttagttctaattaataaaagtctgtaaagttaccagaagtaagggaagttaagaaaagtaaaaagctaatttaaaa

SEQ ID NO: 489423 - DNA, 485 bp, Homo sapiens
gattgtacatacatcagcttgtgtttctttgtggccggctgcttgttggtccattccagttgcatgtttttatttatttaatagatgtgtgctgtgcacccctctgactgctatcagagagagagagtaaacctttaacccaccccagcgaacagtgaaagaactagagagagcctaaaaattatgatgaagtaacatcccccaaatacctgaaaatgatgccatttttcttytctgtaactatcagcaaataatttaacctactacattggctcaaaaaataaattggggaaactgaatggagatactgaaaaggaaacagtgaggaagaaagcatgccaggtacagctagacacagtttaatgccagtaataaatgtttaacacctccaaatacattaattactgcttcaattactttcctattaaaaagaacaattcaaatcaatttcaacgtgctagtgtctaggagaaactggcaaaact

SEQ ID NO: 489424 - DNA, 595 bp, Homo sapiens
atttggtccctgttcttcctaggactctgccacaaattctgcagtggaatagttaatagtagtccatcagagcagttcacaacttcttctgcttgaataaayacccatttttctcatgacaatctttggccctgggaacagtcttcaaaccccaaatctctcctctcttaaggtgagttgctcccatgagatccaatttctcatccacatggataagtgaagtttttcgaagcagctcaccagaacatgtcaaataggtatgaacttgaagtattattaatactcccctcatttacagatctcttcctccaaccaggatatatttttttaaatcctgttttacacaatgacaattgtgaaaaattactattaaattatctgtaaccagaaacagtgtttcatagatagtaggtatagcaaaaatgtgaccaaagcaactgctataaaagggacacagaaaaaataaacttaaaagttcctgtagctggataagttcccttatgttttatctattgctatataacaaaccacctcaaaatttagtgctaaaggtaacaatttactattcctcacaattctgtgttagctgcatggt

SEQ ID NO: 489425 - DNA, 637 bp, Homo sapiens
tctaatttgttactttgattcatgctcactagcaagaattctaaaccctaggttctttgcctccaaaggttcctgataaaaatgaatctcaagaattagtttcattttttattctatatatttactttatgcgtttaaaaatatttttctaaggaggaaataggtgttttagtatttaccactaactgggtaatttataatcaacagaaatttattgattcacaattctggagcctgggaaatacactatcaatatacgggcatytggtaagggcattttttgctatggcatcacgtggaagaagagcaaagagaaagagaaaaaggagggctggacttacccttttataatggcaccaattccaccatgagggtgtaaccctcatggcctagtcacctcttaaaggccacacctcttaatactgttacaatggcaactgaattttagcatgatttttggacgggacgtatgttcaaaccatagaatctcatccctgagccctccaaactaacgtccttctaacatacaaaataaattccttccatcccagtagcctcaaaagtcttaatttgttccagcatcaactcaaaagtccaaagtgtagagtttcacatatgggtgagactcaaggcacca

SEQ ID NO: 489426 - DNA, 575 bp, Homo sapiens
ccttaatctgccactcctgcaccagcagccaggcctcccactgggacccccttatcaaacagacaacccttggaggtttgagatggagcgatgggacagtctcccttggtggtggcaacaggctgctagggactcggtagcagtttccttgatgagcctgtcccatgccagtcgggccctgccacgtacctgccttctcttcaactcataggggatttttaagggccttccagggcggctggaatggggaagaagccgctgggaagggagcgcactcaggagggaattgggaggccaggggtaccttaccagagggctgcaggctttcctggatggcctcgatctccgccagctccatgcacacgccttgcccgtgcatcagtgtgtgcaggggcttctccacccctcggggcgggtagcagcgcaggcccgagccgcaacggggggtgtacaccccgcagggcatccccaagcccagggcgcaagtggcgcaacagccgcagcccggctctcgcaccagctcctcgcagcccacgggggggcggcagcgcgcyagcttctcctcggagcagggc

SEQ ID NO: 489427 - DNA, 506 bp, Homo sapiens
tcagggcatacaggctgaaagtcttcattagagatgatcctttttcacaagacggtgctgaaggcaaagaaagaatctcctgcccctcttaaagccgaactcaagaaggcagtgttgaaaggtgtccacagccacaaaaagaaagaagatccacaggtcacccaccttccggcggcccaagacactgcgactccggaggcagcccaaatatcctcagaagagcgcccccaggagaaacaagcttgaccactatgctatcactaagtttccactgaccactgagtctgccatgaagaagatagaagacaacaacacacttgtgttcattgtgaatgttaaagccaacaagcactagatcaaacaggctrtgaagaagctctatgacattgatgtggccaaggtcaacaccccgattcagcctgatggagagaagaaggcatatgttggactggctcctgattacgatgctttggatgttgccaacaaaattgggatcgtctaaactg

SEQ ID NO: 489428 - DNA, 412 bp, Homo sapiens
aaaggctgggttcaggttggagatgttttgggtacatattctgattgggttgggactttaagaatgggattatagttatgaggtggatccaagctgggattaaggtaggaccagggtaagagttgcagttgaatgaggaaatatgactaaaagttgagctggatgagttgggtgagggttaaagcccaggtaaaaacacaattgggataaagacagaggtcaaggtcagaataactaaagttaagctaaattttgggtcaaaattagatagtagaaggttcagggggcgcaaatgtatatttcagtgtgagaattaatcttggagtgaaggatagcttaaggatcagaactggtctggggrtaaagttcaagtgtcagaactttcaatgggataaaaatcagaggaagaagc

SEQ ID NO: 489429 - DNA, 506 bp, Homo sapiens
gttttacatcttcttttgcctcagtttccacatttacccctcattgctaccctggacttgccttcccaaataaatgtcatcactgtaaactcagacactggctctagttctagacacccaaagctaagatatacattcagttgcatcacttttccatgcatttataatatggcaattaaaacattcatttagaaaggatactaaaatatatatataaataatgtgtaagaaaggtgactcgttactaactcaatttttaaaagcgaaatgccatctttgtgtatatagtaaccagctagaaaatatcataatacaaatatatcattcacagtagaaagtgattgggtacatttacaaacagcttaaccagttgcaaagtttgmtagctttttttttttttcatttcttttgtgttcacttcttttgtatcagcaaagcattgaaggcagcataagtcatactgagggagaaagagatgttccctaaaaacaagagtgtgtttggca

SEQ ID NO: 489430 - DNA, 588 bp, Homo sapiens
ccactatgcatgcctctagcagctttgaattccgctggatcatctggcacagtggccagagcagcytggaccagagcctatatcttctgtagagccctctttagttctgggctccatttgagaccagtagcctttagaaacatcgttcgtgagtcagagcaatattctcaaatgtggaatatgttgtctccaaaatcccagtaggcccccaaaacatagtgtctcttttgtagtgataggaaatatatagagagagcaaaatgccgtttactgtaaaaaagattgtctcagcatgtggactagggacactaaaaaccttaaaacatcacctatgttgtcggtccctgaatcttctctgatttatctattttcttctggtattttacttctgctcaatgttataatattttactatactgaagaaacttgccatttcctgattattgtaccaactaatatattattattggtattattttgagacacggtctctttctgtccctgaggctggaatgcagtggcaggatcacagctcattgcagcctcaaccttctgggcacaagtgattctcccacttcggcattgctg

SEQ ID NO: 489431 - DNA, 585 bp, Homo sapiens
gtataattaccccaacaagacattattattttctaaacattcatttagaattatgcacatatttaccactttcattaatttgtattccttcttgcatattcaacttaatattttcaataagaccctttattggccaggcagggtagctcacacccataatcccaacattttgtaaggctggggcaggagcacccaggagttcaagaccagcctgtgcaacacagyaaaactgcctctacaatgaatgaaaaagttagtcaggcatagtgaagctactcacaaggctgaggtgggaggatggtttgagcccaggagttccagactgcagtaagccatgatcctaccactgaactccagcgtggacaacagagtgagaatccaactctaccaacaaaaataataataataataatttttcttttatctgaaaagatatattttaaatttctgtttatcaagatctattctacttttgaaatacactgaagacatgaatccattgaactctagctttatttttgtctgttgaaaatcagcttgtcgtttagacagttattccctttaacataatctatcttttcctct

SEQ ID NO: 489432 - DNA, 585 bp, Homo sapiens
gtataattaccccaacaagacattattattttctaaacattcatttagaattatgcacatatttaccactttcattaatttgtattccttcttgcatattcaacttaatattttcaataagaccctttattggccaggcagggtagctcacacccataatcccaacattttgtaaggctggggcaggagcacccaggagttcaagaccagcctgtgcaacacagcaaaactgcctctacaatgaatgaaaaagttagtcaggcatagtgaagctactcacaaggctgaggtgggaggatggtttgagcccaggagttccagactgcagtaagccatgatcctaccactgaactccagcstggacaacagagtgagaatccaactctaccaacaaaaataataataataataatttttcttttatctgaaaagatatattttaaatttctgtttatcaagatctattctacttttgaaatacactgaagacatgaatccattgaactctagctttatttttgtctgttgaaaatcagcttgtcgtttagacagttattccctttaacataatctatcttttcctct

SEQ ID NO: 489433 - DNA, 585 bp, Homo sapiens
gtataattaccccaacaagacattattattttctaaacattcatttagaattatgcacatatttaccactttcattaatttgtattccttcttgcatattcaacttaatattttcaataagaccctttattggccaggcagggtagctcacacccataatcccaacattttgtaaggctggggcaggagcacccaggagttcaagaccagcctgtgcaacacagcaaaactgcctctacaatgaatgaaaaagttagtcaggcatagtgaagctactcacaaggctgaggtgggaggatggtttgagcccaggagttccagactgcagtaagccatgatcctaccactgaactccagcgtggayaacagagtgagaatccaactctaccaacaaaaataataataataataatttttcttttatctgaaaagatatattttaaatttctgtttatcaagatctattctacttttgaaatacactgaagacatgaatccattgaactctagctttatttttgtctgttgaaaatcagcttgtcgtttagacagttattccctttaacataatctatcttttcctct

SEQ ID NO: 489434 - DNA, 585 bp, Homo sapiens
gtataattaccccaacaagacattattattttctaaacattcatttagaattatgcacatatttaccactttcattaatttgtattccttcttgcatattcaacttaatattttcaataagaccctttattggccaggcagggtagctcacacccataatcccaacattttgtaaggctggggcaggagcacccaggagttcaagaccagcctgtgcaacacagcaaaactgcctctacaatgaatgaaaaagttagtcaggcatagtgaagctactcacaaggctgaggtgggaggatggtttgagcccaggagttccagactgcagtaagccatgatcctaccactgaactccagcgtggacaacagagtgagamtccaactctaccaacaaaaataataataataataatttttcttttatctgaaaagatatattttaaatttctgtttatcaagatctattctacttttgaaatacactgaagacatgaatccattgaactctagctttatttttgtctgttgaaaatcagcttgtcgtttagacagttattccctttaacataatctatcttttcctct

SEQ ID NO: 489435 - DNA, 629 bp, Homo sapiens
ctgaaatccagcacaaggagagtctttgcaggtgaaggttcaacttatatactcagtgcaatccctatcaaatcccaacaagcctgttttgcaaaaagtgaaaaaccagtcctaaaatatatctgaaaatacccagtgaccagatcaccaaaataaatcttgataaaataacacatttggaggattacactttctggtttcaaagctaactacaaagctgcactaatcagrattctgtggtactggcattacagtagacaaaagaacaatgaaacacaactgagagtccagaaattaacactgacattgatggtaattgatttcaaaaatggtaccactgcagttcaataggaattaatcattttttcaacaaatgatactgagaacattgaatatccacatgcataaagataaatttctattcttatttcacaccatacacaaaaaataactcatatttaattgattatagagctaaatgtaaaaagtgagattagtaactaagatactaaaacatactaactgtacaattgcaagtaatacaagtgggttaatcaaccataattctatctgtgtatttctctacttagatcattatgtctataataataataatcccctgcctatca

SEQ ID NO: 489436 - DNA, 629 bp, Homo sapiens
ctgaaatccagcacaaggagagtctttgcaggtgaaggttcaacttatatactcagtgcaatccctatcaaatcccaacaagcctgttttgcaaaaagtgaaaaaccagtcctaaaatatatctgaaaatacccagtgaccagatcaccaaaataaatcttgataaaataacacatttggaggattacactttctggtttcaaagctaactacaaagctgcactaatcagaattctgtggtactggcattacagtagacaaaagaacaatgaaacacaactgagagtccagaaattaacactgacattgatggtaattgatttcaaaaatggtaccaytgcagttcaataggaattaatcattttttcaacaaatgatactgagaacattgaatatccacatgcataaagataaatttctattcttatttcacaccatacacaaaaaataactcatatttaattgattatagagctaaatgtaaaaagtgagattagtaactaagatactaaaacatactaactgtacaattgcaagtaatacaagtgggttaatcaaccataattctatctgtgtatttctctacttagatcattatgtctataataataataatcccctgcctatca

SEQ ID NO: 489437 - DNA, 629 bp, Homo sapiens
ctgaaatccagcacaaggagagtctttgcaggtgaaggttcaacttatatactcagtgcaatccctatcaaatcccaacaagcctgttttgcaaaaagtgaaaaaccagtcctaaaatatatctgaaaatacccagtgaccagatcaccaaaataaatcttgataaaataacacatttggaggattacactttctggtttcaaagctaactacaaagctgcactaatcagaattctgtggtactggcattacagtagacaaaagaacaatgaaacacaactgagagtccagaaattaacactgacattgatggtaattgatttcaaaaatggtaccactgcagttcaataggaattaatcattttttcaacaaatgatactgagaacaytgaatatccacatgcataaagataaatttctattcttatttcacaccatacacaaaaaataactcatatttaattgattatagagctaaatgtaaaaagtgagattagtaactaagatactaaaacatactaactgtacaattgcaagtaatacaagtgggttaatcaaccataattctatctgtgtatttctctacttagatcattatgtctataataataataatcccctgcctatca

SEQ ID NO: 489438 - DNA, 631 bp, Homo sapiens
acttttacaagttacttctgcacaggaaggcaccaattcaactgtctgatagataaggcaccaagcctgcatgaggaccctctacccttgctcagtatccctccttaccttataaaagtgtctgctttctgctccaaaggtgaagtggtacacttaaaggcaagacactttgtgctccttccccaagctaggtttggaataaattcattacttttgtaccagacctcacttttgttaactggacactgcatgcggccagcaacggactcgcatattggttataggtccaaaggagtctcctgtctcatctttctgggtaactgggactacaggtgagtaccaccatgccaaactaattttttgttgttgttttttctgttttttagtttttgtacagacaggctgtcactgtgtagcccaaggtggtctgcaactctgggcctcaagagatattyccacctccgcctccaaaagtgcggggactgcgggcatgagccatcatacccagcctgcagagggagttttgaaggtcagatgctacctagagttttgactcatgtccatcccaaggtggatctaatcagtttgccgttattgcctcttcttgaatgtgtaatggacacacatggca

SEQ ID NO: 489439 - DNA, 615 bp, Homo sapiens
gctggcaggactctcactttcttcctgacctgtagagtcagggacattattagagcagaaccaaggggaagcctgtgaaattctcctccactggcaacaatgattgaaaaataataatcacattctccaaggaatggaattgatcactaccatgacaaaacacttgaaagttgcaggggatggtagtctttttatatgcctatccacttaacctatctggcctctaccaaaaccagatacactataaaatgaatgcagatttccataaatttaaatcactacttacaaatgctctctaggatgtggtatcttccctgagcagagcagagctcctggcagtttgcatgtggctcttgatttagtgaatgtttcttattttacacccatgggtgggtcagcagattaaaacaattggcctttgtgtggtaaaaacaagagcactgcttcactgttttatgtcagggctttgtcacttctgctctcagtttaatttacattttggaaaacatcatgttaatttaatatattaataaygttacggtaattggtacaataaccaggaaatggaaagttacctaattatagtaaaatacttaaacattaaatagaaataaa

SEQ ID NO: 489440 - DNA, 575 bp, Homo sapiens
gatgaccaccatgctgtctgtctcactaattgtgaagtggccaccagcaaaatcatatcaacatcacgacacatggttttacatcttcttttgcctcagtttccacatttacccctcattgctgccctggacttgccttcccaaataaatgtcatcactgtaaactcagacattggctctagttttagacaccmaaagctaagatatacattcagttgcatcacttttccatgcgtttataacatggcaattaaaacattcatttagaaaggatactaaaaaaatatacaaataatgtgtaagaaaggtgactggttacaaactcaatttttaaaaatgaaatgcctttttgtgtatatgataaccagctagaaaatatcataatacaaatatatcattcatagtagaaagtgattaggtacatttccaaccaacttaatcagttgcaaagtttgctagcttttatttttacttcttttgagtttacttcttttgtatcagcaaagcattgaaggcagcataagtcatactgaaggagaaagagacgttccctaaaaacaaaagtgtgtttggca

SEQ ID NO: 489441 - DNA, 545 bp, Homo sapiens
cttcttttgcctcagtttccacatttacccctcattgctgccctggacttgccttcccaaataaatgtcatcactgtaaactcagacattggctctagttttagacaccaaaagctaagatatacattcagttgcatcacttttccatgygtttataacatggcaattaaaacattcatttagaaaggatactaaaaaaatatacaaataatgtgtaagaaaggtgactggttacaaactcaatttttaaaaatgaaatgcctttttgtgtatatgataaccagctagaaaatatcataatacaaatatatcattcatagtagaaagtgattaggtacatttccaaccaacttaatcagttgcaaagtttgctagcttttatttttacttcttttgagtttacttcttttgtatcagcaaagcattgaaggcagcataagtcatactgaaggagaaagagacgttccctaaaaacaaaagtgtgtttggcagctgctgggaagttccctaacattcttgtcatggggtctgctagccccgagcag

SEQ ID NO: 489442 - DNA, 545 bp, Homo sapiens
cttcttttgcctcagtttccacatttacccctcattgctgccctggacttgccttcccaaataaatgtcatcactgtaaactcagacattggctctagttttagacaccaaaagctaagatatacattcagttgcatcacttttccatgcgtttrtaacatggcaattaaaacattcatttagaaaggatactaaaaaaatatacaaataatgtgtaagaaaggtgactggttacaaactcaatttttaaaaatgaaatgcctttttgtgtatatgataaccagctagaaaatatcataatacaaatatatcattcatagtagaaagtgattaggtacatttccaaccaacttaatcagttgcaaagtttgctagcttttatttttacttcttttgagtttacttcttttgtatcagcaaagcattgaaggcagcataagtcatactgaaggagaaagagacgttccctaaaaacaaaagtgtgtttggcagctgctgggaagttccctaacattcttgtcatggggtctgctagccccgagcag

SEQ ID NO: 489443 - DNA, 545 bp, Homo sapiens
cttcttttgcctcagtttccacatttacccctcattgctgccctggacttgccttcccaaataaatgtcatcactgtaaactcagacattggctctagttttagacaccaaaagctaagatatacattcagttgcatcacttttccatgcgtttataacatggcaattaaaacattcatttagaaaggatactaaaaaaatatacaaataatgtgtaagaaaggtgactggttacaaactcaatttttaaaaatgaaatgcctttttgtgtatatgataaccagctagaaaatatcataatacaaatatatcattcatagtagaaagtgattaggtacatttccaaccaacttaatcagttgcaaagtttgctagcttttatttttacttcttttgagtttacttcttttgtatcagcaaagcattgaaggcagcataagtcatactgaaggagaaagagacgttccctaaaaacaaaagtgtgtttggmagctgctgggaagttccctaacattcttgtcatggggtctgctagccccgagcag

SEQ ID NO: 489444 - DNA, 599 bp, Homo sapiens
cagaaagtaaatggcaaataacatgaggaaggaggtcacagtttgcaaagcttttatatggaccttggtgctgggatcttgagatcctttgctatggagccgcatcttcttgagatgtttacaaagagaacagattaacagcagaaaacatattaggctcagagtaaagggtatgaggtttgctagagtagttacagtcaagcttgaaaggtgtattgcattcctcaatttgatcttccaagtcacatttccttcatattcttttgtccacactctctcatccatggttatcacagcaagattacaaatcaraaataccaagggccccaacagtatcaccagaacaacactcttaattctcttctttaggtggagagaaataaggttggagaaattggcaatcttgagcaaacaaaatatgctgaggctagcagcaagccacatgctgaaatggttcgttacagcccaggcattagaagcaacaattcttacttctaaaccatataaagcagaattaaacacagttgcataccaaaggaataacatgacccagagtaaaccaattctggagaccaccagagcagtgagaatttgctcag

SEQ ID NO: 489445 - DNA, 264 bp, Homo sapiens
gagtttttgaaggtcagatactacctagagcttcggctcatstccattccaaggtggagctaatcagtttgtagttactacctcttcctgaaagtataattgaaatagatatgtatggcagccggcaggactcacattcttcgtgaactgtagagtaaaggacattattatagcaggaccaaagggaagcctctgaaattctcctctactggcaacaaaatatataaaatataataaccgcattccctaaggaatggaactggt

SEQ ID NO: 489446 - DNA, 610 bp, Homo sapiens
taaaacatgtgcaaactagcaccttaacactttttgtaatttcatgacaaatgctatcatatttcatagccagcagatggcactaagtatacataaaatgaacattttgcacactgtcactttttttttttttctcttgagacagtctcactctgttgcccacgctgcagtgcagtggcgcaatcgtgtctctctgcatcatgggctccagcgatcctcctgcctcagcttcccgagtagctgggaccacaagcgcctacctcctacttattttaaaagagttcaatccaggctctactgttctcaagggacttttctccatactaggaactctaaaatctgacaatggtctggatctctgagataggcaaggcatcttgtaggtacagggtcctctcttctgccaggggctactgtgctgtagtctcagagggatttcatcaggggatcccagtaaggttgtaaaatgaataatgatcttggtggcaccacaccatctctgtgtagtgaggaaaacttatgtaaaactggaacgggtgaaggggtgaaactaggaaggtttcatagctgttagaagagggggarcaggattgggtgggtaaagccttca

SEQ ID NO: 489447 - DNA, 602 bp, Homo sapiens
cagacctaaggttcgcagactacctagtgaggcacgtgactgagaatcgggatgacgtcttcctagatggcacgggctgggagggaggtgacgaatggatccgggcccagtttgcggtctacattcatgccctgctggctgccacrctgcaattaggtaagaaaccacacggagcctacagctacctgttttattataatttttcattttgtaacatttatgagattttggattgcacaataaatacatattccttatagaaaaattaccagttattccctcatacaaagatagccacttttaacgtctttagtactttatagccttgcaaatcttttcctatgcatgtattttggattttggttttatggtacttttggtggtccttttacaaaaatggatccctttatacatgttttctgaaactattactttataatagaaacaacacataccaacataacatgaacatatatcatcacttttacatgactgcttcatattcatcagtatttggcagctgtttgtgaatactgccacatgttttttaagatgtataaagggagaaagaatataaaaaatagaaatcattgaaaatcgtg

SEQ ID NO: 489448 - DNA, 648 bp, Homo sapiens
tctgaatagccatcttgaaatacatcaaagaagtatattttggggtgaaatagtttagttttcttcaatagcaaattttcaacatttttaccaaattaaaaataacaaatgtggccaggcctggtggctcacgcctgtaattctagcactttgggaggctgaggtgggcggatcacgtgagctcaggagttcaagaccagcctgggcaacatggtgaaaccctgtctctactaaaaatacaaaaaagtagccgggygtggtggtacatgcctgtactcccagctactcaggaggctgaggcaggagaatcgcttgaacctgggaggcaggttgcagtgagctgagattgcgccactgcactccagcctgggtaacagtgagactctgtctcaaaaaaataaaatgaatgctagacgtctgttgttatcagagggtgtcatttagaaatatttcaaactaattataacttttgagaagtatgaaaccctttaactcctaaagattagggaaggcagcattctaacttaacaagcagcaggtgtatttcatcccttaaatacagccatgccaggaacacagagaatgatcaagtgatgtgtccgtatttcaatcctgtgattcaggaatccaagaagaagaagtgtcaca

SEQ ID NO: 489449 - DNA, 623 bp, Homo sapiens
gcttgtgcttctttttccgataatactacttgtctttgctccagtattttgaagtcttcatctttaataatacgcaaaacatcatctaaataaaaacagttacataataagttttaaactggtagattactggttatgtayacaatacataatatactatcatgagggcatacaatgcactttattctcatacgaaattttgaaagtttgcagaaataccttcttaggttttaatttaaggtgaatagtatctcttaacatctcattatgatgctatttccaatttttcatcgtataggaatcatgcatgcacacacatacacatatacaacacacacacacaggtatctcattaaatctttttcttgggtgtatgcatgtgaatgtgagtgattgtgtgggtgtgtgtgtgtgtgtgtgtgtgtagacagtaacctaaataatcaaccaacacaattatggaagtcattgcaaataatttttatgttcaataaccatgatttgatttgtcccatttggggataaacaaggtgattgaatacctgaaggtatttctcaaccttcttctctcttgcctacttcccactacagaagcctagaaaatccaatactcacacctccat

SEQ ID NO: 489450 - DNA, 623 bp, Homo sapiens
gcttgtgcttctttttccgataatactacttgtctttgctccagtattttgaagtcttcatctttaataatacgcaaaacatcatctaaataaaaacagttacataataagttttaaactggtagattactggttatgtacacaatacataatatactatcatgagggcatacaatgcactttattctcatacgaaattttgaaagtttgcagaaataccttcttaggttttaatttaaggtgaatagtatctcttaacatctcattatgatgctatttccaatttttcatcgtataggaatcatgcatgcacacacatacacatatacaacacacacacacaggtatctcattaaatctttttcttgggtgtatgcatgtgaatgtgagtgattgtgtgggtgtgtgtgtgtgtgtgtgtgtgtagacagtaacctaaataatcaaccaacacaattatggaagtcattgcaaataawttttatgttcaataaccatgatttgatttgtcccatttggggataaacaaggtgattgaatacctgaaggtatttctcaaccttcttctctcttgcctacttcccactacagaagcctagaaaatccaatactcacacctccat

SEQ ID NO: 489451 - DNA, 448 bp, Homo sapiens
tctgtctagcaagaatccccctaacccttgatatttcttcctagtaatttttcatccattgactcccactctgctccttggctataaatctccacttttccttggagttgaattcagacccaatctctcttctcctattgacgtggttcctacactcatcaccataatcccctttcttagtagaaccttctttaccatctttaataagtgtcaaagaataatgtttctttaacaaarttaatgagaaacgtaaaaggaagatcagatctgaagggtagatcatgaattcaggacttttagaatgacaagatggaagaagactcactaccactattgacagttaaaccaggattattatgatccacacatatgatgattaccaaggaaacaatgaataagacaaaagtccattttcacaatagcattaggtttgggccaacattgttct

SEQ ID NO: 489452 - DNA, 544 bp, Homo sapiens
atctacgtaagtggaaaaatgtaaaaacaccccatatgctgcaggtagatatataggcaaagtgatttraaataacagaggcaacattgagaaaatgaaggcttttatttgtttgtttgtttgtttgtttgtttgcttatttgagacagggtctctctctgttgcccaggttggagtgcagtggtgcaatcttggctcactgcaatctccacctcctggggtcaagcgattctcccagctcagcctcctgagtagctgggactgcagagaaagtggatttggtaaaggaaacccagcaagaggtgagcgttttgttttcaaattatgtcaaatttaatttggcgggaaattattagtagttaattgaaaaatttcccaaagacctaaaattcttggccttcattaaatatttaaagaattttaaaatgtgtcccaattttaggaatctcaattagcaaagcttatggtaagaaactcaccctgatgacagagcaattggggacagaaaggctgggcctccttgactccacatggcccatgagat

SEQ ID NO: 489453 - DNA, 551 bp, Homo sapiens
cttctagtctctagagaagcataggagcctaacttcagctccaacttgcaaaactaccttttgccataaagaaataagaagtttatttttcctttggataaaggcaattagcaaacacagatggccactccaataaccaggagactttagaatgaactatgtgtgacaaatagaactagtcccctgaaaactagttattgtttaacgtgagaacacrtatgtaacagattggagctgcttggctggacaaaaggtaagactcctttctgtctttgcaatctcttcgcagatcacctggcatgcgcgtcccattctggttgaatgcttgtgcaataataaaactgttttctttcttttcaacctttgtgaagaggttttctgagttgagagattttgtctgtaattatcgttccccagcaattcttgtgctctcctaaagagaggatacccaggcctttcaggaggagggaggctgaggtagcaccactggcaggggagggaaggaggaaggagagaggaggggcatgcaggccctgccaaggtcagacaca

SEQ ID NO: 489454 - DNA, 529 bp, Homo sapiens
acaggcgcgtgctgacttatctagtctttctagggcggttaacttagttctcttggaaacaattctttcattttgcaatcatatttctttctttttttttttttttgagacagagtctcgctctgtcgcccaggctggagtgcagtggcatgatctcggctaactgcaacctccgactccctggttcaagtgattctcccgccttagcctcctgagtagctgggattacaggcacatgccaccacgcccggcttattttttgtatttttagtagagacgggttttggcatgttggccaggacggtctcgatctcctgacctcrtgatctgcctgcctcggcctcccaaagttctgggattacaggcgtaagcaactgcgcccagcctgcaatcatatttcattgcattatgcaattgtgtattaaatagaataattacaacacaagtgtaagttattgtaaaatgatcattgacatggctataattcaactggtgggagcaatgtgataagcatcagtcagtatggctt

SEQ ID NO: 489455 - DNA, 600 bp, Homo sapiens
tctgggctcagaaagtcgtcaaccatatgccccaggggaggccgggggcctctctgccagggctggagagtgggccacacccccartgtatgcagccaattcaatcagacctcagccacccaccgagccctgcctgcccagatcccctctgagaggagcatccaggagcaaacctcctcccttcagcttagcctccgtcccctgctgtccaagggtaggtcagggaacccccactcccagcccctcaagcctccgattgctgtctaggggcttcttgtttttcctcctctggtacaacccaaggagggaaacacaaggcagaaaagccagtggctgttgctacaggaaacacatctctgttagcaacacctcttcagtacaggcctagaattttccacaacaccaataggttcatttttgaaggaagcagcttctttgacattcactccgctaacttcacatccctctgagtctctggtttcacccacctccttctgacaccatgcaggtcatcactgagggcaggagggaaatgatgggccctccctcagccccattttctcatctgtaaaatgaacagggaggagcatcaaaagagat

SEQ ID NO: 489456 - DNA, 600 bp, Homo sapiens
tctgggctcagaaagtcgtcaaccatatgccccaggggaggccgggggcctctctgccagggctggagagtgggccacacccccagtgtatgcagccaattcaatcagacctcagccacccaccgagccctgcctgcccagatcccctctgagaggagcatccaggagcaaacctcctcccttcagcttagcctccgtcccctgctgtccaagggtaggtcagggaacccccactcccagcccctcaagcctccgattgctgtctaggggcttcttgtttttcctcctctggtacaacccaaggagggaaacacaaggcagaaaagccagtggctgttgctacaggaaacacatctctgttagcmacacctcttcagtacaggcctagaattttccacaacaccaataggttcatttttgaaggaagcagcttctttgacattcactccgctaacttcacatccctctgagtctctggtttcacccacctccttctgacaccatgcaggtcatcactgagggcaggagggaaatgatgggccctccctcagccccattttctcatctgtaaaatgaacagggaggagcatcaaaagagat

SEQ ID NO: 489457 - DNA, 670 bp, Homo sapiens
tgtctggatgttcctgccgctctgtctgtgtgtctctatcatgtccacatcttcctgtcgctttctgtctccctctctcggcactatcttcatctctccatcgcagcgtctccagccctatttccacccctcctttcccccggcctgccttattaaaatcgcagccaggaaaccgagcagttcggggaggtgtgatgctgaaaaccagcttccgcgcgacgccgggtcggagcccgcgaggggtgccgggggggacagcccagggtgcggcttctgtcccgacccagtcgccgctcccgggggctcccgcccggagagcaccctccggccccagcccgacccctgagctccccctgcccgcttagaaaggaactctgaccgccaccggagagggcgtttgcccgagccaggagtccgagaggggtggaaagttctcacctatggtgaagctgtagccatcgatgctgaaagtggcgctccggcattttttgaagccctccttcctgttgccgrcgtccgtcatggctcggccggccgggcaggggcctcgcagcgagaccagcggcgtctgcggtcccccccacggcggagtgagcagcccggggctcggcggcgaatcctcccccggccgcgccgcgctgtcactctcagccccgccgcgcgctggcag

SEQ ID NO: 489458 - DNA, 534 bp, Homo sapiens
aagaaacttagaaaagcagagcaaggaaagaagcatttattgagcacctactaagcccctagggctctgtcctatattgtcaccagagctgcatcttcctgaaacccacgaccacttgacagggaggtatgtgtcataatccccgtttacagaggagtaaagtgagactcaaaataaaatgtgcatcacagacctaggtcacccactacagagtcctgattcaggccaccaattttggaayggggagagaacgaaggtgaatctcacaatccaatcctgatccctgtgatacagcagtcccccatctcttgctctgatctactctcatcagctgaagaacaatcgctcagtgacaaaagaacaaaaatctcaaagagaattacaccaacctcaataactatgcaggtccttaaaaaagacaaattaagacccctcatttcttttgtgatacagcctctctttaagcacaatcacagagcagagcctgcattgttagcccggctttgatttacaaaaacacagcgcagatgagtt

SEQ ID NO: 489459 - DNA, 633 bp, Homo sapiens
aagaacaatcgctcagtgacaaaagaacaaaaatctcaaagagaattacaccaacctcaataactatgcaggtccttaaaaaagacaaattaagacccctcatttcttttgtgatacagcctctctttaagcacaatcacagagcagagcctgcattgttagcccggctttgatttacaaaaacacagcgcagatgagtttcaaaaggaagaacaatttatgaaaggcaaaatgacaataaatgtaggaggagaagaatcaaggggttggaatctctaaaccattgtaaaattacttttgggtggctgtgggaatattactctactatgttaatttctccagcatgcataaaatagatgccccttacttttgggtggctgtrggagtgttactctgttatcttaatttctccagtatgcataaaatagatgccccagagttaaggaacattcctgacttcttcctgcttctcttcaagtgaattgttcaattaattaaaatccattatattcctaaaacttcagcagacactggggaggagagagatggaattttgatagcaggtctgctactaacttgagatgtaatcagcttaatgctgatttatttttcacattcagtttctatacttac

SEQ ID NO: 489460 - DNA, 674 bp, Homo sapiens
catagttatttgtttattcacctgccaagctccccagggacagggactatgacttatttatctttgcaactccctggtttgtcccagagcctggcgaaaggaagggactcaacaaatggcgactgaatgaaaaatgcaatacatactctctgaaggagctgcaagttttgataaatatagtagatggattttctcaaagctctcatttaagctaagatacaaatttatttccaaaagttctcccatcatactctcaaatgttaaagtataatccatttggctctcatttttcatttcactgggatgtgttcctcattgagagaaaatctactgataatatcttgacagataattggacaataggggkaacctatgcacagagtagacaatggagaaaccaagaaacacttttagatggaaaataattctcagctcaatcagaaagtggatggatgatccatgagggatatggtagaggacagggataaaatgtctgagcagaggatcaccaaggctccagccaacattcaggttttagaaccccaagaaatcagaagtgctttcatctaggaaactggttcactggcaaagaccccacaatgtctttttcagcaacatagtgtttctcatgcactcagagagcaaagagaaaaaaggttggctccttgttaatt

SEQ ID NO: 489461 - DNA, 430 bp, Homo sapiens
ctgcccttggtgacaccttccttaagtcacctgggcagcagtgcctccttcctttcctgcctcgtgctcccctggcaytttgtacatctctttctcataccagtgaccacggtgcatctcaatcatgtccttaccaatgccgctctcctcccaaacagccttctctcagcctggcaccatgcaggtactcagaaatattcactggataaaaaagtaaatgtgtctgctctttactcctcaagaacctagaaagagttcaagcctaggtttctttagtccgtcattcaacagcatctgttttgtgccagaggctggagctgcaaagatggataaatggctctgctctgtggagactggcaagttaacatgcactttcaatgcaacagagtgagtgctacaacagaggggccggaatgtggcaggagcacag

SEQ ID NO: 489462 - DNA, 622 bp, Homo sapiens
gcctcaacctcctgggcttaagtgatcctcccaccttagcctcctgagtatctaggacaggtgtgtgccaccatgcttggctaatttaaatttttttttttttttttggtagagacagggtgtccctatgttgcccagattggtctcaaactcctgggcccaggcaatcctcctgcctcagcatcccaaagtgcttataggcgtgagctatcggcacccagccyaatgtattcttttaaatgaaatctactccaaaaattgtctctatgagggatgacataaagaaaaaatggtaaaatatatgtaaaatgctaaaaatgtagaagataccagacttccagacttcagaaaacaaaaattaaacaaatttaaaaatacataatacacaaatttaaaattaataaagggaatcagcttagcactgaattgaactatttaagataagcttcctttcctttactgtgtgacccatttgtttctttgactcaagaccacggtccctgccaggctgacatcttgccccttacccaggtaagtgccataagtcacgtttctgtactcatcccaggagattaagccgtcttgattcatatcaaactcctgccattggttttcaacattg

SEQ ID NO: 489463 - DNA, 622 bp, Homo sapiens
gcctcaacctcctgggcttaagtgatcctcccaccttagcctcctgagtatctaggacaggtgtgtgccaccatgcttggctaatttaaatttttttttttttttttggtagagacagggtgtccctatgttgcccagattggtctcaaactcctgggcccaggcaatcctcctgcctcagcatcccaaagtgcttataggcgtgagctatcggcacccagcctaatgtattcttttaaatgaaatctactccaaaaattgtctctatgagggatgacataaagaaaaaatggtaaaatatatgtaaaatgctaaaaatgtagaagataccagacttccagacttcagaaaacaaaaattaaacaaatttaaaaatacataatayacaaatttaaaattaataaagggaatcagcttagcactgaattgaactatttaagataagcttcctttcctttactgtgtgacccatttgtttctttgactcaagaccacggtccctgccaggctgacatcttgccccttacccaggtaagtgccataagtcacgtttctgtactcatcccaggagattaagccgtcttgattcatatcaaactcctgccattggttttcaacattg

SEQ ID NO: 489464 - DNA, 163 bp, Homo sapiens
aactcttcctcatctttcaggacttggcttcaatgtcaccttaactggaagcttctctcactctccmgaagagcttcccattgcacttgatgcatgcactattatttgatcatttttgagttacagtccaaatctttttgtacctgaataacatgttgctcag

SEQ ID NO: 489465 - DNA, 563 bp, Homo sapiens
gtgttaaaaaaaaaaaaaaaaaaaagatctcagctcttctagcaaataatgttacctcataaaaactcacttaaattatgaaaaagaaaaacctgttakgtgtttctaaaatactaaaaaccacaaacagaagatatcacacgatactcaatttttgagactttgtagcttcattaaaaatttttatcatttcttttgtataatatagcatcatttttaaagtaacccatgagaaacagcttctgtctccaaatgtttctcctctccccatagcataatgtcttcctgttagtttttgtacagaaccatattatcaaaggcagagtgtaactacatttgggtaagtgtgattaccaaattcatactaaagaatctaccaagcaaagatcatttaatgtttatggaaaacccagtctactcataaggtgagtgttcccttgaaatctataatcaaatgtatgaaatcaatcaacctcttggcagttatttaaaattttaagaattctaagtttttgtggcttctgacgctaatgtcttcgaggagttcatgtttaaagtaacag

SEQ ID NO: 489466 - DNA, 563 bp, Homo sapiens
gtgttaaaaaaaaaaaaaaaaaaaagatctcagctcttctagcaaataatgttacctcataaaaactcacttaaattatgaaaaagaaaaacctgttaggtgtttctaaaatactaaaaascacaaacagaagatatcacacgatactcaatttttgagactttgtagcttcattaaaaatttttatcatttcttttgtataatatagcatcatttttaaagtaacccatgagaaacagcttctgtctccaaatgtttctcctctccccatagcataatgtcttcctgttagtttttgtacagaaccatattatcaaaggcagagtgtaactacatttgggtaagtgtgattaccaaattcatactaaagaatctaccaagcaaagatcatttaatgtttatggaaaacccagtctactcataaggtgagtgttcccttgaaatctataatcaaatgtatgaaatcaatcaacctcttggcagttatttaaaattttaagaattctaagtttttgtggcttctgacgctaatgtcttcgaggagttcatgtttaaagtaacag

SEQ ID NO: 489467 - DNA, 563 bp, Homo sapiens
gtgttaaaaaaaaaaaaaaaaaaaagatctcagctcttctagcaaataatgttacctcataaaaactcacttaaattatgaaaaagaaaaacctgttaggtgtttctaaaatactaaaaaccacaaacagaagatatcacacgatactcaatttttgagacttkgtagcttcattaaaaatttttatcatttcttttgtataatatagcatcatttttaaagtaacccatgagaaacagcttctgtctccaaatgtttctcctctccccatagcataatgtcttcctgttagtttttgtacagaaccatattatcaaaggcagagtgtaactacatttgggtaagtgtgattaccaaattcatactaaagaatctaccaagcaaagatcatttaatgtttatggaaaacccagtctactcataaggtgagtgttcccttgaaatctataatcaaatgtatgaaatcaatcaacctcttggcagttatttaaaattttaagaattctaagtttttgtggcttctgacgctaatgtcttcgaggagttcatgtttaaagtaacag

SEQ ID NO: 489468 - DNA, 649 bp, Homo sapiens
ctgctagtaatggaggggcctctgytgacagtgcttttatgaagcaggatggtttgtgaatttaccaacagtgaggtctcagacttgaccagtttaggattaccgtagacccaggagtagttctagactggaatctagatagttttcaggatggggaagatagattcaaaaccacctaagggcattctgggtacaaagcattgtgcaaggctttggtgatacagagaataaggtcttttttcccatacttcctcatctgccaaggttatctccaattgtacctttctctccagttccaagcttgcatcatgaagatggtgtgtgggaaggccatgacagatgaatccgacacatgcagctcccagaaaacagaagtttctactgtctcgtctacccaagttggccccaactgaggacccaatattggcctgtttgcaacagctagaattaaattttacttttaagtaagtttctattgtctccgtcagaaaccaaactactaaaaacacaaaaaagatggtaaaaggagtgatggcagtttggggagtcaatttttcattttcttactattgccttcttgcctacaaagctactgtttccactggtctatttcagaccacccaaaggccatttcaacaatcatcagttt

SEQ ID NO: 489469 - DNA, 543 bp, Homo sapiens
aaagagccctctctgtaggtcctctgatctttgagtgtgagctcaagctctccagtggacacagaaaaaggcctggtagtaagtggtttgcattgtgaggtatgaggatccctggtaaattcagcagcatgtggtttttggaaatcagcccacaagataagaacactgcaaccaaactcataactaatactgctaatttaactattgtccaaaagagaaagggaagaagaaaaaaatccccactctactgggaggttctaggctttcctataagttatccaaatagtctttttttaatctcagggtttcttaagagaattcccattcagtgaccatttctttcgttaaaggcactttcaatgacatgattggaaaggagtgaattttaattgtagtgaaaccaagattaattccttggcacacctgggaagaagaggaaccggatgggggcatttacagtgatttcaaaaggcaaataatkaagtcttgagcatttcaacagatgcacacccagaaaaaaaatgtatgccccgaaaacacttg

SEQ ID NO: 489470 - DNA, 417 bp, Homo sapiens
catgaaatcactttggaaactgaaatgctattcaaatggtaaggcaaggtctgggatgccaaaracctggtttctagtaccagctctgccacttgatgatgatgatgatgatgatgatagcaatatactaagagttactatgtactgactaattacatgcattgtgcctgcactgtgccaaacattttatagtcaattatctcattttgactttatcacaaccttctgaggtaggcagtgttaatctcatcttacagatgaagaaactggagctcagagaggttccgtaatgtgccgaaaatcacacaggtagtaaatgatagggctaggagtcaaaacctggtctgactactccaaagtctggtgttcttgaccaccaactatgccagatgtctgatcttgggcaagtcactcctc

SEQ ID NO: 489471 - DNA, 596 bp, Homo sapiens
  misc_feature (1)...(596): n = A,T,C or G
ccggggtgggggcgggaaggcggggggatgacgcaggaggacaagtggaggtgtgaggaatcattataataataaagcaggcaaacacgtttctacagtgggccgggtggcaggcactgttctgagcactttatatgtattaattcacttaattctcataaccgtgctatgaggtacttgttattgtcaattagctaaagggtacagagtttgaaaagatcatttggccatgtgtggtggctcatgtctgtaatcccagctgtatacagcgtnnnnnnnnnnnnnnnnnnnnnnnnnnnnnnnnnnnnnnnnnnnnnntgacgtcagtaagcccctgttgccccaaaaaatttttaaaattggccgggtgtggtagcacgcacctgtggtcccagstactcggaaggctgaggcaggaggagtgcttgatcctgggagatcgaggctgcagtgagccactatcatgctactgtactccagcctgggcaacatagcaagactctgtctcaaaaaaataaaaataagataattcaaagtactgaattattctatatttttacaaaaagtattgtttataatacacaaaaactaaaaac

SEQ ID NO: 489472 - DNA, 466 bp, Homo sapiens
tataggtgtgagccaccgtgcctggccaaataaattctcttttaaactacattctgacttttgattattttaggttgatagaattatgtttgtttaaaagaaatatttcttctaaaaaggaaaaatctttacatatgaatagcaaaattgagaacyctactaagtattaatctctacctgatatgagaataaatagcattgttataaggatttggcatttattgaaacgtaagtatttgcagatatacaacttagaaaatcagaaatgccctcagatatggcattaatagaatttgatttatgtttctgacaaataatttccagtaataccagatttgttttggagagctactttatgtaaagctagacagcatcaaatacatttactagttatgagtgaactctcacttaaaacatagttatgaaggatcttaaatgtattagactttgacttgatcttttatat

SEQ ID NO: 489473 - DNA, 589 bp, Homo sapiens
gctgggactcttttgaaaaaatgtctcttttttctttttcctcctctatcctcttcacagatagaaacaggatgcctccccaggatgcaccctccaaactgggaagggttaatttcccaaaccttaaacttgttagcttagcattgggcttaggggaagggaacccaggagcctgacatgctgacaaaagggtaagtgttttttttagccagtcaggctttgggcccctctgtccctgtgcaaactggtttataaaaggcctcaggatttttgagaggtccttacccttcgccacttatttcgttttgatatatgttttctaakaacccggtttgtctcttcttgccttcagaccatcacactccaagtggttatgaactggagccttggacgacggccccttttgctagggacccttagattggtctctgaaggagatctgactgccattttcccaaaacagcacctcctgtcagcaggaagcagttaagattggtcttcatccttatccttatccttctaatggcagttaaatgtatttctttagaagggtgaatgagactaagtaaaaaggggtccctggagaatc

SEQ ID NO: 489474 - DNA, 519 bp, Homo sapiens
tgaattcccagcagttctccaaactgggctcatggcttgcaaggactgtgggattctctggtagtaagggctgtaggtgtttgcagtggtaatggggctggtggggatcttctgcttacctttttcacaccatgagaagtccgtcctggctccaggcagatcttatccgtgtggaggaaatggggctgcagaggccagtgcttccacgctgccctcctggacttccagttaccacaggtacactctagcactctccctcctggcgctcctgtcaaattgtagctgtttatttgttgccttggtcctttcttcttgttgagatgtgcgccaatcacctctagtcagccttttgctaaccagatctgtacttaaaaaaatgaatttaaattaatatcactttgagaattaactttgaccattttccagtacccagtaagctaatrcaggatatggaaacctcaatggggaatcctgctcaaatagatgcatccaggagacccacactccatttatccactt

SEQ ID NO: 489475 - DNA, 594 bp, Homo sapiens
cccagtgtttgcccatcttttgctactcattgtctggaagctgtgataccaaccacattttctgatcatgtctaaktctgctgaatgcagagaggctcaggctctatctagtaaaataagggagtcagagaaatatgaacatgtgaaagtcattgagcccagactaaaattacaacaatcaacttacaagtatttatattataccatattatatgtcaacaatattcaggaatagtatatttggtgtgtgtatagaatacagtgttcctccaaaactgtgctaaaatattttaaataaaatcatacagcaaactaaaaacagtaaaaagaagatccctttcttcttaagaatatcttattccttctcactggggatttcttggaagttgttctagtcaagtgttttccttgagctgaaagagggaagaggcataccaaaaacattgggatcaatgtagaaacttgtacatgaatgtttatagcagcattattcagcatagccaagagatggaaacaatccatatgtctgtcaacagatgaaatcaacaacttgtcgtacatccatacaatggaatattattcagccataaaaag

SEQ ID NO: 489476 - DNA, 594 bp, Homo sapiens
cccagtgtttgcccatcttttgctactcattgtctggaagctgtgataccaaccacattttctgatcatgtctaattctgctgaatgcagagaggctcaggctctatctagtaaaataagggagtcagagaaatatgaacatgtgaaagtcattgagcccagactaaaattacaacaatcaacttacaagtatttatattataccatattatatgtcaacaatattcaggaatagtatatttggtgtgtgtatagaatacagtgttcctccaaaactgtgctaaaatattttaaataaaatcatacagcaaactaaaaacagtaaaaagaagatccctttcttcttaagaatatcttattccttctcactggggatttcttggaagttgttctagtcaagtgttttccttgagctgaaagagggaagaggcataycaaaaacattgggatcaatgtagaaacttgtacatgaatgtttatagcagcattattcagcatagccaagagatggaaacaatccatatgtctgtcaacagatgaaatcaacaacttgtcgtacatccatacaatggaatattattcagccataaaaag

SEQ ID NO: 489477 - DNA, 632 bp, Homo sapiens
agtgagtttcttgccacctcaagtcttagctacctcagaaagtctgatattttaagaactttctccctatttaatacagtttttctagtttaagagggagtgttgatctgctacagactattccgtcatattcaaaagcagaaatctttctgtgtttagttcttttggaatagagtgttatatcttgtaggcctgtgagtttctcatggttatattaatgtaaaaacgtamgacttgatccccagagttctttggtctcttgctaagtgttttccttcattaactgcttattcttgctatctgatgggaaagaattgtggaacttaaatacagttgacccttgaacaacatggatttgaatttgcagatctacttacacgtgattttcttctgcttctgccaccttgagacagaaaggtcgatcccttctctttctccttctcagcctactcaacgtgaagatgacaacaatgaagacctttgtgatgatccacttccatttaatgaatagtaaatattttttctcttccttatagttttcttaataacattttcctttctctagcttattgtaagaatatagtatgtcatacacgtaacacatgaaatatgtgttaattgtctattcatgt

SEQ ID NO: 489478 - DNA, 503 bp, Homo sapiens
tggacagggagggtggccacaggacatgggaaaacacatctgggaagaatctcagagggctactgcctctgggcagggacaggtctgcaccctatttgtaggagcttcyaaaggagatgttctaatcttcgatgcagaaaattgccctaaattcctgagttacggaatgtgctcccatgagaacagactgtgacttgacattgccctcatacagcaaccacggggggatgtacctccagccactcctggctctgccctagcatccagagttctaacttcctccctggcaacgcgtgccagggccagagagctaggttcggtgtttgtcccacaacggaggagtttgcaacgtacccccgtcgttgaatctctcgtttgaccaatggcacccgggccaaggccagggtccgagctcacagagtaaagcaaagtttcctagccctgcagaaaccacagtggaaactttgatcatcatagaactcaatcatcacctccccagaggt

SEQ ID NO: 489479 - DNA, 503 bp, Homo sapiens
tggacagggagggtggccacaggacatgggaaaacacatctgggaagaatctcagagggctactgcctctgggcagggacaggtctgcaccctatttgtaggagcttctaaaggagatgttctaatcttcgatgcagaaaattgccctaaattcctgagttacggaatgtgctcccatgagaacagactgtgacttgacattgccctcatacagcaaccacggggggatgtacctccagccactcctggctctgccctagcatccagagttctaacttcctccctggcaacgcgtgccagggccagagagctaggttcggtgtttgtcccacaacggaggagtttgcaacgtacccccgtygttgaatctctcgtttgaccaatggcacccgggccaaggccagggtccgagctcacagagtaaagcaaagtttcctagccctgcagaaaccacagtggaaactttgatcatcatagaactcaatcatcacctccccagaggt

SEQ ID NO: 489480 - DNA, 503 bp, Homo sapiens
tggacagggagggtggccacaggacatgggaaaacacatctgggaagaatctcagagggctactgcctctgggcagggacaggtctgcaccctatttgtaggagcttctaaaggagatgttctaatcttcgatgcagaaaattgccctaaattcctgagttacggaatgtgctcccatgagaacagactgtgacttgacattgccctcatacagcaaccacggggggatgtacctccagccactcctggctctgccctagcatccagagttctaacttcctccctggcaacgcgtgccagggccagagagctaggttcggtgtttgtcccacaacggaggagtttgcaacgtacccccgtcgttgaatctctygtttgaccaatggcacccgggccaaggccagggtccgagctcacagagtaaagcaaagtttcctagccctgcagaaaccacagtggaaactttgatcatcatagaactcaatcatcacctccccagaggt

SEQ ID NO: 489481 - DNA, 503 bp, Homo sapiens
tggacagggagggtggccacaggacatgggaaaacacatctgggaagaatctcagagggctactgcctctgggcagggacaggtctgcaccctatttgtaggagcttctaaaggagatgttctaatcttcgatgcagaaaattgccctaaattcctgagttacggaatgtgctcccatgagaacagactgtgacttgacattgccctcatacagcaaccacggggggatgtacctccagccactcctggctctgccctagcatccagagttctaacttcctccctggcaacgcgtgccagggccagagagctaggttcggtgtttgtcccacaacggaggagtttgcaacgtacccccgtcgttgaatctctcgtttgaccaatggcaccygggccaaggccagggtccgagctcacagagtaaagcaaagtttcctagccctgcagaaaccacagtggaaactttgatcatcatagaactcaatcatcacctccccagaggt

SEQ ID NO: 489482 - DNA, 579 bp, Homo sapiens
ccgatggcaacaagagcgtctgcctaaaagacttggaagttaatttaccaggccagctcctctgcgaggactccattaccttcagccattaagctaatgttatggacttttccagagtgtctgcactgacatcgctattaatagtgttattactcccattaacagcagacccagagagctggtrcgggcttaaattattcactgactccccaactttgaagttcctatttctaagagcaatcagtaggtctgaaaaatgtctttgattaaattatgaagagagcgaaaagcagagctgtttccaggccaaacatcacctggagttaccaaatagagattcagatagaaaagacaggactctatctctcttccaggggtagggaggaagaggtggcacacaggtgtttgctcgggggatctcaggacaaattctacctgcattgcttgctgcttccaaagttcatggggttgcatcttgccactgctcctgaaagccccaaagaaactactcatcatcttcccccaattttaggttttatagggaagccacctgtaatttacaattttaaacatcactgt

SEQ ID NO: 489483 - DNA, 582 bp, Homo sapiens
cttcagcttgtttatacatcccaagaaagaagtaggtgcaagctaggttcacccagacttcagaattacaattttcctcttttgtagcattttcgtattcctgaaatatatagtaagcagtgatctcattttggcagcaaagcaattgatgggccattcttccacaatggaataggatttcatactgagattaagcaacttcacatttagggaatcctacatgctctgcaattactctattctgaaaaggttaaatactgaagctaaagctcagtcctacatctgcaggrctattgtccatataatcttatacttgtggtttttgtcccccagttaatactgatagggactaacaaacaatagaaacaaaaagtaactgaactattttatttctgctaacttaaaaagacatacaagataccctttaagaaattcacacgttcagttaacttaaaatctgatggctttaatacactccaagtttcatttcattctaattgttttctggcttttttggcattgagggagccttcagattttttaaatgttttgtttttcctgccaaggacactttctaagact

SEQ ID NO: 489484 - DNA, 221 bp, Homo sapiens
ctggtttaccatgcattgcaattgttagcatatacagcccttggtattttaattatgagactaaaactcttcttgacaccacacatgtgtgttatggcatcactgatctgctcaagacaggtaacatgttatgttggagtatagcyactgtgataattttagcctttattattgagtggccctaaaataatgaattacaaagtcttttaagtgattatagt

SEQ ID NO: 489485 - DNA, 221 bp, Homo sapiens
ctggtttaccatgcattgcaattgttagcatatacagcccttggtattttaattatgagactaaaactcttcttgacaccacacatgtgtgttatggcatcactgatctgctcaagacaggtaacatgttatgttggagtatagccactrtgataattttagcctttattattgagtggccctaaaataatgaattacaaagtcttttaagtgattatagt

SEQ ID NO: 489486 - DNA, 524 bp, Homo sapiens
aattggccaggccagctcctcagcccaaggaaggcaggcctggggcaatgcccactggccagtaacrtcagagggcccattggaaacacatctaagtccccgtgactcacaactgtcatagctgtgaagtagtgtcatctttcttcctgaagatttcctgtatcaccccaggagcagaagggatgattgatttttgctctggaaataagtaatgggtcactggggacatgaatagaactatagcttccttaagaagcaatctctcttaagaaattacaaagcaagcggctcccctgctcagtggtgtctgtggcattgtactcccagtctttcaggataagtctaaaacagtttggcactcaattccaagctcacctatggaaaaggaggaactctgaaatctgtagaataaataaagtaatgaggtatgcctactgtaaatggagaaaatccagccagtattattgaaaactttcaggctttaaaatttataacatggaaagctatactatactgaagtatct

SEQ ID NO: 489487 - DNA, 524 bp, Homo sapiens
aattggccaggccagctcctcagcccaaggaaggcaggcctggggcaatgcccactggccagtaacatcagagggcccattggaaacacatctaagtccccgtgactcacaactgtcatagctgtgaagtagtgtcatctttcttcctgaagatttcctgtatcaccccaggagcagaagggatgattgatttttgctctggaaataagtaatgggtcactggggacatgaatagaactatarcttccttaagaagcaatctctcttaagaaattacaaagcaagcggctcccctgctcagtggtgtctgtggcattgtactcccagtctttcaggataagtctaaaacagtttggcactcaattccaagctcacctatggaaaaggaggaactctgaaatctgtagaataaataaagtaatgaggtatgcctactgtaaatggagaaaatccagccagtattattgaaaactttcaggctttaaaatttataacatggaaagctatactatactgaagtatct

SEQ ID NO: 489488 - DNA, 524 bp, Homo sapiens
aattggccaggccagctcctcagcccaaggaaggcaggcctggggcaatgcccactggccagtaacatcagagggcccattggaaacacatctaagtccccgtgactcacaactgtcatagctgtgaagtagtgtcatctttcttcctgaagatttcctgtatcaccccaggagcagaagggatgattgatttttgctctggaaataagtaatgggtcactggggacatgaatagaactatagcttccttaagaagcaatctctcttaagaaattacaaagcaagcggctcccctgctcartggtgtctgtggcattgtactcccagtctttcaggataagtctaaaacagtttggcactcaattccaagctcacctatggaaaaggaggaactctgaaatctgtagaataaataaagtaatgaggtatgcctactgtaaatggagaaaatccagccagtattattgaaaactttcaggctttaaaatttataacatggaaagctatactatactgaagtatct

SEQ ID NO: 489489 - DNA, 600 bp, Homo sapiens
taacttagggctttagagttcctggattccaagggaatgcactcttacatatactacatcatgtgctgctcaccatccatgtggtgatgaggagcattagataaggagcattaggtccatgtagcagaacagtaaactgaagctccgaacagcgaaggagctcacccaagagagcacagggctaggatcaggaacattgatcctatgactagggctcttgccactgtattccgcagcacagtattttgaggactsgggtaacgcaaagaaaaggggaaagaaaactctcagactaaatacaaactcgacaagtagaacaacatctcagctctctaaggaatgaaacctctggaaggctgagttctgaaccatgaggttaacccttatctattacctccgccaaggcactgcctagcctgttcctgaagggcagtacctggaggtccatcatgaccatggagataagcagagttacaggtccagaaagctgactcatgctgcttgttttggggacaattgccccagaagaagtacaggaataaaagagaaccagctttagcccaagtgatgagtacccaaatagcaactcagatttgtttt

SEQ ID NO: 489490 - DNA, 604 bp, Homo sapiens
ctggccctgtgtgaattattctttctctattgcaattctcatcttgaaaaatcggctctgtctaggcagcgggcaaggtgaacccattaggatttcctggctgcccggctcacactgcagatttggatttgccagtccctataacccatgtgtgccaatttcttacactaaatctctttcttttaagagatggagtcttgctrtgttacacaggctggagtgcagtggggcaatcataactcactgcagccttgacctcctgggctcaagcaatccttctgcctcagcctcctgagttgctgggactacaggcatgaacccctacaccaggctaattctttattttttgaagagatagggtctcattttgttgcccaggctggtctcaaactcctaggttcaagcaatcctcccacctcagcctcccaaagtgctgggattacaggtgtgagcccaaccctaaatctcttgctatacatatacacatcctattgattctgtttctctggagaaccctgactaacactctgtgactcgctgttttcaaaatgtatacttgaattccttttcagatatatactgtaagttttttttattgtttatg

SEQ ID NO: 489491 - DNA, 548 bp, Homo sapiens
tgtgcttggctcaatggataagacatggtgaatcagtgaacagatatggtgcctgtccataagggatttacagttcagtctgggagacagacaagtacgcaagcaaattttggatttgataaagattataatagagataggcagtgtctgctgactatgagcagggcccccattgtatgtcagtaccagggtggagtaagaagttagcaaaatcttcctaggagagacagcaattcaattgagacccaaattgtgagttactctggcaaaagggaagataaggctgaaaagcaagccaagaaatagtattacaggcaaaaggggcagcatgtacaaaatcccaaaagcaaaagcaagcayggcccattgagagaacgatgaaggttcaggatggctgaagcctaagtgtgaaggaggcaaacagtgcctcgcatgtggtgagtgctcaaacatgggttgaatgaatgaatgcacctcatctgccccctagctgctgagtgggctagagaagaccccacaactctgcatcctggagtccctgtaaagct

SEQ ID NO: 489492 - DNA, 485 bp, Homo sapiens
ccctgttggcccagccgggcactcacrgggcagaagggtgggtctcaagtgggaggataaggcttcaccaccaggagattcccctctgcccgatgactctgataagagtcacgacccatcaagggaatgcatagatggagatatatagtgtgtgatgtgtaaatcaggtcaaacctcaacgacaattgaaagttgttattgtcctatgaggtatcttagcattctcgatgggtattgaggatggttggatgtgctttattgtgtgtggaaacatgcctctctttgctaatcatttcagaggtccagttttcctttcactggacaatcttgaataggaggaacgctgttgctgtaatatgcgtagcttgtgtgtgctcttgtgtagtctgtgtgtgatcaaagggcacggaagtggctgcactttcacatcccttttctttacttagctggaaccttacataccagtacatgctcctctgtaagca

SEQ ID NO: 489493 - DNA, 485 bp, Homo sapiens
ccctgttggcccagccgggcactcacggggcagaagggtgggtctcaagtgggaggataaggcttcaccaccaggagattcccctctgcccgatgactctgwtaagagtcacgacccatcaagggaatgcatagatggagatatatagtgtgtgatgtgtaaatcaggtcaaacctcaacgacaattgaaagttgttattgtcctatgaggtatcttagcattctcgatgggtattgaggatggttggatgtgctttattgtgtgtggaaacatgcctctctttgctaatcatttcagaggtccagttttcctttcactggacaatcttgaataggaggaacgctgttgctgtaatatgcgtagcttgtgtgtgctcttgtgtagtctgtgtgtgatcaaagggcacggaagtggctgcactttcacatcccttttctttacttagctggaaccttacataccagtacatgctcctctgtaagca

SEQ ID NO: 489494 - DNA, 485 bp, Homo sapiens
ccctgttggcccagccgggcactcacggggcagaagggtgggtctcaagtgggaggataaggcttcaccaccaggagattcccctctgcccgatgactctgataagagtcacgacccatcaagggaatgcatagatggagatatatagtgtgtgatgtgtaaatcaggtcaaacctcaacgacaattgaaagttgttattgtcctatgaggtatcttagcattctcgatgggtattgaggatggttggatgtgctttattgtgtgtggaaacatgcctctctttgctaatcatttcagaggtccagttttcctttcactggacaatcttgaataggaggaacgctgttgctgtaatatgcgtagcttstgtgtgctcttgtgtagtctgtgtgtgatcaaagggcacggaagtggctgcactttcacatcccttttctttacttagctggaaccttacataccagtacatgctcctctgtaagca

SEQ ID NO: 489495 - DNA, 471 bp, Homo sapiens
agggatcatgtcttactcatttctgtatcgccagcccctggcatagtgtctggcttatgttaygtgaataaatgaatgcttgccaagatctcttcttccctcaagtttctggaaaacctgagggttcgtgatacctgttcccactcctcatcagcgggctggcaagaaagcaaataaggggaaacatttttaacattccaagcaagagaaggaagaacgactattgggaggaggtacaccagagattgctcagtgtgcagcctgctacctcacttttggctctggattgcctggtggtagaagggaagagtattatgtagttagcaccttacatatttgatgctcaggaagaaagtgcaagaagatccctaatagaacattaaagattcttaaaagtttttgaagtaggctgcttggggtgaccagccccacccttacatctccatagttggtacagttagcttgtagcag

SEQ ID NO: 489496 - DNA, 471 bp, Homo sapiens
agggatcatgtcttactcatttctgtatcgccagcccctggcatagtgtctggcttatgttacgtgaataaatgaatgcttgccaagatctcttcttccctcaagtttctggaaaacctgagggttcgtgatacctgttcccactcctcatcagcgggytggcaagaaagcaaataaggggaaacatttttaacattccaagcaagagaaggaagaacgactattgggaggaggtacaccagagattgctcagtgtgcagcctgctacctcacttttggctctggattgcctggtggtagaagggaagagtattatgtagttagcaccttacatatttgatgctcaggaagaaagtgcaagaagatccctaatagaacattaaagattcttaaaagtttttgaagtaggctgcttggggtgaccagccccacccttacatctccatagttggtacagttagcttgtagcag

SEQ ID NO: 489497 - DNA, 562 bp, Homo sapiens
agaatatgggagattaatcagatacgaaatgatctaatttgatacaaattgagctggaatgtagggccaaaccaaaatgataaaaagatgaaaacaaaagttacatttatgtaaaaaaaaaatcaacttcacatatatgggatgatggagacctagtttgacagttcatgtaaaaaaagacatgagagtttgacccagagccagcagtatgatatagttgctaagaaaaccacyacagtatatcagcaaaatggcagactcagaacttccagacccttattgtcccgtggaaacattaaataaacaactagagactggctgaaataactttataggaactctggaaccagtcaaatatctactgcaaccaaacaaatgcccagtccaggaaaagccacactcaaatggtgggaaatctcatggtgctttcacctgcccttgccccgcctcaccccagcacgttgcagtgatttggggcaagtgcagtcaggtccccagtccccttctataaaccagagagagtagggcagatctaatttgcaatgttctaacccatttggca

SEQ ID NO: 489498 - DNA, 562 bp, Homo sapiens
agaatatgggagattaatcagatacgaaatgatctaatttgatacaaattgagctggaatgtagggccaaaccaaaatgataaaaagatgaaaacaaaagttacatttatgtaaaaaaaaaatcaacttcacatatatgggatgatggagacctagtttgacagttcatgtaaaaaaagacatgagagtttgacccagagccagcagtatgatatagttgctaagaaaaccaccacagtatatcagcaaaatggcagactcagaacttccagacccttattgtcccgtggaaacattaaataaacaactasagactggctgaaataactttataggaactctggaaccagtcaaatatctactgcaaccaaacaaatgcccagtccaggaaaagccacactcaaatggtgggaaatctcatggtgctttcacctgcccttgccccgcctcaccccagcacgttgcagtgatttggggcaagtgcagtcaggtccccagtccccttctataaaccagagagagtagggcagatctaatttgcaatgttctaacccatttggca

SEQ ID NO: 489499 - DNA, 488 bp, Homo sapiens
catttactactgtgatttcattgtataccgcccttactttttcccttatttatgcttaatttatattttattataactgagaagatgacagtggtagtggcagcatactttttggatcttctagaattycacataaaaataaacatagcaactaaatagcgaaatcaaaaacatgtcaaaaaacttacaacgaaaccaggtgacagggtatctcctcaaaccccaaaatacaggtggggctttcataaccacaacacctgcatggtatcagtatctatgcaggaggaagtcagatgatagccacaacacctgcatgatgtgagtgtttatgcagaaggaagctgaaggaagcagcatggtgactgaaagacctggaaacaggggaatgccaagacagctgaaaaatattcactgaaaagcaaagcagggcaatctgggaaccacagctgaaatagaagaggggttgttcccattccagtagtgtttga

SEQ ID NO: 489500 - DNA, 553 bp, Homo sapiens
agtactgtattttaaagcaatattacacatcatttctcttcacctgtacaaatttagtaagttttataataaccataatgttaccacattcaacaaataattccttaatatgtaatatccaatgcagctcaactcttcccacttgcccaaaaatgctttttaaagatgatttgaatcagaatccaaataaggttcacacacaaaatttgactgttatgcctcttttaatcttttaacagtttctatttttaaaaaatttttcccaggctatttatgtgttgaagaaattgtctcgtagaactttccagtctgattaggcaaactgtatcttcctggtattgctcagcataytcctgtagttcctatacaatgtagttagatctagagggctgatcaaattccaattcctttttgtatgacaagaggacttttgacaaggggaacctcaaattgcacatttttgaccagtaggagtccctacaaggtggctcctgcatcactttaacatgacctctgtctctaatagtagcttccttgctctcaggcacaaaat

SEQ ID NO: 489501 - DNA, 627 bp, Homo sapiens
acccttaacttactataccgacttctaaaccacagyagaaaatgaagaaaagttcggctatgggcaatagactcaaccttttgttctatgtctaacctataaaatagaaaaataatactgtcatccctcatctcccaccatactgaacacgcattaggtgctcaatgaatacttgtccattttagtgaagattaagaggaatgagacggaaactgacacttgagaggctggcacacgccagaactgcaccacactttgcactcatagctcatttactcatcagcttgtggtcaggtaggcattaccgtccccattagagaagtcaacggaggctcagcaaggacggccagggtcccccagaaagtagaggaggacttcaggtttaaccaaaagcctgtactctttacacatgtaccccatgccttctccaccaaagctcctggcaccgtgctttgcagacagacgacgctcaacacattttgagcagaagcgtggttcagcaccaggaaggacaccaacttttgcagagacgactcttgggatggagaaagacttcccaaatcttcagggtgcggtcaagacagggtaggctagcgccaggggagctagtggctaggccccagggca

SEQ ID NO: 489502 - DNA, 621 bp, Homo sapiens
aaaaattctaccaattatgacatgccattgatktaagacctatcccaatttcagaaatatcaaaatgtgcaaaaaatcatacatcttagaattgttgaaatatggcataaaaatctattattatcattccctatggtatctagcatatggtatatgttcagagaggaatgaatttagcaggatacattggcatagatgaatgagataggggatagaatatgtttcttagagatttttaaggctctttctatctttttacctaattttttcttcctggataaaatcactgcagacatttttatgttgtggaattttagagctccaatcacctcatttcccttgtggtctcttaaacagagacacaataccatcctgaacactacctcaagtcacataaaaaattgtcagacaccccgagtagcctaactgggaggcaccctccagtaggggcagactgacacctcacacggccgggtacccctctgagacgaaacttccagaggaacgatcagacagcaacatttgctgttcagcaatattcgctgttctgcagcctctgctgctgatacccaggcaaacagagtctggagtagacctccagcaaactccaacagacctgca

SEQ ID NO: 489503 - DNA, 648 bp, Homo sapiens
tgtccaccttgaagacatgttattgtttaattcttacatttaataaatatttctagaatattatctgtagagttggtgctaaggatatcacaataacaggacatagttcctgccttcagggtccctgtggtctgcttgtaagagagacccaaggaaagaggcaatcacactatagtagaataagtgtttcccaggtatgcacaaaatgagatcatgactttatagtgcttagcaaatgttagagtgttgtacaaatattggctttattagtactgggcactcctgatcctattcagggatctctaactactcttgctctgttcctccccaccaagccacgaagcagaaggccagccttggtacccacagcctcttctaaagacaactgatgctaaagcctctgctgaaggggcaggaccaaatgagcctggcaactgatcccacctcactctcaggcagcaggtgatggaactgcgttgacactaagcccaggcaacccgtcaatatgctgacttttgacacatgatattrtctagcaagaaactttgtgttgagacagtcaggttccttcttttgagaattttaacttggaaacacagataggaatccagcagtcaacaacagggctgaaactggaaaaatgcatag

SEQ ID NO: 489504 - DNA, 670 bp, Homo sapiens
ggctctcagcgaattactctttctctattgcaattcccctgtcttgataaatctgctatgtctacgcagcgggcaaggtgaacccattgggtggttacatgttcacctttacacatttttttaatgcaaaataaaccaagtgtccttgcaagaactatgctccttattttatataaaatttccatgcagccagtattttttctaccacctataaagcgtgatacacacttcaatttgcgattcagtcttggcacaaccagcaaaaatggaataaatttgaagataaaaatacaaataaacacttttttcttttaatttctagatggcactattacttaatggttttattttcacacgaaaatcctcgaaatcttgcatgtaggcacttcaggaactatacatggctctacatgaactcaatggtcagaaagaagagaaaaacatgcccgtagtcccagctactcaagaggctgagrtaagaggactgcttgagcccaggagttcaagggtgcagtgagctatgataagaacactgcacatagaccccttctcttaaaaaaaaaaaaaaaagaaaaagaaaacagagagagaaagaaagcgaaaaacaatgattctaggccactcaagtgattgattatatattcaggttttccaacaaggtttcagatga

SEQ ID NO: 489505 - DNA, 502 bp, Homo sapiens
gggcaactgatcataaattaagtgcctgacattcagtaacagatgatcatatctgacataatgaagttataatggaaggtgttcgcacactgcttgactattaagtgcccatttattgtccctgcaccaggtgtgatagtgataggctatacaaatcatccagaagaaatgtcaaaataggctcctttactgataaagtaccacacatgtttattaatgtagcagcttgtcttaagtctggcccatctgctcatttaaaacaaatcwtttccctacaaatatctcagttaagagcatgaccacgagaaatagttttagagcaacagaaatggtaagggaagaggagaaaaagaaaaatagctgagcttaaataaaatattatgctcttacttttgtcttagatgcatttaacaggagaaggggcagggacatagcttttcatatgacatttgctttagattagtactgcgtgagtgtaggccatcgtaaatgggccaggctc

SEQ ID NO: 489506 - DNA, 577 bp, Homo sapiens
gtaagaagcttgaaaatgtcaactaggctgaccacacacaggtgtaggaggtcacggttagtgtgagacagacctagggctagagagagaaggacagaaggccttgggccacagmcagaccaggaggcaggggcagtgacagtgtatcccatgccaccatgctaacatacaaaattccaagaagttcaagaagtctaaaccccaatttgactgtgcaaatcattataaatatatatctatcaaaataagggcatggaacatattttatttaatactttgttaccttgatctataacttcttaatatttagacagaggaaacctagacctccatttgtactcatatcccaggcctaacagatgttggggcaggcaacagagagaaatctgtggccaccaaccaatgccagagaagtgataaacaagaaacactgtcacttccaatcgcttttctccttcctgcaacacaggcatgtggacacaggaaggggaggaggatgaggaaaaggaaggtgggcagcatgttccaggagtagggcacagaccctcgtctctcctagttcttccagccctaagtc

SEQ ID NO: 489507 - DNA, 577 bp, Homo sapiens
gtaagaagcttgaaaatgtcaactaggctgaccacacacaggtgtaggaggtcacggttagtgtgagacagacctagggctagagagagaaggacagaaggccttgggccacagacagaccaggaggcaggggcagtgacagtgtatcccatgccaccatgctaacatacaaaattccaagaagttcaagaagtctaaaccccartttgactgtgcaaatcattataaatatatatctatcaaaataagggcatggaacatattttatttaatactttgttaccttgatctataacttcttaatatttagacagaggaaacctagacctccatttgtactcatatcccaggcctaacagatgttggggcaggcaacagagagaaatctgtggccaccaaccaatgccagagaagtgataaacaagaaacactgtcacttccaatcgcttttctccttcctgcaacacaggcatgtggacacaggaaggggaggaggatgaggaaaaggaaggtgggcagcatgttccaggagtagggcacagaccctcgtctctcctagttcttccagccctaagtc

SEQ ID NO: 489508 - DNA, 523 bp, Homo sapiens
tagtcccacaagtctaagcatatagcttacagtaaagatttatcattttgccagagctagcatatggttgtgacacatttataggagtgattgaaatgatttagaaagatatatctaaattgtgtcacatcatcaaggattatgaggcaacctaaaagaagactgatttagagggaatgtggctaatatgtcacagatgaaaattgtttggggtttgcatatatgtgccttgcaaagcaaaaagctactgtagtctgatttttcctgagactgcttaattaacatattgaatattagtttacctaatgtttgcccctaaggccaaagtgtgtgtgtgtgtgtgtgtgtgtgtgtgtrtgtgtgtgtgtgtgtgtttctggtggaagatgaaaataggggctgttagagataactgtacaaaaatgtctctttctgtgcagaatgcaaaattctggcaagggaagtgacctagaagaaaagtagcaacaaaacagtgacaaaaaaatccagaacatggtggcac

SEQ ID NO: 489509 - DNA, 523 bp, Homo sapiens
tagtcccacaagtctaagcatatagcttacagtaaagatttatcattttgccagagctagcatatggttgtgacacatttataggagtgattgaaatgatttagaaagatatatctaaattgtgtcacatcatcaaggattatgaggcaacctaaaagaagactgatttagagggaatgtggctaatatgtcacagatgaaaattgtttggggtttgcatatatgtgccttgcaaagcaaaaagctactgtagtctgatttttcctgagactgcttaattaacatattgaatattagtttacctaatgtttgcccctaaggccaaagtgtgtgtgtgtgtgtgtgtgtgtgtgtgtgtgtgtgtgtgtgtgtgtttctggtggaagatgaaaataggggctgttagagataactgtacwaaaatgtctctttctgtgcagaatgcaaaattctggcaagggaagtgacctagaagaaaagtagcaacaaaacagtgacaaaaaaatccagaacatggtggcac

SEQ ID NO: 489510 - DNA, 598 bp, Homo sapiens
ctgacagtcttaaccctaaaaacttacactgtgtttttgtcatgtggtrgtgaaactttgatgttgcctgataacaccacccttgggttgcactttaatttttcatgtgacatgtcagccctattccattggctactgcatcaactatcattatctagtggatgaaaaagtcgttacatataagtaaaactgccatagaaagagtggctcctgttacatgaattcttctgaactgctatgcactgtggtgggtttggatatgtatacaaccttgacctgagatctaggtttggggttgggaaatattagcatgaatttctttgcaattagggagaatttagcaagtcagaaacaatctggaaaggaagggtgagatggtataaagcttggttttgtatccagtaaaaactgccacagggggttgtttcaaagataataatagaagttaatgtgtaatgctcggtctgaaattgcatttctgtgccatacacattttgactctgctcctccgtcattttcagtaaaatctaccatacttatgattattactttatgtattttaagcagaaagaggattaatacaagaaaacaggagctt

SEQ ID NO: 489511 - DNA, 598 bp, Homo sapiens
ctgacagtcttaaccctaaaaacttacactgtgtttttgtcatgtggtggtgaaactttgatgttgcctgataacaccacccttgggttgcactttaatttttcatgtgacatgtcagccctattccattggctactgcatcaactatcattatctagtggatgaaaaagtcgttacatataagtaaaactgccatagaaagagtggctcctgttacatgaattcttctgaactgctatgcactgtggtgggtttggatatgtatacaaccttgacctgagatctaggtttggggttgggaaatattagcatgaatttctttgcaattarggagaatttagcaagtcagaaacaatctggaaaggaagggtgagatggtataaagcttggttttgtatccagtaaaaactgccacagggggttgtttcaaagataataatagaagttaatgtgtaatgctcggtctgaaattgcatttctgtgccatacacattttgactctgctcctccgtcattttcagtaaaatctaccatacttatgattattactttatgtattttaagcagaaagaggattaatacaagaaaacaggagctt

SEQ ID NO: 489512 - DNA, 598 bp, Homo sapiens
ctgacagtcttaaccctaaaaacttacactgtgtttttgtcatgtggtggtgaaactttgatgttgcctgataacaccacccttgggttgcactttaatttttcatgtgacatgtcagccctattccattggctactgcatcaactatcattatctagtggatgaaaaagtcgttacatataagtaaaactgccatagaaagagtggctcctgttacatgaattcttctgaactgctatgcactgtggtgggtttggatatgtatacaaccttgacctgagatctaggtttggggttgggaaatattagcatgaatttctttgcaattagggagaatttagcaagtcagaaacaatctggaaaggaagggtgagatggtataaagcttggttttgtayccagtaaaaactgccacagggggttgtttcaaagataataatagaagttaatgtgtaatgctcggtctgaaattgcatttctgtgccatacacattttgactctgctcctccgtcattttcagtaaaatctaccatacttatgattattactttatgtattttaagcagaaagaggattaatacaagaaaacaggagctt

SEQ ID NO: 489513 - DNA, 629 bp, Homo sapiens
tgggaagtttgtgtctcaaaattctgcttggaaccacaccaatagtaagtacaactgccatggactaggaaaaagttcatatatggtgaatgaacaagtcattcaacaataatgattaatgaataaagcaccagaaatattgagtcagacccagagatagtcaagatatcctactatatatcatgaaaactagggttcattcttgagtttctgccagaatcaatacagaaagaagagaacaagggagtagagtcgcattattagaaatgtcagcctacgaaatgaaaagcagctttcaaatcaacagcagatttcaaaagaatgtcagtactgaatgtggtagcttgagagtgtaagtccctagagtgtcaagtcaatttctttctctayagtgaaaacgtggttgtagaaagtgcaaatatccttaagaaatttcacagctactgagataaaatggcaatactctcaagggctgccctgctgataagttttcttaatcatgtttaaattgatgaaaaagtagaatgttaagagaaacacacaaaactaactggaaaatacatgatagagaaatccttaccctaaaacaaccttcttgttttattgctgtggctaaatttcttttcaaa

SEQ ID NO: 489514 - DNA, 641 bp, Homo sapiens
atcctgtttgtttcatacacttgagtttttggaattccttttatatatatcactttgtattctatatcatagaaaattttgaagttaaatgttaaagactcttttaaagaacaattcttaatctaagtgtatgaatctatttaatttgcgtatgctaaaataaatccttcttcatagatctgtcttgttcagcatgtcaatattgaattctccaaagtcaatttgtggaaaatcattgatgatctaaaagtatcatcctagcccttaaagatttgtatcagagatggcataagagaagggatgaataatcgatatgtacatcaaacacctaaaaatattgaatcactatggaatagaatggagtgtaaatattggcttaagtcccctaaactgcataaggaaacctgcaaggaggtttagcataagaaaagtaagcatattgctaaaactgaaggattttatttttaaaattctatgctactctaaggtaattctggctaatgagtctaggcatttaagtttggtctccctctgcaaaagagacatgatattcctcatggctgttttttacttccattgactaaatgtatgcacagcaacatgactgtcatrgtatataattgctctggaagtcaagtttt

SEQ ID NO: 489515 - DNA, 548 bp, Homo sapiens
tgtagatggtgtcatactagttctgaggcttcagtttccacggacaagatacttggacaggaaaagggaatctccaggaaggattaaattgagacattaagaaacatataggaaagaygagatgtattttattctgtaacctactcatacaacctttctcgtgaataaggcctattaagctgactgaattttggaaaggccccattcacactttttttttttatgacttcttttcacaaagaataaataccacagagaaaccaagagaatgctggcttggttattacctttaaaggtcattctgagtagagtaccatattactcaatgttaatgtgacatttcaccttaatgctccagggaaatgtcaaccacaaacaattagggtcaggttatacagggactctctattttgtctttgccacttttctaactattctacaataaaaatatattaaagaataaaagtttcagggaccaaaaaatgaaaagtcattctctctctacttttggtaggagaatctggtggtggtgatgatagcatagggaa

SEQ ID NO: 489516 - DNA, 376 bp, Homo sapiens
aaggcattaccttaaagataatctgcttttaggctgtgtatatggcatgcatgcttcagtcctctaaagaaagggaaaaagaccgaaacaaaaagagcacaattcaaaagatctttaagttattaatagaatagtttaaacagattatttaaaaacagttacctgaaaggttaacgtctcactgactttatgagaaagagaattgaagatgttactttacaagctatgatggaaaccgaattttgcagaaacaacagtggatacagacacagatatcagtggtctgaggaaggytgcaaactacattaagaagctgagaaaacgggaaaagatggctaaattagaaacaagaagattaatgggccaaatagcatta

SEQ ID NO: 489517 - DNA, 471 bp, Homo sapiens
gtcagctatccaaaggcattaccttaaagataatctgcttttaggctgtgtatatggcatgcatgcttcagtcctctaaagaaagggaaaaagaccgaaacaaaaagagcacaattcaaaagatctttaagttattaatagaatagtttaaacagattatttaaaaacagttacctgaaaggttaacgtctcactgactttatgagaaagagaattgaagatgttactttacaagctatgatggaaaccgaattttgcagaaacaacagtggatacagacacagatatcagtggtctgaggaaggttgcaaactacattaagaagctgagaaaacgggaaaagatggctaaatkagaaacaagaagattaatgggccaaatagcattaggcaggctgatgatgctgctttctttaaaatggtgaatatgagctcattgctatctaaatgtcagtcactctggcacctcaca

SEQ ID NO: 489518 - DNA, 587 bp, Homo sapiens
tagaatattagctgttaaaattcctattggctgacctcatgaaagaggacattgcatttgaccagctcagcttttattccccctttctcactgtagatgttactgtacaacacactgaatattggatcagtctttgagaagcactgtaacatgacctgcacaaagagacaagtaattctatactattttcttccaagctcaagttggcacagataaaattcctgtgcattaatttataattaaaacttgtgcctttctagaaaatgcctcatctctgcttggcttaaaaaaaaaaatcaatctgctgtttttccaaaaaagtagagataatttaacatgtcatttttcatgcaattagtttattggctactttacaagaaccaaacaagtctaagaaaatcagtcattgtagtttgtgttcatgagtgacaacctggtgcttgggagagcctagagcatgaytaagggcttaggagagaaaactaaaggtttttctttgttaaagaaacaaatagacaacttctctttgcacctctaactgacttaaaattgctaattgttttcgtctgtgtgtttttgtagaccac

SEQ ID NO: 489519 - DNA, 587 bp, Homo sapiens
tagaatattagctgttaaaattcctattggctgacctcatgaaagaggacattgcatttgaccagctcagcttttattccccctttctcactgtagatgttactgtacaacacactgaatattggatcagtctttgagaagcactgtaacatgacctgcacaaagagacaagtaattctatactattttcttccaagctcaagttggcacagataaaattcctgtgcattaatttataattaaaacttgtgcctttctagaaaatgcctcatctctgcttggcttaaaaaaaaaaatcaatctgctgtttttccaaaaaagtagagataatttaacatgtcatttttcatgcaattagtttattggctactttacaagaaccaaacaagtctaagaaaatcagtcattgtagtttgtgttcatgagtgacaacctggtgcttgggagagcctagagcatgactaagggcttaggagagaaaacyaaaggtttttctttgttaaagaaacaaatagacaacttctctttgcacctctaactgacttaaaattgctaattgttttcgtctgtgtgtttttgtagaccac

SEQ ID NO: 489520 - DNA, 525 bp, Homo sapiens
gctcaggtgttgattataaacactgtagtgtatttgggaatggtgttgctgaattcacagtacaggcataggtagcaatactaagatggtaaggcaaatgttagtgtctagcattttattacataaaagcaggctcaaattagcagcagttataaaattaccattattcattttaagatagtcctttgccttcatgtgtatcttgcctttttttatacattggtcaaaaggaaatagtaagttctcaacctgaatgagacaaacattagtatttactttaactattgtatcattccgaaattgacccaattttttaaagatgtttattgtagagttctattgtttgttttttgtttgcatatccatttttactatatattatttaacagagtgtggaagttagcctaattygttgcggtttatatgtttgttttttccaataatcatgaataggtattacattatattaaatgagttttccgattctgttgaaaagataaaatagtttttctcgactaacctgtt

SEQ ID NO: 489521 - DNA, 671 bp, Homo sapiens
actcattattttcaaattttttttttatttgctcccaacctgccttccaatccttgaaaggaaaaaataacaccacctcctatactgttataaaactgccaaatctgtttttaaaatttcatgttttttatatttattttcttaaacatttgatgactaattaagcttcctggttggaaaggccttcccgagatgctggtttcttaaaactttgtactaaccaggcastggagcccttacctgtatcaccttatttcatcctcacaataaagctatacagtaggtgcatttttaaatctctgcttttctagatgaggaaactgaggttcagagaagcatccaagcttctcaaagtcagaaggtgtcagagtggacatgcaaacccaaatgtttccagctctggcaccctcacactcaccacccaaccacacccctcttaggttgcccagtttctaggtacactgaccaagcactttcctggaatattgaatgggggtagtaaggcttaagtttagatcctgtgtttagatctggtaggaagagcacaaatggtttgtaaggaaaatccctttaatggttacctaatttcagattgtgggtgaaaactcaaatatcctgtctctaggggaagaaggaaatattacaattcatataaaactaaaccaacctgt

SEQ ID NO: 489522 - DNA, 262 bp, Homo sapiens
tgcctccacaaaggggcctggaccccgggggaccacggggacgcttcaacaaccaggctggacggcgacactgcccgaagaagggacagtgggaaaacagcccgaccatacctagccccgcgcagccccagcacgcggtgagcacggcagaggagcattccctccccttaagtcaccggagcccttcccccggctcggcccggtccctcccgcgctccccaccgcccatctycccggccctgctgccgctccagccccgccc

SEQ ID NO: 489523 - DNA, 385 bp, Homo sapiens
ggcggggctgtcggacagacggagagggaggacgggagggagggcttgcgggcagagggctcaggtaggtggaaacggatggagactggcaggaaagggcagaagtgggtgtgtggggggcgctaaatgagtatgagagggaaagctgagaaggagaagaccggagatgaggcgtgggagggggtaaggagggratggaaaagggtaaaggtggaggcagaaaaaagagggaggaatgaggaaaatcaggaaaagagtgagtcaaggaggagcccgggagcctaggagtgaaagggagcaaacgcagagaccgcagggggccaggaggagaggagacagaggctcagagacctgggaagacaagcagggtgggagggggagctgt

SEQ ID NO: 489524 - DNA, 546 bp, Homo sapiens
tgtgtgcccacacggtcttcctgagcatgtacctgtgcatgcacatctgctttgccgccatcagctctaaggtccgtgtgagagtgaacgcaccgttctgtgtctcagtgcccttgaaggtccatgcccctctgagcctgggcatcaaagtggggctgcagggccagaagcatgggagagccacgggggaggcaggtatgcctcagggggagatgttggggaagcaggaaccccagacgtccmggagccccaagcccaccaggagaagggaggtgtcacggagtgagctcagtccaggtgggtaagggaaggggctgctctgtgccccttggacttgtccccagcctcaggtgctagtgccctcttcctgcagccagcccaggcctggagcctgcatctcctcctgctcagccaagcccgtgtgggggcccctcctctccctcactgggcactggcacctctttcctaggctgagtggtctctggggaaggcacaggtggaatgacaggggcagattccagtccttgccctctgtcctctgcgaat

SEQ ID NO: 489525 - DNA, 546 bp, Homo sapiens
tgtgtgcccacacggtcttcctgagcatgtacctgtgcatgcacatctgctttgccgccatcagctctaaggtccgtgtgagagtgaacgcaccgttctgtgtctcagtgcccttgaaggtccatgcccctctgagcctgggcatcaaagtggggctgcagggccagaagcatgggagagccacgggggaggcaggtatgcctcagggggagatgttggggaagcaggaaccccagacgtcccgsagccccaagcccaccaggagaagggaggtgtcacggagtgagctcagtccaggtgggtaagggaaggggctgctctgtgccccttggacttgtccccagcctcaggtgctagtgccctcttcctgcagccagcccaggcctggagcctgcatctcctcctgctcagccaagcccgtgtgggggcccctcctctccctcactgggcactggcacctctttcctaggctgagtggtctctggggaaggcacaggtggaatgacaggggcagattccagtccttgccctctgtcctctgcgaat

SEQ ID NO: 489526 - DNA, 668 bp, Homo sapiens
taaggaaactattgtcacccttaatgaaactaaagcttatcctgctgggtcctcaytggagcaagaacccacaggtgaaggggcagccaggtggcaaagcccccaccccagcctgtctccccaccactccttcttttctgagaagcacaggtgggacaaggtgggcctcttgaatgagggtttattaaagtcttggaggaaacaaaagggaaacagaacagagagttatactcaccttgattatctgaggcacaaatgcagcctcagccatgaacatattgaaggaagggatagtccagtatgtaacagacgcaccctgctattggcaagcaaagcacagatggagtgaatttaaagagtcctttactaaaggactttgtttcaggacgaaagtccacacagagcccacagggtgtgggagatctgagatctggaactgggatctctgggctctgaacttgttctgttgggcaatctgctgatggagaccttgtcttcgagtgtcaggatgcacactgtggtcagctccccctaggttgcaaagggcattctatctgggacttgtcttccctgcccatctgctctccttttcaacagcttcttggttcttttgaaacctatgctgtcttcccaaagccctacctcctattgtgttggcctcctgtaag

SEQ ID NO: 489527 - DNA, 561 bp, Homo sapiens
attccaaatagtttggactcctatgattgatgcttttttctttctcttacctggaacacatatgcctatcatgttgtcttcttccactgttaggtcagctattcaaacaaaaacattgagattatagatctcattttaacttcctaagtgagcccaaatacgggccagaagagtgttggtgtccatttctgtttgaatgttgaaggctgtctgactttgtgcctgcttctagtatggtccaaacaattgaagatattttggctttgagaacaccataaagaagaatgagatcctgtcatttgcaacaacatggttggaactggaggtcattatgttaagtgaaattaaccaggcaaagaaagataaacgtcacatgttctcacttatttgtgggaagtaaaaattaaaacaaytgaactcacggagatagagtagaaggatggttaccagaggctaggaagggtagtggggtgggtgggggggagtgagaataaaaaatgggtacaaaagaataattataaagaatgaataagacctagttgtctctaacacaacatggtg

SEQ ID NO: 489528 - DNA, 592 bp, Homo sapiens
gagtgccctttccatcttctcccctgcatgttggaaaccccaagctaagtgcgtgaaaggaagacaaaatgtaatacgactttctgccttaactattcttctcttccctccacgtgattatgttccagccttgcccatggagaaaggggctctgctgcccgggcctccccagccctctcctgcctgggctgacctgccctccctatcagttctgatgattacttccttccccatgcacttggagaactaccagattctcttacacattaatctaaatcctggcactcatccttagcatttttattaaatagataatttttcttgttgtttttaagtcaattcttcaggtgaatctggcatgggaaatattgcaaatgatgcattggatttttgacataggctaacatatgaacagtatccaggtcatctttgagcatgaaccataacaaacacagcttcccatctctatgtttgggataatctgctwtcccacactggggaaatataaattcattttatattaattaaggcaaaggcagctaggaaaataaattgataaatgctactataaaaatgcactatccaaaagaaa

SEQ ID NO: 489529 - DNA, 427 bp, Homo sapiens
ttggaatgtaaatccattacattaagaataaatctacaaaaataatktaaaatttttgagtgctttctatatgtcaggcattaccataggtgttttatatgcattgtatcatttaatggggaaagtattaatatccccattttatagaccagaagactgaggcttagagaagacaactgcaatcacacagttaaaaatgaatagatttggacaagtaaataataaatgtttgagattatggatatgctaattaccttaatatgatcaccatacattatatgtatcaaaatatcactatgtacctcatgaatatgtacaattatttgtcaattttaaaaaattaaatttaaaattgtgagaaaaaaatgaacagagttggttactcaaattcacatccatatgagtccaaagcctgtgggaaaaaaca

SEQ ID NO: 489530 - DNA, 427 bp, Homo sapiens
ttggaatgtaaatccattacattaagaataaatctacaaaaataatttaaaatttttgagtgctttctatatgtcaggcattaycataggtgttttatatgcattgtatcatttaatggggaaagtattaatatccccattttatagaccagaagactgaggcttagagaagacaactgcaatcacacagttaaaaatgaatagatttggacaagtaaataataaatgtttgagattatggatatgctaattaccttaatatgatcaccatacattatatgtatcaaaatatcactatgtacctcatgaatatgtacaattatttgtcaattttaaaaaattaaatttaaaattgtgagaaaaaaatgaacagagttggttactcaaattcacatccatatgagtccaaagcctgtgggaaaaaaca

SEQ ID NO: 489531 - DNA, 638 bp, Homo sapiens
gcattaccataggtgttttatatgcattgtatcatttaatggggaaagtattaatatccccattttatagaccagaagactgaggcttagagaagacaactgcaatcacacagttaaaaatgaatagatttgsacaagtaaataataaatgtttgagattatggatatgctaattaccttaatatgatcaccatacattatatgtatcaaaatatcactatgtacctcatgaatatgtacaattatttgtcaattttaaaaaattaaatttaaaattgtgagaaaaaaatgaacagagttggttactcaaattcacatccatatgagtccaaagcctgtgggaaaaaacagtgtcctcagctgactcactgtttagtgcttgctttgtttttataagaatatggaacctaatctatcagcccttataaacctataatggtttatatcactttgtgatgaagaagaaataaaatatagaccatggattagctcctgataaatatctgtgtttatcaggacctagtagtccagaaggaataaaaagctctgtccaatctggaaacaaagaacacaggttgcttgcaagaaaagatatcaatattgatgacataagttttccacgttttgttttccacttt

SEQ ID NO: 489532 - DNA, 427 bp, Homo sapiens
ttggaatgtaaatccattacattaagaataaatctacaaaaataatttaaaatttttgagtgctttctatatgtcaggcattaccataggtgttttatatgcattgtatcatttaatggggaaagtattaatatccccattttatagaccagaagactgaggcttagagaagacaactgcaatcacacagttaaaaatgaatagatttggacaagtaaataataaatgtttgagattatggatatgctaattaccttaatatgatcaccatacattatatgtatcaaaatatcactatgtacctcatraatatgtacaattatttgtcaattttaaaaaattaaatttaaaattgtgagaaaaaaatgaacagagttggttactcaaattcacatccatatgagtccaaagcctgtgggaaaaaaca

SEQ ID NO: 489533 - DNA, 499 bp, Homo sapiens
atcttggccaagtcactgaaccattctgggcctcacaacatcacagtacagmtatcataggactgttgtagagaaacagtgaatcaatatgcccagactaatgcctataggatatgtaactgttcattaaatttttgcaactatgaattgtgttgttgttggaatacagaaaataaattaattatagcttggagaaatcaaggaaggctttacagaggaggtaaaatttgagttgtcccctaaaaacttcacattaataagtaaaggtagtggaaataaaaagtcagccacataaatggcttaaaagaacctgcaccatttactgactttgatggccaaaccacactaatcagagctatctacaaacttcaaataacttctgtaaaactatttaggctggcgtgctattctccttatatgttgatttatgttcttagaaagaccactgtaagaaaaaaataaagctttttagaaacacatagttgtcagaaacaatcaa

SEQ ID NO: 489534 - DNA, 499 bp, Homo sapiens
atcttggccaagtcactgaaccattctgggcctcacaacatcacagtacagatatcataggaytgttgtagagaaacagtgaatcaatatgcccagactaatgcctataggatatgtaactgttcattaaatttttgcaactatgaattgtgttgttgttggaatacagaaaataaattaattatagcttggagaaatcaaggaaggctttacagaggaggtaaaatttgagttgtcccctaaaaacttcacattaataagtaaaggtagtggaaataaaaagtcagccacataaatggcttaaaagaacctgcaccatttactgactttgatggccaaaccacactaatcagagctatctacaaacttcaaataacttctgtaaaactatttaggctggcgtgctattctccttatatgttgatttatgttcttagaaagaccactgtaagaaaaaaataaagctttttagaaacacatagttgtcagaaacaatcaa

SEQ ID NO: 489535 - DNA, 542 bp, Homo sapiens
aagtaatccctgtggaggaggatggtggcctaagacagcagcacttagaatggagggaagatgtgtcagacacagcaaagaggtctagagagaactctcaaggcttsttcactgatttatgtgaggtgagaaaaagaaagaaccaagcatgactcctaggctgcaagcttggatgtctaaatggatagacctgctgttcacagagataaagaataagtcaacttatatttgaaagtataaaaatcaatgatactgcactaaattttaaaacattaacacaaacaaaagcagaggctgtctcagatagtatggatatatatctctgagataaatgaaaagcttaaattcagagaggagtaagtcaaagaaattcctgtctaacatatgttgatgagtgaataatcaaagaataaaacagaaggcaattcactaacaagagagccatctactgccttataagcatagtgcagcaatgaaatgccacacacacacaaaaaaaaatgtggaagaaagccaggagtttttgaccacttcacattgaa

SEQ ID NO: 489536 - DNA, 500 bp, Homo sapiens
ggcacaggctggctgagacagagattggagacgaagagcaggaaaagaagttttcatggccctgttcaaggtctttatgctttccaagaattcagtcctggctttgttgtttgttggcagagacaggataatgggttcgtggcagcttcacttttgctgaagggagaagtaggacacggcatagtgcaaagccgtgctttctctccctattcctgaggttccctagctgcctggccagaagcctgggagtgtggcatgctcaggtacagcccctggttggtctctatgatatatgccttcctggatatgttatgagaaacaaggggagctaggctttctttccacactcatgagataaaggaaagcaccccagaccctttgctgttccaaatgtggtctgtggaccagtatcttctagaagcttgtcagagattcagaatctcagayttagtggattcagtttttcattttaagaagattcctgggtgacttgcatgctt

SEQ ID NO: 489537 - DNA, 535 bp, Homo sapiens
tcaaagtatgcacattactcaataatgcagttgatttctaccttctttggagttcaaactgatccatgtggctttcatgattaagcagccactctggcctgtttastatttaaggttttagcaggaattgcaagcttgaagaatgaactgtgactacactgctcattgattcatcaaatacataggacagagtgtaatcctttgactagttttgggagacagtggggtggaatggatagagaatgagctttgaagtcagacctaaatttaaatcctggctcagccctttactccttggtgatcaaatggtttataattttgttgatccccatttttcatgattctgtatttgcaaatgtgcccacttgccaaaatttatttgtaaccccaaaatcaatacttgcggcagcactttcatggtcatttgcagactttacttgtaccctgaaaatcaatatttgcagcactctcgtggtcattaacaggcatacactgagggataaaaaatttgaattgcctaatgcatacatggcca

SEQ ID NO: 489538 - DNA, 519 bp, Homo sapiens
  misc_feature (1)...(519): n = A,T,C or G
tccaagttttgaaaactattatatagagttgcttattatattctcttaaacgattttaatcactcctatatctatggttatttctcctttcacgtttctaatgtaacctatttttgttcacactcatcgtctttmtctctcttgctcactctttccttaatcaggatttgaaggggcttatctgtagatgtcactggtctttgccaagaagcagtatttgaatttatttttcctctctgtagatatgctattttattacctttgtattttatttttttttcatccgtcttcttagtgtctttgagtttactatgttgttctttttagaaaactatagaagtaagtctttagcacctttttggtggttcactggcagtgaaggcattcaaggctataaactcttctccaggctgggtgtcattgtgtctgatggactttgtattttgtgcacaccttttcactgctttctagaaagctggtgatttttcttttgattttctctttaatcnnnnnnnnnnn

SEQ ID NO: 489539 - DNA, 477 bp, Homo sapiens
ctggctgtggagggtcagctttttgttctctaaaccaaaaagaactttttcctcttttataaaagggagacttgttcattaaaaaagaaaagaaaaaatgtgagacatccaggaaagcaaataaaaatcactcacaattccaccaaccaaggaaaattgtgtttcaacctttttgcctgtgcattagtctgttttcacactactgataaagacatacccaagactggacaatttacaaaggaaagagatttaactggacttacagttccacatggctggggaagtctcacartgatggcagaaagcaaggaggagcaagtcatgtcttacatggacggcagcaagcaaagagagcttttgcaggaaaactcctccttatagtaaccatcagatctcgtgagacttactatcacgaggccatcatgggaaagacctgccccaatgattcaattacctcccactgggtacctcccacaa

SEQ ID NO: 489540 - DNA, 622 bp, Homo sapiens
agctggagctgagcagtggccgtccccttcaaatggggctaacattatcacagtctctatccagacaccatcggctatggaatccttgctgtaaggggcagacgtatatctccctcctctggtaccttgcccacaaaggggcagatatacttagcacatcttagagcgctactcttctcaagctatcagtggtgaaggaccagtttgttttcattttcaatcccttgtggaccgacatatggccctgctgagcatgtctgagacacagcacaaagcacaaagagctcagtatgtgagttctataacaccctgatgggtctataacctgatcaataagacaagcctgctgaaracgcacttggatggcaccgcaacatcgaactgctataagtttctaacacttccagtttcagtactaatctcgctgctgataggtgttaagtactaatctcactgctgatgggtgatagttctcagccagtgttatcctcagattctgctttaagtagcactatcacagagaaaatctacgttactctattttttcccacatttaaaaatattttttaaataatgtttaaaatattaaatcaataatattaaaatttttttttttttttgt

SEQ ID NO: 489541 - DNA, 537 bp, Homo sapiens
gcatccaagtccccaaatatgaggaggaagaggaagaggaagggggcttgtccactcagcagtgtcggacccgtcatcccatcagttccctgaaatacacagaggacatgacgcccacagagcagacccctcggggctccatggaatccctggccctgtctaatgcaacaggtaggttctgttcaccttgaaaacagatagaaagggggtagtctctgggtgactggatgctggtccccaggaattttttttttttttgaaatggagtctcgctctgtcccccaggctggagtgcagtggcacgatctccgctcactgcaagctccacctcccgggttcacgccattctcctgcctcagcctcacgagtagttgggactacaggtgcccgccaccatgcctggctmatttttttgtatttttagtacacacgtgtttcaccgtgttagccgggatgttctcgatctcctgacctcgtgatccacctgcctcggcctcccaaagtggtaggattacaggcgtgagccaccgtgcccag

SEQ ID NO: 489542 - DNA, 334 bp, Homo sapiens
tttaaaaattctctctcaccattgctgcccagtcactaycctgcatgtgaatgccagcttgtctcttgagttgtctctttcctattctcagcttccacccccaaacacatttagagcacaggtcttttctgtcacacttgccagtcttccttgcctgctcttattatgtaaatcaaattcaccactctgtcctgttttgttttcatctctgcttcactcaataccccgactccctcaggaccgtgttgcttctgccctgaatgagttcttttctcccgggctgcagggaccacagaggtcttcttcctattacttcatggactgtatgaattcc

SEQ ID NO: 489543 - DNA, 334 bp, Homo sapiens
tttaaaaattctctctcaccattgctgcccagtcactatcctgcatgtgaatgccagcttgtctcttgagttgtctctttcctattctcarcttccacccccaaacacatttagagcacaggtcttttctgtcacacttgccagtcttccttgcctgctcttattatgtaaatcaaattcaccactctgtcctgttttgttttcatctctgcttcactcaataccccgactccctcaggaccgtgttgcttctgccctgaatgagttcttttctcccgggctgcagggaccacagaggtcttcttcctattacttcatggactgtatgaattcc

SEQ ID NO: 489544 - DNA, 662 bp, Homo sapiens
attatcttagttttccaattatttttaattttccattaatacaactgatttccaataaatttaaacactaattttttctcattacaaatagaatcctaagtttgctcctcaaaggatttttgtttttaatgtgaagagcacttaaatgactgaactcactattgtgatgtacttttctaagtgacagaaaagaagacatttgtatattagtttggctaatatgactcttgccacggtttagaggatgtttgagacacttataaataaaacagtaagagagacagtattccatttttcagaaatatgcatggctaaaaaaagtagttaattttgcttaggtttgtagaactctaaacctgagtaattcaagttgaaatgaacaaaagatgcttccttacctttaggtctttccaactgtccaggagtttggtggccaaatcacttatatccactgttttatctggctgttcttggctcctttcactctccacatcagacacaccctcctcttcatcttgggatggtgtttcttcattaataggttcttctagttttgtgccgttgctctctttgrgctctatttcagcgtcagcttctggttcagatgtaggtagcttactagcttctatgttggtttcactatcaactttgcattcaggcag

SEQ ID NO: 489545 - DNA, 577 bp, Homo sapiens
gagggtttggagtatcactttgcttttcattgccaagtgcagtgagaaacctattctgcaaagttttctttgtaaggctgaagctgaatgacaccttctgtcgtccctgttcttccaaattaacttttgttttggtgcctttgggcaaaaatcgactagaagcaacacctttgaacattggtcctttgatgaaacctgttttctgcacattttcaatctttgcctacaaatgaacaaaataagcaattactactacaataaatagttactttcaaatggactgcacagtttaaaatgtttactggagaaatgaaaagccctttttaataacaaatagtatgaatttcactaagctatatatatctttattatgaaaattttcaaacacagtcaaaagtatagaaaatggtataataaatccctaagtatccactccaagcttcaacaattacctattttccccattcttactttctcgtacataaataacttttttcagttttataactattttccaggtagcattttttaaaaagaattttttaaaaacstgacatatgtttgaaagacatttgta

SEQ ID NO: 489546 - DNA, 615 bp, Homo sapiens
tgtgctttttaaacttttcttaaggcaaacaggcctgtttgctttaagagtacagagaagagcattcttcaattttctgtttttattttttagtttcttcttaaacctgagtattttttttaatgttgaaaacagtacaggttcaatataaagcatttgaatgatcacggttaaaagcaaaaattgtctaatatcccaccaaccagtgataaccagcattaatattttgctgtttatctttctgatctgctgtctctgtctcttttttaaatttaacttttattttaagttcagaggtacatgtgtaggtttgttatataggtaaacttgtgtcatgggagtttgttgtacagattatttcatcacccaggtattaagccttgtactcattatttttcctgatcctctccctcctcccacactttgccctcaaataagtcccagtgtgtgttctttctctctatgtatccatgtgtctcataatgagaacatgtagtatttggtttctgttcttgtgttagtttgctaaggataatggcctccgrctccatccatgatcctgcacaggacataatctcatggggtttttttatggctgcataatattccatggtg

SEQ ID NO: 489547 - DNA, 581 bp, Homo sapiens
cagtgtacagagattggcttcatgctccgtgcttttgttgggatggtggttttgatgtttcgaatgcaggcagtagtgcttgggactcttcctatatgctcccaattatctgtaacgttattgtatattctctgccaccagaatgcttttgcgagagctatggtccttctaaagcagcataccactcagaagtgcaaaaatgaaaattaaaataggaagattttcttcttattattatttgaatgacatacgacctgctcgatgtttgcatttaaattgagcagaataattcagctytggcttttaatttcagaagggttaatcaccctaacaaaggtcaatcaaactttaatcttcaataaaattgctacagccccaatcacctgcaggacatttattatattcccatttccatgtgaaagaatgcattgctttcattatgtatcactaatcttctcactctttacattagcacattttaccaaaaaacgttaattcctttgaaactctgacaagagttcatttctacacatctcaggagataatcctgtttaaaaaaaaaaaaaaaaaaaaaaaacggg

SEQ ID NO: 489548 - DNA, 581 bp, Homo sapiens
cagtgtacagagattggcttcatgctccgtgcttttgttgggatggtggttttgatgtttcgaatgcaggcagtagtgcttgggactcttcctatatgctcccaattatctgtaacgttattgtatattctctgccaccagaatgcttttgcgagagctatggtccttctaaagcagcataccactcagaagtgcaaaaatgaaaattaaaataggaagattttcttcttattattatttgaatgacatacgacctgctcgatgtttgcatttaaattgagcagaataattcagctctggcttttaatttcagaagggttaatcaccctaacaaaggtcaatcaaactttaatyttcaataaaattgctacagccccaatcacctgcaggacatttattatattcccatttccatgtgaaagaatgcattgctttcattatgtatcactaatcttctcactctttacattagcacattttaccaaaaaacgttaattcctttgaaactctgacaagagttcatttctacacatctcaggagataatcctgtttaaaaaaaaaaaaaaaaaaaaaaaacggg

SEQ ID NO: 489549 - DNA, 407 bp, Homo sapiens
ctaggataaaaacaatgtttatgtgtatcagtatgccctgttcctagcttcctgcctgtgtaaagcaatattcaatatgaatttgttgaatttctctgattatctctgtctgcttgccttcctcaccctctatctctccccctctcctttcctctttttktctttccatccagcttctcagcttcttttccttccctccctccctccctcttccctcccttccttccttcctttcctccttcctttcttccttcctcttcccttctcttctgcttgcctgcctgccttccttactgccttccttccttccttccttcccacctcctttcttttcttccttccctttttctttcctttcctccttccttctaagacctaaatctggaacttttaatggactcttcagc

SEQ ID NO: 489550 - DNA, 407 bp, Homo sapiens
ctaggataaaaacaatgtttatgtgtatcagtatgccctgttcctagcttcctgcctgtgtaaagcaatattcaatatgaatttgttgaatttctctgattatctctgtctgcttgccttcctcaccctctatctctccccctctcctttcctctttttgtctttccatccagcttctcagcttcttttccttccctccctccctccctcttccctcccttccttccttcctttcytccttcctttcttccttcctcttcccttctcttctgcttgcctgcctgccttccttactgccttccttccttccttccttcccacctcctttcttttcttccttccctttttctttcctttcctccttccttctaagacctaaatctggaacttttaatggactcttcagc

SEQ ID NO: 489551 - DNA, 513 bp, Homo sapiens
tctataggtagaaggtccagaatttgacccaacctaagtagttccagggttgctggcctcagccaccccgctgtaytgcctctcaccacaagctgtcaagttcacatgcatccttgctacccccaggtgagcaatgccaagtgaactcctgctcatcagaggtctgatcagcagccactccaaaggcaagccagacattgatggatacatcagcaaaaccttttccagcttatttttttcttaaacttttcatagttcaggtaaccactagaataatagatattagactccagcctttcaccctttaggaaatgtatttcccagtccacatgccagcacgtatcccaagctgggatgacaattgggttttatttttcttagaaaaggtgaatttcacacatggagttgatctccatgggttgcttttggttttgtttttatttttactttttttaaaagaaagaaaatataaattgggaagttgttcaaagcaatatagcaattatttacact

SEQ ID NO: 489552 - DNA, 513 bp, Homo sapiens
tctataggtagaaggtccagaatttgacccaacctaagtagttccagggttgctggcctcagccaccccgctgtactgcctctcaccacaagctgtcaagttcacatgcatccttgctacccccaggtgagcaatgccaagtgaactcctgctcatcagaggtmtgatcagcagccactccaaaggcaagccagacattgatggatacatcagcaaaaccttttccagcttatttttttcttaaacttttcatagttcaggtaaccactagaataatagatattagactccagcctttcaccctttaggaaatgtatttcccagtccacatgccagcacgtatcccaagctgggatgacaattgggttttatttttcttagaaaaggtgaatttcacacatggagttgatctccatgggttgcttttggttttgtttttatttttactttttttaaaagaaagaaaatataaattgggaagttgttcaaagcaatatagcaattatttacact

SEQ ID NO: 489553 - DNA, 527 bp, Homo sapiens
ttacttatttcatctgtgtttcatataggtgggtttcaattgatttattttaaattctatcatctgtatcatttgtagctgggtttccgtcacctaatttttcttctcattatggactgtattttcctgattctttttgtgactaatacattttattgaattctagactttttaattttaccttgccaggtgttgtacttttttgcatatctataaaaattcttgagctttgttctgaatcgtggctaagttgtttgaaaatagtttttgatccttttgggtatcatttttaacctttattagtcttcattcagagcacagtttaggattttttttttcctattactgagcaaaacccttttgagaaatctatccagtgcctaatgaattatgaagattttcaatatttcatccatagctggacgatcaggacaggaactgttcttaaccctcagagatcttccaggtgtgttgcytctgactttttgggagggtttttccttacacaagtgctgatcagtagtact

SEQ ID NO: 489554 - DNA, 604 bp, Homo sapiens
ttggaacagaaaattaaaaaaaataaaacctcactggtgatgggaaattttttcaattttggctgtcagggtattatttgggaaactaggtatttccaggtggctagctaaatgatggtttggacagttttacactgactagattggccaagggagagctttttggttccaagctcattttctctggcctgttcagttagcaccgattatataatacatattgcatagttggtcctcatccactgggacaayccacagacctctgtttaccaccaccatctgacctctgacttgcagaagtttctcagcctcactaattagattatcatacctactcaaggaaagagggtattcgttgtggtgctgactgactagaaaggctaccctaacacgcattcattgagttcctactaagtgataggtgctttgctaggcataagacatagacgctggaaagacaccgacttctctctgatgcaagaccctcaggctgaagtggggaaagtaattgtaatgcagcatgataactactctattagaagattgagccatcccccacccagacttggcaaacaaggaaaggcttgttagggaagtcacatct

SEQ ID NO: 489555 - DNA, 534 bp, Homo sapiens
tgaaaggtaagttggaggaagcctagtgaagaaagctgaaggaggaatgtagagcgttcaggataaagcagcagcccgtggtaagcttagaatcatcatccaccacgacaagatgcaagataggtaatcaattcagtacatcagaatcactggctatgaagagaagattcaagcagagacctgcagggtatgtcaaataaggagttatattttatcttgtgtgcaayagagagccacttaagattcagagacagagagaactgtgatcagctttggttctcgggaggatctctctagctgcagggtgggagaataagataagatgggggcagagagacgcgtcaggaggctgacacagtaatccgggagagaatttatcaggacccaaactacagtggtagtgatggagatggagactacagggggcagattagaaagctattaaggaggactattaagaaggagtttgcaaccaatcgaacataggcagggaaggaggagatagagttgagagtaatgtttaggcttccttgg

SEQ ID NO: 489556 - DNA, 438 bp, Homo sapiens
acctgtcttcacctgccttttgtaggctcactcttacccccttctgtctggaggagagcctagtttgcttgtcaggactcctttgaggagacctttcttccaattctgaaagcaaactcttctactaacaaagctgtcttgtaactcgagaggcactaaaatgaaccaagaggagaaatacmagtagctgggttgcatttcttacagaataaagtcactgctgtggtctaaaagtgaaagcatttaacagcaacaacaacaacaaaatagaaagggatttaggtgcagctactgaaaggtagaggaatgagtaaagaggaggctggtacacaaaacaaacttaaacctggagtgcaaattcctcagtgttgctgactccttgcttaagaacagagcagggcagggaatgacacagtagagggtgaaatgatgcccttt

SEQ ID NO: 489557 - DNA, 578 bp, Homo sapiens
atgctcttcttttctcctcccccttctccccttcctcatccctgggaagggtgagaccacagctcggctgggtgatcactgaggtatgtgtgttgcctgggcatggggagctcttcctcggtaattaggagacatggaaattaacagcctgtgccgtttgtattaatttggtaaataagccagaacaatttcattagtggcatattaatgtgcttgggagcaggaggacrcgtcccactgtgaggcagcagggcccactggctgctctagcccacagtcaggccaggtccagcgtcgagctgctctcctgcagggcatggctggctggcagcacccaccgctttggccctgtgatggggaaagacctccactgaagagaaagggatctgtgcaggtggtacagggacagtcacacacttgagctcatcctatcaaccccacttgccttaccttcactcggtatttcatgggaggactccccgggtgtaagaaacccaaagctttcagagtcagggagaataaaggagctcattaagcagggattggccatttctgatgagaagacccttctcatcaga

SEQ ID NO: 489558 - DNA, 512 bp, Homo sapiens
ctgttggctggagcctctggttcctcaccctcatcctgctctgtgtggacaaactgatgaagctgactccagatgagcccaaggacttgcaagcgtgagacccaggctcggtgcacaaaatggtgatcgccaccaatttgtggctaatggggaaggggagtaaggctaacatggtttctattatttaagtcattttcacctttaagcttcagttacttttacaagggaaagaagaaagagcgggagaaccaaataaggcaagccagtgctgcccttgcatgtcactcccaagggcccctgggctgtgcccaggtaactcctctctcaagatagtccctctgtaatgtatcctgttttaacctttcttctaggcaccaagggaggtgcacaagaaactataagacttagtctcatcatcaacattttcagaagcaagtgcataaccttctcaccaaaaccaggttatctgctyctgtccctggcttgagtcctgggcttaactgtcatttcag

SEQ ID NO: 489559 - DNA, 563 bp, Homo sapiens
ttctaccagccaactacaacctgattttatctgtgcccaatcttgccctcctccttcccattaaattagaagaagcatatcccctcatttctttttttattatttattttatttttttttttttgagacagagtctcactcttccacccaggccggactgcagtggcactatctcagctcactgcaagctccgcctcccgggttcacgccattctcctgtctcagcctcccgagtagctgggactacaggtgcccgccaccacgcccagcgaatttttttttttttgtatctttagtagagacggggtttcaccatgttagccaggatggtctcgatctcctgacctcgtgatccacccacatcggcctcccacatatcccctcatttctaaagagagctcttccactggtaatccagattcatctcatccccttttgtgaattgtcagactcttcttccgcactggctcagcaccatcmgccattaaacacgttgaaggctcgctgattcttcctcttgaatttatccactgcattgcactagctggagtcaccaactctct

SEQ ID NO: 489560 - DNA, 517 bp, Homo sapiens
ctgcaaaattttctgcccactagcaatccttggcttctaatgtggccactgtgtggtaatattcaagggttgagggtggaggtgggtggtaggtggtgggtggaaaagaaatagayatctaaacagacaaggataggtatttatagttataaaagtcatattcagtatagtattatatataattttacatttagaaaactaaaatagccattgttttcttaaaccaagggaaataaagtctgaccaaaagctcttttggcccagatacacagagatttgccaattgggcacatctctctcaagggctgaaatttatcagaatcatgagggaaattagaggcatgtcgttttctgtttttaaattttttatggtaaaataaattaaacagtcaaaagagtaagacttatatgatttttttttttttaataatagaatgaatgaaagatttgctcaccaaccagcttaggaaataaaacaggccttctggcccctccccagtggtattttctctctcct

SEQ ID NO: 489561 - DNA, 517 bp, Homo sapiens
ctgcaaaattttctgcccactagcaatccttggcttctaatgtggccactgtgtggtaatattcaagggttgagggtggaggtgggtggtaggtggtgggtggaaaagaaatagacatctaaacagacaaggataggtatttatagttataaaagtcatattcagtatagtattatatataattttacatttagaaaactaaaatagccattgttttcttaaaccaagggaaataaagtctgacmaaaagctcttttggcccagatacacagagatttgccaattgggcacatctctctcaagggctgaaatttatcagaatcatgagggaaattagaggcatgtcgttttctgtttttaaattttttatggtaaaataaattaaacagtcaaaagagtaagacttatatgatttttttttttttaataatagaatgaatgaaagatttgctcaccaaccagcttaggaaataaaacaggccttctggcccctccccagtggtattttctctctcct

SEQ ID NO: 489562 - DNA, 517 bp, Homo sapiens
ctgcaaaattttctgcccactagcaatccttggcttctaatgtggccactgtgtggtaatattcaagggttgagggtggaggtgggtggtaggtggtgggtggaaaagaaatagacatctaaacagacaaggataggtatttatagttataaaagtcatattcagtatagtattatatataattttacatttagaaaactaaaatagccattgttttcttaaaccaagggaaataaagtctgaccaaaagctcttttggccmagatacacagagatttgccaattgggcacatctctctcaagggctgaaatttatcagaatcatgagggaaattagaggcatgtcgttttctgtttttaaattttttatggtaaaataaattaaacagtcaaaagagtaagacttatatgatttttttttttttaataatagaatgaatgaaagatttgctcaccaaccagcttaggaaataaaacaggccttctggcccctccccagtggtattttctctctcct

SEQ ID NO: 489563 - DNA, 517 bp, Homo sapiens
ctgcaaaattttctgcccactagcaatccttggcttctaatgtggccactgtgtggtaatattcaagggttgagggtggaggtgggtggtaggtggtgggtggaaaagaaatagacatctaaacagacaaggataggtatttatagttataaaagtcatattcagtatagtattatatataattttacatttagaaaactaaaatagccattgttttcttaaaccaagggaaataaagtctgaccaaaagctcttttggcccagatacacagagatttgccaattgggcacatctctctcaagggctgaaatttatcagaatcatgagggaaattagaggcatgtcgttttctgtttttaaattttttatggtaaaataaattaaacagycaaaagagtaagacttatatgatttttttttttttaataatagaatgaatgaaagatttgctcaccaaccagcttaggaaataaaacaggccttctggcccctccccagtggtattttctctctcct

SEQ ID NO: 489564 - DNA, 622 bp, Homo sapiens
acatcgtctaccatgaagttgttcaggaagcagacccatttcacacaataaaaacggcaggttgattttgtggatttttgctacaccggctacaatcattgatcctaggtattcgggactcctatgaaatccttttggtactatggcagtgtttaagtgacaccagttttgtaaagtggcatatgcagggttgatccctgcctgataattaggagcttgctctcttgattttgtcccatcaatattgttcattttgcctcagatacgtttttctccctaagatcatctccacaaaccccagtgctgagaagaatgaatcccagtaagacctaataaatctgacagaaaaatgtggggttrgagatccacacagaccatgaggactgtcgcattaaaggctcctggggattttttttacgaccttttttttcgtccttctaatgcttggtctcttgcttccataaattgtgcagcctggcttttcattaactcagagagctgaaataattctttgtaaagaattctttagtcacacatgattcaaaagttcaccaagatcaaagccagcctgttttgtggcgggcccagcaccgtatatttcatgtaaatggtgtggcttggt

SEQ ID NO: 489565 - DNA, 437 bp, Homo sapiens
gatctaattcaatatatattcaagtagacagaatgaaaagccaagatctgtgtttcattcttaatcctttcagttactgctgtctgagtatgtctaagtccttcaacatctcttcatctcagccaccacctcggataagtgggagccatggttctcagcctctggaatgagtcaacctggcttaataccaggtgatggctcctctctaccctcaaaggtgcatgagagccatcttgtccctactatatgcccccacactctggtccaatgagacccaagctagggaaatcagtttctacacattttctatcagatctacgagagtcattttctgccacctggataggtaaacgggcaagactgttcctcaggaaagaacagaccatttgactacaattgcccaggagaggtagagaaragacaccaagaggacagag

SEQ ID NO: 489566 - DNA, 621 bp, Homo sapiens
gcccactgggtttacacaggtcagagcagttacagagtagaaaaaagatttacctctactttgygaaagcatttgttttagaaacaatctgaggtaacagatcatattttctgcattctcattttcttgtttcttattccaaagctattttcagaaaaataggatgttacgtgattccaagttcattttttttctgctcactcacctccccaacagaaagcttggtccttaactggtcagcactagagaaaatcacagtacccacaccccctgctccacacacacacacacacacacacaaattatatatatataaaatttcagatggataataagccaaggtgcaaagagggaaaatattaagctatcatcatgaaggtcttatttctattcctgtatcagacacaaatgggaaggcagaaagcacagaatcacactgttacatgatacatgggtattcataggggttgttttgaaatagcccaccctaaatcttcctgcataaaaaactctgatcacacaggttggtaaaacatgaagaaacaacatgctttcaaagtgaagaccaatttggaagtatccaccttttaacactgaacatggaaattacctggactggca

SEQ ID NO: 489567 - DNA, 519 bp, Homo sapiens
ctattcaccagatgttattagcaacccctaatcctaattatgacaaacaaatatgtctccagacattgccaaatatgccctggggggataaactgcccctggttgagaccatcccaacccaaagcctgagcccctaataaacaaggacaggcattagttttcaacacttcacaagggcctattgtaggctgaactatgtctctctaaaattcgcatattgaagccctaaacctcagtggctcagaatgggaatgtttatagaggtaggatctttatgtaggctgaactatgtctccctaaaattcacatattgaagccctaaccctcagtggctcagaatgggaatgtatacagagatagactctttaaagaggtgagttaaaattagttcattagggtgagctgtattccaacctgactggtgtccctataagaagaggaaattcagacacacaaagagataccagggttgcatacacmcagaggaaagcctacgtgaggacacagcgagaagacaga

SEQ ID NO: 489568 - DNA, 522 bp, Homo sapiens
ctgccttgttaacaaaatgtataggggcagaaaggcacccgggatgcctcccacccccacagtctatttgagcacagtgaggctgctgtgtcctggcagctccccagaaagctgagggagaaaggggcagtgtctggaggctcactgcttacacctgcaccgcaccgcaccrcacaacaccacaattagcttgtttttttttttttttttttttttgagacagtctcactctgtcgcccaggctggagtacgggggcacgacctcggctcactgcaacctctgcctcctgggttcaagtgattctcctgcctcagcctcccaggtagctgggattataggcgtgcgtcaccacacccaactaattttttttctatttttagtaaagacagggtttcaccatgttggccaggctggtctcgaactcctgacctcaggtgatccgcccgcctcggcctcccgaagtgctaggattacaggcgtgagccaccatacttggcccataattagctcctaataaccaa

SEQ ID NO: 489569 - DNA, 640 bp, Homo sapiens
gtagaacgagaggccccagccgggcacagtggctcatgcctgtaatcccagcactttgggaagccgaggtgggcagatcacctgaggagttcaagaccagtctggccaacatggtgaaaccctgtctctactaaaaaaaaaaatacaaaaattagctgggcgtggtggcaggcacctgtagtcccagctactcgggaggctgaggcaggagaatgacttgaacccaggaggcagaagttgcagtgagctgagatcacgccattgcactccagcccgggcaacaagagcaaaactccatctcaaaaaaaagaaaagaaaagaaggtatggccccagcctggggaggcatacagcttagatggagcagtaatgtccacaaagtagaataaccaaacacacaagacaactagggaaaaagggcgtgtagcacagcataaagacagagctaactcaatgagcgccactttcacagggaagataaatactgcacttatcctgggggaggcttccrggttgaacaatcagtatacccaagccagttgtgtacaaaggtcaggaaagagaccctggccttggactcagaaagtgccagggttatgtaagaggctggctgatgaggggaaactgtagtcggagcagca

SEQ ID NO: 489570 - DNA, 605 bp, Homo sapiens
ctggtcaggtcttgctttagttaggaatatggtcaacattactgtaaaagaggactctcgggccggcagacgtactaaaggcgtggtcaaggagacaggtccaagtttcttcaggagctcagcttaggcaagtattttaaaggctgttgtaataatcttcctttaccataattcaggcctcagttacatcttcagttggaagaatgttgtttccagtaaggctagaagagaaggaatggcccacagagcaaggacrtaggaggaagaaggagggcaggaaagtctcccccaagcagggaacactatgtgttccaggagccagactcttccccctgctgctctgaggcccctccctcaggggcacctccagagcacacgtatgcccggcctggatacagacgcaccagcagatgtcatcctattgcttctgctttagcgctggccatcgcttgggaagtgttggaggtgtgcatgtggacctgacggctcccacctggccaaggagcttgaaggagaaggtggccgccaaggctgcgtccgtcagctcttgcaccccagcccaagggggtttggagtgtcaccaactcagttgatgacttcagtgc

SEQ ID NO: 489571 - DNA, 605 bp, Homo sapiens
ctggtcaggtcttgctttagttaggaatatggtcaacattactgtaaaagaggactctcgggccggcagacgtactaaaggcgtggtcaaggagacaggtccaagtttcttcaggagctcagcttaggcaagtattttaaaggctgttgtaataatcttcctttaccataattcaggcctcagttacatcttcagttggaagaatgttgtttccagtaaggctagaagagaaggaatggcccacagagcaaggacgtaggaggaagaaggagggcaggaaagtctcccccaagcagggaacactatgtgttccaggagccagactcttccccctgctgctctgaggcccctccctcaggggcacctccagagcacacgtatgcccggcctggatacagacgcaccagcagatgtcatcctrttgcttctgctttagcgctggccatcgcttgggaagtgttggaggtgtgcatgtggacctgacggctcccacctggccaaggagcttgaaggagaaggtggccgccaaggctgcgtccgtcagctcttgcaccccagcccaagggggtttggagtgtcaccaactcagttgatgacttcagtgc

SEQ ID NO: 489572 - DNA, 442 bp, Homo sapiens
gcttcgagaaacgggccccaggaatgagtgctatgctcttagctcttggctgggtaataatcaactgagcctggagtggggggagggggccgtggggggtgaaggcccaggccagcagccggctcaacaaacaaggaaagtcatcagatcccccacctctcatccctgcgckctctctctctctctcccccttcctctccactctcggctgcccagccccctccctggacccactcactcacagagagggccagccaggcccaggcaaagggagacggtggtccaggccctgggggagccgagggctttggccagaggctgtcagcggcagggtgagggagggagggcaggcgacgggggtggcaccgagagccaccctgcggctcagagctcggatgactgagcaggcagatatcccggcaacagggaacaaaagcctccg

SEQ ID NO: 489573 - DNA, 442 bp, Homo sapiens
gcttcgagaaacgggccccaggaatgagtgctatgctcttagctcttggctgggtaataatcaactgagcctggagtggggggagggggccgtggggggtgaaggcccaggccagcagccggctcaacaaacaaggaaagtcatcagatcccccacctctcatccctgcgcgctctctctctctctcccccttcctctccactctcggctgcccasccccctccctggacccactcactcacagagagggccagccaggcccaggcaaagggagacggtggtccaggccctgggggagccgagggctttggccagaggctgtcagcggcagggtgagggagggagggcaggcgacgggggtggcaccgagagccaccctgcggctcagagctcggatgactgagcaggcagatatcccggcaacagggaacaaaagcctccg

SEQ ID NO: 489574 - DNA, 674 bp, Homo sapiens
ccctgcctctcttcctgcctaaccctgggtaccaagccctgtccccatccccactgagcaacagagtgccttcaatttccttcgagtgaactgtgcccatgagttgggcaggggamaaggaggggtggactgggatacagaccctacctactaagcccacaggtctgcagacccctgtgggaagatggcctgtcttggtgattcctacctttgaagcatcacagcccccaacgtgttaagtattttttgaatagatgaatgaatatatgtgctggctggcagatcaacacaagatagaaaagcagccgagaagccagatagtcaacacccaggggttctccagtccctgggctgggaacattcccgaggcctctggaggcagtggtttgacccaagggtgtgcagaggtagaaggcattgcagcccagggagaacttggaggaaagccccattgctgccccgttctggaattgagcgaggggggcaggctgttgaccctgtggatttgggggcctctcgtgtggaagtgagaacagagggagggtagcggagaacgaggaccaccactaggaaaccaggggaccagggaggaggaggcaaagccgagagggagcgggaggacgcctgggaactcgggcagggggagccactgcgctcacacacctgttccccac

SEQ ID NO: 489575 - DNA, 674 bp, Homo sapiens
ccctgcctctcttcctgcctaaccctgggtaccaagccctgtccccatccccactgagcaacagagtgccttcaatttccttcgagtgaactgtgcccatgagttgggcaggggaaaaggaggggtggactgggatacagaccctacctactaagcccacaggtctgcagacccctgtgggaagatggcctgtcttggtgattcctacctttgaagcatcacagcccccaacgtgttaagtattttttgaatagatgaatgaatatatgtgctggctggcagatcaacacaagatagaaaagcagccgagaagccagatagtcaacacccaggggttctccagtccctgggctgggaacattcccgaggcctctggaggcagtggtttgacccaagggtgtgcagaggtagaaggcattgcagcccagggagaacttggaggaaagccccattgctgccccgttctggaattgagcgaggggggcaggctgttgaccctgtggatttgggggcctctcgtgtggaagtgagaacagagggagggtagcggagarcgaggaccaccactaggaaaccaggggaccagggaggaggaggcaaagccgagagggagcgggaggacgcctgggaactcgggcagggggagccactgcgctcacacacctgttccccac

SEQ ID NO: 489576 - DNA, 598 bp, Homo sapiens
gagaaaataaataaatttgtgtcttcagatcttttaataaccagcactttaatccttggaaatctcatytctagattaaaaagctgcatccagagcgtcttggggaaagataaaggtagaacgtgttcaaacctcaactctgctccctttaagacatgttagttactggaaaaaaaaaagagagaaaaataacctctgctccctaaaacttgggggactttagagaagtttttcaacctctttgcaacctctgttttcttacctgcaaaaatgggaacaaccatgactatttcacaggattcctccaaagattaaataagataatataaataaagagctcagcatagtgcctggcacatagtattatgtgatctttggggtgtcacttttctggctggaaacctgtggccagtggtgccttgcacaggttcggctcaggcacattgggcttcttccacccacttggcctgacaggctgcactcagctcacactaccagcctatatcccacgcctccaagggagactgcaagtcaggcatggagcagcaaggggtgtgtgagcgagagtggggtccggccactgtgcagtcagacacgc

SEQ ID NO: 489577 - DNA, 609 bp, Homo sapiens
tggctcagggctctcctcaccacattacagcacagggctgtttggccacctcattacatttcaagcagactcaagtgcaactggacatgttactctggaagacataagctgtaagtcttggtggcattcatgtggagataattctgcaggattacagaatkcaaaatgtttggatgcatagcttcctcctaaatcctgtggaatttccttggtgattggaacatcttatgttttaatggaaggactcttaacaggcttctggatggaagctggtcaccaaaaaacaattagacgcttagaatttatatttccacaccctatcctttggggacgggagaggagctggagattgtgctatgaatcaattatttctatgttataaagcctacaaaaatttccaaagcatgggattcagagggcttctgggtcagtgaacagatccacatggtggaaggttaaagcaccccaactccacataacagaaattcctgtgctgggaactcttcaggccaaattctatgtgtcctttcccctcgttgtttgtttgcattccttatattctttaatatgttggtaagcgtaagtaaatatttctctgagttttgtgaa

SEQ ID NO: 489578 - DNA, 596 bp, Homo sapiens
ctggctcagggctctcctcaccacattacagcacagggctgtttggccacctcattacatttcaagcagactcaagtgcaactggacatgttactctggaagacataagctgtaagtcttggtggcattcatgtggagataattctgcaggattacagaatgcaaaatgtttggatgcatagcttcctcctaaatcctgtggaatttccttggtgattggaacatcttatgttttaatggaaggactcttaacaggcttctggatggaagctggtcaccaaaaaacaattagacgcttagamtttatatttccacaccctatcctttggggacgggagaggagctggagattgtgctatgaatcaattatttctatgttataaagcctacaaaaatttccaaagcatgggattcagagggcttctgggtcagtgaacagatccacatggtggaaggttaaagcaccccaactccacataacagaaattcctgtgctgggaactcttcaggccaaattctatgtgtcctttcccctcgttgtttgtttgcattccttatattctttaatatgttggtaagcgtaagtaaatatttct

SEQ ID NO: 489579 - DNA, 328 bp, Homo sapiens
gtcttcttgagggagtgtgacaagccacatgagaagttatctaagaacacagggcaggagatggtaactcctccacagggcaggagatgcggtgattcaaaggtaatctgataagctgatatttgctttagggttactggatgacaatatgctactcagtaatgggagcctccaactgrccccagaaaagaggaaggcctgatccataggggtggtcctggagggaatccttcaaggaccaaaatggagggcagatgaggagctatttgaagactggtgagtgtctcagtccattttatgctactataacagaatatctgagactggg

SEQ ID NO: 489580 - DNA, 557 bp, Homo sapiens
tgttggaatacacagcttctccttaaagagtcttgcttctgggatttgtcagtcagccccgcccccaatatttyccataactaaatccattccagagaagttcctgccacaagtccatgcaccccatccattattttggctttgcagtttaaggtgtgttcctccccttggcatgggcaccctgtaggtgtctgtgagctcagaagttgtaggcattcttgatccctttccctccacacccctgtttgatcttcattgcttttagtagtccacatatatttgtggattgggattcaaatgtttttttaaatttcatcaaacgtagagtttgtgtttctgttgttattttctcctgttgcctttgaatgacttaagagaagggaaaatgctgagttcagggagcttgtaaggcttttgagtttttgcaaatctgatgtgttcgagatagtatcccactgtggatttaatttgcatttcctcatatattagtgaggtgcagcatatttttggtgtgtttttgtctgtgctggtttgctcatctgtgatatgctggtttg

SEQ ID NO: 489581 - DNA, 626 bp, Homo sapiens
tgttggaatacacagcttctccttaaagagtcttgcttctgggatttgtcagtcagccccgcccccaatattttccataactaaatccattccagagaagttcctgccacaagtccatgcaccccatccattattttggctttgcagtttaaggtgtgttcctcccyttggcatgggcaccctgtaggtgtctgtgagctcagaagttgtaggcattcttgatccctttccctccacacccctgtttgatcttcattgcttttagtagtccacatatatttgtggattgggattcaaatgtttttttaaatttcatcaaacgtagagtttgtgtttctgttgttattttctcctgttgcctttgaatgacttaagagaagggaaaatgctgagttcagggagcttgtaaggcttttgagtttttgcaaatctgatgtgttcgagatagtatcccactgtggatttaatttgcatttcctcatatattagtgaggtgcagcatatttttggtgtgtttttgtctgtgctggtttgctcatctgtgatatgctggtttgtatattctgcccatttttctattcagttctttgtctttttctgatttgtaaacatataaatatgttttt

SEQ ID NO: 489582 - DNA, 557 bp, Homo sapiens
tgttggaatacacagcttctccttaaagagtcttgcttctgggatttgtcagtcagccccgcccccaatattttccataactaaatccattccagagaagttcctgccacaagtccatgcaccccatccattattttggctttgcagtttaaggtgtgttcctccccttggcaygggcaccctgtaggtgtctgtgagctcagaagttgtaggcattcttgatccctttccctccacacccctgtttgatcttcattgcttttagtagtccacatatatttgtggattgggattcaaatgtttttttaaatttcatcaaacgtagagtttgtgtttctgttgttattttctcctgttgcctttgaatgacttaagagaagggaaaatgctgagttcagggagcttgtaaggcttttgagtttttgcaaatctgatgtgttcgagatagtatcccactgtggatttaatttgcatttcctcatatattagtgaggtgcagcatatttttggtgtgtttttgtctgtgctggtttgctcatctgtgatatgctggtttg

SEQ ID NO: 489583 - DNA, 557 bp, Homo sapiens
tgttggaatacacagcttctccttaaagagtcttgcttctgggatttgtcagtcagccccgcccccaatattttccataactaaatccattccagagaagttcctgccacaagtccatgcaccccatccattattttggctttgcagtttaaggtgtgttcctccccttggcatgggcaccctgtaggtgtctgtgagctcagaagttgtaggcatycttgatccctttccctccacacccctgtttgatcttcattgcttttagtagtccacatatatttgtggattgggattcaaatgtttttttaaatttcatcaaacgtagagtttgtgtttctgttgttattttctcctgttgcctttgaatgacttaagagaagggaaaatgctgagttcagggagcttgtaaggcttttgagtttttgcaaatctgatgtgttcgagatagtatcccactgtggatttaatttgcatttcctcatatattagtgaggtgcagcatatttttggtgtgtttttgtctgtgctggtttgctcatctgtgatatgctggtttg

SEQ ID NO: 489584 - DNA, 620 bp, Homo sapiens
aagcgattctcctgcctcagcctcccgagtagctgggattacaggtgtgcgccaccacacctggctaattttttttgtatttttagtagagacggggttttgccatgttggccaggttggtctcaaactcctgacctcagttgatccgccagcctcagcctcccaaagtgctgggattacaggtgagagccactgcacccggccaggagggcccctttctttctctcatctccagctttaacagttggtgccattggctgaagacgagagaaatgaataggaggaaggggcaaaacattaaaagcacattcacatatgcatttcaaatcctgtcatgtgagggaagtcatcaactatagctggtgctgagggagtgtgatggggagggctgggcttggccctcagctctggacttcacctcmaatccctctgggccaccccgggtggcacacagaagggaagtctcctccgcactggcggggcactcaggtgctgcctcctcaggggcaggaaggagcaggctggctggggccctgggccttgcaggtggcataggtgtaccccacaccctcctgaacccagggcaggcagatcattacctcacagtcgccccccttggc

SEQ ID NO: 489585 - DNA, 535 bp, Homo sapiens
tgcttctccctcacacctgggctgtctgtggctgatgtggcctcatcagcatcttaatacacagtggcctttcacccacagcacccactgctccctgtgatggctggatgctcttggagtttcctcattcataccccttacagtgcagatagctgagatccagggtagcrcctgtggactgggctgctgaggctcaccctcccttaagtcatatgcctgcttcccgtccggaagggctgaggggtgggcagtgctggcagcagggtcaccaaaggtaacccttgttttgccaaagggctgccctccctgggagctctgggaatggctgacatctaactgacctctgtggttgccactccttggccctcacttccttgctctgtccactacccatgttgctctgttcccgaaggggaaggggttccacaaattccacatctgggtgtgctgctattccctgactgctgcagcccagaaccatgacccccaaaacagaagtggacaaaggctctttggtccccagagggtgtccccg

SEQ ID NO: 489586 - DNA, 535 bp, Homo sapiens
tgcttctccctcacacctgggctgtctgtggctgatgtggcctcatcagcatcttaatacacagtggcctttcacccacagcacccactgctccctgtgatggctggatgctcttggagtttcctcattcataccccttacagtgcagatagctgagatccagggtagcgcctgtggactgggctgctgaggctcaccctcccttaagtcatatgcctgcttcccgtccggaagggctgaggggtgggcagtgctggcagcagggtcaccaaaggtaacccttgttttgccaaagggctgccctccctgggagctctgggaatggctgacatctaactgacctctgtggttgccactccttggccctcacttccttgctctgtccactacccatgttgctctgttyccgaaggggaaggggttccacaaattccacatctgggtgtgctgctattccctgactgctgcagcccagaaccatgacccccaaaacagaagtggacaaaggctctttggtccccagagggtgtccccg

SEQ ID NO: 489587 - DNA, 317 bp, Homo sapiens
gtctggaaggagggaacaaagagggaaggtaggaaggaaaggaaggaaggaaagsaaggaaaggaaggaaaggaagaaagaaagaaaggcaacccccgcctcaggccgggcagagtgccctgtaactgggcagcttgttcctcactcctccctcttcttcacctggcagggctgagccccctgtgcttgtgatgagcccgggaacagaaggaggatgacaggtgggagacaggacaagagggctcgtcaactgccacttggagaatcctctgtctaggggatcttcaaactatgtgagggaacttacttcccatcaa

SEQ ID NO: 489588 - DNA, 317 bp, Homo sapiens
gtctggaaggagggaacaaagagggaaggtaggaaggaaaggaaggaaggaaaggaaggaaaggaaggaaaggaagaaagaaagaaaggcaacccccgcctcaggccgggcagagtgccctgtaactgggcagcttgttcctcactcctccctcttcttcacctggcagggctgagccccctgtgcttgtgatgagcccgggaacagaaggaggatgacaggtgggagacaggacaagagggctcgtcaactgccacttggagaatcctctgyctaggggatcttcaaactatgtgagggaacttacttcccatcaa

SEQ ID NO: 489589 - DNA, 551 bp, Homo sapiens
tttggagaaatgtaggagggggaaggctttttccatcctgacattatcttccctaactcacattcagaagctgacttacaaaaggtgttcaatrtccttttcaaaacctcgaaccagaaggccgtggttccttctgcacgtggctgtgcatcagaatcacttggaggccttttgacacggattccagggccccacctcagacctcctgagtcgaaatctctgtgggtcaggctccaaaatctgtttttgtttttctaaaccatctctcacagtaattcttatgtgccctcccctaggaaacatttgggaaccattgccagatgaaggttcagttaatggaggaatggaagagggctagcctcaacccagaaaagggaggctgactttgctgaaccttccatccgttccaaaccccatctgttcacatttctctcagtgacttagatgaagacatagaattcatgcttacaaaactgaggattgtgtaaatataatttaataaatggggttcttttttgcttaatatgatacgatgagcattttcttatgtc

SEQ ID NO: 489590 - DNA, 285 bp, Homo sapiens
tgattgaacttgttcagatgatgtaacttcccctagccaaacaagtataaactaaggaatttgctaaataagatagttcattgaaaattcctagttcaaggtttgttgaaaaataatgcatctttgttattatctttattgccaccatggtgtgtacacttatggtaaaggacaaccactctaactstaattcacatgtttattctaaggtatatgtgcaatctcagtattctaaatgatctgttataggaaaatacaaaagatattagtccaatacaatactcc

SEQ ID NO: 489591 - DNA, 608 bp, Homo sapiens
tctcaaaatatttaaagcagtacatgtctatcaattgctttcttctaatgttcaggcaatttttctatataatcaacttttaaagaaaaaaatatatataagtttttttaaaaaactgaagagaagagagtgttacaagaggtgtcacgtctagataaacacagyatgctagtgttttggtaaaaataaatgtcattaaaagagaaaataatttgctgcagaacactgagtgttgcaattctattaaacaaggttttccctgtttccttaaagtgtcataaaataatttggatgcttccaatcttaaaagatttgtatgctatctcataagaaagaatcatgtgcattgtttctttaaaagatatatatcttcatcctacatttgtagagaaaaatgttcatagttaacacagtgttttataattttctctacatagaggagaggataaagtctagtgaaactcaacaagtacaaaacaaagaaaatcctcaaacagctcctaaataattctttgtaggttttatttatttttattgacaaataataattgtatatatttatgaggtacaatgtgttttattatatgtatatgctgtagaatgattac

SEQ ID NO: 489592 - DNA, 608 bp, Homo sapiens
tctcaaaatatttaaagcagtacatgtctatcaattgctttcttctaatgttcaggcaatttttctatataatcaacttttaaagaaaaaaatatatataagtttttttaaaaaactgaagagaagagagtgttacaagaggtgtcacgtctagataaacacagcatgctagtgttttggtaaaaataaatgtcattaaaagagaaaataatttgctgcagaacactgagtgttgcaattctattaaacaaggttttccctgtttccttaaagtgtcataaaataatttggatgcttccaatcttaaaagatttgtatgctatctcataagaaagaatcatgtgcattgtttctttaaaagatatatatcttcatcctacatttgtagagaaaaatgttcatagttaacacagtgttttataattttctctacatagaggagaggataaagtctagtgaaactcaacaagtacaaaacaaagaaaatcctcaaacagctcctaaataattctttgtaggttttatttatttttattgacaaataataattstatatatttatgaggtacaatgtgttttattatatgtatatgctgtagaatgattac

SEQ ID NO: 489593 - DNA, 314 bp, Homo sapiens
catgtggaaatccggaaaatggaggggagcctggtagtggtgtcatgaggttggtgaagttgaagtcgctgtaggagtcttacattctttgttttccagggctggattctgtttaactattaggaaaaatattctgttaatggttagtgaggaagagggtatcgtgaggtgcaactgacctcttgtcttgtcatggatggggaaacttttgaaagttattctgtggtctccttggccaagaggggtctgttcagtcagtcagagggataagaattttacttttatgttayaaatctaggatattttcagagtca

SEQ ID NO: 489594 - DNA, 458 bp, Homo sapiens
tccctcaggagccccaccctaggtcctctctcccttgccttggtggagtgagaacaggtcttatggtaggggttggggaaggggaagaaagtccggacagagggatctcagggtctccttcctaccataggctctccacagatagagaacatccagccattctctgccaaagacctgtccattcgctcactgggggaccgaatccgggatcttgctcagctcaaaaatctctatcccaagaagcccaaggatgaggctttccggagccactacaagcgtgagctggaactggcagctctgattccttcctgtcacccacttcctccctgctccccgctgccctcctctccctgcccgygtgtcatcctgatgtcactccctatttcatagctgtgcttctcttacttccccatgatccatgcccaccttttccacctcccttcctccctaaccccaga

SEQ ID NO: 489595 - DNA, 535 bp, Homo sapiens
ccaccccctcaccatggctcatttcaaacccaacaacaatctaaaagtccatagtaggttgggagagcaggtacctttcactgctggagtatgagcttcaaaataaagaaaagaacagaccacacacattatgcaaaaagcagtgctgaaatatacattcttcaatagattaatttttgtgatcttatctgtgtttttcacaaagtcatttttaggccctggacagtctcctgtaccttgtggggggaaagaaggaatacctttcccatcaattaccctgaattggactacatcaggcctggctgggccccagggaaacagagttcaggtgaggaaatgttacaattttgctgatgatgtggtcctgtaattccctgggattcaggaaggggaattagttggcaagkagattgagggtctcaggtaggggaaaatgaggtatttggagaccttagggttatgaaagggtaggatgcagggagaattctggtaaaacccaaggcagccggattaataatggaggctgagccagggt

SEQ ID NO: 489596 - DNA, 638 bp, Homo sapiens
tcaatattaaaatcacataataatttattattttaaaataataaatcattttaatttttaaaataatataaagaaataatttattattttaaatttcatttatgtttagttttgtttttacttcatttgaaaatttctttggaattgtataacagtttaaagcatgaaatgtttgtgtctcatttttgctttagatatctaagtagcattatctcagattaagactgggactccaatggacttcttcctttgaaatgacccttaagttactcaggtttaaaaacaccgcactgattgctacagcttttccctctggtttgaagttgactttttaaaaagttaagtccagttttgctctgctcawgtgaaattcgaattctataaatccctgctcatatgcagtggccacttgcatattgtcattatttactgatttaactttgaaggcacttaaattttaacatttgaaaatgttcttatcacttagtttgtcttacacactatatattcattcaaatgtgcaaacttaaaaaacaaaacagcaaagaacaggacttttgagctctttttatttcttctttctgaagaaataaaaaataatctatacacccagcagcccctgtgtttttcacgagaag

SEQ ID NO: 489597 - DNA, 595 bp, Homo sapiens
ctgatttgcttgcctggcatacaacttttaagtactctccactgcagtctgtaaagccaggacaataacactcaccctcacacctcaggattttgcacattaacttgttaatggtttggcaaacattagccccaccataaaggctgagataaaactctgtcttccctttctgttcttttttttttttttaactaaagctaaaaatcttcytgtgcattagaaagctgatattttctttatgataactgtaaaaatcagcaagttggatgcactggggaaaaaaaccaaattgcacatacctgtacttcactttttatctaaccaaacagtgcaatgttatggggacacagatgccttctctgtgtaagtgatcgtcatctagagcttgacatccctcatccatcacactgccctctgtgcatttcagggcttggaataaacaaatctgggaagccatatatgttcttgttgtctaagttcatttcacagcacattggttaaagtggatttttaatatgtcatccacattcatgtcagtaagccagtctgaggagctaatgaaggtgtgtcagttgagggaggactggctacctca

SEQ ID NO: 489598 - DNA, 459 bp, Homo sapiens
gggccaccagatagggacagcacctcctgggcaggagaacrtggagcatagtggctgcgcacacaatcagcagtgagttagcggaaaagaccacagaaatgttgggcatctggaattatagttcgtgtctgactgagaaatcttaggaagcccatttaattgttctgcccccgttttcctctctttgaaatggtgttaacagtacttgcctctgtctaccttatgcagggacatttgaccctcaagaggcaatgtttagaatagcactttgccccccaggggtgtataatccaaatagaaatcacatttgttgtattattttctgctgctgtatacctgcatgagactatttttaagttcgtttcttttagcctacttacagcaacagatagattttgaatgttgacctttgcacagccttaaagaacattattaaacaaagcaaatggcctctcagtg

SEQ ID NO: 489599 - DNA, 466 bp, Homo sapiens
gcaggagaggagacagcttaacacaatattcctccagaggtgccatttcaggtatgaaggaagtgctggtgagagtcctatcttaagggtcatgccctttctagcatcccacagtcacttttaaatattccaacttcagaatatgtctctgagtcctacacctgaaatagccaaagcagatttgtgtacagctctctgtatccacgggtttcacattcatgggtttcaccaactgtggatcagaaatgttttttaaaacaatataataaggcaaaataatacaaataaaaactatataactatttatatagaatttatattgcattaggtattataatattgtatatataataatgtattacatatattctatataactatatagaatttatattgtattcggtattataagtaatctagrgattatttaaagcctatgggagaatgtgcatgggttacatgcaaa

SEQ ID NO: 489600 - DNA, 597 bp, Homo sapiens
tctgatcactgtcactgggccaagagcacagtgaagtcaagaaagaaatggcttcattagtgtgagtgcagaggtctgggaaggcagcagtggcgtggaggacctgcttttgtgagggcagtgaagagagaggaaggagtggtgtctttagattgaggtatcttgagattcctgctttctccactcacttcaactgcccatataggttctgcaggttccagaaggttctagaacttgcacaggatcgaacctatagcttcttatggaacaaacacagaatcaagaaaatctggtggcagtcacctggtttaactcctttgagctctagaccagaaattaaatagtkcttaatctgttactttaaagaagcctagttctaacttttcctcagcttgctccctcttttgactaggatcggaagggtgggtgcaaatggccagctccccgtaggtttgcctctttgagccctaagtttcccaccacttctctgcactacaggctttgcccagggtgggatcctcagcccaggaaccttgtttgtcctcctcttgatgtgggtgcctgctgcccagccacacaccctcagattcattttta

SEQ ID NO: 489601 - DNA, 569 bp, Homo sapiens
aagaaatggcttcattagtgtgagtgcagaggtctgggaaggcagcagtggcgtggaggacctgcttttgtgagggcagtgaagagagaggaaggagtggtgtctttagattgaggtatcttgagattcctgctttctccactcacttcaactgcccatataggttctgcaggttccagaaggttctagaacttgcacaggatcgaacctatagcttcttatggaacaaacacagaatcaagaaaatctggtggcagtcacctggtttaactcctttgagctctagaccagaaattaaatagtgcttaatctgttactttaaagaagcctagttctaacttttcctcagcttgctccctcttttgactaggatcggaagggtgggtgcaaatggccagctccccgtaggtttgcctctttgagccctaagtttcccaccacttctctgcactacaggctttgcccagggtgggatcctcagcccaggaaccttgtttgtcctcctcttgatgygggtgcctgctgcccagccacacaccctcagattcatttttaaagaaacatcaaca

SEQ ID NO: 489602 - DNA, 631 bp, Homo sapiens
ctgtagcttaagttcctacagagatgaggccagtgatgttggacgcagaggcacccagccacattttcaatggtggctaaagaatgctcccaatgactgtgtaaatgtgtcstgtcagaaccatggggaatcttttctgtcccaatgcccctccatgtccaggtaataaatattttctcccctcaagggaatcacctcttgtcatctttgctcctctgcttggagttttcttcatgatccttcctggtagttacttgcggctttttgctattctgccctttcctttagttcgtcttagtaggtggcccatttctgacatttccccacagtctcttggcttctgccacatcccatgtcctcagcctcatagcccccttggacttccttcctcattacaactaacagaattcacagttctttcccctggcggcggctgtcttccgctcacctagcatcgtggatagctctgctccacatgtgttcagcagcggagctgggccgcggcaagcctcccttcaaagctgacatcctgcttgtgttactagtctgcattattaagaagacctctttgacagtcagtgtccagtaggagcctgctagaggagagagcagcagcgtctgggtctggccc

SEQ ID NO: 489603 - DNA, 568 bp, Homo sapiens
agtcagaggacttcggtttcctttttattttattttattttwgagatggagtcttcctctgtcacctaggctggagtgcagtggtgtgatctcggctcactgcaaccatcacctcctaggttcaagcagttctcctgcctcagcctcccgagtaagtagctgggattacaggcacctgataccacactgagcttctgtgtgtgtgtgtgtgtgtgtgtgtgtgtgtgtgtgtgtgtgtacttttagtagagacagggtttcaccatattggccagactggactcgaactcctgacctcaggtgatctgcccgtctcagcctcccaaagtgctgggattacaggtgtgagccaccgcgcacagcctggtttccaattttaattttgctttttatcatatcagaatgaagagagttccatccaaatgcaccagcaaaccaggtcataaaggagatgacagaaggcacctgtgcactaaggcagtggcacatgacagtaacatttccttctgcagcaaatacatgaacctttagtcagcttgttttgaccacagttagaaaatattaccag

SEQ ID NO: 489604 - DNA, 568 bp, Homo sapiens
agtcagaggacttcggtttcctttttattttattttatttttgagatggagtcttcctctgtcacctaggctggagtgcagtggtgtgatctcggctcactgcaaccatcacctcctaggttcaagcagttctcctgcctcagcctcccgagtaagtagctgggattacaggcacctgataccacactgagcttctktgtgtgtgtgtgtgtgtgtgtgtgtgtgtgtgtgtgtgtgtacttttagtagagacagggtttcaccatattggccagactggactcgaactcctgacctcaggtgatctgcccgtctcagcctcccaaagtgctgggattacaggtgtgagccaccgcgcacagcctggtttccaattttaattttgctttttatcatatcagaatgaagagagttccatccaaatgcaccagcaaaccaggtcataaaggagatgacagaaggcacctgtgcactaaggcagtggcacatgacagtaacatttccttctgcagcaaatacatgaacctttagtcagcttgttttgaccacagttagaaaatattaccag

SEQ ID NO: 489605 - DNA, 493 bp, Homo sapiens
tttcagaagggctgtccacatgcaggccttctaaagagccaaccaccagtttcctgtataccccagccttggggctttttgccrtctctctgctttgttattaaacagtcagaagtgggctgggggtggtggctcacgcctgtaatcccagcactttgggaggctgaggtggttggatcacttgaggccaggagttcaagacaagcctggccaacagggcaaaaccctatctttactaaaaatacaaaaattagctgggtgtggtggcaggtgcctgtaatcccagctactcaggaggctgaggcaggagaattgcttgaagctgggaggcagaggttgcagtgagctgagatcacgccactgcacaccagcctgggcgacagaacgagactccacctaaaaaaaaaaagttaacagtgagaaatggagtcccctttgtctggacggggagcggctggctgggaggaggatgtcaatgggagaccgaggggag

SEQ ID NO: 489606 - DNA, 468 bp, Homo sapiens
ctttctgcttgctcaaaatcccagcaaagactaggttggttgttatgccacagaacaattggcaaaacartattttcagtaacagtgaagatagtctttgtaaaaatgtttgacgctatctcatacagatgctgtcagtggtccttcctgatatggtggtgcacgcagaaataatatttgcattggcagatcatgtaacacttaacaccaggctctatgctccttttccatccatgactagacactggtcttggaggttccgacaccccctgccgtgcatttccaccaaaatggaacgtcagtttaaatgacctgcccatctgttactttaggcagcctttaaatcagtaggttctatgttatgcataacttgagtcttccaaaatacataagaccacttttaaatgaagcttttttgagaaatgaatggctatttaactgtatttgagtgtcatggtactttcaaat

SEQ ID NO: 489607 - DNA, 468 bp, Homo sapiens
ctttctgcttgctcaaaatcccagcaaagactaggttggttgttatgccacagaacaattggcaaaacagtattttcagtaacagtgaagatagtctttgtaaaaatgtttgacrctatctcatacagatgctgtcagtggtccttcctgatatggtggtgcacgcagaaataatatttgcattggcagatcatgtaacacttaacaccaggctctatgctccttttccatccatgactagacactggtcttggaggttccgacaccccctgccgtgcatttccaccaaaatggaacgtcagtttaaatgacctgcccatctgttactttaggcagcctttaaatcagtaggttctatgttatgcataacttgagtcttccaaaatacataagaccacttttaaatgaagcttttttgagaaatgaatggctatttaactgtatttgagtgtcatggtactttcaaat

SEQ ID NO: 489608 - DNA, 532 bp, Homo sapiens
ttggttgttatgccacagaacaattggcaaaacagtattttcagtaacagtgaagatagtctttgtaaaaatgtttgacgctatctcatacagatgctgtcagtggtccttcctgatatggtggtgcacgcagaaataatatttgcattggcagatcatgtaacacttaacaccaggctctatgctccttttccatccatgactagacactggtcttggaggttccgacaccccctgccgtgcatttccaccaaaatggaacgtcagtttaaatgacctgcccatctgttactttaggcagcctttaaatcagtaggttctatgttatgcataacttgagtcttccaaaatacataagaccacttttaaatgaagcttttttgagaaatgaatggctatttaactstatttgagtgtcatggtactttcaaatttccaagtcatgaaaggcattacttttcctttaatttaatggttaatgatatcttatcagtgccatgtagcagcaggatcattgctttgaaagcaccag

SEQ ID NO: 489609 - DNA, 511 bp, Homo sapiens
aattatgttttagttctccaaacttttcagtggtgaacaagcctctcaccattactttcctttgtaaagagaacacattggaaaacgttgaaatgctttttagtagaaaattttccctcatttttcgtgatcacatttccagttctttaatctgaaaactgccagtttataactgatttcttaatcaagatattataattctaatgaacatctcatgctcagattataagtgctggccaatgtttttactcttttggggaaaaaaaattcagaaaaaaaattcatttcaatgtttttcaggacctttacattttctcaaaacattcacctattatctcccctggagtggtgttcagacctcagcataatgttgagtccagagctaaactgcccacattgatcccacctctgccactcactagctaagtaacattrggcaaactgtttcacctccccatggctttgtgtggtagggagcaaacatagtattttgctcacccatcaggtgcac

SEQ ID NO: 489610 - DNA, 542 bp, Homo sapiens
tccaccagagggtgacagggtctcatgagctgctggatgggacatctgggaacagaccatatttgtccagacaagcatggaattgcccagcccaagaaggatgggtgagctgctaagagggtccttaccaatagaatggggtgtataaaattccagattccatgaggggcattggtgggtttagggccagcaagggcaagatcaaggcaggactccaaccttaaagggaagtagtcatcctatgagggtacaagctcagagtcagaggagcagtacggagaagctgatggtaagtccctgcatggcccacatcccccatctgtggataggactgagccaagcacatgaacaatcacrgcagggacatggtggtataggaagggctctccttgactcctggcatcagttaggcatactttcagctactagtggctgaaaacctgagttgctgtagcttaccgcaaagggacatttattgcttccttaagaagttagatgtgtgatctcaggattgctggtgcagctcatcgaggtcattccca

SEQ ID NO: 489611 - DNA, 392 bp, Homo sapiens
ggaccacaggcacccgccactacaaccggctaatttttgtatttttggtagagacagtgtttcactgtgttagccaggatrgtctcgatctcctgacctggtgatccgcctgcctcggcctcccaaagtgctgggattacaggcgtgagccaccgtgccgggccgtttaacaattttgaggtcaaatagcactgctatgttttagccattttgaattgatttctcatatgcaattttctaatgtgcaaaattaaatgcattgtacacacttaaacacactgaagacctgttaactaatagcaaaagtgttttgctttaaaagcagttacatagatagtgtgggaattttaaagcaactattgttctttacagtatacatcctaaagatatta

SEQ ID NO: 489612 - DNA, 383 bp, Homo sapiens
tcagcaggcactgaagagaaacagtaacgataaaaagagcttgtccaataaaactttgtctggttttctcagtgctcacattgtgctctggcatcacacttccacttcatgmtcaggacatgtccttatatccatattgtgcttcccacgttaaaatgtactttatcatatcttattgtgcaaatagagtcaatctcaggacctatgattatctctctagagtacagaaactatttttggactgcctcttttcctaaattttcagctccagccttgtgtttacccatggtgtacttagatggatataataataagcatcactgagtttcagaatctggaacctcctaataccagtgctacctattcctaaaaggggccactga

SEQ ID NO: 489613 - DNA, 593 bp, Homo sapiens
tacagaagaatcttctgttcataggtccaaaatctagcttgcagaagcttaagtcttaaataattgaataaaagtttatataatcttatgtaatgtaatctgagccccccaaaaagtgataagtatgaatgcctgcaaaaagaggctctgagtatttaaaaggactaaaatagctaatgacatattgctaagaggaagagcagactacgaaaccatgcataaagagtcacataaaaaatatatacaggaccgggcacggtggctcacgcctgtaatgccagcactttgggaggccaaggcgggcgggtcacgaggtcaagagactgagattatcctggccaacatggtgaaaccccgtctctactaaaaatacaaaaattaaccaggcatgatggtgggcrcctgtaattccagctactctggaggctgaggcaagagaatcgcttgaacccgggaggtggaggttgcagtgagccgagattgcaccactgcactccagcctggacaacagagcaagactccaccaaaaacaaacaaacaaacaaacaaaaaacacaaaaaatagacaggaaaggtcatcatgtaaatggtga

SEQ ID NO: 489614 - DNA, 456 bp, Homo sapiens
ccataaaatacttgtgaatttcaggggagtatactgtgcacatgaacatcagccttccctcttatcacagaatccaaaagcatgaagcatgctagtactttgctgtyacccagtagttttaacattctatttcaaggctttcatgaaagcataaaagatgttttactttttcttcctacctttgccccctcttgatggaaatgatttcctcaagcaagaaaaaaaaggttatgacagcaccatgaggaagacactattccaggagctcagtaatctggtccttttccattttcccaaagcaacacagacagagaaaggataaaacaaagttgtgctgtttattccaaaacaaatagttgaaggcaaacttcttaaaggaaatgtagtctagaaggaaaatgaatttagagaaaaggagagctttgcttgaaatgtgtgagttttctttttggccga

SEQ ID NO: 489615 - DNA, 471 bp, Homo sapiens
aagactccatctctacaataaatacaaaaattagctgagcgcgttggcacacgcctgtagtcctaggtatttgggaggccgaggtgggaggatcacctgagcccagaaggttgaggctgcagtgagccatgacagagtgagrccctgtctcaaaaaagagaaaaagaccagctagaaatgcagcccctcaaatgagaagtctgccaaagagtttattctcctcagtagttcatcttcatttctcaacaactttctctgaataatcacttgggaatcattgtgtaaagaaaaaagtatgtcacttacaaacaaaattcatgatcaaagaagaaagcaagtactaaaaagaatgagccaaataaatatgtgagattctatctcacagcattgtttactcagagaaaagttgctctcgggagggaattacaacttggattctgatactagatgaagcaaaatgttaaaaggggc

SEQ ID NO: 489616 - DNA, 619 bp, Homo sapiens
ggcaatcactaacaaaatggccaccatccttagaaaggaaaaactaaaamataaataaataaaataaaaacaaaaaaacaaaaaaaaccactttgtttccccctgctactcctaatgatgagtaaacctcaaaaagagggcattgaattgtcagaaagatttcagagtcgaaagaaacactgtaagtttcaagtataatacgagattctgtattccagtccttgatgtaacagctagattcctgtctacaaagatcctatcctgtagaaatacgagctccttcagcttcagcctagatgatcttctctgtccaccctctgagagggcaaatgagtgacgccaacccctaatagaagtggtcagaaacaaccttaatattatcaggtaattcatcctgccatgctgcccagcaatgcccctcggggcctgctacttgaaagtgcccctcttgtagtcagcttgtctgatatgcttgtgctgccaaagagggtgccccgaaaggcacttaagggaattgaagggtatatggttacagaatcagtttcatatatgaagaatttgtatctgctattatgtcagtgtttgaagagtgaaaaaagcactcaatatacttgcattt

SEQ ID NO: 489617 - DNA, 647 bp, Homo sapiens
ttctgttaagagaaaaagtgtaatcatttttcttgtaaggattcttgcatgaattcatgaatctgatgttgattttgtctctgctcaatctagttgaccagagtcatgactaccagaatttttaaaaaatatgtagagtcagttctccctcttgtataacttgaccatcctccacaattgctcacagcctgaggcagcctgaagatgttttacaaaaagtctgtgagccaaaaagtaatcaatcaaaacatatttaagaagcattataatcgacctcgaagggaaaagtaaaggatgtacaggcagactccatctgtgactaggttatcaataatagttgtttgaccttttgtgagttagcaagcatatatacaatgttattgtggcaaacaatcagccaactctagaaagtcattttatccaattacatatctgaaaagaaaattgataatctaaaagaaactgatcatgacatagaaaagtgtttccacattaaaaytggtttccagttccaagtcggtatgcctgagccagtgtcttccttatgtctccttcttccttcaccttccaacaggagctgaacagccctgcctcaacacagcaaaggctgagatttcagagacttgagggctattgggagctcagaa

SEQ ID NO: 489618 - DNA, 566 bp, Homo sapiens
caggcccatactttcctcagtgtgcaacatttcagtgatatcagagacaaagcagcaggccagacaaattagaaagccctaggattcttttcgtttttgtttttgtttttctttttttctttttcttttcttttttttttttktttgagacagggtctttctctgtcgcacaggctggagtgcagtggcgcgatcttggctcactgtaacctcctcctcccgggttcaaacaagtctcgtgcctcagcctcctgagtagctgggattacaggcgtgcaccaccatgcctggctaatttttgtattcttattagagatggggtttcaccgtgttggccaggccagtctcgtactcctggcctcctgtgatccacccacctcagcctcccagagtgctgggattacaggcgtgagtcaccgcacccagcctgaaagccctgggattctaataatctctttaataaatttcacaaattcccctatatgtattcattcacttatttagcaaatatattttgagtacctactatatgccagatactacactagggatacagcaatagaaca

SEQ ID NO: 489619 - DNA, 666 bp, Homo sapiens
ggttctattctatggcaaatgttgccaataggtaagatccagcccctctgtaagatccagcccctctgtaagatctgtgagatctatggcaaatgttgccaataggtaagatccagcccctctgtaagatccagcccctctctcgaggagtgcacagtctttggaaggaaacagaaacaaaagaaaacaatcttaatacattgggaaatggcctagggaggccttgaggggtaaaaacaacagctaacacatttaagtatttacaatatacatgaactgtgccaagtgctgtaaaatgggttaatctcagtattcctattcccagaggagaaaaccaaccgaggcacagagaagctacacagtttgccctggtcacacagtttgtaagcattagtgccagggtttggactgctacaccctgttgtttgtcaagtgctgtgagatcagagggaagaaaatgatattactgtttagtgtcttaaaaataaaaacaatcactcattttcttctgaaaagaagtcttcattcatttgagcwtctcccactcacaaatctatttcctgcctcttctggtagccatcaggatgacagcatgtaacagtggccctggagtgaggctaagcaatgcgaagggcatgtggggaaggaaggaagacagcagcaggc

SEQ ID NO: 489620 - DNA, 592 bp, Homo sapiens
ggtgctctctaaggtctacacaccaataggcagggtagcccttctaaaagtactcctttgtgattctccctgacaagcaccaataaagagtcaagaaagtctgtctcagttttagaattcaagttgactggtcttcttgaatgatggcattgaatatcacagggaagaaaactcctgtctttaccccttctgagatcctgggagaaacattagatatgtgactggtgaaatccctcaatgcctttgacatcagtttatgtatctgaatattattactatttagaactaatatcatttttaagtccattttaagtctaatattactattcatattaccaacaatccatcaaccattttacaggttcagcccatccatctttttcttccatatttcttacaatgtcttaatggctgcctgctcttgttttctctcattttaatctattatttaaagtgaggttaaaaatatttctatgaaatagttctggttatgtcttttttwaatctaaatattctttaagttactggtgtaaatttcaatctccaaagataaaatatccccagattccttaatttagtgcttaattttaca

SEQ ID NO: 489621 - DNA, 549 bp, Homo sapiens
catgttgaaataatatatttttgttggatggtgtaactcaggctatagtcccacagatggcacataaaaataagggctggcatattgcttcttattcatctacatttacctctttttgtgtttcagtgcattcgaagcagtgcagtgggaagggaaggtagagagaaggtaagwgatgactccttctccaaatgcattttgggcctcagtggtgtctcctttaattgctggtttcatgcccatagttcccttgccccaaggggtctttggtgggctgttctccctccttccttatgggtggtgcatgctaaaagtttggtcaccagtagacctgtgacttcctggggacttactgatcctctgtgtttgctatagttagagtgggttatggggtatttctgcaattggtctggtggtgcagtgggtcaagggtggaggatcctccagcacagcaatggcaccataggtgtgcaaacagaatggtgcctgcagtccagggttctcagcctaacagacagttgtgggccctgcccatttcttggttgttca

SEQ ID NO: 489622 - DNA, 616 bp, Homo sapiens
ctttttagtgataccaatagtccttgaactaataaggaaatgtactcttttgtcagtgtgctcagggttatgattcatagtacaggttataccatatactccgcttttatattagcttgtatattagctataccatatactcttctttatattaactgctatttcaaatctatttcactattggttttatgtcccagaacagctcctgcagttgttctgcaggaagtaagaaggaaatatatttttaaacctcctttgaccaccaggaaaagtagaaagaaagcaattttacggaaaaaaaaaagaatttctkcatttacttatttcttaaatacatataaaaaaattgaagagagtatgtgcccaatgaaggcaggtgattttgtttttcattatcacataggaaaactaaggcttccttctgtttctagtctacgaaccaggagagtctctgtaaatgtagccaggaagtcctaacttaaaattatcccatccttctaaggaataattttaagtcaggactttaaaaagatttctggttacttgaagttcaacaaaaactacaacataaacaataaaaagttaccaattattaagtataatgtacaataaaata

SEQ ID NO: 489623 - DNA, 388 bp, Homo sapiens
gatattacaagaaaccacctgctaacaagagggctggacaacttttgggtcaggagaggataaggggggaaatatttggcacagaaagcccaartgccccatcacttacagagagatgtaaggtgtctttaaaaataattgattctcagtaagattaaaagtttgaactgtttctccaaccatgtagttctgttaagttaatcttgaaatcattctttgaaaactgacaggaaagatacaacttagaaaacattgtggatgaatacttcccccttttgcaaatgatattttggaagcacaaaagaaaaagctctaatacaaatattcataatgaaaatatgaacttaataataccaatggcaagacagaataattaggagaaatcggg

SEQ ID NO: 489624 - DNA, 576 bp, Homo sapiens
gagacatcttttactctgtgaactgcgtgcagtttttgcccatgcatgcctgtaatgagtaggactgggaggtaggaacgggccaaaggagacgcagacacagtccctttgggcagagccccctcctcatgttcttgcttcctgatcctgtctgaactttcctaggcactgggcgctcactgacttgccaggcagtccactcagtttgtgaaatgctcaagatataagggtgtgatcaaatgcaaaattatctgtctgtagcttttgctgattcattcaatcctactctctggagcaatacaagtttaacacttccattttatttcagaatgaattcatgccccttcactgctctgcattctcaattttaagctgygcaaataaacttcctcccaccattttttatggagcatcatttccagatgtttctgtggctttggtggtcccctcaggctccaccctagttggccaaggtcctaccaacaacacgatgccagaactgtgcccacctggcaggagacaggttgcaggtagacaacccatggctcctgttctgtgcctggcttccctagagca

SEQ ID NO: 489625 - DNA, 637 bp, Homo sapiens
gctctagtcgaactaaattatcactgctcacctacctcaaaggagctagaacaacaaatatttaaatatttaccagaatctacaaattgcatctatacaggaatgcactgtgactaggtggcttaattttaaaagaccagcaaagcaggctgaggacaattttgccaacagkaccacatctattgccagtaaaaaggttataaaaatgaacaggaaaagtcgtatgtgttcaatacaatataagcaaattcaggcagcaaattgatccaattatcctgagaactgaaactcaaccatcctcccccgctccaccccacattcactcaataactaccaccatcattcttactttgcctccagacccaccaaaggaaaaataaaattacttttgacataatgatcttcgtaagtaaaacataaaacatttgaaggtctgaattatttggcacgcctaacttttattcctatattctgattttgttagtctctctaacatttgtcagaattttagagttgactgtattgagttataataaaaacattatataaaacgtaaacccaacacacacccttagcagcattacctcatttaattcatctgctttcctcccttattgttctgacatggctgattatg

SEQ ID NO: 489626 - DNA, 523 bp, Homo sapiens
aaagtcttaacgagtttcagcataaactttaaagtctaagtacagtcttatctaaacatcatatgggtgagactcaatatgtaattcatsctgatgcaaattctcccatggaagctttgaaattaaacaaattatatgctttcaaaatacaatggtgatgtcaacaacagatcatgagatctgcaaagggaaaagggagggtctggcttatatagaataagttttcaccccagttttcaatcaggttcacttatgcaaatgaagaattcagacttgttccagaagtctctgtcagatgttcctttcaaacagccagtgggggatggcttttttaggcaccatttatcttggcatcaacaaaaggaacttattttgcttgattgtgaaaagggaggtcctgtgacacttttaaaatatctttctgagaacacagagtatgtgttcactcccttacccagccatggccatctggttatgttttaactttaagcacctcagtagccatgaagaatccattttgtct

SEQ ID NO: 489627 - DNA, 623 bp, Homo sapiens
ggaaggatgaagagtggttggttaatggacacataattatagctattaatagataggaagaatgggtcttagttttccacagcctgcagcaatgtagggtaaatacggttgactataatttgttgtatattctcaaaaagctagaagggaggattttgaatattcacagcataaagaaatgacaaatgtttgaggtgatagatatgctaattaccccaatttgatcattacacattatatacacatatcaaaatatcactctgtgtcccagaaatatgtataattattacatgtcaactaaaagtaaaaataataaaattctgctaggatagaacyctggaatgtgtgttaaaaagaaatcttcccaggtgaatctgagggtgctcaaaatgctagaatgcctgtggctataatgtgaatagactttttggcagtttatttattatgagcctgtgaccctggaataaacatcttcctgggactgccatggtgcccctctgccatagattttatattcgacagtacttcggatgagacagtcttatgctgctgatttaaacctgccatatctgttggtgatggaggccattcaagagctactagctgctgcaagaacaatagat

SEQ ID NO: 489628 - DNA, 623 bp, Homo sapiens
ggaaggatgaagagtggttggttaatggacacataattatagctattaatagataggaagaatgggtcttagttttccacagcctgcagcaatgtagggtaaatacggttgactataatttgttgtatattctcaaaaagctagaagggaggattttgaatattcacagcataaagaaatgacaaatgtttgaggtgatagatatgctaattaccccaatttgatcattacacattatatacacatatcaaaatatcactctgtgtcccagaaatatgtataattattacatgtcaactaaaagtaaaaataataaaattctgctaggatagaactctggaatgtgtgttaaaaagaaatcttcccaggtgaatctgagggtgctcaaaatgctagaatgcctgtggctataatgtgaatagactttttggcagtttatttattatgagcctgtgaccctggaataaacatcttcctgggactgccatggtgcccctctgccatagattttatattcgacagtacttcggatgagacagkcttatgctgctgatttaaacctgccatatctgttggtgatggaggccattcaagagctactagctgctgcaagaacaatagat

SEQ ID NO: 489629 - DNA, 605 bp, Homo sapiens
ctgctcccagtactcaaggacttggagcacacttggggaaatgctcactgttgtattcccgttcctcactatccaggaggcctgaactctcaaactccgaatctgatttycactctcccaggaagtcttcggaaatcactgtaagttccttgcagattctcattgagcctctccccaggacccaccctttggccctgcgtgtctgcgactaggtatgcgcattgctagctgctttagatgcaatgaatctggaagatattttgtatggactgaataacaggttgaggaaggcagaaaagtgccttaaggtcagttcctggttcaagaccggcctctgctacttgctcttagagagaaagagagcagggcctgccccattcttggcttgcaggaccatttgttcaggcagcatttgcagggactcgtgtcctgaaaggagggtctatccaggagcttgaaaaggagagcactcagccaggagagctgagtttggtcctagctctgaccctggttagcagtgttaccttgagcatgtcacttcccttctctgggcctccgttttctcatctataaatgtgagctaagagtaggagaagctctgggaa

SEQ ID NO: 489630 - DNA, 575 bp, Homo sapiens
gttggagacagggaatgcatcttaatgttctctaaatacatcctatgcttgcctgccttcctgtctttgctggcagtttccttggcctacaaaaccctcttatttccacctgtgaacatactcccatctccagctactaccacctgtgctacacgtctctctggctgcctggtgataaaatgttctggccttgtgtcatctctaccactagattagaggctggctgaggacggagcacactaccttgctcactgtaggtgccattaaagagtcagtttggtcaatggccctggccaggagggactggctcycttctggttggcaagtatgaaaaaggctggtggaccagagggtcaaagagttataccttctctctcttttttttgggggggggtgcgggggagggatggagtctcactctgtcacccaggcgcgatctcagctcactgtaacctctgcctcctgggttcaagtaattcttctgcctcagcctcccgagtagctgggactacaagtgtgtgccaccatgcctggctgatttattgagggagactccaacgatatcataagggaga

SEQ ID NO: 489631 - DNA, 521 bp, Homo sapiens
ccctctgcctgctggaactcatttaggtcaatgcttcccaaatcttcacctcatggcacacagagaaaatgagatgatgtgttcagcacacatcgggtggagtagaggagccactgctgcatgcctgaggtgagactgctcaagctaggacaacctgagccatggcttgtcccaggccctacccagctgccctgagggctgaggaaatcccttatctgggagctgggaagctccaacatatctaacaaccccacaaggaggtactatcataatctccatctgacagataaggaaacaggtttccgaaggttaagccccttgctgggaagtggcagagctgaagttgggccctggsagtccagtgtgggggtccacactggcaaccagtactctactggcccccatctcttcctgcaagcctagatcttccaaaaagctcctccctgtcacctcttcctgtgtgggaccctgcagcactcaatttcacacgatgaacttgcccagttgtgtagtggaccttt

SEQ ID NO: 489632 - DNA, 562 bp, Homo sapiens
caccacataactgctcttggcccctcatatgtaattccagagaaaacaacctgctctatacttctgccgtaacacttaatcactccatgtcttagtccatttgtgctgctatgacaaaataccttaaagtagataatttataaagaacagaaatttatttctcacagttctggaggctgaaagtctaagaccaagggaccggcaggtttggtatctggtgagggtcctgtctstgcttccaagatggtaccttgttgatgtatcctctggaagagactaatgttgtgtccttactcacatggtgaaaaggatgaaagagcaaaaaggcctaactagttctcccttcgctcatttataaggcactaatcccatctatgagggcagagccctcatggcctaatttccttctaaaggcccctcctcttaatactattgcattagggcttaaattttaacttgaattttggagaggacacaaacatgcaaaaaatagcatcccaagtggactaaatttagtaagatttatattaatcaaaatggtatatctaacagatgtaaattg

SEQ ID NO: 489633 - DNA, 691 bp, Homo sapiens
ttcctgttatcatcagttactggaatagaatcttaaactaataaaatgaaagttttcaaaatccagaggcaaaatctttacagattaattgaaatagwtttattaacttatcaataaatcattatgcatgatttattatacccttaaagtacacataggagtacctacagtcctctgtgttctagccctgacaacatctcttccattgagaaccattaacagaccatggttaaatctcttcttgccaaaagtaatacatttatcctgtacaatgtctatatcattgattgttagggttctgcaaagttaacaaaaaaaaaaatgacaaacatacaactgcatgataaaactctgacaaaagcaataaatattgaagtttggggaatattcattaatctgtcttctcccttctcctatccagccaatgttggttggggctaagtaccagtgatacggctaaaaggtgtgtaaagtagaagggagaagaatgaggaagagaatgaatcatctgtagatagattaatttaagcctgaataattaagagttggttccaacatcaactatatactttttattactctattttcattctgccattttagcatcattaatatcagtgtttttccattgtttaatattattgaataatgtttgaaaaaatactgaaatgtaaacccaacaatgacagtt

SEQ ID NO: 489634 - DNA, 678 bp, Homo sapiens
gccagtagagcttggatgttatttgattaaaaaaaaattctggtactttcagtataaagtaaaaaaaaaaaaaaaaaagtaaaacattgttataaaagcaatgtagyggtgattatctcctaaagatatctgttatataaaattactgtatagaatgagtcattttatgactttggttttcaactgcttagctataaaatattaaaagtctatttcaagcttcttttagcaaaaataagtgcttatgaatattgtaaatctgcagtttcaaaacttttcaatgaaattgtacctgttaactctttattggtaataatgtgcaaatttgttttatcaccactctgcaccactaaaatagtgatgtccacaaatgagagcaaatatgtattatatcattcctcattataaatattttttgactactaacagattttggaggtataattttagagcctaacctttaaaaactagactctgtatgtctaaattaggactgtaatctaactagtgtctgcactatgtttgcccctttgccaacatgaaatattgaggtgtgctacaaattgaatcaatacatccaatgtgtgctttcttcatgcagggatttgagacggcttggagtgactcttgtcggtcaccagaagaagatcatgaacagccttcaagaaatgaaggtgc

SEQ ID NO: 489635 - DNA, 582 bp, Homo sapiens
caatgtagtggtgattatctcctaaagatatctgttatataaaattactgtatagaatgagtcattttatgactttggttttcaactgcttagctataaaatattaaaagtctatttcaagcttcttttagcaaaaataagtgcttatgaatattgtaaatctgcagtttcaaaacttttcaatgaaattgtacctgttaactctttattggtaataatgtgcaaatttgttttatcaccactctgcacyactaaaatagtgatgtccacaaatgagagcaaatatgtattatatcattcctcattataaatattttttgactactaacagattttggaggtataattttagagcctaacctttaaaaactagactctgtatgtctaaattaggactgtaatctaactagtgtctgcactatgtttgcccctttgccaacatgaaatattgaggtgtgctacaaattgaatcaatacatccaatgtgtgctttcttcatgcagggatttgagacggcttggagtgactcttgtcggtcaccagaagaagatcatgaacagccttcaagaaatgaaggtgcag

SEQ ID NO: 489636 - DNA, 651 bp, Homo sapiens
aatagtgtatactgaacaattgtttctaaactttagaaatccattaaaaaatagatgctcagagtgttaaaagaatgtatgaacttcagcagccagagttggcctgattaatagtcatcttcccccaggaatttcagaaccaaggtatttcaattaaaagctgctgattttatcctggtagaactcattcttttctttttttttctctttttttctcctctgactttctctggactcttttcactgtattttcctacttctctacttattttttctgatcttttccttattctctccttttctctgatatcctttctttacttaattttattttagaaagcacacatatcctcagcttaaataatcccaaactcataaattatctttttttatcggcttccttgacaatatctcacccaaacctatatgaactagtcgctcctttatttacttgattgatttgttgattttagcatacctctgtctttatatctgctgcttttgaaaactaactttacagaaaasaaaaaaacaaatttataggaaagcaattcctgttgcataaaaacatttatcttggtgattagccatacattgtaaaatcgctgggctatagagtcagcctttcttattctgtgttataagaattgt

SEQ ID NO: 489637 - DNA, 632 bp, Homo sapiens
tccaactgtattaaatttaatatctctagccctcacaacactcatcttaggtaggtttattattctcttcccagacaagaaaactgagcaaactgatttttagtaactcattcctgctcggattgtaagaggtagatataggaattgaatccatttcagccttactgtgtagttaatattttgctttagcctctcaaataccccagggacatagaacgatctccttattgaatagaattatctcattagatgactttaaaaatgaatgcacataatacattttggcttcttcaaatgacctattatgttactgataatttccagtaattaaatctatacagaggtctatgacaggaagcttcttcttgttttttatctactcttattttttataatcaagatattctgtcaatgccacaaacrttggaaacaaaaatacctttgttttctattgcagataataggcccatgacatgttcaacgttgcattcagtattgttggaacatattcatttgcccagcaaaagtctgctcaatttattttctttgatgtaataacagatcagcagcattttattagtggttttactcaaccacctgatttaaagtatagtatgtttctgctaataacc

SEQ ID NO: 489638 - DNA, 417 bp, Homo sapiens
acattttttgtagcactttttcttttgctcaaatttgtaaactgtatyaggaagtatataaaacatagtacacatttttagaataccatgaaataaagtgacaggatgctgttgaatgcatttgaacaccgtctgataccaacttatcatcttcccagggtctgcctgccatcatggggaggtgcaaggcggcacagttttctgagtagccggagcttccgagagccagacccagccagaggtggcagccccatgggcttgggaagccccagctaggggatggacagccagagacagacctgagaggccaccaggccgacacagactcgccgtcctgggggaacgagggcagcccaggatgcagggaacaggcggcacacagaggccaaaccttaacccctcagcgctgagaaatgg

SEQ ID NO: 489639 - DNA, 518 bp, Homo sapiens
cacaatgtgtatatatacatatactgaaacacattgtaccccataaatatatgtagctatcatttattaataaaaatataacaaatttgaaaacaaaaaaattaaaacatctcccccaggaagatctctctgtgatggatttgagggagtgaaaccagaatagtcctcctaggaggctgtagtggtgctccaggccagagagaagggtgtcctaagcagctgaggctgcgggagggtatgtgaaggagacagagtaacaggacttgctactaaatagcccacgatgcccaggaaaggaacccaggatgtgtggacattctggtttgagaaktgcacagagtcttcgacgacgcacgaggaggagtgggtttgggtagagaaaagacatcagtccagcgagggtggtgatgggtttcggaagagacctgggatagcgaggtgcctggacggccacaccactgtgaccaatttgcttatgcaggtcacacccaacagtgacaggatcacaggctgaacta

SEQ ID NO: 489640 - DNA, 518 bp, Homo sapiens
cacaatgtgtatatatacatatactgaaacacattgtaccccataaatatatgtagctatcatttattaataaaaatataacaaatttgaaaacaaaaaaattaaaacatctcccccaggaagatctctctgtgatggatttgagggagtgaaaccagaatagtcctcctaggaggctgtagtggtgctccaggccagagagaagggtgtcctaagcagctgaggctgcgggagggtatgtgaaggagacagagtaacaggacttgctactaaatagcccacgatgcccaggaaaggaacccaggatgtgtggacattctggtttgagaattgcacagagtcttcgacgacgcacgaggaggagtgggtttgggtagagaaaagacatcagtccagcgagkgtggtgatgggtttcggaagagacctgggatagcgaggtgcctggacggccacaccactgtgaccaatttgcttatgcaggtcacacccaacagtgacaggatcacaggctgaacta

SEQ ID NO: 489641 - DNA, 518 bp, Homo sapiens
cacaatgtgtatatatacatatactgaaacacattgtaccccataaatatatgtagctatcatttattaataaaaatataacaaatttgaaaacaaaaaaattaaaacatctcccccaggaagatctctctgtgatggatttgagggagtgaaaccagaatagtcctcctaggaggctgtagtggtgctccaggccagagagaagggtgtcctaagcagctgaggctgcgggagggtatgtgaaggagacagagtaacaggacttgctactaaatagcccacgatgcccaggaaaggaacccaggatgtgtggacattctggtttgagaattgcacagagtcttcgacgacgcacgaggaggagtgggtttgggtagagaaaagacatcagtccagcgagggtggtgatgggtttcggaagagacctgggatagcgaggtgcctggacggccacaccactgygaccaatttgcttatgcaggtcacacccaacagtgacaggatcacaggctgaacta

SEQ ID NO: 489642 - DNA, 509 bp, Homo sapiens
tgcccaaatgctaggacagaccagccccaggagcagcttgaaccgcacagatcctgagctgcacttagaggtgtgttgatttcctcccatctcccttccgtggaaaccagggcaggcccagatgcagcgcacagggccaggccagatgagagccagtgcttgccacacgaaggtgcacctcaaaggaccaccctgattccaagggccagtccatctgctggatggtggcaggagggccgaagtggcaggagggccgaaaggcacatttgcagtgttcacaaaccaaagtcaccatcactagacaccatgtctctcaacctgtagggcgacactgtctctcccatgtcrcagatgactaaattaaggcacagcagagtttgcttgaaaagcacactgccaataagctgttccatcaattctaaggtacacgctgaaaaatatattttaatatcaatggcgtgtcaaatgcagttggtgccatctttttagagttacataaatatcttata

SEQ ID NO: 489643 - DNA, 558 bp, Homo sapiens
agtagaaaattaaactgacaacactttgctgttagccaaagcagaagarccaaagggcacgtttggagagaatgaaggtcagttcagcttctgcggcagacgagacgttaggtggagtggtgctggggcagtgggaaacacaggactgcgacgtgggcccaagtgaaaaggtttgagaggaatctacccagtgccaacagccctgtaagggtctggagccaaaaagaacagtgctagaattttctcactgtggttttctcttagcaaaaaaggggagaaaaactgttatgggaagcgcatatgtggactctctgtccaactcaggccagtatctctgaggacatcctgaagcctctgaggcagcctttgcagcttccgaagtgagctcacaattctccaagtggtggacgaacccccagtttacagagttggggctgcaggcaaactacatctgcatggagacttccttgacggcttttggttcaggattggggtgcagatgcccatcgatgtagaccaagggacagagtgcagagggccgacggggcgcagccttgg

SEQ ID NO: 489644 - DNA, 594 bp, Homo sapiens
gtgtcagaagaaaaacacactcactgactccctttgaattcatggccatgagcctgaggggacctttatgacacctgcagcttcctccatctagtgcacccccctctcgcgtctcctacctctgcacaccattgtctcctccasgatgctcatctccgctgatgaccttgcttcctgcgtcactgagaagattaaaatagggaacctgccaggcctttccaccgcccttcccccgccagcctctgcaccctgccctctgccttcctgcctgcggctgacttcgactagagatgaaccgtccgtgggtccatccagaaccagtgactcccactctcactggacacatcctctcgcaatctggggaaactgtcactgaagtacgtgtctcttccttcctagttattaactgtgcccactctaagtcatttccatcagcaagtgaacgtgccgacatttccattgtgcatgccacatatgtgggcgtgcatgggcatttgtttgtatgctgggaaataagtaaccaaggctgaggctttctcaagtggagtatgaggttgcagggctattccactcacacatgctgaaggtcaaact

SEQ ID NO: 489645 - DNA, 594 bp, Homo sapiens
gtgtcagaagaaaaacacactcactgactccctttgaattcatggccatgagcctgaggggacctttatgacacctgcagcttcctccatctagtgcacccccctctcgcgtctcctacctctgcacaccattgtctcctccacgatgctcatctccgctgatgaccttgcttcctgcgtcactgagaagattaaaatagggaacctgccaggcctttccaccgcccttcccccgccagcctctgcaccctgccctctgccttcctgcctgcggctgacttcgactagagatgaaccgtccgtgggtccatccagaaccagtgactcccactctcactggacacatcctctcgcaatctggggaaactgtcactgaagtacgtgtctcttccttcctagttattaactgtgcccactctaagtcatttccatcagcaagtgaacgtgccgacatttccattgtgcatgccacatatgtgggcgtgcatgkgcatttgtttgtatgctgggaaataagtaaccaaggctgaggctttctcaagtggagtatgaggttgcagggctattccactcacacatgctgaaggtcaaact

SEQ ID NO: 489646 - DNA, 480 bp, Homo sapiens
ccatgctggccacccacctgctctgacctcagggcaccatgttcttttgagcctgtccatgaatatctgggacatgagggtctcccaatgcccctcctacttcccagctcatggcaattgtgtccactggctcctgacacctggcctctgtctttctaagctccagtacccaaattgccctgggtggtcccagttctgtaatagccccttctacagccagcctgacctacagagtaagtccacactgcctgcctccaccatgcaggaagctttggggactgatgtgtctcctgkgccctcatatggatggcagctctctgcaggtctccagcctcatgctgaatgtcttctgcgatgtgctccctgcttctccgtgcctttcacaagcccttcaacatctgctatgtgaatgctggtattgccaccacacacaggggccatcgaatgttccttgctccctggagacatcctagggacatt

SEQ ID NO: 489647 - DNA, 480 bp, Homo sapiens
ccatgctggccacccacctgctctgacctcagggcaccatgttcttttgagcctgtccatgaatatctgggacatgagggtctcccaatgcccctcctacttcccagctcatggcaattgtgtccactggctcctgacacctggcctctgtctttctaagctccagtacccaaattgccctgggtggtcccagttctgtaatagccccttctacagccagcctgacctacagagtaagtccacactgcctgcctccaccatgcaggaagctttggggactgatgtgtctcctggkccctcatatggatggcagctctctgcaggtctccagcctcatgctgaatgtcttctgcgatgtgctccctgcttctccgtgcctttcacaagcccttcaacatctgctatgtgaatgctggtattgccaccacacacaggggccatcgaatgttccttgctccctggagacatcctagggacatt

SEQ ID NO: 489648 - DNA, 629 bp, Homo sapiens
cagggcaagaagcaattccttagggagaaaatggagcctgagtagggaagagattcagcctcctttgatgtgcattttgagtggtctaactagagagttcctaggaggtgaggcttaaggatagtgcagcagacagaatagcagcctcccaaagaagtccatgttctaattcctgaaacctgtgtatctgtgaccttttatggcaaaaggaactttgaagatgtgattcagttaaggatcttgagatgggaaatcatcctgatgagcccatttaatcaaaagagcccttttaagggaaagaargaggcaggaaagtcagagtctgagaagaagatgtaacaaaggaagcagagctcagggacagaggtttgaagatgctgcactgctgtctgtgagggtggaggaaggcgccacaagccaaggagtgctggcagcctacagtagccagcaaaggcagggaaactggttctcccttagagactccaggaggaacacagccctgctgatcccttgattttaggacttctaacccccaaactataagacaataaacttgtattgttttaaaccaccacgtttgtcagtaatgtgctacagcaggaacaagaaactcataccaacaacatcag

SEQ ID NO: 489649 - DNA, 622 bp, Homo sapiens
caggaagcaagctcccctgaatgactattttctgctttctgtggtcccacagggtctgtaaataaagaaagcaagaccaattttaggactgcttaacctggaatccatagcccatagaaaagatttgaggaatcctcataagccatgaaattgtaaaattttacatggccagttttggtgagagatggtccaggaatccatgactcctgaaaggttaagaactactcaccttaacaaagagaaaaatccaagccaaaaaagagccccacagtcaatacggagaagtgatgtcaggagccagatgaaagagaatatggaatctctacactccaggagaaaggtgaggggaagatctgggtggctgtgaaagcctcaggctggtgaccaggctgagcatgatggcaaaggtggcctgttcctctttgggggttgaggatatgatcctggtttaacggagatgcataaacaaaagtaaacagaaattcagcttcagtcatcctgaaaaaggagaatttgcttaatgcgccccactatgcagaataatagacaccccagcatttgtaggaaacatagagaagtggyttatggtctttcgttcacctttcactcttttcctatccca

SEQ ID NO: 489650 - DNA, 643 bp, Homo sapiens
tttaaagttgaccttttatatttttctgaaaaaattatcatttcctttgagatttttgttgacaaagaaatataaacaatatttgcttcatcttttaaaaaatatctgtatcctttgatttatcacctttcttttatttgtgttatttatatttatgagaaacttgtctcctttttaaagcacaagccattatatttactttttgtgtcttttattcattcttaatcctataatctttctttcctgggctgttttacttgttagatcttaataacttttgacattgactaytgattgatttagcttagttttattatgtaattatgctattattatgttatttaaagccatgaatgacagtcatgtcactcacaatctggtacatattttatactttcattgtagatttcacctttcatcattataaagaaaactagtcatgttatattctgaaatgcaatattttcatatttattattttctaaaaaaattgttcattattttttaaatagcctgctttgatttcctttttgaataaataattatttagatgtgtgtgtatttttttagttgctaccttagggttttggttgcatatttctttctctgtgtgttccccattcttcttacatttttagctttt

SEQ ID NO: 489651 - DNA, 616 bp, Homo sapiens
tgggccatctgctttggccatcagcccttatttggggctgtcttccagaattttgcatgtgctgaccacacaagtgtaagttcatgcccttcttcctgcctgctgaatactcattcctcagggccctgctgaaacatcacctcttctgtgaagccttccctaacctctctacacaaatgggccacttctccatttgttccctcactctttcactctttctcactctacgtttattactggatctgtcataatgaacggcatatgatatatatatataacaaaaatatatatatgttatatatttataacaaaaatatgtatatatattgagtaatacttattgagtaataaatatgcttttgtgatctgtggaattcctggtgcctagcaatatgcctgacatgtggttaatgaacctgtgagccaatsaatgaatgtctgttgacactcaaagtcagattcaattggatattgattttggaggagaaaaagccaatatcatgtatcaaaacagaaacctcaactttgtgaattttctactatggaagaactcaaactctatttgaaagaaaagcatagtcagccaagaaaaatatagtaagcacctgctgtatgg

SEQ ID NO: 489652 - DNA, 616 bp, Homo sapiens
tgggccatctgctttggccatcagcccttatttggggctgtcttccagaattttgcatgtgctgaccacacaagtgtaagttcatgcccttcttcctgcctgctgaatactcattcctcagggccctgctgaaacatcacctcttctgtgaagccttccctaacctctctacacaaatgggccacttctccatttgttccctcactctttcactctttctcactctacgtttattactggatctgtcataatgaacggcatatgatatatatatataacaaaaatatatatatgttatatatttataacaaaaatatgtatatatattgagtaatacttattgagtaataaatatgcttttgtgatctgtggaattcctggtgcctagcaatatgcctgacatgtggttaatgaacctgtgagccaatcaatgaatgtctgttgacactcaaagtcagattcaattggatattgattttggaggagaaaaagccaatatcatgtatcaaaacagaaacctcaactttgtgaattttctacyatggaagaactcaaactctatttgaaagaaaagcatagtcagccaagaaaaatatagtaagcacctgctgtatgg

SEQ ID NO: 489653 - DNA, 628 bp, Homo sapiens
gcctgactggcaaggggtgcaggggccaagaacatggccttcaccttccagctagaagtcatgggcctcttggcatcttcaggcatcagcatcattccccacgatcaactccggggwcttaatttctcactatttgccttttgtactcaggtgttgcttcacattctttgaggaaatccttctaatcccactcagctttctgccttcacagagcctgcagagggaagttgtgcaaagtcaacaggatggtggagggcggtgacacagcatcgaaggtaatggaaggcacctgctgagtgctccctcctcagtgccactgcacttgggacaggcctgtcttctagcgggcaacaggttaaattgtgtcatatgattttcacaaacaccttgaaaatccccattttacagatgagcaaactgaggcacagagccctgaaaaaatgttttcaaagtcacccagagactagcagttgtcagatctaggactcagaccctgatgtgtcttcttcagggtgtgtttgacacactgagccaccttgtctccccaaataagtcaatgatatatgtgcaatgttctgcaggcccagctacacaagggcagcacaaaatccaaaaatccagtaagatg

SEQ ID NO: 489654 - DNA, 397 bp, Homo sapiens
ttggctgaatggtgtgtgcttcaatgtggaaggtcacaggatactgatctaagggctgagaagtcttgctcacccaactgttgacactcagtaaacggggcaggcggggctggggtgagcatctgaggaagaaggcccccaccccacccccagccagagaaagaataggaagcgacttctattcagggttcacaggggtccctagccccsctctgccccctgctaaagccaccaagccctttccttgcctctaagttaccttgtattataacaggattaaagtatatttagctcctctattagcataatttagcccccattttggcctacttaaggcttccggctggctttgatcagttttgcgttctactggtcaacaggagagcccagcgggctg

SEQ ID NO: 489655 - DNA, 582 bp, Homo sapiens
gtcacgtcagaaaatccaagctcaatggttcaaagtggtcaggggcagagctcactgtgacattttacgactcaatgaggcatccatggggtctccagctccaggagataaatcagctcaaactccatctgccttcaagacagacaaatcttcagtcatggagtcgtcagtaatccaaacataacttggaatgcggttacaactctttattgcttttaggcaccccccgcccaaaaaaaactgagacgaattctgatctatatgatttgataatggcatttgacaagttctcatttattcgaggggtgggggctaaaaagttttttgtctgatcattttgtcaaaatcctgcaagtcattttcatttctctctcttgggcaagattaaaaagcaaaccctcatrcgttctgtcatatgatcttggagctgagagttcgaaacatttcaacagtaatttaatataggggatttaaggagtgtgtatgaaagacagagagagagagagagagagagaatgagccctgggatgacgggaagggttacctaataggagataagatgaatagcaaacctgttactgc

SEQ ID NO: 489656 - DNA, 584 bp, Homo sapiens
tgaaaccaaaatgttctgctctttggaccccaccctaaattcccccagttctcttgactaaggtggtgggggacaatgcagggaccgtgttttgtcttcttgacctagccgggggcaaagaagactgagaaggctgggcagaaggagggagtgctactaatcagcctccaaatcacagcacagctgaatatgaatttgactttccactggcagattgcaataataccatcctttggaatgcccttggagcttccaattgctgtcttttggtttagattaaaccttgacttagcttgccaagtgtgaaacccacccgaccctcatgcagtgtatgttttgagctcaaattgaactttataaggtgcaagttaatttgcatttggcaaaatgcaatttcctgtttctaagaaaaagggactttaaagatttatttaagagatgcaaatggcttcctggacatcaaatagctcttacaaagcaatattttaataagttaagtgtaaatgaatwaaaaacacatgaatctgatttcccttgaactgcagatgggtttaacaaatagaggagggaaatggcttggccct

SEQ ID NO: 489657 - DNA, 325 bp, Homo sapiens
agcccacttcgttactgcttttcaaacgttctgctcatgcagaccagcaatgccccgaggttgaaaataacagaaagttttaaaaatcaaaaggtcattacactttttaaaaactgagaaaaaattcacataccctaatattcacgtatttaaagcccaggtctggtctggttctctgtgaggcagaaggcttttgtccacgtggagatgtttgcacagcaggtgtccacactttgctccgtccggtgtccagcttcgccttggcccctctctcactgacaggaggggagcctcgtttttttgycaccatcggtggttcttgtat

SEQ ID NO: 489658 - DNA, 300 bp, Homo sapiens
cctgatggtggccatgacctttggtcaatgratatggagcatagccattccacagcaacctctagggaaaaacctgggggaataaatattctgacttcactcttgtcccttccctggatctcttgctggctttccccattggctgaacccaactggaagctaattggcaagggaatccactgatattagcagaacaggaagggactttagtgtatatgaagtggcaagcttagaaggtctatctatctactttggtctacgtgcagtctgagaacatgtacagttcagtatactgtgagc

SEQ ID NO: 489659 - DNA, 300 bp, Homo sapiens
cctgatggtggccatgacctttggtcaatggatatggagcatagccattccacagcaacctctagggaaaaacctgggggaataaatattctgacttcactcttgtcccttccctggatctcttgctggctttccccattggctgaacccaactggaagctaattggcaagggaatccactgatatwagcagaacaggaagggactttagtgtatatgaagtggcaagcttagaaggtctatctatctactttggtctacgtgcagtctgagaacatgtacagttcagtatactgtgagc

SEQ ID NO: 489660 - DNA, 568 bp, Homo sapiens
tgcctgatggtggccatgacctttggtcaatggatatggagcatagccattccacagcaacctctagggaaaaacctgggggaataaatattctgacttcactcttgtcccttccctggatctcttgctggctttccccattggctgaacccaactggaagctaattggcaagggaatccactgatattagcagaacaggaagggactttagtgtatatgaagtggcaagcttagaaggtctatctatctactttggtctacgtgcagtctgagaacatgtacagttcagtatactgtgagcatttccagagcagaggatgtgtcttatatgtcataagtgtgtcatcaatatttgcaaaagcaagggatagaatgggtgctggagagacagtttaggaagccaagaatcaaggtgtagatgtttaaaaatttgtattattgattaaygtgataataaaaattgggatttaatttgtatatcttggctaatcgcaagttctttagaccacaggcctggccatacaagatcaagtctttcatgtgaaagtggaaatagcagaaggtccc

SEQ ID NO: 489661 - DNA, 608 bp, Homo sapiens
catgcaagcagatgacagtgacaggcttttagaaagagcttcagaaggcggccagtttttcttcagcctcagccaggccttggagcttgactaggccatccacttaagcagagatgccttcaagaacatcagtgagctctttgccaatcagtccaggaaggacctggacccaggcatggacctgttagtgctgtctcagggacaccagaccaacatcctggacatcatcctcgtacacaaggaagctcttaccaaagtcacggacaacaggcaacatgtggcagaagggaagacagaggtacagaggctgatggtgtcattatcacaggaacaggatttctttggccactttggctgaaattcaccacttccatccaattcactcaagtgagagacttgaaatcacagatggagcatttcttgcaacaagagatactattttttcaaaaagtcacctaaaatttgatagtgttgaataactagttattcgattgtgaactttttccagttcacaggtactttctacagcagaatgataacagtatcaaagagctagtgccagctatcggtrgtagtacaaggatgattttgtgctcaagtgaaaccca

SEQ ID NO: 489662 - DNA, 572 bp, Homo sapiens
cgctgtgatccagcaaaaaatccagggttgaatttcctactccctagatgctaagtcttcctctttcttaaattattacctcatttgctgcagcacgtaatcaagtaacagcatgagggttacttctcctgcacttaagagtacataaagagtacataggargtacattttctgaatcccagtatttttccatttaggcaatttatagtttgcataactattgctgggtctaagttgacaatcattttatttcagaattttaaacaaaaatatgaattgatgggcagaataatggatgcatattgctgaaggtgcaaattagtgagctggaagattaggcaagggattattccagagagtaatgcaagcagatggcacattaggatatgtgatgggtatatgatggatattaggagacgtgaaagaaggaaccaacatatggataataagagtatcacaaagggagggaatatacaataatggggaggaaaacctcaaaagaaaaaaataaaataaaataccccagagctggaggagagatttgagattctaattgaaaggtcctgctgagt

SEQ ID NO: 489663 - DNA, 572 bp, Homo sapiens
cgctgtgatccagcaaaaaatccagggttgaatttcctactccctagatgctaagtcttcctctttcttaaattattacctcatttgctgcagcacgtaatcaagtaacagcatgagggttacttctcctgcacttaagagtacataaagagtacataggaggtacattttctgaatcccagtatttttccatttaggcaatttatagtttgcataactattrctgggtctaagttgacaatcattttatttcagaattttaaacaaaaatatgaattgatgggcagaataatggatgcatattgctgaaggtgcaaattagtgagctggaagattaggcaagggattattccagagagtaatgcaagcagatggcacattaggatatgtgatgggtatatgatggatattaggagacgtgaaagaaggaaccaacatatggataataagagtatcacaaagggagggaatatacaataatggggaggaaaacctcaaaagaaaaaaataaaataaaataccccagagctggaggagagatttgagattctaattgaaaggtcctgctgagt

SEQ ID NO: 489664 - DNA, 572 bp, Homo sapiens
cgctgtgatccagcaaaaaatccagggttgaatttcctactccctagatgctaagtcttcctctttcttaaattattacctcatttgctgcagcacgtaatcaagtaacagcatgagggttacttctcctgcacttaagagtacataaagagtacataggaggtacattttctgaatcccagtatttttccatttaggcaatttatagtttgcataactattgctgggtctaagttgacaatcattttatttcagaattttaaacaaaaatatgaattgatgggcagaataatggatgcatattgctgaaggtgcaaattagtgagctggaagattaggcaagggattattccagagagtaatgcaagcagatggcacattaggatatgtgatgggtatatgatggatattaggagacrtgaaagaaggaaccaacatatggataataagagtatcacaaagggagggaatatacaataatggggaggaaaacctcaaaagaaaaaaataaaataaaataccccagagctggaggagagatttgagattctaattgaaaggtcctgctgagt

SEQ ID NO: 489665 - DNA, 629 bp, Homo sapiens
tatatcagcaggaacatgtcaggcacaccccagacttttgaccttcgccagccggataggtgagaaatcttattgcagttgtaggttccatttcttactacaagtgatgttgcacagcttctcatatggtaaaaagcagtttgtgtggccttttatataaactgtttacttaaagttaaatcactagtcagacagataacattttcattttgtgatttggaaaatgaattttcatattgcttactacatccttcatgtgcatttcagaagtagatggaggtttcccttaggtacgtatgactcatttgcaagcaagcatttattttgggtcttgatgtttttcagaataatgggcagttatggtattgtcctgaattgttttgatgtttgtacctacaacgttgactgcagcacactcttgcagggcactgggaggggtgtcccccacccaccagtgtctctgtgggcttgtgaggagggccagttctcctctgaggcccatgccatagccagccctgacatgctcttgtttgctcacagatgggrgactttaattgcatctttcccgtggaatgatggagccaatgggaactccagggcttccccacttcatctataagcaggcacag

SEQ ID NO: 489666 - DNA, 615 bp, Homo sapiens
gcctggcacatacagtgagctccctctgttctcctcttttctcctgctgattcagagaatgacttaaggatctgtgatgtgtgccaattttcaatgccctggataaacaatggggagttggagtgctgttgccagaaatttgcgctagttttaattaattttatccatttagtgtaagacatctcaaagtcactggataaatttatataacatatgtttatacacataagtgtgtctcttgagagctgagaggctgtttttgctttgttccctgatgctgcagtagaggccaatgtgttctgattccttgagtgatggctgcaagccctccaagtgtcacagtaggtgaggcatccatggggacaagcatcaaggaygaatgtggccagtcagaatctgcaagcccatttggtttgttctctttatttttatagtatgttttattcattttttaggtttatcatttaatctcttataaacatctctcctaaaatgtttcttaattctacaaggggttaattgcatgaagtaagtccagaaatagtccagggcagccatggatacccaacatgccattgggaagtgagaaattttgtaatttgaaggttttgttat

SEQ ID NO: 489667 - DNA, 726 bp, Homo sapiens
atttggtggtgttaactgcaaatgcttttgggctcagcaatcagaatttattgagaaaatgaaccacaaaattgtaaaatgtctatgagacaacaagtaaatgtacatggtattcctttagtgggtagggagaagggattgtaatgtccctgaataacatctttattttgaggtctaaagaaccaggcccattccagttgactttagttttatataattctttatatccgaaaggatttctagcacctagtattggcatagtaactagcccagagtaaatgcttagtaactacttgttgaattaatcaatttacttgtaacggtttatagaggtgatatttttatatgttttttttaaagtgtagtctctgcttctggtaatggcagagtaattgtgtcaggctaattcttggagatagtgacaataagttcaggacaaagtatttaaaaaacaactatttgggctgtgtgcagtggctcacgcttgtaatcccagcactttgggaggccaaggcaggtggatcacgaggtcaggagtttgagaccagcctggccaatatggtgaaacctcatctctactaataatacaaaaattagccaggcatggtggcacaagcctgtartcccagctactcaggatgctgaggcaggagaattgcttgaacctgggaggcagaggttgcagtgagccgagatcgcaccactgcactccagactgggcattac

SEQ ID NO: 489668 - DNA, 594 bp, Homo sapiens
ggccgctgctccctgcacagagctggggcctccctcccccgctgtggacttcaggccaaagcccccaccctgctggcatgttctttccttcttacagagctccgtgtcttcacttaatctccccagccacacgctcccagaccagactgtcactggtgtttctcagatggaaacttctactgatggcacctgggttctccttccttccactctgagaatgcagggagtgtcctgcccacatgctcttgctctgctcacatgtggggtgagcacctgatagatgcccttcagaagatgggggtgggccaggcatgctgactcacgcgtgtaatcccascactttgggaggccgagacagatggatcacttgaggtcaggagtttgagacaagcatggccaacatggcgaaaccccgtctctactaaaaatacacaaattagccaggcatggtggcgagtgcctgtaatcccagctactcgggagactgaggcaggagaatctcttgaacctgggaggtggaggttgcagtgagccgagattgcaccactgcactccagcctgggcgacagagcaaggctccatctcaaaaaaaaa

SEQ ID NO: 489669 - DNA, 553 bp, Homo sapiens
tcaccctggcccatctcaggccagagtgtatcaagtttgtgtcctttctttaggttgccagccccagggggtcagaagctacatgatatcactatttctattcccaggcagtggtttgcccacagcgagcacycggtaaatgcctcacattcattaagagctatttccattgtacttatttttggtatttagttcttaacatatccattccatcatgacctctgttaactgctgacacatggggtgtgctcaaaacaaatgtgttttcgtctcctattgtccttttaaatgtgtttgtggaaggtgatcatccttgcccttgaatggaaaattgggcagaactctggcttctctgctaactctttatttttttatttgttcatttagagacagagtctggctttgtcatccaggccaaagtgcagcggcgaaatcatagctcactgcagccttgacctcctggcctcaagcaatcctcccctcttggcctcccaaagtgctgggatgacacacgtgagccaccacacatggcccagactgtacatttttttta

SEQ ID NO: 489670 - DNA, 402 bp, Homo sapiens
tgttttgtgcaggtgtgtgtggtgggctgagtgcttacccttaatagtatttacctggccctgcygagcagaacagattagagtttaagataagatccaggtgaacttctaggtctaagttctaagattggatgagcccatagtgggtgaaggctgaaggaagagaattgaagtctggggctgggcgtggtagctcatgcctgtaattccagcactttgggaggctgaggcaggtggatcacttgaggtcgggagttcaagactagcccagccaaaatggcaaaacccagtctctactaaaaatataaaaattagctgggtgtggttggcaggcgcctgtaatcttagctacttgggagactgaagcaggagaatcgcttgataccgggaggcagatgttgc

SEQ ID NO: 489671 - DNA, 526 bp, Homo sapiens
ttttccatctgcagattcaaggagggaagatacaggaagctatgaatacctagatgtggctggaataggtttaaataggttttggatagagggtgttggggaggtgagaaggaacagtagctatggataacagactaaggagtttggacttttttctctgtgaaagaggaaagggttaaatgttctttaaaatgaaagaaatgctgttagaatggagtgagcatggagtcaagaccaggctgttacartagcacaggcaagaggagctggagaccgcagccatgggcctgagctcttagagctcctaatcaagcctcatccttctcagacaagtgtcagggagccacatgtgttaaggtggagatgcaatagctctgtagatacaaataagaatgaggggcccaagtgtcatcactggacaaatgtgtgattcctggggcatttgtcacagacatggccgtccggatttatgctacaacttgaggtctgcagtaacaaccctttctgctagctgcttcagtgaagg

SEQ ID NO: 489672 - DNA, 556 bp, Homo sapiens
ctgcttcagtgaagggcaaaggaaagttcaagaatgaagccagaccaatgtgggatggggcaagtctccaacactctacaggctcaacaaatggcgagcttttcagatttaactaaaagttgagcgtgtccaatatcatgtaccatgctggtcagtatcatggaccatgttggtcagtatcatgttccatgctggtcagtatcatgtaccatgctggtcagtaccatgtactgtgctggtcaatgtcatgtaccatgctggtcagtaaggtgtactgtgctggtcggtatcatgkcccatgctggttggcatcatgtacctcactggttgtcactgtgtactgcactggtcagcatcatgtactgtgctggtcggtatcgtgtgctgtgctggacggtatcaagtactgtgctggtatcatgtaccctgctggtcagtatcgtggaccatgctggttggttttacgtactgtgctgattgttccctgactctactcagatctgctctgtgcctgggggcctgacctctacaaaatacatctcccaggctcccctgc

SEQ ID NO: 489673 - DNA, 556 bp, Homo sapiens
ctgcttcagtgaagggcaaaggaaagttcaagaatgaagccagaccaatgtgggatggggcaagtctccaacactctacaggctcaacaaatggcgagcttttcagatttaactaaaagttgagcgtgtccaatatcatgtaccatgctggtcagtatcatggaccatgttggtcagtatcatgttccatgctggtcagtatcatgtaccatgctggtcagtaccatgtactgtgctggtcaatgtcatgtaccatgctggtcagtaaggtgtactgtgctggtcggtatcatggmccatgctggttggcatcatgtacctcactggttgtcactgtgtactgcactggtcagcatcatgtactgtgctggtcggtatcgtgtgctgtgctggacggtatcaagtactgtgctggtatcatgtaccctgctggtcagtatcgtggaccatgctggttggttttacgtactgtgctgattgttccctgactctactcagatctgctctgtgcctgggggcctgacctctacaaaatacatctcccaggctcccctgc

SEQ ID NO: 489674 - DNA, 614 bp, Homo sapiens
gcagcattgttcacaatagccaaaacatggaatcaacccaggtgcccatcagtggtggattggacaaaggaaatgtagtacctatacaccatggaatactacacagccttttaaaagagtaaaatcatatcctttgcagcaacatggatgcagctagaggccactatcctaagcaaattaactcaggaacagaaaaaccaaatactgcatgttctcactcctaagtgggaggtaagcattgggtactcatggacataaagatatgaacgatagacactggggtcacctggagcaggaagaaggaggggacaagggctgaaaaaataactattgggtactatgctcactatctgggtggtgggatcactcatacccccaaacctcaatgtcacacagtatacccatgtaagaaacgcctgaatctaaaataaaagttgaaataatttttaaaaaatataaraggatttattgtttacttaacaatgagtctaggctgcttagagcttgtttagtagctcagcaatggcatcaaggatcaggtgacttcaaacaccctgagtgtgttgacatctcgtcctcatgcttgctgactcctggtcacagagtggctgcag

SEQ ID NO: 489675 - DNA, 621 bp, Homo sapiens
tattaatgtcttcatatcagttctctcatctgagtctctgttgtttgcatgaggttgcattactagctccattttgccacagaggaaattgaattcaaagaattcaaagggctttagagatttactatgaggaaatattggaggccaagctaaaacgtaagcttccaaacactcagcaaatctttcttccaccacaccacattactctcaaggaggagggagagaagaaatgaggaaaaaaakccaaattttttccttcaaaggtaagtagttagaatcatcagttttggaatgtattatcagtaaatgaaccaaggtgatcttcctgaggccaatttaaaatctaattcaaattattttaattattaaacaataagatgtcttccctttatgtttaattcaacaagcataaagaacaggatgaattttaattatctgagaataattaggaacatatttctttcctatcactcttagggccaaatcacatttctaaagtgaaacctaatctaagaactttccaatacaatatcatataattaggtaatttaaaaatatattttgaaaatgaaatctctaaacatcattcattaacagactctgatattcccttcagtcact

SEQ ID NO: 489676 - DNA, 621 bp, Homo sapiens
tattaatgtcttcatatcagttctctcatctgagtctctgttgtttgcatgaggttgcattactagctccattttgccacagaggaaattgaattcaaagaattcaaagggctttagagatttactatgaggaaatattggaggccaagctaaaacgtaagcttccaaacactcagcaaatctttcttccaccacaccacattactctcaaggaggagggagagaagaaatgaggaaaaaaatccaaattttttccttcaaaggtaagtagttagaatcatcagttttggaatgtattatcagtaaatgaaccaaggtgatsttcctgaggccaatttaaaatctaattcaaattattttaattattaaacaataagatgtcttccctttatgtttaattcaacaagcataaagaacaggatgaattttaattatctgagaataattaggaacatatttctttcctatcactcttagggccaaatcacatttctaaagtgaaacctaatctaagaactttccaatacaatatcatataattaggtaatttaaaaatatattttgaaaatgaaatctctaaacatcattcattaacagactctgatattcccttcagtcact

SEQ ID NO: 489677 - DNA, 621 bp, Homo sapiens
tattaatgtcttcatatcagttctctcatctgagtctctgttgtttgcatgaggttgcattactagctccattttgccacagaggaaattgaattcaaagaattcaaagggctttagagatttactatgaggaaatattggaggccaagctaaaacgtaagcttccaaacactcagcaaatctttcttccaccacaccacattactctcaaggaggagggagagaagaaatgaggaaaaaaatccaaattttttccttcaaaggtaagtagttagaatcatcagttttggaatgtattatcagtaaatgaaccaaggtgatcttcctgaggccaatttaaaatctaattcaaattattttaattattaaacaataagatgtcttccctttatgtttaattcaacaagcataaagaacaggatgaattttaattatctgagaataattaggaacatatttctttcctatcactcttagggccaaatcacatttctaaagtgaaacctaatctaagaactttccaatacaatatcatataattaggtaatttaaaaatatattttgaaaatgaaatctctaarcatcattcattaacagactctgatattcccttcagtcact

SEQ ID NO: 489678 - DNA, 620 bp, Homo sapiens
cctcttggggtttctctgcctgcccagtcaccctggataacgtgcttgccctagattgtctcctaggccaagtcctctccaagttcttggccctttgtcctaaggttggatctcttcctctcgcttcccttgctccgagctgtgtctctggatacaccccctgcaaactacgcttcctgagctcggctggcatctggctgtgttcagcaaatgggaagcccagacaggggactggagagcaggaagacgggagaacaaggagatttctcctccttcagcagccacagcagcaatggcgtgtcctccacagttaactggaagaaaaagcctgagtccttgtctcctcctggattgccaaagggtcttctccttagacatgtaaatacacaaatattcgcattttttagtaacccttgaaagatttaactgcckgaatttaacaccagtaaaaacaaatgtagcaatatgaaattgcaactcactgagagcattacgattcagaaagtgaagaaatgcggggccagctccagccgcagcgcaactgtccacgagtccggccgcagcgcacctgtccccaagtgtccacctctaaggcagtgttcttcaacacgcaccacgcg

SEQ ID NO: 489679 - DNA, 620 bp, Homo sapiens
cctcttggggtttctctgcctgcccagtcaccctggataacgtgcttgccctagattgtctcctaggccaagtcctctccaagttcttggccctttgtcctaaggttggatctcttcctctcgcttcccttgctccgagctgtgtctctggatacaccccctgcaaactacgcttcctgagctcggctggcatctggctgtgttcagcaaatgggaagcccagacaggggactggagagcaggaagacgggagaacaaggagatttctcctccttcagcagccacagcagcaatggcgtgtcctccacagttaactggaagaaaaagcctgagtccttgtctcctcctggattgccaaagggtcttctccttagacatgtaaatacacaaatattcgcattttttagtaacccttgaaagatttaactgcctgaatttaacaccagtaaaaacaaatgtagcaatatgaaattgcaactcactgagrgcattacgattcagaaagtgaagaaatgcggggccagctccagccgcagcgcaactgtccacgagtccggccgcagcgcacctgtccccaagtgtccacctctaaggcagtgttcttcaacacgcaccacgcg

SEQ ID NO: 489680 - DNA, 519 bp, Homo sapiens
gcactatcatgaacagataacacattaactaacattttagtaaggacacaccgggagtgagtgttcagtggctggagcaaaggaagtcatggaaataagtcagtagaaatgttccagttttggaaacatggcatcatgcatgagatgggatttccaagactaggaatcagatttakttttcttaggcatgctgggactaagcatcctttcataacaccagtgtttgtggtattgggaatcccagtgatctcacattgcaatccttcattaccatcatgtgcaaagcagctttgaagatgtctctgctctgaattgcattgtcttcacagaaaagtgtggggaagatcccacttctgaggctgcaggacacacagaatgacctttcctctgccattccctgtacggtgccattggttgctttaaacacatttttattagaactgaaactttaaacatagccttgccagtagcttcaaaaagacaccagctaatctacaagcatatatggcccaccatttt

SEQ ID NO: 489681 - DNA, 519 bp, Homo sapiens
gcactatcatgaacagataacacattaactaacattttagtaaggacacaccgggagtgagtgttcagtggctggagcaaaggaagtcatggaaataagtcagtagaaatgttccagttttggaaacatggcatcatgcatgagatgggatttccaagactaggaatcagatttatttttcttaggcatgctgggactaagcatcctttcataacaccagtgtttgtggtattgggaatcccagtgatctcacattgcaatccttcattaccatcatgtgcaaagcagctttgaagatgtctctgctctgaattgcattgtcttcacagaaaagtgtggggaagatcccacttctgaggctgcaggacacacagaatgacctttcctctgccattccctgtacggtgccattggttgctttaaacacatttttattagaaytgaaactttaaacatagccttgccagtagcttcaaaaagacaccagctaatctacaagcatatatggcccaccatttt

SEQ ID NO: 489682 - DNA, 540 bp, Homo sapiens
atggcatgcactaaatattcgccatgaatactcttcctgaatgcaaagtcacaattttatatgamtttattcatgcactaacagacatattgtacctattattctaaatgcgtggaggttgggacgatgtctaaaactcaggtcatatcaggcattttgtatcatggaaaagaacagaatgattcactatctagttgatgatggtggagttgggtggacgtagctacagcggttcacagtggcccatagactctctggaagtatttttcagtaacaccaggagatgaccctgaaggcacaaataattttctctccctccatttgatacggacacaggtttatccattaacaggattccagagctaatcagaattacctctgatttgggttttactcacacacctgctggaaatccatgcatgagctttgtgagaaagggcacaaaggaaaccagcctgaagtctgcaggggccacacagtgcaagccaacagcagagctgacacagatgccagaatggtcaaaaacgaacatttacaaag

SEQ ID NO: 489683 - DNA, 540 bp, Homo sapiens
atggcatgcactaaatattcgccatgaatactcttcctgaatgcaaagtcacaattttatatgactttattcatgcactaacagacatattgtacctattattctaaatgcgtggaggttgggacgatgtctaaaactcaggtcatatcaggcattttgtatcatggaaaagaacagaatgattcactatctagttgatgatggtggagttgggtggacgtagctacagcggttcacagtggcccatagactctctggaagtatttttcagtaacaccaggagatgaccctgaaggcacaaataattttctctccctccatttgatacggacacaggtttatccattaacaggattccagagctaatcagaattacctctgatttgggttttactcacacacctgctggaaatccatgcatgagctttgtgagaaagggcacaaasgaaaccagcctgaagtctgcaggggccacacagtgcaagccaacagcagagctgacacagatgccagaatggtcaaaaacgaacatttacaaag

SEQ ID NO: 489684 - DNA, 636 bp, Homo sapiens
tggtaaattgttttaaagtaccagctttgaacacagacatctctggttaaaaatcacggctgtgttgctcccgagaactacacctgtgaacaggttgcccaggctctgttatttatgtaggcaaccccaaggccagtacatgaccctgtgattactggaagcrcagtatacgacaggggattcaaatggtaaactaaggatgtttagaatttatttacctaatgtcataaagtaaacacaggaacactaaaaattaccactgatttaaaagttatctcccgactgacttgtcactttgatcttatttcaccaaatccaggaaatagaaaatttcaagtacataaatcagatttctctgagatacctagattgataatcggcctctaataatctcccaagtatagcaagtgccacacagtttccttaaggaatccccaaagtcggccaaggaaatcagaaaagaaaattgggcctagctgcatgatgaatgggttggattccacctgccactccaaagcatgctgctggaataatctccagtggcaggggcttagcaaggagccatgactcaagttccacaaccagcagacatgctgctaaaataacccctattttgggctgatccccaagacagtg

SEQ ID NO: 489685 - DNA, 636 bp, Homo sapiens
tggtaaattgttttaaagtaccagctttgaacacagacatctctggttaaaaatcacggctgtgttgctcccgagaactacacctgtgaacaggttgcccaggctctgttatttatgtaggcaaccccaaggccagtacatgaccctgtgattactggaagcacagtatacgacaggggattcaaatggtaaactaaggatgtttagaatttatttacctaatgtcataaagtaaacacaggaacactaaaaattaccactgatttaaaagttatctccygactgacttgtcactttgatcttatttcaccaaatccaggaaatagaaaatttcaagtacataaatcagatttctctgagatacctagattgataatcggcctctaataatctcccaagtatagcaagtgccacacagtttccttaaggaatccccaaagtcggccaaggaaatcagaaaagaaaattgggcctagctgcatgatgaatgggttggattccacctgccactccaaagcatgctgctggaataatctccagtggcaggggcttagcaaggagccatgactcaagttccacaaccagcagacatgctgctaaaataacccctattttgggctgatccccaagacagtg

SEQ ID NO: 489686 - DNA, 231 bp, Homo sapiens
gagatttttatttttatatattttttaaccaaacctgactcatattatrgatgatctaaagtattaatgtaatacaaatccattgtatttcttggcacaaagaaaaaagtgggtcatgtcaaacacctgcaatgacagtaaaatcatgtcacaaataggtaagctaattatgttgaaaaatgattatgcacacactatgtaaagcattgtccttttcctttgttggagggc

SEQ ID NO: 489687 - DNA, 231 bp, Homo sapiens
gagatttttatttttatatattttttaaccaaacctgactcatattatasatgatctaaagtattaatgtaatacaaatccattgtatttcttggcacaaagaaaaaagtgggtcatgtcaaacacctgcaatgacagtaaaatcatgtcacaaataggtaagctaattatgttgaaaaatgattatgcacacactatgtaaagcattgtccttttcctttgttggagggc

SEQ ID NO: 489688 - DNA, 231 bp, Homo sapiens
gagatttttatttttatatattttttaaccaaacctgactcatattatagatgatctaaagtattaatgtaatacaaawccattgtatttcttggcacaaagaaaaaagtgggtcatgtcaaacacctgcaatgacagtaaaatcatgtcacaaataggtaagctaattatgttgaaaaatgattatgcacacactatgtaaagcattgtccttttcctttgttggagggc

SEQ ID NO: 489689 - DNA, 631 bp, Homo sapiens
gtctgcactaagtttggcatcaatatgttagcttccagggagcagaggaccaccaggtttcctaaggagtggtcaactcaaaaattgagcagaataaaactcctctgcttatcagtagtgggatgacccctttgaatagtcactgcactacaacctgggccacatagtgagaccctatttcttaacaaaaaaaagaaagaaataccttccatatttctgcaagtatgtgagttatctttgatgtagtgttaccttttcgcagtgaatgaagtgtaataacctcttgctcattttgtttacaaaaataaataaataaataaaagcagggacattctaagtggaatcaagttctaagtaatccagacataatactatttatagaataattcaatttttatgatatatttcatgtkttgctatcctcagttatatttactcacatatagttacacttgtcaatgtcctagctataatcacctatttttagattttaataaatataattaaattaatagcatttctatttttataacaagttctaaaattaagccacagttgaaaattcatgataagattaagtttgatttttatttcacttttatatgtatgaatcttaagaatttggtatttc

SEQ ID NO: 489690 - DNA, 631 bp, Homo sapiens
gtctgcactaagtttggcatcaatatgttagcttccagggagcagaggaccaccaggtttcctaaggagtggtcaactcaaaaattgagcagaataaaactcctctgcttatcagtagtgggatgacccctttgaatagtcactgcactacaacctgggccacatagtgagaccctatttcttaacaaaaaaaagaaagaaataccttccatatttctgcaagtatgtgagttatctttgatgtagtgttaccttttcgcagtgaatgaagtgtaataacctcttgctcattttgtttacaaaaataaataaataaataaaagcagggacattctaagtggaatcaagttctaagtaatccagacataatactatttatagaataattcaatttttatgatatatttcatgttttgctatcctcagttatatttactcayatatagttacacttgtcaatgtcctagctataatcacctatttttagattttaataaatataattaaattaatagcatttctatttttataacaagttctaaaattaagccacagttgaaaattcatgataagattaagtttgatttttatttcacttttatatgtatgaatcttaagaatttggtatttc

SEQ ID NO: 489691 - DNA, 631 bp, Homo sapiens
gtctgcactaagtttggcatcaatatgttagcttccagggagcagaggaccaccaggtttcctaaggagtggtcaactcaaaaattgagcagaataaaactcctctgcttatcagtagtgggatgacccctttgaatagtcactgcactacaacctgggccacatagtgagaccctatttcttaacaaaaaaaagaaagaaataccttccatatttctgcaagtatgtgagttatctttgatgtagtgttaccttttcgcagtgaatgaagtgtaataacctcttgctcattttgtttacaaaaataaataaataaataaaagcagggacattctaagtggaatcaagttctaagtaatccagacataatactatttatagaataattcaatttttatgatatatttcatgttttgctatcctcagttatatttactcacrtatagttacacttgtcaatgtcctagctataatcacctatttttagattttaataaatataattaaattaatagcatttctatttttataacaagttctaaaattaagccacagttgaaaattcatgataagattaagtttgatttttatttcacttttatatgtatgaatcttaagaatttggtatttc

SEQ ID NO: 489692 - DNA, 625 bp, Homo sapiens
tagtttttaaatggtccacattttgcattaattttttaaaacatattgaagaccataggaaagaactggaaagatttctgagacatctgaaaataatagaaaataatctactttatatcaagaaacattgaacaaaaatgaaataaataaaaaaattctgtggaagaagaaattaattcaacctcatatatttctcagtcaatttattcaataatgaggtcacttgatttacttcatgtgtacatttcaatgaatgactgcatgtctaaaatatattttatacttttttactgagattattcacrcttcagtcttcctgttttggtacaaaatattttagacaaactattatacttgttcatgtataactgtcactttagttataaaaaagatgcttaagttaaaaataaaataattttaataaagaagtgtgagaagtaatatataacctctgagtcagtcagaatctagcaaagctttataggtcacattcattaaacattcttacattcactgtcagtggctctaattaagaatgatcatataaaaagatcttttcatttttcttggttttttctagtttgcccaaatcgcaccaattatttcttctatactgttggttcat

SEQ ID NO: 489693 - DNA, 625 bp, Homo sapiens
tgaggcctgctctcttgtaacctctaacttaagtgctaaaaggtatactaaatgcattttcagttttgttgctatatttgcaagtgtctgaaactctgcctatagttcataattgtagataaagaagtaaaaaaaagaaagcatttgttctgttgaaggtaaaatatgcccacatgtcatatgcaaaatgacattgatgtgagagccatttcctctcatttacataagacaaagttccttccatgccaaacttctctagaaacaatatctggaaaagcacaggtgaaggagaggtatgacagaagaatcccaaactggatactgaacgcagaacttgttgcccttgtctagcaagttcagattgccayaaggaagtcaccatgagtggtaggttaaatggccattgctacattaaactttctcttaatatcacttcaaacatttaaaaatatatattagaagaaatgctaccattttcaattaattctattttactggtttctctttctgttaatataaatatgcatagctcttttcttcaaatacaaagctgttggaaatttctaggaactaattatcaagaggaagaagaatattaacaatataccttgaagtttgtatttct

SEQ ID NO: 489694 - DNA, 590 bp, Homo sapiens
agcaaaagcacctcttggcccacccagagagctgtgagaaatgtaagtcagtccgatttggggtaccttgtctggcagtattgaataactaatgaaccttcaattttaacaagcctgccctttggcacacacactcacccgcacactgattcaaacaacaaactatgcgaggcccaggacgtgaccaggtggcatgtcagtaaatacctgtttccaggccctttacraacttttcaatactcactagagctgcacaaaaattgtgctattgctacataaagattggctatgaccattttttgtggagagacaatttcacatcttgaaaagatatagtttttacccaaatctgggattccacacccaagacatggctgctcagaaacaattgcgctgaagagattgattgcctcttggttgttgtaggctcaggggaggaaagatctgggtttgaatcactggccctacaattaacaagatgtgtggcatgggaaaaatgcctgactttctaaatcttcattgcacctctgtaaatggaggcaaataacattaatcaatttaggttattttgaaatacatagtaaaatcac

SEQ ID NO: 489695 - DNA, 590 bp, Homo sapiens
agcaaaagcacctcttggcccacccagagagctgtgagaaatgtaagtcagtccgatttggggtaccttgtctggcagtattgaataactaatgaaccttcaattttaacaagcctgccctttggcacacacactcacccgcacactgattcaaacaacaaactatgcgaggcccaggacgtgaccaggtggcatgtcagtaaatacctgtttccaggccctttacgaacttttcaatactcactagagctgcacaaaaattgtgctattgctrcataaagattggctatgaccattttttgtggagagacaatttcacatcttgaaaagatatagtttttacccaaatctgggattccacacccaagacatggctgctcagaaacaattgcgctgaagagattgattgcctcttggttgttgtaggctcaggggaggaaagatctgggtttgaatcactggccctacaattaacaagatgtgtggcatgggaaaaatgcctgactttctaaatcttcattgcacctctgtaaatggaggcaaataacattaatcaatttaggttattttgaaatacatagtaaaatcac

SEQ ID NO: 489696 - DNA, 590 bp, Homo sapiens
agcaaaagcacctcttggcccacccagagagctgtgagaaatgtaagtcagtccgatttggggtaccttgtctggcagtattgaataactaatgaaccttcaattttaacaagcctgccctttggcacacacactcacccgcacactgattcaaacaacaaactatgcgaggcccaggacgtgaccaggtggcatgtcagtaaatacctgtttccaggccctttacgaacttttcaatactcactagagctgcacaaaaattgtgctattgctacataaagattggctatgaccrttttttgtggagagacaatttcacatcttgaaaagatatagtttttacccaaatctgggattccacacccaagacatggctgctcagaaacaattgcgctgaagagattgattgcctcttggttgttgtaggctcaggggaggaaagatctgggtttgaatcactggccctacaattaacaagatgtgtggcatgggaaaaatgcctgactttctaaatcttcattgcacctctgtaaatggaggcaaataacattaatcaatttaggttattttgaaatacatagtaaaatcac

SEQ ID NO: 489697 - DNA, 642 bp, Homo sapiens
gacttacacaaatatctgttgaatgaatgaatgtacgcttcacatttgatgacttactaatgtaatgatgtctgaccaatagataaatctttttccgtattaactgattggacatgtyccttgaagccatcactgggggtctgctctgaagtttatggatcactcaggatggtgggctcagggctcaggtgggtcctaggttgccttgttagtatcagtccaaggtgtctatcagagttgctaccaaaaagacgattttccaagtcttcaaaaatgaactgttagggaggattatgctggatatttatatcaatttctggacactttaaagctatgaagacagatatgaaaataaaggttttattcattttagggggctgagacaaaaatagacaatttgaggaaaatataaatgtatccatagaggtcattgttagcacctttcaaaaacttgttttggtcgcctaaaagcataaagaatctactgtatatggtaaaccagtattcagggtccagccaagaaaacagaaacaacactaattattttagtacacagagatttaaatgtgggaaattgactaaatagaataaaaagggggaactgaggtattgcagagagtgaaactgcaggggcagccacca

SEQ ID NO: 489698 - DNA, 642 bp, Homo sapiens
gacttacacaaatatctgttgaatgaatgaatgtacgcttcacatttgatgacttactaatgtaatgatgtctgaccaatagataaatctttttccgtattaactgattggacatgttccttgaagccatcactgggggtctgctctgaagtttatggatcactcaggatggtgggctcagggctcaggtgsgtcctaggttgccttgttagtatcagtccaaggtgtctatcagagttgctaccaaaaagacgattttccaagtcttcaaaaatgaactgttagggaggattatgctggatatttatatcaatttctggacactttaaagctatgaagacagatatgaaaataaaggttttattcattttagggggctgagacaaaaatagacaatttgaggaaaatataaatgtatccatagaggtcattgttagcacctttcaaaaacttgttttggtcgcctaaaagcataaagaatctactgtatatggtaaaccagtattcagggtccagccaagaaaacagaaacaacactaattattttagtacacagagatttaaatgtgggaaattgactaaatagaataaaaagggggaactgaggtattgcagagagtgaaactgcaggggcagccacca

SEQ ID NO: 489699 - DNA, 642 bp, Homo sapiens
gacttacacaaatatctgttgaatgaatgaatgtacgcttcacatttgatgacttactaatgtaatgatgtctgaccaatagataaatctttttccgtattaactgattggacatgttccttgaagccatcactgggggtctgctctgaagtttatggatcactcaggatggtgggctcagggctcaggtgggtcctaggttgccttgttagtatcagtccaaggtgtctatcagagttgctaccaaaaagacgattttccaagtcttcaaaaatgaactgttagggaggatwatgctggatatttatatcaatttctggacactttaaagctatgaagacagatatgaaaataaaggttttattcattttagggggctgagacaaaaatagacaatttgaggaaaatataaatgtatccatagaggtcattgttagcacctttcaaaaacttgttttggtcgcctaaaagcataaagaatctactgtatatggtaaaccagtattcagggtccagccaagaaaacagaaacaacactaattattttagtacacagagatttaaatgtgggaaattgactaaatagaataaaaagggggaactgaggtattgcagagagtgaaactgcaggggcagccacca

SEQ ID NO: 489700 - DNA, 600 bp, Homo sapiens
gctgctatatgccaaacatgatgcttcatattttatttatattttctcatttaattaagttctcatattgattctgttgagggtgtatcattatccccattttctagatgagaatactgaggcttgggaaaatgaggtaataatatgcccaggatcatggcatacagagccagaattgtaattcsggcaggtccatatgatttcagaactggttctttcatttattactcctggctttctccaaatagtttcaacaataattatatttattgactaagaaatagttgcttgagaaaacatgtcatcattttctttccctcccccaattattagggtaattttcattttttactataataaatggatataaaaaggaacagagtcctttttcttcatatttaggacattttttcttaagctaagtttccagaacagaatttctaggttgacgagaatgactgtaataatgaatatgtattaaagggtacagtttaaaagggagcttaataacaggattacacagaaaggtaatatgacttattttggaaaaagccttgctatgattatgaaagtccctttgagatctcacttgtagtctgc

SEQ ID NO: 489701 - DNA, 614 bp, Homo sapiens
tcatggtcatctctcctctgatctcccacctggcctataaacttatgctcttgcctcctcagcctgttcgccatatagcagccagaatgatccttttcaaacctaattcagatcatgttactcctctgctcaagactctccatctctacatcaaatccaaagcccatcctgtgatctacacagccccaggccatcttgtccttgctgccttaagagatgggaaaagcctctcactccattcttcttttgcttactcccttctgccctcactgacttccttgatattcctggaacacaygaaatgtgcccctgcctttttcttcttgcctgtctggctcttcctgaagctatcctatgactggttccctttctaactttgtgtcttcaatcagaaatactcttttcagagaacactttctgatatcctatgtaaattaatttcttcatgccctatttttattgttatcattattgcttattttattttacttttatttcaataggttttgcggaaacagatgatttttggttacatggataagttgtttagtggtgatatctgagattttggtgctactgtcacctgagcagtgcacactgtacccaatgtttag

SEQ ID NO: 489702 - DNA, 217 bp, Homo sapiens
agtggtgccctttatttaaatgcatagaactttatattcagtaacgaacttaaaagggcaatcaggttctcagaactaaaatcaagacttaatgttgacccatgatttgacaacagaatgaaatttttataatataatattaatagttattattttgaatayaaagaaatagagtatatgggtagaaagtgtggtacgttttcttgcccatcataag

SEQ ID NO: 489703 - DNA, 441 bp, Homo sapiens
tttttgtcaacgcaatgtacccatgcttgctggaartggtgcagaccaacagctacattacttttctaatagctaatgcagtttctcgtgaaagcatattcctctctctaaaagtaaattaaatggcataatctttccataaactggatttagtaacatattctctatgataaataacattcaaattggaatcacctcctctgtaatgtgaaattgaagtttatttttgatgtgttatctgttggtgacgattgactataaatgtaggaccatttagtaagcaaataaaccactcagttaggaagtaacataatacacagcaattttatgaatctcttttcatcttgcctttccactggtttgggagaattaaagaggacattgaaaatgcattaggtaaattgtgatattaacaatgccatttaaattgttgccaagatt

SEQ ID NO: 489704 - DNA, 470 bp, Homo sapiens
cctatggatataagacaaataatttactaattacacacaaatatacactgagaaacagaagcagctaattccaaaattcttgtttgctacccactgtctgtaccttgtccttggaatcctgaccttctccctctccattggtttaatggcctcttccttaagacctttgaaaggtgtggcctttgttgagaaagtgcccatctttattcaatcttcacagacagacttgcctstctttcgtttagaagtaagtagtaatggggtatttgcaagaggcccaaggcaccaaactgcttaattttatcttataagtttgtttccctgctgcttcataaactagctttagcttgggggaggcggggtgggggagttaacactgcaaggcagttttcactgccatgaaaacttacgtttgaacagcaatagaataagaaacaatgcagaggccctggtgtatacccatccctacc

SEQ ID NO: 489705 - DNA, 509 bp, Homo sapiens
aaatttccagtttgttctgaacactgctgaaatgtattagtggaatgaacgtttttctcaccctcccatttcacagagctcctgtccccagggatggaaactccacattccctgcctggctccacctggctgctaccatcctctccggcgttgtggcccctccagttcctccaccatgcacgccaggctgctgcttgcttcccagcccgtgcccatgagtttctgctaccggaaacagccaccccttccccgctctgtgccaggccagctctttaggctggggtgcttcctgggtgatgccacccctagccaccccgggtaggcaggtgctagcttccatccagcactgagttagcattaaggtcaytcctcacctctgtacactcccagtggccaggaccacactgccttgttcatccctgtagccccggcacctgggccagcgcccagtgcacggtagggacgcaataaacgtttgtggagggaacaatctctcacgcaattctggc

SEQ ID NO: 489706 - DNA, 502 bp, Homo sapiens
ctgcagaggtcacatgcctgtgaagctggccctgctccaaggccaaatcgttaaggggcagagctgggatttgaacccagggaggcctggagctgggggcatggtacaggagggtcacctggaaacaggtgggtgggtctgagtccctgggccaggctgcggggctagagcagaggggcagagggcctgggtcctggcgggtccctcctcctggtgccctgggcagcgtgtagtgttgaggccccagggagtragagtaatcgtatccagggctgaacggtgcccgctccaaaagatacacctaaccggagcctgtgagtgggaatctgacattgttgaaaacaggatctttgtgatgtcattttttttttttttgagacagggtctggctctgtcacccaggctggagtgcagtggtgtgatcacagctcactgcagccttgacttcctgggctcaagggatcctcccacctccgcctcccaagtggctgggactgcaggc

SEQ ID NO: 489707 - DNA, 573 bp, Homo sapiens
caggacaagcatttttagagcacctgctgtgtacaggactgctttaagggatggtgccctgctccctctgcagggcagagggcttcaactcccctctctcctgccccccaacccagcaccccctctgccatgagagctggtgggggcagagcttcaggccttacctttcaggcaggacatcttaagccccatgtcggcacctctgcaggcctgtggagagaggacagcgctgagagaggggagggcgcgacttgtttgtattggccacgtgcagccgggcccccacccttggccctgatgagtgcaaaacaggaggttgtggtggagagaaaccaccggcctccaggtcatgccacctgtcaactacatctgggctggatttgctcaaagatggagtctgtgmcggtggaaaaaacttacgggtgcctcaaagttaaatatacaggaagccaaggcggcgtctgcagccctggctctgtgaggtcacttgaacccaggaggcggaggctgcagtgaactgatgatggggaaccgacaccaccaagcctttcctttcaagagccacaggacggc

SEQ ID NO: 489708 - DNA, 435 bp, Homo sapiens
tgggggcagagcttcaggccttacctttcaggcaggacatcttaagccccatgtcggcacctctgcaggcctgtggagagaggacagcgctgagagaggggagggcgcgacttgtttgtattggccacgtgcagccgggcccccacccttggccctgatgagtgcaaaacaggaggttgtggtggagagaaaccaccggcctccaggtcatgccacctgtcaactacatctgggctggatttgctcaaagatggagtctgtgacggtggaaaaaacttacgggtgcctcaaagttaaatatacaggaagccaaggcggcgtctgcagccctggctctgtgmggtcacttgaacccaggaggcggaggctgcagtgaactgatgatggggaaccgacaccaccaagcctttcctttcaagagccacaggacggccg

SEQ ID NO: 489709 - DNA, 524 bp, Homo sapiens
cagaggaagataaagcaacagtccrtgggaggaaccccaggggatgggaggtcaggcaggaacaggtggggagaagccgaagatgggtgggacctggggtttctggggctggtttggagttaagagcttattctgaggacgccaaggagcaagtctgctttctagaggggtgtgtggctagtacctgtgaggagaccccaggcctggccctcatgtgcaggctgttggtggattggtagcatcagcaacccggaggctggggagcaaggcagcagctcaggcccacccaggcgcacaaggccccagggattcctgtgcctgctgaggtcagagatgcttgctctgggccagaaatcggggaggtgaatgtgaagatggcaggccaggaagggtttggaggagaaggagctggaagtccaggtggagctagtaagacatgggtgggagataccaccaagacatagaccggggccttgggaagggagggaaagcgagagatactgatgggaacaggcttgggccag

SEQ ID NO: 489710 - DNA, 462 bp, Homo sapiens
tcaagagtcatcatttccgtaacttaactctcaaattgttcagcaggaacatartgatacgcatgaatacgtgcagggagagatgaggacacgcgtgtaggtaaatgttcatttctggcgaaggatatttgcagggcctcttcatattctcacaactcttctttaactttgaaactgcttcaagaaaaaggcttaaaaaggaaagaaaggcaacatccagaagagacagggcagctcagtgagagtctgcgcaatgcctggcctccccaccatggtctcccagggcaggatgcgggcggcagcatgtgcgtcagatcgcgttttcctgctagcagcttctacagcttggtggagatgcgttcctggggccaggctctggccgagcaaaggatctgtattatgccgtgccaggcagcaccacctccctgaagaggtgtctggaactgacaggttttctctgaa

SEQ ID NO: 489711 - DNA, 516 bp, Homo sapiens
ggcccggccggcgctcgggcagccgcgcgcctcccgcggtcccgccccgctcctagagggcggcgctgacggcagccgccgggccgcgggcgccaggattgcacgggccaggcgcggggcggacgggtcccgcccgtcgcctccctggggagcgtgccaggacccgcccggcgccctcggcggcggtcccgacccctcgctgcttgcctgtttcctccctccaggccccgggcagtcccggggaaagtttgggccgcggcgtaggctccccaccgtgcgcccctctccggggctgggtgccgggctccctgaggccctgcaccccagccctgggtgttgaaaaagggcaccagggttcctcccatactggggggcccgggttcagtggacctcgccgcccggaagcgaagaggrgaggcgagaacagcccccccgccccatctcgccgtctgcagccgccctccccttgtgcaggaccccagggactggtaggcagtgccccttccctgtggctgc

SEQ ID NO: 489712 - DNA, 448 bp, Homo sapiens
caggaggctgtttgcaatctgaagagggacggatgggtgaagacagtgttttattaagagatggctcctgggtagaagcatttagcccgatgtgggtttcagggaaggcttctggaggaaactctccagggtcttttcattgccttagtagagtctacaccctgcctggttagagctggtcttgcctgcctttccgatcttattactgactgttgtactcaaaacccaaaaactaccatcagaaccacccatccccacttgctcactgccccagccccctggccttactccattcctcccgtagagccccgagttgtggrtggtcgctcctgtctaatcattcaccctcgatacaaatgtgcttttagaacggcctctcctgaccatcctttctcaggaagctccctgtcacctcaccttgctgtgcttttccttataacactggatg

SEQ ID NO: 489713 - DNA, 615 bp, Homo sapiens
ctgctagctactgctttcccctaagctccccacaggagaccccaggagacaggctgggctcactttatgccacagtggtggcgcctaaccttggccgaggagtctggaaaattctgttgccctggccctgcccctagaggtgccgatttctttggtccaggaggaggcctggtcgtggggccggtggttctactgcagatggggctgggagtttgaggagactctcccccatctcctcgtgtcttcactgtaactcgttattttcctaggctgctggtctcctcactgtaagagggtgaattaagggttgaattaacatcctctgtgcaggtggcccacaggtgctcagccccacaatgacctgtgcaggtgcatcggggggcaggcctcgccccaagtgctgccagcccaaaagtcrgacacatgcttgagtggcccacagaggacccagtccccttgcaggcactcagtctcaggggccaccttgcaagcactgtttcccacatgctgggtaacacatcccatcgttgctgaaagatgactgctttaaaatagcacgaccaagtctcatttttggaggaccatttggcctgtctacattctaatgtcaccaaa

SEQ ID NO: 489714 - DNA, 561 bp, Homo sapiens
actggcatcacggttttgaggttcatccacgttgtagtgtgtaccaggacttcattatgatttgtagccaaatactactccatcgtatgaataggcaccattttgtttgtccagacgtcagttggtggccactgggctgtttccacattttgactattatgaatcgtgctgccatgaaggggaagacacaagcctaccaagtgattctcacacactcaggcttgaggcatcaggacaccacccttctgcaatctgtaaagctgcacactttcccatcctgttctttccaaagcccagtgaggctarcagcagccctgtccccattttacagataaggatgccgaggctctgtgatgtggacagccaggctctggtagccctcctacccatccctcagcagcctctctgaacctcagctttctcatcttttcctttgctcttttataggctggacaaatcaggacgcaaaccctcgtcagctttggaacacaaatatttgccagtgaagaaaacattccctcatcagtcaaaacccggacagtctggcacacacgtctgcag

SEQ ID NO: 489715 - DNA, 610 bp, Homo sapiens
tgtcaaaacttccccaccagggaggccactggcttcttcatagctcctgagcacctagcacaccctgtgcacgttcgttttcttttttctttctgaaatggagtcttgctctgttgcccaggctggagtgcggtgttgagatcttggctcactgcaacctctgcctcccaggttcaagtgattgtcctgtctcagcctccccactagctgggattacaggtctcagcctccccagtagctgggattacaggtgcactttgccatgccmgggtaatttttatatttttgatagagatagggtttcactatgtcggccaggctggtcttgagctcacgacctcaggtgatccacccgcctgggcctcccaaaatgctgggattacaggcgtgagccaccttgcccggccattttctgaacagccatgtcaacaggttagtcctgcttcaaggaccaagtagaacttcttccatgtcctggatttgccccttggcagtgtctcgtccttgtgtcccaatgtgagtgctacgtaaatggcttcttctcactgtgtgcattgactcttgcctgggactctcctttcctacccaccccccatctctggattcagcc

SEQ ID NO: 489716 - DNA, 571 bp, Homo sapiens
ggaaagacaaggagtggattctccgctgcagcctccaggaggagccggctctgacgacaccttcattttagcccagtgacaccgtgttgcacttctgacccgaagaactataagattataaacttgcggccgggcacggtggctcttgcctgtaatcccagcactttgggaggccgaggcgggtggttcatgaggtcaggagatcgagaccatcctggctaaaacggtgaaaccccgtctctactaaaaaaatacaaaaaattagccgggcgtggtggcgggcgcctctagtcccagctactcaggaggctgaggcagaagaatggcgtgaacccgggaggtggagcttgcagtgagccgagattgggccactgcacttcagcctgggcaacagagcgagactctgtctcaaaaagaaaaaagaaaaaagaaaaaaaaagattgtaaacttgtgctgttttaagccattaagtttgtgataatttgtgacagccaccataggaagtgcattgagatttgtagtattttgsggggtgaagaggagggtgaaaaggaatggacaagcctgtca

SEQ ID NO: 489717 - DNA, 493 bp, Homo sapiens
ctgttagaaagggctagatcccatatactaaaatggaaagaaagccctttgaaacctaagaaaactgtgtttccattatgtgagyagaaatcttgtgtacacagaaaaatggtctttcttcttcccctcccctcccctcccgtcctctgagacggagtcttgctctgttgcccaggctggagtgcggtggcgtgatctcggctcactgcaacttccgcctcctgggttcaaactattttcctgcctcctgagtagctgggactacaggcgtgcgccaccatgcccagctaagttctttgtatttttagtagagacaggggtttcaccatgttggccaggctggtcttggactcctgacctcaggtgatctgcccacctcggcctcccaaaatgctgggattacaggcatgagccaccgtgcccagccagaaaaatggtctttcaattggaaatgtaattccagagaataaagaatagaaccacactgtaatat

SEQ ID NO: 489718 - DNA, 493 bp, Homo sapiens
ctgttagaaagggctagatcccatatactaaaatggaaagaaagccctttgaaacctaagaaaactgtgtttccattatgtgagcagaaatcttgtgtacacagaaaaatggtctttcttcttcccctcccctcccctcccgtcctctgagacggagtcttgctctgttgcccaggctggagtgcggtggcgtgatctcggctcactgcaacttccgcctcctgggttcaaactattttcctgcctcctgagtagstgggactacaggcgtgcgccaccatgcccagctaagttctttgtatttttagtagagacaggggtttcaccatgttggccaggctggtcttggactcctgacctcaggtgatctgcccacctcggcctcccaaaatgctgggattacaggcatgagccaccgtgcccagccagaaaaatggtctttcaattggaaatgtaattccagagaataaagaatagaaccacactgtaatat

SEQ ID NO: 489719 - DNA, 493 bp, Homo sapiens
ctgttagaaagggctagatcccatatactaaaatggaaagaaagccctttgaaacctaagaaaactgtgtttccattatgtgagcagaaatcttgtgtacacagaaaaatggtctttcttcttcccctcccctcccctcccgtcctctgagacggagtcttgctctgttgcccaggctggagtgcggtggcgtgatctcggctcactgcaacttccgcctcctgggttcaaactattttcctgcctcctgagtagctgggactacaggcgtgcgccaccatgcccagctaagttctttgtatttttagtagagacaggggtttcaccatgttggccaggctggtcttggactcctgacstcaggtgatctgcccacctcggcctcccaaaatgctgggattacaggcatgagccaccgtgcccagccagaaaaatggtctttcaattggaaatgtaattccagagaataaagaatagaaccacactgtaatat

SEQ ID NO: 489720 - DNA, 493 bp, Homo sapiens
ctgttagaaagggctagatcccatatactaaaatggaaagaaagccctttgaaacctaagaaaactgtgtttccattatgtgagcagaaatcttgtgtacacagaaaaatggtctttcttcttcccctcccctcccctcccgtcctctgagacggagtcttgctctgttgcccaggctggagtgcggtggcgtgatctcggctcactgcaacttccgcctcctgggttcaaactattttcctgcctcctgagtagctgggactacaggcgtgcgccaccatgcccagctaagttctttgtatttttagtagagacaggggtttcaccatgttggccaggctggtcttggactcctgacctcaggtgatctgcccrcctcggcctcccaaaatgctgggattacaggcatgagccaccgtgcccagccagaaaaatggtctttcaattggaaatgtaattccagagaataaagaatagaaccacactgtaatat

SEQ ID NO: 489721 - DNA, 252 bp, Homo sapiens
gaaacaagtgatccatataccatataagtggccatttcattttgcctccttccaccagatcttagcaacctcaaccattgccatgagccactgtaggcctaccatctacaaacaracaagtatcttttaaaaagacttcatactcccatttgataaatttcccagcaaagagatgtttactttaactctatgcaagtggctcatattctcaaagtctggagatattattcatgaagtgtgagaaaatcatcc

SEQ ID NO: 489722 - DNA, 528 bp, Homo sapiens
gtgcttttgaactttatagaaatggattcatacagggtgtattccttcacattgagctggctgtgtgcagcattgtgtgcagttgtttcatattgtagccgggaacagtgactcatcttcattgctctttagcattccattgtttaattgaatcccagttttcttttccactgttgattgtgtttagatttttttcagtttggggttactatgaaggatgctataaagagcattcttgtacatggctcttgtagcacagtgaacacatttctgttgggtgtagagatgtacgtatatgtgtgtgtgtgtgtgtgtgtgtgtgtgtgtgtgtgtgtgtgtgtrtatatatatacaccccaaggggtaaaattgttggatgtacatacctttgacttcagtaaatcatgccaaactgctttccaaagtggttgttcacctttttttccttttgtttttcagtggatccttatagtttgggattcttccataatggtacatatagatgtgtctcatttttttaaacagttg

SEQ ID NO: 489723 - DNA, 528 bp, Homo sapiens
gtgcttttgaactttatagaaatggattcatacagggtgtattccttcacattgagctggctgtgtgcagcattgtgtgcagttgtttcatattgtagccgggaacagtgactcatcttcattgctctttagcattccattgtttaattgaatcccagttttcttttccactgttgattgtgtttagatttttttcagtttggggttactatgaaggatgctataaagagcattcttgtacatggctcttgtagcacagtgaacacatttctgttgggtgtagagatgtacgtatatgtgtgtgtgtgtgtgtgtgtgtgtgtgtgtgtgtgtgtgtgtgtgtatatatatacaccccaaggggtaaaattgttggatgtacatacctttgacttcagtaaatcatgccaaactgctttccaaagtggttgttcayctttttttccttttgtttttcagtggatccttatagtttgggattcttccataatggtacatatagatgtgtctcatttttttaaacagttg

SEQ ID NO: 489724 - DNA, 604 bp, Homo sapiens
gattttatcattgtgtaaattattgggtttttagcattttctaatgtgaagttttaatcatttttaagtatacatattttttttctgtaccatttaaataaaatatttttataactttcttgtgagttttgttcatgcaaactttggaatgacttctggtttttagctattagcactttgaattaaccatagaaataacaagggctaactctgttcttcaaagactttataaagacagtatttgcactttcaaatgcaaatatatctacattaaatctaaacagcataagcattgtgacagaatgtacctcatgttgattgttttctctgtaaggtgacttctagtaatgatttgacttaatcaccacttgtgtctggttcagatcataccctgccatttactagctgcaagaccttcagtagtacaggtttagtatccctaatttcaaaatctgaaactttytgattgctgatatggcactcaaaggaaatgctcattggagcatttcgggttttggaatacaatgcaaatattccaaaatccaaaacacttctggtcccaagcatttcagagaaggggtagtcaacctgtaatcttttttca

SEQ ID NO: 489725 - DNA, 572 bp, Homo sapiens
taaatcattctactataaagacacatacacatgtatgattatggcagcactattcacaatagcaaagacttggaaccaacccaaatgtccatcaatgatagactggattaagaaaatatggcacatrtacaccatggaatactatgcagccataaaaaggatgagttcatgtcgtttgtagggacatggatgaaactggaaaccataattctgagcaaactatcgcaaggacagaaaaccaaacactgcatgttctcactcataggtgggaattgaacaatgagaacacttggacacaggatggggaacatcacacaccggggcctgtcatggggtggggggaagggggagggatagcattaaaagaaatacctaatgtagatgacgaattaatgggtgcagcacaccaccatggcacatatatacatatgtaacaaacctgcatgttgtgcacatgtaccctagaacttaaagtattaaaaaaaaaaaaaaaaagaaaaaaaggaagggagcccatgcccgagggcaccatgcctccctgtccatctgcgtggtactgaatcatcactggg

SEQ ID NO: 489726 - DNA, 572 bp, Homo sapiens
taaatcattctactataaagacacatacacatgtatgattatggcagcactattcacaatagcaaagacttggaaccaacccaaatgtccatcaatgatagactggattaagaaaatatggcacatatacaccatggaatactatgcagccataaaaaggatgagttcatgtcgtttgtagggacatggatgaaactggaaaccataattctgagcaaactrtcgcaaggacagaaaaccaaacactgcatgttctcactcataggtgggaattgaacaatgagaacacttggacacaggatggggaacatcacacaccggggcctgtcatggggtggggggaagggggagggatagcattaaaagaaatacctaatgtagatgacgaattaatgggtgcagcacaccaccatggcacatatatacatatgtaacaaacctgcatgttgtgcacatgtaccctagaacttaaagtattaaaaaaaaaaaaaaaaagaaaaaaaggaagggagcccatgcccgagggcaccatgcctccctgtccatctgcgtggtactgaatcatcactggg

SEQ ID NO: 489727 - DNA, 572 bp, Homo sapiens
taaatcattctactataaagacacatacacatgtatgattatggcagcactattcacaatagcaaagacttggaaccaacccaaatgtccatcaatgatagactggattaagaaaatatggcacatatacaccatggaatactatgcagccataaaaaggatgagttcatgtcgtttgtagggacatggatgaaactggaaaccataattctgagcaaactatcgcaaggacagaaaaccaaacactgcatgttctcactcataggtgggaattgaacaatgagaacacttggacacaggatggggaacatcacacaccggggcctgtcatggggtggggggaagggggagggatagcattaaaagaaatacctaatgtagatgacgaattaatgggtgcagcacaccaccatggcacatatatacatatgtaacaaacctgcatgttgtgcacatgtaccctagaacttaaartattaaaaaaaaaaaaaaaaagaaaaaaaggaagggagcccatgcccgagggcaccatgcctccctgtccatctgcgtggtactgaatcatcactggg

SEQ ID NO: 489728 - DNA, 493 bp, Homo sapiens
gcctcagtcgcggggtcatcggggcccgcggcctgcccrcctccctcgccgtcggccccgaggtccccggagtccccgggccccccggaggggcggtgtgcgcgccagcgtcccacagaagctggccgagatgccgagcagccagtatgggctgatcgtgttcgtggcggggctgctgctgctgctggcctgggctgtgcacgccgcgggcgtgagcaagagcgacctgctgtgcttcctgacggcgctcatgctgctgcagatgctgtggatgctgtggtacgtgggccgcagctccgcgcaccgccgcctcttccgcctcaaggacacgcacgccggcgccggctggctgcaccggctggtgagtccaggcaccgggcaagcgggtctctgcctccttgcctgctggctgcatcctgagacggctctgcccccttcctaccactgccgtcttcccttcagccttttctgccttggtctctctgtgcatctt

SEQ ID NO: 489729 - DNA, 347 bp, Homo sapiens
ctgcgagcgcctcagtcgcggggtcatcggggcccgcggcctgcccacctccctcgccgtcggccccgaggtccccggagtccccgggccccccggaggggcggtgtgcgcgccagcgtcccacagargctggccgagatgccgagcagccagtatgggctgatcgtgttcgtggcggggctgctgctgctgctggcctgggctgtgcacgccgcgggcgtgagcaagagcgacctgctgtgcttcctgacggcgctcatgctgctgcagatgctgtggatgctgtggtacgtgggccgcagctccgcgcaccgccgcctcttccgcctcaaggacacgcacgccgg

SEQ ID NO: 489730 - DNA, 347 bp, Homo sapiens
ctgcgagcgcctcagtcgcggggtcatcggggcccgcggcctgcccacctccctcgccgtcggccccgaggtccccggagtccccgggccccccggaggggcggtgtgcgcgccagcgtcccacagaagctggccgagatgcygagcagccagtatgggctgatcgtgttcgtggcggggctgctgctgctgctggcctgggctgtgcacgccgcgggcgtgagcaagagcgacctgctgtgcttcctgacggcgctcatgctgctgcagatgctgtggatgctgtggtacgtgggccgcagctccgcgcaccgccgcctcttccgcctcaaggacacgcacgccgg

SEQ ID NO: 489731 - DNA, 638 bp, Homo sapiens
gctgcctattacttctttcttatttgaaaacaaaatattgaacatttccctcagcaagccacactgtgtcccactccaagatgttcactgctcccacttcctctctacctaatgggatgagatctttaggatacgtttgcctccctattcctttcccttcttccctctccttttccatttatttaccttgagggctttcaaaggtttttctttgttccctatccagtccttttccaacttaggttttttgttgttgttgttgttgttgttttgttttgttttgttttgttttgttttgtttcagatggagtcttgctctgtcacccatgctggagtgcaatggcacaatctcggttgactgcaacctctgcctcttgggttcacaccattctcctgcctcagcctcccaagtagcarggactacagatgcttgccaccacgccagactaatttttgtatttttagtaaagacggggtttcagcatgttggccaggctcatctcgaactcctgaccaaaggtgatccatctgcctcggcctcccaaagcgctgggattacaggtgtgagccactgtgcttggccgaacttatgggttttgtagagatagttaatagaatttagcctcaaaatgtctatt

SEQ ID NO: 489732 - DNA, 576 bp, Homo sapiens
atttgtctggaagaatttggtcagaagacagtgtattaagaagacagtgagtccccagagaaatataagaatatacatcatgtttatattatatataacataaatarctaactacatctgtatatatagcataaacataaagcacaaaattatttatatataatataaatatatcagtgtaagatattagctattaaaaaatatatatatatagcaaccggtgatttgtctggaagactggtcagaagacagtgtattaggaagacaggcagtctccgcaggaagcatggtgcaggtgggatctggaggtgactctgggctgccagaagacgccccactgctttgcggcagacacaggtggagaggtcctctctgtagcttcagcatggacagtgtgtgtgtcttgctgtgggaacacttctttctgcttccctctccactgtgaccccatcacactcactgacctgccctcctccttcctctcgctctccggggcccctgtggaaagagggtcttccctccgtgcagcaggaacccccaggaccatccccatgctcctgggttctgaacttcagg

SEQ ID NO: 489733 - DNA, 576 bp, Homo sapiens
atttgtctggaagaatttggtcagaagacagtgtattaagaagacagtgagtccccagagaaatataagaatatacatcatgtttatattatatataacataaatagctaactacatctgtatatatagcataaacataaagcacaaaattatttatatataatataaatatatcagtgtaagatattagctattaaaaaatatatatatatagcaaccrgtgatttgtctggaagactggtcagaagacagtgtattaggaagacaggcagtctccgcaggaagcatggtgcaggtgggatctggaggtgactctgggctgccagaagacgccccactgctttgcggcagacacaggtggagaggtcctctctgtagcttcagcatggacagtgtgtgtgtcttgctgtgggaacacttctttctgcttccctctccactgtgaccccatcacactcactgacctgccctcctccttcctctcgctctccggggcccctgtggaaagagggtcttccctccgtgcagcaggaacccccaggaccatccccatgctcctgggttctgaacttcagg

SEQ ID NO: 489734 - DNA, 576 bp, Homo sapiens
atttgtctggaagaatttggtcagaagacagtgtattaagaagacagtgagtccccagagaaatataagaatatacatcatgtttatattatatataacataaatagctaactacatctgtatatatagcataaacataaagcacaaaattatttatatataatataaatatatcagtgtaagatattagctattaaaaaatatatatatatagcaaccggtgatttgtctggaagactggtcagaagacagtgtattaggaagacaggcagtctccgcaggaagcatggtgcaggtgggatctggaggtgactctgggctgccagaagacgccccactgctttgcggcagacacaggtggagaggtcctctctgtagcttcagcrtggacagtgtgtgtgtcttgctgtgggaacacttctttctgcttccctctccactgtgaccccatcacactcactgacctgccctcctccttcctctcgctctccggggcccctgtggaaagagggtcttccctccgtgcagcaggaacccccaggaccatccccatgctcctgggttctgaacttcagg

SEQ ID NO: 489735 - DNA, 576 bp, Homo sapiens
atttgtctggaagaatttggtcagaagacagtgtattaagaagacagtgagtccccagagaaatataagaatatacatcatgtttatattatatataacataaatagctaactacatctgtatatatagcataaacataaagcacaaaattatttatatataatataaatatatcagtgtaagatattagctattaaaaaatatatatatatagcaaccggtgatttgtctggaagactggtcagaagacagtgtattaggaagacaggcagtctccgcaggaagcatggtgcaggtgggatctggaggtgactctgggctgccagaagacgccccactgctttgcggcagacacaggtggagaggtcctctctgtagcttcagcatggacastgtgtgtgtcttgctgtgggaacacttctttctgcttccctctccactgtgaccccatcacactcactgacctgccctcctccttcctctcgctctccggggcccctgtggaaagagggtcttccctccgtgcagcaggaacccccaggaccatccccatgctcctgggttctgaacttcagg

SEQ ID NO: 489736 - DNA, 616 bp, Homo sapiens
gcagaagttgggaaagatccatcatcttgaaaactttttccgcacaaacccactgcgatctctcaagcaattggtaaggaatccaagagagtctgtatatgacacagatcagggagagcagaacacttgggaggtgaccaggtcttgggggccgagcccttatgaatgggattagtrcctttataaaagaagctcaatggagttcttgtgtgccttccaatatgtgaggacatagaaagaaggcaccatctatgaaccaggaaattggctctcatcaacactgaatttgtgagcatcttggcctgagatcttacagcctcaagaggtgtgaaaaaagaaatatctgctgttttttagtcacccagtttatgttattttgttaaaagagtccaaacagaccaagatatcacacttaatatgtaggggaaggcaagaaaaactgccacacttagaatactcctgatgctgggagtatgaaaacaggaaaaacaaaacaaaactgctcttgaaggtgaaggaggaatatcactgagctcaccaacacagccaggaaaggaacagaagtgtgagaatgctacattcctgagaccctgagaaaaagtacctgcataagact

SEQ ID NO: 489737 - DNA, 597 bp, Homo sapiens
ggctgcaaaccagatgtttgatcttaaataggtagtttttacctctcagggctccagtttcctcatttgtgaaattgagctaacaatacttactttgcaggtttgtcgtgaggattaaattgaaaagccacaggaaagaacctaaaagcttgtctggtatgcagtaggcactcactgtgtgtctattgttgagggcagagatggttttcctctcaatccctccaggccacagcatgtcagacagttccctgtacaaagcaggtgctggacaaatgttaaataaagtaggtcataaagctgtgcctttgaggaaccatggagctccacatgtgggtttctctgttccctgatgctctctctgcccgaccccacacacacccttccctcaggccactggggaacaacaactttgaacttagctgtggtttcattactctatgcttcttctatgaagctatgctgaaatgcacatctccttctttactcagttccacacacacccttttaaattcagcttgaatgtcccttcttctgggaagctttccctgactcctgccacccrttcagggtgtcccttttctgtgctgccacagcaca

SEQ ID NO: 489738 - DNA, 651 bp, Homo sapiens
tgtgtggagcagtagccctgtggagctgggcactgtgtagtgatctttatatgtgttgtctcattcactcttacaaaattcctattgatatgattgtccttatttatagatgaggaaatagaaacaacrcataactttcctaaggtgacagggtttgtacatgacagcacttagaggtaaaccaggtttgtctcattactaggactctcttgatttgtggaaacaaagtttgcattaagcctttgaccttcccagattccctatctgtaaaatgggcacaatagtatttattctcaacctcatagtctgggtagaatgacttaacaaagcagtggacttaaactcttgagagttttttgggataagataattagcttgcattatcacagttctgttcaggaaagtggttttcttacgaaggtataaacacccccagttgttaagcaagcaaatgaagacaatcaatggagcagagctaaggccaaggcaggtgtttcaaatagcactgcagagtgacagtaagtggcatccacctttccaatggtaccatgctttaaaaagcaacagctttaaaaagtaacagcttcatctattgagtcgtgtaagaccaagtttctcctctactagtttttctctttcccttaaggaaat

SEQ ID NO: 489739 - DNA, 597 bp, Homo sapiens
tgcaatcatagggaattgttccagttctctccatctcattgtgtcttggagctggtggaaggaacacttacagagacaccttcctgaggtactacttcatgagtcctaagccagtgtcctccrcaggagcaatggcctcatggtgagtggttgtgaacggagctgatgacgtcaccatggcactcatgcctgagatgttcttccatcagtttcagtgactccagtctggtttagttattctttagagtagcaggacttctttcatttgcaacttgaaaaaaaatgcatatcaaaattaggccataaatattacttaattatattgaaataataaatacgttagtaaatcctagtttataattttataataaattagtaaattactattttctaatttatttgttataaattagtaatatttataataaacttacaataaattgtttataataatttataataaattctcaattatcaatttcttatacaaatttgttatacaatagtatacatttgttatataatattctttatttatattacttatactaatttattatttattatttaccataatttatgatacagtatttgtaa

SEQ ID NO: 489740 - DNA, 593 bp, Homo sapiens
ctcagcagatgttttcttgtcacaaatcgtatattgccccacaattattctccaagatgttttagatgaatattctttatcttcccccaccccacagtcttattcattcattcacaagctaaaggaacacagatttaatgagcacctattatatgcccagcaattagcatgatgggtcactactttaaggagctcayagcaaattccctgagagcagaaattatgtcttttctcttttcttgcttttaccccttcccccagtcatcccaagcatctattatgctacattctataagctttcaggatggacgagtgaacgtgctggtttgccatagtcacaaatacacaacatctgagagtcaggaagggctaccacagccctgtgaaattttatattgaaaaactgctaatgatgccatcaggcccagtgtccttcaggaaagaaaatgagtgcttgaggcaaacatgtggaagctgcaaaccatttgtaatcagaaagtgaagtatgcaacaagggaaacatgccaagctcaaggactcggtggctttaatgaagggctggtattaccagtggaaatctaacttgcctacca

SEQ ID NO: 489741 - DNA, 655 bp, Homo sapiens
tgctggttacaagcaagaaagtccttgctccaggctttttttttcttagatacaaaatgtgacctgatactgaattgataggaggatgttggaataaggaaagcagggagaaatcctgtccaggtaaagtgacaacggtgtcaaacgctgcctactcatcagargtaatacaaatgttaggtctcgtgaggtaacactagatgcctctgaggttagattctcattgtgtggaatttttttcttcaccatgagactaaaaaatggtgagaagtacagaaacctttaaaagtcctttgcccttataaacaataatactacattagaaatgtctaggtagaaacattgcctgtcactataataattccatagggaaatgataaatgatagagtagcattgcattagaaactaggaattctaggtttgagaatagaaaactattttattttcacagttgttcatagaccaataacaagggaaaggggatattcaattgaaaaaataaaatacctacccatatgtgaacctactttatggaaagtttcattttacacagtatgtttggtcttatgaatgccgttacattgtgcaacatctcccatagcataatttgtcattattatgtcatctgcatgtaaaataagaaaaaaattacta

SEQ ID NO: 489742 - DNA, 442 bp, Homo sapiens
ttagggacaataatgaagccatgtctgcattgggaaggtctccttcgtaacaaataggattatactgagattgcaatgggcatcaccattccttatatataaaaaggaactccagagggccactggttggaatcatactttgttcattccagatcactgagtgtccagtcttatctagaagcccagaagccagatgctggtccttggtcttctatcttctcatagtgatggcctgaaatcagtgtcttctscattatttatcagtttctctctctgttaaatagcagcaccaagaaagggagttgtgattgctggtaactttgaaatcttcaaaagaaagccaagttcctggtaagaatcagacttagtaactcatggaagtaattgaagggttgtgcttgtactctttctaattaagtttacattgggcaaattttaagaa

SEQ ID NO: 489743 - DNA, 543 bp, Homo sapiens
ctagggattaagcctaaatttcctattttatggcctggaacatcttattaaggagcatctgctatttacagtaatattcgttaacattgattgagagcttacgcagtgccaggacctgttctaaattctttccacatattaacacattttactcttactacaatccttatatcttttggtcaagttctttccattttaaaaatacagattttaaaaactagtcacttaaaactgccacacacatgcacacacacayacacacacacacacgtgactcacaaaatattgctttgcctgtgaaggtttcacaatgccttgttatcgtcagccagtctttttctattaaagataaatggccaattgagacaaaacaattctgaggctttttttctacccttgattaagattgaggtggcaggagttatagataatattcatttcaccttctgaactttctggaaagacctggtgatcttgccagctccagcagccttcttgtccacagcaactgtctgtgtcacaccgcaaatagcaaaatgaccc

SEQ ID NO: 489744 - DNA, 562 bp, Homo sapiens
gcagaggggccaagtcacagaagaagtgtgggagagtgttgtggtyacagaagagcaattgaatgagcagaagggtgtgtgtcagagcaataatattactgaggaaccatgagatgactgtgagcaaaatgccgaacctgggccgcatgagaattgtataattcagagggtggcagatcgccacaaagtggtcataggccatggtccccaagagcaaattgtcaatgacgacaaacacaatagaaaagtacatctgtgtgatgcagctctcataagagatggattgactcttggtttgaatattcaccagcattttggggactgagttggaaatggaggaaatatcagcaaaggatagattggcaaggaagagatacatgggggtatgaaggtacgtatccaagctgatagccacaatgatgagcccgttcccaatcacagtgaccaggtacatacccaagaaaagcacaaagaggaggttttgatgctcatcctgcttgaaaaatcccaggagaatgaattcagtgatggtggtttggtttccttgatgcatatttctgcc

SEQ ID NO: 489745 - DNA, 562 bp, Homo sapiens
gcagaggggccaagtcacagaagaagtgtgggagagtgttgtggttacagaagagcaattgaatgagcagaagggtgtgtgtmagagcaataatattactgaggaaccatgagatgactgtgagcaaaatgccgaacctgggccgcatgagaattgtataattcagagggtggcagatcgccacaaagtggtcataggccatggtccccaagagcaaattgtcaatgacgacaaacacaatagaaaagtacatctgtgtgatgcagctctcataagagatggattgactcttggtttgaatattcaccagcattttggggactgagttggaaatggaggaaatatcagcaaaggatagattggcaaggaagagatacatgggggtatgaaggtacgtatccaagctgatagccacaatgatgagcccgttcccaatcacagtgaccaggtacatacccaagaaaagcacaaagaggaggttttgatgctcatcctgcttgaaaaatcccaggagaatgaattcagtgatggtggtttggtttccttgatgcatatttctgcc

SEQ ID NO: 489746 - DNA, 562 bp, Homo sapiens
gcagaggggccaagtcacagaagaagtgtgggagagtgttgtggttacagaagagcaattgaatgagcagaagggtgtgtgtcagagcaataatattactgaggaaccatgagatgactgtgagcaaaatgccgaacctgggccgcatgagaattgtataattcagagggtggcagatcgccacaaagyggtcataggccatggtccccaagagcaaattgtcaatgacgacaaacacaatagaaaagtacatctgtgtgatgcagctctcataagagatggattgactcttggtttgaatattcaccagcattttggggactgagttggaaatggaggaaatatcagcaaaggatagattggcaaggaagagatacatgggggtatgaaggtacgtatccaagctgatagccacaatgatgagcccgttcccaatcacagtgaccaggtacatacccaagaaaagcacaaagaggaggttttgatgctcatcctgcttgaaaaatcccaggagaatgaattcagtgatggtggtttggtttccttgatgcatatttctgcc

SEQ ID NO: 489747 - DNA, 562 bp, Homo sapiens
gcagaggggccaagtcacagaagaagtgtgggagagtgttgtggttacagaagagcaattgaatgagcagaagggtgtgtgtcagagcaataatattactgaggaaccatgagatgactgtgagcaaaatgccgaacctgggccgcatgagaattgtataattcagagggtggcagatcgccacaaagtggtcataggccatggtccccaagagcaaattgtcartgacgacaaacacaatagaaaagtacatctgtgtgatgcagctctcataagagatggattgactcttggtttgaatattcaccagcattttggggactgagttggaaatggaggaaatatcagcaaaggatagattggcaaggaagagatacatgggggtatgaaggtacgtatccaagctgatagccacaatgatgagcccgttcccaatcacagtgaccaggtacatacccaagaaaagcacaaagaggaggttttgatgctcatcctgcttgaaaaatcccaggagaatgaattcagtgatggtggtttggtttccttgatgcatatttctgcc

SEQ ID NO: 489748 - DNA, 614 bp, Homo sapiens
tttcctaagtgtttcccaccattaagcattagagaagacacagaaaagaactctgaaaatgctgaccatttcgctgggagaagaagacagcgcaaacaactccctccctgtgaagagcaataatcaactaagttacagataggaaatcacaagcgggaagagcatgtgaagacaaaacaagggaaaaaaagcagagctgtctgtctgttccccatttacctcatcaagacttggatgtaaaaattactgtgtcttgaggaaaacacttgagggatattatcccaaagggatgggaaggacctgaatgtcccaggtgagcccagcaccgtgattctattaagatcttggaaggaagcttggaggaagagtttaatctgaaaaatacctaagagctrctgagtctccacctgcaactctgctaaggataaggaaagccactgggtctagaaaccagtaactttctgagatttttaccatcattcagaggtgaatctcttcagaatccagcattggtcttgacgagctaggcagccaccttaagaactcagaacagtttatgcaggactactggtgggtaggaaaggtagaatggaaagcagaaatcagagattgtc

SEQ ID NO: 489749 - DNA, 614 bp, Homo sapiens
tttcctaagtgtttcccaccattaagcattagagaagacacagaaaagaactctgaaaatgctgaccatttcgctgggagaagaagacagcgcaaacaactccctccctgtgaagagcaataatcaactaagttacagataggaaatcacaagcgggaagagcatgtgaagacaaaacaagggaaaaaaagcagagctgtctgtctgttccccatttacctcatcaagacttggatgtaaaaattactgtgtcttgaggaaaacacttgagggatattatcccaaagggatgggaaggacctgaatgtcccaggtgagcccagcaccgtgattctattaagatcttggaaggaagcttggaggaagagtttaatctgaaaaatacctaagagctactgagtctccacctgcaactctgctaagrataaggaaagccactgggtctagaaaccagtaactttctgagatttttaccatcattcagaggtgaatctcttcagaatccagcattggtcttgacgagctaggcagccaccttaagaactcagaacagtttatgcaggactactggtgggtaggaaaggtagaatggaaagcagaaatcagagattgtc

SEQ ID NO: 489750 - DNA, 614 bp, Homo sapiens
tttcctaagtgtttcccaccattaagcattagagaagacacagaaaagaactctgaaaatgctgaccatttcgctgggagaagaagacagcgcaaacaactccctccctgtgaagagcaataatcaactaagttacagataggaaatcacaagcgggaagagcatgtgaagacaaaacaagggaaaaaaagcagagctgtctgtctgttccccatttacctcatcaagacttggatgtaaaaattactgtgtcttgaggaaaacacttgagggatattatcccaaagggatgggaaggacctgaatgtcccaggtgagcccagcaccgtgattctattaagatcttggaaggaagcttggaggaagagtttaatctgaaaaatacctaagagctactgagtctccacctgcaactctgctaaggataaggaaagccactgggtctagaaaccagtaactttctgagatttttaccatcattcagaggtgaatctcttcagaatccagcattggtcttgacgagctaggcagccaccttaagaactcagaacagtttatgcaggactactggtgggtrggaaaggtagaatggaaagcagaaatcagagattgtc

SEQ ID NO: 489751 - DNA, 646 bp, Homo sapiens
aaaatttttatatattgttgtgcgtaataatctaaatctccttttttttttttttttttttttgagacagagtctcactctgtcgcccaggctggagtgcagtcgcgtgatttcaggtcactgcaacctctgcctcccaggttcaagcaattctcatgcctcagccaccctagtagctgggattacaggggtgcaccaccatgcccagctaatgtttttatttytagtagagtcgtgatttcactgtgttgtccaggctggtcttgaactcctgggctcaagtaatctgcctgcctcagcctcccaaatttctgagattacaagcatgagccactgcgcctggccttaaatctttaagctctaaagagtttcaatttagaccttgcactgaaagtccttaaatttcattatgaagatatcctttaagatactttcctcaacaaagggaaaaattttctctaatagagaaaaattaagtcaaacagcagtaaactttatttttttttaacttctaacatactagataaggattcaatgctaaaagaagtctgagaagctgggttaaatgaagttaaacaactatctttactagaaaattttttgaagattttagtatgataatatcctttataaatctccaaaatga

SEQ ID NO: 489752 - DNA, 609 bp, Homo sapiens
tactagtgctctctgcctctcagacactgatggaagcagatgaaattctcttctttcaagggggattagggagaagagcctcagtgatggaaattcctaggtagaacaagccttgcaaagcatgagcatggacatcaggcctccttaattctggctggggccctttcatccctaacctccttagagcttctcagccaatcagcttctaaatgagagatctcaattaagctcagtcaagcactcacagaaagtagcttgatggactctgaactgcaggaatctgaggcttcactgccacccagagcagaaatatcctctctggtatcactgatggctgatctcggagctagcagtgaccccttctgaccaattacacctatgagaactgaacaattccaaaaatggggaaattactcatccacaaaggagattgttctattttagaccctacctgttgcttctagctctctctataacgtcaatggcgtcatgctgaatcattcccaacacctgccagcattttacaagtttcttagaaattcaataagagttgctgcttgctcttycactttctcaatgtaactaattacatgtaaatagcctccccac

SEQ ID NO: 489753 - DNA, 603 bp, Homo sapiens
gggaagtgtctgagggttcatgctaagacgatcttcctacatggcatgggctcattcccgtgggctgttggagggttgctgtgtaacagaggaatttcaggcttcagccaccaacctggcatggaaaccatggcattgggtttcccgggccttttttttcttttttttttttctttttgagacagagtctcactctgtcacccagactggagtgcaatgacaacctcagctcactacagcctccacctcccaggttcaagtgattctcctgcctcagtctcctgagtagctggatttacaggcacctaccatcatgtccagctaattttttttttttttttgtatttttgtagagacagggtttaacatgttgatcaggctggtcttgaactcctgaactcaggtaatccacccacctcggcctcccaaagtcctgggattacaggcgtgagccaccatgcccggctgggtgtcctgggctttattgragctcatggcaggttgtctctcttgctctgtgaggcagcgtgggtgagaaaggacatggtgcatggtcctcctaccctcccccatagggaaatacttcaaaacactcagcagccc

SEQ ID NO: 489754 - DNA, 611 bp, Homo sapiens
gtgccccccaaatccatacattgaaacctgatcaccaacgtgatggtgttaggaggtggaaaytttgggaggtgcttaggtcatgatagcagaaccttgatgaatggaattagttcctttctgaaagaggcttcagggagctgctggtctctttctttgacttgaaggcacagcgagaaggtgccacctatgaacaagaaagtgggccttcaccagacatggaatctgctagcaccttgatctttgacttcctagacttcagaactattagaagtaaacttctgttgtttaaaagccacccagtttatggcattttgttacagcagcctaaagaggctaagacaagtgatggcatgggatgcaggtaattgcatccaatgatcatgggccagaatcagtgtgatccagtctcttcttttaataattatgattactaaaggaatcatcacttactatgtgccaacctctgtaccaagtactggatatgcattaactcagggatcaacaatctatgactcatagtacaaatctagcctgctgcctgttataagtctattgcaatacagtcacactcgtttgtttatgtgttgccccgtggctgctttctcact

SEQ ID NO: 489755 - DNA, 597 bp, Homo sapiens
ctgggacacattgctaatgctccaatttgtccctcagaaatacaagttcatcaggtgcaggatctgctttataaattattgcagtcaatgtgtggtggtaaatgtttaatagccagctctccaggaaaacaaaagcaaaaactccatgatttatggygctcccaatttcagtggtataaattcttctactatgatggatccaagttaacaacatcacatcataaaacttggagttgggaagagatactcacaattagctgtcttgggcataaaccagctctagcacaccactgaatacaggtgattattttatcaaaagcattgccattgcttaatatggagcatcatccttccatgtttctcacaacaggctgtctagcccaaagccaaagccacatattttggatttttttaatggcaactccccacttctcagtaccaatttaggtattagttagtatagactatgttatgccacagtagcaaacaaagccaaaatctcagtgccttaaaacaagaaaggtttatttctcacacatactgccatgcccatcacaggatgtctagggcctatgcttcacacgtccatactgcagg

SEQ ID NO: 489756 - DNA, 567 bp, Homo sapiens
ggacacattgctaatgctccaatttgtccctcagaaatacaagttcatcaggtgcaggatctgctttataaattattgcagtcaatgtgtggtggtaaatgtttaatagccagctctccaggaaaacaaaagcaaaaactccatgatttatggtgctcccaatttcagtggtataaattcttctaytatgatggatccaagttaacaacatcacatcataaaacttggagttgggaagagatactcacaattagctgtcttgggcataaaccagctctagcacaccactgaatacaggtgattattttatcaaaagcattgccattgcttaatatggagcatcatccttccatgtttctcacaacaggctgtctagcccaaagccaaagccacatattttggatttttttaatggcaactccccacttctcagtaccaatttaggtattagttagtatagactatgttatgccacagtagcaaacaaagccaaaatctcagtgccttaaaacaagaaaggtttatttctcacacatactgccatgcccatcacaggatgtctagggc

SEQ ID NO: 489757 - DNA, 492 bp, Homo sapiens
agggtagttgttaaaggacaaagactaaagtgttttgtgggaataaccagttgaagttgaccaagattataaagtaatttgcaaagctatttgcttctacacacagcttttaagtgttagaatatcatgccactacaaaagtattatctaaaatgaggtaatatgctgtattgcattgtacaggctataagcaattatggagggatatactttcttcacttgtattaataaagctgaagaraatataaagaaataaaagcctggagtatataacaactcctgaggcaaattgaaagaaattatgaaagaattcattgtattactgaaacaaagcaaaatgaaatgcattgtgacaacatgatataaatcacaagataatatcacatcttaataaccaatgctgaacagaagagagacttctgtgttgatttactgtgtagaaaatatgacctgaaagaagccccttcaccagccaaatctttacatactagt

SEQ ID NO: 489758 - DNA, 661 bp, Homo sapiens
acattgaattcatattactaatacaatttactcctacagatttcaactttttctaactatcttttaaaatacttttgctagatgtaggggatttaggatatatgagtttgagaaacatgagtttggaaagaggtaggtaagaacaaaaaagaaatggctaatgaatttgccctctggtctagaaagttcctatctgaattgttacagtaacacttattctggagttcctattttattacaaaaaaagacaaggaaagtagctgtaagaatcatccataaccacccgtattaatgactattttcactagattgaatcatagatattttatatctatagaaagtggtcatttttactgtgcatgttgattcatagttgcataactaatcatgacaactttattaattgcttattatcaagggttttctcttttattagagaacaagtgacttccttcccttgcactggtgtgcatatatatctctgtgtgatagagattaatgcataaagctttgcaggaaactgcctcattgattttgttgcctttatatttgtyttccttagatgacttccactaacatagataaaggatgtatagcccgtttcagtgggacacccagggccccgcctatggaagttggagttctggcttgagttcaggca

SEQ ID NO: 489759 - DNA, 541 bp, Homo sapiens
agccttattcttcacccaggtcccaaaatgttagcagtcatgtttatgtcatccaagcaggaaactggaagaaattcttctgaagaatttgaccctagccagctccaaagaaaagtcctaaagatatttacatccaggttgcccctctaaacataattttctgcatgacaattcttaccagtgagtctgattttagtgtggcactggtcttagtaccactgacctagtcagctcttttcagagaataatcttccagtcatctgccagtggtgaaggggatatcttggagtcctaaataaacttttcaccatttttaaattttttagctcagaactcatttttaacaatgcctatttacacatgcagtggttccatctagctttctttttgcctactctgataatagtagacacttgagaaaagcctttattgtgagaggaagaccagagcaaacaattaaaataaagcaaccactgctatgagcaacacacattaggagatagccatttggtycttttaaatcctcaggtttacatttaat

SEQ ID NO: 489760 - DNA, 656 bp, Homo sapiens
gactcctggaagaaatgacaagtacactataacaaaagggtctataggatacttattgaggcagaayataggatacatggttacaggcaagggaagagcatgtacagaggcctggaggcaaaagagagcacagatagaggaactggaaggaatacagaaacatagcatacataagaggaagttgcaaagaaatactcgaagggtctggatgatgcaggatcttatgagtatagttaaagaatttggagttattataaagacaatgtgatacaattgggaataatatgatcaggtttatgctttagaaggtcctttctggaggtattgttgcaaatagatgggagggagaggagacactaggtaaggaagatgccaaaaataaaaccacttttagtcaaaaatataatggggtaaattaaaattaaatataaatgcaatgacaactccagacagatggtaaggttcacagagccaaacttggattcaaatgcataaaaaacataaaatttgatctaatcaaatgcaagatgtatgctaaattcatgttctactaaaatgtaagacacttaaataaggaaatagaaaagtagagcaagtgaaaccacattagcacaattactcagtgcccatctcatgcagccatatgatgtgcattt

SEQ ID NO: 489761 - DNA, 656 bp, Homo sapiens
gactcctggaagaaatgacaagtacactataacaaaagggtctataggatacttattgaggcagaatataggatacatggttacaggcaagggaagagcatgtacagaggcctgkaggcaaaagagagcacagatagaggaactggaaggaatacagaaacatagcatacataagaggaagttgcaaagaaatactcgaagggtctggatgatgcaggatcttatgagtatagttaaagaatttggagttattataaagacaatgtgatacaattgggaataatatgatcaggtttatgctttagaaggtcctttctggaggtattgttgcaaatagatgggagggagaggagacactaggtaaggaagatgccaaaaataaaaccacttttagtcaaaaatataatggggtaaattaaaattaaatataaatgcaatgacaactccagacagatggtaaggttcacagagccaaacttggattcaaatgcataaaaaacataaaatttgatctaatcaaatgcaagatgtatgctaaattcatgttctactaaaatgtaagacacttaaataaggaaatagaaaagtagagcaagtgaaaccacattagcacaattactcagtgcccatctcatgcagccatatgatgtgcattt

SEQ ID NO: 489762 - DNA, 623 bp, Homo sapiens
agcgatgggggctgatcagactgaagagaaataaataggactaggaatgtaacattatggctatatttattatttctaacatgattgcagtttttcagggggactttacaaaaagaattagagttgtgatattctttttttaggaggattttttcttctttcttttttaagtgtgtgaggtttattcaactttctttgtgttatacatacattcctatgctatctgtggagttatgatttattaarcacttgttatgtgctagacaatgtgctgggtgctttacaaatattactcttgtaatcttcactatcatcctaaaagtgagttatcattatcctcattaacagatgaaagacatatggttaataagtggtagagatgctatttaaacaaaaactcttaatattccactcaaagacacttaataatcacaaggctacatagcttaccagggaccatacattaggatacttaaagaaaaggcaaaacaacaacaacaataaacaactattaaacttgagtcagatgacctcatggagtgcctttctcccttattaccatctgagtctagggtcagcttgtgaaaagataaaggaaaaatgtgcccagttgggtttggctg

SEQ ID NO: 489763 - DNA, 527 bp, Homo sapiens
aggcaggtattatgtgtaacagcagtgaagtgcagtaactcattgagtttgggagctagaaattggggtatattaggttgtgctgaggagctacactactgaatctctaaggttttgtcaacctcaaagatttttatgtttcacaggaggaaaaaaaatgatttcttaaggaaaaacaatagcttctacatataagaagtcaaggcataatagaattaggactggaactctggaattctgttcttagtatgtgcttgcttcattaaagcacactttttcatttaatttcttactttgtgccccgtgttttgaagactgggtaaacaagaraatgttattgttttaagatttctgaattcaaatggaatgagtagttagctagtgaccagaggcttctgcaccagcagaggcttctgcaccagcagagaccactgacactgccaagtcctggaagtatgacccccttctgcctgaacagatggtagatagaagcaacgtcttgaaaagctgaagaaagccaaactaaa

SEQ ID NO: 489764 - DNA, 504 bp, Homo sapiens
ctggagtgcagtggcgcgatctcagctcactgcaacctccacctcccgggttcaagcgattctcctgcctcagcctcctgagtagctgggattacaggcgtgtgccaccatgtctggctaagttttgtatttttagtagagacggggtttcaccatgttggtcaggctggtcttgaactcctgacctcgtgatccaccckcctcagcctcccaaagtgctgggattacaggcatgaaaaatggatttcttatagacaacatctagttgggtcacatctttggatccactgaaactctatctttcaactgctgtccttagactattgatgtttaaagagattatgggtacatttggattcatgttgattacatttgtaactgttctctattctatgtgtgggcctttttgttttgttttgtgtttgtcttccactcttcttgccttctttgctttgagtattttgtataattcaatttgtcccctctctgccttctctttttcaa

SEQ ID NO: 489765 - DNA, 504 bp, Homo sapiens
ctggagtgcagtggcgcgatctcagctcactgcaacctccacctcccgggttcaagcgattctcctgcctcagcctcctgagtagctgggattacaggcgtgtgccaccatgtctggctaagttttgtatttttagtagagacggggtttcaccatgttggtcaggctggtcttgaactcctgacctcgtgatccacccgcctcagcctcccaaagtgctgggattacaggcatgaaaaatggatttcttatagrcaacatctagttgggtcacatctttggatccactgaaactctatctttcaactgctgtccttagactattgatgtttaaagagattatgggtacatttggattcatgttgattacatttgtaactgttctctattctatgtgtgggcctttttgttttgttttgtgtttgtcttccactcttcttgccttctttgctttgagtattttgtataattcaatttgtcccctctctgccttctctttttcaa

SEQ ID NO: 489766 - DNA, 367 bp, Homo sapiens
tatataaataaatcaccttacatatgtgatttccaaagtctgtgaatgatttcacagtggttagttgtaataagtgaatacacaggcaacctgggtttgggaaaaaactggtccaggtaaggctggaagcccgccaacctccagacagcacaattagcacaggaggtagacatgaaagctgggcagcacacaggaggctttacaacggcattgggtgagctttctttcacaaggacatcctagccattgcttggtctgccatcccctacacgcaattctgctgtttatagaaagaactttttttagaygcctccaaaaagcaaggattaagtcaactcatcataaattcctcctgctagaaaccaac

SEQ ID NO: 489767 - DNA, 599 bp, Homo sapiens
tgccaacttccacctcacccatgatatgaaacctttccttctggtggttcctaacatgcctttgttttaaaatccgaggggatgttcatgtactaatggatacatcactgcctcctcttatttacaaagtattgtggggactactgggatttagcttactagcaacctctcagcataagcagagccaggaggctccacwgaaaagactcctaatgtacaattaaaatgtcatcactggagatgcttttttgcaccctgcacttgagtttgctggaaaagttcatatttgccttttcattcctcaccctgcattctgatggcttcaggcctttagcatgggccatatttaaattgtcaagagatgtcaacaaattgtgagggacagcctcacactggcagcaattactacacggcaataatcaatgggagtcttttgttagcactgcagactcaccattgactcaggaagtaagtgtcccagtggtttaagtgaaagctgaaatggacaagcagtttcaccttagctgctcaaaagccacagacatacgcttgccccattaattattcctacccaaaagacaggggctgttaccgtccac

SEQ ID NO: 489768 - DNA, 511 bp, Homo sapiens
aagtgatgggaaaaaaactcaactagaaaatatcagagagaagaaacatcatgcagtttctttaaattgtagtgaacaagagagttaacgaaaatcagccatttcatcccatatgaaaaataaaatatctacagaaagccaaaatactttttccaaacaccattctggagtcatttaccaccaaccaaccttccaaacaaatcggttgttgatttgtttatttgttacacaaccagacacatatggctgatgaaagtaatcagatgctggtggggtgaagacagaactcaaaaataaattgaactgaagagctaaacatactgcaaaaaagctcaggcctcaggcacaccttccaagttgtgttattctatgctattcataccactttccttattgatataaaacaatttttgttttcttttccagaaagaatgctgccaatcgccagaggcagacatgtttatcargctgtgtatcttgaagtctgacagaaaatctgtggcctttggta

SEQ ID NO: 489769 - DNA, 617 bp, Homo sapiens
tgcacttacaagtagggtggagcctctgctctcacctctgggtaggtctacggttgctggggctcctatttctctgagaggtgttcactcctcactctgagcagagtagtttaatgctgagtatccccctgtatgagggtttcagaaaacctgaaggtttgccaggcctacagtgcttagaggtttgattatgggagccttcagtgagggcaactgacaacactgatcatctgtgagtgttaaaagaaacaatatttatggctatgataaaagatgtaagcattaatgtctatggcagaagtcaggaatgtggtcacaaaagtgatcctagaatgttaatgatgccagggaccctgtccaatgccatctttctccaactcaagatgaaaactgaggccagggagattaagtcagttgccctaggtcacagagattccagtgccagagytggaactaagaatctactgctggaattgcaatgctttgttgccaacatccttactggggctccaattctacaaaatattctttatttactccctaagcaaggacagtaatgctgctttcaagagttgaacacttaaccatgaattttgatttttgctttatttcaataa

SEQ ID NO: 489770 - DNA, 600 bp, Homo sapiens
aaaggttattggtggcttaaactgaatggtggtaatggacatatgagcagtcaaatcaagacacattttgaatgtagagttggtatatcttggtgactgatgagaagtctggagtgaggaaggcctattaacactcacaatagccactaaaaatgatcytttatacaagagttcgactcaggtataaaagagttgcaaggctatctaaatatatttaaaaacattttctcactaatttattaaaatgactttcatagcataagatgcaactccaaagacgataaatgaacatactatctgatagctaataatgcttatattttacattaacacgttatatgaagggggtaaactgacctaagaatatacacaaagattcactactgtatctttttaattcaacttttattttaagttcaggggtacatgtgcaagcttgttacacaggtaaacttgtgtcactgggatttgttgtacagattatttcatcacccacatattaagaatagtacccatttagttatttttccggatcttctccctcctcgtactctccacccctcacaccggccccagtgtgttgttccgctctatgcgtcc

SEQ ID NO: 489771 - DNA, 208 bp, Homo sapiens
ttgatacatcagatcatcctaccaagattagtcagatttatatacagataaatgagggtgggatctgttttaatttaaatgccagtttattgctcttgaacgtggctgttaaaaaaaaattaacaaataattaaacaccargttataatccccaattctttttctcagaacaacaaaacaacacaaattgtaaagcaatcatttggtt

SEQ ID NO: 489772 - DNA, 512 bp, Homo sapiens
aataacacccataagagataacaaaaaatagaatttagaaactagggaaggagaattccctgacacaggaggtatgcaagcacaagcaaatggtcacttggtgagaatgatatgaagggatgcggaagggagtgggatcactccctggaaaagtgaaaaatgtgttcaaatattaggatcatatagaagaagaaatgatattgttttrtgagccatcagagggcagaactgaagccaagaggtggaaagaaagattcaacacaaagaactgttttggtttttttcatttgtttgttttaatcactggagctgacccaaacagaatggattttcctgaaaggcagtgagttcttcattagtgttgatccagtgtcacatggaggttagatgatcatttgcctaggataatgcagtgagaaaatattattcactcatccactcacttattcactcacaatcctcttttattcttttgcacctattatttgcctgaccctatgccaggaacacaa

SEQ ID NO: 489773 - DNA, 512 bp, Homo sapiens
aataacacccataagagataacaaaaaatagaatttagaaactagggaaggagaattccctgacacaggaggtatgcaagcacaagcaaatggtcacttggtgagaatgatatgaagggatgcggaagggagtgggatcactccctggaaaagtgaaaaatgtgttcaaatattaggatcatatagaagaagaaatgatattgttttgtgagccatcagagggcagaactgaagccaagaggtggaaagaaagattcaacacaaagaactgttttgktttttttcatttgtttgttttaatcactggagctgacccaaacagaatggattttcctgaaaggcagtgagttcttcattagtgttgatccagtgtcacatggaggttagatgatcatttgcctaggataatgcagtgagaaaatattattcactcatccactcacttattcactcacaatcctcttttattcttttgcacctattatttgcctgaccctatgccaggaacacaa

SEQ ID NO: 489774 - DNA, 512 bp, Homo sapiens
aataacacccataagagataacaaaaaatagaatttagaaactagggaaggagaattccctgacacaggaggtatgcaagcacaagcaaatggtcacttggtgagaatgatatgaagggatgcggaagggagtgggatcactccctggaaaagtgaaaaatgtgttcaaatattaggatcatatagaagaagaaatgatattgttttgtgagccatcagagggcagaactgaagccaagaggtggaaagaaagattcaacacaaagaactgttttggtttttttcrtttgtttgttttaatcactggagctgacccaaacagaatggattttcctgaaaggcagtgagttcttcattagtgttgatccagtgtcacatggaggttagatgatcatttgcctaggataatgcagtgagaaaatattattcactcatccactcacttattcactcacaatcctcttttattcttttgcacctattatttgcctgaccctatgccaggaacacaa

SEQ ID NO: 489775 - DNA, 625 bp, Homo sapiens
acacaacaattaagtagaagaggcaaaattctgataatggcctgcctgactctggtgtccatttgaaacaccatatctccaagagggggccaacagccagatcttaactgccaatctctgggtcctcacctattcctcacttctttagaaggagaaaaaggccatgctcctttaactagtatgggcgaagttcatggattttacagcactttcccttcacagcctcattaaacttatatgcatggcctcaggatctgctgagccacgttgtgctgccaagccctggggctttagaatgatgctttgctctaagagagcacttttcttaaatctggcaagttgttgcttaataaaatatacaccaactatctgagcaattgagggaagagggtagtgattatggtttaaaactggatgtwaaagaaagcagattaccaccgaagtgagaatttctgaatgtcatttggtctaaatggaactgtgattaggaaaagaaaagagacatctgaaaaagtcatgaaaagaaaaataatagcaattttgaatttcaactaaatgggtgaaatctgggggatcacaaatggaaatactttctaaagcaccctactctaaagcatctaatgta

SEQ ID NO: 489776 - DNA, 440 bp, Homo sapiens
aagggtcctaaaagtgttaatataccttaatgccaagaacaaggtagtttatttgttgtaaagtacctttgagctgcactgtacattaaattttttaaaattacacgccacactccacggtttattttacagcagtatctgggttttgattcagtgtggttttatggaaaaataaacctatgtaccaatctcaacaaactgaatttcttctcatttggtggtggtttttctattttctccacccacccrtgatgaactctatttatagcaacaaaagaaaatttagtatgagttattcccaattaaatttacagcaaggcaaatataagctgtgacaagaaccctcttacaggacacatacacacaaaaccatgtctctcaaaacaggattaaaagcgaaagaggcaaatgttaattttgcctacgtgacacatataatt

SEQ ID NO: 489777 - DNA, 615 bp, Homo sapiens
tgcacccttgctttcctttgctataaagcagacatagcaattcctgtctcacaggcggttgggaagatataaatgagataagtttatttcccagtataagctatgctctcatgcatatgaaagtatctggcacagtaaatacttaacacatagtatgcctacattaagtgcccacccagtctgaaaatacagcagttaaactgatgactcaaactgacttgctcaacaaagggaatatatactcatagtggtgattataacttaaaagtacatcagtaaagctagcttcaagagatctgatcctgtagctcagctcacaatattgttaagaaatcccttttggtcctgccacactgcctgtctttgtgttagcttcataccaagactaattgccctcatggccccaggacagttgccagtgactcctagacaacttgytttcatagtcacatccagctagaaagagatcctggcaatgattcctagaattcactttgaagagactggcttatatccacccctgaacatgagaccaaatctccagccccattctaaagcttaggtaggataaagacagtctccccaggacattatgagtccttaactgaaatttgg

SEQ ID NO: 489778 - DNA, 644 bp, Homo sapiens
gacacgaaagatgctcccttttttatcatttaatctttaaagagactagggcccatggctcactggtacaattccaagtttgagaacccctggtgaagaaatgcctatgttgggcctatgcactaggcccaagaaaccaggccaagccaaaatataggcactcatgctaaacgcacacaataaaatggaaactttaaggaagcaaatgggtccctgaacaaaccggtttcccctgaagtcaggagtccagtctacctgagtccactaataaggaaaccccttctgctttaactcttacaatagaagtaaacaagttaaccagtcagtttttctctactgttctgtttccttgtccctatcttgcaaaacctacttttccggcattgcccagtgggggcgctcattctaatttgtagaatggagacagcccagattcattaatcatgaataaaagccaatttgatctataactaaatttagagtgagagtaacttcgtctttgacatacttatggggattcagaattttgtgaatatagaatcttctcatcttataaagccattcaaggatgaaccaacaggacttgccgtttgctgaccctgtgcratgaccctgggcagagctcttcacacagtgggagcgtg

SEQ ID NO: 489779 - DNA, 577 bp, Homo sapiens
ttagagttgcatccctgttctctgctcaccctgaggtaggcccagcctctggggttgtggtttgagcaggatcagcgctccacyagccacctagtttctttgagtcttgagcatcctgtttttcccaggcagccagagtcccctgatttcttttctgcttttttttgttgttgttgttttctaatttagaaacagggttgcactgtgtcacccaggctggagcacagtggcacaatcatggctcactgcagcctggacttcctgtgctcaaacagtcctcctgcctcagccttctgaggagctaggactacaggtgcacaccaccatgcctggctaatttactaactttttgtggagatggggtcttgctttgttgcccaggctggtctcaagctcctggcacaagtgatccacctgcctcagcctcccaaagctctaggattacaggtgtgagccaccacaccgggcccagagtccctgatttctggggcttcttttcaagtcgcaataacagatgactgtgacaagatggatatgtaatcacctgatttatcccttaaccctgctccctggagca

SEQ ID NO: 489780 - DNA, 577 bp, Homo sapiens
ttagagttgcatccctgttctctgctcaccctgaggtaggcccagcctctggggttgtggtttgagcaggatcagcgctccactagccacctagtttctttgagtcttgagcatcctgtttttcccaggcagccagagtcccctgatttcttttctgcttttttttgttgttgttgttttctaatttagaaacagggttgcactktgtcacccaggctggagcacagtggcacaatcatggctcactgcagcctggacttcctgtgctcaaacagtcctcctgcctcagccttctgaggagctaggactacaggtgcacaccaccatgcctggctaatttactaactttttgtggagatggggtcttgctttgttgcccaggctggtctcaagctcctggcacaagtgatccacctgcctcagcctcccaaagctctaggattacaggtgtgagccaccacaccgggcccagagtccctgatttctggggcttcttttcaagtcgcaataacagatgactgtgacaagatggatatgtaatcacctgatttatcccttaaccctgctccctggagca

SEQ ID NO: 489781 - DNA, 577 bp, Homo sapiens
ttagagttgcatccctgttctctgctcaccctgaggtaggcccagcctctggggttgtggtttgagcaggatcagcgctccactagccacctagtttctttgagtcttgagcatcctgtttttcccaggcagccagagtcccctgatttcttttctgcttttttttgttgttgttgttttctaatttagaaacagggttgcactgtgtcacccaggctggagcacagtggcacaatcatggctcactgcagcctggacttcctgtgctcaaacagtcctcctgcctcagccttctgaggagctaggactacaggtgcamaccaccatgcctggctaatttactaactttttgtggagatggggtcttgctttgttgcccaggctggtctcaagctcctggcacaagtgatccacctgcctcagcctcccaaagctctaggattacaggtgtgagccaccacaccgggcccagagtccctgatttctggggcttcttttcaagtcgcaataacagatgactgtgacaagatggatatgtaatcacctgatttatcccttaaccctgctccctggagca

SEQ ID NO: 489782 - DNA, 539 bp, Homo sapiens
ttttctccatctcttcttatgtgtgtttatttatttattttatttcccagaaaaagacagtcattattcttggctcgcaggatataataaagatcaaggtcttttattgccttaccttcgattctggtgcacaagtgttcgcagaaccaagctgggtctcgctgcgttttcttggggcccaataataagaagcagacaaactaggaaagaagggaatttattgctgtaaccggatgcagggagaaggccagagagaattccaccagaccaactcaaagtgttacaattttcttagtgctaatataggttgaggttatgcgcctgcgtgcagtatagcattgcctaagtctattggtaacgaattttgtttcaactagaaggtcagaggcaaagaaatgcttsctaagttcgattgagctgtgaggccccagtaccttcaaggcccgtctactgtggcaccggagtgatcatttctacttcatctcctttacagcttggcccagagagctaccttagaccctccaatgaatctattcaaa

SEQ ID NO: 489783 - DNA, 496 bp, Homo sapiens
tgtgagtagccatcaatactagtgtgaaggaaggaacgaggtggagtggatgaggcagttagaaacttttcagtggcatgtcttgaaagcccagttaaagaagaaaaatacccaaagagatgggacatctgtgaaaggcttgttaatttccagataataaatctgctgtagtagatgaaatatgctggataaggggaaggtggaaaggggaatctaaggtcgggcccaggtggtctgtgtgtgggggaaagggaaggacacagggctgccccccactgaggaagtggtgtcaggctctgcacattctttgaccagcccgataaatatggcrgggagggtaggccacacttgtgctcaaagccagccattcaatgacatcccttccagcacagaatgagatcaaaatccatggtgtggcatgtaaggccctacaggctctggcctttacctaccatgtagcctactgctaagtctgcttcactacagggacctccgg

SEQ ID NO: 489784 - DNA, 664 bp, Homo sapiens
cctttggccctgactctgaaacttaaataccctaaaatgtatcctctgatttgctttgctttgtttccttatttgcaatacacatgtaaataccagtctttatttatacaaattaaaaaactcattcattaccatgatcgaaaatagatatcaaagatattgattaagtagacattaaagccaaaggaagaggatgtaagaaataagattaagtcagatataagaaaagtacaaaaaggcattttgaaattctagaataattgttatagggaagcaatacagatattttactataaagttttcatctctcaatttgtgaagcataagcaagtccatgattcaaagcaactgtaggaaactaaaacaaacaagtaaacaaaaacatgtgttaagatttactaaacaaccatagagaacctacaggctggacatgtattccatggctggctggccacagaaatattcatttacacrtataagtaataaatacacataagagttttgacaaatgatccgggagggagagctacatcagtgcaatgaaccccaaacccccacttattaactccaataaaagaaggttaaaaatgcaaggttacatatttttaaacaactattaggtaaactctaagaataataatgacaatgactatctagaatgaca

SEQ ID NO: 489785 - DNA, 285 bp, Homo sapiens
atggctggctggccacagaaatattcatttacacgtataagtaataaatacacataagagttttgacaaatgatccgggagggagagctacatcagtgcaatgaaccccaaacccycacttattaactccaataaaagaaggttaaaaatgcaaggttacatatttttaaacaactattaggtaaactctaagaataataatgacaatgactatctagaatgacatgatattttctagtacatggggcctaagtgaactctgcatttaatgtatagtcagctaag

SEQ ID NO: 489786 - DNA, 390 bp, Homo sapiens
tgcagcacaccaacatggcacatgtatacatatgtaactaacctgcacgttgtgtacatgtaccctagaacttaaagtataacaaaaaatatatatatattataaaatctattcatttttctgtttttctggtcgacagagcaaatacaatcttttttcaaaaaaagtcttgaaattcatactcaggataagaaaaaawtatattctctgcacatttttcaaaaactgccactaaaagaaattttatacctattgtttttattccaaaatgtgtactgcagaaatgaaatatgtcaggagtattactgttaatgctgggcaaataaaataagagtggcagtgatattcataacagacatatagaagtgttgtgaaaaattttactgccag

SEQ ID NO: 489787 - DNA, 515 bp, Homo sapiens
ccagctattacatttccaaacaattgtttgggtctgtaaacatgctatctatcaatcaaaccatatatatwtttttttctctcagtctttgtctgagggttctgtgtagccatttgcctttgctgacctcatctgccaatgagcaggctgagttctcaggcagttttggttgggtattgcttttcaggaccaggaaggagggcccaaagttagacgtagtgtctaaactcacatcaaacctaaatatacacttatgaataaatataagacatcttctccagtgagtctcaatttctattcacagtagatactgtccataacttaaccgtactaaaatgtttacattctccagtaagtacccttctatcccttgtcaaggggaaaatcaaacaggataaagtttaaagacaaaaaaaatttcctggcagtagtccatggcctctatcacattgtccatttggaatatttcttcggctttatggtttgtccactgatttccataatccagtcctatc

SEQ ID NO: 489788 - DNA, 555 bp, Homo sapiens
acacccaatgggataattgcctacagagaggagccacccactcctctgagctgttccaacacaataaaactctttttcacccttcacttgtctgcatacctcattcttccctggatggaggacaagaattcaggcaccatggccatagaggtttctggccagaaaaattgacaccccagagatcctgtaacaataatctatttctaattcagaaacacaaaaagatttcataaaaattaagttaacagataacatttttctgaattttaagttgtattaattcttcataaatttgatgcctcatgacatatctgttaagtattagtacacaacagtgtactattgtgtactaatactgtttacactttttcttggacataactttgcctggtctggctgcagaccctgcacggagtttgctcctgtgtsggtggagtggccgcctggatcccacacttgtttactgacgtgctccctgccgcaaggggttgagcacagcaggccgagtagacagggtgcccctgctgggagtctggcaaagggtctgagagaaat

SEQ ID NO: 489789 - DNA, 295 bp, Homo sapiens
cccgccgctgcactgcggcgcccgtgggtggggattccgccccggggtggggaccccgcggtcccgctgctgggggacactgggggtggcgaccccggtggccggccacctgcgacaggtgtccgctgcgtccctcggagactggggccccaccctcaccccggggcctctgaggcggggcgggagggcaggcgccraggcagagtggggagagggctgccagtgtctatatatttttcatacagcaaatgctactaaaatggctgctgcctctctgtttccttagaaacccatg

SEQ ID NO: 489790 - DNA, 602 bp, Homo sapiens
ttttcacactaatagagaaaattaccacaaacgaattttgaatgaattatggtcacccagtgtttgttacaatttccttttcatcagtaatccaatatggtctcctacatatttcaataaatggatgactttatatagtgaattccacagagaaaatagcacaggaaagagagaatgtgactaaaaatcatattgattatattgaaccaagagcatgttgacttgaaggaagtaaaatggagaattgtcatttaaagtgagacacattaaatcttgactgggcaataaataataaggagctgagctctttcgcttaggtgacactaactttcaccttaaaaatatgatagtgccacagctagtaaagaagatatatttattggcattttgggactaaaagtactagtttggttctagagatagaagataaytcaggaagcttagaagaggtcaacctgggaagacaggattctttctccccacccgtggctctgcaggaagcaataccctcccctctgggcaaggtcgaccctccaagtccagatgagaagagttccctctgtctgctctttcctctgcctgatgacccagaggctttgcag

SEQ ID NO: 489791 - DNA, 583 bp, Homo sapiens
tgcaatataaacatccttattttttaatttaaggggggccagctttttctaatttatagaaaagcactttctgaactgtgacagctcaccttgtaggatatgcctagaattttgaactgcagcttatacatgttgtaggaaattcaattcctctttgaasaacagttttattgtagcgaaaaaagtggaaaccaaattgtagtggataaaaaattgagaaaaaggaggaataagggaagattgtcttctaaagttgttttgctggtcatagagaatgactaaagtccattagattagtttttttttttctgtttgctttgtttgggtttagacagaaagtaaccaaagagcaagatatgatgggaaaatagttgacttagagaaaagtgataagaaaacagttttgtaagtgttggagggaatcagatgatgctgacaataatggtgatgcctttgactattaaaatggtgttatctctcatttatggaattctatctataggcagttttagagggaagatactattctcaactgtcagatgagaaagtgatgcttagaaaggttaacgggtccaagttcaca

SEQ ID NO: 489792 - DNA, 583 bp, Homo sapiens
tgcaatataaacatccttattttttaatttaaggggggccagctttttctaatttatagaaaagcactttctgaactgtgacagctcaccttgtaggatatgcctagaattttgaactgcagcttatacatgttgtaggaaattcaattcctctttgaacaacagttttattgtagcgaaaaaagtggaaaccaaattgtagtggataaaaaattgagaaaaaggaggaataagggaagaytgtcttctaaagttgttttgctggtcatagagaatgactaaagtccattagattagtttttttttttctgtttgctttgtttgggtttagacagaaagtaaccaaagagcaagatatgatgggaaaatagttgacttagagaaaagtgataagaaaacagttttgtaagtgttggagggaatcagatgatgctgacaataatggtgatgcctttgactattaaaatggtgttatctctcatttatggaattctatctataggcagttttagagggaagatactattctcaactgtcagatgagaaagtgatgcttagaaaggttaacgggtccaagttcaca

SEQ ID NO: 489793 - DNA, 583 bp, Homo sapiens
tgcaatataaacatccttattttttaatttaaggggggccagctttttctaatttatagaaaagcactttctgaactgtgacagctcaccttgtaggatatgcctagaattttgaactgcagcttatacatgttgtaggaaattcaattcctctttgaacaacagttttattgtagcgaaaaaagtggaaaccaaattgtagtggataaaaaattgagaaaaaggaggaataagggaagattgtcttctaaagttgttttgctggtcatagagaatgactaaagtccattagattagtttttttttttctgtttgctttgtttgggtttagacagaaagtaaccaaagagcaagatatgatgggaaaatagttgacttagagaaaagtgataagaaaacagttttgtaagtgttggagggaatcagatgatgctgacaataatggtgatgcctktgactattaaaatggtgttatctctcatttatggaattctatctataggcagttttagagggaagatactattctcaactgtcagatgagaaagtgatgcttagaaaggttaacgggtccaagttcaca

SEQ ID NO: 489794 - DNA, 627 bp, Homo sapiens
ctgaaagtgaaactgttaaacctttgatgacatcaatttgaatttgcaacgttttaaaattgtctagtttgagccatggtagagcaaatgacaagtttctgaaagatttgagagccctggctagagtagctatggaagactatgaggaaaagataagagccacggaggcatagagcaggatggccaggtggggacccaggtaagcacaattcattctgcttaaatggggaaatgaggctttgagtttctttgrtatggatgtcactgtgcaagctggatgatatttgggcagagaataaaatgggtttaatacactgtccaggaaaaacgtttgtctgggtctgtccctaccctctatctgacaggtagctggttgttgttatctcctgtagcttcttgtactatccaggctcagaaggactcctcaccatggttagaaatcaataaaggcatctgaagttagttgagaatagcctgtgaataccttctcagtatcctttccttttggttagatttgtcctaactcacgcattacatcacacattcactgagcaaatatttatagagtgctgactttatgccacacactgttcaatgtgtttggatataacagtaaacaaagaagca

SEQ ID NO: 489795 - DNA, 627 bp, Homo sapiens
ctgaaagtgaaactgttaaacctttgatgacatcaatttgaatttgcaacgttttaaaattgtctagtttgagccatggtagagcaaatgacaagtttctgaaagatttgagagccctggctagagtagctatggaagactatgaggaaaagataagagccacggaggcatagagcaggatggccaggtggggacccaggtaagcacaattcattctgcttaaatggggaaatgaggctttgagtttctttgatatggatgtcastgtgcaagctggatgatatttgggcagagaataaaatgggtttaatacactgtccaggaaaaacgtttgtctgggtctgtccctaccctctatctgacaggtagctggttgttgttatctcctgtagcttcttgtactatccaggctcagaaggactcctcaccatggttagaaatcaataaaggcatctgaagttagttgagaatagcctgtgaataccttctcagtatcctttccttttggttagatttgtcctaactcacgcattacatcacacattcactgagcaaatatttatagagtgctgactttatgccacacactgttcaatgtgtttggatataacagtaaacaaagaagca

SEQ ID NO: 489796 - DNA, 641 bp, Homo sapiens
ctgaaagtgaaactgttaaacctttgatgacatcaatttgaatttgcaacgttttaaaattgtctagtttgagccatggtagagcaaatgacaagtttctgaaagatttgagagccctggctagagtagctatggaagactatgaggaaaagataagagccacggaggcatagagcaggatggccaggtggggacccaggtaagcacaattcattctgcttaaatggggaaatgaggctttgagtttctttgatatggatgtcactgtgcaagctggatgatatttgggcagagaataaaatgggtttaatacactgtccaggaaaaacgtttgtctgggtctgtccctaccctctatctgacaggtagctggttgttgttatctcctgtagcttcttktactatccaggctcagaaggactcctcaccatggttagaaatcaataaaggcatctgaagttagttgagaatagcctgtgaataccttctcagtatcctttccttttggttagatttgtcctaactcacgcattacatcacacattcactgagcaaatatttatagagtgctgactttatgccacacactgttcaatgtgtttggatataacagtaaacaaagaagcaagatgactgctatt

SEQ ID NO: 489797 - DNA, 641 bp, Homo sapiens
ctgaaagtgaaactgttaaacctttgatgacatcaatttgaatttgcaacgttttaaaattgtctagtttgagccatggtagagcaaatgacaagtttctgaaagatttgagagccctggctagagtagctatggaagactatgaggaaaagataagagccacggaggcatagagcaggatggccaggtggggacccaggtaagcacaattcattctgcttaaatggggaaatgaggctttgagtttctttgatatggatgtcactgtgcaagctggatgatatttgggcagagaataaaatgggtttaatacactgtccaggaaaaacgtttgtctgggtctgtccctaccctctatctgacaggtagctggttgttgttatctcctgtagcttcttgtactatccaggctcagaaggactcctcaccatggttagaaatcaataaaggcatctgaagttagttgagaatagcctgtgaataccttctcagtatcctttccttttggttagatttgtcctaactcacgcattacatcacacattcactgagcaaatatttayagagtgctgactttatgccacacactgttcaatgtgtttggatataacagtaaacaaagaagcaagatgactgctatt

SEQ ID NO: 489798 - DNA, 574 bp, Homo sapiens
taaaatctgattgtcattgcaaacttatgaggtaaatgttttcgctttgagtctataaatggaaactgaggctcagaaagagtgatcattatgactaatctttattcagtgttttgtgtatcataggtacttttctaagcacctgatatgaattagtccatttamttctcacaacaaccccatgaagtaaacaacattattctcacttcatggaggagaaaacaggcaccccaggagataacttattcaagcttacacaacttgtgtcagagccaggattaaaacctaaatggtcttgctcgcaagtctataccggtaactattaagctggcttgcccctatgggccaagggacctgtgcaggttgatttattcgtggtttcaaagcttattagtatttgttatggtcatgtttctttaacgtagacagcataactcaatgcagctattttcagcagaaagagttctattaaaggtggtagatagctaccacaacgataaaatggcttttatgatatacagactaaaatttcaggaaagattcccagagccacaccttggaactaatacaccca

SEQ ID NO: 489799 - DNA, 658 bp, Homo sapiens
ttcttctcctatagaagtcttcctcgtggctgactgcttgaaaatttagccaggtgttaaaggatcaagactggaagtgactggtgaaccatttgcagtggttccaaaggagccctgcaatggaaaagaaaggagagagagaaactccatgtgtggaagcttgatctcctttgaaaagagctcagcttaaaggatgatatcatggggactgtcaacaggaatcagagatgcatatccaagggcagaatctaatttcaattccaggacgtttcatgaaacagaatgcaaagcaacaattatctgctaaatggaaaattaaaggcataaataaagtcaaagctcaaaccagtgaggcaaaaatcacacgggctccaatttccttttgctgcttgtagctgcaagtttgaaaggaaggacacatggggatagtaaaaatatgagagcaatggaccacgtttaatcgatagtgaaggctctgatcccacaaatgctccccttcccactattagcccttccccacctactgccaaaacccagcaagctgaatggagcaagacrtctgagaaagaggcccctgttctctccataggaacttcactttcctataaatgtgctccagcactgagtaagttctggtaaaaaagagctttatttcccc

SEQ ID NO: 489800 - DNA, 609 bp, Homo sapiens
gcacagtaagtgctcaattaatgattgttgaacaaacgaatgaacattagatgaaaacatacttaaacaagcacataaaccaattcaagtgagatgaaattgaaaactacagacaatcaatttacatacagaaaggactcttccrtattttgtgagtaaatgatgtgtgtgcattacagacacatattccaaacaaacatgcacacatgtactaatacacttagtttctccacttgcaactcaactgtgattttcctatcagagagtagtattttcctagactccagaaataacactaaggcaacatattaaatggtgtgttatacaaatgctaagtaccccacaaattcagtgttacctagccatttcataaacaaaatttaaaagtcaattggtttaattgaactgtcaaagtaggtcaaactgaaagggcagagattatatataaatagtccaatgtctgtcagtctcagggagctagtcattagatgccaatctgatcataattaatatgttattaaaatcctcacaaaataaattgacttgatttaaatcaaagagttgaagtcatgcaagggcaatgaagagaaaaaatgttagggcaaagtt

SEQ ID NO: 489801 - DNA, 552 bp, Homo sapiens
ccaacttaatagctaacttaagaaatcagctccaaaatggaattttggaatgtaagcaccctggaaattttaattccctttgaggaatactacaagcaagccagtctaatttcaatcttaatgaagtggaggacwtgagctaaaataaatgttacacacacctggcatagaaaaacatccttttttcaaaaacaaaagacaacatatgaattgggtattttccatgatttaaaggggaaatgcattttttaattaaaaattaaaaaatgctaaaatttagaataaagaactaaaatggcacatatgcaaatattaaagacaactgtaatttgagaaggtgtatgtcttaggccgttcaggttgctataacaaaatattataactgggtaccttacaaaggatagaaatttatttctcacagttctggagcctggaaatctaaggtcaaagcaccagcagatttggtgtctagtaagggcctgctttctggcttataacattgtgccttcttgctgtgttttcatgcagttgaaagggcaaggttctctggat

SEQ ID NO: 489802 - DNA, 552 bp, Homo sapiens
ccaacttaatagctaacttaagaaatcagctccaaaatggaattttggaatgtaagcaccctggaaattttaattccctttgaggaatactacaagcaagccagtctaatttcaatcttaatgaagtggaggacatgagctaaaataaatgttacacacacctggcayagaaaaacatccttttttcaaaaacaaaagacaacatatgaattgggtattttccatgatttaaaggggaaatgcattttttaattaaaaattaaaaaatgctaaaatttagaataaagaactaaaatggcacatatgcaaatattaaagacaactgtaatttgagaaggtgtatgtcttaggccgttcaggttgctataacaaaatattataactgggtaccttacaaaggatagaaatttatttctcacagttctggagcctggaaatctaaggtcaaagcaccagcagatttggtgtctagtaagggcctgctttctggcttataacattgtgccttcttgctgtgttttcatgcagttgaaagggcaaggttctctggat

SEQ ID NO: 489803 - DNA, 624 bp, Homo sapiens
cacagcatccctatcaggtaggcaggattctttccccccatttcactggtgacaaaatgggctcagaatggaatgatgatctgctatggttaggagcaggaatggagactggcacccaggtctttcccttgtctctttttccttagcccctgcccctcaatactggagccacaggtactcagcccctcaacccactgtactctgaaactcaccaaccccaggatcaagcttctgagccatctgtgtttccttttctcctccaygctgcatgctgaaatctctaggaatcctagagattcttcttttgagatgtttccaaaacacctcccttcttcaatcccactgccactcatgctggtacagaccctcggctcatgacaaccaggcttcctacattgagcaggcacccaagtagtgtctcaggcccaggtcctctttctgtcacccctcacatcagtgccagatgagtgatccctcgcctcactctcctgtccttccctcctgagggagcaacaatcactcccctgccatactaagtcagttccatgttcctttcttggtattcaaagctctttagctgacccactcaaacttgtcttcctactcacagtcagaactttgggt

SEQ ID NO: 489804 - DNA, 515 bp, Homo sapiens
ttaactcttcacaccaaaggagacaaatctacgggtctaatctggtgctaaactctggctcaaccaagctttccaactgttttcctgtggtgcctcagagctccttagggtgaggagtgaggggtgaggggtcctcgccctatctataaactgggcagccctacttttgtttttcagattgactccacacacacattgatgtgaagaaggaatgcgaagcccatgcacgctgaccctgttcggtccccttgttttgcagatcaggaaaccaaagtccagagaagaacagggtcttgtcccagacatgtggctgagttggaaccagaatccaatcctaactcggctgcagcagactgtgtcaattagcattagctaagggtggtaacaccacyaccgtcacatcctttgctgctatcagaggataaccccagtttactgtggccttagcgagtaccagaaacttgttcaaaaagcgtgttttaatctcatttaatccaaacagcagttctacaagg

SEQ ID NO: 489805 - DNA, 504 bp, Homo sapiens
caaaggagacaaatctacgggtctaatctggtgctaaactctggctcaaccaagctttccaactgttttcctgtggtgcctcagagctccttagggtgaggagtgaggggtgaggggtcctcgccctatctataaactgggcagccctacttttgtttttcagattgactccacacacacattgatgtgaagaaggaatgcgaagcccatgcacgctgaccctgttcggtccccttgttttgcagatcaggaaaccaaagtccagagaagaacagggtcttgtcccagacatgtggctgagttggaaccagaatccaatcctaactcggctgcagcagactgtgtcaattagcattagctaagggtggtaacaccactacmgtcacatcctttgctgctatcagaggataaccccagtttactgtggccttagcgagtaccagaaacttgttcaaaaagcgtgttttaatctcatttaatccaaacagcagttctacaaggcag

SEQ ID NO: 489806 - DNA, 577 bp, Homo sapiens
cacaaaaaagaaaaatgttcagggtgatagcttcgtgttttgtctaattcttagggtcrttttcttattcttcacagaaaactttttgtttacaaaagagctttgtattcaaatggtgctttgagagttgtaaaaaggagtaagaggccgggcgcagtggctcacgcctgtaatcccagcactttgggaggccaaggcgggcagatcatgaggtcaggagatcgagaccatcctggctaacacagtgaaaccccatctctactaaaaatacaaaaaaattagccgggcatggtggcgggcgcctgtagtcccagttacttgggaggctgaggcaggagaatggtgtgaacctgggaggcggagcttgcagtgagccgagatcgcgccactgcactccagcctgggtagagcgagactctgtctcaaaaaaaaaaaaaaaaaaaaaaggagtaagaaatcatcatattgtatttgttcccataatttattactgatacctcttatgatccttgtcttgatgacgcagggcttcatgggccaataccacagaagaaggccacataagaaaaaatgagta

SEQ ID NO: 489807 - DNA, 577 bp, Homo sapiens
cacaaaaaagaaaaatgttcagggtgatagcttcgtgttttgtctaattcttagggtcgttttcttattcttcacagaaaactttttgtttacaaaagagctttgtattcaaatggtgctttgagagttgtaaaraggagtaagaggccgggcgcagtggctcacgcctgtaatcccagcactttgggaggccaaggcgggcagatcatgaggtcaggagatcgagaccatcctggctaacacagtgaaaccccatctctactaaaaatacaaaaaaattagccgggcatggtggcgggcgcctgtagtcccagttacttgggaggctgaggcaggagaatggtgtgaacctgggaggcggagcttgcagtgagccgagatcgcgccactgcactccagcctgggtagagcgagactctgtctcaaaaaaaaaaaaaaaaaaaaaaggagtaagaaatcatcatattgtatttgttcccataatttattactgatacctcttatgatccttgtcttgatgacgcagggcttcatgggccaataccacagaagaaggccacataagaaaaaatgagta

SEQ ID NO: 489808 - DNA, 577 bp, Homo sapiens
cacaaaaaagaaaaatgttcagggtgatagcttcgtgttttgtctaattcttagggtcgttttcttattcttcacagaaaactttttgtttacaaaagagctttgtattcaaatggtgctttgagagttgtaaaaaggagtaagaggccgggcgcagtggctcacgcctgtaatcccagcactttgggaggccaaggcgggcagatcatgaggtcaggagatcgagaccatcctggctaacacagtgaaaccccatctctactaaaaatacaaaaaaattagccgggcatggtggcgggcgcctgtagtcccagttacttgggaggctgaggcaggagaatggtgtgaacctgggaggcggagcttgcagtgagccgagatcgcgccactgcactccagcctgggtagagcgagactcygtctcaaaaaaaaaaaaaaaaaaaaaaggagtaagaaatcatcatattgtatttgttcccataatttattactgatacctcttatgatccttgtcttgatgacgcagggcttcatgggccaataccacagaagaaggccacataagaaaaaatgagta

SEQ ID NO: 489809 - DNA, 532 bp, Homo sapiens
taacttagaattaccttgattcattgtgtttgtttctcttctaaagaaatttgttttgactgaacaggatgccattgagcaaagctattttgcctctgatataactaaaattttggaggcattgttataataaaaaattgtaaaaaaatgttagacacacagttcctctctgtacacatttttattgagaacagtttcaaacgtaaagtgtgctgatcacttttctgcttgctctccatctatttccccacttcccttggtctggccttatgtcagggggaggtctgggaagcctgcatttcccaaactccttactcactgcctttgggccagattgggccaactggaaggagattgcatatcataaagaaaaatctttttcaggagagtctctggcagtggctgtatctccttagtagtcccaggtcctgttsagactgctgatcctgctcagtggtcccgccacttgatattaccacattttccctttgctcctcaagttgttgggtaagaggggcttcctgttactgat

SEQ ID NO: 489810 - DNA, 599 bp, Homo sapiens
acctctgtaagtgcaccaggatcaagaaggagaatattattggcacctgcagaagccaccttcatctctctcattctcgaggatacagtacaatgacttctaataccatggattagttttgcctgtagaataggcaacatgtagaacatacttgtttgtaactagttcgatattacatttgttagagttattcttgttgtatttggtcttagtttgttcattttctttggtgtatagtatgccatcttatgcatatactataacatttgaatggacawttgaatgctgtccagtttggagctattacaaatattaggttggtgcaaaattaattgtggtttttgccattaaaagtaatttgcaccaacctaatagtgctgctagtaacattcctctgaaggtcttttgctaaatatatgtctatattctagagagataaatagaattctggaattctaggtcgtagggtaatgtatatctgctcagcttagtagatactatcaattttcaaagtggttgtatcaatttacactactaccagcagaatataggacttctagtttctgtatatcctcacaaacacttagaactgtttattt

SEQ ID NO: 489811 - DNA, 599 bp, Homo sapiens
acctctgtaagtgcaccaggatcaagaaggagaatattattggcacctgcagaagccaccttcatctctctcattctcgaggatacagtacaatgacttctaataccatggattagttttgcctgtagaataggcaacatgtagaacatacttgtttgtaactagttcgatattacatttgttagagttattcttgttgtatttggtcttagtttgttcattttctttggtgtatagtatgccatcttatgcatatactataacatttgaatggacatttgaatgctgtccagtttggagctattacaaatattaggttggtgcaaaattaattgtggtttttgccattaaaagtaatytgcaccaacctaatagtgctgctagtaacattcctctgaaggtcttttgctaaatatatgtctatattctagagagataaatagaattctggaattctaggtcgtagggtaatgtatatctgctcagcttagtagatactatcaattttcaaagtggttgtatcaatttacactactaccagcagaatataggacttctagtttctgtatatcctcacaaacacttagaactgtttattt

SEQ ID NO: 489812 - DNA, 506 bp, Homo sapiens
ttggatgaagacatgggtataggctgtgtgggtgaaagcacagtgggagccatcgtacatgaaaatgatgattgaatccaaagacatttggatggaacactgacggcgtctgctccagtctaaccctctgccacacagatctactcatgccttatgttaactttattccattgtttcttcaggatagagctggtcataatttctaaaaaaagaaaaactcaaagcctttaagaagaaggtctgtgcaatgagctacaacccctcctgttgcagatagatattgatcacttatttcccatcccactcatcctagattttgtttacccttggccagcacttatgcagatctggtggcttgyctagtgggtgatccagatattcatacctgtaggggctgggatgtgattactatgcttttgctgtaattgcttgtttgtagttgaaactgggcaaaagacccagagatgtctgagtgggttctgagttccagatggtcttcttcttgg

SEQ ID NO: 489813 - DNA, 506 bp, Homo sapiens
ttggatgaagacatgggtataggctgtgtgggtgaaagcacagtgggagccatcgtacatgaaaatgatgattgaatccaaagacatttggatggaacactgacggcgtctgctccagtctaaccctctgccacacagatctactcatgccttatgttaactttattccattgtttcttcaggatagagctggtcataatttctaaaaaaagaaaaactcaaagcctttaagaagaaggtctgtgcaatgagctacaacccctcctgttgcagatagatattgatcacttatttcccatcccactcatcctagattttgtttacccttggccagcacttatgcagatctggtggcttgcctaktgggtgatccagatattcatacctgtaggggctgggatgtgattactatgcttttgctgtaattgcttgtttgtagttgaaactgggcaaaagacccagagatgtctgagtgggttctgagttccagatggtcttcttcttgg

SEQ ID NO: 489814 - DNA, 555 bp, Homo sapiens
gaggagattttgcctgtcagaggcacacagggacctgcaacacctagcacatggcctggcacataatggcactcaattaatgtttactgaataaataaacaaagacatgagaaatcagccaggctgagcctcgaacaaaagtccatactcctcctgtcagtttcaaggtggccagtcacacaggtacctggcagcagccgggtgacctagatttgtcagaccttatcttatyggctttcctttctcgtgtatttacccagcacctgcccccacgatgctcagagcaggttggcctcttgtttttatagagaaagagatggacagggaggaactctcctcccacacagacacactttgtgttttttctttttttctcccgctgcgggaagaatcaagaaatatgggggcttcgagcttcaaaaagctccatgaagtctagtttcactggcttcctctctcctcaggcttcctaggtgaatgtttctggcatgaaccttaacggccctctcagagttgtacctgtcgtttggaacatttggcatctgaaggggaaag

SEQ ID NO: 489815 - DNA, 241 bp, Homo sapiens
tttgggctggaaatggggttttactgcctgttgcgagatgggacatgagacacaatcaacatgcaaatgggtaggatgtttcatcacacggaagcaaaatgtattgccgctaaaatgagaagtaacaccctraaagttatcaagacaacaattttcaatgccaaatgttgtttccagttccataggagatggaataagcacacccattacatttctcttctaattacaactaaaacccctg

SEQ ID NO: 489816 - DNA, 241 bp, Homo sapiens
tttgggctggaaatggggttttactgcctgttgcgagatgggacatgagacacaatcaacatgcaaatgggtaggatgtttcatcacacggaagcaaaatgtattgccgctaaaatgagaagtaacaccctaaargttatcaagacaacaattttcaatgccaaatgttgtttccagttccataggagatggaataagcacacccattacatttctcttctaattacaactaaaacccctg

SEQ ID NO: 489817 - DNA, 488 bp, Homo sapiens
actcttccatctgtgcaggttgactgaggtcattcctgagttgcagtatgttgagagggtaatatttctgtcttctctaactccccatactcccttgtcttccactctccatttaggagttttttgtgagttatgtccttgttgcttttgcctctttttctttctagccttgattgtgccagaagacaatgtccctattcacacactctttctgcttttctgtgggcaggaacatggaaggggtgctgatggacgtggactgtgagagcgtctaccccattgtgtaggcctctaattgaggcctggcctctgctgtgggtgaatttctgtactggaagtgagtggggctccttttacgtttctttaacaccaccctctcggtttctctcccacatgtgctgctgccctacttaaggcctccccatctccgtggaagtctctctgstgtctcttttcctctctcagctccttggggctttccttagctc

SEQ ID NO: 489818 - DNA, 385 bp, Homo sapiens
tggcagccttgatgacttacaagccctcaaggggaagcattttctcctggactccttgatgccggagctgctggtgtttcccgcccagacasatctgcatgaacacccactgtaccgggccggacacctcattctgcaggacagggtaggcaagaggaatagaaaagggaagaatgtgtaggcacgggaagggcctagcctggggtctctgtttacccggcccctgtgttctgcctgccaggccagctgtctcccagccatgctgctggacccctgccaggctcccatgtcatcgatgcctgtgccgccccaggcaataagaccagtcacttggctgctcttctgaagaaccaagggtgagtgccacaggaggaggaggaggagg

SEQ ID NO: 489819 - DNA, 607 bp, Homo sapiens
ccaatggaaaatgaaggggccgctgatcctggaaagattcaacaagacctcatcagggcagctgctacctgagactctggctctgggtgcccaaatctctggaaggccaggccagtaataaaacacagggtgcctcaatagggctttccccgctgcgtcagaaacactgkacgggaggagcctcctgaaatgcaaactcccagagtctcagagcgaggcccacgaatccatttttacctggcttcccatgggaggcaaacttccaccccggacagctcctctctgatctctgccatccaactcccatccctgggctgtgctgtactcctaacccgaaatgtctttcctgtgctgaacctgatcttcacggggcctcagagggccaggagcctgccaccccacccaacctctcctcagacagacgagcagggccacagggtggcttgctgcttaccgaacggtccaacaccaacaaagccttgggcgggtgctgaagatgccccaaaggagaggctgctgcccgatgtgcccactccaggcgcaggggtgttctgaccaaaggtgggggtggcggtgcctggaatgaagagaacagagagctggccag

SEQ ID NO: 489820 - DNA, 612 bp, Homo sapiens
aatagcagtggaaatgcaacaaatcactcgacacaatttcttatcagttgtgatttgagtgaacttctgttgctcaaaagcatgtcaattagtcacacaagaaacaaaaggtgatgatcttttggctacttacatggtatgaaaacaytgtctaaagatcaggataaacatatcagaaatatctgctgctacatctcataactttgaaactgatgcttatactgtagttctgggtgaaataagctgatacaccaaagttcttgtttagtttctggacatgtatttcttagaaaagctttatgtttgcctatttaccaccttgacagcatgttaaatagaggaagtactgcggatatagcctcatatttttcctcctgatactttctttcattttttgttgtctatttttcaactttttaaaatctattttctccttttctatatatttgatagattgtaacgtatctttttataagcttcccattctaaccgttccgagattccctccagagatatgcccttggttgatcctttttgattcttggtttctatataagtaaaatgggataaaatatttcctctttaatgtttacatttaatgtttaaatgaaa

SEQ ID NO: 489821 - DNA, 612 bp, Homo sapiens
aatagcagtggaaatgcaacaaatcactcgacacaatttcttatcagttgtgatttgagtgaacttctgttgctcaaaagcatgtcaattagtcacacaagaaacaaaaggtgatgatcttttggctacttacatggtatgaaaacattgtctaaagatcaggataaacatatcagaaatatctrctgctacatctcataactttgaaactgatgcttatactgtagttctgggtgaaataagctgatacaccaaagttcttgtttagtttctggacatgtatttcttagaaaagctttatgtttgcctatttaccaccttgacagcatgttaaatagaggaagtactgcggatatagcctcatatttttcctcctgatactttctttcattttttgttgtctatttttcaactttttaaaatctattttctccttttctatatatttgatagattgtaacgtatctttttataagcttcccattctaaccgttccgagattccctccagagatatgcccttggttgatcctttttgattcttggtttctatataagtaaaatgggataaaatatttcctctttaatgtttacatttaatgtttaaatgaaa

SEQ ID NO: 489822 - DNA, 541 bp, Homo sapiens
atgattacggtgatttaatagtggctttttagagctgtaaataggattttttttataaaggtgttgaatattggtgtgcatatctatttttaataaggataaaaattctctccaactayttccacatctatacaattcttattctcttaagttagataacttgaaagggtagaatgggcagaggactgcatccttgatcttgttgataaataaatttcctatttcactactacattttatcttaatatatgtatttataatgaatctcaagtacacccagtgcattagatatcaacccggccaaaaggtacacagaagaaagctcatctaaagtcacctgttactatgtccactacctatctctaatctatactcctgtccagtggctagggatgtacgtcttgcatatacattttaaatcagaagctgtagcatgcattttctcttgtgaaatgcaagaaatattttcactttggtaatttattattttttaatttcaatgctaaagttgttttgcaaaggccagttaattgttgcagct

SEQ ID NO: 489823 - DNA, 541 bp, Homo sapiens
atgattacggtgatttaatagtggctttttagagctgtaaataggattttttttataaaggtgttgaatattggtgtgcatatctatttttaataaggataaaaattctctccaactacttccacatctatacaattcttattctcttaagttagataacttgaaagggtagaatgggcagaggactgcatccttgatcttgttgataaataaatttcctatttcactactacattttatcttaatatatgtatttataatgaatctcaagtacacccagtgcattagatatcaacccggccaaaaggtacacagaagaaagctcatctaaagtcacctgttactatgtccactacctatctctaatctatactcctgtccagtggctagggatgtacgtcttgcatatacattttaaawcagaagctgtagcatgcattttctcttgtgaaatgcaagaaatattttcactttggtaatttattattttttaatttcaatgctaaagttgttttgcaaaggccagttaattgttgcagct

SEQ ID NO: 489824 - DNA, 574 bp, Homo sapiens
tatttttattcagaattttgcatgtatgtccatgaaagctattgatctatagtcttcttttcttataatatttcttatgatcaccaagtctagtaaaaaattakattattatatatgagtgaatctcagatttatatgtgaataattcatctatgtttacttaggtaatttcccttactaatcctaaaataatacttgaggtagcaggagataaccaactttaaaattctgtatctgcattatgatttccatttcttatataaaatatttaaatatagacatctgagatgcagtcttgctctgtcgcccaagacggagtgcattggcatgatctctgctcactgcaacctccactccctggattcaagcaatcctcctgcttcaacctccttagtagctgggattacaggtaggtgacataacacttggctatttttgtatttcagtagagatggggtttcactatgctggccaggctgggactacaggctcacaccaccatgcctggctaatttttgtacttttagtagagatggggtttcaccatattggttaggctggtctggaacacttg

SEQ ID NO: 489825 - DNA, 574 bp, Homo sapiens
tatttttattcagaattttgcatgtatgtccatgaaagctattgatctatagtcttcttttcttataatatttcttatgatcaccaagtctagtaaaaaattatattattatatatgagtgaatctcagatttatatgtgaataattcatctatgtttacttaggtaatttcccttactaatcctaaaataatacttgaggtagcaggagataaccaactttaaaattctgtatctgcattatgatttccatttcttatataaaatatttaaatatagacatctgagatgcagtcttgctctgtcgcccaagacggagtgcattggcatgatctctgctcactgcaacctccactccctggattcaagcaatcctcctgcttcaacctccttagtagctgggattacaggtrggtgacataacacttggctatttttgtatttcagtagagatggggtttcactatgctggccaggctgggactacaggctcacaccaccatgcctggctaatttttgtacttttagtagagatggggtttcaccatattggttaggctggtctggaacacttg

SEQ ID NO: 489826 - DNA, 561 bp, Homo sapiens
gacatgacttggatgaaaaaatgccaaaatattaccttgttttaaatgactcttgctttatagtcatagcctgcacatagcatgaactagtcaccagtattcacttcaaaaatccatgtcaacacgagacataaaaatcartaaatggaacatagaattgaaaaaaaataagtttaatctcttacatattttctaactttgttttgataatctgctctgggtgaatgctgacactgtccagcttgttttgagtttgcttgatgtgccagactttggttaagtggttttcaagcactaattaatttaaaccaacaaattcatgagcttggtgctactgttatccccattcctcacgacaaaacttaatatcagagagcttatatacctgaaccaaggtcacacaataagtagaagaacaggaattcaaacccaggtctttctgaaatcaagtctgtgcttgaaatgtccctaaaaattactaagtgatcatattgatcttatgatttagaaggtctagagtgcagcatgaatttctttgtttgtatcaagctctcatgtgat

SEQ ID NO: 489827 - DNA, 447 bp, Homo sapiens
ctgggccctaaagggattgggatgatatctcctcacgttggtgaaagtggatcttctttactaagtatgctaattcaaatgctaatgtcttcttgaaacagacctcaaattcacacccagaaataatgttttaccagctggttatcccttaatccaagttgacaagtaaagttaaccatcacattaggacgggggacaaggaagggaaacctaagcagagcctggtagactccttaaattgaagaggtagggagaagagttcagaaaaacaaaggcagctaaagtttgcagggcagagtaatgcaacagaactctaaagatccacagaatttcccccttgggtattcagtagaagagtgatgagtgcatggctatgaggaaactctctgagkcaggcaaggaggctcacggctgtaatcccagcaatttgggaggccaaggcaggtg

SEQ ID NO: 489828 - DNA, 557 bp, Homo sapiens
tgagtctgtagtgtttataggcacaggatgggggatggggtaggccatgggtaaaaagcaggaagacaaggatagaagttctcactttgagcyggggtttcaggcttttcggcttgagggtgggattttgctggggacctgctacttttctgcctagaatttttctgcctcctgcctctatcattgtatcacctccaccagtcctagctaacctgatgtcctcatctggatatctgactcaaactgagctagtcatttaattaatgggctggtgttggctatgctgctaatcatcaaaccaatttcagtaattccatcaatacaataaagacattttatccaaatttgctgagccagtggttggctaagattcagatatggaaatttctgattctgttttttacataaattgtatcttgtgacagtgataggaaaaagatatcagcaactttaattattttagaggttttcaatatttcttagctggagaattttggttcaaagaaaattttactgtaaagtcctttatgttaaacacacaaaaatacagttgcttc

SEQ ID NO: 489829 - DNA, 663 bp, Homo sapiens
tgaaaattaaaagtattgtaaatacctcatttaattacaacctgttctcatgtctaaatcttgtcataatatattctggcatataattttcagatttttgcatttttttcaaactgcaaatgaataataattgttataagaagctacattcttagcgctcacattaccttactgactaattggtttatattgaatggattgacatcttcaactgacacagatggagattacagtggaaatctagataagaaaatgaaaggatgacctgaaagaagtctatatatatatatatatatatatatatatgcatatatgtacacacactatcttagaatatgtgtgaaaaagtaatcaaaactgaaacaagacaactaactcctcatagatatgccatttttttcattatataacatgcatagcaagagattgtaggggatgaatctgaaaagataagcatggacaaccttgccagtattattaagaaagttgacttaattttatgtttataggaatgctttgatatctttaagccagagaatactatatatcagatttgcatttgtaaaatgtcrcattctggctgtattgcgtagatagagtagaaggaaaagatgaagcctggatgaagcagagcaagtgagccccaaaattggggcttagcct

SEQ ID NO: 489830 - DNA, 612 bp, Homo sapiens
agatgggatgggttcgaaacattttgccagctttgtctttacatggaattgttgtaasctggaagacaccaactttacaaagaggttaaacaagcaagggccaaaaattagtagcaacacaacagataacaaaggtcctaggaaaggtcaaaaccaggtaagacttggaaaggccattttgatagctgaccagatatagttgggatcagtgccctggttatatctatgtatccaggtagcttgttcatcattttttgaatggtaatctccatttgttcagagttattaatataggtcatggtccttctcttgaacttgggggactcataagaaacaggattaatcctgaacaggtgtacctagctagtgattctctgaagtttaacagcattagggatgtttaacaatacctaacataggctattccattttagttgtaattgatcctcaggaaatccttctttccaggtttttattgggactagatctcctggttgagcaggggagctaatcttttcctttgtggtaaagggcaactcaatttccatactcttggaaggccttttgaacttggcctaaattccaatggaaggcatagttaggaatgtccaa

SEQ ID NO: 489831 - DNA, 652 bp, Homo sapiens
tttgtttttgctgatctattctttattcctttgcaacttaaaaagctcaagactttgtaaaaatgtgatctaaatattcttgagaagaaaatatgagaaaagtcattattctacctaaataatttttacttccttttggaagctttagaaactttagctaaggacatatactttttaattttaggtgggggccctaaaattactgttctttctctaagcacccacaatctggagtttgggtctgcattttgggagaggtaatttattgcatattttacattctcaagtcatttccctaacagaatccttaaagatatctgaatcagactttctgtatgatttttgaggataatagtgcatcactgatttcaaatcctgaccatatggatacaaaggaaaatctcacgaagcatgaattttgctgtaatccaagaaaaatcattaactatgtgaagatccatttaaagagaaacattcttcttctcataagagttttttaaagatgattttgtcctttgattttgatcctagaattaaactttgcatgagttatttttaaatgaagaaacagatcccaaacttctctgcactcttaataaayggacagttatatttattttctggtatttaagtttagaaatgtgatggccag

SEQ ID NO: 489832 - DNA, 492 bp, Homo sapiens
aggtgacctctgctcttctgaaggtcacagtcaagctggggagacagatggtacaggagatcccagaccaacagagtatcgccacgcgtggcaatgatggctccgcaggaaacccactaggcatgagggtgaagatcagggctaggaccgctttggaccggaggtgctctctgacaggtctttctgagcasaggacatttcaggcaagtcgaggatgaagcagagaggctgacagtgaatagcgggatgcgtgtcctgttcatctgcagagccatgagctgggctgctgggttagggtgcggtgtgagaggatggcttcctgttcaggagttggactttctcccaagtgcaaaggctaagtagtgtgctcagaaatccagtgatggagtgcctctgcctccactcagcgcctaatacaaatgtgctgaatgagcaaaaaacaaatacagtagatggatgttgcatgctcagaaacattccattttattttat

SEQ ID NO: 489833 - DNA, 492 bp, Homo sapiens
aggtgacctctgctcttctgaaggtcacagtcaagctggggagacagatggtacaggagatcccagaccaacagagtatcgccacgcgtggcaatgatggctccgcaggaaacccactaggcatgagggtgaagatcagggctaggaccgctttggaccggaggtgctctctgacaggtctttctgagcacaggacatttcaggcaagtcgaggatgaagcagagaggctgacagtgaatagcgggatgcgtgtcctgttcatctgcagagccatgagctgggctgctgggttagggtgcggtgtgagaggatggcttcctgttcaggagttggactttctcccaagtgcaaaggctaagtagtgtgctcagaaatccagtgatggagygcctctgcctccactcagcgcctaatacaaatgtgctgaatgagcaaaaaacaaatacagtagatggatgttgcatgctcagaaacattccattttattttat

SEQ ID NO: 489834 - DNA, 509 bp, Homo sapiens
cccactgaaagccgagggaagggaactcatrtggcatttcctcggagttcatgctctgattctcacccattgaaatgggcattgaaatcactgctccctaactttaatgtgcattcagatctcctggagctgtgttaaaatgcagattctggttcagtaagtatggcgtggggcctggatcctgcctttccaacagctctcaggtagtgtagcaaggctggagaaaccgggcttcagactataagctaagtgaagccccatgattggcctgttttgcttactgagggtcccccagcacagcacagctcagagtgcacaggtaccctgtgtttgcataaatgaatgcaagagtgcgttctgagagaggggtgagccaggagtactgatcccggggtcagatgccatccgcagccttctgttttatttttgattggatcagaagcttctggctactgaactggccccttgcctcactgggccctgtgctgttgggaggacagcagtcagag

SEQ ID NO: 489835 - DNA, 509 bp, Homo sapiens
cccactgaaagccgagggaagggaactcatatggcatttcctcggagttcatgctctgattctcacccattgaaaygggcattgaaatcactgctccctaactttaatgtgcattcagatctcctggagctgtgttaaaatgcagattctggttcagtaagtatggcgtggggcctggatcctgcctttccaacagctctcaggtagtgtagcaaggctggagaaaccgggcttcagactataagctaagtgaagccccatgattggcctgttttgcttactgagggtcccccagcacagcacagctcagagtgcacaggtaccctgtgtttgcataaatgaatgcaagagtgcgttctgagagaggggtgagccaggagtactgatcccggggtcagatgccatccgcagccttctgttttatttttgattggatcagaagcttctggctactgaactggccccttgcctcactgggccctgtgctgttgggaggacagcagtcagag

SEQ ID NO: 489836 - DNA, 538 bp, Homo sapiens
ggtacatggattgggggtccaacctttatttattcagtttgaatctttccaaataatcgcctcagttcaataattttcaactcttctttcattttgtcccagatagatccggcctaaatgactgttttagaagaaagtggatattccaccagtcaatcaagaaatttccacagaagataaaaggcaagcagattgaatatgggaatttacccaattccaagagaatttgttgtgtcctgcaatcatttggttttacatctgtgtcccatctaggagcagtcayccagtcatttaaccaaataccaaatccttaaattgtctgcaaatacactgcggttcatttgggtagatttctttttaaagaaagtctatatattattattaaaataatagcacatgtttattagtagacaatttagaaagtatattcaaaccaaaaaataaaagaaaatgaaattatccatattttcctcctacttctaaaatatgttttgtgactcttttgttccatcatgttcccatcctcactccctctgta

SEQ ID NO: 489837 - DNA, 538 bp, Homo sapiens
ggtacatggattgggggtccaacctttatttattcagtttgaatctttccaaataatcgcctcagttcaataattttcaactcttctttcattttgtcccagatagatccggcctaaatgactgttttagaagaaagtggatattccaccagtcaatcaagaaatttccacagaagataaaaggcaagcagattgaatatgggaatttacccaattccaagagaatttgttgtgtcctgcaatcatttggttttacatctgtgtcccatctaggagcagtcacccagtcatttaaccaaataccaaatcctyaaattgtctgcaaatacactgcggttcatttgggtagatttctttttaaagaaagtctatatattattattaaaataatagcacatgtttattagtagacaatttagaaagtatattcaaaccaaaaaataaaagaaaatgaaattatccatattttcctcctacttctaaaatatgttttgtgactcttttgttccatcatgttcccatcctcactccctctgta

SEQ ID NO: 489838 - DNA, 624 bp, Homo sapiens
taaaaagaattaaattctgttaaataaatatatatttttcccatctcacttgtaatcacttaactgacttctgatggcatatacgcctaaaagtcagaaggaagagagctsacctattgtgaagaggactgagacattgaataatgaattgaatgagatcacagtgatgatgtcaggcagaggatattagcctgatgttaagactagttttctaggtccaaagtgaatccaaaaacaggtttttttctacccagggaagtgtaccttcacacaggaacacagacttacagaacatgatattaatgaaaaggacaagcagagtttaacgcctcctcccaacttctcaaatccagtgggaaagaaaaggtgtacttctagccacagagaggagatcatttcttctcaacattccaagcagggtgtggcccacgctgatgactgaggagtcatgttggggaatgggtccagctcagtggccagagggccttgagaaactggcttctttatcatcagtccagctcagggaagtcctttcatcagaaaaacctaggagatgcaatgcagcagcatgggtcaaatatttgtcccactgtctaatgctcctcagaaagacaccaggaggcc

SEQ ID NO: 489839 - DNA, 507 bp, Homo sapiens
acagtggcacatacttgtaatcccaacactttgggaggccaaggcaggaagattgcttgagtccgggagttcaagaccagcctgggcaatatagtgagaacctttctctacaaaaaaattaaaacattagccagatgtggtggtgcatggcagcagtcccagctactcagggggctgaggtgagaggatcatttgagcccaggagctcaagctgtgatcatgccactatactccagtctgggtgacacagcaagaccctgtttcaaaacaaaaaacaaaaaaaagtcctatagtaatatagagataatacccagctataaaacaaatgcatactgcaatgtgtaagataaatgtattctatatacttcctagatgraaagacaaactttagaaaagtcactaaaacaaaacaggaaaaaaaatcatatggactatgttgagtccatatgattccattatggtggaagagaaataaaatgtcataatgtattcttcaaagaaactatg

SEQ ID NO: 489840 - DNA, 551 bp, Homo sapiens
aggctggtgttgaactcctgggctcaagtgatccgcccacctcagcctcccaaagtgctgcgattacaagcgtaagccaccgcgcccggcctctccctggcttttgaatttcagaatccaggatcttcgaagaatggaaaggactcatagccatggataaaaaatgtgatctgaaacatcacgaataaaggtaagttctacccaacccctctggtacaggcaataacaaggacactggtatcacagagaaagcgcctgagcctggcaacgcgccaagccaggtgtgtttgcagcattgcaagcagtgaagccctgtgmctggcttcctggtcgagtcccagggaggtcccaggactgcagagagaggaatgcccgtgtggtgcgtggcaagcagggccctagaaagccagtgaggctctgcaggcaccaaaacagcggaactagtctccacgagaggcctgaagagaagagaggcgggagaccagaatgagcccaccatggagaagagggggtcgccatggccacctgcaaggatagaggacccaggacca

SEQ ID NO: 489841 - DNA, 413 bp, Homo sapiens
tagcacgttggcttcctcattgatctgyctagtaaacaggtatatgatatgtgtaaaatactttacattatttttattttaattaataatactgagtcattgtggtatttttatgacatggctgcaaattttctaacactcctcccatgaagcagtcagatctatgtcctctccctgttaatctgggcaggcttgtgactgctttgagaaagacggcatggtaggaatgatgccatgtgacttctgaggctgggtcatgaaagcccaggcagttttggtcttgttcgctgggacactcactcttagcactctgacccaccacaaagaaagagttctccctgctctgtggctgccacgctgtgaggaacccaagtcatctggaggagtaacatgtaggcaccaggtcaactgtc

SEQ ID NO: 489842 - DNA, 588 bp, Homo sapiens
tatcttacaaccttgtagataatatgcaaacacayaaaacagggagaagaaaattaattgtgaaattacacgctagcaattataactgtaataaccctgaggactgaagtgatcccagaggtgttcaggggaggtgggacttaagctgtgtcttgaacgttggacagaatttaaataagttgtaaagggaagatactcccagtggaggtaaatgggagcaatatgggcaaagggtggaggcaggtgtaaggagtgttaggaggaaagtagatcagtgttatctgatgaaagtagaagttgctcttcaaggagtgtgcgatatttatgttgggtgagccttgaaggcttgaaaggaaatttagggcattgatacctacctgggggagcttctgtaggttgctgagcaggtgcctgtcacaggggagccacactggaagagcagtcatgtccacaatgggccggagacaggggtgccgctacagtcgtgtgcatgtgccttcataaaggccaagacgatattggaagcagcaggaacagacaatctcccggcgagtcacaaactcagacactgggatcgcagcagcagca

SEQ ID NO: 489843 - DNA, 606 bp, Homo sapiens
ggtaactacttattcagactttctagtccagctgcatcccctccctaagcttagttgaattggtattaaccttagtatctaagaaatgttctgctcaagtacattaatcatgaaatgagcattagtgattatgttctcagttcactcggatgaggctagcagtgatctatgctacccaggcaaaagtcaaggcctgagtgaagacctcacctccgtcactgctgcctaccctctcctgcatacttgctgggtgctgccccagacgccagcttcttgctgcatttgttgtcatcaatgaaagccaggctcatgtggaagtgtcatgttatttttcttatattttgtggggaaaggacagctttagggcgtgctgccttttgcaattgagttttcatctgagagggataacccagawtcacgaatttcccaaggaataagttagagtacctttttcaggtttatctcctcacacagcaacttgagtggagcaaggtagcatttggggcccatttctgcagtgtggcctggggctgtgagatgaattcactaaattttattttccctgcatctaacagaggtttgaagaagtgatgggacaccaaattg

SEQ ID NO: 489844 - DNA, 549 bp, Homo sapiens
gaagataatttgtgaagatctagcttaagaactaacaatactagatagagcaaagtcagtagccaatgtacagtagcaaaaattttttaattaaagagaaaatgttgaggtgatgagaatgagattcatacaggcaaatgtacagtgtgtgaattgtatgttaaatttattaatttcagtgatgaagaattttaccgatatgaaagggaaaagttamaaataagaacaaatttagattgttctcaaacttttctgtaatgaaaataaaggtcagaaaactggataaattacctacagagatataaaagataagacttatgattgatgaattctgtattctgtcaacttgttatttttatgtaaagacaacagaaaaatattatcagatatgtaagggctcaaaaagcataccactctcaaacatttcctggggaaataaaaaacacaggcatgctcctcttcaagataatttatctagagattcaaagaaagagtgttctaggctctgcttcccaggaagaattgtggaatgacatcctccaggaacag

SEQ ID NO: 489845 - DNA, 549 bp, Homo sapiens
gaagataatttgtgaagatctagcttaagaactaacaatactagatagagcaaagtcagtagccaatgtacagtagcaaaaattttttaattaaagagaaaatgttgaggtgatgagaatgagattcatacaggcaaatgtacagtgtgtgaattgtatgttaaatttattaatttcagtgatgaagaattttaccgatatgaaagggaaaagttacaaataagaacaaatttagattgttctcaaacttttctgtaatgaaaataaaggtcagaaaactggataaattacctacagagatataaaagataagacttatgaytgatgaattctgtattctgtcaacttgttatttttatgtaaagacaacagaaaaatattatcagatatgtaagggctcaaaaagcataccactctcaaacatttcctggggaaataaaaaacacaggcatgctcctcttcaagataatttatctagagattcaaagaaagagtgttctaggctctgcttcccaggaagaattgtggaatgacatcctccaggaacag

SEQ ID NO: 489846 - DNA, 631 bp, Homo sapiens
tgggttttgactaaatttttccaaggtcatgcctttaacgccaatccctgatcaagggcaaatgaattaaaaaacaaaacaaaatacaacactctaattgtttagccctgtaggattgctgaccatttttaaaacgtatgtttctacatgacatgcttgcttccattaataaatatggaaagtgcaccttagaagaaaacattaaagatttttctacaatcctactgatgtctcaatgttattttccccaaggagagagaagtggaagtgattgttgctaggaggagaccctctccacctttcatgccattcttatattcagcatggcttttacttttccaattcagagtgtaggtgaaggrgcaagctatctaccagagtttattccttatttcttactgattacattgcttaattccagaagtgttggccatcgtcttttttttttttttcttcttcttttgcagtgcctctctattgcctctgaggttaaaatatactcttcctagtttctggtatgtatataaatactatcctttattctgtcatacccttgcaatatatttgtcttttattcacaagcctttgggttattttaataacaattcatgtggatggaggagggctattg

SEQ ID NO: 489847 - DNA, 677 bp, Homo sapiens
gctgggagacaggctcatggctcatggctcatggctcagggcggtgcctgccctgggccgggacccccctccccaccccccacctaggctttttgggttttgttcaaggaaggtaaagtgagaggtttaggtcagtgtttttaagtttttgttttttttttaaagcaaatcctgtatatgtatctacatgggagacaggtagacactacttatttgttacattttgtactayacgtttgtgttccaggtttcagcttccctcgctcctgttgttaagaagcgtccctgtcagcacaggtgtgcattgaggaaggggccccagggccttcgctccctcagcactggggtggaggcggcaggaaggggcggcccttacctggcaggtctgggcgcacctttagcaggtggactccgtggggctccaccagccagaagcctttggaaggcaacgaaggcaatgctgctccctgagtccagtccccgcccccaaacccagcccaggtgccttcagctacttcggcttcttaaaccctgcagtgttaaacagaggcattgagaaaggggaaaggcgggtatttttaaaagccaaagattgacccagttacttgagggtagggaggcgggcccagtgcaggaggctgcatccctggcctgctggtgcccaccgggggctgtgc

SEQ ID NO: 489848 - DNA, 677 bp, Homo sapiens
gctgggagacaggctcatggctcatggctcatggctcagggcggtgcctgccctgggccgggacccccctccccaccccccacctaggctttttgggttttgttcaaggaaggtaaagtgagaggtttaggtcagtgtttttaagtttttgttttttttttaaagcaaatcctgtatatgtatctacatgggagacaggtagacactacttatttgttacattttgtactacacgtttgtgttccaggtttcagcttccctcgctcctgttgttaagaagcgtccctgtcagcacaggtgtgcattgaggaaggggccccagggccttcgctccctcagcactggggtggaggcggcaggaaggggcggcccttacctggcaggtctgggcgcacctttagcaggtggactccgtggggctccaccagccagaagcctytggaaggcaacgaaggcaatgctgctccctgagtccagtccccgcccccaaacccagcccaggtgccttcagctacttcggcttcttaaaccctgcagtgttaaacagaggcattgagaaaggggaaaggcgggtatttttaaaagccaaagattgacccagttacttgagggtagggaggcgggcccagtgcaggaggctgcatccctggcctgctggtgcccaccgggggctgtgc

SEQ ID NO: 489849 - DNA, 671 bp, Homo sapiens
tcacaaaaagagtggatagagtgtgttatggccttttaagaggcatgagagatggtgtgataagacattgactagggtgaggtttaagcctatacctcagtgctaggactctatagaaaacattggatccttggaaaagagggagataaagcctcaacgctgaggcagacagcagggctgttggacagggaagagtgcatctaagataggtttcaacctccttatattttaattcagacaaactggtttatctcatttggcttttgagaacccaaaaggagacatttatgttgaggttactaaactgtgcatcctggagcatttctgtgaatctgggcctttcagtgttttcaggttaacaattctttacttctgtcacctctctttgttcatattaaagtacaaataccctgtggaaactattcagtaaaaatgcggccctttgaaacaagtgatttctagttaaaatcatctgaataattttgctgyttagtttttatcttgcactctatttttgtgcatcaagaaatttagacatttaaagatatgcatgttgaattaaaataaaaaagaaacacaaaatagtaaatttttgatactgtcactaagttatgatgaatttctctttcaatacttaaaattctcttaagaagtgtgaagtgttttctatt

SEQ ID NO: 489850 - DNA, 670 bp, Homo sapiens
tggcaatattgtgggttctggagccagtctgcttgagtttaaattctggctctaccacttataagttgtgtgactttgattaagttatcaaacctctttgtgctttagtttaagtagggtaacaacacttagctcacagagctgctaggaggattaaattagttatcgtatgaacaatgcctaggatacagtaaatactcaataaatgttagcgattatttttcttattttacttattaaatagtttaggtaccttacttaagattagatatttcaaaaatgttgattttgggatattgggagtttgagttcttgaactttatagccagcatacttacccactaggctttgttatgccagtattacagaattgtttgttttgagagcaccttcggatataaaataaggtgatgtagcaaaataaaagaacagatagacaagactggtcttttctcatcgtgttctacttgactttttctgatgtcagttgcaatagaaatctctgtgtgccagggaaggacaatctctgagctgagaatawatatcaatagaaacttcaaaactgtaattcagtgaagtaattgatacaatggagggtcagtgaaacatttagagggagcagaggagaagcattctgtactgcttagtgagctctgggaaaagtcacagc

SEQ ID NO: 489851 - DNA, 652 bp, Homo sapiens
aagctgagaaacagatttgggaccagtcacagtggctcacacctgtaatcccagcactttgggaggccgagacaggcagatcatttgaggtcaggagtttgagactagccaggccaacatggcaaaactccatctctactaaaaatacaaaaattagacgggtgtggtacctcacrcctggagttctagctactcaggaggctgaggcaggagaatcactgaaacccagtagacagaggtggcagtgagctgatattgtgccactgcactccagcctgggtcacagagtgagactccatgtcaaaaaaaaaaaaaaaaaagaaagaaaaaagaaacagattttggggagccctggaaaagagacagaccaatactacaaataactgcttcatcaatgggaacctgatgccaatgcctcagttgtttgtgccccactggagcccctggccctccttgcaacagcacccagattctccttatgagaactgtctctgcttaacccattcttgcggcgcctatgtaggcacttagacactccctcagactccagaatgagtacagcccacagacaagaggcatctttcttctatctggccacggactcaggcagttccaacacaaggttcttgaaggggaagtttgctctggggct

SEQ ID NO: 489852 - DNA, 431 bp, Homo sapiens
gccgaggttacagagcccagagtgatttttgacgttccacaatattccacgaacattttctgattgctcactatatgcatagattgactgagtctctgggggaaagatgtagaagacaggagttctaaaccctaggaagtgcatcaccggtagtggcgccggctgtagtcccagctacttgggaggaaaccagatccttaagtcatttctctctgcctctctctctctctctctctctctctctctctctctctstgtgtgtgtgtgtgtgtgtgtgtgttggaggggaaatggtcttccaagtgagggaacattttttaattgcatgtttgggtaggggtgggtgttggggatggtacagccagaatggtggatggtggtacgtcctgaatggtggcacagaatccattgactatgggtacatgaaactt

SEQ ID NO: 489853 - DNA, 445 bp, Homo sapiens
caccacaaaccagagctttagcccccacccccaagagccggttattaaatgtttaccagcactccactggcagaagccgtgcaagacggtgcagcctcagaggcaggatgttgggtggatcaggaactaygtcagggagagttagaggaagcaaggcagtgtgcatccctgaaatagcaaagccaagggtgtggcatgcacgatggagaggtagcggctgactctgcccaaatctctttctacaggtcctcagggatcgcactggcccaaagcacttgtgtcagctcaccttccagcatctggctcagagcctctccccatttctgtgatcaccgagggcttcttccagttgtcctgggtgtcacttggacaccttcctgcttggcacagtgttgctgctcacgctctcgctgtccctctgggcctctggaaacacgcctgcccc

SEQ ID NO: 489854 - DNA, 548 bp, Homo sapiens
ttaattgcatattttatcattgctcccctgtatgtaatgggttgttttccccttacttttgaatattttttttctttggttcttagcggtttgtctatgatgtacctaggtgtgggtttttctgtgttaatcttttttagggttcatggaacttttttttttttgagayggagtctcattctgtcgcccaggctggagctcaatggcgcaatcgtggctcactgcaacctccgcctcctgggttcaagcgattctcctgcctcagcttcctgagtggctgggattacaggcgcctgccaccatgcctggctgatttttatatttttagtcgaggcagggtttcaccatgctggccagactggtctcgaacacccgacctgaggcaatcctcctgccttggcctcccaaagtgctaggattacaggtgtgagccactgcacccggcctggaacttcttggatctataagttacagtgttttttttgtgtgtgtttgttttggggtttttttttttttaaaccaaatttgagtagtgtataaccattatt

SEQ ID NO: 489855 - DNA, 593 bp, Homo sapiens
tgcctgccacttgccctctaccacgttcacacctccaggccctggggtgtcactgcctacgatgggaacgcctccaggcaggaaggccatgaacacacagttctcacccagtgccctagcacttccccactgagcaagtactgcttaagttgttgcctgccattggtcattttccagtgtcctggaatgattatttttagtaaacgtatcacattttgcacttgataactgtagagaggaattgcctgacctactcctgttccaggaacaggagtatatgcctagggccagaagtcgttagatcctagggatatagcggtaaaagcaaagyagacatcctatttggagaaagcaagccttcaacaaataagcagagatgatagccaggtgaccatgagtgctttgaagagcagtggggcagagggaagagcaagtggcaaggtcctgaggcagaagcatattgggggccttgcgggaacaggaagaagcagggagggagttggatatgaggtcagatcacctagggcctggggaaggaccttggcttctatcctgagagaggagggaagctgttagaaggtcactttcatttt

SEQ ID NO: 489856 - DNA, 535 bp, Homo sapiens
atacattagttaatacaccggctgtttcaatgtcatgcagtatctgtgaatgaacacatggaattgagaactacaaacctagataacgataacaaaaggtccttttcacttatcatgacttcctatatttatcaagtacttttggtctcacagcccaatcactacatgcataaataattattaataatcttttctagttgcaatactattgtgtgtgtgtgtgtgtgtgtgttttcgtttgttttttgttttttgagacagagtctcactgtcacccaggctggagtgcagtggcgtgatctcggctcacggcaacctctgtctcccaggttcaagtgattcttgtgcctcagcctcccgagtagctgggactataggcacatgccatcatacccagctaatttttgaatttttagtagagatggggtttcactatattagccaggctggtctcaaactcctggcttcaagtgatctgcctgcctgggcctcccaaagtgctggatyacaggcatgagccactgcacccggcctg

SEQ ID NO: 489857 - DNA, 631 bp, Homo sapiens
taaaacactcatttatattttgagaaattagtgataagggaagacatgtgaattgttgatttagcagaggagagtatcctcttgttcccttttcctgcctctgtacttcatcatgaagaacagtaaatggcttcagcagacttttatccattgaaagaaagaatagttttatagaatatatacagcaggtcttcaaataacattatctcattataattttgatgagaaaaaaatcaattcctggtttgggcaaatgtctgtgttgagtttgcacattctccccgtgtctgtgtgggttttttcaggtactctggtttcctcgcacatcctaaagatgcacacgttaggttaattggtgtgtctacattgtcccagtctgagtggcagggagagagagagagagagagacaaagagtgtgtgtgtstgtgtgtgtgtgtgtgtgtgtgtgtgtgtttaccctgcaatggaatggtgttctgaccaggattgtttcctgccttgtgccctgagctgcctggatgggcttcagccaccctcgactctagaataagcgggttggagaatgaataaataaatatatattatcataaaattcataaagtatttgataactatacaaatacatgacaa

SEQ ID NO: 489858 - DNA, 642 bp, Homo sapiens
tttttgcttcagttcttgctcttccaactgaatttgttcttctaagtaatcttcaaaggtctgtttcctttctccaatagcagctttaatgggcctaattagaaacagaaagttatttaacatgcaaatcataatgtgtgaatattttacacttagtgtgcctggtatagaaacccttgacaacatggagaactaacttttcccaaaatcagtgcctccctttgagaacctaacaaaagccacaatccctctccacaccttaaaataaagaaacatacaacactcttcacatgactttggagtcctaagaacccttctgaagtccatctatcgaccacagattaacacatggagtaacatattcatcaaataacttyaaaatgtatttcaaaaatagatcactaaatatgcatttttttaattaagaaaggcccttaatgtgagaacaataatcagaaaagtcattttgtccatattatattaaaaattttgaaataaatttttaaaataatcaacttacttaaaatataaaatacttaatctttgccatattttaaaattctgtaactaaactgataatgcaattataattgataagtgacaccaaatgggagatgtcaatacttaatttttcccttctcc

SEQ ID NO: 489859 - DNA, 597 bp, Homo sapiens
cccccaccccacaaagacttctccacagtgacaacagtattttttccctttattaggaaatggtgtttaacaaaaccattgattgtttgagacagtctygctctgtcgccaaggctgaagtgcagtggtgcgatctcagctcactgcaacctccacctcttgggttcaagtgattctcgtgcctcagcctcctgagtagctgggattacaggcgtgtgccaccacgcccagctaattttttatatttttagaacagatagggtttcaccatgttggccaggctggtcttgaactccggacctcaggtgatctgccggccttggcctcccaaagtactgggattacaggtgtgagccactatgtctagcctgtttaaatttctaatgcagtaagttattggtaaatacagcccatataacaaaagttctttggggctctcaaatatttaagaatcctaagggatcctgagaccaaaatatttgaaaactactgctccaaagcaaactgctccatgactgcatgaggctagttcttatgtaaataactttgaaatcagcttccctgtcattctgtcatagtgcggttctacctttaaaa

SEQ ID NO: 489860 - DNA, 550 bp, Homo sapiens
catcttttcccaatccttctagttcactctaactcactagttgtatattggacatcgtatttcatgttcatgctatttatacatctggtatacttcccatgactcacagccctccttcactcccaagggataatagaccatcagagagaggttattttattttattttattttattttattattttattttgttttgagatggagtctcactctgtcacccaggctggagtgcrgtgcaccatctcagatcactgcaacctctgcctaccggattcaagcaattctccctgcctcagcctcccaagtagctgagattagaggcacctgccaccatgcccagctaatttttatattttgttagtagagacagggtttcaccatgttggcctgacttgtcttgaactcctgacatcaggtgatccacccgcctcggcctcccaaagtgctgggattacaggtgtgagccactgtgcccagcctggtgattcattttaagttaatccattcaagggtgggattcctgaggatttatgcctcctaattttatgg

SEQ ID NO: 489861 - DNA, 569 bp, Homo sapiens
tatgtccatcactgactttgccatatattaaacaattatatttttatgtgctttttccaatagatttttagccccttgagggaaaggactatattttgctatctctttcttatcaaagtactaaacaatatatataataactttctagcaatatattaagtgctcartgttattaaatgtatttttgcttcaaaacatggcaagactatctgaaaactgcaatttatttttacaggataggaaaatattctgctgtgattttgttgtttcagcttcatttgttctgctttcctctctggggacccctattattcatatactagctctctggtctttgctctcctatctattcttttctttcttcatattcattcctgtgacctttttcttcattccgatgtttacctatacaacactgatttgctgttttttgtagtggaagttctgtactttattctttcttatgaggatttaattttactcctttctttcccccgggatctgtttagtggggttttttgtttttgttttttaattttatctcgaaagagaccactttggtggtagag

SEQ ID NO: 489862 - DNA, 569 bp, Homo sapiens
tatgtccatcactgactttgccatatattaaacaattatatttttatgtgctttttccaatagatttttagccccttgagggaaaggactatattttgctatctctttcttatcaaagtactaaacaatatatataataactttctagcaatatattaagtgctcagtgttattaaatgtatttttgcttcaaaacatggcaagactatctgaaaactgcaatttatttttacaggataggaaaatattctgctgtgattttgttgtttcagcttyatttgttctgctttcctctctggggacccctattattcatatactagctctctggtctttgctctcctatctattcttttctttcttcatattcattcctgtgacctttttcttcattccgatgtttacctatacaacactgatttgctgttttttgtagtggaagttctgtactttattctttcttatgaggatttaattttactcctttctttcccccgggatctgtttagtggggttttttgtttttgttttttaattttatctcgaaagagaccactttggtggtagag

SEQ ID NO: 489863 - DNA, 569 bp, Homo sapiens
tatgtccatcactgactttgccatatattaaacaattatatttttatgtgctttttccaatagatttttagccccttgagggaaaggactatattttgctatctctttcttatcaaagtactaaacaatatatataataactttctagcaatatattaagtgctcagtgttattaaatgtatttttgcttcaaaacatggcaagactatctgaaaactgcaatttatttttacaggataggaaaatattctgctgtgattttgttgtttcagcttcatttgttctgctttcctctctggggacccctrttattcatatactagctctctggtctttgctctcctatctattcttttctttcttcatattcattcctgtgacctttttcttcattccgatgtttacctatacaacactgatttgctgttttttgtagtggaagttctgtactttattctttcttatgaggatttaattttactcctttctttcccccgggatctgtttagtggggttttttgtttttgttttttaattttatctcgaaagagaccactttggtggtagag

SEQ ID NO: 489864 - DNA, 594 bp, Homo sapiens
gcccaccatgacttctatctgaggactcatgttcagaatgttggctccaccaggttgctgccccaaaccctccagtcaatttcggatctagctgagatttayatcaaaagtcacctctctgctattgataaactggcctcttcaattcactgtattatatctccctgttttattttcttcttcataactaacaatttattggtattatttgtctggctcctccacaaatttctttagcataaggaccctacctctgttgtttccactgcattcaatcacaaagtacaactggaaaaaaccagactagaataagagatataggatcatcataacatcatcaacaaaacctggcttaatttgaagctgctttgcgctctctttgctttcctctaaccatgctaatattaaaaagagaagcccttttctgatgcatttataccatcctacacagacccagaccatgggcccaggctaagatatattcatggaattatgtttgcaaggtgaaaaaagtgtcaagaagtgggagactttctctgatctattcattatttttcccttcaaggcaccaggggagccagaagagcagaagag

SEQ ID NO: 489865 - DNA, 594 bp, Homo sapiens
gcccaccatgacttctatctgaggactcatgttcagaatgttggctccaccaggttgctgccccaaaccctccagtcaatttcggatctagctgagatttacatcaaaagtcacctctctgctattgataaactggcctcttcaattcactgtattatatctccctgttttattttcttcttcataactaacaatttattggtattatttgtctggctcctccacaaatttctttagcataaggaccctacctctgttgtttccactgcattcaatcacaaagtacaactggaaaaaaccagactagaataagagatataggatcatcataacatcatcaacaaaacctggcttaatttgaagctgctttgcgckctctttgctttcctctaaccatgctaatattaaaaagagaagcccttttctgatgcatttataccatcctacacagacccagaccatgggcccaggctaagatatattcatggaattatgtttgcaaggtgaaaaaagtgtcaagaagtgggagactttctctgatctattcattatttttcccttcaaggcaccaggggagccagaagagcagaagag

SEQ ID NO: 489866 - DNA, 658 bp, Homo sapiens
gatgcaggagcagtgatgccttctatgtccccactcaacttgcctatgcaaaagaccaattgatcttggagaatgacagtggattattgaaaatttaatcttgtggtaacttcarctgtgtatgttgttttattgttggagcaaatcaacacatcccctggtaacttgtatgcagcagttgatctcataaatgctttttgtctatactaattagtagaggccatcaaaaacagtgacctttagctgataaggccaacaataaactttattagtctgcccaggactaacctcccagccctatgtcataatctagtccttagagtctttgatagcctttctcttccatagtacatgatgcaggtctattatattattactaggagatggtagtatagagggaataaatggtagtttttctctgatctcagacctggcagctattttagcttctaacatcagagtttatcagattctaaccacgtgaagaattactagcttcacagctttgggccaagacacagtcttaatgagacttattttccttatacagaaaaatgaagatactaacagtccttccctcagagtagctgagaaaattaaatgagataatgaatgtggatacctaataattgctaagtaaatgttggttatttatctt

SEQ ID NO: 489867 - DNA, 630 bp, Homo sapiens
ggggaatagaatcgagaagaaaagcaatgatctcgccccacaaagtggtaaagactaggggttaaatatattgtttttctaattgaaggtgagaaaaaaaagtttctaaatcctctgcaacagttattttcctttcaattcccttaggctttagttgatgaactattttctaaagaatttcctttggagatgcctttttatttactgaaaagaactaattgttttcacagtgatgtataaaaatacaktttgttcaactcaccattctgtatcaagaattagaaaaatattgttctcaaggcacggtctattccgaggaactttgcttttataatgtgcgctaacagcagagctgcccttatttaaacaatcattaggaaccatttatatgtggtagcaaactcacgttgattattcacaccctgttatcaggaggaggaaatgaaaatttacatccacatctttaaccctgccacgagcagtgtttcattctgctcttgagtcccttgacactgaggtcaggtgctgtgtgtttattactcagcctgtgtgaagcctttcctgcctgagaccactctcctctggggaaaacaattgtgtagctgaaagcagctttctccttcccttgcc

SEQ ID NO: 489868 - DNA, 634 bp, Homo sapiens
tgcccagccacactgggcaaggatggacccacaacattaagcaacaggacccgtgcagccgcacggcccagagtacagcgcatgggagaagtgtgggcagagcagcaggtgcggcttggccccttctctgagacactggcacctgtgcgcaggccatgctgccaacgcggccccctaggaaggacacagggcactgctgcgggtcccgcctagtgacaggctgaatttcctacaacaagcacataccagtggcagycctatatttaagacatggctgtcagatgacccagagatgaccttggggcatggggagtggctggcctccacacccaccaggtcgcagtgcagctccaggttgaggtcgcccttgttggtgtgcagccgcacgtagcccttcttcttcacaaactggtagcgcagcacatcctcgtcgatggcagctacaagccaaggtcccagctcagcccctgccctcaccctggggcagccccaccatgccaggcagcaccgacctcagacacacaggcggggactaggctccagctctggggagagcaggggagctggaggccgagggtctgcttaggccacgcacaggctcaccccagcctcatggggctggcaggggttcagc

SEQ ID NO: 489869 - DNA, 555 bp, Homo sapiens
actccactttcacgcacggggaattccaattaacaaagaaacaggyggggcgcagtggctcacgcctgtaatcccagcactttgggaggctgaggcaggtggatcacttgagcccaggagttcgagaccagcctggccaacatggtgaaaccccgtctctacaaaaaacacaaaaactagctgggtgcagtggtggtgcctgtagtcccagctacttgggaggctgaggtgggaggatctcttgagcccaggaggcagaggttgcagtgagctgagactgtgccactgcattccagcctgggtgacagagacctcatttcaaaagaaaaaaggaaacacaacaaaagaagctgactgccaggtcaaagttttaaaagaaaaaaaaaggctggacctcattcctccctcagtggctctcatcttggagcggaagcccaagtcctcctgtggctcccaggccccacaggactgctctgcacaccatccccacccctgacctctgtcaccacatcccctgcttccaccgctagcacacgctgttccagccacattgga

SEQ ID NO: 489870 - DNA, 509 bp, Homo sapiens
aaaccccacctacccccaccttgccaccaggctgctccctgaggccgacacccagccacacagggcacaggcaggcagcagggacctctgctgagaagagcaacagagaatgacttcccagactggggcacrgaccttgggggaagcccctgggatccaatgtggctcccagcagcagacatcacagaaacagtcttcaagtgacaaagaccaaggaagaagagtgccctccctaaggaggtgaggccacaagccccctacccaagcatttgaaagagaaaagccacgggctttagtcgctggtccaagaacactcaaaaaccagccccctggccaagttccccttgtactagagagcagggaagccttggaggagcaccaactccatctacaaagagtccccagaaccctgcagcccccagaacaccacaagggccagaagagctgagacagatgggctgccagcttctcctgctggcccggtagggagggtcatattgtccagggag

SEQ ID NO: 489871 - DNA, 509 bp, Homo sapiens
aaaccccacctacccccaccttgccaccaggctgctccctgaggccgacacccagccacacagggcacaggcaggcagcagggacctctgctgagaagagcaacagagaatgacttcccagactggggcacggaccttgggggaagcccctgggatccaatgtggctcccagcagcagacatcacagaaacagtcttcaagtgacaaagaccaaggaagaagagtgccctccctaaggaggtgaggccacaagccccctacccaagcatttgaaagagaaaagccacgggctttagtcgctggtccaagaacactcaaaaaccagccccctggccaagttccccttgtactrgagagcagggaagccttggaggagcaccaactccatctacaaagagtccccagaaccctgcagcccccagaacaccacaagggccagaagagctgagacagatgggctgccagcttctcctgctggcccggtagggagggtcatattgtccagggag

SEQ ID NO: 489872 - DNA, 537 bp, Homo sapiens
ggatttcttttggcgcagtctagcaaactgattttaactgaagccttacattacacttaatgcaattactaatatatttgaayttaaatctattatttttgtacctgctttgtgttctgcgtttttttttttttgtttttttggttttttttttttttgccttttcaatgattccttttttcctctttctggcctacatttggactgctggagtaatttctattcttcttagttcatttctttcccacaagtttaaaagttttgcactctattgctaagtttattagttattctttaaaaaacatataatacacagttaataaagtctaaagttagtgaccttttaaagcttctccaatataagataggacattagaaccctttactcagtttgcacattccaatatattactattttcttattttacatgtgtcttatacttaagcctcttactcatttttattgttatgattactcaaattattactaatggtgaaataacagagagtgaaggtggagggcaaagcattgggaaa

SEQ ID NO: 489873 - DNA, 537 bp, Homo sapiens
ggatttcttttggcgcagtctagcaaactgattttaactgaagccttacattacacttaatgcaattactaatatatttgaatttaaatctattatttttgtacctgctttgtgttctgcgtttttttttttttgtttttttggttttttttttttttgccttttcaatgattccttttttcctctttctggcctacatttggactgctggagtaatttctattcttcttagttcatttctttcccacaagtttaraagttttgcactctattgctaagtttattagttattctttaaaaaacatataatacacagttaataaagtctaaagttagtgaccttttaaagcttctccaatataagataggacattagaaccctttactcagtttgcacattccaatatattactattttcttattttacatgtgtcttatacttaagcctcttactcatttttattgttatgattactcaaattattactaatggtgaaataacagagagtgaaggtggagggcaaagcattgggaaa

SEQ ID NO: 489874 - DNA, 537 bp, Homo sapiens
ggatttcttttggcgcagtctagcaaactgattttaactgaagccttacattacacttaatgcaattactaatatatttgaatttaaatctattatttttgtacctgctttgtgttctgcgtttttttttttttgtttttttggttttttttttttttgccttttcaatgattccttttttcctctttctggcctacatttggactgctggagtaatttctattcttcttagttcatttctttcccacaagtttaaaagttttgcactctattgctaagtttattagttattctttaaaaaacatataatacacagttaataaagtctaaagttagtgaccttttaaagcttctccaatataagataggacattagaaccctttactcartttgcacattccaatatattactattttcttattttacatgtgtcttatacttaagcctcttactcatttttattgttatgattactcaaattattactaatggtgaaataacagagagtgaaggtggagggcaaagcattgggaaa

SEQ ID NO: 489875 - DNA, 610 bp, Homo sapiens
aaggtccttcactcatcaaacaaaaagaaggtatggcccaaggtgaagagaaaggctatagggaaaccctccccaaaacatcacacccattttcccatgccctttgttcagaaaataattaattgtggaaatgagatctgttgcctccccacttcccccagcccagacccgacaacaatggggaccctgtctctacttcctacaagtccamcaggggcaaattaccatttggggttatttaatggtgtaataggagaatctgctgcttttagttcaggggtgtccaatctttcagcttccctgggccaaactggaagaattgtcttgggctgcacataaaatacattaacactaatgatagctgatgagcttaaaaaaatttgcaaaaaaaacccaaaacctcaatgttttaagaaagtttatgaatgtgtgttgggccacattcaaagccatcctgggccacatgaggcccatgggctgtgggttggacaagcttgatttagatcatctcgtgattttaggctctgccagtgtggggattatcccacctgcagggattatgtggtgctctaggattatcttgggtttggggttgatccccccacatgga

SEQ ID NO: 489876 - DNA, 610 bp, Homo sapiens
aaggtccttcactcatcaaacaaaaagaaggtatggcccaaggtgaagagaaaggctatagggaaaccctccccaaaacatcacacccattttcccatgccctttgttcagaaaataattaattgtggaaatgagatctgttgcctccccacttcccccagcccagacccgacaacaatggggaccctgtctctacttcctacaagtccaccaggggcaaattaccatttggggttatttaatggtgtaataggagaatctgctgcttttagttcaggggtgtccaatctttcagcttccctgggccaaactggaagaattgtcttgggctgcacataaaatacattaacactaatgatagctgatgagcttaaaaaaatttgcaaaaaaamcccaaaacctcaatgttttaagaaagtttatgaatgtgtgttgggccacattcaaagccatcctgggccacatgaggcccatgggctgtgggttggacaagcttgatttagatcatctcgtgattttaggctctgccagtgtggggattatcccacctgcagggattatgtggtgctctaggattatcttgggtttggggttgatccccccacatgga

SEQ ID NO: 489877 - DNA, 671 bp, Homo sapiens
atctgtccctcagtgtccttggttccacatgtagtggggttgacgggtggcccccaaaagatacatctaagtcctaacctgcagaacctatggatgtgaccttatttggataaagggttttaagagcttttgcaggtgtcatgaagttaaggattttgatatgagatctggcttttcaacactgataccatcctggccaacacccttctggtccttgtgataatttccattttccaaatgttgagagataacacagagatgaaggaagctgccccaaagcacatgagacacggcctccgccatcagctcttgtcatcgtatgttcaagtgttctgcaaaactggtccgtggagcccaaagcatccacatcatctgtgtgcatttgctaaacatgacgaytactggtcttcactgtcatttattcagattttgtgagctcagggctatggaaatgatttaaacaaatgtcccaggtaattcttacgtacagtttgagaaccatctgattaggaaaaaaaaaatgcctcccaaagtgaaataagaagactgaatgcctgtaatcccagcactttgggaggccgaggtgggagccccagggggttcgagagcagcctggcaacacagtgagaacttgtcactacaaaaaatttaaaaattagctggatgtggtg

SEQ ID NO: 489878 - DNA, 473 bp, Homo sapiens
tgacatctcgataactttatatttttactgagttgttgaccgataaaggctgaggactttatataaagtatcttctttttttttttttctgagccggagtctctctctgtcacccaggctggagtgtagtggcgttttcttggctcactacaacctccgccttccaggttcaagcgattctcctgcctcggtctcctgagtagctgggattacgggagcctgccactacgcccagctaatttttgtatttttagtagagacagggtttcaccatgttggccaggctgttctcgaattcctgaccyctggtgatccgcctgcctcggcctcccaaagtgctgggattacaggcatgagccaccgctcctgccctatataaagtatcttcttgtatatcttgtctgatttaagccatactctttcacacttctccctcctccttcatttacctaggatgactatataatttattt

SEQ ID NO: 489879 - DNA, 654 bp, Homo sapiens
tataaagtatcttcttgtatatcttgtctgatttaagccatactctttcacacttctccctcctccttcatttacctaggatgactatataatttatttttcacagcagggcacttttcagaatggaagtggacactactcatcatgatgccagaatgatgggtatcattcactactcataattcaggactaataataatgggtattatttgggttcatttcaggcaaactaggatgcagatgacagcttcttcctatcatttcccaccctgaccacccraggctgaggtccaaaatcaaaaaagaagtcaataataaactcatatctgtttattctccccaaatcaggggacacaaaggcttttttttttttttctgatgagtgggtaatcctaaaataagcaggaaatgcctgtggctcagcctaactcaaggtgagacgaagctggagctgggagctcgaaagtgtcccccagctccctcctcactttgcctgtaactccacctctgcagaaggtaaagtagaattggtagctgtgtcactggtttgggttgagtcctcggtcagggccctctccagactggcgggaagggcgtggatcagcctctcccggaagtcctggcccatgaagacatagagcatggggttgaggc

SEQ ID NO: 489880 - DNA, 565 bp, Homo sapiens
gaagtggggatggttaatgcgtacaaaaagaacagaaagaatgaatgaaacctagtattcaaaggcacaatagagtgaatatagtcaatgataagttaattatatattttttaaaaactaaaagagtataactggattctttataatccaaaggacgaatatttgagggaatggatactctattttctatgatgtgattattacacattgcatgcctgatatcaaagtatctcatgtaccccataaatatatacaactactatgtactatgtaccsacaaaaattaaaaattaaaaaaagtaatactaaaaaagatcgtttgtaatttagttgatttctctgctcttatctactatcagagctataaagcccattgccacatcttaggaagacaacttttctgaaaaacaaatagtgatctatttcttgacatgagtgggagtacatgagcattttgttttacacaaatatattaatcttcacgtttatctttttctcattgtgtgtgtttgtgtgtggggtggttgttatagtccacattttaaaagctaagagaaataagtca

SEQ ID NO: 489881 - DNA, 532 bp, Homo sapiens
tgttgtacctgctgacccgctttggattctgcggcccagcctgacaccttctcactctcgcccttcaacctgggtgcagtgcgagtgcaccctcctctgtcctggttacaacacagagtggtcagggctggcccagggggtgctcaggaggctgtgggaacacagaggaggtgctagacccagcccagggttcaggaaagaccttacagagcaaaggacctcaaatctaccacatccaaacgaaatcccagattccctgtcctaaacctgctcctctcacaatctttctgcctcctccccactaactgtccatccaagtgctcaagccaaaatcttggaatggtcgccagtgttctgtttctctcatccgcttccctcccgcaaccaaaycttgtgtgagtctcatcgtctctatctccagaagaggcccagaatctaaccacttctctccacttccactgtctccattctgctccgagctaccgttactcctcacctgcatcactgcaggggcctcctcactgttctgttt

SEQ ID NO: 489882 - DNA, 576 bp, Homo sapiens
gcttaggtggattctgataccagagcggggttaagttcagaactggaggcctacacaccctcacctcaaaaataggtgcaacccctgctagtctccctagaggttgatctagcctgcctgtgtatgtccttgtaagacacaatcaggacccattcctggagacagaatgcccaccccgacccctgaaagtgaaatccaattggtcttttctgtatagcccccttcccttgaacagagcatgacctccctctgtccttaagagtctctgacccctcccctcccaayctctctgaatagtcagtaatatctaccttctgatcagggctgtaacatgggtggcctcctggaagttgttacaactggtccttaatagacgccctcacccctttggacaggacacgatctaattctgggtataacctgcttgttgctccctctttttccccctgaaatcagcttaagttccttctcttcttggtgcataatgggtgcagtccaggaagccttcctggaggcagtggccttcttacaccagaacccatttataacccacgtatataagagcagcagccacag

SEQ ID NO: 489883 - DNA, 470 bp, Homo sapiens
cccctggtctattccaggcaggggcactatctagggaactcctcaaaggcaatgaaacatgtgtaacccgcctcctctcccggtctaggagaagctgtcccttcttgcaatgcccgccccgtcatgtgcctcctgccacgtggcatgcgcctccctccgccgtccatgctcgggccaagtgctgtgcggttcctgcttctgcaccgccttcgaggcggaggtgcagcacayggtgcttgtgggctacctgctgccgccaggcgcagtggtggccctgggcacctcgggcggcaaggattccacggtgctggcacacgtgctgcgcacgctggcaccgggcctgggcatcttactgcagctcatggctgtagacaagggcatcgggcgtggcttagcgggaggatcccagtaaggagctggggaaatacgcatgtgcctatttagggccggagcctactgaaggctcatgt

SEQ ID NO: 489884 - DNA, 470 bp, Homo sapiens
cccctggtctattccaggcaggggcactatctagggaactcctcaaaggcaatgaaacatgtgtaacccgcctcctctcccggtctaggagaagctgtcccttcttgcaatgcccgccccgtcatgtgcctcctgccacgtggcatgcgcctccctccgccgtccatgctcgggccaagtgctgtgcggttcctgcttctgcaccgccttcgaggcggaggtgcagcacatggtgcttgtgggctacctgctgccgccaggcgcagtggtggccctgggcacctcgggcggcaaggattccacggtgctggcacacgtgctgcgcacgctggcaccgggcctgggcatcttactgcagctcatggctgtagacaagggcatcgggcgtggcttagcgggaggatcccagtaaggagctggggaaatacrcatgtgcctatttagggccggagcctactgaaggctcatgt

SEQ ID NO: 489885 - DNA, 592 bp, Homo sapiens
cctgcccagttctctgctggttctgggtgcgctcagcatggtcctgaccctccttgagcaccagattcctgatgtttcctgtttgcccgcagtggggtaagcggagtgacgtgacttgatggacacacgccattcacagcccccgtcacgatgcctcccttccagcgcttcgtgtgcagcgcgtgctgcaccctcatttcgtctcctccacggcctcactggcagtagcctgagccgcagtaactgacctgggggctcccaccaggttggcctggctccagagctgtcagagattttgggattgcctttcccccatgctatcctgtcctcatccatcaccacctgaatctcccttgccgtctcttgtcataggtaaggaggggctggtgggctttgcagacctctcaagctctgaaggcagagctgcgcgagcctgaatcgccgcttaactcttctgaccttctatttcctcctctgaaaatagaagcaaccctcyctctccactcccccgacatcagggtactcttgggaggattcagtaacttggttgttcatattaaggtttggccaccagggagcttttagtttcagg

SEQ ID NO: 489886 - DNA, 656 bp, Homo sapiens
tagaaaggaacttccttaacctgatgaaagttcacagaaccaagtggcaggatattgggtgcatttccttcaaaatcagcagtagcaaaagatgcccatggtcactatgtctactcaactttgaccataatctcacccagcatattgaaacaagaaaaaggaaagaagtgcttaggacaaagggaagaaataaactgttattattttgcagatgatataatcatctaatttgaaatcccaaaacattctaaataatacccaagatcaatgtgtgattttttttctttttgtagagatggagggctcactgtgttatcccctggccttgaactcctggcctcaagagatcctcctgcctcagcctcccaaagttctgggattacaggcatgagccaccaaacctggcctaatttgtgattttgttttaattgaaaaaaatttatttaaaatacttcaatttctatatactagttatttgaactaataagggagcttrgcaagttggaaggaaatgaaatcaattaaaaatgagttttacttgctgcatttactgagagaattatgacaattctctaaatccagagagctgacatcccagaggagatgggtgtcactatgaagagatgcacagttatagtgaatcccctcaaggaacc

SEQ ID NO: 489887 - DNA, 610 bp, Homo sapiens
tctaatttgaaatcccaaaacattctaaataatacccaagatcaatgtgtgattttttttctttttgtagagatggagggctcactgtgttatcccctggccttgaactcctggcctcaagagatcctcctgcctcagcctcccaaagttctgggattacaggcatgagccaccaaacctggcctaatttgtgattttgttttaattgaaaaaaatttatttaaaatacttcaatttctatatactagttatttgaactaataagggagcttggcaagttggaaggaaatgaaatcaattaaaaatgagttttacttgctgcatttactgagagaattatgacaattctctaaatccagagagctgacatcccagaggagatgggtgtcactatgaagagatgcacagttatagtgaatcccctcaaggaacccagctgagaaattcaaccccatcaatataggaaagaaaaaggagaagttctgtgttgccaaatggtggggaaatgaaaggtaactggctattcttcaaaccatccatagtcacaaactgcccacagtctgaggtgttacacagacttccgttgccasatgaggttaggtttgcgtgt

SEQ ID NO: 489888 - DNA, 430 bp, Homo sapiens
tgggcagctcaggtgcagacgtgccaagaactgagacaggcagacgaggaaagaggctcctagatccgcaacctgtcagggaggacccagagctcccaagacacgataatggaggtagaagcaggctcagatcttttggagcattgggtgccagattgagggccttgggctttatcctggaaagcaagagggggctataagcaagggaaacagagttagcactggatctagaaagatcctgctggagccaagtaggtcccggactggagagaagtgggatrggaggcagggaggctgggaggaggctggggcaatgggccagggttgagcacgagacttgagctgggcctggaaccaaggggatgaggagggaagtgatgattggtgaagtaaaggtgttaagacttgcggactcatgaaacagctgatg

SEQ ID NO: 489889 - DNA, 351 bp, Homo sapiens
ggggtgagggagggtctcctctcccaatgctgaaccctgagctaatagaaggctcccatcacagccccagagggaagagggtctttcctacctgtgcctgtgccatttctgaagaagatgctgatggcgaggttctgtggagcatctgggatagaaagatacagcaccagcttcagaggtgacaagagggatgggcgtggtcccgggagggacccaaggaggggccacagaaacccaccaggtggggaccgctgtccttcctgcccacacacgagttttscctggttatcattctctttctctctctctcttctacacacacacacacacacacacacacacccccctcac

SEQ ID NO: 489890 - DNA, 549 bp, Homo sapiens
gtgaccccgagagtggccaggcctcaggccccgacctgccccaagtcctacacctcctccagccgcccctgcccaactcctgtccctgttctcatacgggggtctccacgtcccagggtcctctcctrgggttcctgccatacctgtcacctccaagttcagcttattctgttggtagctatattttacatcccttcctctctccacgcggaagaaatagcttcccgtgtcctccattctggcatctccgatgctcagggagcagttcttcttctggacatccccaaggaggcggaatcggccctgggtctctggcttcactcttctgtctgggttgtttgtggccacaacctcagcgtagtatgggatctccccgtcccggaaccagtagacgtagagtgggggagaggaataccaggatctccaggggtaagagaaggagcagggcacaaggacgcacaggccctcctgcaccgtcaccgacttctgcacttgcagctcgtacactggcttctcctgcagggaccctggggggacacagaagctcag

SEQ ID NO: 489891 - DNA, 548 bp, Homo sapiens
gaactatggaaggtgtcaaagagaggaagaagaaaaagaaggttcctgctgtgccagaaacccttaagaaaaagggaagcaatttcacagagctgaagatcaagcccctgagaaggaattttgcccaaaagatgcttcgaaagacaaggaagaagcttttctaggaaaaagcgaagcactatcacaaggaatataggcagatggacagaactgaaatttgaatgcaaggaaggcaagaaaagctagcaacttctatgcaactgcagaacccaaattggcctttgtcatcaggatctgaggggtcaatggtgggagcccaaaggtccgaaaggtgttgcagcttcttcgccattgtcaactctccaatggaagctttgtgaagctcartaaagcatcaattaacaggctgaggattcagaaccacatatcgcatgggggcacccaaacctgaagtcagtaaatgaactaacctacaagcgtggttatgacaaaatcaataagaagcaaattgctttgacagataacactttgattgcttgataaatatg

SEQ ID NO: 489892 - DNA, 616 bp, Homo sapiens
aacctgtgcttattatggctactgtgtcagaagctctgagcaagtattgcacttttataagctccctgggagagaccgatgtatatgaaagtttgagaattaatctgtggcttcttcatgctctaattgacaaaaggagcaacagaacaggatgttggacttaaacaaaatgaatatccaactcatgatctagtccttgcttkctcctccagcttggattgatgtcattttctccctctcccaaactaagcctcttttagttcctcaataggacttcgctcaccttagtacatttgcatgtgtttatcctcttattcttcaacagaactggctgattctccatttttaggtcccagattaactttcagagtctcagatgactttcccagggtccttcccgtaccattccatggaaagaaggttatctctctcattatccactattctgatcaccttggtttttgtggggttttttgtttgtttgttttgagacagagtctcactctgtcacccaggctggagtgcagtggcatgatctcagctcactgcaacctcctcctcccaggttcaagtgatcctctgagtagctgggactacaggtgcgtgccaccacacc

SEQ ID NO: 489893 - DNA, 616 bp, Homo sapiens
aacctgtgcttattatggctactgtgtcagaagctctgagcaagtattgcacttttataagctccctgggagagaccgatgtatatgaaagtttgagaattaatctgtggcttcttcatgctctaattgacaaaaggagcaacagaacaggatgttggacttaaacaaaatgaatatccaactcatgatctagtccttgcttgctcctccagcttggattgatgtcattttctccctctcccaaactaagcctcttttagttcctcaataggacttcgctcaccttagtacatttgcatgtgtttatcctcttattcttcaacagaactggctgattctccatttttaggtcccagattaactttcagagtctcagatgactttcccagggtccttcccgtaccattccatggaaagaaggttatctctctcattatccactattctgatcaccttggtttttgtggggttttttgtttgtttgttttgagacagagtctcactctgtcacccaggctggagtgcagtggcaygatctcagctcactgcaacctcctcctcccaggttcaagtgatcctctgagtagctgggactacaggtgcgtgccaccacacc

SEQ ID NO: 489894 - DNA, 616 bp, Homo sapiens
aacctgtgcttattatggctactgtgtcagaagctctgagcaagtattgcacttttataagctccctgggagagaccgatgtatatgaaagtttgagaattaatctgtggcttcttcatgctctaattgacaaaaggagcaacagaacaggatgttggacttaaacaaaatgaatatccaactcatgatctagtccttgcttgctcctccagcttggattgatgtcattttctccctctcccaaactaagcctcttttagttcctcaataggacttcgctcaccttagtacatttgcatgtgtttatcctcttattcttcaacagaactggctgattctccatttttaggtcccagattaactttcagagtctcagatgactttcccagggtccttcccgtaccattccatggaaagaaggttatctctctcattatccactattctgatcaccttggtttttgtggggttttttgtttgtttgttttgagacagagtctcactctgtcacccaggctggagtgcagtggcatgatctcagctcactgcaacctcctcctccmaggttcaagtgatcctctgagtagctgggactacaggtgcgtgccaccacacc

SEQ ID NO: 489895 - DNA, 417 bp, Homo sapiens
ttaaataacaacaagggtaattaactaattattttgtggcttatttaacatttatcttgcactagactataagcttcataaaagcagggactatgtctgtctatractccagtgcgtagcagagagagcttgtactctaatgaatggaatagtaatgtgtaatacaagcctcttgggttctttacaggaggaaataacgcttcgtagaatcattaaatttcaaaatcattgtgaaactcagtacaagaacaatagagttcacccatggacaaaagatccctgcggtgggatgagaaggggttgaatgtcatctctctgtttaacccagcacttaacagtggaggtagctaagtgccagacccagataattcctagaaaaatgtggcctgggaaccccaagagcaaaggtggagatta

SEQ ID NO: 489896 - DNA, 417 bp, Homo sapiens
ttaaataacaacaagggtaattaactaattattttgtggcttatttaacatttatcttgcactagactataagcttcataaaagcagggactatgtctgtctatgactccagtgcgtagcagagagagcttgtactctaatgaatggaatagtaatgtgtaatacaagcctcttgggttctttacaggaggaaataacgcttcgtagaaycattaaatttcaaaatcattgtgaaactcagtacaagaacaatagagttcacccatggacaaaagatccctgcggtgggatgagaaggggttgaatgtcatctctctgtttaacccagcacttaacagtggaggtagctaagtgccagacccagataattcctagaaaaatgtggcctgggaaccccaagagcaaaggtggagatta

SEQ ID NO: 489897 - DNA, 581 bp, Homo sapiens
tttttatacagacaccctaatctgggggggcttactccacatcttagtaacacactaaaaggtttccagacaccacctgaaatgactctcccaagtgttaaattcaattgcaattcacaagctgacataacattactgcctgcagaatatggttacatagaaacattgattagctttgatcctgcagtcttcttttcatattctggaatcaacyttttttttttttttttttttttttttggtaaaaagcaagctagaggactggaaggtgacaaaccagtaagaagggggaggaagtcctgggctggagattataaacagcagcaagggccgtggaggtctttctggggattgtttaaacatttaccccaaattttaatagaacatgacttttaaaaatggaagggattaaaaatcctttatttggcaagatcagatccatcattattcttccataccagtggtctcaggaaacaaaagtgacatgttattagaagaaaatgtaaatgtttcatttttgtacattgctgctgggtgattcctgctaccttgttattccctgtatttattgccatggcaag

SEQ ID NO: 489898 - DNA, 620 bp, Homo sapiens
gctgcacaattgtaaaggcaattcctcgcaataaatctgcatgtaaaaaccacatctcctactggttctgtttctctgttgaacgctggtataccccctctcaaagcccattgtccagtcattctccaagttctgataattctcccttctaaagtagtatcttaatatcactagagatgagatggccacctggggaatccaattccaatttttacttctcctagtgccaatagagagtaatttatttctgcctgttcccactgtcaatarcagagaccagatgccatcagctcttaccagaatgattagaagggcctcatatcctgtactcagcaagccattggtatccaacctatattctttgttggacagagggcaaacttccataaatacaaatctgaacaagtcagcccccacttaaaacccatctgtggtttcccactgggtgaagtctcagatctcaaacacgccctaaaagcttctgcactgcctagtcttttcctaccactccagtcttctttcatcctcactccgcctttccactagtacctggaaatttctcccgacattctccacagggtaggcagaataatagtcttctgaagatgtccatgtcctaa

SEQ ID NO: 489899 - DNA, 620 bp, Homo sapiens
gctgcacaattgtaaaggcaattcctcgcaataaatctgcatgtaaaaaccacatctcctactggttctgtttctctgttgaacgctggtataccccctctcaaagcccattgtccagtcattctccaagttctgataattctcccttctaaagtagtatcttaatatcactagagatgagatggccacctggggaatccaattccaatttttacttctcctagtgccaatagagagtaatttatttctgcctgttcccactgtcaatagcagagaccagatgccatcagctcttaccagaatgattagaagggcctcatatcctgtactcagcaagccattggtatccaacctayattctttgttggacagagggcaaacttccataaatacaaatctgaacaagtcagcccccacttaaaacccatctgtggtttcccactgggtgaagtctcagatctcaaacacgccctaaaagcttctgcactgcctagtcttttcctaccactccagtcttctttcatcctcactccgcctttccactagtacctggaaatttctcccgacattctccacagggtaggcagaataatagtcttctgaagatgtccatgtcctaa

SEQ ID NO: 489900 - DNA, 612 bp, Homo sapiens
atgagggatcacatatacaacagcagtcccataagatyatagtacagtattttttactgtgcgttttctgtgtttagatatacttagatacacaaatgccatcatattataactgtctaccatattcagaatggtaacatgctgtacaggtttacagactaggagcaagtggctataccatatagcctaggtatgcactaggctatactatttaggtttgtgtaagtgcactctatgaagtttgcacaatgacaagattgcctaatgaaacatttctcagaatgtatccccatcactaagcaacacataactgtagatttaaaataagtgagggtgtactatatgaataggaacactgaaaatggaaaatgtgccaattttctcaaaattaagctaatgatttaatgcaaccccagataaaaattcccatggaccttttgtaaacctgacaagttgatcctaaaacgaacatgaaaaaatcaaaggacttacactggccatggcactactgaaaagaagaataaagcatatgggtgccatcaacctcctgagtagcttggggtacaggtgcatgccaccatgaagttttcattttaattgttgtaattttga

SEQ ID NO: 489901 - DNA, 612 bp, Homo sapiens
atgagggatcacatatacaacagcagtcccataagatcatagtacagtattttttactgtgcgttttctgtgtttagatatacttagatacacaaatgccatcatattataactgtctaccatattcagaatggtaacatgctgtacaggtttacagactaggagcaaktggctataccatatagcctaggtatgcactaggctatactatttaggtttgtgtaagtgcactctatgaagtttgcacaatgacaagattgcctaatgaaacatttctcagaatgtatccccatcactaagcaacacataactgtagatttaaaataagtgagggtgtactatatgaataggaacactgaaaatggaaaatgtgccaattttctcaaaattaagctaatgatttaatgcaaccccagataaaaattcccatggaccttttgtaaacctgacaagttgatcctaaaacgaacatgaaaaaatcaaaggacttacactggccatggcactactgaaaagaagaataaagcatatgggtgccatcaacctcctgagtagcttggggtacaggtgcatgccaccatgaagttttcattttaattgttgtaattttga

SEQ ID NO: 489902 - DNA, 613 bp, Homo sapiens
gttcaacctggttttgctttctgctatgacaggcagctctgagttcaatgcagtgtctcgtaattgctaacttctcactctgccaagttgacagattctctctttgtgccatgatgccagtgctggggtggtgaaaaggtgacatttgtgattcaagactgttttttwccctcctcagtgcttcttccagtgatataaggttgataccaggtattgtgaatgttcacatgatttgggggttttattaaggtgcttttgtgtgtgtgtgtgtagataataaactggtgtcctcattgggaggatgatcagtggagccttctattcagccatcttgctccacccctccatcttccctttaaattatactactttattgttttttgtaaagaattagcttttatttagttccagtatattttctgtcacaatttactagtttctgtttatatgcatgttatttcctgcatccttttcatttttgatttactttttctgtagtgaattttactttaatgtataatttctctttttccattaatgtatgtatttggtgtaataaagttatccgtaagtactattttagttgaaccctatgggtatttaaaataattac

SEQ ID NO: 489903 - DNA, 561 bp, Homo sapiens
ttaccccttcctgcatttaaagttttagttatctctttattttctatcttttatagttcctgtttttctgaatacttctatagaaggagttggtgtagtaatattataacatattccatctacaagactaatccattccacttttaaaactgatacygctacttctcctagaaagttgctagctgccaattaccaatatcctggaaactctcagtggttgtgggacattgcaccataaccaacaataccaccctatttgtgtcttccttagacagtttggtgcagagttctaatgccttcatccttcattggtttcaatttacttcatcccatctatggaaatatatgactgccacttgagagtgtgcctttttttttttttcattaccaaactcagaggtttgtgccatgggctattgtgtcacccaaaattattatgatgaaagtttaatttctgatgtgactatatttagagatagagcttttaagaggtaaagttaaatgagctcataaaggtagacgttctaatgtaataaattgagaggccaaataagacgaaat

SEQ ID NO: 489904 - DNA, 461 bp, Homo sapiens
gtgcagtggctcactcctataatcccagcagtttgggaggccaaggcaggcrgatcacctgaggtcaatagtttgagaccagcctggccaacatggcaaaaccccatctgttgatttatttcatggtaattaaaaattttgctctcaaaccccaactttctcacaacaatgccacaatttcacattatttcagattaaatcattataattatttacattgttataactatgttaatatttttaatgtttgttaataaacagattcttattggagggtcattacacaggagtggctctgccactttaaagttctacagaaacaaaccaatgcccaatgtaagtggtaaattgaaagtaaaaaatttaaacagtcagaaaccaccaacttgcttgtaggaatttttcattctaaccaaacaaatttgttttcttcatcttggttctgcaatcactttttgaaa

SEQ ID NO: 489905 - DNA, 471 bp, Homo sapiens
aaaatattttccatagagactgtatatgagagttacagttkttcaatattctcataacactttatattgtccatattttatttgtatccattttaatgaatattcattaatatatcaattgggttttgaattgctttttcttgatgactagaaatgcttaatttgtcatatgattattgtcatgtgattattggcttttgagtatataattcagtgaactgtttgtttatatcttttatcaatttttaattaatttatcttcttattattgagttgtaatttttttatattatcaacataagtcctttatcagtcatgcatattacaaacactttctcctattctgttacaacaatcacgtatttgaggaaaaagctctattttttaatcaagtataatttatattgctttcttttatttatttattttttgcatgttataactaagatttatttatcttcttgtttcttt

SEQ ID NO: 489906 - DNA, 472 bp, Homo sapiens
cagccagctggggtggcttctccttaaaggctgcctcaactttggccagttacccctctccaaaactcagtttgctaatctgtaaaatggaaagagctagagtattggtctcttgagatggcagatcaaatgagtaggttaatattgcataaagctcttagcccagcttcatgtgcataacaaaagctaggtaaaaattagccccaatggtagtaagtgatgtttggccatttaaatcaggttgaactgagtctcaggaggcagcaacaaattgtggctcagaggaaattgtgaacctctcattcttacagagtaaggtgttgaacaaacaaagcagaagttgatgtcagattatttgaacataaagaccagccctgcagggagtttgtggccagtgcacctagtggccttgggtgaggttaggtttyggggttttgggggaaagcattggggagaagaggatctctcaatt

SEQ ID NO: 489907 - DNA, 601 bp, Homo sapiens
ctgtgtgacagggaaaaacataattgtctctgagccttgcttggtacaataaggataaatactaggatctaccttctggatttgttgaggattgactgagccaawgtatatatttttataaaaagattagcaccagccctgatgttgagtagtgtcttaggcagtaatgataattaattttactggaagagggaagtatagcagggattattaatagaaacagaaaataaaatataattaacacctagatctgagattctaaatattattctccaactaaaggcattaaggctctttggagagatgcttgagtctacggctgtgataaggataatagaagttgaacctgaagtatcctgcagtgtgtgtaagtaagaaagtgccaaaaatgaaaaaataataataaaaagatgagggcaggtcaaaaggacctaagaaccaacctgacagaactcctgatggctaggttggaacagttcaggcaacaaaataaataattcaatgataatattgaattataacccagaggtaaaataaatatccacaagtccacacagttataaataaatacatgaagtaataaatgaatgtgggagaagag

SEQ ID NO: 489908 - DNA, 601 bp, Homo sapiens
ctgtgtgacagggaaaaacataattgtctctgagccttgcttggtacaataaggataaatactaggatctaccttctggatttgttgaggattgactgagccaatgtatatatttttataaaaagattagcaccagccctgatgttgagtagtgtcttaggcagtaatgataattaattttactggaagagggaagtatagcagggattattaatagaaacagaaaataaaatataattaacacctagatctgagattctaaatattattctccaactaaaggcattaaggctctttggagagatgcttgagtctacggctgtgataaggataatagamgttgaacctgaagtatcctgcagtgtgtgtaagtaagaaagtgccaaaaatgaaaaaataataataaaaagatgagggcaggtcaaaaggacctaagaaccaacctgacagaactcctgatggctaggttggaacagttcaggcaacaaaataaataattcaatgataatattgaattataacccagaggtaaaataaatatccacaagtccacacagttataaataaatacatgaagtaataaatgaatgtgggagaagag

SEQ ID NO: 489909 - DNA, 602 bp, Homo sapiens
cttttaaggccttgcattttgaaacatctctaaagaaaggactcaggctcctctaaaaccttgtttaaaaatgattcarcagttgtgatatgttggggatctttccatcttttgctaccataaggagagggaagtggaaccatggccatctttctattaaatttaattttccaaggtggtgactctatcttgcagctatgcatggagaaagtatgcagtgtgaaatgccaaggtgatgatataagaggttcacttgctcactgctctcccttacttcttgctatgcacattctcccaatcctatctcacccacctcaccccaaaatcataggaaatgagcataggtagataaaaaaatcaaatacccaattaaaatgggaagatgtagaagaatgaactgcctcctgttaatagattactcgatgggtttgatgaagtaacaaacgcttttacatatttcctggaatagtggcaggcaacctgccactattaggttattccctggtgatctccacctcctgatattcatgtctttatgtaatttcctcccctgtgtgttgactcagcctagtgtctcgtctctaactagtaaaatactggtt

SEQ ID NO: 489910 - DNA, 624 bp, Homo sapiens
gcaacagaacacaacacatttactaaattgataagccggaacaataaagttacatatatagagaataattctctttctcaaacacatctcccttcttgttttctccatatgggtaactaactggaacaatgtctaactcattactgtcaatgggaacctagaagattcttgtttaatggttgctyacctaggaacttgagttgctttctctttttctcctggttttcatttttctggtttccctaggtggggccaaaatttgcaggtgatagcctgcatcacagcaacattgtggcagaaataagtgctaagtctccttataggtttggccacactgaattatggaaagagcctcactgctagtagggtctcctaacaaaaggagaaaccttgggtggaatgaagaagaaataggaggtgtaaaaaattctaaaataaatctattttccaggcttttaaagtgaccagctcgtggctctttagcaaagattctgcgtatatatcggctggcttgaaaagagccattcctagggctgaatctgaggaataaatgtcggtgtgataaatgctatccgagaggtaagcagaaggttcactggaaagacggactagggacacgtaagc

SEQ ID NO: 489911 - DNA, 624 bp, Homo sapiens
gcaacagaacacaacacatttactaaattgataagccggaacaataaagttacatatatagagaataattctctttctcaaacacatctcccttcttgttttctccatatgggtaactaactggaacaatgtctaactcattactgtcaatgggaacctagaagattcttgtttaatggttgcttacctaggaacttgagttgctttctctttttctcctgkttttcatttttctggtttccctaggtggggccaaaatttgcaggtgatagcctgcatcacagcaacattgtggcagaaataagtgctaagtctccttataggtttggccacactgaattatggaaagagcctcactgctagtagggtctcctaacaaaaggagaaaccttgggtggaatgaagaagaaataggaggtgtaaaaaattctaaaataaatctattttccaggcttttaaagtgaccagctcgtggctctttagcaaagattctgcgtatatatcggctggcttgaaaagagccattcctagggctgaatctgaggaataaatgtcggtgtgataaatgctatccgagaggtaagcagaaggttcactggaaagacggactagggacacgtaagc

SEQ ID NO: 489912 - DNA, 624 bp, Homo sapiens
gcaacagaacacaacacatttactaaattgataagccggaacaataaagttacatatatagagaataattctctttctcaaacacatctcccttcttgttttctccatatgggtaactaactggaacaatgtctaactcattactgtcaatgggaacctagaagattcttgtttaatggttgcttacctaggaacttgagttgctttctctttttctcctggttttcatttttctggtttccctaggtggggccaaaatttgcaggtgatagcctgcatcacagcaacattgtggcagaaataagtgctaagtctcyttataggtttggccacactgaattatggaaagagcctcactgctagtagggtctcctaacaaaaggagaaaccttgggtggaatgaagaagaaataggaggtgtaaaaaattctaaaataaatctattttccaggcttttaaagtgaccagctcgtggctctttagcaaagattctgcgtatatatcggctggcttgaaaagagccattcctagggctgaatctgaggaataaatgtcggtgtgataaatgctatccgagaggtaagcagaaggttcactggaaagacggactagggacacgtaagc

SEQ ID NO: 489913 - DNA, 624 bp, Homo sapiens
gcaacagaacacaacacatttactaaattgataagccggaacaataaagttacatatatagagaataattctctttctcaaacacatctcccttcttgttttctccatatgggtaactaactggaacaatgtctaactcattactgtcaatgggaacctagaagattcttgtttaatggttgcttacctaggaacttgagttgctttctctttttctcctggttttcatttttctggtttccctaggtggggccaaaatttgcaggtgatagcctgcatcacagcaacattgtggcagaaataagtgctaagtctccttataggtttggccacactgaattatggaaagagcctcactgctagtagggtctcctaacaaaaggagaaaccttgggtggaatgaagaagaaataggaggtgtaaaaaattctaaaataaatctattttccaggcttttaaagtgaccagctygtggctctttagcaaagattctgcgtatatatcggctggcttgaaaagagccattcctagggctgaatctgaggaataaatgtcggtgtgataaatgctatccgagaggtaagcagaaggttcactggaaagacggactagggacacgtaagc

SEQ ID NO: 489914 - DNA, 556 bp, Homo sapiens
cctgcctgtcgccatttaagaagatgcctgcttccccttcactttctgccatgattgtaagtttcctgaggccccctagccatgcttcctgttaagcctgcagaactgtgagtcaattaaacctctttcctttataattacagtctcaggtagtattctttatagcagtgtgaaaacagactaatacagagggttttaaaaagatgattctggaaatagtttctccatgtgaagttctttgcggaagggtagatgtaggagcaggaagaccagtttggatgctgttgatawggtcccagagaatgatatctgtgtttatggatactatcaggagtggtgggtatccagtatgggactgaatggaataaagaaaaagagtgggcctttggccttttggggtcacttgctctattcagtacttacaagacaccagggagaggggcagagaggacagatttgaggctgggagtagagtcaatactctgaattcctggccgctctattcctacctgcagcagcaggaaaaagcgcttgggagatgcaggtggattccgta

SEQ ID NO: 489915 - DNA, 557 bp, Homo sapiens
cctgcctgtcgccatttaagaagatgcctgcttccccttcactttctgccatgattgtaagtttcctgaggccccctagccatgcttcctgttaagcctgcagaactgtgagtcaattaaacctctttcctttataattacagtctcaggtagtattctttatagcagtgtgaaaacagactaatacagagggttttaaaaagatgattctggaaatagtttctccatgtgaagttctttgcggaagggtagatgtaggagcaggaagaccagtttggatgctgttgataaggtcccagagaatgatatctgtgtttatggatactatcaggagtggtgggtatccagtatgggactgaayggaataaagaaaaagagtgggcctttggccttttggggtcacttgctctattcagtacttacaagacaccagggagaggggcagagaggacagatttgaggctgggagtagagtcaatactctgaattcctggccgctctattcctacctgcagcagcaggaaaaagcgcttgggagatgcaggtggattccgtac

SEQ ID NO: 489916 - DNA, 556 bp, Homo sapiens
cctgcctgtcgccatttaagaagatgcctgcttccccttcactttctgccatgattgtaagtttcctgaggccccctagccatgcttcctgttaagcctgcagaactgtgagtcaattaaacctctttcctttataattacagtctcaggtagtattctttatagcagtgtgaaaacagactaatacagagggttttaaaaagatgattctggaaatagtttctccatgtgaagttctttgcggaagggtagatgtaggagcaggaagaccagtttggatgctgttgataaggtcccagagaatgatatctgtgtttatggatactatcaggagtggtgggtatccagtatgggactgaatggaataaagaaaaagagtgggcctttggccttttggggtcacttgctctattcagtacttacaagacaccagggagaggggcagagaggacrgatttgaggctgggagtagagtcaatactctgaattcctggccgctctattcctacctgcagcagcaggaaaaagcgcttgggagatgcaggtggattccgta

SEQ ID NO: 489917 - DNA, 269 bp, Homo sapiens
atgcatcaagtgcagggtatgcaaaatatctcaagcactggtcttaggttgtacagtagtgatttttgttttgagaaaacaaaacaaaaatagtttgttttgagaaagggctgttatcatctttgttttaaactatagactaagttcctcccaaagctagttcagccttcacccaggaatgagcaaggacagcttggaggttagacacaagatggagttggttaggtcaggcctctgtcackgtctcagccataattttgtaatggtgg

SEQ ID NO: 489918 - DNA, 624 bp, Homo sapiens
cataggaggagaaacagactcccttctccacactccaagcctgtctctgcctaccaccccatctctgctcccacctccaagccctttaaacatggaagaatgttttgtttgtcartgtgttgcctttatgcaagcaaatgcaaacacacttaaagacatcctccgccctcgcataactttagatacctaaactcttcctaaggaataccattaggattctttgtagaaaaatagataaggccaagtattttcagaaacacacattctgcaaagtgaatttccttggcaaattgagatggggtcaggcaggcaggagagtgatcacacagtaaaaagataagaaacaattagatctccctcactttgcattagccccttggaaggacacccaacctccgcatccaagacagacaatgggcctcactccactaggggatgaggatggcgtctctgtatccaggctgcgtcctctttttcttgcatcctgccaaagttcagcccatgagaacgggttggacaacatatgacacttccttcttcttgaacccacagagccagggagagtcataggactcgctcacgcctggagtggtggactcatgctctaaacctgtctttatcatg

SEQ ID NO: 489919 - DNA, 624 bp, Homo sapiens
cataggaggagaaacagactcccttctccacactccaagcctgtctctgcctaccaccccatctctgctcccacctccaagccctttaaacatggaagaatgttttgtttgtcagtgtgttgcctttatgcaagcaaatgcaaacacacttaaagacatcctccgccctcgcataactttagatacctaaactcttcctaaggaataccattaggattctytgtagaaaaatagataaggccaagtattttcagaaacacacattctgcaaagtgaatttccttggcaaattgagatggggtcaggcaggcaggagagtgatcacacagtaaaaagataagaaacaattagatctccctcactttgcattagccccttggaaggacacccaacctccgcatccaagacagacaatgggcctcactccactaggggatgaggatggcgtctctgtatccaggctgcgtcctctttttcttgcatcctgccaaagttcagcccatgagaacgggttggacaacatatgacacttccttcttcttgaacccacagagccagggagagtcataggactcgctcacgcctggagtggtggactcatgctctaaacctgtctttatcatg

SEQ ID NO: 489920 - DNA, 213 bp, Homo sapiens
aaggccaacaaatgttccagttccttttcagcctgggtctcctcctctctcccactctgtgttcatttttgctttcttctyttttcacccttaagtgttgcaaaagtttaaagcaagagttggtaaaccataatgtgcaggccaaactcatatgctgcctgttttttgtaaatagttttattagaacacagccatgcccattcatgtacatgt

SEQ ID NO: 489921 - DNA, 629 bp, Homo sapiens
acttcctcttggtcttcaaagcaaaatttatgctaatcttagagtttgtatttttattcaaaatctttaaaatagggtggaaacccatttagatgttttcctctggtgaggtaacagtaacttaataataacataaataatagcaattttgtaatagtaaacgtacaataattatattccatataatatgataattaaagtatataatttcagtgattagcataacgtctgacacatactgcaactgataggtgaagcataaacacttttacccaatgctcatacccagacacaaaaaacagtccataaacacccttcttcctctgtttggtctctagcctgggcacagctaccttctcttatctgttttcttctttagtcctgtgttgggtcttttgtgtactggatcttgtatatttatctttcttgatttactactccatcgtgttaaagctcatcttctgggagtttcctgaataaaggtacatgaacagaaggtttttttgtacttacatattggaaaattttctattttaccttttcactggattgataatttgsctgggtatagaaacttaagttgaaaatcattttttatttaaaattttgatgacattgatccactgtct

SEQ ID NO: 489922 - DNA, 299 bp, Homo sapiens
gacataatcatggactctctacagtcaattattgcaattactggaagccactctcttgtcatatttcatttagcaaaaaacagcacaagggaggtgaggggcactgagggtcctgggcccattgctgctgccctcgctggagcaggcatctacaaaggagaatgccaaccccaataaactgttcctgcagaagccattaggctgggtgacatgytcacttagggtgacatatattgatcatgtaaaacacgcacactgtataatatgattaaacaaactcaaccagttccagagagagc

SEQ ID NO: 489923 - DNA, 299 bp, Homo sapiens
gacataatcatggactctctacagtcaattattgcaattactggaagccactctcttgtcatatttcatttagcaaaaaacagcacaagggaggtgaggggcactgagggtcctgggcccattgctgctgccctcgctggagcaggcatctacaaaggagaatgccaaccccaataaactgttcctgcagaagccattaggctgggtgacatgttcacttagggtgacrtatattgatcatgtaaaacacgcacactgtataatatgattaaacaaactcaaccagttccagagagagc

SEQ ID NO: 489924 - DNA, 533 bp, Homo sapiens
tttctattatgaagcagaatgtgaaatttatgtgcatttttgaagggaaaagaatagtgacctgaatactgacagggccttgtgtttttttgttgttgttgctttgtttgtttgttgctttgttttgtttgtttctttatttttaaggagtaggtctttgacagctacttaaattttgtgctgttaatttttttttccttctagggcaatcttggtcatttataattttaaagcaaatgcttttatatatttaaattttgtttatgtatagttattcgcagtattctcttaatattgtttccctttagacgcgtgtagggtttcttttttttgtttttcatgattacttttgtaaatctctccctctattsctgagtcagggtccaaatgcttgcctagcctgtggcctttttagaaaaccaacatttttacttttatgatcaaaaaatttttttgttttcaattttattaatttttaatttaaaacattttattcttacatttcctaaaagatttctcttttttgcttcttt

SEQ ID NO: 489925 - DNA, 533 bp, Homo sapiens
tttctattatgaagcagaatgtgaaatttatgtgcatttttgaagggaaaagaatagtgacctgaatactgacagggccttgtgtttttttgttgttgttgctttgtttgtttgttgctttgttttgtttgtttctttatttttaaggagtaggtctttgacagctacttaaattttgtgctgttaatttttttttccttctagggcaatcttggtcatttataattttaaagcaaatgcttttatatatttaaattttgtttatgtatagttattcgcagtattctcttaatattgtttccctttagacgcgtgtagggtttcttttttttgtttttcatgattacttttgtaaatctctccctctattgctgagtcagggtccaaatgcttgcctagcctgtggcctttttagaaaaccaacatttttacttttatgatcaaaaaatttttttgttttcaattttattaatttttaatttaaaacatkttattcttacatttcctaaaagatttctcttttttgcttcttt

SEQ ID NO: 489926 - DNA, 622 bp, Homo sapiens
tggtagatttacgcatagaaattcacacggtttcccagcctggaattctgaactgtaaatccttcccccaacatattacatatgcacacatacacacactttacctcttgcaaatgaaaagtcatatatatcttgccaaagcatttctgacaagcagctctagcattcagagccttaggcaagctttgtgtctcccatagtgatgtataactggccagggaggttgcagagcccagtgttcaagactaatcaacacctcttcagatattctgtgcaaagctcccttttccttgtctgcaaaacctatcagcaggaggtactttatttaggaacgaatggctgagttcagtacccygtttgaaaggaggaaaataatttttattttattttagaatcctcataatccaaccatatgctctcagtttcttatttaattggttccacgtatactttggggataaagctaagttctagggtttagtcatcaggctatctctgcaatacttttgtgatgtggaatgggggttatcggatactcatcttcaaaaacctttaatgattcccacccaattacgtgtagaaaaacttaaaccccttagcctgactttcacagtatgacacc

SEQ ID NO: 489927 - DNA, 597 bp, Homo sapiens
cttcctgctgtgcagtgggttcctaacaggtcacggaccagtactgatttgtggcctggagggttggggrccgctgttctagaaggagacacagataataaagatatgaaaagatagataagaaaatgacatccaaaaataaatgcttctagtaaacagggtaaacgatggaaatgaacaggagtttctgcttttgacttggtaacgaaagaaaggctctcagaacagattggacttgacctgagaccagaagggtatgagagatccagtgacataggaaggtgtgtgaacacctgtgtgtgtgtgtgtgtatgtgtgtgagagagaacactgactctgggcagagaaaattgccagagtaaaggaatggagataggaaataattttgactgttcaagggttgtgcagtttgtctgatgcagagttagcgaagggagaggccgggtgcaaggtgaggttgccgaggaaagcagggccctttatgtagggctctgtaggcagtattaagatacttctttaaaatacattttccctgcctacttttgtgctagcatgaacaacatggataagaaatgcataaaatactttaaatagcag

SEQ ID NO: 489928 - DNA, 600 bp, Homo sapiens
gatgagctgtaattgttttaatattgcttatcttgaggccagtgcttgtttagctgttaaagaaaaagaaaaacctgtggcagttagaacatagtttatcttttaagtgtaggggtgggtgattcaacacctgcctgatgcgcatggccttaggtcctatttataatttggtgtcttgttgtcatagagtctcctctgtcagtcttatggtctctattttaacattaatgtgggtcagtattgtgtctaaactccagaagggagagggtakaaggcggtgtgtctaacatcctatcccatcataactaggaactaagtttttaaggtattttttaagggagtccccttggccacaaggaggtgtctattgagttggtgaggggcttaggattttatttttagttgacaagtctcaccattaaagagccacttctacactacaagtctttctgattcccaggacataccttatcaaggtataaaggtgtaagacttctcctatgggaagaggcatgctttaaacaaatgcctcatcagaaaagagctagctgccatgtcagataaaaaacactccagagaatggggcttggtggatacctg

SEQ ID NO: 489929 - DNA, 600 bp, Homo sapiens
gatgagctgtaattgttttaatattgcttatcttgaggccagtgcttgtttagctgttaaagaaaaagaaaaacctgtggcagttagaacatagtttatcttttaagtgtaggggtgggtgattcaacacctgcctgatgcgcatggccttaggtcctatttataatttggtgtcttgttgtcatagagtctcctctgtcagtcttatggtctctattttaacattaatgtgggtcagtattgtgtctaaactccagaagggagagggtagaaggcggtgtgtctaacatcctatcccatcataactaggaactaagtttttaaggtattttttaagggagtccccttggccacaaggaggtgtctattgagttggtgaggggcttaggattttatttttagttgacaagtctcaccattaaagagccacttctacactacaagtctttctgattcccagsacataccttatcaaggtataaaggtgtaagacttctcctatgggaagaggcatgctttaaacaaatgcctcatcagaaaagagctagctgccatgtcagataaaaaacactccagagaatggggcttggtggatacctg

SEQ ID NO: 489930 - DNA, 487 bp, Homo sapiens
ctatctgcttgattctgcctgttaagatttatgggttatttttaatatctttcttttaccccawgtaggctttttaatggttgtattctctgtgtgatgataaaaatattttaataatagtaaaataaaattttaagaacctaaaaagcctgtcttattctttggctgaagtctgtagggtggggggtgagggtaaggtcttcaccagattcaacggcataagaaagagctgtcttccaatgggaattgaatgggaagttactaggaaatggatcagggccctggtaagctcaagagaacacgaattttctgccaagagcagccacgtttttcttttctgattttctagctggctgcctcactcacagctttctctgcaacgggtgcctccacaattgtgatagagaatgacatgccccagcataatgcctcaacccaagtgtcaacctacccttgacagagaagagaaccccaaatgaatctccca

SEQ ID NO: 489931 - DNA, 549 bp, Homo sapiens
attttctaagtaaatgctaaggccaagtttgagcccctggcttatttattaggcaaagtgaggcatttaagtttccagtcagtgaacaaagagactgcagtgaggagcagtttctgattagatgtgctcaaaggaagccttgtaaaacgggagcttggcactataattgaacaagtggcaccaagcaaagccaagacattagcagtgraggagaaagggcattagcacagccaacattatctttacagaaaaaggcccctgagatcccacctgcatttgtttaattttatttatttattttcagagccccatctcaactccacaaagatctgagacacctacagaagtaaaacaacatgaacataggtaatgtttaaaattagaaaaaaggtaatataaaaagtagaaatacagccaaggataaagtaatacacaaaatgcataacacaagttctgtgcacttgctagaagtagggccaacatttgactttgagcttcctggcagccaaagcaaagagggaaactgtttccagaaaattataaattagc

SEQ ID NO: 489932 - DNA, 549 bp, Homo sapiens
attttctaagtaaatgctaaggccaagtttgagcccctggcttatttattaggcaaagtgaggcatttaagtttccagtcagtgaacaaagagactgcagtgaggagcagtttctgattagatgtgctcaaaggaagccttgtaaaacgggagcttggcactataattgaacaagtggcaccaagcaaagccaagacattagcagtggaggagaaagggcattagcacagccaacattatctttacagaaaaaggcccctgagatcccacctgcatttgtttaattttatttatttattttcagagscccatctcaactccacaaagatctgagacacctacagaagtaaaacaacatgaacataggtaatgtttaaaattagaaaaaaggtaatataaaaagtagaaatacagccaaggataaagtaatacacaaaatgcataacacaagttctgtgcacttgctagaagtagggccaacatttgactttgagcttcctggcagccaaagcaaagagggaaactgtttccagaaaattataaattagc

SEQ ID NO: 489933 - DNA, 561 bp, Homo sapiens
tctaggggattacactagcaaagattctttcatgagaaaggaagcattrtgaggaaggaagatgtgttccccttccccacaaaagtgtcttctgctgtgctttgaacatgtttcttcttatttagttatctgttgcttggtccaaaacgtagtactccccccacaccagggaagatagccactcccacccctgtacttgtcattctaatcttccactcttcatacaaaaccagttcagttcttccttttaaattatcgtccatcaattccccaaaaggaagggtggaattccctatggaggagaagtcaaaggatatatgcttgagacagaaagtccataaccagcatgggcctaacatgtcaaatatttcgtgggactacagtcatgtggtcccaagtggtagctgtcaaaggcctgttgtaggaagatgacctcaatttccccttctgtcagtcaggccatcttcccaggccccatgtctaattcagaaacctcctctactcttcaaattcaccctgctttacccctggggcttaaggactgaagtcaatggcatccac

SEQ ID NO: 489934 - DNA, 473 bp, Homo sapiens
gttataagccgtgttgatacagctrtttagagaaaattcctatggaagtagttctagctggaagtcatctggggaaaattaacctctgtaggtggactgaactttttcagggaacgtgtagggacctcacaattgacctaattaatgtgtttgcatagtaacatacctgttttcattgtacatttaattagcttctttaaaaataattcttcaggtgaaagatgttaaaggcttctcatcctgccctgctgagcagagccaaagagcttgatagttttaggacaaataaaaggaagcagtactttacgctgtaggtagtaaatgtgtgaaaatcattactcctagaaacagtatgtgttgaaattatcaatagattctagacacgaacctttagagagcatcatggatgacagatataaattgagttattaaagggacattagagagcattttctaatcgttttaagttatcg

SEQ ID NO: 489935 - DNA, 609 bp, Homo sapiens
tattgcacctggaaaagaaggtgaggaaatgctgaactcaatggtttctaaatctctgtgctcctgacatctctaacattccaagactatatccaattgtctgttggttagatgcagacagcattattgatgcttaatgatttcattaacaacagaagcctcattaaagtgctaaaaataaaatgcactattccttaataaccagtaaaataatcggaaataggcttaattcaatttagctttaaggaattgtagggctgtatagcgagctgtgaataatctgctttagatcactgtaaaagtgctgtgtattcaaatcggggagagagaacattttagtctcatcagtggatatagatttgcgtggtcattatcatggctttataaatccactgggttagagatacacaaagctataaagtgacacgttgaaatttctcggagtccascccatcacagccattgcagaaacactttcggagtttcccattgaactcatgtgccttctgcattagactatatacatttttgacacacattgtgtcagtcaagtgagagaagatatacatcaagtgctcgaaggccctattataccatttagaaaggagc

SEQ ID NO: 489936 - DNA, 609 bp, Homo sapiens
tattgcacctggaaaagaaggtgaggaaatgctgaactcaatggtttctaaatctctgtgctcctgacatctctaacattccaagactatatccaattgtctgttggttagatgcagacagcattattgatgcttaatgatttcattaacaacagaagcctcattaaagtgctaaaaataaaatgcactattccttaataaccagtaaaataatcggaaataggcttaattcaatttagctttaaggaattgtagggctgtatagcgagctgtgaataatctgctttagatcactgtaaaagtgctgtgtattcaaatcggggagagagaacattttagtctcatcagtggatatagatttgcgtggtcattatcatggctttataaatccactgggttagagatacacaaagctataaagtgacacgttgaaatttctcggagtccaccccatcacagccattgcagaaacastttcggagtttcccattgaactcatgtgccttctgcattagactatatacatttttgacacacattgtgtcagtcaagtgagagaagatatacatcaagtgctcgaaggccctattataccatttagaaaggagc

SEQ ID NO: 489937 - DNA, 459 bp, Homo sapiens
acacttaacaaacacatgacatgcactatttgggaaactttcaaccattacagtagtcaaacttcaaggtggatcccaatgatcccagctcccaatggtattcatactcctatgtagcctcttcctacatgaaaccaccattagtctgtttgatcaatagaatatagcagaaagatatagattcacagattccttcaatcaaataataaggcctttaaaaagtttatggaagttgtcctttggctattttaatagaagcccatagtggagaaagagttacctcaaagcaatttgtgactgtgacttttgtttaatggagtgaaccttaataagtttcaaggagacamaaattatttttacagaatattatatttaaagaatcacagacagcttaactgaaagggacagagagtagaaaattaaagcctggaacttccaaatttctgcaagaaggaaaca

SEQ ID NO: 489938 - DNA, 530 bp, Homo sapiens
gagccaaggttctgtgtggatgtgccattgagtgatctcaaagaaagcagataatcacagcagagtcctgacgcatcagcgatatctaagtccacgatcttcaggacaatgctagtccttgccagggctgcacaaaatacaagcaatgcaatgatgcagatctggggacacagaaacagggcctggtgcaragggccagggtgtccataaagtgcagcctcacagggcagaaaggtgaggtgggagtggcaggaaaagagagagaagtgcgtctggaggagaaaacagaaagtatgcatcatgtatacaaaatgggaagaagtttctacaaactggctgttatggactaaatatttgtatccccctaaaatttatatgttgaaatcctaccctccaggatgatggtattaggtggtgtggcttttgggaggtgattagatgctgagggtagaaccctcatcaatgggattagtgcccttataaaaaaggtcctagagaactgccttacctcttctgccatgttctcacac

SEQ ID NO: 489939 - DNA, 530 bp, Homo sapiens
gagccaaggttctgtgtggatgtgccattgagtgatctcaaagaaagcagataatcacagcagagtcctgacgcatcagcgatatctaagtccacgatcttcaggacaatgctagtccttgccagggctgcacaaaatacaagcaatgcaatgatgcagatctggggacacagaaacagggcctggtgcagagggccagggtgtccataaagtgcagcctcacagggcaraaaggtgaggtgggagtggcaggaaaagagagagaagtgcgtctggaggagaaaacagaaagtatgcatcatgtatacaaaatgggaagaagtttctacaaactggctgttatggactaaatatttgtatccccctaaaatttatatgttgaaatcctaccctccaggatgatggtattaggtggtgtggcttttgggaggtgattagatgctgagggtagaaccctcatcaatgggattagtgcccttataaaaaaggtcctagagaactgccttacctcttctgccatgttctcacac

SEQ ID NO: 489940 - DNA, 621 bp, Homo sapiens
cttctgctctctgcctgctcaggataaattcagcttcatttgctactcttactagatgatccttcattgtctggctaagcaacctgtaagaaatgaatgttatcaaataaatatatgtatacacacacaacataaatgattattcactgcttayggtggagaggaaggaatacttactttcttcttttgacatcatacacaatgaggtaccattatttcatgctaaataattgaggaatgtaacaacagcaaaaggttacccttctggcaatagcagattagcttctatcagactagccatgtaacaaaagcaactaaaaatactggattaaagttgtgttttaatcttttaaaatgcactggaaagttaccaaggcagccaaaattaaccagtgaagatcacagagaagaaagcacacaaaggacaatcagtgtgactttttacattaaggcatttgctattcccaagtgagaacagaaaagctacacagacctgtcactagtctcacaaagataaatagaaaaaaattgaggttcacagtctgtcaaggtggaggagtcccggtagactacccaagagttacagcaggaatcaagtgtaccccagaaagcaagaaatag

SEQ ID NO: 489941 - DNA, 603 bp, Homo sapiens
gattacaggcatgtgccaccgtgcccagctaatcttttctatttttagtagagacagggtttcactgtgttggccaggctggtttctaactcctggccttaagtgatccgccctcctcagccttccaaaatgctgggattacaggcatggcccacagtgcccagccatggmtaagtttttaaattatttctagagagggaggggtcttgctatacagcctaggctcatctcgaactcctgggctcaagggatcctcccacctcagcctcccaaagtaccgggattacagtatgagccaccgcgcctggcctccatgaattttgtagcttgctagctcatgtctttgtattgcttaataatatcccatctgtatggatataccacagtttatccattcccctacagaaaaacattgtggttgcttccagttttgggctatgttgagatgcttttcaggtgcagatataggagcaagtagatgttacctctacaaagacagcaggatcaacttaaggttggaaacgagaagcaaagtcctggggctcactggcagacactgctgtgaatttctggctcagacaagcccctttatagcctctggca

SEQ ID NO: 489942 - DNA, 434 bp, Homo sapiens
taggctctcttttgaccgttatcctgggagttcttttatctttctcttgggctggaaccccacattttctcttttctgggttcgctattattttgrtagagtgtatcttacacgagctttgtgaataagttttacagaaggtaattgtttgaggcctaaaaatgtctagattctgtccttctgcttgattgatagttgagctaggtacgagattctaaaatcttgtttaggaacctgaaatcactccattctttgcctacagttgtgaaataaataccatcggaggaaagtgatcatttcacaacccttcccattctttcatcttccttcccctcacctaatttttcactgttgttgcactgaagatgtgaacaacgatgtttggcactgaagccaaataaaccagaaacaccacactgcagttagacaagaga

SEQ ID NO: 489943 - DNA, 450 bp, Homo sapiens
tgacctgtttggaggtagggcagatagcagcaacaggtgaacagggtaagaggaaagcttttcatgaactatcttttaatagagtttgattggaattctatctttagaattagaggatgaggatgacgttaaggcgccatgtttgcgctctccatctgtgctcactsactcttgcctgagtttcgtgcagcttggggtcatgcggagaagggtgaatccccgcaccatttggatttaggttctgagctaagcctctgctccagcctggccctcccagagctagggtgattgtcctgggccaataattctcaatctggccgtatgctagaatctcctagcgagctttaaaagatcctaatgcccaggctgcaccccagaccagcgacatcaagatctctggaaggggaggagcacctaggcatcagtgcattatcaaaggtccccaggcca

SEQ ID NO: 489944 - DNA, 513 bp, Homo sapiens
atgccccgtggccttgcctagcagcaaatgctgcagcaggaagaggccctgtgcctctcttctgtttcccaaattgygcatgagcatattcaaccaagggaactacattcactttcaagattctagctgcaaaggagtcagggaaagtagtcttcatctttctaacctctacggccaggatggcaccttaaaatgagggtagactggaagctgagtcaactcacaactcagcccaccttctcacaggcaaccactgctgccaacgacttggggatctttctagagataacccctgcataaacaaacatgatcacagatataccttaaaaatacacacacacacacacacacacacacacacacacacgtgccatactattcatactttctacatttttttaaccagacaccacaatatatgaagaatatagttctaagtcattctatttgacataaaagtacaattttgaacactaaaattttttgctgcatactttaagggattggataaca

SEQ ID NO: 489945 - DNA, 513 bp, Homo sapiens
atgccccgtggccttgcctagcagcaaatgctgcagcaggaagaggccctgtgcctctcttctgtttcccaaattgcgcatgagcatattcaaccaagggaactacattcactttcaagattctagctgcaaaggagtcagggaaagtagtcttcatctttctaacctctacggccaggatggcaccttaaaatgagggtagactggaagctgagtcaactcacaactcagcccaccttctcacaggcaaccactgctgccaacgacttggggatctttctagagataacccctgcataaacaaacaygatcacagatataccttaaaaatacacacacacacacacacacacacacacacacacacgtgccatactattcatactttctacatttttttaaccagacaccacaatatatgaagaatatagttctaagtcattctatttgacataaaagtacaattttgaacactaaaattttttgctgcatactttaagggattggataaca

SEQ ID NO: 489946 - DNA, 525 bp, Homo sapiens
tgctcatgccccgtggccttgcctagcagcaaatgctgcagcaggaagaggccctgtgcctctcttctgtttcccaaattgcgcatgagcatattcaaccaagggaactacattcactttcaagattctagctgcaaaggagtcagggaaagtagtcttcatctttctaacctctacggccaggatggcaccttaaaatgagggtagactggaagctgagtcaactcacaactcagcccaccttctcacaggcaaccactgctgccaacgacttggggatctttctagagataacccctgcataaacaaacatgatcacagatataccttaaaaatacacacacacacacacacacacacacacacacacacgtgccatactattcatactttctacatttttttaaccagacaccacaatatatgaagaatatagttctaagtcattctatktgacataaaagtacaattttgaacactaaaattttttgctgcatactttaagggattggataacattcagga

SEQ ID NO: 489947 - DNA, 596 bp, Homo sapiens
gcttcatgagcaacttttaacattctctagggagtccataagccacttcatgaatttttcataccaaacacttgaggcaggattgactcatctgtgatttgttacaaccatagttctatgaattagaaggaccgttggtcacgtttcagattttccactggrtcacattacagacataaaagtaatgtgtaggctgggcccggtggcttacgcctgtaatcccagcactttgggaggccgaggtgggtggatcacctgaggtcaggagtttgagaccaacctggccaacatggtgaaaccccatctctactaaaaatgcaagattaattgggcgtggtggcacgtgcctgtaatcccagctactccagaggctgaggcagaagaatcacttgaacctgggaggcggaggttgcagtgagccgagattgcgccattgcactccagcctgggcaacagggcaaaactccatctcaaaaaaaaaaagaaaaaaagtaatgtgtatacttactatgtgcaatgcttttgtgctatgccaggcacacagaaatactgaaaatctttcttgacactggtaaatctgggcttattaactgggt

SEQ ID NO: 489948 - DNA, 596 bp, Homo sapiens
gcttcatgagcaacttttaacattctctagggagtccataagccacttcatgaatttttcataccaaacacttgaggcaggattgactcatctgtgatttgttacaaccatagttctatgaattagaaggaccgttggtcacgtttcagattttccactgggtcacattacagacataaaagtaatgtgtaggctgggcccggtggcttacgcctgtaatcccagcactttgggaggccgaggtgggtggatcacctgaggtcaggagtttgagaccaacctggccaacatggtgaaaccccatctctactaaaaatgcaagattaattgggcgtggtggcacgtgcctgtaatcccagctactccagaggctgaggcagaagaatcacttgaacctgggaggcggaggttgcagtgagccgagattgcgccattgcactccagcctgggcaacagggcaaaactccatctcaaaaaaaaaaagaaaaaaagtaatgtrtatacttactatgtgcaatgcttttgtgctatgccaggcacacagaaatactgaaaatctttcttgacactggtaaatctgggcttattaactgggt

SEQ ID NO: 489949 - DNA, 657 bp, Homo sapiens
aggggcagcttttattggaaagaataaagaatcataagcataaaacatctggtcacagcctctcctgctgccagggcccttggtggcttaccatggtctcaggagcaaagggccccctaccagagcttgaaaacccacacagtcaccccatcgacctcctggcctccgctcctgctgctgctcacctgtgccagccagaaggaaagtacttccttcagttcttcaagggcctcttcttgtctcaagacacttgcactcaggaacttgctctgttgcacttccctccacctagtcaaggcctaaacagccttattctgacaggtcatagttcgcttccttaagaaatgacctctgactgttcctggttcccaccccatcacgtgtgtccctttgtgwccatctctccagaacccagggagagctgtccagtcagcaccctgctgttaggatctggctgctcaccaggtagagacatccagggaaaagtggccctagggaagagatgcagccttaggcagggagtagctctgggtttccccggctgctgtcatcacccctgcatgcccacacctggagcctccatgtgccctgtttccaggtatctcttggaacccaggctcctcagccccatcccttcctttgcaggggcaggtgtct

SEQ ID NO: 489950 - DNA, 441 bp, Homo sapiens
actgcttgacaaggagggcggaggggccccagcccatcacttgcactgtactgggcgccccaagacctgaaggccactcctactccagtctctcgccggcttccccaggctcccagcataaacacgaacttgacccgtggctgtggcccaggtgctctgcactggcctccccccacatcctgtctcctgcctggtcccctgacctctctgccctgggccacactggtggccttcccatttcctgagctctccctcacagccattgcccaggccctctcctctacctgggatgccstcacttccatcccgcgtttgccccttctggtatcagcccaaacatcacttttccaggacagcctgtcctgttcccaccccacccaggcgggtaacttcagtcactccagtcactccaccccgcaggacccagaaactctttgtagc

SEQ ID NO: 489951 - DNA, 634 bp, Homo sapiens
acagtgtagctcgattctggctcatggggtatcagcagtagtgaagtgtgaaattcccaggtcgtgttcttaaaatgaaatagaattgtctctcatggtgtctctttccccttttctgctggtcagagtgtggaagtggtgttagccatcttggactgtgtgggtaaggacagaatcctagggtgagcagaaaaaccatctggaagaagcctagatccctgacattgacaaagtgtcctaccagttctggactaaccacactgagagataagtgagagggaggatttgatctgagagcatgggggagtcatttgctgtcaggcatccacagcactgaattggagattgtggcatttgtgccatgtgacatasagctagtttctccaaatgtaaccttaccttatctacacatttgcataattgctactaggaatatcttttgcaaagaccttttagagaatgggtacagcagtgggaagagtgattttctttccatatgtcaggcagggacagacactcaagactttggccagccatgttctgaaagaatcaaggactcgctgcaaacccagaaagctgctatgagatcttacagttggtgtgggggaggtattaaaaacactaatatttctgg

SEQ ID NO: 489952 - DNA, 553 bp, Homo sapiens
tcttttgttttttgtttttttgagaggaagtctcgctctctcccccaggctggagtgcagtggtgtgatctcgcttcactgcaacctctgcctcccgggttcaagaaattctcctgcctcaccctcccaagtagctgggattacaggcatgcgccaccacacttagctaattttttgtatttttagtagagacggggtttcaccatgttggccaggctggttttgaactcctgacctcaggtgatccacatgccttggcctcccaaagtgctgggattacaggcatgagccaccacgcctggcccrgagaatattttcattctatttctctttcgagcagagatcacctctactcctgaggccctggtcacactgtggttctcaagtgacagtggtcaaaccaacacactgatttggattctaagatttattttttttggtctgggggccctacctcagcaaaaggaacaatagttacaacaattatgacagcaaaaagtttgagaccagcttggccaacaaagtgaaatcccatctctactaaaaatacaaa

SEQ ID NO: 489953 - DNA, 247 bp, Homo sapiens
gtctcaaacaaaaaaaaaaaagagagaagaaaagattgccctcattccttatttttgtgagtagaacctctgcccagtctggaggttctgtctraacttaaaatctcagcaatcctgctgccaccacccaataacataattgtcaatatccttataatcccctacctgtgtaccttatttcatagttttcaaagagttttcctatgtaatgtctcccagttgcctatcagacatatctgctgattcc

SEQ ID NO: 489954 - DNA, 621 bp, Homo sapiens
agctgtccaaccattcaggcttttcattattataggaagcatctggccaaggaccaccamcatcttcctgtcctgcccctgaagctgtgagttccccaagtggagacacagcctgttccccaacacctacactcatgaacatgggagggttggtcaaaattgcacagctatcatgcttagttttatactcaggtgtaagtgactgatagaagggccttttggaggtggagagtgcgcaggttctgaagaggcaagaccggggaagtctggacctgcttccagagtgtcctcccacaaggcttagtgctcaggacctgtagtgggttgaatatgttccctaaagttcgtgtctatccagcatctcaaaatgtgaacgcatttggaaactggggctttgaagacgtaagtagttaaggatcttgagatgaaatcatgctggatataggatgggccttaaattcaatgactggtatctttataagagaaaggagagggaaattcggacacacagagatgagtaagaagccatgtgaagatggagggagagattggaatgaggctgccacaagccaaggaacatcagaagccaccagaagctgaaagaagcaaggaaggattctc

SEQ ID NO: 489955 - DNA, 621 bp, Homo sapiens
agctgtccaaccattcaggcttttcattattataggaagcatctggccaaggaccaccaccatcttcctgtcctgcccctgaagctgtgagttccccaagtggagacacagcctgttccccaacacctacactcatgaacaygggagggttggtcaaaattgcacagctatcatgcttagttttatactcaggtgtaagtgactgatagaagggccttttggaggtggagagtgcgcaggttctgaagaggcaagaccggggaagtctggacctgcttccagagtgtcctcccacaaggcttagtgctcaggacctgtagtgggttgaatatgttccctaaagttcgtgtctatccagcatctcaaaatgtgaacgcatttggaaactggggctttgaagacgtaagtagttaaggatcttgagatgaaatcatgctggatataggatgggccttaaattcaatgactggtatctttataagagaaaggagagggaaattcggacacacagagatgagtaagaagccatgtgaagatggagggagagattggaatgaggctgccacaagccaaggaacatcagaagccaccagaagctgaaagaagcaaggaaggattctc

SEQ ID NO: 489956 - DNA, 648 bp, Homo sapiens
gggtaagcttgttagaacctgagaagaatgctgtctgaaaaggtagagaagtcaggagaagcagtgaggccctcaaccctgtgtgtcacaatgcctcctgtcatttcctctctgagtttccagtacaagcttctcggtggctgttttctgcccaagcacatgaactttggaagacctagcactttggacaaagtccctggccctgacacttaatagtttggggaacttgggcaaaatactcaaagcttccyagtctgtaaagtgagaatgataaaacatctgccttccttgcaggattgttgtggtgatgtgtaagacaaaatatcaagcatagtcagcagtcactgagcttaaggaatgttaagttataatcattatttctgaacttcagtgcccaatatgaccctgttgacacctcctttgcctccttgggacatactctcttctggtggtcctcatccctttccagctatcctctgtctcttggtattctcctaatctaccaactcccatcaatgttcctgcttgcccagggtgcctgtctcagtcctcttcttttctccctaacccctgggaagatctcatcaaattccctgcctctcgttttccttatcgatttgctgagggcttactcacaagtttctccag

SEQ ID NO: 489957 - DNA, 635 bp, Homo sapiens
ggttccaggcccttcctcacccctggggcccatgctaggatctgctcccctaaaggggaagaagggaagccctgttatgactgttcccagtgttgcccacacttggatacacccacccctccaagaaagggagatctaaatagggaagattaaaatcctccccaaagcccactacaatgtaagcttatgaggaaagataaatgttttttaatttctgtaactagaacagagcctagaacaaggcctggcacatagcaggcactaactatgtatcgaataagtaaatttgaaaaggggtaacagggtcaaggaaacagaaggaatgtcaaggtccagctctcagccagctctagaggctgtcagggaggacagcgagcctcakgcagacgtacttcgagccacgagaggaacacaggggtatctttggtgagggcatgaaacaagattggcgtaggatgaaatttggaagtctttggagagtgatagggcattattacctgggaggcatctggaggccaggcaactgctaggctgacgactcctgggctccggcatcctattttcctggacagactttggtccagagggttgaggggggtctagagttaacccctaggctccccaactccccagag

SEQ ID NO: 489958 - DNA, 538 bp, Homo sapiens
acacttggatacacccacccctccaagaaagggagatctaaatagggaagattaaaatcctccccaaagcccactacaatgtaagcttatgaggaaagataaatgttttttaatttctgtaactagaacagagcctagaacaaggcctggcacatagcaggcactaactatgtatcgaataagtaaatttgaaaaggggtaacagggtcaaggaaacagaaggaatgtcaaggtccagctctcagccagctctagaggctgtcagggaggacagcgagcctcatgcagacgtacttcgagccacgagaggaacacaggggtatctttggtgagggcatgaaacaagattggcgtaggatgaaatttggaagtctttggagagtgatagggcattattacctgggaggcatctggaggccaggcaactgctaggctgacgactcctgggctccggcatcctrttttcctggacagactttggtccagagggttgaggggggtctagagttaacccctaggctccccaactccccagagg

SEQ ID NO: 489959 - DNA, 584 bp, Homo sapiens
tgtgctcagcccttgctgcagcaactggctgggcacaggcgtaggccargggcaccttgccttagccacccctagtcttctgcccctggggcttcttggcctgccttccgtgagatgctcactgagcaggccaagccattctagcacctgtgcaaacctggcggaaatgaacagtccctgggggaactgttcatttaggcaataggaatgggagctggtaaataaagactttcctctcccgggcctcatgtagacaaagcattccattcatcagactgtccccagagggatggagccccaattgcctccaagggtaaccagctcacaatgcacacttggattggctttcctcctttcctggttcactttcccagcctccctaaaataaactccctacatgaaagccatgccaggctctgttttagagaaaaacctgactaacccatgccctccagtggtagtggctaaatcctgcagaacaaggaaggaggaggctgcagacttcagagagggctggcccacagtgacccagaacaccagaggctctccctaaagccacagcccctgcctgaggctcactgcag

SEQ ID NO: 489960 - DNA, 478 bp, Homo sapiens
tactcccaggaatacattttgggaaatgctaatctatctttctggtgcgcagctctttgacctaccacccaccaggcagagtggctgcaaacgtgccctgtcccctataatgagggcggggcagcaggccctaggcagggctgtacagaatgaggttaggtgaccacgcagcacactcagacttctgtcatcgagtgagctcagccacaaatgaggtgactgagagcccagaaaacaaataaggaatggtccaataaatataaatattcacaactgaacatcaggtgacattttcatttattctgtttacagatgccacttagttacactgktttttttttttcagtctcatctgggttggatccaaagacattcagaggcatggtaagaggcaaagcatcagacatctcattggtggcaggtacttcctgactactgtaccacctgctgtatccttccccacctcatcacccccaaa

SEQ ID NO: 489961 - DNA, 474 bp, Homo sapiens
tgaatcccagcatcttcagggaaactttccccaatgattgggaagatcagaatatgtgctacgaagacgtgaaaacacctcctaagctgactgtttcctcatgrgtcagtaagtgcatgatggatctagacacatctagatctgtctagatctagatggcacagtccagaggacagggaaactatcacatgatgatctgctctacactcactcatccctggggctttgaagcaccctcaggtgatttaacaatttgaaactctggtaatgagcatctttaatcactgccatttattggagtccttttagcagcaataacaaaggtgaatgctggctttgctgtaggagtttaattaatccaatctagaatatagaattccaaggttagcttagtaaaataaaaataaaatagaaaccacgtcataaacctatgtaaggaatgtgttactgccatcggtttagcattacttaaaa

SEQ ID NO: 489962 - DNA, 474 bp, Homo sapiens
tgaatcccagcatcttcagggaaactttccccaatgattgggaagatcagaatatgtgctacgaagacgtgaaaacacctcctaagctgactgtttcctcatgagtcagtaagtgcatgatggatctagacacatctagatctgtctagatctagatggcacagtccagaggacagggaaactatcacatgatgatctgctctacactcactcatccctggggctytgaagcaccctcaggtgatttaacaatttgaaactctggtaatgagcatctttaatcactgccatttattggagtccttttagcagcaataacaaaggtgaatgctggctttgctgtaggagtttaattaatccaatctagaatatagaattccaaggttagcttagtaaaataaaaataaaatagaaaccacgtcataaacctatgtaaggaatgtgttactgccatcggtttagcattacttaaaa

SEQ ID NO: 489963 - DNA, 358 bp, Homo sapiens
agatagtcaaattcatgaagatagaaagtagaatggtggttgccagagttgggggagggaagaatggggagtttgtgtttaatgggtataaagctgggatagatgaaaaaattctggaggtggatatgatgacagctgtacatcaatgacaatgtgcttagtgccacagaagtgtacacttacaaatggcaaaattttatattacttatattttataacaatacaaaattggtggtgaagtaagtcagagtgtgctttgacttggagaagtaaggaaaaactcacctgctgcagaatagmtccctggcccagggtcaacagtgttaaagccaactaaatatggcctgagaaggactcc

SEQ ID NO: 489964 - DNA, 525 bp, Homo sapiens
caaaggtgcccaggcccctacaaargcttcagagtagatatctctgtctacaaatgtgagaacagaaggactgctgcgaccccctcgggctgccgtctgcatggggcggggatcctcctgtgctatttgtacaaacaaactgacgcaagaaaaaaaaaaaagcgagggatccaggatgactaaaacaaatactgaaagaaaaaatgttgtaaaagtaatatttcctgatttcaaaatctactataaagctatagtaaccaaagcagtgaaatactggcataaggaaagatgtataaatcaatggagtagaattagaagtccagaaataaacccatacatctacagtcaactgattttagaccaggatgccaaaaacatccagtggggaaagaacagtctcttcaataaatggtgatgggacaactaaatatccacatgaaaaaatgaatctggaccccgacctcacatcatatacaaaaattaggctgggtgtagtggctcaagcctgtaatcccagcactttga

SEQ ID NO: 489965 - DNA, 484 bp, Homo sapiens
caaaataatcaacattttaataaggttaaaataaagcaggggtatctctaaagagattaacataaatactgaaatcttattttagaacccagctgcctgatctgagaatgggtggctaaactcccccattcatcaaaggttggcctgtgatgtcgttcttttatgaattttggcttgaaaatctttcattccctatttasgtacatgtactcaaaattggctagccagagaacttttcactgagaacaggatatgtggactgaaacttacctaataagcagtaagccatagaaaaataggcagtgagagtatttggggcacaggaaaaagaaatttcaaaaagccgacttctaaaattagatgaaggagttcaaagaatagaaatggttgtagcagagtatttgtggaggtgaagcagaagataaagtagatgaggtgaatagaaatctaatcatgtagggtcaagtatgcaaatgttaagatt

SEQ ID NO: 489966 - DNA, 484 bp, Homo sapiens
caaaataatcaacattttaataaggttaaaataaagcaggggtatctctaaagagattaacataaatactgaaatcttattttagaacccagctgcctgatctgagaatgggtggctaaactcccccattcatcaaaggttggcctgtgatgtcgttcttttatgaattttggcttgaaaatctttcattccctatttacgtayatgtactcaaaattggctagccagagaacttttcactgagaacaggatatgtggactgaaacttacctaataagcagtaagccatagaaaaataggcagtgagagtatttggggcacaggaaaaagaaatttcaaaaagccgacttctaaaattagatgaaggagttcaaagaatagaaatggttgtagcagagtatttgtggaggtgaagcagaagataaagtagatgaggtgaatagaaatctaatcatgtagggtcaagtatgcaaatgttaagatt

SEQ ID NO: 489967 - DNA, 484 bp, Homo sapiens
caaaataatcaacattttaataaggttaaaataaagcaggggtatctctaaagagattaacataaatactgaaatcttattttagaacccagctgcctgatctgagaatgggtggctaaactcccccattcatcaaaggttggcctgtgatgtcgttcttttatgaattttggcttgaaaatctttcattccctatttacgtacatgtactcaaaattggctagccagagaacttttcactgagaacaggatatgtggactgaaacttacctartaagcagtaagccatagaaaaataggcagtgagagtatttggggcacaggaaaaagaaatttcaaaaagccgacttctaaaattagatgaaggagttcaaagaatagaaatggttgtagcagagtatttgtggaggtgaagcagaagataaagtagatgaggtgaatagaaatctaatcatgtagggtcaagtatgcaaatgttaagatt

SEQ ID NO: 489968 - DNA, 484 bp, Homo sapiens
caaaataatcaacattttaataaggttaaaataaagcaggggtatctctaaagagattaacataaatactgaaatcttattttagaacccagctgcctgatctgagaatgggtggctaaactcccccattcatcaaaggttggcctgtgatgtcgttcttttatgaattttggcttgaaaatctttcattccctatttacgtacatgtactcaaaattggctagccagagaacttttcactgagaacaggatatgtggactgaaacttacctaataagcagtaagccatagaaaaataggcagtgagagtatttggggcacaggaaaaagaaatttcaaaaagccgacttctaaaattagatgaaggagttcaaagaatagaaatggttgtagcagagtatttgtggaggtgaagcagaagataaagtakatgaggtgaatagaaatctaatcatgtagggtcaagtatgcaaatgttaagatt

SEQ ID NO: 489969 - DNA, 642 bp, Homo sapiens
tgagatgtggcccctctgttaggttgaaggaaagatacacagtaattcagacagtttatctcctgtgtcccccaacagagaaacctatttgagagaagactttccaaacattgtcactgatgtgaacctgaacaacaattggtgggaatgtgaagaaaagaaaggaaatggaggcatgtactgaggctgggactaaatatttcaataatttcttatgtgcataacagaaaaagaagtttagacttcaggtaaagttcattctcagttgtaaataaggactcagaaattgaaggaactatctgtgagatacatttsactaaggctattgaactaaaattaacaaaatatcctggcaaaacctggaagttaggaataggggatcagtcaaaagtgaaaaagaattaagagcattgcaaaactcttgttttcaaataagtactagagaaacgtgttctaatcaggaaggcagagaaagcgcaggtaaccatttaatggggtgggtaatccaagtagaatttcaagttaggtacaaaatggagtatataacaacttgacaaaaaccaagggcagaaataacaatataaaataaagaagatgtgaggaatgtacagtaaaaaagtcattacaccaaatgtgtataga

SEQ ID NO: 489970 - DNA, 347 bp, Homo sapiens
ttagtacaagctcctccattgtgctcagatgttggagatgtagcttctgcttatccacaagtgtcccaaagccccaagggactggtttaggatttatcctctgtcacctggatgatcacaccagacttctaactggtctctgcttataggcttaccctttccaatccatgctaactcaggaaaatgatacatctgttgtatttttccaaaatttcttatagtatacatttctcagataataaactatggcttctggcttcccctctctacctacagtgctgcagacttggttcaaaaattaggaaytggcaagccatgctttgggaggcccaagtgggaggattgtc

SEQ ID NO: 489971 - DNA, 440 bp, Homo sapiens
gaacttaaacccattggctgggtaatggaatcagtttaatggctctagatccacattaaaaggaaattgaatggaaagtaacatataatataatataatataatataatataatataatataatatatattaatacagctcatgaaatattcctttcagtaagtataaatatgtgtagtaagatgtctagtgagatgtatgtattttttgtggtctgcagcttaaaaagtttgaaaawctctgatgtaaacaggacatgaaagccttctatatttatttataccttgcctggcatgttgaacccttgctctaactattaaatgaatatgaagtcagtatccacaatttgagtctcaaatactagtgtgcaagatggttaatttctaagtttatcttaatatcttgcaagaagtaccattagagtgtgataacttttagaa

SEQ ID NO: 489972 - DNA, 440 bp, Homo sapiens
gaacttaaacccattggctgggtaatggaatcagtttaatggctctagatccacattaaaaggaaattgaatggaaagtaacatataatataatataatataatataatataatataatataatatatattaatacagctcatgaaatattcctttcagtaagtataaatatgtgtagtaagatgtctagtgagatgtatgtattttttgtggtctgcagcttaaaaagtttgaaaatctctgatgtaaacaggacatgaaagccttctatatttatttataccttgcctggcatgttgaacccttgctctaactattaaatgaatatgaagtcagtatccacaatttgagtctcaaatactagtgtgcaagatkgttaatttctaagtttatcttaatatcttgcaagaagtaccattagagtgtgataacttttagaa

SEQ ID NO: 489973 - DNA, 562 bp, Homo sapiens
cttgaacaacatgggttcgaactccatgggtccacttatatgtggagtttttcagtaaatttagttggctctgcattggcaggttctgcatccgcaaccaaatgcagatgaaaatatagtatttgtgggatgcgtaacccttgtatagagagggccaactttttgtatctgcaggttccatagggttgactgtgggaattgaatatgtgaagatttttatagctgaggaggtcctagaaccaatcccccacrtataacaagggacaactgaagtatgctatttgatcctcataaaatgtaaatctaatcgtgttattcttccagattgaaagttttccattggttcccatttcctttaggaataaagtttaagtggcatgtcatgttttacaaggcccttcattaaccaccatctctctaccactccctcttcttgtgctctatcttccagccaccctaaatctcttttggcttatccagtgtggggatgctttctcttctggcctctgtacatgctgttattctctctctacaagcaatcatttctgagctaagtctttaa

SEQ ID NO: 489974 - DNA, 606 bp, Homo sapiens
gtaaggattcaaagatgaaaaagatgaaatcactgctcctaaggagtttgtaatttagcaygcaggcagaagacaagaatatgaatgtttctggttcaagatagtgttaaataagtgccatgggagcttctaagctcccatgtgtggttcaaagcagagagaaaaagagtgccccaagaaaggcatcatggaggatggtccctaaagacttggtatggttagggtagtatggcagtcaaaggaagccttccaaatgaggaaacaaaccaagcaaaggttgaaaagtgtggcagtcacttaatggttttcatcaacagcactttgcacatttgtctgttattagcatttagcccatgatgttataataatatgtttaaatgtatgtctctatgactattcattaattcaacatatatttctattgtcatatgctgtgcactgtcctaggtgctagagatatagcagtgaccaaaacagattcctgcccttatgtagcttatattctagttgggggaagacagacaatataaacacaagtaaattatataatatattcaaagagtacagagtaggaagtaaactaaattagggtaagggaatggagaa

SEQ ID NO: 489975 - DNA, 512 bp, Homo sapiens
cagataagcaaagcaaaatatctcttgcaatcagatattctgttattctgacctccattctggcatgagccatgctgactctaccaagataaaaatgggcaaactaaagcattcctacaccacttcatacagggtgtggccaggctcctgcctggattccagcccacatagccttctyactccttctctgctgagccaaccttcccttcaccacatgctcagcctcgcctttgacagtctctgggctgtcctaatctcaagaagaggaagtgaggaagttctaattctatgccccaggacagagcagtgagtcacacttgctataatctgatcttgctagggtgtcacagtcctaataacaggccttctgaagggctccaacggtctagagtgccaaactccagttcctccatgagtatgcagatcagattcctgacttagtcctgataccagggcctttgtccaggagaagcactcatttcctcatgtcagcccacactgccatccccatc

SEQ ID NO: 489976 - DNA, 522 bp, Homo sapiens
aatttcaatatgagacttggaggggtcaaacaaaccacatctagagaaagagctccagaaatctgcatggggttccttaagcattttatattartaacaatcttacatactcaatagccatgttattagtattgacacattacataattacattgatcatgtagatctagaccaaccactgtgaaaaaaacaaggtgcagctaataataaaaaagatgagttgataatgaggtaaaaaaaatgatgaagatgaaatatcatactaactatgcatgtatatgtgccaggtactgttttaattgctatctatgtcttaattcagtgaatatacacaacacaaccttaagatgtaggtattacctacatttttacaggttatataatttatcctagtagaatcagaattgtagtctaaacagtgtggctccaagagtctacagtcttaactataatgctgtatgtaattccttgcagtaagtagacagtagtagtgttttgttatattgttattaaatgcccttt

SEQ ID NO: 489977 - DNA, 448 bp, Homo sapiens
aaaaagctccagggtttacctccaaactctctctaaaggaaatcccatcaaccttttaaacatcactttgtatacaccatcttctrtactgccctagctcaaaaacatgaacctgtatctaaacgtgtttgtagaatttccattgtaagttttactttaacaattttgaacaattataatgatagaaaattatttaatctagattttggtcaactctattactgatattcttttttagtgaaggacaatcacaaacactaaatttatacagtccagagaatgaaagattgctttaaaaaattccttccttttctcactgtaaaataaaaataccaaggggaaaaatggaaagtatttattataactggctgttacactgtcatacacaatgaaatactggaccattagcagttcgttattatatgttgttaagtgtagaactgtaaat

SEQ ID NO: 489978 - DNA, 438 bp, Homo sapiens
tacgtcactcgcccgccgccaatcggcgcccggcaggtcacctctcctcccagggcccgccgccccgcccgccgcccaggccgaggccgccagtgcccgccggccgcttccgctcccggcgcaggcgckgcagcttggccagagcggagggggctcgggagaggagtggacgccgctggccaggatggtgctggagagcgtggcccgtatcgtgaaggtgcagctccctgcatatctgaagcggctcccagtccctgaaagcattaccgggttcgctaggctcacaggtaatcctcccccatcagccagtccccatccttgcacgttcgccaagcgggggaaggaggcgtaaaaatcctagggccaaggggcgggacggagctcggcgcctggcacgtgatccccgcgcgcagaggaaggtgggcgcgcgccgacgca

SEQ ID NO: 489979 - DNA, 447 bp, Homo sapiens
tggattttaaatacattgatggcactatagtgtgaacagcgaagggaggaagcatgccacatcccagataacatcaatgatgtcactagggattttgtgttctctgcctcctatccaatgctgggaagattgatcagaaattttcaagtgctgcaaaattttcataaatgaggagcacttacaaaacctcctaaaaaagaagtgctctgacacttgtgtctttatttgattattgtttatgtcccattggcttaagtttcataagctttggttcatctttatatttaatatttgaggcacagtgcctggaacagaatatgtatacagcaagttttgatagaaataattaattaggaaaactgatgaaagaagtagaagctacctggaactcatgtttktttgtctgaggttcatactaaatctctctgaagaaatacagtatgatgt

SEQ ID NO: 489980 - DNA, 475 bp, Homo sapiens
tttataaacacaacaaacccaggaaatgttgcctaatgcagaacaaatttcccagattatttgccaaaagtataccatgtatactttgttatccaaagacatacattttattcctaaattaagtattgttaattattgttcttagtctgctttatttctcacaaattctgagttagtagaaagcgcttattttccccattatccaagcaatgattttcacaattagacatcargcaacatgtgacaattatcactgaataaaaagaaagaaatcaagtaagccatatgattgctccaacttacttccttgggagagtaaaggtgggaatacccaagtggagcctggaaaactcataaagttaacaagagggatttgagagtttataaaggataaattggctagaatttgtagagtattgggagaagagatcttcatagagagatccagaaatctccagatttgagtctttatctg

SEQ ID NO: 489981 - DNA, 642 bp, Homo sapiens
ataaaggttttattgcattaaattctggaggaaattttaataaggaatatcatgtaaaattttacaatggacaatcatatttgttttgcagcaaatgtagaagatgttgactattgttctagactaaaaatagcatagacttgggttttacttctgtttctgacatgtccaaacaccatacctttggacaaaataccattttacttgtctcagtttagttaattataaaatagggatgataccacttactcacaaagtttagatttgaatgaggcaacktctatcaggtatctgtcaaatggtgggtttaagcatatcttaatttacatatatctcttcttacaatgattttcaataaaaactcaagggcataccgctaggtttacccgcaatgcaggtaattttacaaggggcaagcaaatatctgcaaggttaatacccttctgggagtttggtataaaccaaaagaacacttaagtagctggcagggtagatggaagacatgtgtcttgaaatatttttcttgaactttggtctggaatgagcaagggcagcttggaggttagaagcaaaatggagttggttaggtcagatcccctccactgtcaaaattttctcactgttataacttttgcaaaggtg

SEQ ID NO: 489982 - DNA, 642 bp, Homo sapiens
ataaaggttttattgcattaaattctggaggaaattttaataaggaatatcatgtaaaattttacaatggacaatcatatttgttttgcagcaaatgtagaagatgttgactattgttctagactaaaaatagcatagacttgggttttacttctgtttctgacatgtccaaacaccatacctttggacaaaataccattttacttgtctcagtttagttaattataaaatagggatgataccacttactcacaaagtttagatttgaatgaggcaacttctatcaggtatctgtcaaatggtgggtttaagcatatcttaatttacatatatctcttcttacaatgattttcaataaaaactcaagggcataccgctaggyttacccgcaatgcaggtaattttacaaggggcaagcaaatatctgcaaggttaatacccttctgggagtttggtataaaccaaaagaacacttaagtagctggcagggtagatggaagacatgtgtcttgaaatatttttcttgaactttggtctggaatgagcaagggcagcttggaggttagaagcaaaatggagttggttaggtcagatcccctccactgtcaaaattttctcactgttataacttttgcaaaggtg

SEQ ID NO: 489983 - DNA, 402 bp, Homo sapiens
cccacactcccagccatcattatcagccctggggagagcctctgacctggcagagcagcgccaaggctggcgtgcatgcaggaaatctcctgcttcctcctggccttaaccaacctacataccaatattttccctcacttacattaattttaatatcatgacagtttaaacatkttaaaagcatggctctaatcacaatcccactcaaaagcctccagcggtttaccattgcctattgaatttaggcaaaacttccaaccgtgcctttagtgttgtgctggttataatccatttgcctccctccaccccaccccatactcatcccagggctctaggaggctgatctctgagggcagaattgcctgggctttctcccctgtggcttctggttgggctcaacca

SEQ ID NO: 489984 - DNA, 585 bp, Homo sapiens
atgattatttaataagcgtatatcttctacattagcctctgagctcatcaagggctgcattttatccatctttatattttcacagtctaggttgcccattacatagctggtactcaataaacgtttcgctaagtgaataaatgaatgatgtgtgttctgtacagcagcataactgtcctttctycacaccgcagagtttctggttaccaatagctttcattcagaaaatgagggagactttgctagaaataataattgagagtccaaaatctgctcagaaaaatttaggaatcccctagtttgggttgcattattagtagcgctccctggtgtccaaaaatggaaagtatagctatcgctgagaaattgcccaaggtctgggtgggtagagagtgaggagagaccttagcttctagcaacagcttttcctaggctagtttcacacagagaatcatctcctcattcagagtgagttctagaatcttgcttgcaatgttcattcattcatttaacacctactgagcacctatttgtaacaacttagttcctactctcaaagaggtccatttttacggggaaaaaaat

SEQ ID NO: 489985 - DNA, 320 bp, Homo sapiens
atgattatttaataagcgtatatcttctacattagcctctgagctcatcaagggctgcattttatccatctttatattttcacagtctaggttgcccattacatagctggtactcaataaacgtttcgctaagtgaataaatgaatgatgtgtgttctgtacagcagcataactgtcctttcttcacaccgcagagtttctggttaccaatagctttcattcagaaaatgagggagactttgctagaaataataattgagagtccaaaatctgctcaraaaaatttaggaatcccctagtttgggttgcattattagtag

SEQ ID NO: 489986 - DNA, 585 bp, Homo sapiens
atgattatttaataagcgtatatcttctacattagcctctgagctcatcaagggctgcattttatccatctttatattttcacagtctaggttgcccattacatagctggtactcaataaacgtttcgctaagtgaataaatgaatgatgtgtgttctgtacagcagcataactgtcctttcttcacaccgcagagtttctggttaccaatagctttcattcagaaaatgagggagactttgctagaaataataattgagagtccaaaatctgctcagaaaaatttaggaatcccctagtttgggttgcattattagtagcgctccctggtgtccaaaaatggaaagtatagctatcgctgagaaattgcccaaggtctgggtgggtagagagtgaggagagaccttagcttctagcaacagcttttcctaggctagtttcacacagagaatcatctcctcattcagagtgagttctagaatcttgcttgcaatgttcattcattcatttaacacctacygagcacctatttgtaacaacttagttcctactctcaaagaggtccatttttacggggaaaaaaat

SEQ ID NO: 489987 - DNA, 668 bp, Homo sapiens
ctgggagccactgctcagggcaaggttcatacgggactttctactgcccaaggttctatacaggatataaaggtgcctcacagtacagatctggtagcaaagaggaaacaracactgacctccttctgccacattatttgaacccctctcaccctttagaacaagcccacctaacatctgccagagaaaagaccaacaacagcctcaaaggatctcttaccatgaaggtctcagctaattcctggctaagatgtgggttccacattaggttctgaatatgcggggaagggtcaatttggtcactttgtgtgcggataaagtcaggatgcccagcggccagagcagggggctggtgctctgggaacaatggctgagcatataagcataggtatgggaattaaaaaacatcaaagtcactgtatgaatcgccatgaagacttgagggatctgaatctactgattcatcttaaggcagcaggaccagtttgagtggccacaagcagcaacagaatcaacggaaacaacagaatgattgcaatgtctttttttctcctccttctgacttgataaaagggactgtcttccttggatgtagtgaacatcttcggtgcttgaaaaattcaaggagtatgtaggacatagtccccagaagacagtacaagactttc

SEQ ID NO: 489988 - DNA, 262 bp, Homo sapiens
gaaaagcatgtaagacacaggttaaaaactattagaaagggttaagaagttcaatactgagtcataaagtaaactaaaagttaaagttcaaacttcataaaattaatatgaaatcctttaagctaacataagatcatgtaaccaaaaatgtcacataacaaataacatcagtcaatataataagagaagatgaatcctactaaaactgttctttatgttgcccagcccaartaattgtttttctacctaactgatttgtgtt

SEQ ID NO: 489989 - DNA, 528 bp, Homo sapiens
tggtcagaatattactttacttttctctgaggaagtggtttaggggcygctactggccccctcgtgggctcaggtcagcacaggtactctgcaggacccccaggggaagggaggaagacagcgcccaccgatgggtagagcgtggccgtcatctgctatcatgagccctggagacaggcccctggagctaggggcagagcagttggctgactgcagggcgtgagcctagtaaatgtagtcatggggcccttagggtgcaggcaagacttacctggcctgcccttgcaccccaggaacacccaagccttacctggcctgcccttgtaccccaggaaccttgtccagcttgctgttgtgaagtaggggctcctcttccaggtccgccttctgggggacgtcagcttttgaatcttgcttgttgaaggagccgggctggggcctggccttgccttgagagttggctgcaagtcagaccctacaaggccggtcactgcaggcaccaacagtcaccgcccaagttttccagga

SEQ ID NO: 489990 - DNA, 491 bp, Homo sapiens
ctgcctaggcagaaatgacaagtgtgtggatggatttgaggtcagtgaagcagagttcagacctgtaggggacttyagggatgacagaggaatctgtgagagccgggggagacgggctgtgctcacagccagtgatctgtcccattcacctgggaaagagcacacatgattgaacaggaatttgagcataagatgagaaaatgtgttggctccttagcgctggtgggctgggatggtggccacagcacacaggggcacctcattccgcagagccactgcagaggagaggagggacctgagggcttgcgccagggagggaggacagtggtccagaaagcatctggcaaaccccatggtgggagggtgaccagcgagacccaggtggggtgagctgaggtgctgtgagtctcagcccagtgggaaatgtgcggctttggggacacatccttaagaagcaagcaggtgactgtggccagggactccatgtggga

SEQ ID NO: 489991 - DNA, 295 bp, Homo sapiens
gacaccttgttctcaggccagaracaccatgggctttggtcgggtcccagcctcccagtagtgtcctggcactagcaggagctgacccctgagccacaaccgcagttctgggtttgggatttggtaaaaccacctcaaggacagagtcttgggatcgggtttgccaggaaccatggtgcctcccagagatggtgtgtcattcccactcgccacgaaatgtgcacacaggctgtctccatgtccatcccatccgctggacaggatggaggaagtcagggaacaggcatggtggaca

SEQ ID NO: 489992 - DNA, 630 bp, Homo sapiens
catcaattcttatgaaaaatatcaaatacttctcctttggattgaggccattgtgcaggtcactactcaactgttgcaggcaaatgaaggtgaattaagaacatggctttatcctatacgtacgtatatagatatatgacaaaggatatatagaatatatacacacatatatatgacttaaaaatcctttatatttccaaaatacagttctttaaaatatacacacatataaaaacatttgaaaataactaaagaaaatacctcagaattcattttttcaaccacttctatctgcttttcttcatgaatcagaatctcatcgtgtaatattccagtgttctgttcttcacaaaattgcttctgagtatcattttgttcgtcactagaagaaattttaattttcatgaaatactggagctgtccctaaaatgatgtacagggcaagatggcgccatcagatgtcattcacacaaygcatatctgcacattattccaagacaaggcaaaggggtctcacatctgttaaccaggtgtccccaaccatgctggcaccagggactgcttttgtggaagataatttttccaggaacctgaggtgggggatggttccaggatgattcaagtatatta

SEQ ID NO: 489993 - DNA, 612 bp, Homo sapiens
caaacttctgggctcaagcaatcctcccgcctcagattcccaaagtgctgcactacaggtatgaaccaccaagccaagcctatacaatatttttaataacggtgcacgtaaaacaaagttttgactgtaatttgtcacatgagcctgggcaacaaagtgagactccgtctcaaaaaaataaataaataaaaagaaattattcagtcaggtgcggtggctcacgcctataatcccagcacttcaggaggctgaggtgggyggatcacctgagctcgggagttcgagaccagcctgaccaacatggagaaaccctgcctctactaaaaatacaaaattagccaggtgtggtggcgcatgcctgtaatcccagctactggggaggctgaggcaggagaatcacttgaacccaggaggtggaagttgcggtgagccgagatcgtgccattgcactccaacctgggcaacaagagcgaaactccgtctcaaaaaaaaaaaaaaattattcacaaaatgagaactactaatataattctagaagatgcagttatttctttatactaataatatcagaactatgtccagacaaatgcatagcagatccccaattcttgc

SEQ ID NO: 489994 - DNA, 435 bp, Homo sapiens
tacttcatatttagctttgcatctaacgaagcagtgcatttaaaaagaaaatgagaattaaaactctgaccacaaccatttccttaattaaagtaatgttctcttattgccccggtggaattctttattgcctaatgtttgatattgaggagggcatggaccattctaaaagttctcatttagtatagcwgcaaaaattagttaaagggtaaactttaatcaatgtccttccccttcctcccatgaaaaggacaatacaccccattcacacataacacccataccaattatatgttcgggtaaaaagaaagtaaccatggtgcagtctttagaatcaaactttactatctgtaatttcacatttccactatggtatttccatttcactcacatacatcttaggtccttcttgtctctcggagggattacggtaca

SEQ ID NO: 489995 - DNA, 603 bp, Homo sapiens
aaatgcaaatcatacacatacaattgaaatgaacagtatttattgatattggaatgattacataattatatattgtacaagagttagtaaatatggactaaatattaatgcagtaatatagtattatgtccaagacacacatttggataagaaaacaagttccttagtagcaagatattttattattccaattctggtaaatcacctctatgtaaatattctatgtattttttttgttgaatttagctattaatgtataatttaatatactaaaattctgttagtgaatattcccaagtgtcagaagaaacatatttaagcttataactagcatcataaaaaggataggtgatgtcatcactcctctctcacatttccctgtgcctctttatactcartccatgactccacccgcagcccctggtaaccactgatctgttttctgaagctgtaattatgcttttgcaaaattatcacataaattgaatcatacaatatgtgcaaatgtgaagcaggcatcttaacataatgtatttgagatacattcatgttcttatgtttattagcagatcattcctttatagtgactgcatattagtagta

SEQ ID NO: 489996 - DNA, 632 bp, Homo sapiens
gacagtagcctagtaaaacaagaagtgagcaggcagagtggagagtcagggaaactaagttcaaaacccagttcttccacttcctgcctttgcaacctgggacaagtcatttagcttctcagagcctcagttttacctcggggctacattcaggsacctgctacatattaggtgtgcaataaagtcaaacaaagggagaagtgattcatattcactatttttcagtcaatatggaattctagagaattttctgtccgacattgacctctggggagatggtgctcaaagggaacttgagtttaactgtaatatttcgcttgtatttacaagaataatgcgttcatgtgtcattgagaaattactatgttgttattacaatggttttgttttgactttttttctagcaaaactatttcattgcatcttactaatcatttaaaaagtagaagaaaatgcatatttgattaaaatagctctcttaagtctagttctcttttatgtatcatgacttgtgggttttatttttagtatgaaaccagaatcactgaaagcaaatgtgtaaccatcctccacaaaggcttttcagcaagtgtgcggaccatcctgcagaacgaccactcactactggccag

SEQ ID NO: 489997 - DNA, 532 bp, Homo sapiens
ctggcttctctgtcttatcttaagagctaacttcccaatttttacatgtctttctcctttttaaactttcttaacttccggattcttctgttcctttgttatctttgctgtctcctgtttatcgaaaccttttgtttcctgaccctggtcttcatgaagctgtgtgttttctcaagtccatcatcttctcttcttcccgccatccwtgaagctcaaatgccaagtgtgaaacgaggaatgatgaaaataaatttttccatagtcatatccttgcttgaggaaaagagacttatgtgggtctaccctgcacttatttctggccgtgtctttggtcaggatcagtggttctgagaactgcttcttctgtgacagactacaatcactgcaattgcccttcaaagaaacgatggagttttgctttgacctcactgaaagcaaaatttgatggcccaaatttgactttcgttagtcttgagatgtatggcacctacacccaggggagtagaagactcagcaccgttttcagatcact

SEQ ID NO: 489998 - DNA, 538 bp, Homo sapiens
gctgtttgatctttggcagattatttcagctttcagactcctttccttcatgggtaggaataacgtccatggaagggatttccatcatgtataacagccacatgtgtctggtaccaaatctctggggggagcacrtggtaagagagtaggaagaactcctttgtaaaagtgaggacaacacagggggaagccatgcgtgttatttgcccttgaaagttaagttcttatgaaatatgcctttcaaaatgtgcagaagaaaaactcaagacttctcatctacagttcccagaaagagatcaccgactctcctctttgacatgtagaacaggatgccgagacttttgtgtgtgttcacactgggttatcacatttccagctctagattccttctcattgcccaattgtttcaaggacatagaaatactgtctttattttccccaggtctatcactgtgtttttcaattcttttgtgatccgctccctttgcggggtgggggggggaacaaaacaaatcaacaaacaaacaaaaaaaacact

SEQ ID NO: 489999 - DNA, 602 bp, Homo sapiens
tagattcgttcagatattcctgacttcatactctgtcttatcaaatacttggccccaaggtagtactggatattataagatcctaccctctatagtatatagagcacaggagttccagaccagcttgggcracatcagttcacagttttaggatctgttcagtttcagttatgtctgtctgtctatctgtctatctatctatctatctatctatctatctatctatctatcatctatcaatgtgtgtgtgtgtgtatgtgtgtgtgtatcatttatttagtactctcctttttctcaaaagcctttggcaattttgaaaataaaacctaagaatttaacttattttttctttaggttaaaaatgtatatgcctgttgaaacagattccctgtggtagaatgtataacatagaaataaaaatggacatgaaagataacattacactgatattgatttaaatattgtatgtagtagtgaaaacatgacacaacttaaatatctatagaagacaaattaaattattttaatactgtcaatggaaaactataaaatcattaaaactgatattgtagaacacagcaacatgaaaaggtgttaataaa

SEQ ID NO: 490000 - DNA, 427 bp, Homo sapiens
ggtttgttttaagagcaattttccatagaaaccatcatcttaaaggaaggaggctagagagcacgacacaattccaagagggatggtggtggtcatgggtgattttctttctcattctcccttcctggttcgcagcagtgacgcaatatcacttctctaatttgaaaaataataaacaggcttgccccaaactgtgcctttcaatagtcatatagttagtacaaaccacggtgaccttttaaagatatgacttgttttttaacacctaaagcaagaaatgctccatatgtgagctcctacctggccaagctgccatgtcaactgcaatgccatggtgtcygcccatctctgaaatgtcagcagagaaccgtggcaggggctgaaatgcaatatgttgcaagaggctgaactttggtgtctaaaagcc

SEQ ID NO: 490001 - DNA, 548 bp, Homo sapiens
gcaagaaacagagagggggagagagaaagaagcttgatggccgggcgctgtggctcatgcctgtaatcccagcactttggtaggctgaggcgggcggatcacaaggtcagaaggtcaagaccatgatggctaacatggtgaaatcctgtctctactaaaactacaaaaaattagccaggcgtggtggcgggmgcctatagtcccagctactcgggaggctgaggcaggagaatggcagggacccaggaggtggagcttgcagtgagctgagattgcacccctgcactccactctgggcgacagagtgagactctgtctcagaaaaagaaaagaaccttcactacactgatgtgagctcctggatcatgctgtgccttaagccagtacccatagtgtaacacctccaggccctccaccaatttctatttcatttaaccttgctgaattgcttttctatcacctgcagttgaaagagccctatcaaataaaaaaaatatataccttttatggttctgcttcaaaacattccagcaatttaaaaataatta

SEQ ID NO: 490002 - DNA, 586 bp, Homo sapiens
tttaggggatggtcagggaaatttcrttgagatcctacttgctctgagtctccttgaagcaaatcattgcctctaacaagcaaatattagtttaggtgagctaatagccgggacacatgtatcccaatgctctcaccatgacgttcaaagtggattaaagataaacttatgatactaagctaagctatacacaaacaagggacacattcttatgtaacttacagaggttaaaactgagtaaagacattttacaaaagtggtgtttacaattcagtactgcattgataacatttcaaagcactggcaggcacgtttcggtcttggcagtgcactcaaccaaatccaggtggtttcggagaatgaggagaggctggaagagctgtagcgaatgaacaattgtataagcttcatgagcaaataaaacctttcattcagagggtgtttgttgttccatattccttgatttcttgcttcctgatctttagggatctgaggactcttatttgcgccatggaagacatatggaaacaatttcagaaacaccccaagggactaatagaatccttatctgcaaactcaagtgatt

SEQ ID NO: 490003 - DNA, 469 bp, Homo sapiens
ctatcaatttttgtgtgccttatcctttatatattttttgttaaaaggactttatgtttggctgaagtgttctttgctttccttccacccaaatttttgctctttcttcaaccagaacatatgatgcttattccatgaaatattttctaaatgcttaaatmaactgcaagtgttggtgctggaacactgaacacatacctcttagcctatctaataagttgaatcatagttatatatgtccatgtgtatctctccctcaggtagttagtacattcaaggacataaaatattttatttattgttaccaagttttctttatactattctctaatttagaatgtggatttttaccaggtatgggttgcaaagaggtaggaactaagtatgtttgcatcatattttatttgtattgtcccatccagtcctcaaaatagtcatttctcaaaagtgtcttgcatggtgaaataag

SEQ ID NO: 490004 - DNA, 481 bp, Homo sapiens
tttcaaattatattacaaagctatagcaattaaagtggtgtggtactaaaataaaaacaggtacatagaccaatggaagagagtgagccgagattgtgccactgcactccagcttgggcgatagagccagactccgtctcaaaaaaaaaacacaccacaccatcccatttcctcttccatcacttggtgataagaaacatccacctccccatatagacataggtataagcagagggtgaggcacaagcacaacagtagcaggtagtttcaaactgcctgcttttgcagcttacctgggctttttattcttcttattggatcctggttgttctgcttccaatttgtgttgaactcacccgaccttaacacttgatgggtctaaaggagctcagctcataaagaatatttttacttgtcctaaatttaaataaaakaaatggccctctgttccccttcagccaatacgtgactgcgggccacc

SEQ ID NO: 490005 - DNA, 544 bp, Homo sapiens
ttatggtattttttatagcagcctgaacaaactagacttaataggatttgctcagcaggattaccaccaggtcaagtcatgagatcttttcaaaatataagtaaacctccccttacccctactctccacaaatacaaatttcagcartgctcttggaacaactaaaaggcccaaggaccttcccaaaagcctactacaaatgaagaaactatggaagtcttagtagcttaattgcaggacatccctgccagtttctatcctgattagggatctgcaatgaacattacaaaatcttcaccatctccatggctttcaacaccaagcatatggacttagccactgtaaaatagtggcatgcatcaatgaacaataaagagaaatggagatcattcatattattagtgagggaagttgggtacaacttttcatcaaccaaaaagagggagaaaaaaatcacaccaccaaataatgaaatactgtaactagaatgtcttggctctaagatcattggcatagaattagagattatgttcagcagattaaa

SEQ ID NO: 490006 - DNA, 544 bp, Homo sapiens
ttatggtattttttatagcagcctgaacaaactagacttaataggatttgctcagcaggattaccaccaggtcaagtcatgagatcttttcaaaatataagtaaacctccccttacccctactctccacaaatacaaatttcagcaatgctcttggracaactaaaaggcccaaggaccttcccaaaagcctactacaaatgaagaaactatggaagtcttagtagcttaattgcaggacatccctgccagtttctatcctgattagggatctgcaatgaacattacaaaatcttcaccatctccatggctttcaacaccaagcatatggacttagccactgtaaaatagtggcatgcatcaatgaacaataaagagaaatggagatcattcatattattagtgagggaagttgggtacaacttttcatcaaccaaaaagagggagaaaaaaatcacaccaccaaataatgaaatactgtaactagaatgtcttggctctaagatcattggcatagaattagagattatgttcagcagattaaa

SEQ ID NO: 490007 - DNA, 544 bp, Homo sapiens
ttatggtattttttatagcagcctgaacaaactagacttaataggatttgctcagcaggattaccaccaggtcaagtcatgagatcttttcaaaatataagtaaacctccccttacccctactctccacaaatacaaatttcagcaatgctcttggaacaactaaaaggcccaaggaccttcccaaaagcctactacaaatgaagaaactatggaagtcttagtagcttaattgcaggacatccctgccagtttctatcctgattagggatctgcaatgaacattacaaaatcttcaccatctccatggctttcaacaccaagcatatggacttagccactgtaaaatagtggcatgcatcaatgaacaataaagagaaatggagatcattcatattattagtgagggaagttgggtacaacttttcatcarccaaaaagagggagaaaaaaatcacaccaccaaataatgaaatactgtaactagaatgtcttggctctaagatcattggcatagaattagagattatgttcagcagattaaa

SEQ ID NO: 490008 - DNA, 544 bp, Homo sapiens
ttatggtattttttatagcagcctgaacaaactagacttaataggatttgctcagcaggattaccaccaggtcaagtcatgagatcttttcaaaatataagtaaacctccccttacccctactctccacaaatacaaatttcagcaatgctcttggaacaactaaaaggcccaaggaccttcccaaaagcctactacaaatgaagaaactatggaagtcttagtagcttaattgcaggacatccctgccagtttctatcctgattagggatctgcaatgaacattacaaaatcttcaccatctccatggctttcaacaccaagcatatggacttagccactgtaaaatagtggcatgcatcaatgaacaataaagagaaatggagatcattcatattattagtgagggaagttgggtacaacttttcatcaaccaaaaagagggagaaaaaaatcacaccaccaaataatgaaatactgtaactagaatgtcttggctctaagatcattggcakagaattagagattatgttcagcagattaaa

SEQ ID NO: 490009 - DNA, 625 bp, Homo sapiens
tattaaggtcaacgttattattttcaaaatatcgaaattaaaatatgacaatgacctttaatctaaataattatgtggtgtggccgggtacggtggctcacgcctgtaattccaacactttgggaggccaaggcaggtggatcacttgaggtcaggagtttgagacaggcctggctaacatggagaaaccctgtcyctaccgaaaacacaaaaaagccaggcatggtggtgtgtgcctgtagtagtagctacttgggaggctgaggctggagaatcacctgaacctgggaggcagaggttgcagtgagccgagattgcaccactgcagtccaaactgggtgacagagtgagactctgtctcaataaataaataaataagtaaataaataaataaataaataaataaataaaataaaaatatatatgtatgtggcgggacctgggcaatgggtgttttgagagaagtacatataattgaagaaaacaggaaaacaagataatgatgatataataaatattaattttggcttaagaccagtacatttaaaggtaaaattgaataaggcaaaaataaattctatcaaaaataagcttatcctggaaagtcctgtttagaaagagccag

SEQ ID NO: 490010 - DNA, 438 bp, Homo sapiens
ttacgaaaaggcaacattcaagtggggaaaagggayataagttctcactttgggccgtggtctcaggatttccagcttgagggtggggcttcgccagggaccctaccttttttttttggatagaatttctctgcctcctgtcactattaataagatatcatgaataagaatacttaagatagtaaaaagacttatagactgttttggaggctaattaaaataacattattaatggtttcataggttgcaaggataaattatagagaaaatattttgtgcattcatcatgcataattcatgtgagaacctgtttaccctagctccatggttccctctgcagtaactcttctaggataacactctaggcctcttgccctatccttatacacatgtgttccatgggataggagtgatttatctgactgttgaatttggaaa

SEQ ID NO: 490011 - DNA, 671 bp, Homo sapiens
gggccgagggttgcagattggagggggctctctttccttccacatgggcctttccatggcctccttcagcttccttatggcatagggactacgttccaggagccagtrttccaagaggaccagaaagaagttgtataaccctttatgtacaagttttggaagtcttaaggagtcactttcttggcagttacagccctgccatatctaagggaaaggaacatagattctcacagtgaggagtattgtgaatgacttggaaaataaaatatgcgacataactgaaatttagatatgctcttttctctatctgtgcacctttgcctctcttttatatgctgtcttctttttcctctgttaagacagtctttctccattaagtgggtaagatgagagccggctgttcacatgcttagagtactctgtcgtagaattaaaaggaattcttctccatcagcttgagggggaataagggcttaaaaggcaaagttagaatttggacagtactcgtcagaaacataattaggaaaaatagtccccactctcaccaagtatgggttacattcaggtcagacaacataaagaacatccactaaaagttttgacaacagaaaagggtcttttgcattttgctgcctacctttcactttcgattgcatactcatttgtttatt

SEQ ID NO: 490012 - DNA, 524 bp, Homo sapiens
ggtcttgactctattccagccccatcacactaaaattgcctatttcctttattgctcttactgagctataagctatttgaagggaggactatgtcttatttattgttttactattaaaacttcgtataaaggctggcacactgtagttctccaataaataggaaaataaatgctttatttgtttggttttattttaaataaatttggattacacagaaaataaagtacaaaaataattatgaagagctggattattttgtaaaaataacacataaaaagtttgctctgaagtagtcgatgaaacatggcaaaagttaggctgaaaatggagctcagtaaatgtctgtgtttgtgtgtgtgtctgtatgtttatacataaaatatatatgcacatrtattttaacagtgcctaaaggtgccccaaagttttttacataaaaaattataatatatataaaatccaaattatagttatttaaaaaattaatttttatataatttttaattgtgtattttctatgcca

SEQ ID NO: 490013 - DNA, 524 bp, Homo sapiens
ggtcttgactctattccagccccatcacactaaaattgcctatttcctttattgctcttactgagctataagctatttgaagggaggactatgtcttatttattgttttactattaaaacttcgtataaaggctggcacactgtagttctccaataaataggaaaataaatgctttatttgtttggttttattttaaataaatttggattacacagaaaataaagtacaaaaataattatgaagagctggattattttgtaaaaataacacataaaaagtttgctctgaagtagtcgatgaaacatggcaaaagttaggctgaaaatggagctcagtaaatgtctgtgtttgtgtgtgtgtctgtatgtttatacataaaatatatatgcacatatatkttaacagtgcctaaaggtgccccaaagttttttacataaaaaattataatatatataaaatccaaattatagttatttaaaaaattaatttttatataatttttaattgtgtattttctatgcca

SEQ ID NO: 490014 - DNA, 524 bp, Homo sapiens
ggtcttgactctattccagccccatcacactaaaattgcctatttcctttattgctcttactgagctataagctatttgaagggaggactatgtcttatttattgttttactattaaaacttcgtataaaggctggcacactgtagttctccaataaataggaaaataaatgctttatttgtttggttttattttaaataaatttggattacacagaaaataaagtacaaaaataattatgaagagctggattattttgtaaaaataacacataaaaagtttgctctgaagtagtcgatgaaacatggcaaaagttaggctgaaaatggagctcagtaaatgtctgtgtttgtgtgtgtgtctgtatgtttatacataaaatatatatgcacatatattttaacagtgcctaaaggtgccccaaagttttttacataaaaaattatratatatataaaatccaaattatagttatttaaaaaattaatttttatataatttttaattgtgtattttctatgcca

SEQ ID NO: 490015 - DNA, 524 bp, Homo sapiens
ggtcttgactctattccagccccatcacactaaaattgcctatttcctttattgctcttactgagctataagctatttgaagggaggactatgtcttatttattgttttactattaaaacttcgtataaaggctggcacactgtagttctccaataaataggaaaataaatgctttatttgtttggttttattttaaataaatttggattacacagaaaataaagtacaaaaataattatgaagagctggattattttgtaaaaataacacataaaaagtttgctctgaagtagtcgatgaaacatggcaaaagttaggctgaaaatggagctcagtaaatgtctgtgtttgtgtgtgtgtctgtatgtttatacataaaatatatatgcacatatattttaacagtgcctaaaggtgccccaaagttttttacataaaaaattataatatatataaaatccaaattatagttatttaaaamattaatttttatataatttttaattgtgtattttctatgcca

SEQ ID NO: 490016 - DNA, 632 bp, Homo sapiens
tatttggtttaccacttcttaaaaatgtgcacacacagtaaatgatgtatttacatcagacaaaaacatcatactgaatctatgtctaaaggcataatatttcattcttgagctatatttaaggcagttctaaaattaagacttttaaaaatgtttaaaaactattagtactttatatgatgtacagataagctggagttttaaggtattttttctgtttttgattctgttcttaatggattatgtccacagtgagttcgccgrtaatgagcaaatcaaatatagcatgaatagcagagacagtatgggaataagtgaatattgagaagaaaatgtaagcaatgagttccaaagagaaagagtgcaacctaaaaacaaaggcaaaataaataaataaataaaagcaatagaaaaaagaaagacagataaggtagatatttctatgaatagtggagaagtaaaaaatggcgggcgtgggtggggggcgggaatttaagaaggaaagtgaagcatcatttgggggtaaaataatgtaaccaaatgtgtcctcattctgtgctctttaatagaaatcattgaaacagacaagattaacagcaaagtactatgatctattaaaagttcagagaaag

SEQ ID NO: 490017 - DNA, 583 bp, Homo sapiens
gctgcagccaagttgatagaagcttcatctagctgattttagggaataaacttaatttgcaagtcccacatactgtgggaagtcctttacatgccaaccaaactcagtatttttcagaaagtagaccaacatcttgttaaattaatctccttctaatctctatttaaaattctgcaacatacttaactctgctattccattactcctgtctgatgatggtgaagcctataattttgtaaggataatatcagaaatagttgcctcttgtgttgatttatgagatacaccattggataatcataagtttttgtcaatgagccctgtgccaaaaattcagaaggaaaatattgggcagggtatgccattgccacccaaaataagtygagagagaagggagctcttcctcaatttaagtcagctcaggacatggagctttttgctcccacctgagcttgtcatatagctgagggcaagtcagtaaatatttatgcagatggctgatatacctttggcatagcacacaattttggtatgttatagaaacaccaaaggtttctcatttctagtgggaacttcatcaaaa

SEQ ID NO: 490018 - DNA, 611 bp, Homo sapiens
atactgataactgttgaaactggattatgtgtacatgaarctgcattcctattatacaattctctctactttagtctgaaaatttctaccacccaaaaaaatgctctttggcccctcttttttagggattctttaagaaactggagatttaatctcatcagcaattttttacaaggctacatttgccctatcttcattctccttctgcctggggacagtctgcagtgccctttcaaatttgggcccatcttggtcctctgggtatttctactgcttttttaatgcagtgatttctgggagtccccctcatacttgtcaactaatagtcccactggactggggccactgccccaaataaggtgtctctaattttagattggaatcaggaagatccagatgggttgccacttataactggtatacatttcagcccatgagcagagatgtgcaggaaatagtatgcaattttcttatgtaactccatttaatttgtaatttaagccttggttctgttgatgtcctgtttggatttccacccctccctatttggaaatcatacacggctgaggttttgagggtggggtgagagcatagtctctggttattggagc

SEQ ID NO: 490019 - DNA, 547 bp, Homo sapiens
aaattcttgtctgtttaatttcttgctatattcagattggcatcacagatttttttctttgagaaatccacatgtctgtataaaaataatctctttttcaggaaaacatactaagagaatcacttgtggatgttggaatgcagaaaatctgcttgctttaggtggtgaagataaaatgattacagttagtaatcaggaaggtgacacgataagacaggtaatacagtaacgtctctttggtctgatatattcaagctttccccccaaataaatagtttgtctgtcaaactaatctatacaatttttaaaaatctatatgtgaggtatatatgtgtgtgtgtgtatacacaataacttcaaaaacctttctatttattgtcagaacatttttctttgatatgaatatgttatccaaatatcctcctttgtatatttcccttccgtattaacatggattatcagctctgtggttctagtcasacagtgtatttgtgaaataactcttattttatatatgtgtatttataatacaaatgttaataactgg

SEQ ID NO: 490020 - DNA, 574 bp, Homo sapiens
attatgggctgcattgggttttgtgggctggtgagctactgtggccacctaaccaccattcacagcatagattcattcggtaaacacactctgaggttcaaataaattagattttcaattgaatggagtctaacctgttcacagttaggaattttctatccaatataggactttatcacacctgacatttaattgtatctcaaagcatacgatgatttctttgattagtgaaccccttgtcttgtgttctgccaagtcataaagagaaggggaaattatttttaagtcttggttattggtatcgatttctagatgaccttttgtaaaggtttcctatcaatttcatccttttttagtttaattggttatcacatcaacagacttttaccaaatggtactatgggcctgcctctgtgctagctggtggggatttaaagatgagcaagacccaggcccagccctcaagcatctcataggtctagtcaggataacacaaataaatagatagttaatgtatgacatggtaagtccwatgatagagttatgcacaggaacatctatgtccatatgagag

SEQ ID NO: 490021 - DNA, 604 bp, Homo sapiens
tttttttttttttttttaatccaaacattgcttccttcctaactagccaagttagttacttcattactttccccctgacctyatcctgaaaatactgtaacatggcaagctatggagtgattttccccccagctttattaaagtatgattgacagacaaaaattgtatatatttaggatataaaatatgatgttctgatatatgtatgcattcttaaatgattaccacattgcactaattaacatagcctcacacagctatcatttttttgtgtgtggtgagaacatgtgagatctactcagatgatctcaggtgtatgtggcagctaaaagaagtcaaattcatagtaatggaaagtagcacaatgcttattagggtctgggagatggggaaagggggaaatattggtcaaagaatacaaaccttcagttataagatgaagaagtactgaattcctaatgtaaagcatagtggctatgcagtgactgaattccaatttaaatttttgagaaaagagatgctatataaaaacaaagtgttcctttaaaaacatctttgattcaaaataaaatcaagctaaattccaaaatgttctggggaaacg

SEQ ID NO: 490022 - DNA, 607 bp, Homo sapiens
tacacatacatgatttatatgcatagctacacaagcatttcatacacttggaaaatctcaaaatatttgttgattcaatgaataaatataaatttcatgttattaactaaaatcccattatacatacacatgattttttcctacataaagtattgtgatcagatttttatatcaatacatcttggatatacactattttatgggcatgtagtattttatttttttgatatatcaacatgtacttttattatcctataatatcggacacttcatttccaagctctccctttataaacatcattttcatatcattatataagaccaaacatgtccatatgtatgtatgtaccaatatatatgtatgtgcatatgtatacatgggcatacgtgtgtgcgtgtgtgtgtgtgtgtgtgacagagagcaccaggcatggatttaaatgccttatacatattaactcatttcattaccaaaacaacaactaaagtttctattattttcctgaytttacagaggggaaaccgaggcacagagtttaaggatgttgctcagggtcacatttcagtataaatggcagagccaggatttgaaacaaaatggtctggc

SEQ ID NO: 490023 - DNA, 593 bp, Homo sapiens
tacagtttacttggaccactgttgattgagaaaactgtagaaagttagtcactaccacaagcaaaaggcaggggatggatgtgtcctttctccacagtcctgctttgcagagtgttggagcacactgcggaggctctgctcacacgtggtggaatgcaccctggcagacttttgtccacaggtcgctttccccatgtttccttgtaaactcttcagcatttcataragtattattcggctaggtgagccaggagtgtcaggctgagcagatgctcaggctgggtaaccaatgctggactggagtgtgtggtcatccctggttgctggctttctcttctcagtactaatttccaagcagacggacctccacttctagtcgatgttcgggtgatagatctttgttttaaatctggtcttttatgatttgaatgggtaatcttctcataggttgattttgattctgaaggccgccttatcctatggaggttgtcagggacaataagcccttgccgagtcaataaattagcttcttcaacctggatgttgcgggaggctttcattccgcatttgcagcttcttcaagctcctctacc

SEQ ID NO: 490024 - DNA, 686 bp, Homo sapiens
tacaccagaatttcccaactcagtctcagccaaacgrctcaacatttcagtcaaataactggcccctctattgaagctttctaaatggagcagacaaatcagattgaccattgctgtgaggtttactgtttcttctattgttgaaaataaaaaataagttatgtgactccagaggctaccagatatttatttaacattaaatggaatttgaggctaaccaaaccttcttccttagtcaggacaacagaccagataacctcataaaccatatctttataaaataataatggatatagggcatgcatttgaaacagcaaggtaacttttttaaatttgtgactgtttcaaaagtttaagggcacacattccgatataattagcagagaatttactaccattatgagttaattcactgaccctcagtttacgttcctatatttgaaatataaagaatgtttgccctttaataacactatggactagttaagaagcaatgttttagaaaatgtattattatatttatctctccaatccaatcaggacccagtaatcaacattaatcagaagtgttcatgctttatgtacaaaactgtttcagaaatgtcaagagtgaaataaatcctaaagattcttcctaggtctgacttgtgacttaataatatcaatatgaaatttgttgcttatga

SEQ ID NO: 490025 - DNA, 623 bp, Homo sapiens
tggtacctctcatgtcgttttagtacatcatggatatttggtgattatgaacattaagagtctcatgttctttcctttcctttctatctgttgtgaaaaccccacactctactaaatctttacctaacatgtctcataggttgaaactaacttacttatccctaaaacatcacataaattctgcctatatttccttagccattccctttattcttagcttaaaacttcaataatagtggtttctccstgcctgtattctcagtagaaagccacactgggtgtcacttttccttttttaaaaactcacaattgcagcactctcatctttcattttaaggagctaatcacatgtcagttttcccaaccagactgagctcttcaagggcagggacatgctttcttttgcatccccagccgactgtctggtgcagagtagatggtgcatacattttttctgactaaaaccatgaagaaatgaatcaacccatagtgtcatttaagatgaatgacccagagatggtctgaagtaactaactgggcactcactcagggaaagggaaatcactggattatctgtactgtttagcagccacaccaccacctactccccaggcatgaatgcc

SEQ ID NO: 490026 - DNA, 623 bp, Homo sapiens
tggtacctctcatgtcgttttagtacatcatggatatttggtgattatgaacattaagagtctcatgttctttcctttcctttctatctgttgtgaaaaccccacactctactaaatctttacctaacatgtctcataggttgaaactaacttacttatccctaaaacatcacataaattctgcctatatttccttagccattccctttattcttagcttaaaacttcaataatagtggtttctccgtgcctgtattctcagtagaaagccacactgggtgtcacttttycttttttaaaaactcacaattgcagcactctcatctttcattttaaggagctaatcacatgtcagttttcccaaccagactgagctcttcaagggcagggacatgctttcttttgcatccccagccgactgtctggtgcagagtagatggtgcatacattttttctgactaaaaccatgaagaaatgaatcaacccatagtgtcatttaagatgaatgacccagagatggtctgaagtaactaactgggcactcactcagggaaagggaaatcactggattatctgtactgtttagcagccacaccaccacctactccccaggcatgaatgcc

SEQ ID NO: 490027 - DNA, 477 bp, Homo sapiens
aggcagaggtcgcagtgagctataattgcaccactgtactccagcctgggtaatagagtgagaacttgtctcaaaataaataaataaatacagttacacaaaattarcagcaattccctttgattaatgggactctagataatgtctttgacatttctcttattttactccagttaaaaattttctgtaagttttactttttgcactgataaaaaaataaaaataagacataatataacaaccttacaaacccttgggagaagaagcataacagttatattttaccaaacatctaaaatggtatgccaacagtggaagagaattacattcagaaaatcaatctgagattttcagtttcttatgtattacaaatgttacacattggcaaagattttgccaaagtacccaataattaatgaactcatataaagcagataaaaggttagcattggctctgggtgctaagagtacggtacc

SEQ ID NO: 490028 - DNA, 477 bp, Homo sapiens
aggcagaggtcgcagtgagctataattgcaccactgtactccagcctgggtaatagagtgagaacttgtctcaaaataaataaataaatacagttacacaaaattagcagcaattccctttgattaatgggactctagataatgtctttgacatttctctyattttactccagttaaaaattttctgtaagttttactttttgcactgataaaaaaataaaaataagacataatataacaaccttacaaacccttgggagaagaagcataacagttatattttaccaaacatctaaaatggtatgccaacagtggaagagaattacattcagaaaatcaatctgagattttcagtttcttatgtattacaaatgttacacattggcaaagattttgccaaagtacccaataattaatgaactcatataaagcagataaaaggttagcattggctctgggtgctaagagtacggtacc

SEQ ID NO: 490029 - DNA, 477 bp, Homo sapiens
aggcagaggtcgcagtgagctataattgcaccactgtactccagcctgggtaatagagtgagaacttgtctcaaaataaataaataaatacagttacacaaaattagcagcaattccctttgattaatgggactctagataatgtctttgacatttctcttattttactccagttaaaaattttctgtaagttttactttttgcactgataaaaaaataaaaataagacataatataacaaccttacaaacccttgggagaagaagcataacagttatattttaccaaacatctaaaatggtatgccaacagtggaagagaattacattcagaaaatcaatctgagattttcagtttcttatgtattamaaatgttacacattggcaaagattttgccaaagtacccaataattaatgaactcatataaagcagataaaaggttagcattggctctgggtgctaagagtacggtacc

SEQ ID NO: 490030 - DNA, 518 bp, Homo sapiens
atttcgggaaacacatttaaacaatagcaataacaaactttttcctggggactcacttttatttaataccacaagaaaaaaataaataatctcacatacatagttcttaaataataaagaatctaataaacttagattctttaggtataaaagaaagaaatttctaaccagttcagtcatgttggagtaaattctcagtaaattcagattccaaactccttttcagggttcttttctattatcttaagagtttctttgcccccttttctttaccaaagttttaayataagcacagtggattatgtaccttcatagatgaagatgtatagacctttaattgggctgcttttgcctgggccttaacattttcatagtaaagagcttggcatggcctgattccatggtcgtgtgctagactctgccaagttttgttttatcccatgtatcatttggagccttgtgctagttgcaataagatggagattatgttcctgtcattaggtcctgaaatgcttgag

SEQ ID NO: 490031 - DNA, 518 bp, Homo sapiens
atttcgggaaacacatttaaacaatagcaataacaaactttttcctggggactcacttttatttaataccacaagaaaaaaataaataatctcacatacatagttcttaaataataaagaatctaataaacttagattctttaggtataaaagaaagaaatttctaaccagttcagtcatgttggagtaaattctcagtaaattcagattccaaactccttttcagggttcttttctattatcttaagagtttctttgcccccttttctttaccaaagttttaacataagcacagtggattatgtaccttcatagatgaagatgtatagacctttaattgggctgcttttgcctgggccttaacattttcatagtaaagagcttggcatggcctgattccatggtcgtgtgctagactctgccaagttttgttttatcccatgtatcatttggagscttgtgctagttgcaataagatggagattatgttcctgtcattaggtcctgaaatgcttgag

SEQ ID NO: 490032 - DNA, 511 bp, Homo sapiens
gcctttcaagtataagatacctactacctggccctttatgaaaaacaaaatttgacacaccatggactaggagatagacaggtgcaagttcttgtctctgctttgcaagttattagctcttactttgaacaagaaaaatcctctttttgcatatttctttcctttaaaataatgggtttagtcttttcagactatgataggcaacatggtaggcagaattctaaaatggtctctatgatcaccagccactagtgctatgccctattattatttcctcccgttgggtatgggtgaagcctatgctttgtatctaataacttgaacatggcaaaggtaatgaaatgtcactttctggattagcattatatgccaaaggcaattggatgtcactttcatgaygacatgacactgtataagattcccatcttagcagacagaagagaaggattctctgattagctttaaagaaatgaacagccatgaaataaaccaccaatggacagtgccatgt

SEQ ID NO: 490033 - DNA, 450 bp, Homo sapiens
gggcttctcagagtaagaaaggaccatagggtaatgtcaaagctagtgtgctaataggaaaatgtggactggagttgaagataatgctaagggtrtgacttaaaaaccctttaataagacctcagaaagagataagttggtgcctcatagacccatgcagacagacaaaagcccttctaagggtcttagggtcttgtttagcaagtcctctctattaaacaatagggcttctaaaactctcaaaacagactcatagggggcccagtacagacaagggtttatctcaaaaagatgtgagtatgtattagtccgttttcgtgctgctgataaagacatgccttagactgggcaatttacaacagaaagaggtttaattggacttacagttccatgtggctgggaaagcctcacattaatggcgaaaggcaaaaaagagcaactcacgtctta

SEQ ID NO: 490034 - DNA, 566 bp, Homo sapiens
gctggggcttctcagagtaagaaaggaccatagggtaatgtcaaagctagtgtgctaataggaaaatgtggactggagttgaagataatgctaagggtatgacttaaaaaccctttaataagacctcagaaagagataagttggtgcctcatagacccatgcagacagacaaaagcccttctaagggtcttagggtcttgtttagcaagtcctctctattaaacaatagggcttctaaaactctcaaaacagactcatagggggcccagtacagacaagggtttatctcaaaaagatgtgagtatgtattagtccgttttygtgctgctgataaagacatgccttagactgggcaatttacaacagaaagaggtttaattggacttacagttccatgtggctgggaaagcctcacattaatggcgaaaggcaaaaaagagcaactcacgtcttacctggatggcagcaggcaaacagagagagcttgtgaaggggaactcctctttttaaaaaccatcagatctcgtgagacttattcactctcacaagaacagcacgggaaagac

SEQ ID NO: 490035 - DNA, 612 bp, Homo sapiens
tcagattgagaggagcagaacatgaggtactgaactcaagaggtctcacgtgcacttggacctgatttacatgacaaggttctggcctgattcagtaacatgatacaatcttatgtggggtattgggaggttgagtatgtatttttcatggggaagaatgtaaataatccatggaataaaaaatatgacttttaaaatgtggcctcagaatcctttgcactcctctcattaagaagtaaggtctatgagtttccctttgaatttgagtgggcttttgacttcttcattcaatactgcaagtttcaagtgatgttatgtgacttctaaatctagattataaaaggtcttgcagattttgcataatttttttaaattacacaaaaatcatttttgcataattctccttcctggagctttcattcttgtacattccctcccagaatctagccaccatgctgcgagaattccaagcctcacagagagggcccgtgtaggttcaaagtactagagtcccagttgagactgtccttgagccaccacacccygaaaagcagactgtgggtagagttaatattggaaatgttttctccagtcttagttgtcccagccccc

SEQ ID NO: 490036 - DNA, 612 bp, Homo sapiens
tcagattgagaggagcagaacatgaggtactgaactcaagaggtctcacgtgcacttggacctgatttacatgacaaggttctggcctgattcagtaacatgatacaatcttatgtggggtattgggaggttgagtatgtatttttcatggggaagaatgtaaataatccatggaataaaaaatatgacttttaaaatgtggcctcagaatcctttgcactcctctcattaagaagtaaggtctatgagtttccctttgaatttgagtgggcttttgacttcttcattcaatactgcaagtttcaagtgatgttatgtgacttctaaatctagattataaaaggtcttgcagattttgcataatttttttaaattacacaaaaatcatttttgcataattctccttcctggagctttcattcttgtacattccctcccagaatctagccaccatgctgcgagaattccaagcctcacagagagggcccgtgtaggttcaaagtactagagtcccagttgagactgtccttgagccaccacaccccgaaaagcagactgtgggtagagttwatattggaaatgttttctccagtcttagttgtcccagccccc

SEQ ID NO: 490037 - DNA, 536 bp, Homo sapiens
tagggagccgggatttgaatgcagatagtctggttccagatgctgcacttgtaatcactatctcatgcactcttagttctgagtgttgcctgtcaactcagcaaacacttgttacctaggcctggaatgaaaactaccaccgtttctgtagagtaagtgtttcttctacccagcagcccctgaatttaactgtgaaatttcaccccaattctcagaccaattcaccatttcatctcattcattcaacaggtactcattgagagcctgctctgytcttatctctagggatcagatggtcatcctgaacaaataaagcactgccttcttatcatcatataatatagtgagagaagccaacatcatcataataatctctccaataaatataagggcacaatgtggttattggtatgaaagaaaagcacattgtgctctcaaagcctccaacaggagaactggattcagtttgagctttggtaaaggcttccctgaaaaagtgactttcagttgactagtcactgatgggctaatcagta

SEQ ID NO: 490038 - DNA, 433 bp, Homo sapiens
ttcagcgtccaggagagaaagcgcacagtcaggggatggatgtgagaaggtgtcttccgcaactgtgcaggggtagaacccacgccctcaatgacccacaggcaggtgatggggataggggcaggcaatagtcaagcatggcccctggggtctgcagaggaggagcagaagactggggagagggtaagagctcacttcgggacacattggagtgaggctccgatggggcgcctggaggtgcaggagttggggttcactggaggccaggacaggtcttgagctggagttaacctgagtcattctcaaatgcacacagaasgcctactgcctgccaagcactgtgctggctataccagctacaccactgcacatgggggcagtcaagaccataggaatgagagtgaggggtggcccctgggcacccacatcaaaa

SEQ ID NO: 490039 - DNA, 563 bp, Homo sapiens
tggtatagttccacaagaaattctgttagtattttcactgcgattgtgttgatgtgtagcttaatttaggagaactggcatccttataatgttgagatttttaacccaagaatgtgctgtaagttcacatttgtatcctttggcagcatttaaatggttttgcacattttttaagaagtttatttctaggttgcttttgcaaatggagtcttatatccattatattttagttctgattgttgtctgtgtatttgaaggccattgataatagaacgctaattttgaatccagctaccttacacaattagtcattttcaataactttttcagttgattcttgtgggttttccatgtaaatggtcaaataatcttcaaacacggataaattacctcctcctctccaakcggatacctctttcctggagcattggctaatcctccagagtagtggcgatggtgatgacagtgtggaaagtatctgccccctggcttattctagatataaaatagatgactgggctaaaatagataaatgctaatttatggaattatccatctagtct

SEQ ID NO: 490040 - DNA, 594 bp, Homo sapiens
acttccaccaattgtgaaatggccttcacttcttcactacttcaaggctgagtagtaaagccttttggaattgaaaactggaaccttgttttgatagggctagttggcagtgtctcacagtggttgagttcccttgacttttcctctccttcccactagcagggatgctctgggctttaggatcaagactgtctttagggggctggggcacaactgagatggggattagaagaggaacccaagacctttagtactttatggaaaaaccattttgttttgctgattgacttgcaggagttctgccaatgccttttggttttgttttgccatttctgtggtcttggaagtggcaggtgaccagataatgtacatgagaatctgccagtgggtcaaaggaggtggcaggtggggaacctggtggtggcagccacaaaggcttcagctcggaatagctgtgttgtggtctcattttcctgcattcacgcattcrttcactaaacagtccattcacccctaaaataattactgagtgctttcctatgccagacactgtgtttgactttgggatgcagagtcattaaagaaaaagggggg

SEQ ID NO: 490041 - DNA, 610 bp, Homo sapiens
cagcctctaagatgggtgggctgcacacaatcaccccttcccggtcagtgctagagctgggagtrgggtggggaggaagttgagggccagtcagagaagaaggaggggtgagggggtgccccactatgggatccctgcagttgggaaccccataaaaaggcatcaaaacaaacctgaggccaggtgcggtggctcatacttgtaatcccagcactttgggaggttgaggtgagtggatcacctgaggtcaggagtttgagaccagcctggccaatgtggtgaaaccccgtctctaccaaaaatacaaaacttagccgagcatggtggcacatgcgcctgtaatccctgctacttgggaggctgaggcaggagaattgctggaacctgggaggtggaggttacagtgagctgagattgcaccactgcactccagcctgggcgacagagcgagactctgtctcaaaaaacaacaacaacgacaaacaaacaaacaacaaaaaaaccccacaaacccgagcatcaccaccagcttcctaggactcccaaaagcagggtgggagccaagaattctccatggaggggaagaggtcccaagcccccacagattggg

SEQ ID NO: 490042 - DNA, 610 bp, Homo sapiens
cagcctctaagatgggtgggctgcacacaatcaccccttcccggtcagtgctagagctgggagtggggtggggaggaagttgagggccagtcagagaagaaggaggggtgagggggtgccccactatgkgatccctgcagttgggaaccccataaaaaggcatcaaaacaaacctgaggccaggtgcggtggctcatacttgtaatcccagcactttgggaggttgaggtgagtggatcacctgaggtcaggagtttgagaccagcctggccaatgtggtgaaaccccgtctctaccaaaaatacaaaacttagccgagcatggtggcacatgcgcctgtaatccctgctacttgggaggctgaggcaggagaattgctggaacctgggaggtggaggttacagtgagctgagattgcaccactgcactccagcctgggcgacagagcgagactctgtctcaaaaaacaacaacaacgacaaacaaacaaacaacaaaaaaaccccacaaacccgagcatcaccaccagcttcctaggactcccaaaagcagggtgggagccaagaattctccatggaggggaagaggtcccaagcccccacagattggg

SEQ ID NO: 490043 - DNA, 637 bp, Homo sapiens
tgaagttccttggcgtcatttccatcatagcacttaccctgtagtgaaatgagcttagtgagccgctctcacggacagccagtcttgtggtcacttagggttttttttctttttcttttttgagacaggktctcattgtgttgtccagacttgcctggaactcctgggctcaagagatcctcccccctcagcctcccatgtagctgggactacaggtgtgcaccaccgcacccggctcctaactcacttatgtttacatgaccaaaaatacacatttgtttgcagggtttcttaactatcaatgtgtccagcttccagtggaaattgacttatgtttctgctttttaaaatctgcaggggggacctcaattatttcagcttcctggtacatctcttcctctttctggaactctagggaggagcggctttctttctgctggggttgctgagctgctggggtgtcaaccaggagatgctgtgggccctcttcatccctcatgaaaacagtctgcctgacaccaaaggcatctcagagaaaagcagaggcagaggtggagagaatctgagctggtgccagacagcacccgtacactcagatccagctatacgtgaagctgtggctctacccaggactttt

SEQ ID NO: 490044 - DNA, 637 bp, Homo sapiens
tgaagttccttggcgtcatttccatcatagcacttaccctgtagtgaaatgagcttagtgagccgctctcacggacagccagtcttgtggtcacttagggttttttttctttttcttttttgagacagggtctcattgtgttgtccagacttgcctggaactcctgggctcaagagatcctcccccctcagcctcccatgtagctgggactacaggtgtgcaccaccgcacccggctcctaactcacttatgtttacatgaccaaaaatacacatttgtttgcagggtttcttaactatcaatgtgtccagcttccagtggaaattgacttatgtttctgctttttaaaatctgcaggggggacctcaattatttcagcttcctggtacatctcttcctctttctggaactctagggaggagcggctttctttctgctggggttgctgagctgctggggtgtcaaccaggagatgctgtgggccctcttcatccctcatgaaaacagtctgcctgacaccaaaggcatctcagagaaaagcagaggcagaggtggagagartctgagctggtgccagacagcacccgtacactcagatccagctatacgtgaagctgtggctctacccaggactttt

SEQ ID NO: 490045 - DNA, 637 bp, Homo sapiens
atggccccaaatggagagtaattattattgcaaattcttgagagaacagaaacaaaaggcaaaagatatatatagattacaacatgttcttgacacagcacaaaaattgaatggaggtgaggacagtttcagcaacaaatgacttaaacattgaatctaaaaggaaaacatggctatcaaacttaaagtaactagaatgtcaacaataaaccttacagatcacctgtcccaataaaaaaacagaatgttgactttttaaacacacatgtatccagaagaattattgggaaattattgtatccatttctaagtatctctaagtactggaaatatgtattttgatatagattcaaaaaataattaatgtgtaagacaaactattttagaagrtatttaaaggattatatttaggttggttaggcaaagaactgaaaaagaacaccctgcccttatttcaattctatttgctctgtgaaggagtggagctggccaacttaagttacttctttgtgcccaggatataactcatcccaagtagcttttgaattgcctgggagctcacaaaaggagaggggtccctgaaggatttctaggactatgaaatagtttgagtacaccatgctctctttgtacatag

SEQ ID NO: 490046 - DNA, 637 bp, Homo sapiens
atggccccaaatggagagtaattattattgcaaattcttgagagaacagaaacaaaaggcaaaagatatatatagattacaacatgttcttgacacagcacaaaaattgaatggaggtgaggacagtttcagcaacaaatgacttaaacattgaatctaaaaggaaaacatggctatcaaacttaaagtaactagaatgtcaacaataaaccttacagatcacctgtcccaataaaaaaacagaatgttgactttttaaacacacatgtatccagaagaattattgggaaattattgtatccatttctaagtatctctaagtactggaaatatgtattttgatatagattcaaaaaataattaatgtgtaagacaaactattttagaagatatttaaaggattatatttaggttggttaggcaaagaactgaaaaagaacaccctgcccttatttcaattctatttgctctgtgaaggagtggagctggccaacttaagttacttctttgtgcccaggatataactcatcccaagtagcttttgaattgcctgggagctcacaaaaggagaggggtccctgaaggatttcyaggactatgaaatagtttgagtacaccatgctctctttgtacatag

SEQ ID NO: 490047 - DNA, 637 bp, Homo sapiens
atggccccaaatggagagtaattattattgcaaattcttgagagaacagaaacaaaaggcaaaagatatatatagattacaacatgttcttgacacagcacaaaaattgaatggaggtgaggacagtttcagcaacaaatgacttaaacattgaatctaaaaggaaaacatggctatcaaacttaaagtaactagaatgtcaacaataaaccttacagatcacctgtcccaataaaaaaacagaatgttgactttttaaacacacatgtatccagaagaattattgggaaattattgtatccatttctaagtatctctaagtactggaaatatgtattttgatatagattcaaaaaataattaatgtgtaagacaaactattttagaagatatttaaaggattatatttaggttggttaggcaaagaactgaaaaagaacaccctgcccttatttcaattctatttgctctgtgaaggagtggagctggccaacttaagttacttctttgtgcccaggatataactcatcccaagtagcttttgaattgcctgggagctcacaaaaggagaggggtccctgaaggatttctargactatgaaatagtttgagtacaccatgctctctttgtacatag

SEQ ID NO: 490048 - DNA, 583 bp, Homo sapiens
atctgggagggagggggaactacaggggagtgaccttacaaagtgtcccacatgggaaaaccgaccacatggggcccaggggagctgtggaagggacccaggatccacgtgccctgcaggggtgctgccattggaaccagggccgggggtggggggtcagttatgccagtttcccttctttggcctcaagtggccccagactcacttctaaaatattcccaaggcagtagccatggcaagagggaactaggccccagagggagcccctccatgccataccccacctgccakagaaacttctctgtacactccccactcagtgggcctgtgctgtgcttgctgggggcattctacgtttcagcagagctgagctgcctgcccgcctcagggcttgagcccctctccttccccccacacactcctgctgctcttgaatgaacatggaaactctttaacagggtcagccctcaagacatctcaagttcccctgctgcaggctgcatccagtttcttaaaacactgcactggtttcatctggccctggacacatgcccttccagacaaccaaacctccctgtcatca

SEQ ID NO: 490049 - DNA, 583 bp, Homo sapiens
atctgggagggagggggaactacaggggagtgaccttacaaagtgtcccacatgggaaaaccgaccacatggggcccaggggagctgtggaagggacccaggatccacgtgccctgcaggggtgctgccattggaaccagggccgggggtggggggtcagttatgccagtttcccttctttggcctcaagtggccccagactcacttctaaaatattcccaaggcagtagccatggcaagagggaactaggccccagagggagcccctccatgccataccccacctgccagagaaacttctctgyacactccccactcagtgggcctgtgctgtgcttgctgggggcattctacgtttcagcagagctgagctgcctgcccgcctcagggcttgagcccctctccttccccccacacactcctgctgctcttgaatgaacatggaaactctttaacagggtcagccctcaagacatctcaagttcccctgctgcaggctgcatccagtttcttaaaacactgcactggtttcatctggccctggacacatgcccttccagacaaccaaacctccctgtcatca

SEQ ID NO: 490050 - DNA, 595 bp, Homo sapiens
cctgggtggctttcctcaatgctccctgagtcccctgttggttctctaagcatcgcaggagcctaggtttcccctgggagccacttggggaggcctgggtgtcctgtctgcatgccgatgaagacctcacagggggctggaagctctgcaggccctgcctgccctgcatgcttcccccactgcgagggatttctccacagatctggcttctcccctgctgaacctgtgctttctgatctgcctcactcgtggcctcactcatggccatcggccctcaggtccacggggccctgaaaatgctttgaatagagcaggctggggtgggctggcaagcagagagggacacaggcagcccattagaaacacgagaagacactgagaagttcaagtgcgaataaagtgccgagtgacattcccaacgaattccgtctttaaatggaatgttgctggcctccctctcaggtctgcaaaaatattttttgaagccaagtttcagtctgcagcggtgccttctcttcctgtttatttactagtcctggcctgtgcggctggtgggaaattcttcytgtttatttacttgtcctgacctgtgcag

SEQ ID NO: 490051 - DNA, 634 bp, Homo sapiens
cgtcgtccaagcaaaagggaaaagagaaaatgccttgcaaagcaaatgacactaatgtcaggtttgaagagctgagttactgacctggggtgagtttgtgagatcccccagcacagcagaacagccaggaccaggcgtggagatgtgccagtatttgcccccaaacgaatacatcgagacacgattttatccagatgcccctctcttccaactgatcaaagtagtaggtgtcactcacttctaccgtaaatttgtgcatattaatgatttcccttattcaaagacaaggcagggaaaattgatcagaagaaaactgagaaactaaattaagcaatttttcatttattttctgctaagtttcttgtttcttttcttctttcatcgcaatcacaagaaaagacagaaatagattaaccatccattaaaaaccccagcagccagttacactgccacggaagaggccgggactagctttccaggcccctccgcagtcgaggaccgagctgccttttctcccggagtcggtcaggatttccagtcctyactgtggccgggcaccctctatagtcctgccgtccatcccgccctaaaataagactgtgggcctgacaaaggcccggggtgccttggagtt

SEQ ID NO: 490052 - DNA, 600 bp, Homo sapiens
actccagccttagcaacagagcaagacgctgtctcaaaaacaaacaaacaaagcaatggcagtaaaaataagaaggaaaagacataattgtaaacagtaaagggctgttttaggcattacaggacaggttaataaattggatgtacaaaatgaaacagaggagaatagggtaactcctttttcttgcttggataactggttggatactgataagactagatttgagatggaagacagtgaggtcaactttagacaggttaactttgtacatgtgagacgcgcaggtagagatgctgggctcatgggagagagctagatgagacaaaggttcaagtcataggaatgaatgagatagcccaaagaaaagagtgtagaatgaggcgatacctgaagtatcagagtatctgagcacaggatatcatataacaaatgtaaytgagaaaagatacttctgtacttctacagcacagcttatacagagtgttttgcaagaaagctaattctctattaggagtcttatcacttataaagttttaagcaattgtgttctgtatgcctgagaagtcacgtgcgttgtgactcaggattatttttatatca

SEQ ID NO: 490053 - DNA, 619 bp, Homo sapiens
tctgggggagaatatttagcctcagggatttataacctgtgctatggtttgaatgtttgtcccttctaaaactcatgttaaagtttaattgccgttgtaacagtattaagatatgggacctttaagaggtgatgaggctatgagggctccactttgatgggtgggattaatgctgtatgaaaaaagctaggcccccccttgcctctgtggcctgacttctgccgtctgatgatgcaccaagaaggtccttgccagatgctggcaccatgatattggacttctcagactctagaattgttagacaatgcatttctgtttataaattgcccattctcaggtattctgttacaggaacacaaaacgtactaaaacagatgttagttggaccatcagcttcatagactatttaaagactaggcaaaratgtatactcattagctaagcaagggagggtaaatcttggttagaccagagatgagattcttcctatggtgtgctggtattttttcctgggtccttatgacatccaggcctctaccctcacataggtgttgtaattcagaacacaaacctaataatgtttctcaaaaatgttagcggcctttggattcttcttttc

SEQ ID NO: 490054 - DNA, 478 bp, Homo sapiens
attaggcttacctgaaacatagatggtattgacgccataagggctgttttaaatatgctttcagagggatatggctgtgtccagccatccctccaaccactgcctggtggcctgaacatcagaagtaaggctctgtccactctatatagtttgttcaggtcttttgatactactcgagtctatacaaggtacagcccccagttcccagagcgaaattgtttctccaggcgaaaacgggctaatgtccaactttgattctaaataagtgagatcgtagagacctgaccagggctgtgaggaccactctcatttctatccatcttgacaacagtcactcacgaggcatttctgaattcctgacataactatcgcacgaggttaactgctataaaagtcaatgaartaagtaaagtcactccctactgtaagaaaaaaacaacaacaaactcattaatttctcaatttaaagggaaatttt

SEQ ID NO: 490055 - DNA, 478 bp, Homo sapiens
attaggcttacctgaaacatagatggtattgacgccataagggctgttttaaatatgctttcagagggatatggctgtgtccagccatccctccaaccactgcctggtggcctgaacatcagaagtaaggctctgtccactctatatagtttgttcaggtcttttgatactactcgagtctatacaaggtacagcccccagttcccagagcgaaattgtttctccaggcgaaaacgggctaatgtccaactttgattctaaataagtgagatcgtagagacctgaccagggctgtgaggaccactctcatttctatccatcttgacaacagtcactcacgaggcatttctgaattcctgacataactatcgcacgaggttaactgctataaaagtcaatgaagtaagtraagtcactccctactgtaagaaaaaaacaacaacaaactcattaatttctcaatttaaagggaaatttt

SEQ ID NO: 490056 - DNA, 642 bp, Homo sapiens
tattagagaatcaatgaatgctctccgattaagtcattcttgcaagcacttaccattaaacttattagccattacataagcccaattaattagttaactmatttgtaatcataatgatcacaatgtggaaagaagtcagtcttcaactaaactattttcggcgtcacccaagatcagatcgctccctccattttatactttgaaaacactcactttctgtctctgtctcttccacgcatgtgtgtgcacacaggcacaccgctcataaactgaaccaacaaatacaagcctatgcaattttacagcaagcctcaaagctctgatacagtaattccaagtaatcctacttttgtttccatctgtataggtctcattatactaacactcctgcagatggtgtcagaaaggtgaagtgtcaagtccacaaaggggagaccccaacagctcattgctactgcaatatcaatcactgctggtggtttttacttttatctccttccctccttagttgtcccactcacactgtcagttcggttagaatatttcacctacacctcacaatatgtcaaaaggaagtagacacacgctgtgaaaagctggtaattttattagattcctttacctttaaaaatctgttacttg

SEQ ID NO: 490057 - DNA, 642 bp, Homo sapiens
tattagagaatcaatgaatgctctccgattaagtcattcttgcaagcacttaccattaaacttattagccattacataagcccaattaattagttaactaatttgtaatcataatgatcacaatgtggaaagaagtcagtcttcaactaaactattttcggcgtcacccaagatcagatcgctccctccattttatactttgaaaacactcactttctrtctctgtctcttccacgcatgtgtgtgcacacaggcacaccgctcataaactgaaccaacaaatacaagcctatgcaattttacagcaagcctcaaagctctgatacagtaattccaagtaatcctacttttgtttccatctgtataggtctcattatactaacactcctgcagatggtgtcagaaaggtgaagtgtcaagtccacaaaggggagaccccaacagctcattgctactgcaatatcaatcactgctggtggtttttacttttatctccttccctccttagttgtcccactcacactgtcagttcggttagaatatttcacctacacctcacaatatgtcaaaaggaagtagacacacgctgtgaaaagctggtaattttattagattcctttacctttaaaaatctgttacttg

SEQ ID NO: 490058 - DNA, 582 bp, Homo sapiens
gtgagctaatgctaaaccaggagatagcgatagctagagaatccaggctgctgttttctttttctttctttttttaaaaagaaatcttcttgggcagcctttctagatttctggaatgtttctattagaaacaaatttaagtagattttaaaatgatcagccaaattccaaaatacagaacatgtacctgtggtataactacatttaaagggaagatcattttatagacttggtatttacaagcatattgatcagtgtttattgaacttttaatttaattctctcttcttttcagtgccttattggcaattactcacatttttggaatgagccaaatgagagtttctatgtgtcagttacttatttttcttctgtgaagcatattactttagaactatgaatctatttaartgtgatacatgtaaggaagcaaatattttacactttaatttttggttcacataaaacttgaatattatggacaatcttagatttatgtagcaaagtcttgcagcagtgtcataatacttaaagctatttcaaaagattgcaaacagtatgcccaatggaaaaagtttactc

SEQ ID NO: 490059 - DNA, 641 bp, Homo sapiens
gaactaaaactcatttaaagataacagttacattaaattcagtagaaaacacctaagaagtttccattgttttcctggaccagtggcacagtgtcttccccattgtgcttttaaaaatagctggagtctcaatactcacaaaaccaataaattcaatacaacccttgttaacaatgactagtatatttattcccttaatgcaatggttctaactttgtccacargaataaacatacaagtatatccaagaacatttagaaaataatggggtgttactacaacacatattaaaatgtattgtaaaataagagtgattaaaacagtgtttaaataaagacactgatatgatcattgtttaattgagctaacaggacttgtttttgttgtaactgctgaggactctccagagaagaagaaatctcatccttcttctaccctgacttcaggaagcatagaccaactttgtgattataaacatctgagctacccatatacatttgtctcctaccagtctcgaaagagatggtaaattcttgttatttaggattatggatattgaaaggtagattatccaaagaggagaaagtgtattactacactgtaagaaatggaagtggctcaaccagaagagagagtagtct

SEQ ID NO: 490060 - DNA, 559 bp, Homo sapiens
gatcattacgttaaatacagtaagtcaggcacagaaagacaaacatcacacgttctcacttatctgtgggatctaaaaatcaaaacaatttaactcatggacagagagtagaaggatggttaccagagactgggaagagtagtggagggctgggaggtaggttaggatcattaatgagtacaaaaaaaaatagttagaatgaataaatacaacctactatttgatagcacaacrgggtgactataatcaataataacttacttgtacattttaaaataacttaaagagtgtaattagattgtttgcaactcaagggataaatgcttgaggcaatggataccccattctccatcatggcttatttcacactgcatggttgtatcgaaacatctcctatatcctataaaaacataaacctactatgcacccacaaaaattaaaagtaaaataaattcttttgaaaaatctcagatgaattaagccatatagccatctctgcttaggcaccagtcaaaagtgtgtgaagtcatcttaacccttcagaccatccttccaccag

SEQ ID NO: 490061 - DNA, 576 bp, Homo sapiens
gcccccgctgtcttgggcatagtcatctcaaatgtgccttctactcaaacgtggcatctcctcctctgactctgactttcctgtctccttcttataaagtccctggtgatgttattggacccacccagataatacagagtaatctcccccgtcttgacataatcacatctgcaaagttccatttaaggggtaagtgacatagtcaccggttctggaattcattagaatatggacatcttggtagtggagggcaggcgttatgcagcttggcacacttggaaaaggaaaaccacattgtattttgtgtctctgtccacctttgtcaycaagggatggtaactccattgtgctggctcctggcatggacagaactgaccacagcttcaataaaagggctactttgagagacgagatgttgacaggattaaagaagataagaaggactgtgaggtatccagagaccagcaacaagaggggctgttagccctgtgagcaagggtcgggacaaggtcagggagctgcatcacagaccccagtgaggacagagccatggaggaaggactgttggcagcagct

SEQ ID NO: 490062 - DNA, 639 bp, Homo sapiens
ttgcttgctcaaggtgcatatctaatgatagtcggctctacagaaacattcagggacccaggctgatgaagcccccgctgtcttgggcatagtcatctcaaatgtgccttctactcaaacgtggcatctcctcctctgactctgactttcctgtctccttcttataaagtccctggtgatgttattggacccacccagataatacagagtaatctcccccgtcttgacataatcacatctgcaaagttccatttaaggggtaagtgacatagtcaccggttctggaattcattagaatatggacatcttggtagtggagggcaggcgttatgcagcttggcacacttggaaaaggaaaaccacattgtattttgtgtctctgtccacctttgtcatcaagggatggtaactccattgtgctggctcctggcatggacagaactgaccacagcttcaataaaaggrctactttgagagacgagatgttgacaggattaaagaagataagaaggactgtgaggtatccagagaccagcaacaagaggggctgttagccctgtgagcaagggtcgggacaaggtcagggagctgcatcacagaccccagtgaggacagagccatggaggaaggactgttggc

SEQ ID NO: 490063 - DNA, 591 bp, Homo sapiens
tcaccagcgtgttccacacaacatgggcaaggaagggaggaaaaacaaaacacaaccacaggccgtcagtcatctggcttgcagttgccaattaaaggtttcccgggctatctggattcagatgaagaactaagccttccttcacttacattgaattcatacgagtattcagtcgtgacatttgtccatatttccaaaggaaaatagcttccatttctagttattaaaaaatacaaagtaattgtagaaaattccaacaatgtagacaagccgaaagcagaaaataaataatacttgaaatctcatcacttggagaaaataaaactaatttttgtaaccgggggagcattcagacagcaacacagatcccccgcacacataaacacatcctgtaataaagaaaaattaagtccttgacatctgttgcacgtgcrtctaattgaaaagatgtgcttgcaatggtctgatttaaaatatcggctagatggtgttctagaaatgcagtcgggcccctgcagggtgggggtggctcctggaacggtgagacagtcacccccccagaatagctgtaggcttgggttcggttgtgat

SEQ ID NO: 490064 - DNA, 380 bp, Homo sapiens
ccagaaaatagttgccttttctctctatctccaattcttcatctagcatttcttttttatagtagatgtattaagacataatttaatttacataattacaattaacccatttaaaaatgtatcgctcaatgttttagtatatacgcaggtatacgtaaccatatgattgtgaattttagaacatttccattacctaacaaagaaaccctggatcttttagctattgtctactattattcactaatccaagtcaatgcaattggtccgtgaaacaacccgatcttaactggcaaattctgtgtcatggagaaggcctytagtatcaacatagcaaaaactgaccaacaaaagaacgaggtaaaaatagtaattgagtgccc

SEQ ID NO: 490065 - DNA, 424 bp, Homo sapiens
ccttccaaaaggctctataaattttctggctatctgaaatttatgggtagatcaagattcaaaataagtgccacttatgtaggaaacactgacttcccattgtgatgatgacattctcctggtgggcctaggacaccattcaataaggactcgatactcttttaactcacatgccacaatacagttaggccgctaayacagacaaaatacaagaaccgaataagtaaaatttgtgactataatctgggaaagaacattccagagggaatgattgccaaaattttaaccttccctacccaacaaataaagagattggtggagctattgagctactggagttctcacattcagcatgcagggatcttgatggcatccatatacagggctactggaaaaactgctacctttgaacagaggccccgac

SEQ ID NO: 490066 - DNA, 424 bp, Homo sapiens
ccttccaaaaggctctataaattttctggctatctgaaatttatgggtagatcaagattcaaaataagtgccacttatgtaggaaacactgacttcccattgtgatgatgacattctcctggtgggcctaggacaccattcaataaggactcgatactcttttaactcacatgccacaatacagttaggccgctaacacagacaaaatacaagaaccgaataagtaaaatttgtgactataatctgggaaagaacattccagagggaatgattgccaaaattttaaccttccctacccaacaaataaagagattggtggagctattgagctactggagttctcacattyagcatgcagggatcttgatggcatccatatacagggctactggaaaaactgctacctttgaacagaggccccgac

SEQ ID NO: 490067 - DNA, 574 bp, Homo sapiens
cataaatacaactagtgttctctagatgtgacctctaagaccactcatagcttcaagcaacactgtctcaccacagcttatatttccctctggaaacttatcacaccktcactgccctttgccctgggtgagatagctgatgcttcagtggcagtgtactgtcaccagaaactctgtgcctgacagcttgtaatttaaggcaatctctactcctttagccattagtgtaataaagatggaattacaacatatttgacacatcccttttctgaattgtggcattaggaaattatggacatttcagctaaaagcttttagatgttgaaaggaaaaagagaagagactcttttataatactagcatgtggagcctgaatactatgattcctgatccacccatgttatttatctgtgagaaaatttggaacagaaatcatcatactgaaacaatgtcactcaataaggacaaatatgaaagaatcttacttttaacctccattgtccattcacttcatgctgtaggactcattttgccttttcttcccttggatgaaaactagggcaggtcccatggc

SEQ ID NO: 490068 - DNA, 549 bp, Homo sapiens
ctgtatataaaagttgaggggtcaaaataattgttcatgggtagatttaaaagcaattcataagaatatcttaattgctttcaacactatatctagcagaataaccattaattttaatatcttgtatatttgtttaaatattttttgaataaagcttaagaggatatcaagttgcataaataagtatctctgtcyttctcatctaaataagattaaactttctaattgaaagttacatacaatttggagtgaaatgatcatttaaatcattttaactctcttaataaaatcactttgatttgtatacacagtgcttaggatgataatacactggaggacaatattataaatgataaacagttgtgctactttgagataagcaaattttatcccatttacttcaattgcagaaatacattgagcctaaactacatgttggtgcagttctagttctaggcattgtgtatagagtagtgaccaaaaatagtctttgacctacagagttcaaatgtaatttgaattctttgtaatcttgttcaaaattatgtt

SEQ ID NO: 490069 - DNA, 619 bp, Homo sapiens
taaatgtgaactttaagcagtgactatctagcaataaattgttggaagctctcctgtttgttttgttgatgctgtatataaacgagtatttagaagaagagttctgtttattcctttatttattatagcttaactgttgcataacattatgtgctgcacgatcctagygccaacaaataatgaataattacctagtactggggttctaaataagacccataccaacaaacagatgtcagtagaattttggctccaggtttttgcctgcaggaagtcattaaaagataagtggaaaatcaagtctgttcccttagtagcagggaacatttggagctatacagggaggcttattttcggacaacagcaatagctcccacattagatggtaatcactcttgtatttatagactccttgtaaatcaatctcagacaggcaatgaaatgatcttctttatatttacttttaggctatttaagaaaagtagctctaaacaaaccgaaaatttctatacaatcctaccccttagtcgatttcatagttcagtcttacaaaatcatattgtggttatctgagaactcttaatgacttttcagtatccggaaagtagcattatattcc

SEQ ID NO: 490070 - DNA, 560 bp, Homo sapiens
tgcagaggctgcctggagcaggcagagctcacaggtgcacattcccktgtgagcccaggtagggcttcagggctggcctgcagccttgcagatgagctgtgcaaggttactgcagaggggcaccacctcccttctgttcccgtgacttatttgactgtctttatgacagtgccactctgtcatataattactggagctttgtagccagtcttaaaatcaggagtgttagttctctttgtccttttttttcgaagttgttgtagatattctaagtcttttgcatttacatatacattttatgatcattttgttatgatgtacaaaaaaatctgcttgagtgggattatgttgaatctgtagatgaatttggggagaactgacatcctaatcctattgagtcttctcacccaagaacatgatataagcctcctttaatttctctcaacagtgttttgtagtttccaaatctttcatcaggtttattccataatttcatattttctgatgctactttcatggtatttaaaggattttaacgtatgatttttattgctagtata

SEQ ID NO: 490071 - DNA, 560 bp, Homo sapiens
tgcagaggctgcctggagcaggcagagctcacaggtgcacattccctkgtgagcccaggtagggcttcagggctggcctgcagccttgcagatgagctgtgcaaggttactgcagaggggcaccacctcccttctgttcccgtgacttatttgactgtctttatgacagtgccactctgtcatataattactggagctttgtagccagtcttaaaatcaggagtgttagttctctttgtccttttttttcgaagttgttgtagatattctaagtcttttgcatttacatatacattttatgatcattttgttatgatgtacaaaaaaatctgcttgagtgggattatgttgaatctgtagatgaatttggggagaactgacatcctaatcctattgagtcttctcacccaagaacatgatataagcctcctttaatttctctcaacagtgttttgtagtttccaaatctttcatcaggtttattccataatttcatattttctgatgctactttcatggtatttaaaggattttaacgtatgatttttattgctagtata

SEQ ID NO: 490072 - DNA, 499 bp, Homo sapiens
cccgttcattcatttattatccacccattcatccattcacccattatccacccagccacccacccacccatccatccatccatccatccacacatctatccatccatccacccacctatctatacacccattcatccacccattatcyatccatccatccatccatgcatccatacattcatccataattcacacattatccatttattcatccacccatccatttacccacccacccactcatccatccactcacccacccatccatccattcacccactcactcgcctgttccaccatcctcctgtccagcatcccaggcactgtactaggtgctggagagctggcacatgaattagacacaacccctgcttttaaagagctcatagcctattcatgcatttgagtgggaaaaacaaaagaaagagtcagagagtgcattttagtgggaggtttctggagtgaagcggattgtggaaaaggacagccactgaggagt

SEQ ID NO: 490073 - DNA, 601 bp, Homo sapiens
gctgctcctcaccagctcctctgagctgaattcatcacagccttcttcagtcctgccttagttcccatcattgttccatatccaaacctgactcaggtacgagttctatgagctgctccagcttcrtgagctctcgtcttttaccaccccattctccatccacagtgaggtggatgaaaggagccaagtcctaactttgaactctgagactgcttggtttgcactgcccactgtacaccgagcctggctactgcagccctgaacagggctatgatgttccactgctgagcccttgcaccccactccgttcctaggttgagttgaccccaatctcgggtccagatctgataacctagttatggttctggaccttatgaatcccagtttctctatttgccccatcttttaaacctgacattttctgagagtttcattctgagctctgattctaataagcagtctatctgccacaattttttcatgaggcctggatccctgccttaatctttttgtgttcatccctgaaaactgtagtcccactgatggataaacctcagctccaaaagctggggccttgatgttcacaaaaataaggcccaca

SEQ ID NO: 490074 - DNA, 531 bp, Homo sapiens
attgttccatatccaaacctgactcaggtacgagttctatgagctgctccagcttcgtgagctctcgtcttttaccaccccattctccatccacagtgaggtggatgaaaggagccaagtcctaactttgaactctgagactgcttggtttgcactgcccactgtacaccgagcctggctactgcagccctgaacagggctatgatgttccactgctgagcccttgcaccccactccgttcctaggttgagttgaccccaatctcgggtccagatctgataacctagttatggttctggaccttatgaatcccagtttctctatttgcccyatcttttaaacctgacattttctgagagtttcattctgagctctgattctaataagcagtctatctgccacaattttttcatgaggcctggatccctgccttaatctttttgtgttcatccctgaaaactgtagtcccactgatggataaacctcagctccaaaagctggggccttgatgttcacaaaaataaggcccac

SEQ ID NO: 490075 - DNA, 543 bp, Homo sapiens
acctcagctgtccacactaagccagaggcatgagaggaggtttggggaaaagacagtagcatctcccccttttttttctcttcyttttttttttttttttttttttttgagacagagtcttgctctgtctcccaggctggagtgcatcttggaggtgcgatcttggctcactgcaacctccacctcctgggttcatgccattctcctgcctcagcctcccgagtagctgggactacaggcacgtgcctccacacccagctaattttttgtgtttttagtagagacagggtttcaccttgttagccaggatggtctcggtctcctgacctcgtgatccacctgcctcagcctgccaaagtgctgggattacaggcatgagccactgcgcccagccagcagtctcctcttttaggccagtggctctccaagttaggcatccatcaggatcacctgcagggcttgtgaaactacagactgctggctccatccccagagtctctgattcagtagggtccagccttcgcagatgtccaggtcacactg

SEQ ID NO: 490076 - DNA, 652 bp, Homo sapiens
aattctccatgaatactgttctttcaacaaggttagaccttccttctctgcagggaaagaaggccaagaatggccaacactgacttggagaaggatacctttgccccaatatatttgaaacacataattttattcccaagtagcaagaaaggaaaacgaaattatggtcccctccaaggctgcctctctgttgcctattatgaacccatttctgtaccaaccatgaggtcctgggcttagggagccagtcttttgcatctttattatagtgagtgagtgcatggcttatcctgagtacccaagaaatgctgttgaacgacaaagataatgccagacatctctagaaacaccaagttcactatgttccccctgggggaatgagaatttcttaatctgctggaaagwtgcaagccacactggaggaaggaggaggaaatttctacaacctggtacataatcatagtttgttttgatagtcacctggtatcttgtggtcaaggtttaatctctactcaggcccagtagcaaaccaagacatctctctcaaagggagagtaatgcaataaagaggccacattattattctaaaatctaagcacttcttctgagactcacctcttagggacatttgtttgatttgccatagacactt

SEQ ID NO: 490077 - DNA, 569 bp, Homo sapiens
cctgtggcttagcgatgttgttcaaggggagtgtaaattaaaaaaaaaaaaattaggagaaaaggccaaagcaggacatttggttggttacattcaatgagactctccttaatggagcctatctgaatgccaggcctgctcaggatcacasagctagtgagaaagggtctcagcatggggcggggcatgagtctgctgggaagccataacgaagttccacagactgcagggcttaggcaaccaaaatttatcttctcacaatgctggaggctagaaatgtgaaatcaaggtatcggcagtttagtttcttctgaggcctctctccttggcttgcagatggctgtctttttctccgtgtcttttcatagtgcccttccctgtgtgtgtctgtttcaatctcctcttcttataaaaacaccagtcatacaagattaaggcccgcccatatgacttcattaccctttttaaatcctatctccaaatatagtcacattttgaggaaacaagggttagagcttcgatatatgaatctgagggcataattcagcccattaacaggtggttttcag

SEQ ID NO: 490078 - DNA, 641 bp, Homo sapiens
ctgcttgaaagccattgctgtagcaacatacaatccaccatgacatatggttctttattaccaggtcttacagccctgaggaattgtatctgccaatgggagaatactcacttcagaattttggatgtaaatattcagtcccttgtgctttgcgtgtcattgctaatggtatataaagaatgatccaagagaagtataaataatcatttggctctacaatgaaaagagcggttctgactataaccagccaaaaattaaatagtgcaaacttcaaactcaaatcaggaggttatcatctgtatccacctcagaaggaaattcttactgccagagtacagaatgaattaaaagaaaaatactagcccatttctgcaatcccatttcagccaacaagctaggcagttctcaaatacaagtgggttgtatttataaaggtctttcatatgttgaaggttcagaacccaatttctagcagaacaataatggctattcartttccagaaataaatcttccataacagatccttgaaagtgtttcaatgcgaatttgggattccagttccaattataaaacacagggataggagaacaatctggaaggattgacgtggctcatcagggtagatgagctaggtgttctc

SEQ ID NO: 490079 - DNA, 583 bp, Homo sapiens
cgctgcatggaaaattccacttatggttgtagaaacaaayattttgaaggcaaaatagtattatatacagcttgtgtaattttgtttcaaaacacagatctttttttttttttaccatcaaaaattttagcactaattaatctaacagagcaatcctgggaatttaacatctattttcagtcattactttcctgaatctttctgttcttacccctggagggcttgtcaaatgaaagcagaaggtttgaaggaagaaagccaaagtcaaagtgaaatgataaagcttgagagtgaataggggaagagaaaaatgcacacatagggcaactcccaaagggataggagaacacaaattgtgggagaatgggactccaccggggaagaacaaaacacgttcagaccagcttcaaagaattcttcatggctgggcacagtaggaaaaggttaaaataacatgagcttccctcagtgaaactcaagaacaaaaagacactgaacaggaccagggttttttgctgtcccacacctgttcagtacagaaggacctgatagactctgggaattgaattccttgcaaggaata

SEQ ID NO: 490080 - DNA, 632 bp, Homo sapiens
aaatgtcaagttacagatgagaatcagatrtttacaataaatacagccaacaaagaactcatatctagaatattgttgtagtttctataataagaaaaaagacatatctatctcattattttaaatggaggaaaaagaacacttctcagaaatgttaaataacaggcaaactctgtttttctcaaggaaaaagggtttgatgggtgagctttggaaatgggtcattatccaggctctttttggccttccctcagaatctctgagcctaaaggccatgttccttcccctctctactcttgcctcttccaattagcaaactcacccaccaggatagatcctgcaccttgagaggacggaagagaaagctttaaatggttaaatcttaggtcaaagccacaacctccaatcctgctttaccaattataaattgagtatgtgacaccctatcttatgtctgtgtctttttctcatttggtttagaattctcatttttcaaaacccaacagtagtaaagggagaggaatttgatgagatgaggttaaataaattgagaggttgaagggtgagggcatggagcacctcgtttggaagcagcggaggaggtgatctctaaccgctgcctctgagaagtg

SEQ ID NO: 490081 - DNA, 637 bp, Homo sapiens
ctgtcaatttcttacccagcaacttttaataactcctcactgtctacagcataaagtccaaattctttaacctgatacttaaaaccctctactaatctggcctcaatatacctctctaaatttatcttctcttgctctcaaatcaaaacttatattctgaaaaccttgtctctcagacataaaatgtgaatttagtctccagatctttgtatatgccaggagatctcgctaggatattgtccccattcctttccacttaactgattcctrcctatccttgaaattcacaccagagcttctattctctatgaaattctatttcacttatccacaataatccacccattatactctcctgccttacttattatgtgactcacccatgttggctcttattatatgctaccttttcttctttttttgactttattttttaatttacaaataaaattgtatgtatttaccatctacagcatgatgtattgaattatatatgcattgtggagtaactaaatatagctaattagcatatgcattacctcacatagttatcatagttatggtgagaacacttaacatccaccgtcttaccatttttcagtaacacaatacaaatggtccctgatttacactggtg

SEQ ID NO: 490082 - DNA, 549 bp, Homo sapiens
aacgaagaacaccaagggaggaagggggatggagcatcactggtgtgcggtggtcttactctaagagcctgcagctcagtggcacatctccacttgggtgtatttttaggaaggactgagacactcatgggtagaaactcctcctaagagatgagacgtgaggaacagaactcggtggagtgaccgtggctcaatggatcttggagagggctgcaacagaagattctttttaaaaaatttatttttaattaaaaaaaaatgttttcaataggttttggggtggtggttggttacataaattctttaggggtgatttttaagattttggtgcrcccatcacccgagcagtgtaccctgtacccaatgtgtagtcttttatccctcaccatcccccacccttttccccaagtccccaaaatccgatgtatcattcttatgcctttgcgtcctcatagcttagttcccacgcatgagtgagaacctatgctgtttggttttccacttctgagttactttaatggtctccaattccatgcaggttgctgtgaa

SEQ ID NO: 490083 - DNA, 549 bp, Homo sapiens
aacgaagaacaccaagggaggaagggggatggagcatcactggtgtgcggtggtcttactctaagagcctgcagctcagtggcacatctccacttgggtgtatttttaggaaggactgagacactcatgggtagaaactcctcctaagagatgagacgtgaggaacagaactcggtggagtgaccgtggctcaatggatcttggagagggctgcaacagaagattctttttaaaaaatttatttttaattaaaaaaaaatgttttcaataggttttggggtggtggttggttacataaattctttaggggtgatttttaagattttggtgcgcccatcacccgagcagtgtaccctgtacccaatgtgtagtcttttatccctcaccaycccccacccttttccccaagtccccaaaatccgatgtatcattcttatgcctttgcgtcctcatagcttagttcccacgcatgagtgagaacctatgctgtttggttttccacttctgagttactttaatggtctccaattccatgcaggttgctgtgaa

SEQ ID NO: 490084 - DNA, 599 bp, Homo sapiens
taccaccaatggttgcttttcatgggccgagctactcatgcatgagtgagctgccagttctttccaattatatcatggagaagcaaccaccccttaaaatttatacataacatctgcacttacacactaccrtcctcacatacttccttagaacatgcttgcctaaaactaaatacaaacagctttaaattatttcaaggacagttggagatccaaagcagggaaagtctcatgacaacatggcatctgcttgaagggtctactagtatcatctgaaaatgtgagtcagatttcactgactttcagtgaaaagaaagtgaaagtcagagaagagaagtaattgtctatcatagtggtttttttttaaactgtttcatgaagcaagagtcctttgagatgctacacactcacacacgtgtgcacacgtgcatgtgcacacatacaggcaaacaagattctgtaatcattcagaaaaatgctgaatacaggcataccttcctttaatgtactttcctttatttttatatgttgaaagtttgtgaccaccctgcatggagcatgacttttggcaccatttttccaacggcatgtgctcactt

SEQ ID NO: 490085 - DNA, 599 bp, Homo sapiens
taccaccaatggttgcttttcatgggccgagctactcatgcatgagtgagctgccagttctttccaattatatcatggagaagcaaccaccccttaaaatttatacataacatctgcacttacacactaccatcctcacatacttccttagaacatgcttgcctaaaactaaatacaaacagctttaaattatttcaaggacagttggagatccaaagcagggaaagtctcatgacaacatggcatctgcttgaagggtctactagtatcatctgaaaatgtgagtcagatttcactgactttcagtgaaaagaaagtgaaagtcagagaagagaagtaattgtctatcatagtggtttttttttaaactgtttcatgaagcaagagtcctttgagatgctacacactcacacacgtgtgcacrcgtgcatgtgcacacatacaggcaaacaagattctgtaatcattcagaaaaatgctgaatacaggcataccttcctttaatgtactttcctttatttttatatgttgaaagtttgtgaccaccctgcatggagcatgacttttggcaccatttttccaacggcatgtgctcactt

SEQ ID NO: 490086 - DNA, 424 bp, Homo sapiens
ttcctcggtgccatttctcacctgggcagatgcaaaccctcagcacatgtgctaagtagagtgtgagccccaatgaaactacagtttactgacctgttggccaagagcccaagttccacactctccttcctagaaagtgctgcacctgtcttccatgggccaattctcaagcctcccagtgtgacggaaagcagcaagcgtggttcccacatgaagaacccacgacacccctgtgtgaagtacactgtgaacctggccacagaagtgactcttgcagccattctgcaactgtctgttagggactccagggtggaaggcacatgcctggtgactccatagaaggcgtatcatgccaacggagtgacagggacaccttccygacagggttcacgtcagggatgctaccttgagcaggaggaaccag

SEQ ID NO: 490087 - DNA, 671 bp, Homo sapiens
tacactgaggaatcagttgctgctgtttccattaagacttttggccttgaaaaaatatcttttaaaaaaataatttagacttttttttttttttttgagacagagtctcgctctgtcaccctggctggagtgcagtggcccaatctcggctggctcaccacaacctctgcctctaggttcaagcgattctcctgccccagcctccagagtagctgggatttcaggcatcagccaccacgcccacctaattttttgtgtgtattttagtagagacggggtttcaccatgttgtccaggctggtctcaaattcctgacctcaagtgatctgcccatctcagcctcccaaagtgctgggattacaggcgtgagtcaccacactcggccgtaatttagacttttattttagattcagggggcatatatgcaggtttgttatatgagtatacatgtgtgatgcttagacttggggtacaattgatcccaccatccaggtactgagcatagtacccaatagtttttcaacacttgctgcctcagtttcttccccagtttctattgttgccatygttttgtccatgagtacccaaagtttagctcccacttatgagtgagaacatgtggtgtttggttttctgttcctgtgttaattcactgaggataatggcttcca

SEQ ID NO: 490088 - DNA, 434 bp, Homo sapiens
tgtgcattcctgggtggctccacggaggctgaagagaaggtcacccaggagggggaagcacaggttggaagagaagggagtccctggtggaagcagataggaagaggagcaccagcgggcatgggcaaggcagaaaaaacagccctgcaatgcacggggcaagataggcacttaactcactctgggccattaatccaatcgtggttggccacaggatttctatggtcttttaaccaatataattctgacatggttgtcatttaatggtttaaaaccaaaaaacagcaagcartgtcctaacctacctataactttccattatacaaccatggaaagagagacagaatttggtgggtttgtttatgtggttgtgagtcacagtctgaagcaaagacatagcaaaatgcataattaaaatagactatgcatttgtt

SEQ ID NO: 490089 - DNA, 557 bp, Homo sapiens
aatttggggggaaaatactccagcaatattgaggcaggaaatcaaaagcaacggctacagatgcagtgttcttagtagaaatagaaagaagcagttcaatgctggaataaagccggacttaacaaagcaccaccataacgtcacagcatggagttcaccatgcagagggaccagcgtacctcaggcaggcaggggcctgatgacatctcttttagcggctgagcattgtgactttgccaggagtctgcagccaccggcatgcccagaggaccgggcatcctgtaggaggctggaatgtgtttgaggtttgacttgctgtgcggctcctggagttttattgagttcytttggtttgaagtcctcatgacattacattaaactacacattatcacaaaaaagttttaaaatacgctaagattactgtaaaggtaagatgataaacttatggcaaaattttccctatccgggaagctaaaggtgcctgttaacctgtgttgtccagtttcacgtatttttaaaatactgccatcagtaccaaagcatagatttctgcact

SEQ ID NO: 490090 - DNA, 688 bp, Homo sapiens
gagacaagaaaatgtgcccacacaaagacacagatacaaatgtttattgcagctttatttgtaatggccccctaaaatggacacagcacacatattcacaaattggtgagtagatacatcaataaatggcctatgacgggacgggatagttcccttgactcccttcacggaggaaaytggaatgtctcatttcactcggcccgctgagtgcaggaaccggagcaaatgaactctgcaacgggccgggccggtctctcctctccagggggagcaggctctgtgcaggctccgcaacagcatccaggcgtgtgacaaccaatgctctttcagctctgccgtccggggacaaccaagtgccaaccagctcagtggacggtcagtgtggcagcccctgccctcttggcatccaggttcttgtctggcatccaggaagaattgagtcgcacgatctctttgaaagatgataaatgcggaagactttattgacccatgggtggctgtcagcggaaagggaggctggaaaggggatgggaaggtctttctctgatgcctaatcgggctcctcttggaagccgcatcgtctgaagttagccgcgtctatccttagtgtcgactgttaagttgcttccctagcttgcggctcagccgctcgatcctcgacactcagccgcttgtgttgctctgccag

SEQ ID NO: 490091 - DNA, 603 bp, Homo sapiens
cagtgtgtctacaagaaccctttcccactacttgggggattgaagatacctgtcaaagctgaagggactggtttggtcattcaataggcaagaaatcacttaggtgacccctatggggtctttttttctctgcctgctcccctggtgccaggttgcaggctgatcttgcccagttcctgactaactagactgcaggctggtgaatcatgggacccacctttgacagcagscatctggctattggccttgggtgcccgaaggctgatgctcaccatccatggagctacaagctcctgctgtgaacctatatgatttgtgtccagttggttgagtgctgctctgagttttagacgaaggagtccaccgtgggcctctaccccatgaggaaaaggaaatcaggaaatgtatgtggggagtgtcttaatgagggaatccgtgcttcaaccatggcaggctggataaagtcttcctattctcctcagattttcagtacctttttagttaaaatgctgaaaattaaagtttgaaagagactagaaactggcctcattccatgtgttaatctgtttgaataatgtcatctcatttgaccagagaaccctt

SEQ ID NO: 490092 - DNA, 674 bp, Homo sapiens
agttcattaactgaccaaagttttgatgtttttcacaagcaattttttaggaactgagcgtcttttagtaatgcacgatgtctgggtccatatagttactgtaytaaattaaccattccccaaacccatgattgcctcgaaacaacagtgcagggagtctgaggtctaggtggccatccgcatcggcattttggcatgactctgtttaatattctcatggccggttttgtcctcatttacataacaaaggcatgctatattttttaaaagtcactttgtcaaaatgacacttgtaaagagcttcaggttaaagaatgtgatctatgcaattttgaccttaaaagttgccagtttgtcatgtaaaaggcccatggctctcccgtctgccccactgaggatgactgcctgagagtcacccttcttccaactcagataaaccccaccccccagtttcaatattaaatcatattgtggatgcaatggaatggcagcttttaatgtctttttataaacctgcacagatgtatgtcatgagtgcactattgtaatgtagcaatactgccatagtgatgaagtgactttttgctagtttctataaaggagaaatcatccaaggttagcagggatttgcatttgtgcttgatccttgagaatagaacattttaagcatgttc

SEQ ID NO: 490093 - DNA, 674 bp, Homo sapiens
agttcattaactgaccaaagttttgatgtttttcacaagcaattttttaggaactgagcgtcttttagtaatgcacgatgtctgggtccatatagttactgtactaaattaaccattccccaaacccatgattgcctcgaaacaacagtgcagggagtctgaggtctaggtggccatccgcatcggcattttggcatgactctgtttaatattctcatggccggttttgtcctcatttacataacaaaggcatgctatattttttaaaagtcactttgtcaaaatgacacttgtaaagagcttcaggttaaagaatgtgatctatgcaattttgaccttaaaagttgccagtttgtcatgtaaaaggcccatggctctcccgtctgccccactgaggatgactgcctgagagtcacccttcttccaactcagataaaccccaccccccagtttcaatattaaatcatattgtggatgcaatggaatggcagcttttaatgtctttttataaacstgcacagatgtatgtcatgagtgcactattgtaatgtagcaatactgccatagtgatgaagtgactttttgctagtttctataaaggagaaatcatccaaggttagcagggatttgcatttgtgcttgatccttgagaatagaacattttaagcatgttc

SEQ ID NO: 490094 - DNA, 584 bp, Homo sapiens
gtcatcttggaagcggagtaccctctggcacacggagctctgctgaagcagcgcagggaggtcagactcggccagtagacgtctctgcagacacgcctgtggtctgggtggtggattgctgctgttgtcatgacgcttataactggaaaccgtttctttcttaggggaacccagaagaacacacaatcctagaatttgctcagttaattaaaaaccttgttggtaagtaggataagtcatttcctgagtaaaatcgactgtgcctgccctatctgttaataacaccttgactagaaagtgggtaattaatacaagctaattgaattggatcaaagcagaactttttatcaggaatacttaagtgttttctaatttttaaggaatagaaagataaaggagggcaggattggtttctcctcagttttcgttgcaggtttgcakgaagtgggagggaggaggagatttgctcccagtgtttgaggcacgattgtattagatcatcctacatgggtgacaactattggatttccgaactggtcatgtcaagcatagaatttcagacagcaagagacagcaaccaccag

SEQ ID NO: 490095 - DNA, 584 bp, Homo sapiens
gtcatcttggaagcggagtaccctctggcacacggagctctgctgaagcagcgcagggaggtcagactcggccagtagacgtctctgcagacacgcctgtggtctgggtggtggattgctgctgttgtcatgacgcttataactggaaaccgtttctttcttaggggaacccagaagaacacacaatcctagaatttgctcagttaattaaaaaccttgttggtaagtaggataagtcatttcctgagtaaaatcgactgtgcctgccctatctgttaataacaccttgactagaaagtgggtaattaatacaagctaattgaattggatcaaagcagaactttttatcaggaatacttaagtgttttctaatttttaaggaatagaaagataaaggagggcaggattggtttctcctcagttttcgttgcaggtttgcatgaagtgggagggaggaggagatttgctcccagtgtttgaggcaygattgtattagatcatcctacatgggtgacaactattggatttccgaactggtcatgtcaagcatagaatttcagacagcaagagacagcaaccaccag

SEQ ID NO: 490096 - DNA, 549 bp, Homo sapiens
agggaggtaacatttctatccttcacccaaatgggcaaaagttgacactagtagatttttggtaagtttaatgtaatacctagagcaaccagcaaaaaaagctatacaaagaaatgtactcaaatgcacaaataaaatagaatgccaaaaaagtacaacctgcaggaaggcagggaagagaaaatgaaaatataaaacaaagtaaaacggcagatttaaactttaacataacaataattgcattaaatgtaaatggtctcagcaccaattaagagattggcagagtatatttttaaatggcccaactatatgctatgagaaacttcagtgaaaacaatatatgtgggttgaaagtaaaaggataaaaaaatatatactatgcaaaaatcagaggaaagcaggagtgactacattaatattaaataagrtaaatttctgagcaaaaagaaaaaaaattgccaaggtcagagaggaacatgacattataataaaaggatcagtccaaccaaaagaccccagcaatcataaaggtgcatgcaacaagtaaca

SEQ ID NO: 490097 - DNA, 196 bp, Homo sapiens
tcaggaggctgaggtgggaggatggcttgagcccaggagttggagccagcagtgaacsatgatcgcaccactgcacttcagcctgtgtgacagaatgagaccctgtctccgaaaacaaacaagcttcacacctcacaggattgaaattgcacctgtagtcacaatgcactcctgttcacaggcagctagctgcaag

SEQ ID NO: 490098 - DNA, 196 bp, Homo sapiens
tcaggaggctgaggtgggaggatggcttgagcccaggagttggagccagcagtgaacgatgatcgcaccactgcacttcagcctgtgtgacagaatgagaccctgtctccgaaaacaaacaagcttcacacctcacaggattgaaatygcacctgtagtcacaatgcactcctgttcacaggcagctagctgcaag

SEQ ID NO: 490099 - DNA, 606 bp, Homo sapiens
ctgcagggcaccaggttcctggtttctcaaaggcttttctattggagaagtttgggtgagacgatttcccggactgcagctctgaacccagactgtggaatctttcaaactatctcaaaaacagccccgcstaaggcatccttaagagcagctctgaactaaggaaattccaaagcccactttacaaaccaggcagaagcaaggcccccaagcagggagggagggagatagggaagaaaggggtgaggagtaaggggaacagtggcgcggctggggcgggcggaggaagtgggggagccaaggagacaccccagcgctgggatccggcaagtcctccctctgagtggccagggggcctcgtcccttctcccgatgccttctgcccttccttgggtctccggaacccagcttgtcctaaccgctttcgctgcgggcagcgctggccacgcggcccccgccgccggcggttctccgtggccaagcatccttggccttggagcccaggggctgcgttccccttggggccggggcgggagagaggacctcggtggtactcgcccgtgcgctgggcgcagccgcttggccctcagccctctggcgcggcgc

SEQ ID NO: 490100 - DNA, 663 bp, Homo sapiens
tttgactttgttttttcttttgagacaagttcttgctctgtctcccaggctggagtgcagtggyacactcacagctcactgcagcctcagtctcctgggctcaagcaatccattcgtcacacctcagcctcctgagtagctgggactacaggtatgcaccaccatgccaggctaatttttgtattttttgtagagatggggttgtgccatgttgccagggctggtctcaaacccctgagctcaagcaatcttcctgccatggcctcctgaaatgctgagattacaggcgtgagccactgtgcctggccagttttgacttttgaattatgtgttttacatattcaaaaataaaattaaatcaaagagttttttagaagcactctaaacttggataaacacaacacaatgatatactatctaccaaactggttacataagtacatagaaaaaaagaattaagtaacttaaaagctgagctccaagcatacacatttagttggacttattctaagggtaaaaagacctgcaaagaaatcttgatcttaggagttttgttgtcagtactggtatcgatactgtgattctggaatattttgagttatgtcctagaataaagcaatgagtaaggaagaagagagatacaaatatggtgtggaggatatt

SEQ ID NO: 490101 - DNA, 463 bp, Homo sapiens
ctgcccgcagacacagcacagcaccaagtgcccagcaggctggtggccacaactgggttcaaaccattagatttgtctccaccagtcactcttcccatgttaacccctaataactagaagatgattccttctgctaccctacccaccttctctccaggagccttggataaggcttcartaaaaactcctgtacatgtatctctcataagcttcttagagaaaggtgtctctgtgcagcccaggcacagaactgtctgtaagatatgtaactgccagtgtaatgtttggtacagctaacctctcttagccagagactcacaaactgggactttcaaaaacaaaataaatttttttcctgccatctatagaagaaagcagactgtaataacaaaaaaattgtgccaggaattttttaaaagattttgtaaaaaccgtccaggatagttataggcagaagtgatct

SEQ ID NO: 490102 - DNA, 563 bp, Homo sapiens
aagaagttttgttagtaatatatttgatacttgatcttgatgtagaatgaatgcgaaagagaaatttgatggaaatacacttcacaaaagaaagaaattacaaaactttgctgagggccaaaagaaaggtctatctaaagtatgggtgtccaatcttttggaatccctgggccacagtggaaaaataattgtcttgggccacatataacgctaacaatagctgaagagcaaaaaaagcaaaacaaaactcataatgttttaagaaagtttatgaatttgtcctgggccacatgcagcccgcggsgagtggcttgaacaagtttggtaaagaaaagctaggcgctatttctggatgggaaggcaatttaatatgcagaaattatgaggtctgggatttttctcttctttgcacttcattctctagcttttccacattgagcaccttgttttctcatttctcctgtattttgtaattttcaaatgggagcttaaaaaattttaataatggttttaagctagccttttcattttgtgttcaaaaagggcagagagggaaagaaggt

SEQ ID NO: 490103 - DNA, 610 bp, Homo sapiens
gtttgaatgacttatgagctgatgtccaaatagagcaaggattatccatatagatggtataattcagcattatatgattaagctgtgtatcatgttatttttctatagactagtcagactatcaaggatcctgaaattagggtgcaatgatttggtgattatgtggtcccaccaaacccagtaatgaggctctggaactgctagtgggtgcaatatagacatgatgaaatatagagttaaaacaagctgaatgactcttgcaaaatattctcagctagytttatgattttaaagtatggacaaccaagcaatgtttcttctagaaagatatgccctctatgaaccttgaggatccccttttagggagtgtttatggaaacacttagtaaatactgtgccctacatatacttactattatgtttataatagaggaaataataccctgaattctgaccacatatctacagagttacgcagaagtcttcagactttggaataaaatatggaaatcaaggaggttggtgattgataatgctgagatcattccttttttcctgtctataatcctttataaacaacaaatgtgataggagtgaacaaaaggaaaaa

SEQ ID NO: 490104 - DNA, 610 bp, Homo sapiens
gtttgaatgacttatgagctgatgtccaaatagagcaaggattatccatatagatggtataattcagcattatatgattaagctgtgtatcatgttatttttctatagactagtcagactatcaaggatcctgaaattagggtgcaatgatttggtgattatgtggtcccaccaaacccagtaatgaggctctggaactgctagtgggtgcaatatagacatgatgaaatatagagttaaaacaagctgaatgactcttgcaaaatattctcagctagctttatgattttaaagtatggacaaccaagcaatgtttcttctagaaagatatgccctctatgaaccttgaggatccccttttrgggagtgtttatggaaacacttagtaaatactgtgccctacatatacttactattatgtttataatagaggaaataataccctgaattctgaccacatatctacagagttacgcagaagtcttcagactttggaataaaatatggaaatcaaggaggttggtgattgataatgctgagatcattccttttttcctgtctataatcctttataaacaacaaatgtgataggagtgaacaaaaggaaaaa

SEQ ID NO: 490105 - DNA, 492 bp, Homo sapiens
atggcaggatggtggggggtcctcgggccagcctcaagggttcctctgcgggcagagtctgggggatcctggtgtgcagtgcccagcgtgggaggaccagggacttgggtctccgttggtgctttcaggatgtgtgtgtttgtgtagagtaaaagtcacgtgtgattcagataaactgcataattcattccttttcctccttttcttttaatcggttgtctgtacagtgtttgtggagaaggtgctgcagagactttttcctcctgttccaagtggccaaggaaagagggaaccccagacgctggccgtccaaaatccaccaaagaaagtgacctctgagaaagtgagccagaaacatgctgagcctttgacaggtragtttgtctgcagatgtgggtgggtctcagaaactgaagttaacctccgtcatcatcacttgccttggagaatgtgtcttttgggcctcgggcatctgtctgcaggtctgcagag

SEQ ID NO: 490106 - DNA, 632 bp, Homo sapiens
gaggaacgcgtccaccctaggtacaatgcttgcttaagtataggataaaaaaggtcatggggagatgtgctctgctacattaattttcttaattactatattttgcaagaattcatattgttatctttaaagcaaaattaggaatgcctttgttctcaagatatcaggatattaggacactctcaagcctgggtctgtttagtaaacattaatctgttcccttcacggtaaacatctagaggccaggaatgcrgctcagcaggtcccagcctcatttcctagccctcactcaaaatggagtcactccagttcaaacgtctcagacactttgatgttaagtagctaaacaggcagtgttctaatagaatgacggtgcttgaggaaaagtgcaagaccaagtctgtttgcagcttacagccattattctaaatatttcctttgtgaatataaaaatccactcataagtttataaaacaaccaagatccggttacagatcaaacagctctccttcctgtaaaggaaaaacattccaggagtttttccttcaggaaggaaggtggggctgggggcacaggtgagaaaggcgcgggcattcctaatcccacagctcatcttcacgcttagtgctgtt

SEQ ID NO: 490107 - DNA, 570 bp, Homo sapiens
agcgttgccggctttttattccccgaggagccttatcctggcgcctggtggaattaagtcttaagtcaatatttggtgaactgcgttgaatgattatgtataaaaacagcccgtaaggcaagtgttagtgtttccccggttcctaatcacaagcggtgtgaggcattgactcagattctgtgctcagatccagctacagagtcatgaacataagtcatttctgtggagagctgttgtgatggtgattctagcagcaagcaccagttgaaatagttactaacttcacggcttctggaagcatgcagtaaatgcacagttataatgtggattccgtttgagttaaacatccstacatgctctgttttgacagaatcgtggctctctctgccttttgcctttcctgaaggagtcctagcgtgacttctcttagcctttccagagtggctcgtgggtgggtgatggggctgccccccgctccgcattcctcgcatctcaccctctcaagggcctgacagagtcagagctagcagtgtttcattcttgtcacgctgatttattgatatgagagtt

SEQ ID NO: 490108 - DNA, 544 bp, Homo sapiens
tctggcagaatgaactgaaaaacaaactcaaacaatgagagaattrgtgaggcagtctggtgtgaaattaaaagacacgatccaagtgctttcattaagcaaataacaagctagaagctacaaacaaagggaaagatcacatttgtaaaagcaaaaaaaaagagctgaggaacagctcattcaggatgtacatcctctctgtcacctccatccatggctcagttccgtcgtgcactgcaggctggttcctaagatggggcccaggccctcgaggcccaggtgctctgatgggcttggcctaccagaagcaccgctagtgggaagaagagttcggccctgtcttcccggccctgtcttcctggctccctctacagagacggctcctcctctaggcctcctggagtgtctgctgcggatggaggtactttgagacagcagagttttaaggatgcccctgcacctggagctgctcctatgattgtgtaaagttacctggcaggggcttcatctcatcacatatttggtgaagcagggagctttcccc

SEQ ID NO: 490109 - DNA, 655 bp, Homo sapiens
tgctcccctcagcacgtagccctgaagcccagtcagcttctccgatgctgttagcttctctcctctgctcagtacgttttatctccaccagcgcagcagggcctgacccattgcagtgttgggaactttaaggtttcaggttcatatctggtgccaaaattcacaggatgaggttgtctttaaagtctttcctggctctcatattttatgagtcagttctacgattttggagacaggagatatcccgaacgaaagcagagagaacaagggttgtaatctatctgggtttgagagggagaagaggaaagagtactgcagaggaggataaaagaacataagscaggagcgcgcggcggtgcctgtggtcccagctaccctggcggctgaggcagtagtcagcagagatcacgcaactgcactccagcccgggcagcagaccaagaccctgtctcaaaaagtaaataaataaaaaggaacacattggaggctggaatgtcctgggcaccttgactctagacctgccagagcactgtgataggagggcagtgaggggagcgctgtgaggggggagctctgtgaggggagcgctgtgagggaacgcggggagggatgtgagggagcgctgcgccagagcgctgtgaggggagcactgtga

SEQ ID NO: 490110 - DNA, 655 bp, Homo sapiens
tgctcccctcagcacgtagccctgaagcccagtcagcttctccgatgctgttagcttctctcctctgctcagtacgttttatctccaccagcgcagcagggcctgacccattgcagtgttgggaactttaaggtttcaggttcatatctggtgccaaaattcacaggatgaggttgtctttaaagtctttcctggctctcatattttatgagtcagttctacgattttggagacaggagatatcccgaacgaaagcagagagaacaagggttgtaatctatctgggtttgagagggagaagaggaaagagtactgcagaggaggataaaagaacataagccaggagcgcgcggcggtgcctgtggtcccagctaccctggcggctgaggcagtagtcagcagagatcacgcaactgcactccagcccgggcagcagaccaagaccctgtctcaaaaagtaaataaataaaaaggaacacattggaggctggaatgtcctgggcaccttgactctagacctgccagagcactgtgataggagggcagtgaggggagcgctgtgaggkgggagctctgtgaggggagcgctgtgagggaacgcggggagggatgtgagggagcgctgcgccagagcgctgtgaggggagcactgtga

SEQ ID NO: 490111 - DNA, 563 bp, Homo sapiens
tttacgactcttaaaaaaatgaaatgtacattttgagtttcccagaagtgatgagcagcaaagcttttaagatgaaaggggctctgaactgcctttgggagatgccggccaggatcccggagaaccgagggggtggcgcccgtgcccaaggcctggggggacctggggccctggcgcgggacgcacagggagggcgggggctgggcctggcaggagcccccagccgagtgggaagagccagataataacctaacgatactaacctaactataccgtcacccagagaggagggcagcacccctcccacmtgcctccctcccccggtgaccgctaaacctaccggccgcaaacatcacgaaatagaattaaacactggcgcctactaaggaccactccacccagtacaaactaaatttgagagttcatcttcacgcaaataataagaatgttaaaaatgtatatatgctccttttcaaacaaggcctaataggcctggcctcctgggctagggggcttagaaaattgcaaatgcaagatggcatggtgtggctccggggtgctgt

SEQ ID NO: 490112 - DNA, 573 bp, Homo sapiens
gatacaaacagattctcacagtaatattcaatgtttcaaaaytctactctttctaaaagaaacatcctaaatgttaggggacagagttaatgaaaaaaataataagaaatcacattatgcaaagatggcttttactcaaagtcctcaagagtctttccatatttcatatgaattgcagtttaaacagataaatagacaggttctgccttaacttgaaaacctataattttctcttgtttagagaagttaacttaagcaaaaacattttccatcaccattttattctcaccgtattcactcatcaataatgtgagagattgaggagagtagaaaggtaaatgcatatttgacaatggagtggatattataccttttaagaataggtcatttgtgtctttccaaagtctattgaatggtcaatggtgaacttaaatgagtattgttgccttatataatagaggtcaataatttaaggtcatatttatccagaactaagtgtgactttaaagtctaaagatccaggcattcctgtaagtgcaaagaaagagaacatcttacttcatttttcatcct

SEQ ID NO: 490113 - DNA, 615 bp, Homo sapiens
gaggaatcattttggagtggttattctgtttcattcamcttccctaaaaatctttatgatctatggctcactagagttctacttacatgaaatccaatggattctttaagtttttatccatatagttccaaggttatactctatgctttactttctttaatcagtagcagaataaaatttgaaactggctttacaatgttaatttacataaaaccttttcagtggctcattacatttcctctgcttcaacaagactcagtcagtaaagaaagcagtcaataccctcaaactctattttctttctaaggagaggacacacaagaatctctggaagatggtagtaattgagaaaacaattcctttcttagaaattctgatacatttttccccctaggaaaggaaaccctcacccttgcttgagaatcactgactacataactttatttagatccagtgaatatttattgactgtctatgtgtgccattattccttttattatctggaatacatttttactgtgtttgggaaacctattttaaaattggggtcaggtgttgacttaatttactaaaggcagataaggaaatcacctatggtatccctcagcattgttt

SEQ ID NO: 490114 - DNA, 517 bp, Homo sapiens
gaggaatcattttggagtggttattctgtttcattcaccttccctaaaaatctttatgatctatggctcactagagttctacttacatgaaatccaatggattctttaagtttttatccatatagttccaaggttatactctatgctttactttctttaatmagtagcagaataaaatttgaaactggctttacaatgttaatttacataaaaccttttcagtggctcattacatttcctctgcttcaacaagactcagtcagtaaagaaagcagtcaataccctcaaactctattttctttctaaggagaggacacacaagaatctctggaagatggtagtaattgagaaaacaattcctttcttagaaattctgatacatttttccccctaggaaaggaaaccctcacccttgcttgagaatcactgactacataactttatttagatccagtgaatatttattgactgtctatgtgtgccattattccttttattatctggaatacatttttac

SEQ ID NO: 490115 - DNA, 517 bp, Homo sapiens
gaggaatcattttggagtggttattctgtttcattcaccttccctaaaaatctttatgatctatggctcactagagttctacttacatgaaatccaatggattctttaagtttttatccatatagttccaaggttatactctatgctttactttctttaatcagtagcagaataaaatttgaaactggctttacaatgttaatttacataaaaccttttcagtggctcattacatttcctctgcttcaacaagactcagtcagtaaagaaagcagtcaataccctcaaactctattttctttctaaggagaggacacacragaatctctggaagatggtagtaattgagaaaacaattcctttcttagaaattctgatacatttttccccctaggaaaggaaaccctcacccttgcttgagaatcactgactacataactttatttagatccagtgaatatttattgactgtctatgtgtgccattattccttttattatctggaatacatttttac

SEQ ID NO: 490116 - DNA, 250 bp, Homo sapiens
ctgtcggtcaacagcactcccagaagccaggggaatacagtcctgaagggagtacctggyggggtacatcagagtgtctattttaatcatcatcattatcatcaacatcctcattatttatctcttctcatgtaaatgctcttaatgttatgtgaaaaaccactttggtaacagttcccaaccagggtctttctcactgctaaaggttgtggatgaaggtcatctccccgaataaggccttgatgctagt

SEQ ID NO: 490117 - DNA, 618 bp, Homo sapiens
cccaaatcttcttcattaatggtttattgaaacttcaaatccatgatataggcctaaacaaaattttataccaattatcatttgaaagcatgtgtattattttgtaatttgtgtcagatgcctcttctagaaaagcttttacaaaggtcattttttttattactgttgcaagaaaacaacttaggaaagtttggaaaataaatttatttgcaaatagaaggtcaaagacagtggtaatgattttcaatatgcttgaaaaaataaaaaattattmttaaaagtgataaaaagttgattgatatttaaagttattttattacttcttatttagaatttgaaaaataacaatgttttatttttgctgttttcctccacattttttggtggtagggaaaattagcatattcaactgtggatttttcccatatatgagacatagaaattgcatattatctagtgtggttgcatagtctgtgttctacattatttatccaggtaaagaataactcttaggtcgcttccctaatcaatttagtatgagaactgtgttagtccattttcctgctgctgataaagacatacccgagattggaagacaaaaaggtttaattggatgta

SEQ ID NO: 490118 - DNA, 616 bp, Homo sapiens
caaatggactgatagtttaattatgtctacaaaaatcatttcaaagtagtaggtrgataagtggtgatttaaaaaatcagtgatgggaatcttgggggggtttctttagaattctgcctgtcacaactagtttactcagttttagttaaaacgtgctgctctctctgtcaccattatccattcctatagtccttcctttttacaatgtgttttcaatttctagtttctgtgtttataggacttgagatatttctatcttagtgctagttagagcattttcattatttaatttttgtgtttatttccttcttccatatgtcactcaacaagttttaaatttaaattatcagttgtagatgtttcttattttccaatcatgttgtctaatctgcattttaaaaacattcattgtcttgtcttttctgttactgagagaagtattttgaaaactgctttttttgcccacttgcctatttcctagtaattcagtccatttttctttatatattttgagactgttattaattattttaacttcctggcaaaggaagtttgaagtatcactttttagttttagcttttttgcttgagagtctgtgtatgcatgtgtgtttac

SEQ ID NO: 490119 - DNA, 607 bp, Homo sapiens
aaagaacagaaaggactgccaaaaactcgatwatggtgccaattgagagacaaaacactgagaggacaggattctggcttacagaatttaaaacaggctttgtatcagacatcaatctagtgcagtctttccccatatccagaactcataagtccagcaaccaaggaatagaagttcaaatagctcttctcactatttcgccttgtcacacactcacaaaatttttgcctcttgtctctacaactttgagctgtacttgtttagaagtcttggttctcaaggaaggaatgtttccacactctgattctacaaaactaaaagttgagactgccaactagtattttatgctactcgtgccactggaccaaagtaaaagtttctctaccgactggggtgacttatcacaattaacaagtggaaattgggttgatgttacgtagtgagggcaggtgtcagtggattctctgaggttcctgttaataattttatctccttattaagagttaatgaaaatgtaaatcaaccaaaaaaaaaagcagtgccacagaggatttatatccttcaaaaatgaagggtgtagattattccaacaaataaagaaccctga

SEQ ID NO: 490120 - DNA, 424 bp, Homo sapiens
gacacataaaatgtaatgatgaacaaatacatttgatgggttgggagaagaaggaaagacaggaaggcacatggggtcatctggacagtgagatatgggagtgcaaggggtaagaggaaggcagccagacaggacaaggtaggaaaggacacttaccttcttgttacatgtacagtcagtttccagcatgcaaaccgcaggtaaaaccctccagcatttaaacccatgcatcagactctaaaccactgaggtcatatagtaaaacacagtgctctgtaaccctggcactctgcatggttctgagcaccaactagcaccttgacgagtttgctggcacattgaatgggractctgctttcctccttgcaggaaactctccctagagccccttccttttgctctgaggaattgtcccctaggacca

SEQ ID NO: 490121 - DNA, 296 bp, Homo sapiens
cctgacctactccctttctctatctctcyccccattcttccctccctctcttcatccttcccctccttctttccttcagtagaaatatattgaggagataccattatgttcaagtcattgggagttcacagaaataaacaataaaatcctcattctcaaatgaggtgattataaaacactgtcacaaatgttatggcagagaaaggggaagcagtcacacggaatgggtgccggggcctttacagagtcttcctggagaagggttggccatttaggctgagtgtcagaagatgagc

SEQ ID NO: 490122 - DNA, 550 bp, Homo sapiens
gctccccgcataggcaccaagccttcaacacacggctccatctggctctgctgtctcttgctccccaagttgcgaaaggcgaggctctgtttgcctacccgaactttttgtggcctcgactctttttgcttgttttcaggacctcattgctctggggcataacagaatacctgcttcttctccagtcccctagttggggtttctgcgcgtcataaatgaccagcttatactcttcttggacttttatccaatgccttgtccttgatctctggcaagactcacttatgccttcatcctcgttcactccctgcacgccagtgacatctcccatatgcaaatttggcaagctcatcacctcatatcacggccaaagcttcccgaggtmtgaagccagtcgttcccacatccttccactccatcaggtctctgtcctctcttgcaactccaagcatggctggtcctgccatcggcgtgtccctgggtccatccccaagtgaagtgtccacgtgaggtgtggtttggagaccctaaagacagggatgggaagttt

SEQ ID NO: 490123 - DNA, 437 bp, Homo sapiens
agcacatggggaccgtggcagtcgaccaggggtcgcccgcaaggggccggctgaggtcagaggagctgcgactcatgtagcacccacctgcggggctgactccagaaaccaggacctgtgcccaggaagcagaccaccctccaggccatgccttccggcatcagtgaggtgtgcaaactgcttggcaactggggtgcaaggccgggcgctctcgaggccaatacatcagctggttttattcgttaacacagtggtgcctggcatgggggagggcacttaataaacctttgttggatgaagggttacratcaccgactagcgctgctttctagaacaattttcctgggagtgcccggcccttgctttgcaccctaagtactttatattgtcttatgctctgctaggttcccagggctgcctgaaaacttaaaatgaaa

SEQ ID NO: 490124 - DNA, 413 bp, Homo sapiens
ccagcgaaccccaaggagaggggaggggcccggagcagattctccctcacagcctcagaaggaacctgctgccatcttgattttggacttctggcctttagaactgtgagataatacacttctgttgttctaaaccaccaaatttgtgatacttggcaatgccagccctgggaaactaataccaatgcaaagttagaaatgcaaaattagtgttgcattatgattgagaaaattcgaagcccagtgcaacaatcccatgcgatggtgccaggggtgagccgggagctctgcagctgctctctgcagggatgctctacaatcctgccgggtcgggccctcatcaccactaaccatgcaggaygctcaaagacacaggtgggctggttagaaggggctcatcttgaattgaaacg

SEQ ID NO: 490125 - DNA, 557 bp, Homo sapiens
cagaatgaagctgtagggtcccagccgtgtcttgctagtcatctctcacttttgctactagcgaagaagaaggtggagaagctttcacaggaaggaagggaagctgaggaagagggggctctgtcatgaagaaacggaggaagagagggctccgtcataaagaagcagtgacaggggaccccttagagaagccgaagagggagcagagataaggaagacagaaaccagcacaggccagggagccccctggggaaagatgcagagcccagatgacgctgcctccccacaggttgcagcacccaggaggctccaaaggcctggccccaccacccagccccacggccctatgttcaggagccatccaattagcctgagctcagcttgcttctgatggggaacagaatccttcacccatgtttggaagtcagttgactagagatttagcctggagacaggtgggttttcctgatttgagcctggaaatgtgaaccaggaggatttggttatcatctccrtacagcaagtgtgagccatctgggacttatgtacctcaccag

SEQ ID NO: 490126 - DNA, 339 bp, Homo sapiens
gcttggcataaactccccctctgcatcttattttcacatttctgatgtgaaatcagaattcctttccaacccatagtgtcctagacaacctatacaatgggagaaaaattttgccgtctatccatctgacaaaggcctaatatcaagagtctacaaggatctttaacaaatttacaagtaaaaaacaaacaaccccattataaagtgggcaaaggacataaacagacacttctcaaaagaagacatttatgcagccaacaaacatatgcaaaaaagctcaacrtaactgatcattagaaaaatgcaaatgaaaatcacaatgagatacgatttcacacc

SEQ ID NO: 490127 - DNA, 649 bp, Homo sapiens
tttccttgcaaactgtcagcccagagccactgctcatatttccttccacatgttttggtctattttctctcagtaatgccatatagttctctgtaaagaagacttgcctttattttgttagattactcctatgtacttcatatttcttatactattgtaaattgtttcttttaatcatggcattataggaatgytacatattatggatgttgatttctttgtctgtcatgtacatggaaacggtctttccctattctgcagctaatctgtggactgtcaatttactcagtttagggtgctcttgtcctacagaaagttatattttgacaatgcagtaaaagttatagggtattttccccacttctttttctttatgccttggtcaataaatcctatcaaacctggagatcataatatgtctccctacaccacgtaaagttttgtttggctgtttgtctttaatacatctgtaattcaattaattttaatttttcagatggatagacagtgaccttgttgatttgcagagccacaactctcatatgttagtttcataaaggaatatacaaattctgctagtgtttctgttttcatactttctgttatgttccttcagttaatttgtccgtctcaatttctacatgacatt

SEQ ID NO: 490128 - DNA, 649 bp, Homo sapiens
tttccttgcaaactgtcagcccagagccactgctcatatttccttccacatgttttggtctattttctctcagtaatgccatatagttctctgtaaagaagacttgcctttattttgttagattactcctatgtacttcatatttcttatactattgtaaattgtttcttttaatcatggcattataggaatgttacatattatggatgttgatttctttgtctgtcatgtacatggaaacggtctttccctattctgcagctaatctgtggactgtcaatttactcagtttagggtgctcttgtcctacagaaagttatattttgacaatgcagtaaaagttatagggtwttttccccacttctttttctttatgccttggtcaataaatcctatcaaacctggagatcataatatgtctccctacaccacgtaaagttttgtttggctgtttgtctttaatacatctgtaattcaattaattttaatttttcagatggatagacagtgaccttgttgatttgcagagccacaactctcatatgttagtttcataaaggaatatacaaattctgctagtgtttctgttttcatactttctgttatgttccttcagttaatttgtccgtctcaatttctacatgacatt

SEQ ID NO: 490129 - DNA, 649 bp, Homo sapiens
tttccttgcaaactgtcagcccagagccactgctcatatttccttccacatgttttggtctattttctctcagtaatgccatatagttctctgtaaagaagacttgcctttattttgttagattactcctatgtacttcatatttcttatactattgtaaattgtttcttttaatcatggcattataggaatgttacatattatggatgttgatttctttgtctgtcatgtacatggaaacggtctttccctattctgcagctaatctgtggactgtcaatttactcagtttagggtgctcttgtcctacagaaagttatattttgacaatgcagtaaaagttatagggtattttccccacttctttttctttatgccttggtcaataaatcctatcaaacctggagatcataatatgtctccctacaccacgtaaagttttgtttggctgtttgtctttaatacatctgtaattcaattaattttaatttttcagatggatagacagtkaccttgttgatttgcagagccacaactctcatatgttagtttcataaaggaatatacaaattctgctagtgtttctgttttcatactttctgttatgttccttcagttaatttgtccgtctcaatttctacatgacatt

SEQ ID NO: 490130 - DNA, 652 bp, Homo sapiens
ttacatccatttaataagataacaaattctagaactattttctgtaggggtgcaaacagctttatctttctgttaaataacttttataagccaattaacttaagaacatctccacacatttccgtgaatcaaaacctccccattaactgaaggttgcaatgtgtctaaccaggaatttataaagcgcaggtcagtggtgaagcatatgggcttgggagcaggtggcccaatgccaatggcaggcattgggcaagctacgtgattactctgtcgttccgctgtctctctctcatttgtaaaacaagacgaaagaacccatcacgtggatttgtggggggaagaaaagagttaacaaatggcaaccacttgcaccagtgcccagcagcacagagagcatagcagatattatatgccaagcactgcacacccgcagatkgaacacttaacattataaaaataacaggcacatacttctagaaatagtaattaataagtctagtacttttataaaacaggaaataatcaatgtgacaggatcctctcagaggcccgcatgtgtcctgacagctaggacagagccaggtggtgatttaggaaaatgtaggaagcagagactcctgcataacccgtgctggcaaagcctctggaggga

SEQ ID NO: 490131 - DNA, 550 bp, Homo sapiens
tacctaaattaaaatttcctctggcctagggcaggcctcactctgttcctccctgcataattctttaaaaatatccagatatgactttacattcaaaatcatgaaaaaagtaaggaaaatggagtgagtatagktaaagacagaataagaagagtcaacaattccagaaccactgtgtgagcagaggggcattgaggaaactcataaagatttggaaaataaatcttaaaaggattaatttaaaaccatgaatagagtgaaaataattttcagcagagtcaaagcagattcaacatccttgacccagatatgataactcaagctgtagatgtttctgtgctgtgattcccatttataaaaacaagcattaggagccctgaaagagagaatacaacgaacaactgaccagagtgacaggaaggggagatgaaaagatatatggccttacaaattatgtaattgaggttccagttaaagtggactgtattatggcaaggaaacaaaagacatcatgattctttttataaaaccaacataattgtgataccag

SEQ ID NO: 490132 - DNA, 550 bp, Homo sapiens
tacctaaattaaaatttcctctggcctagggcaggcctcactctgttcctccctgcataattctttaaaaatatccagatatgactttacattcaaaatcatgaaaaaagtaaggaaaatggagtgagtataggtaaagacagaataagaagagtcaacaattccagaaccactgtgtgagcagaggggcattgaggaaactcataaagatttggaaaataaatcttaaaaggattaatttaaaaccatgaatagagtgaaaataattttcagcagagtcaaagcagattcaacatccttgacccagatatgataactcaagctgtagatgtttctgtgctgtgattcccatttataaaaacaagcattaggagccctgaaagagagaatacaacraacaactgaccagagtgacaggaaggggagatgaaaagatatatggccttacaaattatgtaattgaggttccagttaaagtggactgtattatggcaaggaaacaaaagacatcatgattctttttataaaaccaacataattgtgataccag

SEQ ID NO: 490133 - DNA, 550 bp, Homo sapiens
tacctaaattaaaatttcctctggcctagggcaggcctcactctgttcctccctgcataattctttaaaaatatccagatatgactttacattcaaaatcatgaaaaaagtaaggaaaatggagtgagtataggtaaagacagaataagaagagtcaacaattccagaaccactgtgtgagcagaggggcattgaggaaactcataaagatttggaaaataaatcttaaaaggattaatttaaaaccatgaatagagtgaaaataattttcagcagagtcaaagcagattcaacatccttgacccagatatgataactcaagctgtagatgtttctgtgctgtgattcccatttataaaaacaagcattaggagccctgaaagagagaatacaacgaacaactgaccrgagtgacaggaaggggagatgaaaagatatatggccttacaaattatgtaattgaggttccagttaaagtggactgtattatggcaaggaaacaaaagacatcatgattctttttataaaaccaacataattgtgataccag

SEQ ID NO: 490134 - DNA, 631 bp, Homo sapiens
aacaggctgggcgtggtggcttatggccaggcgaggtggtggctcatgccaggcgtggtggctcatgcctgtaaacccagcactttgggaggcagaggtgggtggatcatgaggtcaggagttcaagaccagtgtaaccaacatggtgaaacgccatctctactaaaaatacaaaaattagctgagcatggtggcgggcgcctgtaatcccagctactcaggaggctgaggcaggagaattgcttgaatctgggagacagaggttgcagtgagctgagattgtgccactgtgctccagcctgggtgacatagtgagactctatatcaaaaaagaaaaagaaaggaaggaagaaaggaaggaaggaaggaaggaaggaaggaaggaaggaaggaaggaaggaaggaaggaaggaaggaaggaaaatgacccctgcatgatttcattaatataaaattcaagtaaatgcaaatgaatcttcaatgacagaaagcaggtcartagttgtctggggattactaaggatttgaagaatatctgaggggtggtaatatgtatcttggttgtggtgatgttttttctggtgtacacataagtcgacattgattgttttttaagatgtacatgtcattt

SEQ ID NO: 490135 - DNA, 701 bp, Homo sapiens
ctttcccagtttcctctccattctattcataatttcttcagcaatacattgttaacttattcacatattgacctcgtagttacccaggttgaaaatgcagtaacatcttgacctcgctgttctttctaatcgccatattgtttctgcttcamctcagcaaaacttggatctgttcagcataactatttcttataaaacagcttatctcagccttcctttctcttatccctcacatttactaaaattaattttaacctcattgaattgttttctaaatccatcgtttaaaatctaaccacagatctattcaccagcaatctcttggagtcttacatcaattatatcctctccatagtcagaatgcactagatgttagatttttgcaaagctcgtcttcacaatctgcagtctagagcaaactcatttctcatgcccgggccaggcagcagtactcatggccatgaaacttctgatcatttcactttgcagtcataacattgaacttcatcttagtccttgctagtactcagaattattttagttcctttcctgcaaaaaaaaaaaaaaagcagtagttacatacaactaatcacaatgaaattattgaattagctatactaattattgttctagatgtttgccaaattgggctaaagtttgcacaaggtgcactgaggcaattgatgaaagaaataataaat

SEQ ID NO: 490136 - DNA, 497 bp, Homo sapiens
agctggcatagctctggcacctcccaggcttcatctttcaaaaacagaaatggaacaagtgcagaacagggaagagccttytgcagtcagcccagcactgcttgaggggtggtggggagataaaaagattcctggacacagatgtcctattttttttttttttttttgagacagagtctcactctgtcacccaggctggagtgcagtggtgcgatctccactcattgcaacctccgtgcctcccgggttgaagcgattctcctgcctcagcctctcaagtagctgggactacaggtgcatgccaccacgtccggctaattttttgtatttttagtagaggcagggtttcaccatgttagccaggatggtctcaatctcctgacctcgtgatccgcccgtctcggcctcccaaagtgctaggattactggtgtgagccattgcgcctggccacagatgccctattctttcatcaaatctgaaaacgaaatgaaaggcc

SEQ ID NO: 490137 - DNA, 565 bp, Homo sapiens
agggagcacctaactagtggaagaaggaggagaaaccaattaagagagcttctcggaggaagtgacatttgagctgagtcttgaggaacaattataatttcaaccaccagagaaaagaaggatattctagacaaagagaaaagcatgagcacaggctgagacatgaaagagctaggtatakttaaaggctagtgggtgatttttaagtcaagaaaggtttgccccaaaatgtttttaaaaaagataaatgtctagtatccagaatatataaagaactcttacaataacaaaaaaacaaacaacttagttttaaaaaatagacaaagaacttagacatttctccaaagaagatatacaactaaccaacaagtacatgaaaagatgatcaatatcattagagattagagaaatgcatgtcaaaaccacaatgaggtactatttcataaccacagtgaggcactatttcatatccacaagaatggttataataaaaaaaataacaaactttggtgaagatgtagagaaactagaactttagtccattgctggtataagtaaaaagtgg

SEQ ID NO: 490138 - DNA, 555 bp, Homo sapiens
aattatttgcctaaatcattatataatctttgaaaataggacccttaatggctgcatgatatttaatctttcatacagttttctctttctattgaagtataataaacatacatacaaaagagggcacagatctaagcgcacagctcaaaatactgaggtaaacacatctatgtaaccagcaaccaaatcaagaaacgaatcagtatcagcattccaggagcctctactgtgtcccattccaaccactcagggtagctattacccagtctactaaatacaagaactcacctgtttttacatgatataaataaaataatagagatacataatgtttttgtgtctggcttctttcttgcaacattgtgtttgtgaaaktcaaccaagttgttccatgtagttgttcactgttcattcaatgttactgctatatagtatttcaatgaatagtccacaattatcctttctactttttttttttgcatttgaatagctatgcaaagaatacgtagttatgttatgttatttatttatttatttagagacaaggtctcactc

SEQ ID NO: 490139 - DNA, 545 bp, Homo sapiens
aggaagcagattaggagagaagtggaaagtggcaagaaaaggagatactcagtattgttaaggatccaggaacactgcttgatgcttcccaaggctgtcttatctattgtacccacagccatcctgggaagcatgttgcataatggtcactttatagatgaggaaactggggctcacagagtgagttgctcaaggtcacacagtcaggatgtggaggtctgagctcagaatccccatcttttgtcttcraagcctgacagctctttctgctaccttatgagagtagtatataaacataaggtgttaagcatatagcacctctcatattctggctctataaaacagaagaaatagtttaactgggtgggagcctaaactggttgggcacatatcttacaaggtcattcttgatagaaacattaacagtatctaccttgttattttgactgggaatccttgacctgttgtgggacctgatcctgcccatccttttttttgagacaaggtctcactctattgcccagactggagtgcagtggtgtgac

SEQ ID NO: 490140 - DNA, 481 bp, Homo sapiens
ggcaccttgggacagagttgctgtgggtgctgggctgtggtgccccagcctggagttgccagtagccctcttggcacctcaggagagcatgcttgaaaacaaggccagccccgagaggtaaggtgggccgacctccaagatggccccaagcatcctgccttcatgagctcatggccttgcctgacccctccttgtgtcttactgacttgcgactaacccccagagtctgctaaaggtgagatwaggtcgtgagagactgtgaaaatagaaattttctctctctctctgtctctcgcccctacccccaacccctggttctcacaagctgccctatgtctcacaagctgccctatggaaaggcccttgcagcgaggacctggggcagctccagccaacagcccatgagagaccaaatacccccaggaaccaggccagtgagaaaaaggggccctgcctggtggtatctgaggtgaacacatcc

SEQ ID NO: 490141 - DNA, 200 bp, Homo sapiens
tttgtttttgttttgctgcttgtgaaaatgacctgggtgctcgcccccgccaaggtttccacatcccaggtgcggctgagcctgccaggaaagaaagtccagcccctttggtgacaggactcgcccccctcacctctgcacccctttcccccaccccattcacccccacmcctcacccccacctccagtcctctatccca

SEQ ID NO: 490142 - DNA, 655 bp, Homo sapiens
ctgccaaggctgtttgtagaatctgcctccccagaggtcttcagaaagagaaaaggatgccaatctccatgacggtttcagtgcagtcctgctgattagaaggaacaggctagatttttctgtaaaggtttccttcagtcttgagtgctcttagatggatgagtttgctttttggtgcaggagggagagatgaaaactgacactctatgaacttcctggcatatcactgcacacatcctgtgtatttatatttatgtatttacttattttgagatggagtctttctctgtcacccaggctggagtgcagtggtgcgaactcagctcactgcaacctctgcctcccaggttcaagcgattctcctgcctcagcctcctgaggagctggaattataggagcctgccaccacatccagctaatttttgtatttttagtagaaacagggtttcgccatattggccaggctggtcgtgaactcctgacctcaagtgatctgcctgcctcagcctcccaaactgctgggattacaggtgtgagccactgctcctggcccatcccggatagagagtaaaacatactgttttcatgcttttaatgttttcaaagtacttagctgtgctrtgtgagggaggtagggcctttctttaggtcccta

SEQ ID NO: 490143 - DNA, 547 bp, Homo sapiens
tgacttcctcattcttcatctaagcaaaagagcatctacacctgaagagaccacttgcccttcactgacattaaatttcatcctactgactctgacctatctccctaggctgttaggcttattttttgaacattgtattatgaaattttcaaacatacaaaaaagttggaaaaaaaagtacaatgaaaacctgtatactcaccacctagaccttacaatttatgttttactatagttgctttatcacatgtctatctatccttccacctatctatcaatccatcttgtcttttgatgactttcaaagtaagttatagacatcagtacactttccctgtccccctcaaacatttcaacrtgcatacattggctaaagttcaatatttgtttatgttttttaggtgtatacagagctctaactgtcctgttccatccaaagggggaaaaccaagaagcacttgtgaagttaacatttcagagacagaggatcactaaaaggctgagacctaatcataggactgtgatcactcttctgtcctttgccatc

SEQ ID NO: 490144 - DNA, 593 bp, Homo sapiens
gacatccatggggacgagggtggccagcctcctaccaaccgcaccccygcctcccttgctcatgctgagttatcacggactgagcccctggtgctggaatttcctgtgtgcaaatggccttggtgttatcctcctcttcctatgttctgggcgagtcccagggcagtggggcatttgctttggcctccctgcccacgttgccctgcagtcttcctcagcctaccatccactcagtggctccagccagaggccttagaacaaaccatggtcccctctgttcctcacacactgcatccacgcccagatggaccttatgcctttccatctttctccatgtgcccgggatccccgttctactatatcctgtcccctcatgacagccaggtgacgttttgcaacaaaacccattatctacccccactccccaaagccctccaaaatatcagcattgcattaagaataaaatcccaactccttgctaaatcctgtaactttgggcccctgcccccttatctgaacatcccacaggcccctcttctcactctttctgttttgaacctgctgactttctctttattactgaccacatccag

SEQ ID NO: 490145 - DNA, 639 bp, Homo sapiens
tgtttcctgccctgggatctgtgctcacgagactggtggtctgtctgcctcagctctccctccaatgagcaggagccctcttctccgcttcattccttagtggaggctgagcagtccctccagatggggcttccatgcccytgggttttccaccacttggctcccatctttttttcatagcaggtagtgggtttggtcactgcctctccagtgagcctggaggggccacgaggacagggcagacccctcctgctcataagtggaccccagcctgcacagaaactggctcccagcagagctggtcgtgatctgttgataaagacacagcaccctctgtccctggaggtgtggccagggcacatctaccccgctttgcttctgtccttctcaccacaacacgcttcttatcactgtgcccccagaatgacaggatagtggtgattgggaaggggctgaaacacacctgactcggtggatgtagcactccactgtcacacctcatctgtgtatgtgtgtgtgtgtgtatgtgtgagcatgtgtccatgtgtgtgcatgtgtgtatctgtgtgtgcatgtgaggacagcatttttggctctttaagtttgacctggaatgtccacttttaaataactgatggc

SEQ ID NO: 490146 - DNA, 569 bp, Homo sapiens
tgtttcctgccctgggatctgtgctcacgagactggtggtctgtctgcctcagctctccctccaatgagcaggagccctcttctccgcttcattccttagtggaggctgagcagtccctccagatggggcttccatgcccttgggttttccaccacttggctcccatctttttttcatagcaggtagtgggtttggtcactgccyctccagtgagcctggaggggccacgaggacagggcagacccctcctgctcataagtggaccccagcctgcacagaaactggctcccagcagagctggtcgtgatctgttgataaagacacagcaccctctgtccctggaggtgtggccagggcacatctaccccgctttgcttctgtccttctcaccacaacacgcttcttatcactgtgcccccagaatgacaggatagtggtgattgggaaggggctgaaacacacctgactcggtggatgtagcactccactgtcacacctcatctgtgtatgtgtgtgtgtgtgtatgtgtgagcatgtgtccatgtgtgtgcatgtgtgtatctgtgtg

SEQ ID NO: 490147 - DNA, 616 bp, Homo sapiens
ccctgggatctgtgctcacgagactggtggtctgtctgcctcagctctccctccaatgagcaggagccctcttctccgcttcattccttagtggaggctgagcagtccctccagatggggcttccatgcccttgggttttccaccacttggctcccatctttttttcatagcaggtagtgggtttggtcactgcctctccagtgagcctggaggggccacgaggacagggcagacccctcctgctcataagtggaccccagcctgcacagaaactggctcccagcagagctggtcgtgatctgttgataaagacacagcaccctctgtccctggaggtgtggccagggcacatctaccccgctttgcttctgtccttctcaccacaacacgcttcttatcactgtgcccccagaatgacaggatagtggtgaytgggaaggggctgaaacacacctgactcggtggatgtagcactccactgtcacacctcatctgtgtatgtgtgtgtgtgtgtatgtgtgagcatgtgtccatgtgtgtgcatgtgtgtatctgtgtgtgcatgtgaggacagcatttttggctctttaagtttgacctggaatgtccactttt

SEQ ID NO: 490148 - DNA, 639 bp, Homo sapiens
tgtttcctgccctgggatctgtgctcacgagactggtggtctgtctgcctcagctctccctccaatgagcaggagccctcttctccgcttcattccttagtggaggctgagcagtccctccagatggggcttccatgcccttgggttttccaccacttggctcccatctttttttcatagcaggtagtgggtttggtcactgcctctccagtgagcctggaggggccacgaggacagggcagacccctcctgctcataagtggaccccagcctgcacagaaactggctcccagcagagctggtcgtgatctgttgataaagacacagcaccctctgtccctggaggtgtggccagggcacatctaccccgctttgcttctgtccttctcaccacaacacgcttcttatcactgtgcccccagaatgacaggatagtggtgattgggaaggggctgaaacacacctgacycggtggatgtagcactccactgtcacacctcatctgtgtatgtgtgtgtgtgtgtatgtgtgagcatgtgtccatgtgtgtgcatgtgtgtatctgtgtgtgcatgtgaggacagcatttttggctctttaagtttgacctggaatgtccacttttaaataactgatggc

SEQ ID NO: 490149 - DNA, 652 bp, Homo sapiens
aattatttccatttggaataaagaagaaggagaatggcatggaacgtttatcatggaaagcagccatgtgctgtggctgctttggaatccaggcagtgtgatttggggctgtggctcccccacccgcatctgcagttcaccgctgccttttgaccttacctttcagaagggccacaggcatatatcagtatctcaaataagaagagagctggggtggtgcaggcctggaaatggtgtcctgaacagttggaggaaagggagatggagcagagaggacgatctgcayggagatgtagccacgacataaccacagaagacacttcatctcctctactgcgtcctcaaccagtgggctaggtttttctcttggcccgggccttcctcctgacttctctgctctcattgaaatgatttaacatcctacgttcactttgaattcatggtctccattctgtaaaggaaaaacaaaaacaaaactgtccacctaaaagtcacaactctaaattgaccttcacctccagtctcttcctgtcccctgctggccctggcatggctgcctctgggctggctctcctctcctaggtggggtggaggttcttgcttgatggttcagttgtagatggtttgtgctctttggtcccggcagatgtct

SEQ ID NO: 490150 - DNA, 498 bp, Homo sapiens
aatcagattgcatctgtcaccattcagcagtatgcgcaatgaaagctctggaaatctctgcttccttggagcctgcaccagctcctcgaaagtgactgtgacctctccygtgttccccgccctccctacactcgggtcctctcctggctctccctcccttacctgtccaaggaagtggcatgtgtttaccacctggtggttacaggagacccatgcaggtgtgtctgttggaaagtgtagcgagtggactctttccaaaggggtgacctcatcagtcctgaaaaacaactgcccaaatggacatttgtgtagcgcacttcactttgcataatgacctcaggtgctctcggtctttttcagtcctcaatgaacgctgagctcttgagaacacttgagactggttgtccattgagtgggatattaaagaaaatgcaatctccatctgtagacccgggggatggagagcagagatgtccttgtgtggtataacacagttcc

SEQ ID NO: 490151 - DNA, 254 bp, Homo sapiens
tctgggaagaccagtcctgcagccccttaaggagttctccttcctgctgaaattggcactgtctttggyggcacctcaggctggctgtacaaagagcgtggtcccacttcaatttggccaattattagctatgtgaccccagactacctgcataacctctctggtcatcgcatataatatcaggaactggaccagtcaggtttgcacattttatttttcttttctttagcagtggtaccctttcttcagcagaa

SEQ ID NO: 490152 - DNA, 616 bp, Homo sapiens
ttggggcgagttagagatcacacagtgtccggtgaaaggtggaataaataaatgagtgactgaccatggccctcccgatctttcgtagatttctgttttgcgtcactggcctaggcaagcacttaatagttaaacggtttctccactcccagcmggtttttgttttctttcttctttgttttctttcctttcctctcccacccaccccatttgttgtggtgcctactttgaacttgtcatcagcaatggtgaattcaggaataaaaggcgacagaagcacaggaattggcacttctctgtgtccctgggcagcgcatggcctggttgttctgctgtgacctttggcctatgacaccaggatgaggataaacaggtatacacagtccctgcggcctttgtgaacagagggcgtttgcaaaagacagttgtgtgctgtttctttctgagtaacttccgtggagtcccactgccctggagaaagaggacaggatgtgagggtctgtgcagcaagtgggcagaaggcagcacctgctcctcattgtcaaaatctgagaaggacttggaactggaagaaaaacaaacccctggggacggattggaaccagggctaggaagg

SEQ ID NO: 490153 - DNA, 305 bp, Homo sapiens
ggcctctctaatgagcatccttagggatgcttctctaagcacggagagccckagcaaatatttgcacagttgaattacattttctaaggctacatatgcaggtaaaattctctttccaagtgcctgagagacttatgggttccagctacctgcctgggaaggtagaagtggccaatcaattcccttcaactggctttgagttgctctgtatacacccaactaaacacatggaaagcatgtaacaggtggatctgggttctgcatggcatgatttgaagaaaatctccagggatatctgttgcaaa

SEQ ID NO: 490154 - DNA, 567 bp, Homo sapiens
tagcggccgggatggtctcagcttcaggaatagagatgttgaatcctttcatcaaagtcaggcggtggggctgggtttacacctgggtctcctgaatcccacccctgcacttcacttgctcaattaacaaatatttcttargggttgacatgaaccaggcacagttttaggcgtggggaacccaacaaggaacaaaatgcacagaacttgagcccatggcagctcctgtgctggggggacggaaggcaacgaagaaacaagtgaggcacttatgtggcagcagcaggtggggctgagacgaagaagccaccacatgggagagcgcctcgcatgcctcgtctgctgcgcgaatggtctcgaacatctcagcaagagcaaacctctccctgcatcccccaaaacctccgtgggattgcaatgtgtcaaactgatccagtggcatctctctggttgagatgggaacaggggggtcctgccagggcccaccgcaccccagcaccctctcaccctgagactcatgggcagaacatcaggtccgtgggtcccacagggaaatttgtctgccag

SEQ ID NO: 490155 - DNA, 567 bp, Homo sapiens
tagcggccgggatggtctcagcttcaggaatagagatgttgaatcctttcatcaaagtcaggcggtggggctgggtttacacctgggtctcctgaatcccacccctgcacttcacttgctcaattaacaaatatttcttaggggttgacatgaaccaggcacagttttaggcgtggggaacccaacaaggaacaaaatgcacagaacttgagcccatggcagctcctgtgctggggggacggaaggcaacgaagaaacaagtgaggcacttatgtggcagcagcaggtggggctgagacgaagaagccaccacatgggagagcgcctcgcatgcctcgtctgctgcgcgaatggtctcgaacatctcagcaagagcaaacctctccctgcatsccccaaaacctccgtgggattgcaatgtgtcaaactgatccagtggcatctctctggttgagatgggaacaggggggtcctgccagggcccaccgcaccccagcaccctctcaccctgagactcatgggcagaacatcaggtccgtgggtcccacagggaaatttgtctgccag

SEQ ID NO: 490156 - DNA, 353 bp, Homo sapiens
atgcacagaacttgagcccatggcagctcctgtgctggggggacggaaggcaacgaagaaacaagtgaggcacttatgtggcagcagcaggtggggctgagacgaagaagccaccacatgggagagcgcctcgcatgcctcgtctgctgcgcgaatggtctcgaacatctcagcaagagcaaacctctccctgcatcccccaaaacctccgtgggattgcaatgtgtcaaactgatccagtggcatctctctggttgagatgggaacaggggggtcctgccagggcccaccgcaccccagcaccctctcacmctgagactcatgggcagaacatcaggtccgtgggtcccaca

SEQ ID NO: 490157 - DNA, 667 bp, Homo sapiens
tcaagacagaaactgcctgaggaaaaatgacaaatacttcacttcatgattaatctttttgccattataaatgtcttttttaaattaatgttttattttgtatctagaggttgtatttataagaaaccttttgtatttaatcagatcaatttctcattgctctccaaaaatactcaatgcctattcacttattatattttcttctaagccagcttcttcttgagaagttagttgaacttctgagaagcaggaagaagagtgatattatttcctttccattactgcgccatccaataaagccataaataaaaatctagtattcaaattccaaagaaaactgaagaaggcaacatgatctggtggaagtatattcatgaatctcttaggagcttggccttgagtgtaaacatgtcttcaagtcagactctttcagtgaggacaagttacatggccaccacgcaccacagtaagggaggctggggaacaggaaccgtctgctcttgtgactccatttatttttatagccttcttcttacagaatgatcactcaccctcctccccaaaagaaacaatccaaaggcaaactccaggatttcagggtgaytcaagaccagtctaccaggtttacatgtgattcctcatatgctagtgattagaacacaaatca

SEQ ID NO: 490158 - DNA, 585 bp, Homo sapiens
tgtacatctgcaaacattcaggtcctcaagcccactccttgccagcaccagccttctttataaaccacgatgtaaaaagagtttgccctgacaaacatacttgtcaacggtggttgatttaaaaatgccaatggaccatccaggataagaaagaaagtaaccaataaagagggataastaagtgccaataagatacaaatattttatcaatattttgtatttttcaatactctaccctgctccattaccagaaaagaagaatgtaaaggggacttaaagagtagataatgcccctccaccatctgagtacctcaagccatactttaacctgttctgagaaagggtaggacatagtcttataattggatttgagatactggcattcagtgcgataatataacccctcattcagatcatctttcccactgagagcaactacaaactccagacaaaacaaaacaaaaacaactagctaagtattcagtgattcagtggagtcaaacttagataaatgacaaaaaagtagtcaatttcccattttcttgcagtttttccctgcaggctgaccacagacacagagcagct

SEQ ID NO: 490159 - DNA, 585 bp, Homo sapiens
tgtacatctgcaaacattcaggtcctcaagcccactccttgccagcaccagccttctttataaaccacgatgtaaaaagagtttgccctgacaaacatacttgtcaacggtggttgatttaaaaatgccaatggaccatccaggataagaaagaaagtaaccaataaagagggataactaartgccaataagatacaaatattttatcaatattttgtatttttcaatactctaccctgctccattaccagaaaagaagaatgtaaaggggacttaaagagtagataatgcccctccaccatctgagtacctcaagccatactttaacctgttctgagaaagggtaggacatagtcttataattggatttgagatactggcattcagtgcgataatataacccctcattcagatcatctttcccactgagagcaactacaaactccagacaaaacaaaacaaaaacaactagctaagtattcagtgattcagtggagtcaaacttagataaatgacaaaaaagtagtcaatttcccattttcttgcagtttttccctgcaggctgaccacagacacagagcagct

SEQ ID NO: 490160 - DNA, 585 bp, Homo sapiens
tgtacatctgcaaacattcaggtcctcaagcccactccttgccagcaccagccttctttataaaccacgatgtaaaaagagtttgccctgacaaacatacttgtcaacggtggttgatttaaaaatgccaatggaccatccaggataagaaagaaagtaaccaataaagagggataactaagtgccaataagatacaaatattttatcaatattttgtatttttcartactctaccctgctccattaccagaaaagaagaatgtaaaggggacttaaagagtagataatgcccctccaccatctgagtacctcaagccatactttaacctgttctgagaaagggtaggacatagtcttataattggatttgagatactggcattcagtgcgataatataacccctcattcagatcatctttcccactgagagcaactacaaactccagacaaaacaaaacaaaaacaactagctaagtattcagtgattcagtggagtcaaacttagataaatgacaaaaaagtagtcaatttcccattttcttgcagtttttccctgcaggctgaccacagacacagagcagct

SEQ ID NO: 490161 - DNA, 621 bp, Homo sapiens
aaaggtcttaatgcattatctcaatatctacactattgatgccttgccatttgctggctttgtgacatcgggcaaattattccacttctcttaatttccttttctgtaaaatggagaaaatagcagctgtggtataggaccgtggtgtgacaattaagtgagttaattcattaatatgcgtggcagaatgtctggcacataagaaggactccattcagttattcatacactcttaaattcatgatctactacatggaaattgttttaccaaggccttggtatacagtggaggataaaatagataacatccttgcacttatggagctctatatcctagcttgggggaaaactattcatagtaaaaatgaaagtacctgaagataactgtatytgctaggcaagcaatcaaaacaggtgcacatggtagagagagaccagatggtttctttagttggagtggtaaggaaaggtctgtctaggaactaacattgaaactgagatctgaatggggaaaatttaaagacaggctgcacaaacctgaagggatttgttagccaaggcaaactgtgcttttgtccattagggtcacaggaacatttggaaacttttaagcagataaat

SEQ ID NO: 490162 - DNA, 641 bp, Homo sapiens
tacgatatttcattctgtttgttgtctttatttgtatcattctttggtgaaagaggacataagccgagatggcttgcatttgcagcctttatgattggactgggagcacttgtattctcattgccacaatttttcagtggagaatataaattggggtctctttttgaaggtaagtttctattgtgtttrtgtttgttttaatctgaagaagtggataaaactaggtcattaactttatattgcaattcacttacacagtatggtaagggtttacatctcttccacacctcactggtttgttcattgtgtgaactgtatgagataggagattagagagactgtacattattcatcgtttcagtggttctccaagtttttaagcctctaattcttattccccatattatacacagtcctcctcaagaagagatgacttgttttcctttgcaggttgtgacctcattggagttctgagatctttagtttttcccttttgtacttttatttgctgtgtttacagctctgcaccctggacatgttgattcctgatttgagacaaagagaggtgacatttagaaaagtggaaattttcctaagaaatgaaactagctctacttttggacctagataagaaacataga

SEQ ID NO: 490163 - DNA, 473 bp, Homo sapiens
gttgtaaacaataaatttaagtaggttggagagaaagtgtttttttaagggaagcttttagaaagacataagcattagaggtgattaactttgaatggagatgatcaaagggaagttgtggttgttactggactaaaaaaagaggtagtattaaaattaagaggaacaaatacatgctattaagggctaattttttgtacaagttaacccaaacatagtgtcaaaacacttttaaataagtcatatttgacattcattttgacttacttcaacataatattaatatgacacaacatattgyagtatgactttaaaatatttaaaatgcgataagtaaatctttaccacgtaacatttttttcatctaagcaatcttaatttcttttagatgagtgttattttaatgttaccatgcaaaataatctttatgtctctttgagactttgggagagaggcattattaaatactgagg

SEQ ID NO: 490164 - DNA, 574 bp, Homo sapiens
aacaaggtgcagctcttggcttcagccttaagctcacctcccacatggagttgccctcctgagtcttggcctaaataagggatgcagaaaggtggaaagcccaaagctgggcatccaagtcaccgtgccttgggtataaatcaatgtgcatactgcaaataaactggccattggaagagagactgcctagtactcttaagagagccatcagcacccgaaccaataatggctgaaatagccagtcaagcccaagagtgacagggcctgggaccttctgccacagctcccrttggacaactagtcatatctcgggaggagccttaggtaacccttgacatggcaagtaagaatattaacttccttctggatataggagctgtttactctgttttgatccattataatgggcctctgtcacccaaaaactgaatggtcacagagttagatggacaagctcatggaagccattttgcctattctttaagctggtcttcagggtcctcggtttactcatatgccttccttattatgcctgaatgcacgacgcctttgttggaaagggatttgttgattc

SEQ ID NO: 490165 - DNA, 574 bp, Homo sapiens
aacaaggtgcagctcttggcttcagccttaagctcacctcccacatggagttgccctcctgagtcttggcctaaataagggatgcagaaaggtggaaagcccaaagctgggcatccaagtcaccgtgccttgggtataaatcaatgtgcatactgcaaataaactggccattggaagagagactgcctagtactcttaagagagccatcagcacccgaaccaataatggctgaaatagccagtcaagcccaagagtgacagggcctgggaccttctgccacagctcccattggacaactagtcatatctcgggaggagccttaggtaacccttgacatggcaagtaagaatattaacttccttctggatataggagctgtttactctgttttgatccattataatgggcctctgtcacccaaaaactgaatggtcacagrgttagatggacaagctcatggaagccattttgcctattctttaagctggtcttcagggtcctcggtttactcatatgccttccttattatgcctgaatgcacgacgcctttgttggaaagggatttgttgattc

SEQ ID NO: 490166 - DNA, 548 bp, Homo sapiens
actggactgcctgctctgggragccaggtcattctgtcccaatccttgctttcatcctagctctgtatttccaacacctcccagccctgttttttctaattttcacaccacatagatccttgcggctctagaaattttgcttaaacttctcaaactgagtgttacagctcttttagaatttgtctagctcttttagaatttaaataaaaaataataaacaaagaaacttcgcaaactgtgagttcctggccccgaaagcattcacaatttcacctctaccctggccccactactcccctaacagaccttgccaccgtgaccctagacagtgctccccagggatgcggtcaacctgcccctgttggagttttgacccccagggccatggcttggtatccagaccaagtacttgttgaaccccctctggtagacaggcaagctcaaggtgctctgggagaaaacaagataaaagccttcctgccacccccagggaatgtccaggtgaggctgaagagtagtgtggccagcaagtcagcaggggagtgtgg

SEQ ID NO: 490167 - DNA, 625 bp, Homo sapiens
tctcccggggagctttctctgtcccacaccaggagcaggagattcaaagtggattgctccctgcctctcccactttctagtttttcatccaaaacatggcttctctggacattgaggtccagagaagttttgggacttgcacagggtctcatagcaactgagagactgaagattagaactcacaaaccccaagtttccggaaggaggagtcaaacttttagaatctattagaaagggcaactaagactgggccarggaagggtggccttggaagtgagaaatgagacctggcacgttggcacccccacccccaactcacaacacatcctctccaaggctggctctcccctgttaaggctgcctgtttctctgcttcctcatctgtagcccctgcaggggcccgtctagaccatgtaagggagcatgctggcgtcttccatcaggtgctcccctcccctccctggattttcagactgtactcttaaaaaaaaaaaaaaaaaaaaaaaaaaaacctaaaattactctggttcccagtagaactcactccatcttcttggcagcttcttgcagctctcacagcccccaactacacacacacctatcctatgcctttcatagaacagga

SEQ ID NO: 490168 - DNA, 670 bp, Homo sapiens
agctctcccggggagctttctctgtcccacaccaggagcaggagattcaaagtggattgctccctgcctctcccactttctagtttttcatccaaaacatggcttctctggacattgaggtccagagaagttttgggacttgcacagggtctcatagcaactgagagactgaagattagaactcacaaaccccaagtttccggaaggaggagtcaaacttttagaatctattagaaagggcaactaagactgggccagggaagggtggccttggaagtgagaaatgagacctggcacgttggcacccccacccccaactcacaacacatcctctccaaggctggctctcccctgttaaggctgcctgtttctctgcttcctcatctgtagcccctgcaggggcccgtctagaccatgtaagggagcatgctggcgtcttccatcaggtgctcccctcccctccctggattttcagactgtactcttaaaaaaaamaaaaaaaaaaaaaaaaaaacctaaaattactctggttcccagtagaactcactccatcttcttggcagcttcttgcagctctcacagcccccaactacacacacacctatcctatgcctttcatagaacaggactgcttccctccctcccatgctagctccaggacttcctcctc

SEQ ID NO: 490169 - DNA, 605 bp, Homo sapiens
ggtacctttattcccatgattgcctctgccgtcacctactgcactgtgaaggattccatttgtccttctagatggacattatttttctcttcccactcccttacctggcccacagcctgtgccttttggagtggagggggacatcccaacctggggacagggacatttggagaggagccccatgaagagttgccctctggaccctctacctcccaccaggacactcccaacactgagcatctttagttccacaaattcttgctaggcccctataaagattcacccagcctcctcttcctctaagctcccatgtgctggaaccccaaagccataaggagcctctctcaggccagaaggaactctgggatcctagccctcagcagaaggccccaccaggctttcccacctgctcccagctcctctgaggaagttgatagagcctgcagagctgggctggaggaggtttccttgccccagagcggggctggggstgcaggtgggtggcctggaatgtgctctctcaccctcctcctgcccaggtggtgagcagccagagcccccagccctccagctctgaggggaagctcccatgagccagacagaca

SEQ ID NO: 490170 - DNA, 459 bp, Homo sapiens
ctgcctccccgccctcttttctggtctctgctgctcctcctggtttttcctttctccatatgccctccctgctttctcctccacctcctcctatgtggaggggaggaaggaggagagagcaaaggagcagggaaaacttggcacctccgcctgaggggtgcctccagcgcctgccttctgagtaacagggtagctctggcacctccatcctggtgggggctgagggtggcccctgggggctctggcaggtagagaaggctggggatggcaggagaagggaagtgggaaacaggataaaccctactgcatacagcgtggtgcgtacagggtggtggggcagaggacgaacaatttggagctgtgattctgaatccagggcttagcaccacaggaaactagacgtggagagaccaaagtctgaggawatttagaaactgaaggattagcagggagaggatt

SEQ ID NO: 490171 - DNA, 274 bp, Homo sapiens
gaagaaatggtcttccctgtagttgagccagaaagatggagggtttgaaatactctgttttcaagagtggagggcaggtactcatgaaggcaccagtttyccactcagaagggagtcaggcattagatcagtaaagccctaataccattctggggctagcaccttggccccatgattgcaagttttgttgaactccatcttccctcccctgagaaggggctacctggttgtcttgagggcatcatcccactctgaagcaaggctgggccaggga

SEQ ID NO: 490172 - DNA, 637 bp, Homo sapiens
tatacatgatatatattttaacatttagattaggcttcctcaaattaacagttatgctgtaagatgttcatgaatctcaaaggtacctacataccatatgcaacatatcagatatagtaaattgaactatgaatgtgtatggcaatacattttaaaaccacaataccattaatcaataaggatgtttggcagacaattgggctcactaactaccaaagtaaccactctgcacaccaccttcacagtacggagaaytcacacttctacttcagggaaataaaacctattactgttctcagtgctttttgatgtcactatcgaatactcaaatatgtaattattgggtgattcatgatttactttatatttcacacaaccttgactgctccttccttttcctgaggttctgacagcctgactacaatgtcctcaatgcttcctctcagaactaattcaaatttcacctctgccacaaagacttttctttatttgctctttcctctgtgttatcatggcccctgcttgtccttacgaaggaggataaaacattgatttatgttttgctaattattttctcacctgctagattgtgagttctctgaggacaagagatgatgttttctgtgactttgtagta

SEQ ID NO: 490173 - DNA, 637 bp, Homo sapiens
tatacatgatatatattttaacatttagattaggcttcctcaaattaacagttatgctgtaagatgttcatgaatctcaaaggtacctacataccatatgcaacatatcagatatagtaaattgaactatgaatgtgtatggcaatacattttaaaaccacaataccattaatcaataaggatgtttggcagacaattgggctcactaactaccaaagtaaccactctgcacaccaccttcacagtacggagaactcacacttctacttcagggaaataaaacctattactgttctcagtgctttttgatgtcactatcgaatactcaaatatgtaattattgggtgattcatgatttactttatatttcacacaaccttgactsctccttccttttcctgaggttctgacagcctgactacaatgtcctcaatgcttcctctcagaactaattcaaatttcacctctgccacaaagacttttctttatttgctctttcctctgtgttatcatggcccctgcttgtccttacgaaggaggataaaacattgatttatgttttgctaattattttctcacctgctagattgtgagttctctgaggacaagagatgatgttttctgtgactttgtagta

SEQ ID NO: 490174 - DNA, 566 bp, Homo sapiens
gcttgagtagggaccagtcaggcccccttttgcatacctgtttttgttttgttttgtttttccaacattcctcccctttccccttctgcgccaccttggctaagatgatgtggaagcaattagacagaatgcatgctccaactggagaaagggaaggacatctgaatgccaaataaccacagtgggcattccctccaggtcactttgagtaagcccatccaacccccataaagatactaccggtgcctagaaaaaaggtggcccagacatatcctagaaacactctcatttgctctcagatattttcacttcattattattattatcatcatcatcatcatcagggtatataactaawccaaattttattttagattcaggaggtacatatgcaaatttgttacatgggtatactgtgtgatgctgaggcttgaggtacaattgatcctgtcacacaggtagtgaacatagttcccaataggtagtttttaacccttgttcctctccctctctcattcttccctctagtagtccccatagtctatttagttcctatctttatgtcc

SEQ ID NO: 490175 - DNA, 360 bp, Homo sapiens
ctcctccagagggtcatcttgaggaacaaattaagtgctgaatatggatgtgctttataagatataaagagctttctcattagtggagaatatgttctgaagcatctagccctcctttaaagtatgggaaaatggctggtgcagggaaggacccctgcagagaagcaggcagtgcttccctgattaagcgttcctatcaatctcctgaacaagtgggagattgcagtcctgagacgaggatcctggaggagaagatttccccccaagcagttccatagacttacgtgccatgagtgtgtatgtggaaaacaggatcagccrtgggtgaaagacaagaaggaaggacagtgtcagcaaagg

SEQ ID NO: 490176 - DNA, 590 bp, Homo sapiens
ttcattaatgtttgatagaaattaaatgactataaasagatatttcatattatattaaaaagtgaacaagatctgtgagagccaatgatctggcaattgctacaaaatgtaaggacaggcagctccacaactttttaggaaacatttttggagaaatcactgtataccactcactgtcctgggcacttttatatacctcactgcatctaattctcaaaacgagcctctaggtttaaagaactagttcctatatcacaaatgaggaaatgctctcagaaacatgtaaagatcactcaagactacatatctgacaagtgggagaacccagacatgtccagatgaatgacttttgcctcaggtttaggaggtgggaaaggaggcatacatgacattatttccttgttttgttgaagttggtagctgtgactaatctgtatttagaataaaatgttagcaaatcccatttgttctcctctttgcctatgtgcctgacagagctaggctttgcaactattttacggaacagtaagtccattgctactataacaaacttcatttttctttcttatgggtttgctttaagttcacag

SEQ ID NO: 490177 - DNA, 526 bp, Homo sapiens
tctttgtgagtgcatgtttatagttcgtctttgtggrtatgcccagatgagcattctgctaatctgctaatgaaaataaaagtatttccattaggccaagtcagcaatttaactgtttgtaacagagatcggcaaactttttctataaaggaccagaaagtaaaaattttcggtttgttggccctatattctctgtcataactactcaattctgccattgctgcacaaaagaagccatagacaaaacaaaaatgagtaagctaactatgttctaataaaacgttattgatgggcatcaaaatttgaatttcatataatattcatgtgttgcaaatattcctttgattattttcagccatttgaaaatacaaagcccttattagcttatgagccatacataagcagacccatacccatggccatagtttaacaacccctggtctataatcctaaaatgaagacttacattttttagtgctttctatgtgccacgtattgaggtaaacaccacatatccaatagctta

SEQ ID NO: 490178 - DNA, 572 bp, Homo sapiens
gtatacatatttatggggtatagtttttaacagaaatatacataattacaattttcaggtgatttttgggtgtttttgtttttattaagttcaggggtatatgttcaggttacttacacaggtaaacatgcttcgtgggggtttcttgtgcagtttatttcatcacccagatattaagcctagtaccctttagttattttttctgatcctctccttccttgcaccctctaccctccgataggccccagtgtgcgttattcccctctatacctccgtgagttcccatcatttagctcccacttacaagtgagaacatgaggtatttgtttttctgttcctgtgttagtttgctgaagataaaggcagtcctacttacttctttttttttttttaaatttagagtttttatttcatctggagcctgccttctccagcagtaatggctcttcacttccttcttatgtaaatcccactcatcccacccatcctcctacaagtttcacgtcctctgtgcacctttctggataaatmcagcccttgctcatctcctcttgcattcaaacttctcatgc

SEQ ID NO: 490179 - DNA, 478 bp, Homo sapiens
tggttctttcacaggtttcaagctctttgcacaatacctgctgcctctgctcatccyttttacttccactccactcctggggaattaacacaattgggccgaaggaagccatcaaaggccatttggaatttgggcaggaactcagaatccatgtgtggagatattcctgccacctctaaacacagttcactttctctaatactggaatactggcaggagatgagaacacgggctgcaaatgataagtgggtgcttttggcctggggtggccaagtgtgtgggagaagtgtcactaaggagggaagttacgggcccagcaacaggcaccgaagtgttctgcattacactgcctttgctaggcatgctgtgaggctgcaaaatgtctctgaaaagggagatgagaggatgggaatttcagtttgaacacttctgcataggatgctctgggtgtcctgtttctaatcttcctgtgagactc

SEQ ID NO: 490180 - DNA, 551 bp, Homo sapiens
gagagccaagtaatgcacattttaaccaatgtcctcagatttgaggagtytcctcaactgctccctgaaaggtgagtgtgcaaatggggaggacttcagactctacctctctccctctttctcttggttttatccaaattgtcagtggatccacctggtggcgattttgtgtgctaagaacccttgtggcctgttgctctctgccatagaagggagggatgcaattaatattgttgccttagtaccagcctacaatctacgtggttcccccagacacaagcatttccactaaataaactctacctgtttgggtccttgacgtgttcatttggtgaactggcaaattatgtaagtttcacttacaagctactccttttaagctaaaaataaaaatgcatcactttacctttccctgtgtatggtttggaaagtttgaaataatctcaatttctatccgattagataattaagccttcaaataaaagaatattaatccagaataattcaatgccacagtttatcaaacaactgaattattcttatacgactca

SEQ ID NO: 490181 - DNA, 551 bp, Homo sapiens
gagagccaagtaatgcacattttaaccaatgtcctcagatttgaggagtctyctcaactgctccctgaaaggtgagtgtgcaaatggggaggacttcagactctacctctctccctctttctcttggttttatccaaattgtcagtggatccacctggtggcgattttgtgtgctaagaacccttgtggcctgttgctctctgccatagaagggagggatgcaattaatattgttgccttagtaccagcctacaatctacgtggttcccccagacacaagcatttccactaaataaactctacctgtttgggtccttgacgtgttcatttggtgaactggcaaattatgtaagtttcacttacaagctactccttttaagctaaaaataaaaatgcatcactttacctttccctgtgtatggtttggaaagtttgaaataatctcaatttctatccgattagataattaagccttcaaataaaagaatattaatccagaataattcaatgccacagtttatcaaacaactgaattattcttatacgactca

SEQ ID NO: 490182 - DNA, 551 bp, Homo sapiens
gagagccaagtaatgcacattttaaccaatgtcctcagatttgaggagtctcctcaactgctccctgaaaggtgagtgkgcaaatggggaggacttcagactctacctctctccctctttctcttggttttatccaaattgtcagtggatccacctggtggcgattttgtgtgctaagaacccttgtggcctgttgctctctgccatagaagggagggatgcaattaatattgttgccttagtaccagcctacaatctacgtggttcccccagacacaagcatttccactaaataaactctacctgtttgggtccttgacgtgttcatttggtgaactggcaaattatgtaagtttcacttacaagctactccttttaagctaaaaataaaaatgcatcactttacctttccctgtgtatggtttggaaagtttgaaataatctcaatttctatccgattagataattaagccttcaaataaaagaatattaatccagaataattcaatgccacagtttatcaaacaactgaattattcttatacgactca

SEQ ID NO: 490183 - DNA, 639 bp, Homo sapiens
ttggagattgcacaagacttttcgttttcaaaggacagtgctaacaaagtggtgagcgaggacctgctttctctcttgaagagctggaaagaaattagggtgactcagatcaagaggggtacacctggataccttgattccaaaattctagttcagtttggttactgttccaattttcatagaccagcccattgcataggcagggtcctcaccaggatgaggtgagtcgagacagtggaagttagtggacaagggatattgtcaatgctttagggctcaaaacctgagctcttttaccattgcaccatcttacccagtcctgtgtgcagttggggaaattggttttgatgcctttctatacgatgacgtctaagaaacttttacctggggcatctacaaaaagcctgtgtatgaaaaatgctccatctctcatcctcctgcccttttctggctggctgtcttttttgtaacaatcccatttggagctctgaggggtgtcctccccmccacccacttcctcgcataccactaatgctaacacagtaatttataaaatgtccaacacaccatgcattaccacttgttctgacatcgtctatagaaacagatgagagtgggtgtttctattgtgacagatgc

SEQ ID NO: 490184 - DNA, 631 bp, Homo sapiens
ggatgtggtacatgatacagggtgacgtgtaagaacaggcagttcctggagaaaagggagaggtctccacaacccagcagtgccctrtctcactcatttcctcccagcatctgtcctatgatatgttgcagttctctggtgccagttaagtgaatttatacattttatgctggagctttaactaaatcaacctttacaaaataagcgacctcagaagataactgcacaaaagctctgatttggaggtagtactagcaatgcaagcctggcaaacaagaaaatggtggagccaacacctgacctactggcaaacactctgtcactcatatcatgagataaaaacaatgccaatgtaatcagatgggacaagatgtcagtcaagacatgatgaaattattgagaagacaactcaaactacagatttataaccaatgtcatcaacaatgtaccttgccctaaatatatgtggtaccttaaagatagctaataacaccacagccaccacaattagcaagttattccaaaatgtagatttttaaatctttagcccatctttgatttttggatattttatgatatatgtgataaggtaatatattaatacaaagtaaacttatgtaatataaaatgt

SEQ ID NO: 490185 - DNA, 631 bp, Homo sapiens
ggatgtggtacatgatacagggtgacgtgtaagaacaggcagttcctggagaaaagggagaggtctccacaacccagcagtgccctgtctcactcatttcctcccagcatctgtcctatgatatgttgcagttctctggtgccrgttaagtgaatttatacattttatgctggagctttaactaaatcaacctttacaaaataagcgacctcagaagataactgcacaaaagctctgatttggaggtagtactagcaatgcaagcctggcaaacaagaaaatggtggagccaacacctgacctactggcaaacactctgtcactcatatcatgagataaaaacaatgccaatgtaatcagatgggacaagatgtcagtcaagacatgatgaaattattgagaagacaactcaaactacagatttataaccaatgtcatcaacaatgtaccttgccctaaatatatgtggtaccttaaagatagctaataacaccacagccaccacaattagcaagttattccaaaatgtagatttttaaatctttagcccatctttgatttttggatattttatgatatatgtgataaggtaatatattaatacaaagtaaacttatgtaatataaaatgt

SEQ ID NO: 490186 - DNA, 631 bp, Homo sapiens
ggatgtggtacatgatacagggtgacgtgtaagaacaggcagttcctggagaaaagggagaggtctccacaacccagcagtgccctgtctcactcatttcctcccagcatctgtcctatgatatgttgcagttctctggtgccagttaagtgaatttatacattttatgctggagctttaactaaatcaacctttacaaaataagcgacctcagaagataactgcacaaaagctctgatttggaggtagtactagcaatgcaagcctggcaaacaagaaaatggtggagccaacacctgacctactggcaaacactctgtcactcatatcatgagataaaaacaatgccaatgtaatcagatgggacaagatgtcagtcaagacatgaygaaattattgagaagacaactcaaactacagatttataaccaatgtcatcaacaatgtaccttgccctaaatatatgtggtaccttaaagatagctaataacaccacagccaccacaattagcaagttattccaaaatgtagatttttaaatctttagcccatctttgatttttggatattttatgatatatgtgataaggtaatatattaatacaaagtaaacttatgtaatataaaatgt

SEQ ID NO: 490187 - DNA, 630 bp, Homo sapiens
cttagacttgttgtattcactcaggaaaagttgtagaaaaatctccctcccttttaaaattataaagcaaacagctcaacctcttagactccaatactgccatggggtaaaggtgccaaataaacacattttccacatcccaccctcctccctgcagcaccaagtgtcttggactgtgtttgtacctggagagaaaaggaaaaaaaatcaggaaattttgtacttttgatgcagccaggagccctattactaattaaaccacagtagcttcttttttttgagcatgggatcaccaaccagtgggaacttggtacctccaacagagttagaaggttccgttgaaatgggtaatagaattttgcacctcaaataaaatcctagaaatagcagcagccttctcatctcctctttatcactttttcccctacctagcctgtctgggaagagtgaagatatcttaaaccctttctgccrttggccttcaaatcttacaaggtccagttgagcagtgattaagccaagaccctcaatgattgctattgtatcaattaggatgacttgggctgtaaagggcaaaaaaaaaaatcttaccttacctggcttaaacagtaagggcatttgtgatcttat

SEQ ID NO: 490188 - DNA, 384 bp, Homo sapiens
acattgggaatgcagagagaggctaagaaacctagacagaggtcctgagtgtatgtgaactgagcttcccacagcacatcctacaatttaaaaaagatattggacatgatctgctagcctgtgggaccacctcacccctgggtgaggtgagaaagctcgaagagacacttaaaggccgtatttcccaaggacacatggttgtgggggggraaatgcaccctctgccatttcatctgggacgccatcagaatgccaagtccacattcgtaagtgccagtggaggctcggtccctgttcaaggcatcagtcagtttgtagtacaaagcccatttgtggttcagcgtcacagatcagaggcagcgatcgcgcactctcctgtctcag

SEQ ID NO: 490189 - DNA, 667 bp, Homo sapiens
cttggccttccaaactaccctatcattggaaggaagtctgcgtaagtgcacaccattatagtgctggagaagagggtggaaggtgtctcccatcttactgacttgcagaagtcaatttgtaactcwgatttcgaacaaatggatgaaagaagacacaagggaaatgcatctccaagcttgtctcactctgtcgcccaggctggagtgcagtggcacgatctcggctccctgcaacctctgtatcccgggttcaagcaattctcctgcctcagcctcctgagtagcggggattacaggcacaggcactcaccaccatgcccagctaatttttgtatttttagtagagaaggggtttcaccatgttggccaggttggtctcgaactcctaacctcaggtggtccacctacctcagccttccaaagtgctgggattacaggcataagccaccacacgcagcctcttcctaggcttctttagcattgcattatcattcatttgcattgcctgtttccattaaattggtgtttattatacctactgcctgtttactagtttttctgagttcaacgatttttttctcttctaaaaaatgcacctttcttttctcccttatagaagttcttagccttattccatcatagacatttttgataatttaatgaatgc

SEQ ID NO: 490190 - DNA, 667 bp, Homo sapiens
cttggccttccaaactaccctatcattggaaggaagtctgcgtaagtgcacaccattatagtgctggagaagagggtggaaggtgtctcccatcttactgacttgcagaagtcaatttgtaactcagatttcgaacaaatggatgaaagaagacacaagggaaatgcatctccaagcttgtctcactctgtcgccmaggctggagtgcagtggcacgatctcggctccctgcaacctctgtatcccgggttcaagcaattctcctgcctcagcctcctgagtagcggggattacaggcacaggcactcaccaccatgcccagctaatttttgtatttttagtagagaaggggtttcaccatgttggccaggttggtctcgaactcctaacctcaggtggtccacctacctcagccttccaaagtgctgggattacaggcataagccaccacacgcagcctcttcctaggcttctttagcattgcattatcattcatttgcattgcctgtttccattaaattggtgtttattatacctactgcctgtttactagtttttctgagttcaacgatttttttctcttctaaaaaatgcacctttcttttctcccttatagaagttcttagccttattccatcatagacatttttgataatttaatgaatgc

SEQ ID NO: 490191 - DNA, 640 bp, Homo sapiens
gatggttcagccagactctctggctcagatacactaactgctgctccctttgggaaggaggagaaggtagccgagtgataagaccattaccactgactgtgccctgtgagctggtagtccctgaagccacttttcttgccctttgcaagcatgaaaggaagtcggtgaaaggctgatcagaacagacttcctggtgggagataaagctgtctatggacaggctctggatgataatgggcagagagtgatttagtaccatgattacttctgaatagaggctgcaagcattgtgcccaggaagcccagtgawgctgcggaggagtgaccagagagaaatccactaggctggatacacataggagagctgagctgcctaccctggcattaggaggagccaagagcaacctctgggaggccttagcaacacctctcagaactccaggatgcatcagataaaacagtcccatctgtggagaatttccctcctctttccatatacactttacccctgtcctctgaactcacagatttttaattttcttatgactccagactttaggggtacctgagcctctgccttattgtttttttttctaacaggttggaatgttgttgagatttactaatgacagatcaacag

SEQ ID NO: 490192 - DNA, 431 bp, Homo sapiens
tgatttctcacctgatgtactaaagaatggcagaacgaaagcctctagggagaaaatgagattttcataacttaaacactaaaaacaacagccccataacactgaatgtcattatcaagcagcgaacactctcgcctctcttgtcaactgtggtgtgcacgagatgcctttcagaaggccacacgttcgtttacactcatgcctacccaccacgccacccccatcacaatcagacacacacacacacacacacacacmccaccagcaatcatgctattacctctggcacacttggaaaacatgtgtcagagctagaaccttctcttgtcacattatcataaattactgcacaggatatgagtctgtggttgcagaccatttttttccttacgtggtgaatttggccagaactggtgagaataatgaatgca

SEQ ID NO: 490193 - DNA, 587 bp, Homo sapiens
ccggaaccaagaatgtgaattccccacaagctccccgaccttgggaggaccagcagcctctgtgtgctctgtcaccagtgcctggcacttgattcacgctttcagtcaacactgaggwcaccacccagtcagcacctctagagtgctagagagtgaagaggtgtcagggcggagagctgggaaggaccctacaggcaacctggaaggtagaaagcagcggactgctccatggaatctaaaggagaaaggggacatgttggctccactaattccctcttgcagcccacctctggctacagcagatgctggtgtgaagtcacctctgcactcagtcactggttctctgacatcttccccacccagtctcccttgtgtagcacagtcctgcctcctccctcctggctcctattgtgtgtgcaggaggcctgttggggagttggtggagccagaggttaggagaaggggaggcaaataggatttatgggatatttgcctttcctaagaactgtcctctgctcatgatgtcaacctaggttcaaggtactgaggccaactaacagggaagcaatgcttgaaaactaggagcc

SEQ ID NO: 490194 - DNA, 587 bp, Homo sapiens
ccggaaccaagaatgtgaattccccacaagctccccgaccttgggaggaccagcagcctctgtgtgctctgtcaccagtgcctggcacttgattcacgctttcagtcaacactgaggacmccacccagtcagcacctctagagtgctagagagtgaagaggtgtcagggcggagagctgggaaggaccctacaggcaacctggaaggtagaaagcagcggactgctccatggaatctaaaggagaaaggggacatgttggctccactaattccctcttgcagcccacctctggctacagcagatgctggtgtgaagtcacctctgcactcagtcactggttctctgacatcttccccacccagtctcccttgtgtagcacagtcctgcctcctccctcctggctcctattgtgtgtgcaggaggcctgttggggagttggtggagccagaggttaggagaaggggaggcaaataggatttatgggatatttgcctttcctaagaactgtcctctgctcatgatgtcaacctaggttcaaggtactgaggccaactaacagggaagcaatgcttgaaaactaggagcc

SEQ ID NO: 490195 - DNA, 587 bp, Homo sapiens
ccggaaccaagaatgtgaattccccacaagctccccgaccttgggaggaccagcagcctctgtgtgctctgtcaccagtgcctggcacttgattcacgctttcagtcaacactgaggacaccacccagtcagcacctctagastgctagagagtgaagaggtgtcagggcggagagctgggaaggaccctacaggcaacctggaaggtagaaagcagcggactgctccatggaatctaaaggagaaaggggacatgttggctccactaattccctcttgcagcccacctctggctacagcagatgctggtgtgaagtcacctctgcactcagtcactggttctctgacatcttccccacccagtctcccttgtgtagcacagtcctgcctcctccctcctggctcctattgtgtgtgcaggaggcctgttggggagttggtggagccagaggttaggagaaggggaggcaaataggatttatgggatatttgcctttcctaagaactgtcctctgctcatgatgtcaacctaggttcaaggtactgaggccaactaacagggaagcaatgcttgaaaactaggagcc

SEQ ID NO: 490196 - DNA, 569 bp, Homo sapiens
accttctactttcctggcgatttcctgagggctctccttggagatctggaggactaaatcagccccaatctccttggctttggacaatcgggtagcagacagatctgaaggtaaaaaaaaaaaaaaaaattctttcaaacaagagaaatctgatgactcattaggaagaaaagaaaatggagrtgtaagatctgatggcaacaaagctctcgtgcaatgggtggtggtgttgagcccaacacacatactcttcacaccaagcttgtccaacctgcagcccacatgcagcccaggatggctttgaatatggcccaacacaaatctgtaaactctctaaaaatattatgaaattaaaaaacagttttgtaaagttcatcagctatcattagtgttagggtattttatgtggggcccaagaccattcttccaatgtggcccaaggaagccaaaagattggacacccctgctctgctctacaccctcatatacccccatatccaccatacagctacacacacacacacacacacacacactctcacacaaactctctctctctcatagcttct

SEQ ID NO: 490197 - DNA, 593 bp, Homo sapiens
tctagtgggaggccagccttctatattttagccagcgttctttcctgcgggcmgggtcatgaggagtatgcagactctaagagggagcaaaagtatctgaaggatttaatattttagcaaggaatagatatacagtcatcccttggtctccctgggggattggtttcaggaccccttcttggacaccaaatctatggatatttaagtcccttctataaaatggtatagtatttgcatataacctatccacatcctcctgtatactttaaatcatttctagattacttgtaatacctaatacaatgtaaatgctatgcaaatagttgttattgtttaaggaataatgacaagaaaaaaaagtctgtacatgctcagtaaagacacaaccatccctttttttccccagtgtttttgatccatggtttgctgaatccacagatgtggagcccctggatacggaaggccagctgtactttgaatgacaaataacagatttaaaattttcaaggcatagttttatacctgatggccagctttgtttatttgaccaagaatctgagttagctagttctaggtactgacaggataaataa

SEQ ID NO: 490198 - DNA, 593 bp, Homo sapiens
tctagtgggaggccagccttctatattttagccagcgttctttcctgcgggcarggtcatgaggagtatgcagactctaagagggagcaaaagtatctgaaggatttaatattttagcaaggaatagatatacagtcatcccttggtctccctgggggattggtttcaggaccccttcttggacaccaaatctatggatatttaagtcccttctataaaatggtatagtatttgcatataacctatccacatcctcctgtatactttaaatcatttctagattacttgtaatacctaatacaatgtaaatgctatgcaaatagttgttattgtttaaggaataatgacaagaaaaaaaagtctgtacatgctcagtaaagacacaaccatccctttttttccccagtgtttttgatccatggtttgctgaatccacagatgtggagcccctggatacggaaggccagctgtactttgaatgacaaataacagatttaaaattttcaaggcatagttttatacctgatggccagctttgtttatttgaccaagaatctgagttagctagttctaggtactgacaggataaataa

SEQ ID NO: 490199 - DNA, 593 bp, Homo sapiens
tctagtgggaggccagccttctatattttagccagcgttctttcctgcgggcagggtcatgaggagtatgcagactctaagagggagcaaaagtatctgaaggatttaatattttagcaaggaatagatatacartcatcccttggtctccctgggggattggtttcaggaccccttcttggacaccaaatctatggatatttaagtcccttctataaaatggtatagtatttgcatataacctatccacatcctcctgtatactttaaatcatttctagattacttgtaatacctaatacaatgtaaatgctatgcaaatagttgttattgtttaaggaataatgacaagaaaaaaaagtctgtacatgctcagtaaagacacaaccatccctttttttccccagtgtttttgatccatggtttgctgaatccacagatgtggagcccctggatacggaaggccagctgtactttgaatgacaaataacagatttaaaattttcaaggcatagttttatacctgatggccagctttgtttatttgaccaagaatctgagttagctagttctaggtactgacaggataaataa

SEQ ID NO: 490200 - DNA, 619 bp, Homo sapiens
cctaattccacaaaagaaattggaaaagagtcatattgctgacttgaccctttgtcaccatatccataaaatgggataattattcctatatcataaatttacttatttattcacttagtcatttgttaaataaatayggagtgtctactttgtgccgggcactctttttagggtggttctgagaaggggatggcaatgagaagggctctctaagatgcaagactccaggcaactgcttttacttccagtggttctttattttcacagctcattagagcaaattaccacagcagggagatacaggttgagtatcccttatccgaaaagcctggcaccagaagtgttttaaattttggatttttttttgatttttggaatatttgttaattatcagttgagcatctctaatgtgaaaatctaaaatccaaaatgccccagtgaccctttcctttgagcatcatgttggtgctcaaaaagtttgagatgttggagcatttaggatttcagatttttggattaaggatactcattttgtacaatggaaaacttcttggcactaatctgatgaaagaagaaactacgggagaatccctttccctaaaaggctttcagtaacaag

SEQ ID NO: 490201 - DNA, 619 bp, Homo sapiens
cctaattccacaaaagaaattggaaaagagtcatattgctgacttgaccctttgtcaccatatccataaaatgggataattattcctatatcataaatttacttatttattcacttagtcatttgttaaataaatatggagtgtctactttgtgccgggcactctttttagggtggttctgagaaggggatggcaatgagaagggctctctaagatgcaagactccaggcaactgcttttacttccagtggttctttattttcacagctcattagagcaaattaccacagcagggagatacaggttgagtrtcccttatccgaaaagcctggcaccagaagtgttttaaattttggatttttttttgatttttggaatatttgttaattatcagttgagcatctctaatgtgaaaatctaaaatccaaaatgccccagtgaccctttcctttgagcatcatgttggtgctcaaaaagtttgagatgttggagcatttaggatttcagatttttggattaaggatactcattttgtacaatggaaaacttcttggcactaatctgatgaaagaagaaactacgggagaatccctttccctaaaaggctttcagtaacaag

SEQ ID NO: 490202 - DNA, 577 bp, Homo sapiens
gctgaaacagaagagattttgtcatctctaatagtttgcagttagccagtgaaccgctggaccgtggcacaccctgagaccacataaycaaatgacggaaggggccaccctaaggaagggcctggtaataaattaattcagaaataataaaaccagatgagaggctcaagtcaatgaaaagagaaatgtagacataaggccacataatgatgatgactatgatgataagaacagcttatattggaatagaacttagtatttttcgaagtgtttttgtgtgtatcacctaatacaattttcacctccaaagtaagcaggagagacattatattctactctttggaggaaatagtaacaccaagaggttaaaaggcttgtccaagcctgatgactggcatagagtagagctgggttgttacaccccacatctcttgatttccaggggaaagtctacacaatgcttcttctgctttgttacacagctccctaccatggtctcccctcaattaaaatgtttatgcattagttcccatcaaacataaagataacaaatgcataccacagaaacctgtacatg

SEQ ID NO: 490203 - DNA, 577 bp, Homo sapiens
gctgaaacagaagagattttgtcatctctaatagtttgcagttagccagtgaaccgctggaccgtggcacaccctgagaccacataaccaaatgacggaaggggccaccctaaggaagggcctggtaataaattaattcagaaataataaaaccagatgagaggctcaagtcaatgaaaagagaaatgtagrcataaggccacataatgatgatgactatgatgataagaacagcttatattggaatagaacttagtatttttcgaagtgtttttgtgtgtatcacctaatacaattttcacctccaaagtaagcaggagagacattatattctactctttggaggaaatagtaacaccaagaggttaaaaggcttgtccaagcctgatgactggcatagagtagagctgggttgttacaccccacatctcttgatttccaggggaaagtctacacaatgcttcttctgctttgttacacagctccctaccatggtctcccctcaattaaaatgtttatgcattagttcccatcaaacataaagataacaaatgcataccacagaaacctgtacatg

SEQ ID NO: 490204 - DNA, 577 bp, Homo sapiens
gctgaaacagaagagattttgtcatctctaatagtttgcagttagccagtgaaccgctggaccgtggcacaccctgagaccacataaccaaatgacggaaggggccaccctaaggaagggcctggtaataaattaattcagaaataataaaaccagatgagaggctcaagtcaatgaaaagagaaatgtagacataaggccacataatgatgatgactatgatgataagaacagcttatattggaatagaacttagtatttttcgaagtgtttttgtgtgtatcacctaatacaattttcacctccaaagtaagcaggagagacattatattctactctttggaggaaatagtaacaccaagaggttaaaaggcttgtccaagcctgatgactggcatagagtagagctgggttgttacaccccacatctcttgatttccaggggaaagtctacacaatgcttcttctgctttgttacacagctccctaccatggtctcccctcaattaaaatgtttatgyattagttcccatcaaacataaagataacaaatgcataccacagaaacctgtacatg

SEQ ID NO: 490205 - DNA, 604 bp, Homo sapiens
acataaatggactctgtaattttcaagagtcaggccagctacaactactttattccagacgcaaaccaaaaactatctgagacacatgtcaatcaatttagtttattttgccaaggttaaagacattaycgtgacacagcctcaggaggtcctggtgacctgtatccaaggtggtcaggctacagcttggttttatacattataggaagatataagacatcaatcagtacttgtaagatgtacactggtttggtccagaaaggcaggagaactcaaagtggtttggggttggaggtgcaggggagcttccaagtcatgggtgcattcaaagattttctgattggcattggttgaatgagtttatctaaagatctagaatcaatagaagagagtgtcgggattagataaggggttgtggagaccaaggttcttattatgcagaagaagcctccaggtagcaggcttcagagacaattgattgtaaatgtttcttatcagacttaaaaaggtgccagacttagttcattctctcccagatcagtgaaaagatctggatagggaagggaattctctacagaatgtagattttcccaccacaagacag

SEQ ID NO: 490206 - DNA, 604 bp, Homo sapiens
acataaatggactctgtaattttcaagagtcaggccagctacaactactttattccagacgcaaaccaaaaactatctgagacacatgtcaatcaatttagtttattttgccaaggttaaagacattaccgtgacacagcctcaggaggtcctggtgacctgtatccaaggtggtcaggctacagcttggytttatacattataggaagatataagacatcaatcagtacttgtaagatgtacactggtttggtccagaaaggcaggagaactcaaagtggtttggggttggaggtgcaggggagcttccaagtcatgggtgcattcaaagattttctgattggcattggttgaatgagtttatctaaagatctagaatcaatagaagagagtgtcgggattagataaggggttgtggagaccaaggttcttattatgcagaagaagcctccaggtagcaggcttcagagacaattgattgtaaatgtttcttatcagacttaaaaaggtgccagacttagttcattctctcccagatcagtgaaaagatctggatagggaagggaattctctacagaatgtagattttcccaccacaagacag

SEQ ID NO: 490207 - DNA, 604 bp, Homo sapiens
acataaatggactctgtaattttcaagagtcaggccagctacaactactttattccagacgcaaaccaaaaactatctgagacacatgtcaatcaatttagtttattttgccaaggttaaagacattaccgtgacacagcctcaggaggtcctggtgacctgtatccaaggtggtcaggctacagcttggttttatacattataggaagatataagacatcaatcagtacttgtaagatgtacactggtttggtccagaaaggcaggagaactcaaagtggtttggggttggaggtgcaggggagcttccaagtcatgggtgcattcaaagattttctgattggcattggttgaatgagtttatctaaagatctagaatcaatagaagagagtgtcgggattagataaggggttgtggagaccaaggttcttattatgcagaagaagcctccaggtagcaggcttcagagacaattgattgtaaatgttwcttatcagacttaaaaaggtgccagacttagttcattctctcccagatcagtgaaaagatctggatagggaagggaattctctacagaatgtagattttcccaccacaagacag

SEQ ID NO: 490208 - DNA, 604 bp, Homo sapiens
acataaatggactctgtaattttcaagagtcaggccagctacaactactttattccagacgcaaaccaaaaactatctgagacacatgtcaatcaatttagtttattttgccaaggttaaagacattaccgtgacacagcctcaggaggtcctggtgacctgtatccaaggtggtcaggctacagcttggttttatacattataggaagatataagacatcaatcagtacttgtaagatgtacactggtttggtccagaaaggcaggagaactcaaagtggtttggggttggaggtgcaggggagcttccaagtcatgggtgcattcaaagattttctgattggcattggttgaatgagtttatctaaagatctagaatcaatagaagagagtgtcgggattagataaggggttgtggagaccaaggttcttattatgcagaagaagcctccaggtagcaggcttcagagacaattgattgtaaatgtttcttatcagacttaaaaaggtgccagacttagttcattctctcccagatcagtgaaaagatctggatagkgaagggaattctctacagaatgtagattttcccaccacaagacag

SEQ ID NO: 490209 - DNA, 411 bp, Homo sapiens
cttttctcaggagaggcaaatgggttaaactgcaagtagaaaaaagttcaagctgctatcattccagaacccccagttcctcatgtctcggaacttcttgatgtctttatttttgcattctaaastgcttaataaacatcactgaatacatgctaccccccctacctcaaatcctgtctggtgcaggttcaatcaatcatgatgcctttggaagctaactcaaactggcttaaataaagagggttttttgtttggttggttttgttttgtttttaaatctcacacaaaaggaagttccaaggtagagtggggcctcaggaagagctgactgggctgcttggtaatgttatgaagatgcagtgtttttccttctctctgctccaccatccttgatgttggcttcatcctcag

SEQ ID NO: 490210 - DNA, 411 bp, Homo sapiens
cttttctcaggagaggcaaatgggttaaactgcaagtagaaaaaagttcaagctgctatcattccagaacccccagttcctcatgtctcggaacttcttgatgtctttatttttgcattctaaagtgcttaataaacatcactgaatacatgctaccmcccctacctcaaatcctgtctggtgcaggttcaatcaatcatgatgcctttggaagctaactcaaactggcttaaataaagagggttttttgtttggttggttttgttttgtttttaaatctcacacaaaaggaagttccaaggtagagtggggcctcaggaagagctgactgggctgcttggtaatgttatgaagatgcagtgtttttccttctctctgctccaccatccttgatgttggcttcatcctcag

SEQ ID NO: 490211 - DNA, 560 bp, Homo sapiens
ccactgagtgtaaatgattctctcgaaagtttggcttagatgaggcaggattatattgtaatatggtgtgtgctatgagagaaagatgtataaaattccagggcacagcaggtcacatggacacctcattcaycctggtaggaggctaggtgtcttaatcctaaatttatgatagtcatgatacagacgcccaggtctgaaaagcgaagcgcctttcacaactcccagattgttgggccaatatcctaaggagaataaccaagtatgacacctgccaaagtacaagccagctcttcagcaaatgaatgcaatgcaaagcaaaaaatgaaaaaacatttaaaaaaataaaggaatctgaatgactaggctgacatacctttccccaaagaaaaatcagctatcagtgcccagtatataaccaatcgacattattaaaaattctatgtaatctatttaaactctcttcatccatcatattttgactcaagcatcactttcataaggaattctctgaccttcctgatgtcccaccctcctttctcagtcctatctctgcatta

SEQ ID NO: 490212 - DNA, 562 bp, Homo sapiens
gggaagggagaaagacatggctccatcccaggttccctgatcccaaatctccccctcattgcaatgtaccaagctgcctccaataagatcaagagtcttgacgatccccaagctagtccactcagtccagttttcctgccagactatagctgttttgcattccttatcttgtgttgaagcaaaccrggtaaggaaactccccaccttttttattaatgactcattttcagccaaaacacattgcagccacatcaggtacatgtgcccactcagcaaagacgtactgtgagaaagtaacatctaagttacttggtccaaagcccttctacatcaatcatcaagcaaccaaccctcctttgctgaaatctccaggggactaggccctttggtgggggaagaggggacggtttcttcaggggcatctcacccctgggaagtgcatcctctctgctgggggcagtaaaaaggctttacgtgggccactgtggctcatgcctgtaatcccaacactttgggggcccaagcagggtgattcacttgagcccagaagtttgagaccagc

SEQ ID NO: 490213 - DNA, 623 bp, Homo sapiens
tttttctcctgtctgtctctcaaatgtgtcccctggctcccctccattgccactgccctcttcagtgtctggcctgtgctcccacaacaacaggcttgaagctggctgccctctcccctccatcttccacaccataatccaggtgatccttctaagaggcaaaggtaatcatgtttcttccctgctcaagatctgtcaaaagattctgtggcctccatagaaaaggcagacagcccggccacccaggcccttcaccatctgcctcttgaccatctccagtgtcctgcagtgtcctgaatataccttttccctgcctctgcccaacacactcccgttctttcaacacccaactcaactattaccttctctccatcagatcttccctgaaccaccccccagaaacaaaggtgastgtcccctctggttccccacagccaccccaccacttacccctgtgctcaggcactcctggagcactgcattgcaaccattggctcacacatctgtctctaccagcaaaccactaaaccgtgaataagtggcttcctgagccaggccttgtgcaatgaatggatttgcaacaaagggagccactgagagattacatgagccaagtcatggca

SEQ ID NO: 490214 - DNA, 566 bp, Homo sapiens
gccctgtcatttgtggcataagcgagagagcccactgacatcccagcgctgccttcccagccacaatgagggagaggtgggcttggcccttgaggccccttcttctcaaaggcattgaggttactttccatgtagattacggttgagaacaatgagaacttctggagcacattctgtgggctgtgtgaggacgtcggcaagggaacagactaagatggctagaaaatgcccctctttcatctctagaattcatctagtgaagcacttcccaagcctcaggtatccagggtctccctgttcttcctagaagtaggttccagtgaacagaaagcccacagcataactaagaaaaagctgtgtgtctctaccatgctggtgaatccatgctgctccttgacctgccactccttgacatggacggctctattctaacagtgccactctctcatgtcactgtccctctgcctggttcctcctcctctcttatctgcctgsagagtcccactccttggatgagtctcacccagagcatccctcccccatctcctcaggctgggtgtagggtg

SEQ ID NO: 490215 - DNA, 433 bp, Homo sapiens
aagcgtgggggataatttagtggaatcccttcacagataggttttaacttgaaataaytcaactataggtgcttggcaaacaatcaaatagtgaacaggcccaagagagaaggaaataatttagatggcagatggcagttggctccactagaagtgccacctggtgagcacgggcccacagtgggtgtgaggcgggacaacgggggcacacttccctcctgcgtgtgtacctcacactgtgctaggatgattatggttctggcatacaaagtcacttatttttcatgcaacctggtccctaaacttaagaaaatgcctttatctggtaatcaactgggaaaaacattggctgaaccccatactttcaagtacttatgagattttcaaaggtggttcttacacactaacttaagagtccccagatggtgagtcc

SEQ ID NO: 490216 - DNA, 537 bp, Homo sapiens
attaatattactgtcattaattgatattattgtaatgttactataatatacatagccataatataaacacattataaagctgtaatagcttatctttattctactatgtggcaagtctgtactaagcattctcctactctaaacccccacaaaagtattagctatgaactatcattgaatttcgttttacaaacaaggacaatccaaagaggccaagttacctgcccaaggccacacagtccacaagagcccaagttcccactcaggcccattctyttagctctgtgccacccagctctgcaaatgtagccacccaaagccaatcaagccagtggtagagttctaaaaccaaatctagggctctgtcccaccaatctccacctggtgcctggaattcctctatttttgttttttgttctgttttgttttaaagtttcactcacccccctccttaaacccaaatatccctgggacaggatggaaatccataaacaggtgcctgagtaagacatcattcacagagccttttcctcctga

SEQ ID NO: 490217 - DNA, 690 bp, Homo sapiens
ccaccctgccctcagttcctagcagatcctcaacttggcctgctttgatgtttgtgaatggcaggtaggaaaggtcaggcaagtggaagaaacctaaaaccatgctctctatggccatggaagcttcctaggtattattacatagctgtagtatattaatattactgtcattaattgatattattgtaatgttactataatatacatagccataatataaacacattataaagctgtaatagcttatctttattctactatgtggcaagtctgtactaagcattctcctactctaaacccccacaaaagtattagctatgaactatcattgaatttcgttttacaaacaaggacaatccaaagaggccaagttacctgcccaaggccacacagtccacaagagcccaagttcccactcaggcccattcttttagctctgtgccacccagctctgcaaatgtagccacccaaagccaatcaagccagwggtagagttctaaaaccaaatctagggctctgtcccaccaatctccacctggtgcctggaattcctctatttttgttttttgttctgttttgttttaaagtttcactcacccccctccttaaacccaaatatccctgggacaggatggaaatccataaacaggtgcctgagtaagacatcattcacagagccttttcctcctg

SEQ ID NO: 490218 - DNA, 647 bp, Homo sapiens
ccaccagactcctgggttacaagtcttgtgtctctgttaactatgtgtccaatctcccaggccctaaactaggattctttaggaatgagtatgtaacaggaaagggaagatctgtgtttccctgaagcagctttcataattcttctaccatcaacctgaaaagaaccaatagtctcctctatctctaaaccagattcccatttcttccttagaaactatgtccagtcagccaccgaaccctataagttgatcccagtggatcaactcttccgctccggtttctctgagcacctaggaactggtccctgtgtctctcctggggggatccatttcttatccaggccccagctctgcctgtccagcccaggagccacccgaaatgctaaatctgtcttcttgctaaacaagttggattgtcataactgtatagccctggtctaagtgaggttggataacagaagtggtctaggaaaactgtgtcctggggaggaggtaaagtgataaataggatgtggtcacggtgtcctaggcagtagcccctcacaatgccagtggatgtcaggatcacgaatcagggaggtctgwttcggtagaagacatgagttggggaggtctgatttggtacaagagatccagaacttgtgtcc

SEQ ID NO: 490219 - DNA, 556 bp, Homo sapiens
ctggagtaaggagagtaaggtatagcagagacaggacaaagtaaattggacctcagagacagggcacggggcagagtctgattccaactgaaacgtaaggatccccacatccctcaacagtccctcagatggtgaggtttaggacacagtaaggaggggtggaaagagcatgggtttgggtatgtcttccctcatgaaaaccgtggagccagaagcagtagtgttacagtgatgtcatcccctgaggctcagtttcctygtaggtaaggtgggaatggaaatgactgctgcataggctgtgagatgattttgtgagatgtaagcgcccaacagatggtggtgatgacgatgttggaatcaggtgactctagcctcttcactgtcacgcttgctctcgtctgaacgtgcttccatgtctccatgttgctcttgtgtccacaagcaaaagcaataatccattgccatttaaccagcacaaaactgaatgaggctgtcaccttccttttctgaaacacatgcttcagacagcgcagtctacagtcacttgagggctggg

SEQ ID NO: 490220 - DNA, 556 bp, Homo sapiens
ctggagtaaggagagtaaggtatagcagagacaggacaaagtaaattggacctcagagacagggcacggggcagagtctgattccaactgaaacgtaaggatccccacatccctcaacagtccctcagatggtgaggtttaggacacagtaaggaggggtggaaagagcatgggtttgggtatgtcttccctcatgaaaaccgtggagccagaagcagtagtgttacagtgatgtcatcccctgaggctcagtttcctcgtaggtaaggtgggaatggaaatgackgctgcataggctgtgagatgattttgtgagatgtaagcgcccaacagatggtggtgatgacgatgttggaatcaggtgactctagcctcttcactgtcacgcttgctctcgtctgaacgtgcttccatgtctccatgttgctcttgtgtccacaagcaaaagcaataatccattgccatttaaccagcacaaaactgaatgaggctgtcaccttccttttctgaaacacatgcttcagacagcgcagtctacagtcacttgagggctggg

SEQ ID NO: 490221 - DNA, 496 bp, Homo sapiens
aactcatgaggccagttattttcagtcaaaccaagctacaaaaaccacagtcatgcagaagctggaggaaccaccaaggcaaagagaatggaaattcccttatgctagacagcacaggtccccagttttctgggrcatctgaaacttgatgtgacagcactgggagaggccaacagtccacgaataggccaggacctaaggggaaaggctaccactctacagccggccatcagggtgctgggctacagcagggctggcaggagcagacggaggccacatgccaactccagcctctgctacatatggtcccagcccccctactcaccagccatgcggcctcaggcaagtgggataatccccgtgtctcagtttcctcatctttaaaaagtgggataataaaagattcatgtactttatagggttgttgtgaggatcaaatgatttaatatacaaaaaaatgttgacaacagggctcaacacaaagtgtgctcaacag

SEQ ID NO: 490222 - DNA, 649 bp, Homo sapiens
gtgtgtaactccaaatggccccattatcctatctcgaggagagctgcgcatgctgtaccctgttttacatggcctgccatgcttctggtagcaaagcagtaatctcctggttatgtagcactggggatgccaataacagccagataaagaatagaactcatgaggccagttattttcagtcaaaccaagctacaaaaaccacagtcatgcagaagctggaggaaccaccaaggcaaagagaatggaaattcccttatgctagacagcacaggtccccagttttctggggcatctgaaacttgatgtgacagcactgggagaggccaacagtccacgaataggccaggacctaaggggaaaggctaccactctacagccggccatcagggtgctgggctacagcagggctggcaggagcagacggaggccacatgccaactccagcctctgctacatatggtcccagcccccctactcaccagccatgyggcctcaggcaagtgggataatccccgtgtctcagtttcctcatctttaaaaagtgggataataaaagattcatgtactttatagggttgttgtgaggatcaaatgatttaatatacaaaaaaatgttgacaacagggctcaacacaaagtgtgctcaaca

SEQ ID NO: 490223 - DNA, 520 bp, Homo sapiens
ttcagcagaagacaggctgggctggcccaacttggtcctgtacccccaccaccccagaaccccactggtccatagtgaggatccsttctctttgactctcctccttctctgtgactcgcctaagcctgatcctacaccttctctcccagccactgcctcagcttcctccacccccagcttgggacgagccacctccctggctgggtagcatgggacaagccatctccctgcagaggcagagaaccagtgacactacacgcaaaccaaggccatgctgcaaacagaacaccaaggcaccctcgtcttaggatgcattatattcggggtagatgttgaattctagtaacacattccctggggtgttttcaaatccagacacactggagccttgttccagcctcactgtgggcgaaggccccgggctcacctccagcctcaggctggctctggctgctgcccctgttccatcctggcaagcggaactgaacaggcccgactccacagcccccggtgctgccag

SEQ ID NO: 490224 - DNA, 539 bp, Homo sapiens
aggatctattttctacaactgtacaccagaactcgggtaaacactgcgagagtacagcagtagcaagagagaattgggaaacagtcgccgagtgaaacgaggcaatttatcgcccacttccattctcactctctcacaaggaacctttaccagtttgggagcctgtttttaagggagggggagggaaacggatctgtacggagtaaatcctgtttcgccagtgcctcctctcatttcatcctcagagcagtcagatgaggtaaccgggtggagaggagggaaggggccctcggggggcactctgcccgggcactgggctggatgtgttgtacacgttagctcatttcccatttgatcctcacagcaacccccagacagggagagacacacgcacacacagagacacggtcagggcaaagtcacacaatttgtgagcaggaagcrtcgcattgaatcccagcctttgctccttttactgcacttggcctcggcgtaggaccaaggccctcgactgagtgcctctccctcctgcggcattc

SEQ ID NO: 490225 - DNA, 643 bp, Homo sapiens
gactttaacaataaatcttgctaataactattttctggaaagaatattttctttaccataaaaaagtatgtatctgcttttctcagcttggcagactctgtatacattgttctccactgcgtggtgactacagtgactacaacctcaaatgtagccaagggcaaatgatcactggccaacttgatcagccaaaagataactttatttactaaattgcatatttcaagggagtaaaaagggataaactttttgaacagattttcaattattaatttgttggatgcatgaatatttagtaagggttataagtaatgaggatataagttgccaggcacagtataagtgatatattaaaaattgttgaatgaaatacacaggaygatatggaagaatctcaccaacataacactgagttgaaagaagctagatgcaaaggaaggatattatatgattcacaaagtacaaaaacaggcaaaactaatttattctgagagaatgcaggatagcaattaaccactggagagaagcaatgcttaatgggaaacataagagggtggatgtggcctttgtgggcctagtcatgctctgcttctggtgtacatgctgattacaaagtaatgctcagtttatgaaaattcaagca

SEQ ID NO: 490226 - DNA, 631 bp, Homo sapiens
ccatttacagagataagcctataaagctttataaagctataaagctgagagatttcaatgtcaaaaaattgggctgctattagcaacaatttaaaagttctgagctttattaagtaaactgaagaataagacataaatagagaatacaaacagatactaatcaccacactcagcctagccttgtggccatcgatgatcttggatatattctacataatgatatctgtgtataaggaaaaagtagtaatatctatattcctgccacatgcattatttcataagcacattagatatattttttgtttagattatcttatctcccatatttagaagtcaagtaccaatttttttcttgctctattcttcataytagtttccaaaattacactaagattacttagaatttttgacttcctgcaatgcatttttttaatccaccacacaaatcactttaaaataaagataataatgaaagaaagttggcgccacaactgagccctcagtatgtgacaagtataaatcagtggggacagtagtcagagcagctttataagcacacatcacgtgctgaccttgcattccctcgattctatttctgctacttccagttcctatttgaaaaaattgaaaa

SEQ ID NO: 490227 - DNA, 555 bp, Homo sapiens
tgagaggacaagccctgttctgggtcaacctatcatgtaggacaggatacttttctcccaccttctttgttacaggcaccctgtgtcagtctccacatctagctctatgtgccctctcagtctctgctatggctccttgctctgggagagaccacatacctcaaactcaacatcatctcttacttccatccactccaccacctatctattgcatgtcaatagacacatgggggaggagcatatttcagctcaayttacaagcattcaatttctcagacacagtgcttattctgagggatggataccactctcgacacatgctcttcccagtacatggtagttttatataaaagtatagaaggggcatacttaagagaaaaatcaaaccaaacaaaagagacttaaaagacttgaaaatagcacaagtcttttaaagcctcattgaagcaaataactaccactgaaattttaaaagtccctgggaaaaaaagtctaaccatgcccagggccaaggtctctgtgctccgttggctccatccactcctcacttgtacc

SEQ ID NO: 490228 - DNA, 318 bp, Homo sapiens
aaattgtaactttcaaactctttgaaatttggtcaaaataaatcatctcttttcaagttgttytgggaatccagactttcagaggtacatcttatgtgagtatattttactaactgtatgtatgtaaaatctgaacaagtggttggtaataatggattgttaaatacagtagggtagacttgatgtctagacaagatagtggtgagagctgcactttaaagaacattggttacttgctctgataaaaaggaaaaacaaagaatgtttctattatgtaaggttactatgaaatgcttagatcttgaacctacaacaata

SEQ ID NO: 490229 - DNA, 620 bp, Homo sapiens
ggtgaaatgctgttccttttaaagagttttgacatttagaaaagaacatcaattgtgacaaaagcagaggtgctgtgactcagttgttattcttacacattttctaaaagaaaacttaaaaaacagataacaattttaaaggacaaatgaaggtgacagaacactcagttcaccaatgacacagactgagagattcactcatggtcattaataaaataagaaagaaggtactaggtatttctagctttgatctaagtgctttgaaaactcaatttaaagaaaaaggaatattaaagggaaagttagaagcaatcaactgtgtcactgattattcctctctagtgtttcaataatggaagtccttcagtgtaaatgggttttaaaatggaaatagctttatgatttagggttctattatgaggacatcagatcctcctttaaagatataaactcaggataagtttagttttaatttgacagaaaatcctgttaagcctaattttttaaggcatttgaatccagatacatatttctgaagtattagaaaaatactgagataatatttctctagtttcatgaagctatayagaactcattgcactacttgctctcttattttt

SEQ ID NO: 490230 - DNA, 590 bp, Homo sapiens
acggcaagccatctcaacatgaccatgggccagggcaggccacaaggcacagcaatacaacagaaacttggactggcactggtttatttctaagacacgtttttccattttctctgcaaagttttctctcacatctagtcagctgaaaaagtacgagctggcaagcagcactgaggcccttctgcttgaggaaggcttcggagtcctggtcccctgccaagaacacctcctattcctcacttgccccatcaggtcttctgaagaatgctggctgtggccgagtccctactgtgtcttgctgcacagatagaggctccttctccagggccctggtcaggtcgccttgacacctttctgttctgttgggaggtgtggtgtccctcccagcacacgaagagtgtgtccacagaggatgcccacggagaggggattgtgtctgaggggaatggcgggctcatgaggaactggatgagggaggcattggayggtttcctgagggtgacaacatacagccactttcagtattttgccaaaacactattccatatctcaaggaatgtgacgggctttcaagccaaccgcctcacatg

SEQ ID NO: 490231 - DNA, 459 bp, Homo sapiens
tccatgtagctctgtgcatcagactgcaggccctggtggagtgggtttgctaagggatctcctgaccgacggttgcaaagatccatgggagaaatgtgggwccccggggttgctcactcactcaccgcttgcctgggcaggggaggctcccctggctccatgttgctcctaggtgggcactcatcctgccttgcttttctccattctctatggattgaattgtttacttgatgaatcccaatgcttgtacctggatgtctcagttgaaggtgctgtatttacttgccccttccatttctctccctgagagaggcacactctaactccttctgatcagccatcttggccagacttgcatttttatttctaataagcacccccaagcaattctgatgcaacttgtccagagaagggcatttgggaaatggtacagactgaaaattgcctaaggtcacacag

SEQ ID NO: 490232 - DNA, 459 bp, Homo sapiens
tccatgtagctctgtgcatcagactgcaggccctggtggagtgggtttgctaagggatctcctgaccgacggttgcaaagatccatgggagaaatgtgggtccccggggttgctcactcactcaccgcttgcctgggcaggggaggctcccctggctccatgttgctcctaggtgggcactcatcctgccttgcttttctccattctctatggattgaattgyttacttgatgaatcccaatgcttgtacctggatgtctcagttgaaggtgctgtatttacttgccccttccatttctctccctgagagaggcacactctaactccttctgatcagccatcttggccagacttgcatttttatttctaataagcacccccaagcaattctgatgcaacttgtccagagaagggcatttgggaaatggtacagactgaaaattgcctaaggtcacacag

SEQ ID NO: 490233 - DNA, 459 bp, Homo sapiens
tccatgtagctctgtgcatcagactgcaggccctggtggagtgggtttgctaagggatctcctgaccgacggttgcaaagatccatgggagaaatgtgggtccccggggttgctcactcactcaccgcttgcctgggcaggggaggctcccctggctccatgttgctcctaggtgggcactcatcctgccttgcttttctccattctctatggattgaattgtttacttgatgaatcccaatgcttgtacctggatgtctcagttgaaggtgctgtatttacttgccycttccatttctctccctgagagaggcacactctaactccttctgatcagccatcttggccagacttgcatttttatttctaataagcacccccaagcaattctgatgcaacttgtccagagaagggcatttgggaaatggtacagactgaaaattgcctaaggtcacacag

SEQ ID NO: 490234 - DNA, 581 bp, Homo sapiens
tcatttctagtaatcttccctcaaactctagccaccttggcctccctgtaatctacactctatctcccaaagtcagggagtccaccagctcccccaggacccctccctgcactctctcaaggcagaaagctggggcatcacaggactctgtctgtttccctccctctgggaaccctccaagatcgcttcactccctggkctacgatgtctaaaaccatcattttctacatttggtctgtctggtctgttagttgcttttgggaggaaggcaaatccagtccttcttgctctgtcttggctgaaggttatcacaccctgccactgtcaatgtgtagaagtttctgcaagaccctcagtaggttttcctagtttagatagtttgaggttcacttttgattgtgtgttttcagaataaaccaaaaggtaatatcacaaacactagttcccagatgggggatgagctccgggtccacagcacctccgagagctgtcccctctctggccctctctgcctgcctgatccggggctcctgccactgcattctccttcccattgttctctgagctaagaatcaccatct

SEQ ID NO: 490235 - DNA, 599 bp, Homo sapiens
aggcggcccagtgcctgcatgtgtgcccgcagtagtctggagtgctgtgatgccccgaagaggaggccaggcctgggttgttggtggtgccacaaaaactgcaggtggtggcagtggccatgactccagcagagaggagggktgctgcatgggggctgggttaggaccaacagtgggagaacagcttgcctgtctgtcgccagagcccatcatcgcatcagctatgcaaacgtgaattctccagttcaagtatcaggacaggaactgctagcactcaggcagtaaactttgtcaataaattattacaaaataaaaacatacaaaaacgggcattgcaataaagcatatcatggagttattcaacttcaaagaatttagaatctcttgttatgcaaactgcagcaacattggaaaacaagtatccacaggcttagatataaatatgaaagactgttatattagatgaaaaagatcattgtttttatatgaagcagcaagtgagccaattgttaatgaggaagacatttttaaaattattattttcttgtaattgaatgtacagtgacagaatgtataaacaagaattttgaattatgtac

SEQ ID NO: 490236 - DNA, 515 bp, Homo sapiens
agtgcactaatgcaagttacgactttctgtgcctccattttattttttcttttcttttctttccttttttttaaattataytttaagttctgggatacatgtgcagaacgtgtaggtttgttacatagatgtatatgtgccatggtggtttgctgcacccatcaacccatcatctacattaggtatttcgcctaacggtgtccctcgcctagccccccacccctgccgacaagccccgatgtttgatgttcccattcctgtgtccatatgttctcattgttcaactcccacttgaacaatgcggtgagaacatgtggtgctttgttttctgttcttttgttagtttgctgagaataaagtgaagataataacagcacctacctcatagtagtaaagtgcttagagctgtgctgtccagcatggcagccacagccacatgtggctactgaggcttgaaatgtggctagtgcaacattagaaactaaaattttaactcttttaattgattgaaagtg

SEQ ID NO: 490237 - DNA, 481 bp, Homo sapiens
cagctgggccgaaaactatcyaccatgtcaattctgagcaattatgtaaagactaatttctcaaactccatggtgactccacaatcctaattactcctgatccataattttaatagactttgaaagattcaagtgtacatgcagaaaagtgcctaaataattttacatacatgtaaaattcaatgaaatttcacaaggtgaatacacccatgtgaccataatccagatttaaaactaggtcactgcctgcgcacaggagccactcctaatccagccactccctcccactcactcctccccctcctccccactattttgactttttttttttaatgctttaagttctagggtacatgtgcacaacgtgcaggtttgttacatagttatacatgtgccatgttggtttgctgcacccattaactcgttattaggtatttttcctaatgctatccctccccatccccccaccccaccacaggcc

SEQ ID NO: 490238 - DNA, 481 bp, Homo sapiens
cagctgggccgaaaactatctaccatgtcaattctgagcaattatgtaaagactaatttctcaaactccatggtgactccacaatcctaattactcctgatccataattttaatagactttgaaagattcaagtgtacatgcagaaaagtgcctaaataattttacatacatgtaaaattcaatgaaatttcacaaggtgaatacacccatgtgaccataatccagatttaaaactaggtcactgcctgcgcacaggagccactcctaatccagccactccctcccactcactcctccccctcctccccactattttgactttttttttttaatgctttaagttctagggtacatgtgcacaacgtgcaggtttgttacatagktatacatgtgccatgttggtttgctgcacccattaactcgttattaggtatttttcctaatgctatccctccccatccccccaccccaccacaggcc

SEQ ID NO: 490239 - DNA, 515 bp, Homo sapiens
agtgcactaatgcaagttacgactttctgtgcctccattttattttttcttttcttttctttccttttttttaaattatactttaagttctgggatacatgtgcagaacgtgtaggtttgttacatagatgtatatgtgccatggtggtttgctgcacccatcaacccatcatctacattaggtatttcgcctaacggtgtccctcgcctagccccccacccctgccgacaagccccgatgtktgatgttcccattcctgtgtccatatgttctcattgttcaactcccacttgaacaatgcggtgagaacatgtggtgctttgttttctgttcttttgttagtttgctgagaataaagtgaagataataacagcacctacctcatagtagtaaagtgcttagagctgtgctgtccagcatggcagccacagccacatgtggctactgaggcttgaaatgtggctagtgcaacattagaaactaaaattttaactcttttaattgattgaaagtg

SEQ ID NO: 490240 - DNA, 515 bp, Homo sapiens
agtgcactaatgcaagttacgactttctgtgcctccattttattttttcttttcttttctttccttttttttaaattatactttaagttctgggatacatgtgcagaacgtgtaggtttgttacatagatgtatatgtgccatggtggtttgctgcacccatcaacccatcatctacattaggtatttcgcctaacggtgtccctcgcctagccccccacccctgccgacaagccccgatgtttgatgttcccattcctgtgtccatatgttctcattgttcaactcccacttgaacaatgcggtgagaacatgtggtgcttkgttttctgttcttttgttagtttgctgagaataaagtgaagataataacagcacctacctcatagtagtaaagtgcttagagctgtgctgtccagcatggcagccacagccacatgtggctactgaggcttgaaatgtggctagtgcaacattagaaactaaaattttaactcttttaattgattgaaagtg

SEQ ID NO: 490241 - DNA, 615 bp, Homo sapiens
tgatctgagatgtgttttagaaagataattctgacagcatgtatcctcacagggaggatgtgagttttgaaaacagttctaagccatttggagcagtctgctgagtaggttgggtgatcatgctgggaaacgctgtctggggtcacaaaccaagtcttagtttgagtgatgagtctggtttcatgggagctcataatccagcttcatgggtgattccgaaagagaagtttcacaggcatttttgaaaacyaaccgacagcatcactggcttaagtaaattgccttccgctttgactattccaatgcgtatattttggtgtatttatacaaacaagcaaataaatgtctcattacattttagtttatttgtgtactctagataaaaggctcttttgttatagttttggtaagaaaagtctcctgatctcaaacaccctaatgagtgctttaagttcctttttttaaaaaattattattattatggatatctattagttgtacatatttatggggtacatgtgatattttgatacaaacatacaatgcataatggtcaaatcaaggtaattggggtatccaccacctcaagaatgtatcatttctgtgtgatagaaa

SEQ ID NO: 490242 - DNA, 590 bp, Homo sapiens
gcacagaatggcattccttaaattcttatgctagtgctaacacagcataccaagctgtgagcagctatgttgccaacaacttacaatgaggaagaggcagaccatatgctcagatgtgtcctctataaatgtccttaaattcacagtgatgaacaagcaggtgcctaataaccrtatttttcaattatgtcacagtttgagttttggaagagcataaagtcatcctatatccacaacagaagactacagattgtctttgagttggttgcttttggaagttgccattgtaccttcagaatgaaagagtgacacaagttctttgcctttgagtagtatcatcctcccttatgtatggtctaaagtgagctgctttctttccttttcttccaaccagtgtgttctagtgcaacttacaccactccctcctgattccagacacctgtccatcatttccctcttaccctgcttctctctacatatgctaaaggaagaagtgttttgctaaatcagtagtttccaaacattaacatgcatcagaatcacctgggggttagtgctgggctccactctcagagtttctgatttagtag

SEQ ID NO: 490243 - DNA, 532 bp, Homo sapiens
cacaaagcccttactgactcaagtagaatagattgctgacttaaattccatggaggtcacctcttgggcttgctatagttgtkaatcagtctctttcactacatttcacgctgtggtaaaggcttcaacccaaactttttaatcataacagggaaggacagctggtattccccaactacaagttctgagttagcagaaaagcatggccagagaccacagactgcctgttaactgctgttatcttttcagcagaggagtcaatgcagtttaaatgccccgcaattgaagggtcaggatacctttaatggattcttactgctgggcctgctagacttttgtgcactgagatgatggaacactacacttacttctgccactatctattattttttcctcataaaatttagtccagccagccttttgtgtgggctgcttggccactcattgttatttgcttgatattctcaaactttggttcttatattgaaatgaaattttatgctgttctcagaaaggtaaagaaaattgatgt

SEQ ID NO: 490244 - DNA, 532 bp, Homo sapiens
cacaaagcccttactgactcaagtagaatagattgctgacttaaattccatggaggtcacctcttgggcttgctatagttgtgaatcagtctctttcactacatttcacgctgtggtaaaggcttcaacccaaactttttaatcataacagggaaggacagctggtattccccaactacaagttctgagttagcagaaaagcatggccagagaccacagactgcctgttaactgctgttatcttttcagcagaggagtcaatgcagtttaaatgccccgcaattgaagggtcaggatacctttaatggattcttactgctgggcctgctagacttttgtgcactgagatgatggaacactacacttacttctgccactatctattattttttcctcataaaatttagtccagccagccttttgtgtgggctgcttggccactcattgttatttgcttgatattctcaaactttggttcttatattgaaatgaaattttatgctrttctcagaaaggtaaagaaaattgatgt

SEQ ID NO: 490245 - DNA, 532 bp, Homo sapiens
cacaaagcccttactgactcaagtagaatagattgctgacttaaattccatggaggtcacctcttgggcttgctatagttgtgaatcagtctctttcactacatttcacgctgtggtaaaggcttcaacccaaactttttaatcataacagggaaggacagctggtattccccaactacaagttctgagttagcagaaaagcatggccagagaccacagactgcctgttaactgctgttatcttttcagcagaggagtcaatgcagtttaaatgccccgcaattgaagggtcaggatacctttaatggattcttactgctgggcctgctagacttttgtgcactgagatgatggaacactacacttacttctgccactatctattattttttcctcataaaatttagtccagccagccttttgtgtgggctgcttggccactcattgttatttgcttgatattctcaaactttggttcttatattgaaatgaaattttatgctgttctcaraaaggtaaagaaaattgatgt

SEQ ID NO: 490246 - DNA, 523 bp, Homo sapiens
ctgccctctagctcagcattggtctcagctatcaacagccactttgctcaaaggaatggccttcttctcaggacatcatacatcaatgactggttgaggctggggtctattttgactccacactgggcaattctgatggggcatatatgattcagagttctctatggagtcttccagggccacagttctgcttctctctgcccaaccctgcttccttccctctccttcaacagaagttgtactggaataaatactcagcaaggcaaactctgctacagagaacctcatcagccacagttargaaactgaaaaatgtttcttccaatagatttttttatttttgtgtgtgtaagttagaaaacaaagccttctctgagaatgagttatgagatgcatgtgggtgtaggcatggtgagttcaaaggaaatgtaaatgtttgaaatagttgctaggaaaactggagctaagaatagtttaaggagacagaagcactgctaggctgtcttggtagccaaattgaagt

SEQ ID NO: 490247 - DNA, 568 bp, Homo sapiens
gtggccccagtgtgtggtggaagagttggcctgctgagggaggtataaaaaattaatatttagacatatggtctagcctctaggctttctcttttggggtagaataccccaaggagaagcacatataactaaataaagaatatggataggtgatttttaaaagcactgggactctgggttcctcacccacacactgtcattgataactgcataactcactttggttgataatatgtgacrttttgccaagattcatagcactaagaacagtatacatgggaaagccctcttggcagttgcttttgtacacaaagaggagttctggttttcattacagaccaatactctaaggtggcacaatattggaatactgcactgagcttagagttaaggacttaagttctaattctagctttgcaactaaccagttacgtgatctggggaaaaatcactaaacttgtctcagcttccgagaacagtggtgaagagttgagttttgaatcctggatctacccatgacagcctgtgatgccttgaacaaattacttaagtactctgagcatcaggc

SEQ ID NO: 490248 - DNA, 510 bp, Homo sapiens
gctttcgccacaccacactggggcttgagtcctataaggctgtcctcagccactaccatcttgaccatgcaasaggcctattgaatgtgcatcatctcatctccctgggctgccctgggaggcaagctcatttaccctgcttctctgggctcctcctgaggaatatacagcctagatactttcgagaaatttctggatctgaggagcccacatctatttccttcttccctcacctggaatgaggcagagtgcagggaatctctactcaggcacccatctgctttgcaagtccaatcacgtccccttggatccatctctttctgccagtgggttgaattctttctttcctttgggttggataagtgctctcctgccatttaggcattctctactctatggcttagaccctcactgttcaaaatggtctgcggaccagcagcatgaatgtcgttgcctaggagctaattagaaatgcagaatctcaggctccacctcagacctaattaactg

SEQ ID NO: 490249 - DNA, 663 bp, Homo sapiens
cagaagctggctgttcagcaaagccagagtttaagctgactgggagaggcaagtgagaaaggaaaagtaggtgataaggtggaaaaatgtaggcaggggccttgtaagccaggctcaagactttgtactttgtccttcgggcaatgcagggttctgaaaggacagacatacatttttctaagatgatcctgagagtagcatgaagaatgaactacaagaggtacgaagctgggagaccagttaagaggaccaagccaaaggtaagagcaatggaaatgaaagaacttaggcagactcraaagtgtgtagagagagagaataaatagggcttagtgatatattggatacagagggtatggtaagctgagtaacggaccccctcaaagatgtccacctactaattcccaaatcctgtgtatatgttactttacatggcagaaggaccttgcagatgtgaatgagttaaggattttaaaatgagaagattatattgtattaactaggtgggcccaatgtaatcataagggttttgataagagggaggcaagagggtcaaagtcacggggcaggaaatatgaccacagaagcaagggtcataaagaaatttgaaaatgtttcagtgttggctggaaaatggaggggggtgccacaagccaaggagtg

SEQ ID NO: 490250 - DNA, 663 bp, Homo sapiens
cagaagctggctgttcagcaaagccagagtttaagctgactgggagaggcaagtgagaaaggaaaagtaggtgataaggtggaaaaatgtaggcaggggccttgtaagccaggctcaagactttgtactttgtccttcgggcaatgcagggttctgaaaggacagacatacatttttctaagatgatcctgagagtagcatgaagaatgaactacaagaggtacgaagctgggagaccagttaagaggaccaagccaaaggtaagagcaatggaaatgaaagaacttaggcagactcaaaagtgtgtagagagagagaataaatagggcttagtgatataytggatacagagggtatggtaagctgagtaacggaccccctcaaagatgtccacctactaattcccaaatcctgtgtatatgttactttacatggcagaaggaccttgcagatgtgaatgagttaaggattttaaaatgagaagattatattgtattaactaggtgggcccaatgtaatcataagggttttgataagagggaggcaagagggtcaaagtcacggggcaggaaatatgaccacagaagcaagggtcataaagaaatttgaaaatgtttcagtgttggctggaaaatggaggggggtgccacaagccaaggagtg

SEQ ID NO: 490251 - DNA, 582 bp, Homo sapiens
gccttcaggaagcttatggtctacaaggaaaagcaaaatagtccacaagtaataataatagcagaatattaaaaaataaataagtaaataacaagaagtatctaccctaccttgtaggcagttcaacytagtgcactgaatctagagggaaagaacaccccagaccaaagaaacaccatacgcaaaagccctgaggcaaagagcagggtgtagtaaatgtacttagggaagtctaggaagtagaggcaacacagtgaacctggatttgaataccagctctgcctgacatttattagctgtgtggccccgggcaagttacttaacctctctgtgcttcatatataagataggaagcatcatttctatgcacgggattattagaatggtgtctgacacatggaaaagtgtttatcaagtgttgtggttggaacatagaaaaggagagactagcataagggcagcaggggcctaatcacacaggaccttgctgggaagacattcgagcagtctaagtctttttaaacaatgcctataggctgctatcatgacgatgaatgggggtgtggtgatgaatgcagatgg

SEQ ID NO: 490252 - DNA, 539 bp, Homo sapiens
gatcaaaccagccataacattcccttaagccaaagcctaatccagagcaagaccctaattctgttcaattatatgagggctgagagaggtgaggaagctgcagaaaaaaggtttgaagccaaatagaggttggttcatgaggtttaaggaaagaggccatctatgtaacataaaagtgcaaggtgaagcagcaaatgctgatgcagaagctgcagcaagttacctagaagaacttctttatcatttttcttagaattatgtgttatggttatatagatgagggcttgctaarttgcccaggctggtctcaaactcctggcctcgcctccttatgcaccagaaccataggcctgagccaacatgcctcaccagaagaactaatttagataattgatgaaggtggctaccctgaacaacaaattttattgtagttgaaacagctttctattgcaagatgctgtctaggactttcatagctagagagaaatctatgcttggtttgaaagcttcaaaggacaggctgactctctacttagcca

SEQ ID NO: 490253 - DNA, 617 bp, Homo sapiens
ttatcacctgtaagactaaacagggtaaaaaaaacgttttggccgggccagagcgagactccgtctcaaaaaaaaaaaaagaaaatcatttcccaaatccattaagagctaagagccatggtaagaggtgctgcctaacgaagacatagtagcagatcttgcagggatgcagttacctccagaracaaagagcaaaggcaggaagagaatagattgtctccctatctcctgccagtgcaccctcagttaaagcaatagaaaaccaatccataaggagctgtgagcaaggcagctagcaggggtaagcctgcacagccccagtgcaggcaaagactggatttggggttgaggagtgtaaaataccaaacccaaattatccttcctcagagaaaaactgaaggttaactaggatagattttaagttcctaagcacttagacaaatttctatgcagtaacaattaatttacattccaaatttctcttttcatgtcacaagtcttgtgaaaacaaaaacccactgcttccatacttgctatctctgagttaaaagaaactccatccgtcactcatacactgtttgtgggaatgtaaattagctccacctttatggaaaaca

SEQ ID NO: 490254 - DNA, 501 bp, Homo sapiens
ttattagtcagcaaatattagtcagtaaatggtataaccatccatgtgtttatgggcaagttgacttccttcaaccaagggcagttgttttgaggtcacagttataagctgctagctgcrgtactcacagcatggtaatctggtaaaggggatatgagtggagcaccaagaatttctaccacatatatggagtgtagttaagaagcacaagcatccataatctgtgacagctgaagaattaagacatgaattgtgtcataaaaggtcattaacaaaattttgaacattttcttgtaagacgttttattacatgttatgacagtttttgactttattatattttgaaggcccactacatgttatgaacttacacagagctacaaaagaaacataagccataatgctgctctgatcgactttacaagaggttgtcaacatttcaagacaccatgtaaattccaagataacttttattataattaccattgaatgccaaggaac

SEQ ID NO: 490255 - DNA, 501 bp, Homo sapiens
ttattagtcagcaaatattagtcagtaaatggtataaccatccatgtgtttatgggcaagttgacttccttcaaccaagggcagttgttttgaggtcacagttataagctgctagctgcggtactcacagcatggtaatctggtaaaggggatatgagtggagcaccaagaatttctaccacatakatggagtgtagttaagaagcacaagcatccataatctgtgacagctgaagaattaagacatgaattgtgtcataaaaggtcattaacaaaattttgaacattttcttgtaagacgttttattacatgttatgacagtttttgactttattatattttgaaggcccactacatgttatgaacttacacagagctacaaaagaaacataagccataatgctgctctgatcgactttacaagaggttgtcaacatttcaagacaccatgtaaattccaagataacttttattataattaccattgaatgccaaggaac

SEQ ID NO: 490256 - DNA, 501 bp, Homo sapiens
ttattagtcagcaaatattagtcagtaaatggtataaccatccatgtgtttatgggcaagttgacttccttcaaccaagggcagttgttttgaggtcacagttataagctgctagctgcggtactcacagcatggtaatctggtaaaggggatatgagtggagcaccaagaatttctaccacatatrtggagtgtagttaagaagcacaagcatccataatctgtgacagctgaagaattaagacatgaattgtgtcataaaaggtcattaacaaaattttgaacattttcttgtaagacgttttattacatgttatgacagtttttgactttattatattttgaaggcccactacatgttatgaacttacacagagctacaaaagaaacataagccataatgctgctctgatcgactttacaagaggttgtcaacatttcaagacaccatgtaaattccaagataacttttattataattaccattgaatgccaaggaac

SEQ ID NO: 490257 - DNA, 483 bp, Homo sapiens
gcagtattccctgataagcttgcaatatgaattaaaagagaaatacagagagtgataaatattctctcctacggaatggcaaaagctgaagttgtagctgttttatgtttttgttgttaatattcttttttagtgtgtggagttcaacatttgctcttttcaagcccttggaaaagaagttgtggttaaggacatttagttgcacaagaaagagactgtaatagtttaggggtcagaaagcctggatttaaatatttcttgacaccaaataattgcttagtgactacaagtgagtatgaagacagcactgctgtgtggtgtggaccagstagtctgccagcagagactaattggttactctttaatgtgtaaactttggtgtgctactaaggcctacaatcctggatttaaaatttcagttatgtcactgattaatttctaaagttaacaaacatatgcttttaactttctttgaaaacaatc

SEQ ID NO: 490258 - DNA, 460 bp, Homo sapiens
cacagacaaaaagtgcagaagtagagacagatggaatccctgtggccagaggttagggaagatactatgtaggaattgagwcttcatctgggctttgagatgtgactccaatttagattggcggagaagagtaagcaaagggaaagggcaagacatgttctggaaattttctacaacaggaggcttatatccaggagtgttagtagactaaactgcaaagatagggaccagcttgtggaaggacagtggctaataattagtgattctatgctggatttaccagacactaacttaaagcaggcatttgggaaacgtctcaacttcacaaaggttctgtggctgtgaaaaggggttactgcctgttctccccaggtcacaggatgattgtgagaattaacatacaatgcatatgaacatgcactgtacaaagcaaagtgttataaaaatgtcaggtggtgga

SEQ ID NO: 490259 - DNA, 588 bp, Homo sapiens
tctaaaattcacatagctttcctcactgtgatttcaaaatagatgtacaatagaacataatccatgctctgttcaaaaatttcagtataatataaaatgcaaatacttcagaaaataggagtgaaaagtcaccatttaartgcatctacatttaaattcaatttagtacatttttcttcaatatgtatttagttttggaatatttgggggttaaaaatgattataaagttaaaagccttcaaaaagcttacagtttagttgaagacataagtaaaaaaacacaaagctttagtaaatggattcattatgagaaattgctaaagtagagaagtaacactgcttacagggggttgcaagagatcaagggaggatctggttggatcaggtaggaatccaagaatgacttcttggagaacaaagaatttgacatggattttttttacatgtgttggtgagggcaggtgcagattcccaattaaaaacaccattcacatactttgtctcttttgtttttggaatctcgaggcccttataatttgaatcatactgaataatttataataatcatagctaaaattcagtgcttac

SEQ ID NO: 490260 - DNA, 548 bp, Homo sapiens
tttcccccctcaacttaatgacttacctataaaatattcataatyaagtctattagagatcatgattgctttggatgctatatagggaagaaataataaattaagtcatcaattagtgatatagctgtatgttaaatagcactaggaacaagcacttttttctgaggtggatctataggttcttcttgggaatttgatttttgattggcttctatcatcagaaataatatagagactctttattcagcattcatttattcacagtatttgttaagcacacactatgtaccatgcatataataggtgttggtcatatagtcatgagcaaaaccctcctactaaaccgctgccttcatggagttgacttactagcagaggtgacattctaaaatctctgcccattttccagatgcaggaggaaatgagaattgtgattgatgtttttgtgctttgttaaaaataagtaatcctgtttttatactcctttggcagttttttttttttcaagacctcagtgtttgaggtccaacatgtgatccaaagaccag

SEQ ID NO: 490261 - DNA, 601 bp, Homo sapiens
gcatgcataattgaacatatattgtagttagtacttactcatgtactgagagcccagtttagataaatactgtgagagttagtgtaaagtcagtgtggtatagcagaaacttgtgatcagccaaatcatgtatatattttctgtatagttgatgtagtcactatgcagcaccaagcatcagtaccttcatctataaaatgaatatgctaaatatatatatttagcatatataaatatatatatttgtatatatatttagcatattcattttatatacatttttagcatatatataagaaatatataaatatatatgtatgtatrtatatatatttatatatatatataaaatgggttcaagatcttttattttcagagcttgcaacagttggttagcaatgctagctaagctgatataatctgaaggccatccaacctttctctttaggcactcaaccagcagaatctctttcttgcaaacaggatcatagaccaattgggatctgtctccatgtgtgtgtgggaagaggtcctcttccccacacttttcccaacaaattgttttataaccaaatgcaactcaaacctataacacagctag

SEQ ID NO: 490262 - DNA, 567 bp, Homo sapiens
aacaggtttataaaggccatagagacgacttaaaggaaaacaattaggaatgaacaaaaatcttaccgccctgcaattctcagtctcaagctcaggataacagggtacttgtggagatttcacttacacactgggcatcatttctaactcacgtgcatttttagacaaaagttcgtctcttctatagtccagtggttcagagaggagctttggtatcataggtcctagattctaatctcaactctacatttattaattgtgttaccttgggcaagttatagttaacctctctgaaccttcaaattgatataacaatcaaaaatcttcctgatttggtcttggaaatgatgaaatgaaatgatgcaagaacacattaatgaacatgtacaccaggttccaagcactttatggaacatacagagacacacaggcacacatgtgcacacacactcatttccacacttcctgattatgtagaaagtgactaataaaaacttgtgttggaacgtaatggaaagagcactggactrgtataaagaccttgattctgaccacgttcatactgac

SEQ ID NO: 490263 - DNA, 580 bp, Homo sapiens
tcaatctgatgagagtggttcatcactggtggtatctaaaagctcacacagttggaggcttggagaaggaagccatgcctagagagtaggaactccagggaccagagctttgggttgatgagagaaaacagaatgtaccagctccgaaagtcactgtgaatttatctgctttcattagaaaaataagctgaccaacaccggagctctaacttctaagattagcaggctgccttcctttatgccatcaatgtattcttgaaaaggtgtatggaaatgcagtgcatgctaatcagagcatactccccggagactttagctttcatctcagagttgctttatcttcatctctgactgatgctcagtggacagtgattccaacaatgcaaccttaagtttttctgccctttgccctcaggctctcagccaaggggttaaycatgtgtaaacaagcctttacatgcacctgattaaaaacagctctgggatggaaccctttgtaaagaatcatctgttcaaagagaaaactaccccaacttacatctggtgagctaggaagttcatatatcatgttttcttaaag

SEQ ID NO: 490264 - DNA, 396 bp, Homo sapiens
ctgcaggaaatacgaattaaattcacttaccctgttaaaatgcaacagaaatgcctggtttttcccagatgttttggtcataaaaatgaatgagctaagttattttagactaaactaatgtaaaagaaatgggaaaagaacaacttaaaacaccagggcatggtcaggattagaggcagccaggtttgctgtgagtgcatattaggttaatgctttcccggggctgtgtcacctggtgaacaagtgctccaggctctggagtaagattgctctctggtatccagrattctgagatatctgtttgataattccttaatttgccaaagctaataaataacattactaagatataaacctacaattttatcttaatttaaacctaatcttaaccaagaa

SEQ ID NO: 490265 - DNA, 571 bp, Homo sapiens
ttggcaataaatcagacccattcagttgttatcacatgcccatgggcaccagccttaccgtacacgagattcacatttgtgcccagcaaaatgacaattcacttatgtgacatgttcttgagtactagtaataaacatagtacttaaatcaatggagaagtgaaatagccaagtgtccacttgatacatctgctcctttcaataaccttatgaaattgacaacaaaaatactgttcccattagatggatgagggaaccataggttaaagaggtcccacttaagccaaggtttgttctatacccagagaaatgcatattttgtcttttctcaaggagataacaagttaatatttacatccctaacctatacaaaacatatrtcttcaatataagcggtttagagctttagaaaaccctgaattctgtctttggattaaaaaaaaatgtctatgtaaaataagctcttttgccatgactcacacgacacctaaaagaataatcgcggtaattatatatcagaaatggagaagtgataattacaaaaattgaatattcaaaactaccacttgac

SEQ ID NO: 490266 - DNA, 594 bp, Homo sapiens
tggggcacagaaaccaattattcccctaggcatgaaaaagaggggaaacctakaactgaaaggcattgtagattagtttgtgatcccactctgcaattgtcatttaattccagccactgagacctcggccttgtgacctctgccttgtgacctaactcccactgtgcatcctgccatgattatatctgcctgtctgtggtttagaagctctcttatgttctcacttcctcactgaaagttcttcctattgcactaccttgcttgagcccactcccagaacagtcgacatatttgtaactacatgtgtattctgtctcttttacttgagcattagctccacaggtaccattatcttgttcatgttctttccctaatgcctatcacattgcctataatataataaggacttaatatatttttataaaatttaattatacttatacttctctttcagacccttccctgtctttttatgcttcagttatagggaactcagttttccccagaatcagtgttccttgtgccttagtggttttttaaaaagttgagtcctggccatgaaactcagactcatgactaagtcctccaatgcca

SEQ ID NO: 490267 - DNA, 502 bp, Homo sapiens
ttaagtcagaagctcagtttgatggcagggtgtgtgtttccaggtatggaagggtcatgggggaagccaccactctctctgaacatattcccaccaaatggcgattattccaacaatttctcaaagtatatgttaacataatgatttttaagacttagtagaaaagcccttaaagaagtgaaatatgagaatgaaacatggygatgagatcatgaattgaatagagaagggagttgaaaagttcagccaacccatcccttctgcacatccaaaagtagggttcagtctgggggactttgtgtgcttggcttcacacaagaaagaagtcaaaagcgatctgacagaaaaaaagcaagaggaagttgaatgaaataaaggaacaaagggaagactgctccataagcaaagtagggttaccccataggcagaatagcattgtgggctgctcacttgttatagttgtgattatttcttgattatatgctgaataagggattgatta

SEQ ID NO: 490268 - DNA, 651 bp, Homo sapiens
gttcaagaccagcctgggaaacatagggagaccctatctctacaaaaaatattttttaaaaaaattagccaggtgtggtggtgtgcacctgtagtcccaactactcaaaaggctggggtgggagaaatatttcagcccaggacgtcactgtgcacaattgctttacttttttttcccttggtatagacttgttgaagagtaagccttcatgtactgtttcctcactttacattcactctcaactggagacaatatagagtcttcgcagatgcagctttctccagaccaacaatgtggttagacatctggtttttcattgttgttgtttgatttctctgactagcttccctgaccagaggtcgttttgagtttccttctctggaatttgaccactgagcagagacacataggagaraagacgtgaatgctgagtcatcaatcagcatcactgggaagaaaaagcctctcagtttcttctgctgggactcccagagctggagtattttctgctcttcctaaggcctggtaattcagctctttgtgagactgtgagctttaccatacccttccagtagcaaccttcttcttttttaagttcattgcggggaatagggagtgatggctgatggacatagggtttctttttggggt

SEQ ID NO: 490269 - DNA, 459 bp, Homo sapiens
tgtccagaagtttccctagacttaattgcatggcaggagggctctaagagcagcaatggggaaagcgagtgaggaagagagtcggtgcttgtgccacttttgctactatcccatwagccaaagcaagtcacaggccagcccagatcctagggggttgagagagattccagcactccatgggaggagctgtaagctcagtagccattggtgatctgtcatagaaaacgagcttaataaatataggtgcatctacacagcttgtctgactggagggaggtaggagccttccatgggtccccaggggccatggcccatgttaaggaacatggcctgcaccctgtccaacggaacccacttcctgcttcgtccctctgccagggaagtatattcaatccttggaaaacacagttcacagcgggggcctggatgcgagggatcagcacaagaaactcccaggac

SEQ ID NO: 490270 - DNA, 642 bp, Homo sapiens
agctgggatggaggaggaaggagtcatgggctggcccctcaacttcccctttctccctccccatggccccccaccaatggcaagcctgggcttcctcacagcatggccaactcaggacaatcagacttcccacaggacagcacagggctaccagagaaaggaaacagaatctgctgttgccttaaagacttggactggagctggcacagtatcacttccaacatactctaaagcaactaaaatccagcccagattcaaagggaggaggcagagaccccmcctcttgatggcaggcatatctagactctggagccatccttgatctgacacacaggtggatcccaattatgcctatgccagctatttcattattccttagtcattgaattaaaatattttttttctgggctgtgtattctatttcactgatttgtcttttccttggctaattctgttctgttttgattcttgtggtttatcttttgatatctagtgatctggtgccccattgttgactcactcccctgctctagaatttgctgtaaccctggctggtttacacactcaggtgaaatttgggttagcttctcatattttgtagatagtaagtttggatttttattggaatggctcaaaaatgta

SEQ ID NO: 490271 - DNA, 583 bp, Homo sapiens
gtttaatggagcaagcagcaattcatgaatttggaagtactaatccaaaggtggtttcaggctgcactgaggagatgcaagggaaaggcttttttaaatggtgaatgaagaagtaaagsaaaggaaatgtttgatttgttacacttatatacatacaagttgatatgctacagttatagagttgccttatttgatttatcctgttggaaagtttctcattatataattgtcagtgagttgacagttctgattgattatccttaagtttcatttttctttcttttctttcttcttcttctttctctttttttttttttttttttttttttttgtaggaatggggtcttgctttgttgtccatgctggtcttgaactcctggcctcaagtgatcctcccaccttggctttccaaggcactgggatttcaggcataagccaccatgcctggcctcagttttctttaaaataggcatttacaagaaatagctcaagttaagctttgcttatgtttgtaaatcaagcaaggttatggtcacttgtaaggcctcacttataagtgacctcataatttacttcagcacag

SEQ ID NO: 490272 - DNA, 587 bp, Homo sapiens
tatttttcatgtgtggaaattgagagctggagagattatgttactcgtcaaaggtcatgatcagacctgaggtctctggactcctagtcattgcttttttactattctgcctacatctctttctttattgttgtcttaattktattaaaagaaatgataatggaaacatgttttttggaggaacgcatttggggcatgcgtattggtgtatgtgcctaagcgtgtgtgggtgttggtgtaaatttgttgcaaatgagtgtggttctgtgtactccgtgagccagatatccattaatcaacctctaaaaccatgtctttgtgggtgacagatgtttggattcaattataaggatgggaaagttgtttttccttccaaggaaagaaggtattatttgagagtgaaagtcagccatatataacattggtgatgaatattgttcattgtggaaacactctaaaagtggcttgtttaaaagagggtaatacattcagaagcttttaacccaccggatttaattgcaactgagtgccaaaataaaccccctgttaacaaacctccagctttccactgatttctcgcacttgct

SEQ ID NO: 490273 - DNA, 444 bp, Homo sapiens
ttgaaaggatggagatgaggatggcctgacactcaagaagggaattacaccttttgtgcctaagatacctgttctgaaatgccccctaccctgggtccagggtctgtaaagacttgggcccataaagatgtctctgtgacagcaggcaggcttttcagtgggtagcaagccacactcctgaagcccaaatttgagaagcagaaagcaggtattggagggacaaagcccctgcatccaggaaggactctcttcatgccagattccattaggttagctactgccccttccaccctgtgagacattataggccttgcatcccaaaagckggggttagaggctgggtatgggatatgcttttttacacaccacacactaggtggctggagacagtccctaaagctcctgaagggatggcttggagacaagcaacctgaattttaaaac

SEQ ID NO: 490274 - DNA, 614 bp, Homo sapiens
ctgcagaaaaattaaggattgaatttagggattctgtagtgatgaaaccggttccagtcagctagacttaacaattcataggcccagggcaaaagtaaaaatggaggcccatacttcatatgtccaaatattataaaaatagaactcaagccaaaatgctgtcaaataaaatatgttctatcctactatctcaataaatatgcattcataacaacaaaattttaaaaagtatgtgaagctatatctagaatatgactaaggatgactgaatttaattgttattgcacaaatctgggtgttctgtagatggtggctcaatctgagtgagttagtgatgtgtgattgggtaataaaatgaagagaaaatttttatgttattaaaatctgctctttaaaattgtttatacttatttgccttgtttcagcaaaatcattatgctgttatagtcaagattatctacataatttgggttatattgacggtgaccatctaaaagtattatggagtaaaaggggctcgctgcccawtgcattagaagtcaatactatgacatcaggtttttgagaaaagaaaagctttatattgaaagtcgaacttccccaatctagcaaga

SEQ ID NO: 490275 - DNA, 495 bp, Homo sapiens
gacaccacaaatgaaaaagaatgggaattcctcttattgaggaaagagagggggagcctaaatgaaaactttcatttgactgtgtccttggagtaagagaggtggctaaaaaggtacagtgaacttgcttggaggtggatcagacttaggaccaaggttagagaaaataaacttatttaacaaacsctgaagaggaaggagtcagtaacaatttagtggtagagtgaatgtgtacattcatgaagaagagcaatggggttgagacttaaccctagaaatagtactgatgcttttgccagcattgcttgcaagtagctgacattctcttcctccaccgtgtctaaactatccaacagtcaaagtattccctgagaatctgtcgtagtcagcaaggtgctgaggtatgtagcaatggaggtggggaaagggctcatgagattcctaaaataaaacatgattcctgccctagaacttgcactgaatttggatatgcaa

SEQ ID NO: 490276 - DNA, 495 bp, Homo sapiens
gacaccacaaatgaaaaagaatgggaattcctcttattgaggaaagagagggggagcctaaatgaaaactttcatttgactgtgtccttggagtaagagaggtggctaaaaaggtacagtgaacttgcttggaggtggatcagacttaggaccaaggttagagaaaataaacttatttaacaaacgctgaagaggaaggagtcagtaacaatttagtggtagagtgmatgtgtacattcatgaagaagagcaatggggttgagacttaaccctagaaatagtactgatgcttttgccagcattgcttgcaagtagctgacattctcttcctccaccgtgtctaaactatccaacagtcaaagtattccctgagaatctgtcgtagtcagcaaggtgctgaggtatgtagcaatggaggtggggaaagggctcatgagattcctaaaataaaacatgattcctgccctagaacttgcactgaatttggatatgcaa

SEQ ID NO: 490277 - DNA, 582 bp, Homo sapiens
ctctgttccttcccttagtaggccaagctcaaaagatgtgtttcagtctgagtaatgttttttttctgttttctsatccttgtcatttttttatattattacatattactgatacaagtttttaaaatttacatgtataccaagcgatcttaaaaggttttttgtcttgtggttgatacagactcaattgccttaacatttttatactaatgaataggaaaactactagaaagagacaaaaaaagtattattcgtgataatctttgagtgctggaattcaaggtaattttctacttttctgtgaaaggttatggtgactgttgaggtcactaagaatactctataatacacactgctgcttggaataatatttccttagtatatttctattcagtatactttttactgaataagtttcaaagtaatgagcttcctttgtggggaggaaagaacaatgataaagtatttgccatgtactcatgttttctggtaaaacattaaaaatagataatttcaaatatttttatactttttgtccagagcttatagcttgcagtgaatgccaagaatgagttctcagac

SEQ ID NO: 490278 - DNA, 597 bp, Homo sapiens
actcgcaaaaaagcaggagaatctgcagaccacatctatggtcatactagagcatcaccttgagcattcttttctgataagggaccaggtagcttagaatgagagcgaatatgtatgatgtaaagagggtgatgatgggaccgaggagctcttgtgctggaagaaacaaagctagtaggggttcattagtaatgcccttcacatgtgcaagatttaaatgagtaatactatacaccatgtaagcagaatcactaactatatttatgtcttggtgaggaaaagttggttgcatgctgccttctaggttttatctcagatagctctggctttcttgctacccacagaggcctggggcaggagagttgctaagatgcaactaacttttccttatactccagggaagcagaaaaaagacacggccagaaaggctgatgctggaaataggaaatgagaacttgcatattaggaagactgtcataatcagccactttccttccctcctgtaggcacccctccagcagggaagtttgttgaggagacgcagccacctaatcatacaaatgttcrctgaccgggggtataatctaagaactgtca

SEQ ID NO: 490279 - DNA, 505 bp, Homo sapiens
aagaaatagaagaaatggaaaaattgtggaatatagattgaagaccaaactgtgttgagaacagcctttcttataatcaaagagaaagagtaggccgggcatggtggctcacgcctgtaatcccagcactttgggaggccgaggtgagcggatcacgaggtcaggagatggagaccatcctggctaacacggtgaaaccccatctctactaaaaatacaaaaaaattagctgggcgaggtggcgggcgcctgtagtcccagctactcgggaggctgaggcaggagaatagtgggaacccggaaggtggagcttgcagtgagcccagatcgtgccactgctcagtgacagagcgagactccatctcaaaacaaaaaaacaaagagaaagagtaatctatatacaaagcaaagaccttaagtagatattgacaaatcctgaataactgttttttttttttttttaatttaraggtgctcgtttggcaattttaaacatcactgtagt

SEQ ID NO: 490280 - DNA, 542 bp, Homo sapiens
ttcttcccaaaattggtagtaagccagmagggaggaaagaagtgtaatagaaagaaagagagggaatgggtctatactacccaagctaagcataaatcatgtcagcaaaagtgggagtggctgggcaggcctggcagctgcagtcatcaggaatctccagttgctcagtggccaccaggcagctacccagaggagcttctctggagcacctttggaacagcgccaagagcaggttagtgaaaactctgggagagcatctgacttacactaatgttccctaatttaagataaatcagaagggaactcagatcaatacaatctgattttatattaggaaacaggccccaagaaataatttggtcacatttatatatttagtgtcagaatttaccaactctatctccgctctggagacatttgtgtttttcaaatgtgaaagttcataaattggtcaccctcacaaagcagaaaattggaagaattactttttggaattattttaattaaaaaaaaccctttgcattggaccacttgaatatctg

SEQ ID NO: 490281 - DNA, 542 bp, Homo sapiens
ttcttcccaaaattggtagtaagccagcagggaggaaagaagtgtaatagaaagaaagagagggaatgggtctatactacccaagctaagcataaatcatgtcagcaaaagtgggagtggctgggcaggcctggcagctgcagtcatcaggaatctccagttgctcagtggccaccaggcagctacccagaggagcttctctggagcacctttggaacagcgccaagarcaggttagtgaaaactctgggagagcatctgacttacactaatgttccctaatttaagataaatcagaagggaactcagatcaatacaatctgattttatattaggaaacaggccccaagaaataatttggtcacatttatatatttagtgtcagaatttaccaactctatctccgctctggagacatttgtgtttttcaaatgtgaaagttcataaattggtcaccctcacaaagcagaaaattggaagaattactttttggaattattttaattaaaaaaaaccctttgcattggaccacttgaatatctg

SEQ ID NO: 490282 - DNA, 617 bp, Homo sapiens
ggttacaaaaacaacagtactacacaatacttcccaagcctgatgcatgaaccactttagagggaattctatctttataaatcattgaactaaaagaggacactggactcyatgttcatgtacaatgccaaactcttgtgaacctatgtcaagaacttccatgaactctgacaataaactctatttcaatcagaaattttctgcaggttctaacccttggtacaaatccatcctgagatgatatcaggttcccttttttatagcatagcagcccaagactttataaatcttcccttaaagggtcccacaacttggctttagaacttaggaaatcacacctttcctcttggttattataggagaattgtagtagatgctgtaagtgccatggcctcatccccttagctgccaccattccagtacacacgtacagcatcctaccaaagacacctgactttcacctaaaggctttctttcaacctcatatggggcagatcagaaatgttgagatgctgacaccattgagaacagccctcagaaagagaggataggagtgggtgtttaaatacccccactttcacacccctcacgtaggacaacttggtggcatattctat

SEQ ID NO: 490283 - DNA, 560 bp, Homo sapiens
ctgcatgtgtagcacactctctttgaatgttagcaattgtttttttttctaaagtaaatggcctttttcttttttatgtcatataaaagtagctaatgcagatgtataccatgatacagaattaatatacagtgaaacacactaagggaatgccttcattattttcaggcaaatagcttttgacaggagtcaagtatcaattaaggtactgtyttctgattacacatgggacttcttgatcataaaaacctctattagatgtgatcctttatgcttttgacacatgctatcacactctcaactttgtttcgttgaggtctatcttcctgccagaagtaggtgggggtagtcttctgtcaccttggattttgaagcccatcaaaggcaaaacaaaacaaaacaaaaatcaccttctgaaaccttattaagacacatgaaattttaggctgtcatctttgttgattttgaaagatctcaactctaattggtaatggaaacttaagtcatctcatatgggcgcaggtatgataaccagtttgtgcctaaactcagtacaaaat

SEQ ID NO: 490284 - DNA, 562 bp, Homo sapiens
gtataaacatgaaatacttatttttttccattattgccttcaactgcccactggtgtcataatgatatgactggatctcacagctttctggtcattgtagtgaaacagtccagttaacagcttcagtctccattcctatgtagtactgtaggccgttctcttccccagcacaggcattcacagtagggagggaacttggcctgatcctttgccttttctctcctccttcttctgggttctcttttatttgtgttgggataggaaagaagcattaatggttagaaagagtaaatgtcctttttaaaaaatagatgggagtgcatgttaatatactattgtatgtcatgactatttytggaaaactagttagctgtggagccctatgtgtgatttggcatgaccgacatccaaatgccaattctctcagagggcctttgcttacattctgtgggaagtgaatcatcactacataatcccctgatgatctcctggattgatctcttccaacatctctcagttcccacctgcatggtcctcttgcttctggggacccctcactagc

SEQ ID NO: 490285 - DNA, 616 bp, Homo sapiens
cctcacacacaaacccaggggtctgactgctgagcccatgctcctaatgtccacacggtgccctcctacgaagcgaacctaacagcagagcaygattaacagcaggtgaggacaaaagtacatcagcctgttggtgctcagaggggacgaggcccctgtaaacggaacactcagcgaagggccctaaaggagcggggatgggggctcctcaaggcagatcctgagcaggacccgcccagcacccgctcccagcctgtcaggaaggctgaatgaaagaacaccgtgtggatcttcctctggcccttggaggctgtgccctctgctcagagaggaggagcaaggacattagcaggaagggctgcagagtgagctaaggtctggaggtgaggatgactctgaaggccttcctggagagcaggctgaggaggtaatgcctgacttggtgggggaggggtgctgaggacccgcaggccactgtggaattggacccatctggctgaggcaaaggcgctggcagttatgttgcactaagtgggccaagaggtgacctctgctttggtctgactttggccacagacctaagaatctggatacagttgggctagaagggccttgg

SEQ ID NO: 490286 - DNA, 592 bp, Homo sapiens
tggatgagcaagatgtctgcagtgaagggacagaggaattgaggccaagctactggggaggggtggaaatgccattctggaggatctgtgacgttgacagagactttatcgacacaacaagccagctaacccctaacgaacgygttgattcattcattcattccatcagttactccaacatgtgggactgcatggttgtgaaaacagaatatgaccttgtaaaaggagaagccttgggcccttgatgccaggtgggaggaggatggagagctctaagaggactggagatgccaagacggcttcttaaagaggtgtggaaggactgcggatggctgctttccctctttagatcctgctgtgggatgctagcacaaagtctggaaaatgcacctgactttgcctagagggcaataggtctcttcctgggggtgtcacgcaggagggtacctctcttgctagtcttgcccagagctcctgaggaagggtccctgtgacagctccttctctcccctgatcaagtggcctaggcttcaggtagcaggactggtgaactggttgggcagacatggctgtccttgcctaggccaatgta

SEQ ID NO: 490287 - DNA, 592 bp, Homo sapiens
tggatgagcaagatgtctgcagtgaagggacagaggaattgaggccaagctactggggaggggtggaaatgccattctggaggatctgtgacgttgacagagactttatcgacacaacaagccagctaacccctaacgaacgtgttgattcattcattcattccatcagttactccaacatgtgggactgcatggttgtgaaaayagaatatgaccttgtaaaaggagaagccttgggcccttgatgccaggtgggaggaggatggagagctctaagaggactggagatgccaagacggcttcttaaagaggtgtggaaggactgcggatggctgctttccctctttagatcctgctgtgggatgctagcacaaagtctggaaaatgcacctgactttgcctagagggcaataggtctcttcctgggggtgtcacgcaggagggtacctctcttgctagtcttgcccagagctcctgaggaagggtccctgtgacagctccttctctcccctgatcaagtggcctaggcttcaggtagcaggactggtgaactggttgggcagacatggctgtccttgcctaggccaatgta

SEQ ID NO: 490288 - DNA, 582 bp, Homo sapiens
ctgcaatcagcatcccccacccccacttgcctgyggttgctacatgggtcagacagcaaggaccacaggggcactaagtttgctgctgactcttgacctcagatgggctatttggccaagggcccagctctccctccaatgtagaggaggcagggaggcaggagccagcaagaagttcctccaggcaaagggaaagtggcaaagatactcaagagctcacaggtacctagcacacattgcccatgggcacacatatcactctgcaaactatacacgaaacccctgaaattcaggagtacacaagcccccacaaaatgtaggaccacatgcttcaatattcactttccaacatattcagatccacagaaacacaaatagccccgcgtaatgtgcatacaaacacatctatatcatgctgcaacatgcccacacttacacgtttcccccaaaacagcatgaaatcaatctgggcacctcacttctatggaaaacttgctctctgaagtgtgaacatttgtgcacacacacaaatacacctaccctgtaggtccaaatgcctgggcagcatgccaggaatggcac

SEQ ID NO: 490289 - DNA, 410 bp, Homo sapiens
tttgatctgatgggtcatgatgcttttgtggatttgtttgcatgaatcattatgttcataaayacggttaagttacagaagcaagttactaaataatatcaacagcatgagttcattattgcttgtttgaaaaaaaaaagtgtgtatatgtatgagtgtgtttaaccagtatgttccaggttcatgtctacattgatatcttaaatcactgtgctctaaaatgtagactttggtgtctaaatcttcactactcaaggtgttgtccttgaaccagcagtatctcaagcaacacctgggaagttactagaaatgcacaatctcaagccccatcctagaccggctgaatcggaatacggatttaaaaatgcaagctcccacattaactgacgaatggataaacaaaaacggta

SEQ ID NO: 490290 - DNA, 623 bp, Homo sapiens
gtggctcagtggttgaaaactgttgccatggtccgggtccagtggctcacacctgtaatcccagcactttgggaggctgaggtgggyggatcacttgaggtcaggagtttgagaccagcctggtcaatatgacgaagccccgtctctactaaaaatacaaaaattagctgggcatggtggtgcatgcctggagtcccagctactcaggaagctgaggcaggagaattgcttgaacccgggaggcggaggttgcagtgagctgagatcatgccactgcactccaggctgggcaatagagtgagactttgtctcaaaagaaaaaagaagaaaaggaaaaaaaaaccattgccataaatgatctttagttacctatgtttccgttggtagaaaatacatgtaactaaactttcctttgttttatcttaggctttcttgaaatgtactaagagatatttgaaggggaaaatacagttttctttttttctttgttttattctttttctttttggaaaatagttttcttttcctatcctttttacaacctcctccctgcctccaaaaatctgagaattcattatttactgcttccataggagtttcttttaatattttagctgaaataa

SEQ ID NO: 490291 - DNA, 623 bp, Homo sapiens
gtggctcagtggttgaaaactgttgccatggtccgggtccagtggctcacacctgtaatcccagcactttgggaggctgaggtgggcggatcacttgaggtcaggagtttgagaccagcctggtcaatatgacgaagccccgtctctactaaaaatacaaaaattagctgggcatggtggtgcatgcctggagtcccagctactcaggaagctgaggcaggagaattgcttgaacccgggaggcggaggttgcagtgagctgagatcatgccactgcactccagsctgggcaatagagtgagactttgtctcaaaagaaaaaagaagaaaaggaaaaaaaaaccattgccataaatgatctttagttacctatgtttccgttggtagaaaatacatgtaactaaactttcctttgttttatcttaggctttcttgaaatgtactaagagatatttgaaggggaaaatacagttttctttttttctttgttttattctttttctttttggaaaatagttttcttttcctatcctttttacaacctcctccctgcctccaaaaatctgagaattcattatttactgcttccataggagtttcttttaatattttagctgaaataa

SEQ ID NO: 490292 - DNA, 623 bp, Homo sapiens
ctgggaccaccatcgagaagcaagaaaactgattaagagaatgacttatcccgccgacggtatagagaccacagctacctctcccacagcccagcaagacccgggggctcccaaaggccagcgcgggaaccccgctgagaaaacgtctgggtggcgggcaagccccctccacgcccctcagcagcgcgccgctgccgccgcggtctccctccttgaatcactcaccgccccagggcccagccggggatggagcaggaagtgagtcctccaccgccgagccgcacccggcccgcaaccccgaggckgtgcctcccagaacccgaccgggattcgtgacagggctgtggggacacaggtgggactccggcttcgacagccagcggccggaaagtaccgcccccatcctcttgctattggcttttcagtttccatggctagaatttttctctgtccataggactgatagagctgtcaattatcgcctagccttctgggaaacgtagtcccgagcaagacctcaaaggactcggagccgtggatgtccagttccaagcgttggaaagtgctaaacccaattccccagctaccggtcccccggaaccgcctgtttggagccgagggat

SEQ ID NO: 490293 - DNA, 623 bp, Homo sapiens
ctgggaccaccatcgagaagcaagaaaactgattaagagaatgacttatcccgccgacggtatagagaccacagctacctctcccacagcccagcaagacccgggggctcccaaaggccagcgcgggaaccccgctgagaaaacgtctgggtggcgggcaagccccctccacgcccctcagcagcgcgccgctgccgccgcggtctccctccttgaatcactcaccgccccagggcccagccggggatggagcaggaagtgagtcctccaccgccgagccgcacccggcccgcaaccccgaggctgtgcctcccagaacccgaccgggattcgtgacagggctgtggggacacaggtgggactccggcttcgacagccagcggccggaaagtaccgcccccrtcctcttgctattggcttttcagtttccatggctagaatttttctctgtccataggactgatagagctgtcaattatcgcctagccttctgggaaacgtagtcccgagcaagacctcaaaggactcggagccgtggatgtccagttccaagcgttggaaagtgctaaacccaattccccagctaccggtcccccggaaccgcctgtttggagccgagggat

SEQ ID NO: 490294 - DNA, 565 bp, Homo sapiens
gaagagaggatcattaccctgttgaggggttgggtgctaaaagggcgtggccgagaggaggcgtagaagagccaggaaaaactgtgaaaggacttcaaggagcatgaaaagacagaaagacttcagcacttgctataactgaattwatttatttatttatttatttatttattttgagacagagtcttgccctgtcgcccaggctggagtgcaatggcaccatcacagctcactgcaacctctgcctcctggcttcaagcgattctcctgcctcagcctcccaagtagctaggattacaggcgtgcaccaccacgcccggctaattttttgtatctttagtagagacgggggtgtcaccatgttggccaggctggtctcgaactcctgacctcaggtgatccacccgccttggcctcccatagtgctggaactacaggcgtgagccatcgcaccctgccagaactgatttttttaaagagagagtctatcattatctattgctgtgtaacaaattaccccaaaatttattggtttaaaaaaccaaatatttggtttttgtgctcc

SEQ ID NO: 490295 - DNA, 634 bp, Homo sapiens
catttttcctctaaagcctctttccttgagttctctcgaactagaaacagctttcttctctggtgttttggtacttaaagggttttagcctcattcatctattatttttaattcacttccttttttctgatggagtcataaggttaaatccatcttaattagcatatacygagcagctacctgttccagaatcataatgcacctgcatcttctcagagctccagcagcattcccatggtacattatttctcctgctttttccctttcccccatcctcccaactcttgttcctccttcaggcctcaggacagatattattgcttctgaaaagcttctccctatgactccacttcaccacctaccccaagactagattgggctcccataatatgtatctcctcaagacgctgtattcaattctatcatataacctgtacaccatactgaattatggtgaaccctgtgtaaaatctgttttctaggtcaaaactttagcaaatttaggaagtgattatgccttatttactatcttatgctcagacctaactcagtagctgacacggatgccacttcaattaagaagatggcaaatcgaggaatgtgagctttctaatgataactttggggaaagttg

SEQ ID NO: 490296 - DNA, 634 bp, Homo sapiens
catttttcctctaaagcctctttccttgagttctctcgaactagaaacagctttcttctctggtgttttggtacttaaagggttttagcctcattcatctattatttttaattcacttccttttttctgatggagtcataaggttaaatccatcttaattagcatatactgagcagctacctgttccagaatcataatgcacctgcatcttctcagagctccagcagcattcccatggtacattatttctcctgctttttccctttcccccatcctcccaactcttgttcctccttcaggcctcaggacagatattaytgcttctgaaaagcttctccctatgactccacttcaccacctaccccaagactagattgggctcccataatatgtatctcctcaagacgctgtattcaattctatcatataacctgtacaccatactgaattatggtgaaccctgtgtaaaatctgttttctaggtcaaaactttagcaaatttaggaagtgattatgccttatttactatcttatgctcagacctaactcagtagctgacacggatgccacttcaattaagaagatggcaaatcgaggaatgtgagctttctaatgataactttggggaaagttg

SEQ ID NO: 490297 - DNA, 662 bp, Homo sapiens
  misc_feature (1)...(662): n = A,T,C or G
taagtaagtaaactcttctgtgattttgatcattcagacacttatcaactgagggtaattattggrgattcatggagctgccactagagggagtgctaaccaagagttgggtctaagtaccatggcatctgaagcatgctggtgtcttaggggcccaaacacaggagaaagaggaaatcaaaagatagtagcggtaagtacagaaattagaaagtcatttccacagggaatcagagaactcagaaaataactcaataattatcaaaagtgtctctccccaaagaaagaaaagtgtnctggtgcctttctcactcatcttctgggagcccttcatgaaagcgattcctgccagttgaccttgatgtgccatctgtgatctccttggttagagactgtgttgttggttagtggtatcttcttccctcaatgaactactttttttttcttacatcaccatcattcaatgaaaaacagtggaatccctggatagttaaatgtgtgctgaaaagaactctgctaaattatgtggatctttccaatttgctccttggaactttgtggctgcattgagtgaaccagaaggattatgtttgcataagacaactgccgaggaggaaaagggggaaataatggcaggtggagatggacatagtccatgcaca

SEQ ID NO: 490298 - DNA, 662 bp, Homo sapiens
  misc_feature (1)...(662): n = A,T,C or G
taagtaagtaaactcttctgtgattttgatcattcagacacttatcaactgagggtaattattggagattcatggagctgccactagagggagtgctaaccaagagttgggtctaagtaccatggcatctgaagcatgctggtgtcttaggggcccaaacacaggagaaagaggaaatcaaaagatagtagcggtaagtacagaaattagaaagtcatttccacagggaatcagagaactcagaaaataactcaataattatcaaaagtgtctctccccaaagaaagaaaagtgtnctggtgcctttctcactcatcttctgggagcccttcatgaaagcgattcctgccagttgaccttgatgtgccatctgtgatctccttggttagagactgtgttgttggttagtggtatyttcttccctcaatgaactactttttttttcttacatcaccatcattcaatgaaaaacagtggaatccctggatagttaaatgtgtgctgaaaagaactctgctaaattatgtggatctttccaatttgctccttggaactttgtggctgcattgagtgaaccagaaggattatgtttgcataagacaactgccgaggaggaaaagggggaaataatggcaggtggagatggacatagtccatgcaca

SEQ ID NO: 490299 - DNA, 654 bp, Homo sapiens
tagtcgtgatgtgaaatcctgcaggtgttgtgttctgataatgcatatcctttacaagtttgggtaaattatttgctttgcatataaattaactccaaagctgaatcaacattagaataataaaaatgtagagaatatttttattccaaggaagcaaagatttatagcaaaatatatccaaatcctagatgcaatttcaggaggatagatttaaaaatatttatcatactccaaaaagaaaaaggagaaagaaaaaaggaaaaatacatacaattgagagaaaggaggaatggttttggaaaatacaatattatgttattattgttacattagggagaaaataattgagaatcgatacatttgtttttcagtataaaaacaaaaagatgrcacttatttaacaattcttaagtgatgtcttctgagctccactttattgggtatgtattgttcttaagctaaaatctaatttcaaaatattacgtattacaggtgtagtgttgtcttggtctgtgttgtgttgctgtaacaacacctgagactgggtaatttataaagaaaaaaaggtttatttagcttatggttctggtggctggaaagtccaagactatggcattggcatctgttgagcttctgatgagagccacatgctat

SEQ ID NO: 490300 - DNA, 654 bp, Homo sapiens
tagtcgtgatgtgaaatcctgcaggtgttgtgttctgataatgcatatcctttacaagtttgggtaaattatttgctttgcatataaattaactccaaagctgaatcaacattagaataataaaaatgtagagaatatttttattccaaggaagcaaagatttatagcaaaatatatccaaatcctagatgcaatttcaggaggatagatttaaaaatatttatcatactccaaaaagaaaaaggagaaagaaaaaaggaaaaatacatacaattgagagaaaggaggaatggttttggaaaatacaatattatgttattattgttacattagggagaaaataattgagaatcgatacatttgtttttcagtataaaaacaaaaagatggcacttatttaacaattcttaagtgatgtcttctgagctccactttattgggtatgtattgttcttaagctaaaatctaatttcaaaatattacgtattacaggtgtartgttgtcttggtctgtgttgtgttgctgtaacaacacctgagactgggtaatttataaagaaaaaaaggtttatttagcttatggttctggtggctggaaagtccaagactatggcattggcatctgttgagcttctgatgagagccacatgctat

SEQ ID NO: 490301 - DNA, 641 bp, Homo sapiens
atattatgttattattgttacattagggagaaaataattgagaatcgatacatttgtttttcagtataaaaacaaaaagatggcacttatttaacaattcttaagtgatgtcttctgagctccactttattgggtatgtattgttcttaagctaaaatctaatttcaaaatattacgtattacaggtgtagtgttgtcttggtctgtgttgtgttgctgtaacaacacctgagactgggtaatttataaagaaaaaaaggtttatttagcttatggttctggtggctggaaagtccaagactatggcattggcatctgttgagcttctgatgagagccacatgctatgtcacagcaaggcagagaaacaaaatggaaatcaggcaaatcattgctttataaaagaggcaactttctttagaatgaccggctcttatgagaactaatccattatcatgaaaaataacccagtttcaccagaaatttattaatttgtcttaatgacctaatcacctcttcaaagcacgatctcctaacaccttacatgggaaattaaatttcracatgaattttggagagaataacccatgtccaaactatagcaagggtaaagaccccaaatttacttagacatggggatta

SEQ ID NO: 490302 - DNA, 673 bp, Homo sapiens
ctttcacatgttgcagcctgactcaagttattcatcgcagaggctagcagctccctgatgcatccttccttgtctctggacaggataaaaataagaaattggccattgtgagacactctgagtttcgtgggattgagcagagcatattttatattcttctcttggaactgcctcttgttggtagtaaatggttgccagcactgttgtttctcaatagacaagtcctagaaataaagataattcaattttcattcactcttagctcttctgctaccagtgttcttctttgacactgacagggctgcacctgtctccctggcctgacatagcacttgtatggtttgccacttgccagaaaatccacgagtcattctaaagaccttttgcccagcagagaccactccagtgagcacaaattgtctagtggttttttttagatggtcttcctccttggctcatttctctccaagaacgaaagtatcaaggtgttcatttaacagcagctcctgaaagacaatccagcttgatttaaatctttaacggttttcattataatagaaaatataatagcaacagtagcatcctcttttacattgaaattaaattgcaattctttcactgttggggtrgcaagtataattcctatcacttctttggaaagcaatacaactta

SEQ ID NO: 490303 - DNA, 342 bp, Homo sapiens
ggattcactggcctctccatccgccccgacttccagaagggcctgaaggacgggattattttatgcacactcgtgaacaaactgcagccgggctcagtccccaagatcaacggcttccgtgtagaactggcacyagctagaaaacctctccaacttcctcaaggcaatggtcagctacggcatgatcccgtggacctatttgaggccaacaacctgtttgagagtgggaacaatatgcaggtgcgggtgtctcttctcgccctggcagggaaggccaagactaaggggctgcggagcggggtggacatccgtgacaagtactcagagaagcagaacttcgac

SEQ ID NO: 490304 - DNA, 496 bp, Homo sapiens
ggattcactggcctctccatccgccccgacttccagaagggcctgaaggacgggattattttatgcacactcgtgaacaaactgcagccgggctcagtccccaagatcaacggcttccgtgtagaactggcactagctagaaaacctctccaacttcctcaaggcaatggtcagctacggcatgatcccgtggacctatttgaggccaacracctgtttgagagtgggaacaatatgcaggtgcgggtgtctcttctcgccctggcagggaaggccaagactaaggggctgcggagcggggtggacatccgtgacaagtactcagagaagcagaacttcgacgacaccaccatgaaggccagccagtgcgtcatccggctgcagattaccaacaaatgtgccagccagtcaggcatgaccgcatatggcacgaggaggcatctctacgaccccaagaaccgcatcctgccccccatggacaattcgaccatcagcc

SEQ ID NO: 490305 - DNA, 496 bp, Homo sapiens
ggattcactggcctctccatccgccccgacttccagaagggcctgaaggacgggattattttatgcacactcgtgaacaaactgcagccgggctcagtccccaagatcaacggcttccgtgtagaactggcactagctagaaaacctctccaacttcctcaaggcaatggtcagctacggcatgatcccgtggacctatttgaggccaacaacctgtttgagagtgggaacaatatgcaggtgcgggtgtctcttctygccctggcagggaaggccaagactaaggggctgcggagcggggtggacatccgtgacaagtactcagagaagcagaacttcgacgacaccaccatgaaggccagccagtgcgtcatccggctgcagattaccaacaaatgtgccagccagtcaggcatgaccgcatatggcacgaggaggcatctctacgaccccaagaaccgcatcctgccccccatggacaattcgaccatcagcc

SEQ ID NO: 490306 - DNA, 496 bp, Homo sapiens
ggattcactggcctctccatccgccccgacttccagaagggcctgaaggacgggattattttatgcacactcgtgaacaaactgcagccgggctcagtccccaagatcaacggcttccgtgtagaactggcactagctagaaaacctctccaacttcctcaaggcaatggtcagctacggcatgatcccgtggacctatttgaggccaacaacctgtttgagagtgggaacaatatgcaggtgcgggtgtctcttctcgccctggcagggaaggccaagactaaggggctgcggagcggggtggacatccgtgacaagtactcaragaagcagaacttcgacgacaccaccatgaaggccagccagtgcgtcatccggctgcagattaccaacaaatgtgccagccagtcaggcatgaccgcatatggcacgaggaggcatctctacgaccccaagaaccgcatcctgccccccatggacaattcgaccatcagcc

SEQ ID NO: 490307 - DNA, 459 bp, Homo sapiens
  misc_feature (1)...(459): n = A,T,C or G
tttaaacagccaaagaacgaagtcatcattgatactttagtaaaggtcatcgaaggcttctttgcattttacagcttttactacnttagggagttaaaggagtacctgcccaggcttgtgcatgctaatgtgacaattttctttttgtagttgaaccgtattttgtgggaagatactttgaggctctgtaaatatccagttactcccagaacccactagatttagcatttcatggatgacttgtgtttgaacaattattactatgatggttgccagatgattattttcttctcttctttgctgtacctggagaagtaaaaccaataaataactgagaagggaaagctcatgattctggtgctccaattccccaagattaggccagtggtagacatttcaagctgacttcwtgtcttttttatttgtcttcgttactctgtcagcacttttttagtttca

SEQ ID NO: 490308 - DNA, 390 bp, Homo sapiens
ctgaattgtgctgagtgtgcacaaagatatacatcatcagaattgtgggtaaatcaagattaaattgtgaaacaataagaggcttatactcaaaggttaagacttgctttgtctcttgaatggtctctagagattaggaaaagaaagcagttgaagagaaccagatagaatggtaaaacatgtctcctctyctctcctcccctcccctcccctctccattttttccctccccttccttccctcttctcttcctcctcccttcctctgccttccactcccttccctccactcctctctccttcctttcactcctttccccttcctttcactcctctcccctccccactccttccttccctcctttctcttccccacctctcctcctttcca

SEQ ID NO: 490309 - DNA, 493 bp, Homo sapiens
agctttggaagccagaaactggggtgtcttgaggggtagtaagcctctgaaatgtgccccagggaactggcttgaccgttgattctgaacaaaataaaaactcagttctttaaggaccatcttcttctttctgcatttactcacrtggcattcctcaagggcactgatctgcagtcactctgctttgtctggttatcacatgaagattgagaggaaggtttacttaacagtcttatgaggcagatgttactgttatccccattttacagaggcagctactgaggcacagcaagattaattgccttgcacaagaatttgcggacagtaaatagcagagcaacattttgaatgcaggcagtagggctctagagactaataaataaacttaatttattcttttataccttagtggtctgaaaaaataataatttcatttattcaaatgatagtgcatgtgtatgcatgtatatttgtttatgtgatgttttccagc

SEQ ID NO: 490310 - DNA, 582 bp, Homo sapiens
tacttcctgtacatcctccctgattgactgggactcttgtccaaagcatttatcagaaaatttactcatttttagggccrggtgcggtgactcacgcttgtaatcccagagctttgggaggccatggtgggaggtcaggagtttgaggccagcctgggcagcatagaaaccctgtcactatagaaataaataaacaaattacagctaggcatggttgtttgtgcctgtagtctcaactacttgagaggctgaggtgggacaattgcttgagcccaggagttctaggttacagtgagctataattggaccactgcactttagcctgggtgacagagtgagatcctgtccctaaaagacagaaaacaaacaaacaaaagcttactcattttttgattgtctctttctgtctctctccctctagtaagctaagagacaagacattttgtttgttgtatttactgttacatcttcagtgtctggaagaaggtacatagtaggcactcatacatttgttgaataatgaatgaaaatattcatatgcgtatatcatataggaacatacacatatgctatacaattcta

SEQ ID NO: 490311 - DNA, 582 bp, Homo sapiens
tacttcctgtacatcctccctgattgactgggactcttgtccaaagcatttatcagaaaatttactcatttttagggccgggtgcggtgactcacgcttgtaatcccagagctttgggaggccatggtgggaggtcaggagtttgaggccagcctgggcagcatagaaaccctgtcactatagaaataaataaacaaattacagctaggcatggttgtttgtgcctgtagtctcaactacttgagaggctgaggtgggacaattgcttgagcccaggagttctaggttacagtgagctataattggaccactgcactttagcctgggtgacagagtgagaycctgtccctaaaagacagaaaacaaacaaacaaaagcttactcattttttgattgtctctttctgtctctctccctctagtaagctaagagacaagacattttgtttgttgtatttactgttacatcttcagtgtctggaagaaggtacatagtaggcactcatacatttgttgaataatgaatgaaaatattcatatgcgtatatcatataggaacatacacatatgctatacaattcta

SEQ ID NO: 490312 - DNA, 520 bp, Homo sapiens
ttttcatctgaaataattgacttgagacttaaaaacgtctgtcttttgtgttcatgctgtttgctttgttttcttaaatattagaggtcaaaatatgtttagaaaccaaatctgsgtcttagagcttttttcctggagcagtggccttgtggtagctgtttttttttttcataggctgaagaggattttccatgcccactgtgagccgtgactggcagaatgaagctgcgcaccctggtagctctttctctgttgggcacttgttctttataatgtctcagcatttattactggcctgggcaaatattgagatagagttctggcactggccatataaagcagcaaagcataggcaattgagtaaaaataagaatacaaataataataataataaggccatgcaaatatatttaggtttgagagaatgaacagatccatggaattgggttgaagattgtatcacactagagattctagatattttcttcttgggtttggtacatatgtttctgttaatact

SEQ ID NO: 490313 - DNA, 696 bp, Homo sapiens
tctcaattatattgacacttagccacaatataatggacttttatttgagattttgactttttctatgacttcatttttaaaacgaatctgattgctttgcagggatattataatgccccctttccaatgtttatttttaatcaagaaaatgtttaagcaaggctgtagttttttcaattaaacttcaataatttggaactgccatttttcaatttacttttcaaactttgtatttattttgttagctagctaggtcatttgtaaatagtccttactaacagatggaaaaagatgagaaaaggcactattaattgggtgcctaatatgtgctgaggcttaaaaacagtcatattatctgtcatttattgcatgacactgaataaatttactgactgaataatacaatgatgaagaatgactgttaacattattgttttatacatacatactatgcattgtaaatgcatttatctcatttaatttgtataccagattggcaagttcatgagtaatgctttcatgrtaaagaaattaaggagatgcagaaatgtatctaaatatacacaaaagtagtacgtgatagaatcaggactcaatccagagccttttgactataaaaatctatgtcttttttgttacagtctttgtctgtaataaaaatttgctaatacctgaaaaataatatgttgcatattg

SEQ ID NO: 490314 - DNA, 636 bp, Homo sapiens
atttatatcacaccaatccaggatattcagttctagtcctattattgcctttaagctgttttgcacatctgtaaattgtaggtatctgactggtatgcaaattctgtcttttccagtagaatttcaattgacttccctccctcccagtggaaaaatcactttgtcttcatttgcaatttgctcaacattcgtttactccatgtaattttgtagtgttttgacttttcctttaaactggtatagcgtctgcttgatttcctcatatcatatgagcaaaataaattattgaactcatgttcatttttatatgtgcataagggtcatgattgtacttttttctgaaaatttcttttaacacaatacaggaaagaaatcagatatgttctaraaagcttctgaaggcagaacatggactgatgtagtatcataagcaagtaggtttccttagtgtcccgtagtattgtcagaaatgaagaggcaggaagcagtggtgtgggcttcgctggaagttgattccttcactcagagtgctccattgaggctctgtacctctgactgccatatgtaaagggtgctgtggaactggatggaatgctatctttaaagcttaagtctaatttttcatggttctaactc

SEQ ID NO: 490315 - DNA, 636 bp, Homo sapiens
atttatatcacaccaatccaggatattcagttctagtcctattattgcctttaagctgttttgcacatctgtaaattgtaggtatctgactggtatgcaaattctgtcttttccagtagaatttcaattgacttccctccctcccagtggaaaaatcactttgtcttcatttgcaatttgctcaacattcgtttactccatgtaattttgtagtgttttgacttttcctttaaactggtatagcgtctgcttgatttcctcatatcatatgagcaaaataaattattgaactcatgttcatttttatatgtgcataagggtcatgattgtacttttttctgaaaatttcttttaacacaatacaggaaagaaatcagatatgttctagaaagcttctgaaggcagaacatggactgatgtartatcataagcaagtaggtttccttagtgtcccgtagtattgtcagaaatgaagaggcaggaagcagtggtgtgggcttcgctggaagttgattccttcactcagagtgctccattgaggctctgtacctctgactgccatatgtaaagggtgctgtggaactggatggaatgctatctttaaagcttaagtctaatttttcatggttctaactc

SEQ ID NO: 490316 - DNA, 619 bp, Homo sapiens
gttaaactaagttgtttaactgacttaaacatccttacctctgtttcttaatctataaaaggagaattataatccaaatttttatagcatagttatgaagcttaatttgtacagtaaygtagagagattagcccagtgcattagaagtataatgcaagcttaaattagtttcttttattctaataatagtagcaaacaaatctgatatgccagttttaaaattatctttgcaagtagtaattccagctatcactcaacccttcagttttaggaaatgtattgttttttcaagacaacaacaaattaaatatgaacatttcaaccaaaaatacctttttccctctggaagatatgtgaggggaaaaaaatcatcatatcatgctaaattctgtaagctatcttacatattgttggtggtttccccagtcctttcagaatttcaacttctctttaacatcaggatagctgaaggatggacaactgacctactggtcattagactccaaagagttattaatcttttgagttaaaaataaaattgtactaaactccgtcaggtagataattaattttttttcaagtaatacatgaatctcaaattcgttgattacaaccacct

SEQ ID NO: 490317 - DNA, 514 bp, Homo sapiens
acatgagataagagatagagcaatgggaggagaagcttctaagcttgtgtatggagtgtgtgtgtgtgtgtgtttgtgtatgtgtgcgcgcacacgcacacttataggtctgaattatctatcaatactaccctcctctgccaatgcccatgataacctctcaagcacatttcacaagagaagcgtgagtctcccctgaagcgggtgggatgagaactgagacatgcacgtgtgagatctgagagcccttagcgatcgagaatgtcaagcttcaggatgaaattacacaaatgtgctgcattatctcttgtactrtctttaaaaagtaaaataaataaaagcttttgggggaggaatgtttttcctcaccagcttcagagctgctcttaggcctgacagttgagctgggcaggcctttccttcgactccgcgctgccgcgatattcggatattcggcacagggggccttttagagtcacaaggcgatgtacatcaagcctttcttctctccttc

SEQ ID NO: 490318 - DNA, 651 bp, Homo sapiens
acttatttttgtgactatagttcttacagtcagaccagagcccatgctcacttaacagaatcaagatagcaaactatactatatttactttctttgaggtatggtaattattactattgtcttgttcaataattaacaattggtggctgtaagctaactttctgtatcctcctactctgtgactgcagaggtgtggagagtatgttatttggtggacagctcatattttaacccaaaggcattattamcctgaggaggggtatccaatagagacataatgaaacatagacttctgttttacaaagttctttatgtatttatttaaaaatttgttttgcatattgactaaatgtataaactgcttgaaaaaatttatttctctaaattagttatcccaaattaacatatttgtactttcaattacttgtcccaatttgaacaattgttttctcctttccattcttcagatttctctcagtctacaatcccttttatctgggaagtaaggtctagtgtcacttctttaataaagacaagtaacacaaagctactgccactaccgctgctactgttaataaccatgacaacaataataataataataatgattataatgtgccaggcatcaatctaagagcttaaacaaataca

SEQ ID NO: 490319 - DNA, 516 bp, Homo sapiens
gagccagttcagcagtctgcttcttgcctatcatcctgccccactttctgtgtgttcctttgggaagaaatcctggggaatagatagcaggaaatcacaggcaaattcagagcttcttgggggtggcgatgggcggggaaagcacaatataaactattaaatgcagtgatgaagccagctactcccttgggtctgattggaggaagctggcctcctccttggggaatgaggcatttgaaattaattgttttcattttatacaaatacttcacccaaatgaaaggaatgaaatacttaaatgcaaccacagccstcctttataaatatgactatgagcacacacatatacacgtataccagagaaagcaaataacagtagtgtgtaatcaaatgatcaagtgtctttatgccagcagttttctgggtaatagcactgtcccttgaaagtgagcattatgatttttgtgttttgcaccagatccttcatcctgcagtgtctgtgctgcagcatctggg

SEQ ID NO: 490320 - DNA, 409 bp, Homo sapiens
  misc_feature (1)...(409): n = A,T,C or G
tgtttctatatttaataaacacccgaaacatattattctttataaagttccatttacaacagtgtcagaaagaataaagtaacaaagaataaatttaacaaaggaggtgaaaaatctgtacactgaaaactgtaaaaygtggatgaaagaatttgaagtagacacaaataaatggaaagatgtcctatgtttatggactggaacattaatattgttaaaatgtccatgctacccaaagcatttacagactgaatgcaatctctgttaaaatttcaatgacatttatttacagaaacaaaaaaagtaatattaaaaattgtatgaaaccataanatttacatggaaccacaagatcaagaagacagctanagcaatcttgagaaagaacaatgctacactcactcactgc

SEQ ID NO: 490321 - DNA, 550 bp, Homo sapiens
attattgagagcagatcaggtgaagagcaccttctcttaccatgaagcaaagctaagttagaaggatacatcaacccagctctaatgaccagactgtacttggctctactctgaaatggtaacataaactaattgggctttgggttctttcttggaagtaaaacttcaaacctattctctctcaagacttctgaaatgttggatggagaaaaatatttatggaggttttttctcgagaaaaccatttgtttatttttttagatactcgaaaatttattctgggatgaaattaaataatcatgtaagtggacatgcttktattaaactgtatcttggcattatgccattggtatggtttgaatgtgtttcacaaaattcacgtgttggaaacttgatccccagtacagtggtgttgggaggtgaggcctcatgggaagatgtttgtgttatggggataccagcctcatgaataaattcatgctgttatcatgggagtgggttccttagaaaagaatgagtttggcacctcttgtcttcttttgcctttttg

SEQ ID NO: 490322 - DNA, 483 bp, Homo sapiens
ctaagtacattcttatcaaaaggcagaggtgtgagagagaggaaggccaactgtgcaagcacttttcaaaccttcagttgcttcacatttgttaacatcccattaaccaaatccaatcacatggttaagcccaaaatcaaagtaggtgagcaccacaaagttatatgacaatggtgaggatattagcagggctgaaaatgggggccatctctgaaatttaatgctctctataaataatactacaacaatattgttacatgaggaggtgatcaaagattatgcagctaaaaatttatggataaactgttgtatatgtatattakcaattatttaataaaatgataatgctgattttgtgatggttcttgtattcatcatcttttttaaaaatgtatactttatagtgatttctcattttaaatgaatagttgtgattgtatctcattttgtttttgcaatttcatgttcttttccttaaggagg

SEQ ID NO: 490323 - DNA, 711 bp, Homo sapiens
tgctggatcttcaggctacccccaaataggcagggacaggtccccagagtcactccctcagagaggcagcaaagcatggctctgtcagagacgggaattgaggagcctgggcggagagcgtgctaggcagaagtttgagatgtggtttcagaatgaggaaagaaggtctccagacttgcttgagagatgtcagagcaaaagataataggtaatcatttgcattatttgtttcttttcttggaagtgggcctgtgggctgtgarttggatatccttcaaagttttccaaaagacaaaagtaaaactagaattaaattgtaatgtttaatagttgtacatattttagtacctgataaggcagtctattagtttttgctgtatagcaaatcactctaaaacttagtgatataatataacaaccaattatttagctcttaattctcacagaggctggtgaggccaggcaatcacacttctggggcttggctggctttaacaaggaggagagtgagtagggcatgggaggcacctgataatatgtctctcctcttggtggaagacaataaaaagtcacattgcttcttttattaagaggtggaatctatttttccaggccttgaatctggaatgcccttgtaacttgctttggccaataaaatatgcaggaagcatagttgtaccatttctgagcctatgcctcaagagatctatt

SEQ ID NO: 490324 - DNA, 476 bp, Homo sapiens
ggcacaggatctcagggtagaatgcagaatgtgacaaaagaatccatctgaattatatatgtataaagcaaccttactgaaggggttacggaaatatggtgccgacataaataactttagaaatgagcggagtttgtgaaactaaaggcaaaataaactctacacagcactgtactccagttgaaaaagttgattcccatggcrgtaggggctaacaattctgatactgttatacttgtatactggaattgaatgattaagtaaatggattgcagatggtgggacttaggttttcactgtgggagttggagtttacagataagcaaaaggagaaggctagaatgtgaccacgggttagagttgcaaacaccagtatgaactcatttttagtttgatgcagataaagatggctgcatacagaaatatctatagataagggtatatacacaggttagtatacccatgtgtattgccat

SEQ ID NO: 490325 - DNA, 616 bp, Homo sapiens
tccagagatacgttgtaagtataaaatacacattggatttccaagattagtaaataaataaataaatatatgaatatgaaatgtarcattaataaatgtatattgtttacctattaaaggacatttgagatatgttggatatatgattttactgattttctgttaatttatctaccaggaaatttaaattatgcatgtggcttatgtctccatgggacaacacagttttagagagtaaatccccaactttcttgaacatgtctacctatagtacatgcaatttaaatctatcctcagtatttactttcaaatagcaaatctgtcaagctctataaaaaggtggtgtattttataaaatgtatggaaaaataaaaatttcaaaaaggcaaaacaaaaacagagagagaaattctcatactttctttcagatctccagtagcttatgtgatgtactcttttagaagctaaaaaaatattacttgcaactttgtttatgagccaactagctaatcacatgtggctaatcctgacaggcttaaagaaacagagagatggaaaaaaatgtttatttgtaaacacattttaagttacatataaaattttgtgttaggtttaa

SEQ ID NO: 490326 - DNA, 616 bp, Homo sapiens
tccagagatacgttgtaagtataaaatacacattggatttccaagattagtaaataaataaataaatatatgaatatgaaatgtagcattaataaatgtatattgtttacctattaaaggacatttgagatatgttggatatatgattttactgattttctgttaatttatctaccaggaaatttaaattatgcatgtggcttatgtctccatgggacaasacagttttagagagtaaatccccaactttcttgaacatgtctacctatagtacatgcaatttaaatctatcctcagtatttactttcaaatagcaaatctgtcaagctctataaaaaggtggtgtattttataaaatgtatggaaaaataaaaatttcaaaaaggcaaaacaaaaacagagagagaaattctcatactttctttcagatctccagtagcttatgtgatgtactcttttagaagctaaaaaaatattacttgcaactttgtttatgagccaactagctaatcacatgtggctaatcctgacaggcttaaagaaacagagagatggaaaaaaatgtttatttgtaaacacattttaagttacatataaaattttgtgttaggtttaa

SEQ ID NO: 490327 - DNA, 604 bp, Homo sapiens
ccaaccaacgactgccaaacctacctgaaaaccaattagaaactctccctgcttccyaaaatgccacctttagtgggtccggaattggttctttccagtgggttcatggtcttggctgacttcaataatgaagccactgacccccgcagtgagtacagtttttaaaaattgtgtgcccagagtttgttccttcagatgttcagatgtgtcccagtgggttcgtggtctcgctgacttcaggagtgaagccacagacctttgcagtgagtgttacagctcataaaggtggcccttccagagttgtttgttcctcctggtgggtttgtggtctggctgacttcaagaaacaagctgcaaaccctcgtggtgagtgttacagatcataaacattgcgtggacgcaaagagtgagcagcagcaagatttattgtgaagagctacaaaacaaacataccacagcctggaaagcgaccccagtgggttaccactgctgcctaggggtagccagcttttattcccctatatggccccacccacgtcctactgattggtccattttacagagcgctgattggtccattttacagattgctgattggtccatt

SEQ ID NO: 490328 - DNA, 604 bp, Homo sapiens
ccaaccaacgactgccaaacctacctgaaaaccaattagaaactctccctgcttcccaaaatgccacctttagtgggtccggaattggttcyttccagtgggttcatggtcttggctgacttcaataatgaagccactgacccccgcagtgagtacagtttttaaaaattgtgtgcccagagtttgttccttcagatgttcagatgtgtcccagtgggttcgtggtctcgctgacttcaggagtgaagccacagacctttgcagtgagtgttacagctcataaaggtggcccttccagagttgtttgttcctcctggtgggtttgtggtctggctgacttcaagaaacaagctgcaaaccctcgtggtgagtgttacagatcataaacattgcgtggacgcaaagagtgagcagcagcaagatttattgtgaagagctacaaaacaaacataccacagcctggaaagcgaccccagtgggttaccactgctgcctaggggtagccagcttttattcccctatatggccccacccacgtcctactgattggtccattttacagagcgctgattggtccattttacagattgctgattggtccatt

SEQ ID NO: 490329 - DNA, 604 bp, Homo sapiens
ccaaccaacgactgccaaacctacctgaaaaccaattagaaactctccctgcttcccaaaatgccacctttagtgggtccggaattggttctttccwgtgggttcatggtcttggctgacttcaataatgaagccactgacccccgcagtgagtacagtttttaaaaattgtgtgcccagagtttgttccttcagatgttcagatgtgtcccagtgggttcgtggtctcgctgacttcaggagtgaagccacagacctttgcagtgagtgttacagctcataaaggtggcccttccagagttgtttgttcctcctggtgggtttgtggtctggctgacttcaagaaacaagctgcaaaccctcgtggtgagtgttacagatcataaacattgcgtggacgcaaagagtgagcagcagcaagatttattgtgaagagctacaaaacaaacataccacagcctggaaagcgaccccagtgggttaccactgctgcctaggggtagccagcttttattcccctatatggccccacccacgtcctactgattggtccattttacagagcgctgattggtccattttacagattgctgattggtccatt

SEQ ID NO: 490330 - DNA, 604 bp, Homo sapiens
ccaaccaacgactgccaaacctacctgaaaaccaattagaaactctccctgcttcccaaaatgccacctttagtgggtccggaattggttctttccagtgggttcatggtcttggctgacttcaataatgaagccactgacccccgcagtgagtacagtttttaaaaattgtgtgcccagagtttgttccttcagatgttcagatgtgtcccagtgggttcgtggtctcgctgacttcaggagtgaagccacagacctttgcagtgagtgttacagctcataaaggtggcccttccagagttgtttgttcctcctggtgggtttgtggtctggctgacttcaagaaacaagctgcaaaccctcgtggtgagtgttacagatcataaacattgcgtggacgcaaagagtgagcagcagcaagatttattgtgaagagctacaaaacaaacataccacagcctggaaagcraccccagtgggttaccactgctgcctaggggtagccagcttttattcccctatatggccccacccacgtcctactgattggtccattttacagagcgctgattggtccattttacagattgctgattggtccatt

SEQ ID NO: 490331 - DNA, 573 bp, Homo sapiens
aaactgaggaagcatcagaacaactatgtgaagccaatgaaaaaacttctgaaattgggacattttaaatcagaaagagaagcatcatgttaagataaaaatgtatcagacagataaaggtaatatttaatggcctagatgcaccaaacctcctcatgtacactgactgaatagtgtagtagttcattttcattctgctgatgaagacacaactgagactgggcaatttacgaaagaaagaggtttaatggacttacagtgccacrtggatggggaatcctcacaattatggcagaaggcaaggaggagcaagtaacatcttatgtggatggtggcaggcaaaaagaaaacttgtgcagggaaactccaccttataaagccatcagatctcatgagacttattcactatcacaagaacagcacaggtaacatgagcccccaggactcaattacttcccaccagatccctctcataacatatgggaattcaatatgagatttgggtgggaacatgggaaaccatatcattgcatccctggcccctcctaaatctcatgtccttacatattttaa

SEQ ID NO: 490332 - DNA, 557 bp, Homo sapiens
aacgccgagggctcggcagggccgcggacaccgccgcggcttggtttgttattgtcgactccgtctcttcctccgcggcgcatgccgggaaacggcctgccgggggaggggcgcgcctggaggcgcagagaggcgtctacgcaggtccggaagtcggcagcctgccgggaagggggcggccccgcctccggctctccggccggcaggttggctgtcctggcctgaccctgggagactccgctggggccgcctgttatggtgctagctgccgtcccggtgcgtactttcccaaggtgaatttgaccttctttgcgacagytaggccctgactaaggtcgacccaccaaacactggatcgtccccaggcgaaagagagcttgttcccctcagcctgtcgcggaggagcggagccaatcgagggtctggtgtccccgtcgcctctccaggggcaacctgcggactaggccaaggtctgtaacaggataacgtaccagcgcctggcccaggcgttcctgccgccacctccccgcatatccggaccgccgggactgcacgca

SEQ ID NO: 490333 - DNA, 514 bp, Homo sapiens
ggaggctgaggcaggagaattgctagaaccccagaggcagaggttgcagtgagctgagatggcgccactgcattccagcctgggtgacacagtgagactccgtctaaaaagaaaaaaatrttatgactgttgtaccacagaatgcaaccatgaatctgtaataactctaaaattaatatttaacactgttagaggttctagataattttaaaaagtagggacaagttcagatattcaaagaactccatgtattagcaaaaataaaataagcaataaaaacagatgggaacattaattttgttgttatgaaggaatattggtcttttctatactaatatttatattaacttcaagaacacaagaacattacaaatagaatgcagtagccaagacataaagaaaaagattaaaactagaaatagaattagcaaagaatatttgccttgttcacaatggtggatactgcatttaaaaagtttgttagtctgggtgtggtggctcatgcctgtaatcc

SEQ ID NO: 490334 - DNA, 630 bp, Homo sapiens
tcacacatccgccctcccgggcatttattgagtaacctttatgtgccagtcctctaagccaattagtgagaacacaaaaataaagatggaatagactctgcctttatggggctctcccatctattttgagggactgatgtctaaacaaaataattagataagtgatagttacccttatagtggtatgaacatgaggakccacggaggcagtatttaattcagcccagaagattaggaagggttcaggaaaatcttttacagacaaactgacgcttgagctgagacttgaagaaagggtaaaatttctctggttgaaaaataaactggtgtctcattgagaaggatcaatatgttgaaaaacaagaacaacatgaaataacattgtgcatttgggaaatgacaagcggttcggcgtgatcaatcagaaagcgtggggacagacagcggaggccaggtctaggatgccgcgctaagggatcaatattggatcctggagacaatgggagtccatgaaatttttcaagcaaatgaacagcatgatttgatgtgttttgattctcatcactccagcatctgtccgagtgcagcttggaggaagacaacactgggcagagtcaggaggctgttgaa

SEQ ID NO: 490335 - DNA, 646 bp, Homo sapiens
aacctaaaacataaacacaacacttggttgtaagtgagccaacagtttcttgtctctttctctgctcaaggcttaaggccgtgtctacccaactatgttcagtggaagaaaagatcccctggacaaataagtttgagaactgtttttgcaggacttctcagaacctttaaaacacaaatcgtcatccgcagggatcttcaggagggagatggctgatgcagcacaaatttctttcacaggagtatcttgcagaatacagtatgagaygcacaaaggctgcattgagtctttttaagggactgggcctttgtggcattggggtaggagctctccagatagcatctaatgagtagaaacattcaggttgctttttttttccttactggcaaaactgtgtgtgcatcatgaatgaagctggtctcccttatccatatcaaaactaaaccccaattaattggctaaattgggactcaacacctccaggagccatgcggaagaaagccccagcacactttaaagtagcttacctcatatttgatgaaagcaaaacgcttatgaccagtgtgctgctaatacaagtcaacagataaagctgtatgaaaaattatttttcccaatcatagctagcatagtccacattttgcat

SEQ ID NO: 490336 - DNA, 646 bp, Homo sapiens
aacctaaaacataaacacaacacttggttgtaagtgagccaacagtttcttgtctctttctctgctcaaggcttaaggccgtgtctacccaactatgttcagtggaagaaaagatcccctggacaaataagtttgagaactgtttttgcaggacttctcagaacctttaaaacacaaatcgtcatccgcagggatcttcaggagggagatggctgatgcagcacaaatttctttcacaggagtatcttgcagaatacagtatgagacgcacaaaggctgcattgagtctttttaagggactgggcctttgtggcattggggtaggagctctccagatagcatctaatgagtagaaacattcaggttgctttttttttccttactggcaaaactgtgtgtgcatcatgaatgaagcyggtctcccttatccatatcaaaactaaaccccaattaattggctaaattgggactcaacacctccaggagccatgcggaagaaagccccagcacactttaaagtagcttacctcatatttgatgaaagcaaaacgcttatgaccagtgtgctgctaatacaagtcaacagataaagctgtatgaaaaattatttttcccaatcatagctagcatagtccacattttgcat

SEQ ID NO: 490337 - DNA, 646 bp, Homo sapiens
aacctaaaacataaacacaacacttggttgtaagtgagccaacagtttcttgtctctttctctgctcaaggcttaaggccgtgtctacccaactatgttcagtggaagaaaagatcccctggacaaataagtttgagaactgtttttgcaggacttctcagaacctttaaaacacaaatcgtcatccgcagggatcttcaggagggagatggctgatgcagcacaaatttctttcacaggagtatcttgcagaatacagtatgagacgcacaaaggctgcattgagtctttttaagggactgggcctttgtggcattggggtaggagctctccagatagcatctaatgagtagaaacattcaggttgctttttttttccttactggcaaaactgtgtgtgcatcatgaatgaagctggtctcccttatccatatcaaaactaaaccccaattaattggctaaattgggactcaacacctccaggagccatgcggaagaaagccccascacactttaaagtagcttacctcatatttgatgaaagcaaaacgcttatgaccagtgtgctgctaatacaagtcaacagataaagctgtatgaaaaattatttttcccaatcatagctagcatagtccacattttgcat

SEQ ID NO: 490338 - DNA, 480 bp, Homo sapiens
caagaggttggacgttctcttttctaaagaatctgcctggatagctagagcccgtgataccctaccttgttttaacctgagtgactctctcctagcagagagagccggacagactccattttagtttcttcacttgcagccccctttatcccccttaagggaayaactagtgtaagctgactccaagcacatccaggaacgcaaactgctgataagatactgaggcaggctgtaccagcagctcctggggatgtgctcagtggcaggtacctaaagcccctgcatttatctctcagtgatagtttaagcccctgcacctggaactgtttattttttgtaactgcttctataaccaattactttttttaactttttccctattctgcttctgtaaaattgcttcagttaaactcccctcccctatttagaccatagtataaaagaaaatctagccccttcttcaggcccgagagaatttcg

SEQ ID NO: 490339 - DNA, 480 bp, Homo sapiens
caagaggttggacgttctcttttctaaagaatctgcctggatagctagagcccgtgataccctaccttgttttaacctgagtgactctctcctagcagagagagccggacagactccattttagtttcttcacttgcagccccctttatcccccttaagggaataactagtgtaagctgactccaagcacatccaggaacgcaaactgctgataagatactgaggcaggctgtaccagcagctcctggggatgtgctcagtggcaggtacctaaagcccctgcatttatctctcagtgatagtttaagcccctgcacctggaactgtttattttttgtaactgcttctataaccaattactttttttaacttyttccctattctgcttctgtaaaattgcttcagttaaactcccctcccctatttagaccatagtataaaagaaaatctagccccttcttcaggcccgagagaatttcg

SEQ ID NO: 490340 - DNA, 480 bp, Homo sapiens
caagaggttggacgttctcttttctaaagaatctgcctggatagctagagcccgtgataccctaccttgttttaacctgagtgactctctcctagcagagagagccggacagactccattttagtttcttcacttgcagccccctttatcccccttaagggaataactagtgtaagctgactccaagcacatccaggaacgcaaactgctgataagatactgaggcaggctgtaccagcagctcctggggatgtgctcagtggcaggtacctaaagcccctgcatttatctctcagtgatagtttaagcccctgcacctggaactgtttattttttgtaactgcttctataaccaattactttttttaactttttscctattctgcttctgtaaaattgcttcagttaaactcccctcccctatttagaccatagtataaaagaaaatctagccccttcttcaggcccgagagaatttcg

SEQ ID NO: 490341 - DNA, 480 bp, Homo sapiens
caagaggttggacgttctcttttctaaagaatctgcctggatagctagagcccgtgataccctaccttgttttaacctgagtgactctctcctagcagagagagccggacagactccattttagtttcttcacttgcagccccctttatcccccttaagggaataactagtgtaagctgactccaagcacatccaggaacgcaaactgctgataagatactgaggcaggctgtaccagcagctcctggggatgtgctcagtggcaggtacctaaagcccctgcatttatctctcagtgatagtttaagcccctgcacctggaactgtttattttttgtaactgcttctataaccaattactttttttaactttttccctattctgcttctgtaaaattgcttcagttaaacycccctcccctatttagaccatagtataaaagaaaatctagccccttcttcaggcccgagagaatttcg

SEQ ID NO: 490342 - DNA, 639 bp, Homo sapiens
cattgtgccctgccccttggagcctgagctgacttggtgccctgctttccagggaatcagtgccttggccagtctgagcagtcacaccccccactgcacgagagctgaagcgctgccctgcttcacagggaatcagtgtcttggctgagctgagcagmcacacctgccagggatgagccaacatggcacccccatatcctaggaaaatggcattggctgaactggggtaccttgcccttcaggacaaacaactgtagaaccctgcttccttggaactggactagctctggagaatctgagttgcccaggcacctgcctccccagggagagaagtagttgctgcactggtccctgcccctaagggcccaagccacagtagggctccaccattctggggtccttgctgatgctgcatctggcctcacagagactgagatgctgctgtgtcccaccacggcaggttccagagtcactatcatgtcactcccatgtccagagtcactcccatcccctgggagtttacttcttaaactcttcgcaaaaacagagcgagaggaaataattccaaacacattttaccaggccagtatcaccttaatacctaagccaaaccaaaacacacacacacacacacacaca

SEQ ID NO: 490343 - DNA, 610 bp, Homo sapiens
tggtgtaatcttggctcactgctacctccacctcctggttgaagtgattctcttgcctcagcctcctgagtagctgggattacaggcgcacaccaccatgcccaggtagtttttgtatttttagtagagacggggttttaccatgttggccaggttggtcttgaactcctgacctcacgtgatctgcctgtttcagccacctaaagtgatgggattataggcgtgagccactgcgcctkgcctgcactattcttttttcaaggtagactgtttctttcttagcatggttgatctttacagtcttctaggaggtaggcgggaaagaaataacctcatggtgcatgaggttatttccctccctcatggtgcatgaggttatttccctccctcatgggaaaactcagggaagccggagggcacctagagggtgctgtcagtgccacactggggctggggtgccctggagttgggactcaggacagtcgctcctcctcttgttgttgcctggacagccacaaacctggcttcccaccctgcgtagcctggaggagccttcagcagaattcggctttccatgcccccaggatgggtctcacctggccgtagcatg

SEQ ID NO: 490344 - DNA, 612 bp, Homo sapiens
gccaaaagaagcattgagattgagctgggcacagaggcttgtatccatcatcccagcacattgggaagccaaggtggacgaatcacttgaggtcagaagaccagcctggccaacgtggtcaacatggtgaaaccccattgctactaaaaaaatatacaaaaattagccgggtgtggtgtcctgtgcctgtaatcccagttactcagggggctgaggcaggagaattgcttgaacctgagaggcggaggctacagtgagctgagattgcgccattgcactccagcctgggcgacagaacaagagtctctcaaaaaaaaataaaataagaaaggaaccatttaggcattgaaacygggagataaatcagtgtcaagatgccaggggcctgatgtgttaggcagggtggtccagcagtcttagggagcagggtcagttttagagcagagggtggggcatgactagagtcatccttatggaaaatgagcctgtcagccaggtgagtactggatggggcaaggagggggcacacacctgagctgggctgctgagggcaaggctgtggcatgcacaagggtccggttgggggtgttcatacataccttgttgtgttcc

SEQ ID NO: 490345 - DNA, 615 bp, Homo sapiens
tgatccacctgcctcggcctcccaaagtgctgggattacagacgtgggccaccaygcccaaccagaatcattcatttcttttcaagtggatatcttatggtattttagggcatggctgggagcagttttgttttctgttctcaaggtggagtttttgcaggatgtcatagagttcatgtctgcagctcacagtgtcattgcctgtgtccgcagctccacgtactggcaggtgtactgcaagctgggcaggtgctccgtgtccctgggataccttacccaacactcctggccctcctctgcaagccgtgccctgatcctccctgcagggactggggattggttctgctcacccagaagccgggatacctggctgagggcacttctctccctcttctctttgaacagagtggccgcgaacccaaaggtgcgggaacaagtgcggctggagctgagcttggtcaactcagacctgcagatgctcaaggaagagctggaggggctgaacatctcagtgggcatctatcagaacacagagtaagtgggagcagcacaccttccagaagcctctgagccagagatccttcatatatccagggtatgaagaggtacctgggt

SEQ ID NO: 490346 - DNA, 615 bp, Homo sapiens
tgatccacctgcctcggcctcccaaagtgctgggattacagacgtgggccaccacgcccaaccagaatcattcatttcttttcaagtggatatcttatggtattttagggcatggctgggagcagttttgttttctgttctcaaggtggagtttttgcaggatgtcatagagttcatgtctgcagctcacagtgtcattgcctgtgtccgcagctccacgtactggcaggtgtactgcaagctgggcaggtgctccgtgtccctgggataccttacccaacactcctggccctcctctgcaagccgtgccctgatcctccctgcagggactggggattggttctgctcacccagaagccgggatacctggctgagggcacttctctccctcttctctttgaacagagtggccgcgaacccaaaggtgcrggaacaagtgcggctggagctgagcttggtcaactcagacctgcagatgctcaaggaagagctggaggggctgaacatctcagtgggcatctatcagaacacagagtaagtgggagcagcacaccttccagaagcctctgagccagagatccttcatatatccagggtatgaagaggtacctgggt

SEQ ID NO: 490347 - DNA, 320 bp, Homo sapiens
ttgcacctggtggcacacacctagagccccagctactcaggaggccaaggcaggaagatcacttgatcccaggagttcaagaccagcctgggcaacatagcaagacmctgtctcaaaaaagaaaaacagtttgtccttgttttaagaacctaattctatataagcattggtcacctgagtttccgaattatgtctgtttaatttattttttggagacagagtcctgctctgtcacccaggttggagtgcagtggtgcaatctcagctcactgcaacctccacctcctgggttcaagtgattctcgtgcccagccttgcaa

SEQ ID NO: 490348 - DNA, 481 bp, Homo sapiens
tacctatcatttaatctaacctcaattcaaatgcaacttgttcttcgaaaccttttctaacattttcattttaaaaaatcccttcctttaaagacagcctcctgggtcttcatcagtaattctaatatggcaatatgcaataaatatttattgtgtacctaaaatgtgccacaagctcagtgctagggatatgtcagtgggtaaaacagtcagaactccttgtaaagtgaataaagttaaaattgcttgttagatagtggtaaatggtaaggagaaaagtgtagaagaggaagagaaaaggaaattggaagrtagaaattttatgtggttagtggaggcctgtcagggaaggagactcaaatctgcaggaaatggggaatgacagacaaatatctgaaagaagaacattcagacagatggaagagaaaatgaaaagactctgggtgaaagtgtaaataggaggaaaattaagagaaatcat

SEQ ID NO: 490349 - DNA, 481 bp, Homo sapiens
tacctatcatttaatctaacctcaattcaaatgcaacttgttcttcgaaaccttttctaacattttcattttaaaaaatcccttcctttaaagacagcctcctgggtcttcatcagtaattctaatatggcaatatgcaataaatatttattgtgtacctaaaatgtgccacaagctcagtgctagggatatgtcagtgggtaaaacagtcagaactccttgtaaagtgaataaagttaaaattgcttgttagatagtggtaaatggtaaggagaaaagtgtagaagaggaagagaaaaggaaattggaaggtagaaattttatgtggttagtggaggcctgtcagggaaggagactcaaatctgsaggaaatggggaatgacagacaaatatctgaaagaagaacattcagacagatggaagagaaaatgaaaagactctgggtgaaagtgtaaataggaggaaaattaagagaaatcat

SEQ ID NO: 490350 - DNA, 631 bp, Homo sapiens
aatctccagaactgtgagaaataaatgtttgttgcttaagctacccagtctatggtatattgttacagcatcccaaactaagacaatatcagtaaagagaagtgtgtttacattggttaagtctttctgagtcaataccttgattgtttcattgttatcaagttacccattcttgaaaaggagatattactttgaagcgacgactagcaaaagttcctcaggaagcaaccgtgatgataaacataggagaaaacaacacacacacaaaaataaacaaacaactgtgagaaacaataagcctgagtaacagttactataaaatgtggcattcaataaaactctaggtgaaaatttgacccctttcacaagtgaaatgagcaactggaccagtgctatgaagttattgtcgatagtttaaatgtaaaaagtaaattatggttgcaagcatttttttttggatttgggagctatgaaaagttcaggttatatataaactcrctgcagagagggcataaaaacatagtactacattgatctgtccttgcactatacttactttaaagtggaaatttttaagattcaaggtcttttttcagtgttatcaagggaagtaggtaattagatacttaca

SEQ ID NO: 490351 - DNA, 603 bp, Homo sapiens
tcaatagtattccctatgtttttcacaattatctatttttctcctgcactatcaccatcaggctagacaaagccatcactatgcctggcctaaacaattgcaacatagctttatttatctcactgtattcagtagattcaatccaatctattattgaaatgggagagttccctgatcccctcatgggacttgtgacagaagtgtggcttgtttacttggctgccatgcacccaaaccccttatgggagggggagcatgcaagtgagcaggtgcaggagctggggtgagtgcttttgggctccagccccatggcaatgtctaggggtattacaatgttcttttagccctgctgtccagggacagcttaaatgttaaaccactcagtgaaaagtcrgtgtgacagcctttttggattcccacactgagtgcatcctgaattcttgtctggcgtccaggaagaattaggtcacatggagttgaaggatggtgagtccggggattttattgagtgatggaggcggctctcagtgagatgggaaggtggagaggggatagagtgggaagatgatcttctccttgagtttggctatcccacagccaact

SEQ ID NO: 490352 - DNA, 425 bp, Homo sapiens
agataattaagacacacttcaggctgcatgtagggtaagtatctaataaaaaaatgttgatttgggaaagtgagaatttatatgttgagagaacaatcaaattctaaattaatgatgaattcactgacttcagcatttaccacctaattaatttcttagatctgtcttaacaaagtattacaagcagagtggtttaaaacaacagaaacttattttctcacaattctgttctrgaaactagaagttcaatatcaagaggtaaattgtattgattccttctgaggactctaaatgagaacatgttttatgcctttcttctagcttctggtgatgcctggcaatttttgatgttccattgttcatagatgcaacattacagtctctgtctgtatctccacatcgcattctctgtgccgtcacacaaa

SEQ ID NO: 490353 - DNA, 603 bp, Homo sapiens
tgtggccagaataaaagtaggcagaagaacatagaaacactagactggtttagtctctggcctacatctttctctcgtgctgcatgtttcctaccctcaaacatcagatttcaagttcttcagctttgggactcaaactgrcttcattgcccctcagcttacagatggcctattgtgggacctctccttgtgattgtgtgactcaatactccctaataaacttccttttatatatatacacatctatcctattagttatgtccctctagagaaccctgactaatacactctccttcaaatctttcacttccgctgtacacgagtgaaggggagcaaaaattaagctctattataaaactctaaactgtctcattctcagttttggaaataaatggaaaccctataatgctagaatagattccttgattctaacataaacccgcctcataaattttatttttcttttgtcaataggtaagacttggtattttattctcaattttactttcaatttgcatcaaaactctcttgtgttttctcttgggaaaaggtttttaaacttaaattccaattctaattttaatttaatattaatcatagtca

SEQ ID NO: 490354 - DNA, 591 bp, Homo sapiens
cctttgttaaagcccatagaacacacaacacagagaatgaaccccattgtgatttgtgtactttgagtaatgatgtgtcaacataggttcatcaactggaacaaatgtcccactctggtgggggaagttgataattgaaaagctatgcatgtgtcggggcaaggggcatatgggatatacctgtactttgctctcaattgttctttaagcctaaaactgctctaaaacatacagtatattttaaaataattatccatacatttaaaaattgaacctagtatgtgccaacataaataacatattttatgagaagtaactatatttctctccaaaaaaatgaataatgcaaaaaaagagaaggaatccaaagaatccacagtgacattttctcagtggtttgaagcttgggctagtgataaacctatatttaatgttctttcaccttccctaacctgtcactgttttaattctatattgtttttagacacgttcgcctgagactccagaaggaaatgctcagasaatagcagatttttcatcctctgagcagtaggctaagaaaagctgcaagaaagaaagagtagcaatata

SEQ ID NO: 490355 - DNA, 582 bp, Homo sapiens
actgtatcctttcatctatctcaccagaagtataatacttttattttgtttgagtataaattcttgcaccctaaaaagttgtccttagtcatttgtattrgctaacaaaaaaacaaaacaacaacaacaaaaaacaaagctttacccgtctttatcccttattccagcaaaaactagagttggaagtggcagggagacaaagcctggattatagggagaatcttctcttgtctttaaagtttcattaagtcttcgctcaatccattatctctcaaggggttgatgttggagattatgtgagagaatgtcataccatgcaattgcaccgagactcaatttggaagctctggctacaaaaatctcccaaagccagcaaggaagtgagaaacggcatccagaaaaatgccaattctttttctcatcggtatttagagattattatttggaaccctcagttagactcggaactactaactagatctgtgctgtttaatttaactttctttgaggatggaaatgaaatgtaactttctatgatgatagaaatgaaatgtaactttctatgatgatggaaatgcacta

SEQ ID NO: 490356 - DNA, 582 bp, Homo sapiens
actgtatcctttcatctatctcaccagaagtataatacttttattttgtttgagtataaattcttgcaccctaaaaagttgtccttagtcatttgtattggctaacaaaaaaacaaaacaacaacaacaaaaaacaaagctttacccgtctttatcccttattccagcaaaaactagagttggaagtggcagggagacaaagcctggattatagggagaatcttctcttgtctttaaagtttcattaagtcttcgctcaatccattmtctctcaaggggttgatgttggagattatgtgagagaatgtcataccatgcaattgcaccgagactcaatttggaagctctggctacaaaaatctcccaaagccagcaaggaagtgagaaacggcatccagaaaaatgccaattctttttctcatcggtatttagagattattatttggaaccctcagttagactcggaactactaactagatctgtgctgtttaatttaactttctttgaggatggaaatgaaatgtaactttctatgatgatagaaatgaaatgtaactttctatgatgatggaaatgcacta

SEQ ID NO: 490357 - DNA, 631 bp, Homo sapiens
taatcctcaccacatgctacagggtaggtatttttaattaattggtaattaaatatagaaaattgatgatataaaagtttaataactgaataacttgatcaagtttccaaagttgtaattggcaaagtcaatgacttgagatttccccaacccaggattactaaaatttcattttcttgggtggatggcaagatggccgaatcggaacagctccagtctacagctcccagcaagatcaatgcagaaggcaggtgagttctgcatttccaactgaggtacctggctcatctcactgggactggttagacagtgggtgcagcccatggagggcgagccaaagcagggtgaggcattgcctaacccgggaagcagaaggrgtcagggaactccctcctttagccaagggaaattatgaggggctgtgccatgaggaatgatgcattctgccccaaatactatgcttttcccaaggtcttcacaacctgctgaccaggagattcccttgggtgcctaccatgactggggccctgggtttcaagcacaaaactggatagccatttgggcagacactgagctagctgcagtttaatttcataccccagttgtgcctggaatgccagcaagacagaac

SEQ ID NO: 490358 - DNA, 677 bp, Homo sapiens
accaaaccctgcatgctctgtctcctctgcatatttttaagtgtacttacaagttattcaattttcaagtaaattacccattggattttaatttgtcatcattgccatttagggggctaaaaatgtcttagactacctcaccaactggataagattgcagacaagaggtacgggaatctttccaccacgttactagyggaggcagtgttgcaactaggaactccaaaatgcccatatctctgtgtagggccctgggctccacctgctatggaggctaatgctaggaaaggaacttggcctacttgaggtaaaagtttgaagtgtttttcaggcttgtcaaggccaaaactagagtgaagtcaagtgaagcaactaagtaagtttcagtatttaaaaaggctttcctccccaggtcacaaaagtgcctcacttagcttaccattgtcctcaccaacttgtcaagcttctttgtgtgtgattaagacaatcaacagttggtcatttcaatccaaagtttatcataatgatatggacaggagacagagaaacactgggtagaagatggtggttccctggcaaaagtcctaccctcaagcctggagacccatggccccaagtgggaataggcatttctgtttttgcgcccaaaaagttaccttttggccggccatgccccc

SEQ ID NO: 490359 - DNA, 466 bp, Homo sapiens
tggttagtcctaccattggatttcagacttgcaggggcattcagattgagatcaatgattcaattctcttcaaaatggacagtctcttaaaaggragtaaaaggaacaaaggaaacaacttgtcagaagttcaagaaagaagacctcaggtagtcctgatataacagttagggaggtgtaagctaaaagatgacaggccaaaaatccagctaaacccatctcaccatgtatccaactacccagcccacttcctgcagcccccagtggttccctttgaaaggaactcaccgtgtaagcaggtgagggaattcgtaacagggcacgatcaaaagtgaactgggtaagcgagggaaagcaattacacaaggagatcattaattggaaggcttatctcttcagtgagtttggaatgtgtaagctgtagtgttgtgaattgaatttcatgcactcctattgtgtgtgaaga

SEQ ID NO: 490360 - DNA, 654 bp, Homo sapiens
  misc_feature (1)...(654): n = A,T,C or G
tttttctctaaaataaatatagtaccaaactgatgttctaatttaaaattttagtcctattaaggtagttgatattttataattcaagcagagaccaattatttgagagagatgctttataaggaagacaaacatttggttgtgagctggacaggaggtattgattggttcaacaggcatttatggagtgaatacaatgatccataatagattctgagcccaaattttattgttgtttaaaggatataaagccaatgatagggaatccccaataattctgtgctactcacctctcctccctaaaggatttcatataaaaaacccntatatccaaggaacagcagaacaagtgtcaaaacatcaatgtattgatcgtttaatgtactttagtcaaaagtgatcaagtctcaagcttagtctaagctgggacattttattttccactctcacccctatttckaacctaaatttagggttcatcatgcattagtttccttcagagaaaaagagatggccaggttacaggaggggccttgaatccattcagccatctagctataaagaataggagaacaaaaaaatgaggaactttcatctgtgaccatgaccactgggaaagagacaggaagacagttttttaaaaaagagagaagt

SEQ ID NO: 490361 - DNA, 687 bp, Homo sapiens
gcaaaaatagggaggtaaagatagctttcgttagcttcctaaaccaggtcttctaaatacatctttattattctgtatttaggcttttacttggatctcaataataacaaacacaaattccaaagcttgatatattttgtattctatacaagcttatatacagctctgtcttcaccattaacgcagatatttgaaaatatatattatgttgatactatagttattgctgtgtctagatacatacacttgtgttgtgtcaaacacaccttatggccttacatattctcttgacctcacctacttctcagaccctcagcaacttcctccatctcagccactgacctgacacctacctttgagactgctgcatggttttatacctgaggccaaacaagtaacatttctggagtccctggttcctccaatcacttccaaacttagattccagaaatacacaccacatggagtaggatctggcttccccaaagctgccaaaggacaaactaatgcaacttcttaagtgttggggagacaacttccagggggcaaactttcacccacaacaagcagaagayggaatagagatggcatacaagtgtcatctcacttcttccccagatggctgtttagatgcagttttgccacaccatttgtacaaacaatgccacacaggccaagcagggatgc

SEQ ID NO: 490362 - DNA, 629 bp, Homo sapiens
tgcaacccaaatttgtttctgcatcctaccctgttgacagaaggctcrgagctacatgtcaattctttcgctgtaactgattccagacacctgcttcttctttctctctcttcctcaatttacttatttattataattgctctgtttcatatcatttttattaatataagctgatgaactattttaaggaaatgaacaagaatgaaattatttattaggtggactaaactgaacttggcctctttggtcaattatttcagtccagattacttaattttctgctttataaaatactcctaaattaggtcacatcaatttcagaaagcacgtcttagaatatgacatcttccatgtgcaagaaaatccagaatttaaaaaaaaatcttgtcttcatatgagacttcttggatgacatataggtgttaacggtttaatacatgcatataaagaggtacctcttaacatgtcaaatatgttgataggtttccatgctcattaagactcacatggataaggaatggagcaaagagcagctatactctactggcactgtgctgggaataatttgaaatcaagcttctcttctgcaaagcccaattctagttaaaaggtgcaagagggaaatcagt

SEQ ID NO: 490363 - DNA, 629 bp, Homo sapiens
tgcaacccaaatttgtttctgcatcctaccctgttgacagaaggctcagagctacatgtcaattctttcgctgtaactgattccagacacctgcttcttctttctctctcttcctcaatttacttatttattataattgctctgtttcatatcatttttattaatataagctgatgaactattttaaggaaatgaacaagaatgaaattatttattaggtggactaaactgaacttggcctctttggtcaattatttcagtccagattacttaattttctgctttataaaatactcctaaattaggtcacatcaatttcagaaagcacgtcttagaatrtgacatcttccatgtgcaagaaaatccagaatttaaaaaaaaatcttgtcttcatatgagacttcttggatgacatataggtgttaacggtttaatacatgcatataaagaggtacctcttaacatgtcaaatatgttgataggtttccatgctcattaagactcacatggataaggaatggagcaaagagcagctatactctactggcactgtgctgggaataatttgaaatcaagcttctcttctgcaaagcccaattctagttaaaaggtgcaagagggaaatcagt

SEQ ID NO: 490364 - DNA, 559 bp, Homo sapiens
tggccgctaaagctgccagaagagccccctctgccaatggggtgaagaatacgcgtcactgcagggccggacccttcgtcattaccagaaactgactgagcttctcatccagaaactgcctttccagaggatggtgaggaatcgcccaggatttcaaaacgacttgaggtttcagagcacagccattagtgcttttcaggaggctggtgaaacttagctggtgggtttgtttgaaggtrctaacgtgtgtgccatccatgctaagagattcaccattatgcccaaagacatccatccagttggctctctggaagaggcgagagaactgggagagagctctctctggggagagaccttaagtgaaggcagattttatggtattttgtaataaagtctgcaaaatactttgattaggtttagtctgtgacttttttttttttttttttttttggctaagaaattgctttccatgctttgcatttgtactgaagtcactccatctttcactcaagacgaatgtgaaaagtgactgagtattcacagacctcaatgatgctca

SEQ ID NO: 490365 - DNA, 368 bp, Homo sapiens
gcaacaaactagaagttgttgctacataccgaaacactggaagggaacgaagaaaacgttcaaggattgagagatgtttattgtaggaaaactaagttctaaaaagcctacaaaaagaactgttagaacagtgggtattaatgaattatgatggggaaaaaaagaaaatgtagctttcagattacttggtggaaagggggaatggaaatttactggaattagaaaagtggggttttgggaatcttctgcaactatgccattaagggtctatgagtaaataacttctggcataataaggtctatgataaaggyttggatattaattccataacatattacttagtgagtaataaactgtcattgataat

SEQ ID NO: 490366 - DNA, 624 bp, Homo sapiens
tgacatcactgacactgactatgaagttgactctagctaggggacttkgtaaatcatccaatccctctgagcctcagtttcctaatctgcaaaattgggataattatacttagcgtgcaaatttaaacaattacctgagaacctaaagagacaatatatgtaaaatagttatacaaggggagaagaaaactaatgtatactgagcttctgagtcccacttcggctattccaaaatacttgcctcaagatcactccagacacactttatcccttgagcctttgtagatttcttagtcttaggaaataatttcagcctctctgagccccttcacctggtattactaactcattgtcaaattctacctttgatgtcacttaatttaacaaatgtgtattaagcacctaatatgtgccatgtggtatgctagggggcagaatggggttaaagttagcaaccattctcaagactggttaatttcccctctcctttgaacttacctctgtcatagcatgtatcacactatgttatattgcctgtttgtaggtctgcatcccaactatactgtctccttgatctccatcatagctgtagtacatacactgtgcctggtatgtagtagatac

SEQ ID NO: 490367 - DNA, 633 bp, Homo sapiens
ctgcgcaggtgacatcactgacactgactatgaagttgactctagctaggggactttgtaaatcatccaatccctctgagcctcagtttcctaatctgcaaaattgggataattatacttagcgtgcaaatttaaacaattacctgagaacctaaagagacaatatatgtaaaatagttatacaaggggagaagaaaactaatgtatactgagcttctgagtcccacttcggctattccaaaatacttgcctcaagatcactccagacacactttatcccttgagcctttgtagatttcttagtcttaggaaataatttcagcctctctgagccccttcacctggtattactaactcattgtcaaattctacctttgatgtcacttaatttaacaaatgtgtattaagcacctaatatgtgccatgtggtatgctagggggcagaatggggttaaagttagcaaccattctcaasactggttaatttcccctctcctttgaacttacctctgtcatagcatgtatcacactatgttatattgcctgtttgtaggtctgcatcccaactatactgtctccttgatctccatcatagctgtagtacatacactgtgcctggtatgtagtagatac

SEQ ID NO: 490368 - DNA, 633 bp, Homo sapiens
ctgcgcaggtgacatcactgacactgactatgaagttgactctagctaggggactttgtaaatcatccaatccctctgagcctcagtttcctaatctgcaaaattgggataattatacttagcgtgcaaatttaaacaattacctgagaacctaaagagacaatatatgtaaaatagttatacaaggggagaagaaaactaatgtatactgagcttctgagtcccacttcggctattccaaaatacttgcctcaagatcactccagacacactttatcccttgagcctttgtagatttcttagtcttaggaaataatttcagcctctctgagccccttcacctggtattactaactcattgtcaaattctacctttgatgtcacttaatttaacaaatgtgtattaagcacctaatatgtgccatgtggtatgctagggggcagaatggggttaaagttagcaaccattctcaagactggttaatttcccctctcctttgaacttacctctgtcatagcatgtatcacactatgttatattgcctgtttgtaggtctgcatcccawctatactgtctccttgatctccatcatagctgtagtacatacactgtgcctggtatgtagtagatac

SEQ ID NO: 490369 - DNA, 574 bp, Homo sapiens
tgtaatctttgcacaccatgtagcttaaacaaagatgaaatattatttcattccaaatgaacctagtgactyccatgctcactactggtaaaatacttaaatttatcaaatcaggatcaccgaggctattctagattaaaacacatttatctgatttttgccttatgcattctcatttccttctccccagactgatcaaaagctcagagggacttacttttgcttctcatataggagagaatgtctcggctggaatttacttttgatgacactcctgtttccctgttgtgcaagtgcaagatgattgctgttggaaactcagcggcctgcttctgctgactcactcctacctcagggtggctggcactgtgatcctttcaggcttagtcacatcctccttgcattcacggcttttgctggccaccctgtagtttctgcaaaaggctctcctggcctcattttattcttcagtaactggtcattttgaccaatcatcttttgtggtaaccccttgcaggaagactacctctcaactctcagctatttctaatgttttattagacacacaaaacat

SEQ ID NO: 490370 - DNA, 596 bp, Homo sapiens
tggtgtagctttttgggaaagaaatatgctactattaatacaatggtacaggatgaaaatggactcagaaccttccagaagagaggagaaagaaactgatagaaacagggcagtgaggtattctcattgaattaaaccctgatatatttgctttcttttcttctttttttctttttggagacagagtctcactctgtcacccaggcaagagtgcagtggcaatcatggcaaaaatcatggcagccttgaactcctgggctcaagtgattctcccagctcagcttccagagtagctgagactacaagcatgtaccaccacacccagctatttttttttwaattttttattttgtagagatgggatcctgctatgttgcccaggctggtcttgaactcttgggctcaagcatcctcctgcctcagcctcctaaaatactgggatcacaggcgtaagccaccatgcctggcctatgttagcttttagtaacagagaaggggaagaggttttttttttttttctttttaaagattggattggttccccatgttctttgagatttcttaaaaatacaatagccactgtaaccacagacagc

SEQ ID NO: 490371 - DNA, 596 bp, Homo sapiens
tggtgtagctttttgggaaagaaatatgctactattaatacaatggtacaggatgaaaatggactcagaaccttccagaagagaggagaaagaaactgatagaaacagggcagtgaggtattctcattgaattaaaccctgatatatttgctttcttttcttctttttttctttttggagacagagtctcactctgtcacccaggcaagagtgcagtggcaatcatggcaaaaatcatggcagccttgaactcctgggctcaagtgattctcccagctcagcttccagagtagctgagactacaagcatgtaccaccacacccagctattttttttttaattttttattttgtagagatgggatcctgctatgttgcccaggctggtcttgaactcttgggctcaagcatcctcctgcctcagcctcctaaaatactgggatcacaggcgtargccaccatgcctggcctatgttagcttttagtaacagagaaggggaagaggttttttttttttttctttttaaagattggattggttccccatgttctttgagatttcttaaaaatacaatagccactgtaaccacagacagc

SEQ ID NO: 490372 - DNA, 482 bp, Homo sapiens
ctttgctattagacactgtttggtttcctgagtcacagtgaacaggttaaaataatatctaccagactaaagatctaagtccccaaacaagaataaactacataatagatgaacaaatcatacaataactcaggctgcaaattcaagaagctcaatttggcatactggagttatgtagttttcatagtgattttcagctcagttttaaactctcaaggtgctctgaaggaaaactactgcaatgcttggaatatctttagcttagctttctgaatgcagaacaaaaatttcctttctgaaaaattatttttatcagatagtgaatatgctgtaatttccacagtcttaacaaaagccctcttcctctataccacttccctcttccaatggctgttcatttttttctgctccccttcataacaaaattccttgacgttkctgtccctacagtttatctctgtgttctctccacccagcctctt

SEQ ID NO: 490373 - DNA, 388 bp, Homo sapiens
agctgcaaactaacgtgtcattttgccaaatgcttcctgtctagcttctggctatttctgagagagagagagaaggtgggggcrgggggagaaagagagagagagagagagatttttttttacacatttgctttgtactaggaaaatatttcttatacagtcaacaatagcatattaatggggatgatttaaggagcccaagcttctattctgttgccagaatgccaacgggaatgtatgctacttttcaaaaaataggtgttgacaatagcctgcagtattgcactgtagtcaaagaagagtgctgaaagcttcagttcataaaaatgcttgattcatcaaaaataatcacctcacctgataattgaaagctacagagaattattat

SEQ ID NO: 490374 - DNA, 388 bp, Homo sapiens
agctgcaaactaacgtgtcattttgccaaatgcttcctgtctagcttctggctatttctgagagagagagagaaggtgggggcagggggagaaagagagagagagagagagatttttttttacacatttgctttgtactaggaaaatatttcttatacagtcaacaatagcatattaatggggatgatttaaggagcccaagcttctattctgttgccagaatgccaacgggaatgtatgctacttttcaaaaaataggtgttgacaatagcctgcagtaytgcactgtagtcaaagaagagtgctgaaagcttcagttcataaaaatgcttgattcatcaaaaataatcacctcacctgataattgaaagctacagagaattattat

SEQ ID NO: 490375 - DNA, 498 bp, Homo sapiens
ttcattcagaatatatatattttctctctctctcttcctcccatggaatattaatatctatatgactattggatttgctcacaaatcataataaagyaaaattatgatttgaatattactcccatattttgagtactccccaaagtgccttttgactgattagagtgatttttcatttagtgcatgaagatactgagtttaaaatgaaggctgtatacatagcccctaaattcataatatcattttgcatttttatgaagatgttcgtctgaagatttcaaagcccactgctgatttaaggtcattcacattcagccatgaagctgctctgaagacacaggaactgcatagctccctactgggaatgtcaagggctgtgaaaggtctaaggttttatcctacttgcaaccaacaagctatgcagccacagttttatggatgctgtcaaaagacatgacactcctgggtaagagacgaaagactttaccacttgtggtg

SEQ ID NO: 490376 - DNA, 561 bp, Homo sapiens
ttagattaaactcttcagtcagaaatatttttgtttcaaactcaatttactcagcagaaagaaaataccctttctccctctcttcctccttctcctttttcctgctactcccttcttcctccttctcctttttcctgctactcccttcttcctccttctcctttttcctgctactcccttcttcctccccctctttctctgcttcctcttccgcctcttcattcttcatgaaacttcaaccatactgacctttgttcccttaacattgatcatgaacaactttccttacattcgatatgttctatgatggcattttgaatgggtgtatcatattctgccacgtggatgtatctaatttatttaatgctcccctgatattaaatctgctctagaatatatatattataatatatatgtaatataatatatatatatatatatatatatatatatatattttttttttgagacaaagtcttgctctgttgcctaggctggagtgcagtggtacgatcacggctcactgyagcctcgaacttccaggctcagatcatcctacca

SEQ ID NO: 490377 - DNA, 482 bp, Homo sapiens
ctggtgtttggttacatgagcaagttctttagtggtggtttgtgagattttggtgcacccatcacctgagcagtatacactgcacacaatttgtagtattttatccctcactcccttcctactcttttcccttgagtcctcaaagcccattgtgtcaktcatatgcctttgcatctcatagcttagctcccacttatgagtgagaatatatgatgtttggttttcttttcatgagttacttcatttataatagcctccaatctcatccaggttgctgcgaatgccattaattcattcctttttttaattgatacagaattaaacaaacagcataaatattatagtcaaaaaacataaacacatagacacagcaataatcaaaaaacataaatataaatgcaacataagtagctgaattaatcacacaatataaatactaatgtagggggacttctggaactgtgctggcccgtgacccttca

SEQ ID NO: 490378 - DNA, 600 bp, Homo sapiens
ctctgtgggagataaaatacaagtcacacacctacacacgcatgtgttcacaagagtgctacatgcagatgactgtgtcacctgctgcatggcactatgccactgaatcctaacacctctaggtagacagtgacaaagagtttaaaggtttaaaaggttaagtaatttgcacaaagtcacacagctactgagtgataaggagtcacgaacatggaaaaattaaaggtccatggtggtggacagggcctgatcgtaggaaggtcaagagactctcccatttcctcagtcctttgtaaacagtcttctgattaaactctccctggaaatttggtcaaaccatgacaccccaccctcaatcctacccccactagggcgaggctcccatgaagctcttgcaccagtcatgtcttttcgttttggtgacacccgcagcaaagtcctctcttgaggccaagctagaaggtttctacacgtccctgcacatctggaaggctgggcagggaggtggatgagaaactgaggaatraggcaatggcaatgatactggtcgcagtaacaatgcattcttcctagaacataacttgggccagatgctgtctc

SEQ ID NO: 490379 - DNA, 600 bp, Homo sapiens
ctctgtgggagataaaatacaagtcacacacctacacacgcatgtgttcacaagagtgctacatgcagatgactgtgtcacctgctgcatggcactatgccactgaatcctaacacctctaggtagacagtgacaaagagtttaaaggtttaaaaggttaagtaatttgcacaaagtcacacagctactgagtgataaggagtcacgaacatggaaaaattaaaggtccatggtggtggacagggcctgatcgtaggaaggtcaagagactctcccatttcctcagtcctttgtaaacagtcttctgattaaactctccctggaaatttggtcaaaccatgacaccccaccctcaatcctacccccactagggcgaggctcccatgaagctcttgcaccagtcatgtcttttcgttttggtgacacccgcagcaaagtcctctcttgaggccaagctagaaggtttctacacgtccctgcacatctggaaggctgggcagggaggtggatgagaaactgaggaataaggcaatggcaatgatactggtcgcagtaacaatgcattcttcctagaacataacytgggccagatgctgtctc

SEQ ID NO: 490380 - DNA, 616 bp, Homo sapiens
cgtattaaaaactagtatttaggaattaaccagctacttggggggctgaggcaggaggatcacttaagcccaggaggcggaggttgcagtgagctgagatcacttgactatactccagcctgggtgacatagtgagactccgtctcaaaaaaaaaaaaaaaaaaamagaaattaaaattcagatttttaaggaagaaaaaagcctctttattgaactgaaacagtgtcccagacttatcccattttccttctcactgggggaagggaaggactctgctttagaataacctgggggtcactggcagggcacagaaggaagtgtaggtgacgcgggctggcctggggcacaatgggtggagctgcgcaatggggcagagacacattacactgtttcctcagctctgtagatggcttaaataactccataagataaagttttcttaaaatgtgaaggcaaatttcactgatgactcatcagtgtatttgttcagagtagaggccacacaggctgtcttggagaaaccccattgccttcacttagaacacactcaattctccagatttgtcagagaaggtggctcttacatccccctctgactgtgtggctcctgtccca

SEQ ID NO: 490381 - DNA, 537 bp, Homo sapiens
ccctggcgctgtgatgacagaggagggtcaacattgccaatrgtgtctgtgcatctgggctgagcagaaacaaggaaggggaagcgtcctcagtattctatgtggaaaggatagtctttgtgatttttagttctgaaaaacagaaaaacaaatcaaaaataggaacaaagaatgattattttttaagagaaacattttaaatggtatatacttttaaactccccagtgcatgaaattagcttcattcagtggctcatcttcaaacaggaaagaattataatgagaaggtttaattaatctaaaatgtgtatgataaatacctattcagacaccaatcattcaatctgtatattcttccctctgttttaaaaagaaggagccatatttacatggggaacatggccagtcggagattcctgtttaggctgaggatgttatccatatcgtgctgtgttaattcaaaatcaaacacctggaaccaaaacacaatgtttgtagaaaacttagtttaattcacatttaatggagcacatgtta

SEQ ID NO: 490382 - DNA, 537 bp, Homo sapiens
ccctggcgctgtgatgacagaggagggtcaacattgccaatagtgtctgtgcatctgggctgagcagaaacaaggaaggggaagcgtcctcagtattctatgtggaaaggatagtctttgtgatttttagttctgaaaaacagaaaaacmaatcaaaaataggaacaaagaatgattattttttaagagaaacattttaaatggtatatacttttaaactccccagtgcatgaaattagcttcattcagtggctcatcttcaaacaggaaagaattataatgagaaggtttaattaatctaaaatgtgtatgataaatacctattcagacaccaatcattcaatctgtatattcttccctctgttttaaaaagaaggagccatatttacatggggaacatggccagtcggagattcctgtttaggctgaggatgttatccatatcgtgctgtgttaattcaaaatcaaacacctggaaccaaaacacaatgtttgtagaaaacttagtttaattcacatttaatggagcacatgtta
